United States Patent Application Publication US 2007/0083945 A1 - sequence listing, part 11

SEQ ID NO: 68961 - DNA, 496 bp, Glycine max
  unsure (1)..(496): unsure at all n locations
gctcgctaacactcctccatgaaatagctccaccagccatcatatttatgttcccagatgttgatttgcaagaatcaacatatccaacaaagtttgagtctaaataaccaatcacatctacattgtccgtttgtctatgcataagcatgtaatatatggtcccttgaaggtacctcatcactttctttgcagttntccaatggtcaatatatggattactctgatatcttcctaacattccaactgcataagcaatggcaggccttgtgcatacttaagcatacatgaggattccaacaagtgaagcataaggaatgtttctcaatatgtctctctcacagtcattctgtgggtattggttcagattatacctatcacccttcacaatgggagcaacacttagtgaacaatctttcattcgaaatctctctaaaaatttgtaatatacgtttcctgtgatagacctaaataccttgaggctatctatatgaatcta

SEQ ID NO: 68962 - DNA, 384 bp, Glycine max
  unsure (1)..(384): unsure at all n locations
gcttcttaagaatattcctaaagaagctaaagcttanctactctctcctctctaatagctaagttcacctccttgagatgagaagctagagcttactacacaccccctataatagctaagctcacccatatgccaaagaacaagagaatacaaaaaatgtgcctactacaaagaccactcaaaatgcctcgaaatacaaggctaaaaccctatactactaaaatggccaaaatacaaggcccaaacgaaggagaaacctattctaatatttacaaagataagcgggctcatacttagcccatgggctcgaaatctaccctaaggctcatgagaatcctangtccttcccttggatctcttacccaatctacttggagtcttcta

SEQ ID NO: 68963 - DNA, 355 bp, Glycine max
  unsure (1)..(355): unsure at all n locations
taagctccttcaactgcacanggctcttaatatttgaagagtattcttgtggaaccttcacccgacgaagacactgatgaaaacttatattctcctttctggacaaagtatgacaaactaggggcaagtaaattttcttcccatcagaccttggatgcaactatgatcgtatccccatatcaactatatcttgacgggtattcaagccatacttcgactcgccttgaatgttaaggagcgtcccaatcacactgtcacaaacattnttctccacatgcataacatcaatacaatgtctaacgtctagatcagaccaatacagaagatcaaagaagatggacctctttcttcatat

SEQ ID NO: 68964 - DNA, 450 bp, Glycine max
tgaataataatcatgtgtggcctgaggatgttacttatttattatagtattcatgccttcattctgtgttgtatgaataagagtaattcgtcatctctaacaactttactggctttgttctcaacatagctgtacatttcttggtctcaataacagaagttcaaaaatgtttatatttcactgataactgccatacatatacctattaattctgaaacagctagctaatatgtgttgttcttgcgtccataatcacgatcaaacacgagctaccatccatctcaaatcaataaatcactgaccacgattcatcttcaaattacacatttattctatgacaacacaatgaacttgagatattttcattgtcttcaaagaagtagtctatgtggtgcgatggtcctcaaaatatatcagacttgattcaatggttcgggcaacacatataca

SEQ ID NO: 68965 - DNA, 333 bp, Glycine max
acctttgtgttactagttatctcacattgtacctcactcactcatccgaatcaccggcatgatcagagaagatccatcaatataaatttctctgattcacgacaggataaatgatgaattctcctataaggtgtcatacagaaaagcatggatggccaaacaacaagcgattgcaatcgaatatggtgatcgggaagagtcatatgcgaaactctcgtgctggcttacacacatgcataatcattcttctggctcttactctgcaatactacatgacgattttattgtcggtaatagggtgagtcgccaacatcgtcatctcataaagtattt

SEQ ID NO: 68966 - DNA, 475 bp, Glycine max
  unsure (1)..(475): unsure at all n locations
ctctccaaccacttccctgctctttgttatgtattcatccacagtttcgctgcatacattgaacgaggaaaacattaatgaataagcaataaacctattttttgctaatggtttggtactggctatcatgtatggaaaactctgggcaggcgctgagtagaataatgatgcaatatctgataatataacaacattattgcgtcatattaattacactaattaaatcatattatagaacttactttcagattgtggaggcatgcccttactttctttctcagtttgttataactgatttataatatctatgttactcacctgacagtttagatggtatgctttgccgtttattaatnttcttataaaatatagtatcattatataacttactanaaacctgcagatctattcttcatatacactcatatattggtttaaattattgacgatactaaaaatataaatataattttta

SEQ ID NO: 68967 - DNA, 242 bp, Glycine max
  unsure (1)..(242): unsure at all n locations
ttcatcaatgtggctatgttgtcagatgattgtgtcactcttcatgtaaaggaataattccacttgtagttatttttctgaatgataaaataaaatacaaacatttctcttaccaaaaattcacaatactttattacattattatgaaagactatcccctcttctaacttaaatctcgtccntctaatattaataacaataatggtattttatttggtatttggcatgcatattttttaagc

SEQ ID NO: 68968 - DNA, 397 bp, Glycine max
actagctaggagcattctgaactttcaaaaaatttttattatactacatatctgtcagagatatcgcttgatgtgggcatggttcattagttgaatgcttcattatgttaaaaactgtcaatggaagggatgcaattattatatatgttacttttactctatgtacatcactcattgtattcacatgtgtgtgtgtgtgtcgtgtttgattgaaaattggtttaattgtttttcattaatggtttgttgtttcgggctaattaactactccaattttgttattcaatcattataaattgaattgtatataatcaattgagcttaagctagggaatcagcatctaagatggttttaaaggtaaacccgtcgaaaatgctatgattctagatggtttta

SEQ ID NO: 68969 - DNA, 346 bp, Glycine max
  unsure (1)..(346): unsure at all n locations
gcagatgattantanntaccgtatagagtaaccatgtctctggcagcgagacccttattattgaatctggagataagagtgtcacatcgtctgcgaatcgtggaaggtcactagtagccgaacttttgcttgcagaggttgaatctcttcgtccaagcttcacagaccatgatggacctcccacctaatcaataattattaaaaaacatgcatgttaattatcacagtaattaaaaccatgaagataattaacggatatatagctagctagtgtgttacagtgacttacagcaaatgatgcatcacgtgctgctactgctacaatgtcagcacatgacacaactcc

SEQ ID NO: 68970 - DNA, 408 bp, Glycine max
  unsure (1)..(408): unsure at all n locations
ttacatcttattcatcacatactatacaaanatcatatctctatttcctctattagattatgtaaaaataaaattataatgaaaatgaaaattccaagatgaagttgcaatagctataattattgttccttcaaatactataaatacttcagaattcatacagtgtccctgcgccagaaaatagagattatgaaaatatgtcaggagtattagatgttcaatatattcaggttaatagacaagaagcctagacaaaaaatagtagttgtaatcccatagtacattaaaatttcagtcaagcaagatatactaatntatgtaaagcaacttgtccagactatattggtaaaataaagctacctaaagttgccatgacttcttcattntcaatctctgcatcagtaaaag

SEQ ID NO: 68971 - DNA, 450 bp, Glycine max
  unsure (1)..(450): unsure at all n locations
ggaaggtaaactatatgccttggttaacctggtaacttatctgtccttgaataaaaaatctgcacctgtcgccagactctgtggtttatgctcctctgccgaccaccacatagacctttgcccttttatgcaacaatctgaagcaattgaacagcctgaagcttatgctgganaaatctacaatagacctcctcaacctcagcagcaaaattagccacaacagaacaattatgacctctccagcaacaggtacaatcccgggtggaggaatcatcctaaccttagatggtcgaatccttcacaacaacaacaacaataaccttattttcaaaatgttgctggcccaagcagactatacgttcctccaccaatccagcagcaacaacaacaacaacagcaacaaccccagaaacagcatacagttgaggctcctccgcaaccttcccttga

SEQ ID NO: 68972 - DNA, 293 bp, Glycine max
  unsure (1)..(293): unsure at all n locations
nctataaagtgtacacttctccgtgtgaccggcaaatttattattatattcatcggtcaaccacacttagcaattctaagtgaatatataggggagaacatgttctcttatttatatttacgtatttgtccacggaacagattcatcttaacacaaattctatgctacttctcatacacgagtgagaataaacaatcatgtactagatcccctatttatgtatattgcgtatctatgacttaaccgaacatgcaacacataccgaataagcacggaatgccttcacttttcaa

SEQ ID NO: 68973 - DNA, 258 bp, Glycine max
  unsure (1)..(258): unsure at all n locations
ttaataaacatcgattgtgtcatttaataagtgacgatgttttaaatgagcatcgctattaattaatgatcagttattattttattttaaatcacaattttcctattctattaaatgtttaagttgactaaaacatccattcaattaatagtcttaaacctattaaatattaagataaatggtacttattgcatattttattatgatttgaatataaaaatgggtggaaggagatatatgtaattntaatctataaaa

SEQ ID NO: 68974 - DNA, 375 bp, Glycine max
  unsure (1)..(375): unsure at all n locations
taaaaatnttttttgtagttcggctaggtttcttcgngcgagctcaaccgaagttgtattttggccgacgccgcattttgtcggccaggaaaacattagcccatctcggcaaaaaaaaaacatgattcaccggtattgacagaaaaaaatgctggccttagtcggccaggatagatgaccgatcgaggtctataaaagaagcatgaccggattacgccgatcgaacgtttcctaatagatatcctccaagtattattcagggattgaatggaagaacaatagccgacatcggtagttaaatagccgtgactgtatattnttcagccaacattgcgcaacttctttcacaaacgctggccgataatatttctttac

SEQ ID NO: 68975 - DNA, 437 bp, Glycine max
  unsure (1)..(437): unsure at all n locations
tcggtattcaatttcgagcatctcgatatattacgagacttattctacatccgagtaaaaagttattgtcgtttgaatntgctcagagcttcagaattcaattntgatcgtctcaatatattacgtcactcaatcagacatctgagtaaaaaagttattgtcgtttgaatttgctgagagctttaacattcaatttcgagcgtgtcgacatcaacattcaatttcgagtgtgtcgatatattacgggactcaatcagacatacgagttaaaagttattgtcgtttgaatttgctcagagcttcagcattcaattttcaacgtctcgatatattacgggaactcaatagacatccgagcaaaacgttattggtcgttgaattggctcagagcttcataattcaatttcgatcgtctcgatatattacgggtcttaatc

SEQ ID NO: 68976 - DNA, 457 bp, Glycine max
  unsure (1)..(457): unsure at all n locations
tcttcagtcacctgcangatgcagctttctcggccattcatgcgaagcaaattttggagatgtatnnccaccaagagatgctattcttataacgaaaatgtgatacgaccttcccactaacacatacatcaatgtaaatttagagcgaactcatgcgcatacttcctcttgaacattcactcgcaccagatattcttctaacatagaaaaatgcacccatgcacaatcaatgcaccttcgttacctagaccactcatatgtacttccaaggggtatttgctacctacatcacatgcactttctttgctaaatttacatacatgcatactcagaagcatttggctacacaaaattgcatacacgcacattctgtggtttctaatatctatacatatacaaacattgtgaggaatgcttgcgtactacacaagacggagcgacatatcatagcttattc

SEQ ID NO: 68977 - DNA, 329 bp, Glycine max
  unsure (1)..(329): unsure at all n locations
aaccaactgcactattcctagatagaaattccaatattctatattacctgctcattagctgtaggaggaaggcctccaacatacacccgcctagcatgtcatgtagcctgtaaattcagtacatcaaagataggccataatcagggaaagtcatgctaaacttaaaatgaaacttaaataagactgtagtcagtctcagcaagcctccatactcggaaagactaaacttaanatgtttgttgacaaattagtgtgttctactctcttctatatgactcttttcttctaatgaagagaaatttctccacagacagtgtactaaacaacaa

SEQ ID NO: 68978 - DNA, 368 bp, Glycine max
  unsure (1)..(368): unsure at all n locations
agctagcgcgacanaccgnncgagggggagctatctgcttgaatggatgacgatacaaaatcagcggtaagacaataactatatatctagttctactcccaccgatacgcataaaattatatccaatgtcatagtgatgagtatataaataatttgcttatttaaagatagttatgattataaaactgtaatcagttgaataaaaaaacacaatctaaatatcgtctcataaggatagaattaatcatagatactacctactatttaagcaatttatacataattagttatatactcattatatttaacactaatgattgttacagtaactaaatagtgtgatcatgatcaccttacctgtatgcgca

SEQ ID NO: 68979 - DNA, 463 bp, Glycine max
  unsure (1)..(463): unsure at all n locations
gtgatgtgtataacccaatccagcccttacgttatcacattatatttgtgcaactaatgcttccaaactgtccctccccttgtgaacttggataaactttttagtaaatattctaccttggcttctataactttacatccttcataaggggaagtggcattagtggtgttaatgcaatagcaagaagattcattcttttctttttccaaaactatttttttctttcaacaaatctttttgaatatccactagctaatccacatgccacctcagttttccctttagaagattatttgaaacagacagactttatgcttcttgatgcatcttattgagagcgtctagtatcttatcatagttatcgtcgactttcgaataaataatgtttacctcacttttagcttcagttattgccatcaagcacatgtntgcttctatcttttcactacctgcattggatgtg

SEQ ID NO: 68980 - DNA, 440 bp, Glycine max
tggacctttcgggtcatttattggcttcttcttcccactttctaaggaagggtgtagtttcctcagaacttctccatcgaagtaactacaaatctgaagccaggtggtgtaacagcacctgtgagtgccaccacactgccatcttctttcacagccttcactgccctgtcacatttgcctggcagtcaccagcgaagaatgaaacactatcaacaacatgagtagtataatatagtattgggggaagtgggattatgggaagaaaatattgtgatctttccttatagagcatattgttaacagggtgtgagcgttgttaacactctagtaccgcgttcattgctacagataaaaaatatagtatattgtttcatcgatttcagaccattactatgatatacatgataacaaattactttccatctacctgtgcggacaca

SEQ ID NO: 68981 - DNA, 483 bp, Glycine max
  unsure (1)..(483): unsure at all n locations
gtgccaattcgtcctcttctatagtccagtcttcttctggcttcaattcatcagtgggctttccttctgtgtccagcatcttgggatgttcccagcctttgatgacagctttccaggttctgctatccagtgatttgaggaaggccaccattcttgctttccagtattcatagttgcttccatcaagaattggtggtctgttcactggtcctccttctttctccatgttcatcagaatttatctccccagatctcactctgtgatttcgagtgttggctctgataccaatngaaattctgataccaggggacagatgtcgtacaggatgtcacgacatcacgcttcagaacatgcagattgtatgtgtccgtatgaacagattanacaagtaaataacacacgagaattttaacccagttcggtgcacctcacctacatctgggggctaccaagccagggaggaaatccactctcaatagtgt

SEQ ID NO: 68982 - DNA, 321 bp, Glycine max
  unsure (1)..(321): unsure at all n locations
tgctgtgctacgcttaatctgcagaanaaatattntctatgtctttatgctattctccagtccactgcgcttagtgcctgagtaaaatttcataaggcgtgctaagctcagcctgttgcgctaagcgcccagtcaaaatttcaattttaattatatgtttttgtgaaaataacctattgtgagagatccacgttcacatctcaagatgcttgggagaggtatacagatattgtggtgcctangaaactactactagaaaggaatgtggtagtttattaatccagtttgacgaaattaaggaggaactcgagagatgacact

SEQ ID NO: 68983 - DNA, 290 bp, Glycine max
acaaaacaggggagaaggaagagaggaatttaattggagaaacggggaagggagcagcagaaaacccaccccaagagaaggaggaggacgaaggatgaaggcgagagaaggcgaaggaaggaggaagaagagggagcggagagaggcgaaagaggatgaggaagggggaaggaagggaagagggaaaaagagaaagaagaagaagggagaagaagaacgagaaggaagaaagaaaaagaacgaggaaacaaaagaaagaggataaaaaataagaagataaaagaaaggaa

SEQ ID NO: 68984 - DNA, 480 bp, Glycine max
  unsure (1)..(480): unsure at all n locations
agctagccaccctgctcgcccattttagctangttgcttcctctagaaagcaccgccttctggtggaacttcctggaatgactaagtggtctgcgtgctatttgcaccctcctgtttacttaatacaccctctacccttgtttgcttattctttcgccgtaacgttacggaactttacgaattacgtaacgatacatgtttccttttcgtaatgtcacgaaaccttacggattacgtaatcatcccttttttggcttctggaatggtacggaacttcacggattgtgcaacaatactttcttttgacttccggcattgcacggaactatacggattgcgcaacatgctctcttttgactttacatgtgatgaacttcaaaagagccagaattgagatggtatacaccttagcaacattcttcaactgatacaagcgtatcgatactgacatgcatgatccatgttaaacttaattaaatt

SEQ ID NO: 68985 - DNA, 443 bp, Glycine max
  unsure (1)..(443): unsure at all n locations
ntgaggtattgaatatatggtttatttctccaatggttcatattaatgtgtgatggattctgcggagagtcagggtttcttatgtgtggatgagagttttggagagtgcttctcttgttgaatctgtcactcatttgtaagtattttgttttttgaattataattactctgttctttggattttcagtctggtgtatggaatttgagtttgttcattgaagaattgttatgaaaatcgagtgtcagttgaatgtttgttttttcatttttattantgcatcttatgcgtaatgctactgatgtttcgttatcctttgctctatgttgagcaattgtcattcgtgaaagcatggaggatggacattctggtgcttaattgttctataatgatnggggatgacatggagacccagtacttggggccttaccaggaggacaagcta

SEQ ID NO: 68986 - DNA, 449 bp, Glycine max
  unsure (1)..(449): unsure at all n locations
cgccgcccagctcgcccaggcgagcangggtgcttcttctcatattcaacagccttctggaggaatcttctggagggcccaagtgggcctggttgctatttgcacccccctgtttactaaatgcacccccctttctattttttagtaattctttctccgtaacgttacgaaactttacgaatttcgtaacgatacttattttccttccgcaaggttacgaatccttacggattatgtatatactctttattagctttcgaagaagttacggaaactcacggattgcacaacaacacctcttttctgatttcgccacattacggaatttcacgaatcacgcaagcctgcttcctttcgatattgagacgtctcgngacttcatttattgcatgtcatcaagtaataatccccggacgaaaatgggtatgacagttcaccctctttactta

SEQ ID NO: 68987 - DNA, 268 bp, Glycine max
ttgaagccacacagacaccataagaggatatttactaagcaatatgattaccatccatcactgcttatcattttattatcataattgcaatttagaaccttaattatctgtatacaacatcattttatgaatcttgacctctcatttttttgaattaaaacccctataatctaatcatgtaatatatattcatacattaattacacatttaaaagtaaccataggattgacaatctattgaactggcatattaacacatttatgttta

SEQ ID NO: 68988 - DNA, 156 bp, Glycine max
gggaagataaaatgaagaaaggtaagtagaaggaaagaagtaataggtggaggagatggagaagtcgaagaagtagaagtaagtggaatgacgtttaataatgtataaatcatatgttagatcgtagagatgtggaaattggataagtggttgtat

SEQ ID NO: 68989 - DNA, 169 bp, Glycine max
gaaaaagacgacaagaaaaggaaaaaagagatgagaaaggggacgagagaagaaaggcaacggcaaagaacaagggagaacatgcccggcgacagacatcaaaagcccccaaggatcggataaagagcaaagaccggaggaaggaataagaggacgcaaaggaacaaaa

SEQ ID NO: 68990 - DNA, 175 bp, Glycine max
  unsure (1)..(175): unsure at all n locations
aaaagcccgggcnaaaagaaggagagacaacagatagaaatcagacccacggcaagaaagaagaggaaaaaagaaacgaacggaaaacgacaaaagaaggagacaggagaacgggaaggggcccaacaaagacacgcacccaaaaacccaaaaccaaacacgggagggaaaaaca

SEQ ID NO: 68991 - DNA, 374 bp, Glycine max
  unsure (1)..(374): unsure at all n locations
agcttcaacttctgaatgtcgggaacaataagttatctggaggaatcccaccattcatagggaatctttctgctctactttatctctcagnggagagaataacatagagggagatgttccacatgaaatgtgccagctaaacaacttgataaggatacggatgcctgtcaacaaactaactggaacatttccttcatgtctttataatgtctcatctctcatcgaaatctcagctacagataatcaatttcatggctctcttccacctaacatgttccacaccctcccaaatctccaacgattttatgttgcgctcaaccaaatctcaggttcaatcccaccttccatcataaatgtgtctaagctntcagtac

SEQ ID NO: 68992 - DNA, 473 bp, Glycine max
  unsure (1)..(473): unsure at all n locations
actaagctcacacattatttttttatcaaacttgagntttggaaatctctactactaagactnnccnaacnagangatttaaatgatgcatgttaatatgtgcagccctatgatgccacaatcatgaatcatctatcttactcaccaagcaacttagctcatgaaaagatacatgttcaacattcaacatatagatattacctattctcttactgatctggacaactttaccggatatggcttcacttataagacatcaatttctattgaactctattttgaaccctttatcacaaagttgactaatgcttagaaggttatgctttagttcattcacatataacacatatcttaatctgaggttttatgttgattccctatatcatgagaatcattatatttcccttgttgttgtctccaaacatgaccatagtttggactttgcacacgtcatgttctataacagtcactat

SEQ ID NO: 68993 - DNA, 330 bp, Glycine max
  unsure (1)..(330): unsure at all n locations
agctnggttcgatgactcatccgttgacgatcttataacgattatgaacgaatgaataacgtcgaagaatcggtcataactctttgcgagattacctaccgaccaacgtaactgaaatcgtttaggaagcgcctcttgtttatattgtcttcacagaaatatattttccatgcaaattctaaagagagagaagtgcctaaggggctggacccctcccttcttgcattcctgccctatataaagagaaagaagagaggtgggtgccggccagcttcgccatgcgagctaatgttgtccagacgagcaggggtgcttcctccataagcaacc

SEQ ID NO: 68994 - DNA, 469 bp, Glycine max
  unsure (1)..(469): unsure at all n locations
taagcttgagacgaggaagtgtagaagggtgaaacatcctgcntaaattctatgatcatagagcggaaccaggaagatatgtcgcggtggtcatgagaccttgnggacgtcaggtggggtgctattgcccaataccaagcttgaccaatcccgacccaacccgggcatagtcagtctgtgagaacctgtgatgtacctaagcaggcgagctcctatctgtcaacagataaaaggaacaaagaccacatagcaatgaggcttgtgtggtggctggccacctgtgaattatgattgatatatgggatatggcctctggtaatcgattaccaagggtgggtaatcgattacaaggcgtaaaaatgaagacaggagactaagatggtctctggtaatcgattatcaacgggttgtatcgataccaggcttgaaaccaggtcaggagctagagagcttctggtatcgataccag

SEQ ID NO: 68995 - DNA, 342 bp, Glycine max
  unsure (1)..(342): unsure at all n locations
atgctgaacttagttagtcacctttataagaggccctgctgcctaaaccgtgtcccgtaatccaagtgtttctgctgtactctcatcatcataattatatctcaggtgaccatnatagtggctacaatggcttaacaactatatatctgttaaaccttataataaaagattatatgcactttatgccaatacaagatagctggtggggtcaattgcattgaactattaccaagtgtgagcgagattatagcatgaagcactatttccatgctatacaattctgccataatttatatcatacctgataaacaatgagtgacttaagggcaaagggaaacctgc

SEQ ID NO: 68996 - DNA, 361 bp, Glycine max
  unsure (1)..(361): unsure at all n locations
agcttggactcatgagtggtaaagtgaggactatttggattggttcttttgtcganactaaagattatccttatgggaccagtgagatcaaaagcactccacaaacaagagctttaaggtcaatggacaccgacttatgccattcctcacaaacccttctttataggacgtagtggtggaagagacttccttactccacactactctatctctaccatgacttaaggagtctctctctcttatctgcttctttacttttattacatatgcccgatcctatttgatggtctaaatgcttctaatcttttaattgtgccacaatgatgacaatgtgttgtttaagtatggggggggggggggg

SEQ ID NO: 68997 - DNA, 441 bp, Glycine max
  unsure (1)..(441): unsure at all n locations
accttgaacaagcaactaactcctctttcagaaccttgctatgtgctcgcgactggtccctctcttcccttcgcagctggagttcactattgctaccccatagagctccgcgaaatntattccggccatactcttccttgcgagccctcttggtctcttgtacaagggctcttgcggtaattgcattctcttcccgtaacccggcacactccttccgaatgtgtgtagcggccaacttgaacttctccttggcaagatttgcctttcctaactcgctttngagagcttggacttcttcgtcctctttcggtgctttaaaactctcttcgctgacgactcttaacttggcgagccaatctaaacctcggatatgaactttcagccattcgtggtacccaccaatgatgccattacgaatgctcctaagctcttgatctttac

SEQ ID NO: 68998 - DNA, 340 bp, Glycine max
  unsure (1)..(340): unsure at all n locations
acagagnggnaccnggagatangtcacggnggtcaggagacctcgcggacgccaggaggggtgctattgcccataaccaagcttgaccaatcccgacccaacccgggcatagtcggtctgtgagaacctgtgatgtacctaaacaggcgagcttctgacagtcaacagatataaggaacaatgaccacaaagcaaggaggcttgcggtggcaggccaactgaaaattatagtgatatgtggattatggcctatagtaatcgaataccaagggtgagtaattgattacatggcataataatgaatataggaggctaacatggtctctggtaatctattacc

SEQ ID NO: 68999 - DNA, 386 bp, Glycine max
  unsure (1)..(386): unsure at all n locations
ggacacgatgatgctacttctgctgaagaaggataatcctcattgtatcttcctgaccttggaaagggctagggttgtgtaattcaaacaaaggatggaggctacttggcatctatgaaccctcttgatatcgctgtggctagaaaagatgctccaaagctagctatgcagatatcaaggccttttgtgttggcaatggcatcacaccaatccttgacagggttcgagatgttacagagattggctgacattggctttgatgaactcanctccaagggtttgtccttaatgccaatagatgaaatggtaggcataactgcagaacaagttgctttcgaaggcattgtcaatgccatcatacaatgtaggaacaatgaatgagcaag

SEQ ID NO: 69000 - DNA, 446 bp, Glycine max
  unsure (1)..(446): unsure at all n locations
agctntacagcagatgccactctactccaagttctttaatgatatgttaacaaggaaacataagtatattcaccaggaaaacattgtagtggaaggaattgtagtgctatgattcanaagatccttccacccaagcataaagaccctgngagtgtaactattccttgttcaattggagaagtcactatgggaaaaactcttattgatctgggagccagcattaatttaatgccactctccatgtgcagaaggttgggagagttggagatcatgcccactaagatgaatttacaactagctgaccactccattaccagaccatatggagtaattgaagatgtgctagtcaaagtgaaacattttatcttcctgacagactntgtagtaatggatatttgtgaagatactgacattcctgtaatattgggaggccattcatgtaacta

SEQ ID NO: 69001 - DNA, 404 bp, Glycine max
  unsure (1)..(404): unsure at all n locations
atggttattctggagtaaatattgtttataaatcttgttttatggttaacgctatctctagaacatttctgttggatttaatgatgaaatgtgtacattatcaggtgaaagagaggctaagttttgaattgcaaaaagtagcagttgggctaagctcagtagttgggctacgcgcatatccaccgctaagcgcagcttcaacgcgcttagcgcanaggagaatctggcagagcatcagcatcaaagccacgcggtaagcgcgagatcagtgcactaagcgcagcaggtgcattcagccaggctcagcgcgagactggtgctaagcccaatctcacttacccgcgctaagtgtgaaggtggcgctatgcacaacttcgcgatttaaagcctatttaagcctgtct

SEQ ID NO: 69002 - DNA, 475 bp, Glycine max
  unsure (1)..(475): unsure at all n locations
gtcacctgcggcatgcaagctatgagaatggctagacatgatacatggcattgtttggttttgttcaacgataaaagggatgccccacattatttccatgacacanatgcaaaatgatgatttggaaactttatgcaaaactggtcatgcatgcacctatgtggacactcaaatgtcatatttttatggtcatgtgatgctagggctcacgactcatttcctctattttagtcaaaccaacgattccaaaatatgttcttttatcaatttgtgcattcatccgagtccatcttgggcgtgtgggaaatcttacagcatcacccttaggtgtaacacatttttcaaaactaattatgacagcgaatcttttcaagaaagatggaagtatctttttcaaagcatgtggatttagctcacaattatttctttttctccttattttatatatatggacatgctttctgtgttatttctt

SEQ ID NO: 69003 - DNA, 477 bp, Glycine max
  unsure (1)..(477): unsure at all n locations
gcttggaagaagtgtgaggacatgccctaaggcagagctttattatcccgggtagtcgaagagaagttcaagtccatagccatcaaagtatgaaaagagtatgatgaactaagggacgtcaatatggccacagctgaagccttggaatgagaaaccaagaaggcctgaaaggaagaacacgaccaaaacaaagttttgaggggctttatagggcagcaatagtgaactcaagctccgaagaggtgaaaggaatcatcacgggtcaaaggcatgatcttgaaggacgagctaaaggcttgccttatgtcgaaaagaaatttgtcccaacagttaatcgagactgaanggaatatgttngccatcatcgatgagtgcaaanagaagctaaatctagcagcgactcacgagcaaaggctagaggatgagtatcgccagatatcaacagaaagggatgcatgggaaatggtatttgattca

SEQ ID NO: 69004 - DNA, 449 bp, Glycine max
  unsure (1)..(449): unsure at all n locations
agctagcttgtggtgcttctatggaggccggancttatagcatttttgaagcccnangacggagagacacctccgcggagatgctgtggaatatccacgacaagatgtgagaggaggctccatactctatggaataagccatggcagaatgagcttctctaccatgatgatccttatatactaagcttgaaggattcttttatgtgggacaaatatatggaatataatagatggggtatctctatttttacgtattaaataggatatagttgcctcttgttgtgtttccttattatattttcgagatacactgtgtctcatgcttttttatgatataacttcctaatgctttaatatctccttaaactcttgataatcttttgaactaacgttatcaaatcttattttattgtatttcttgagttcttatatatcttatatattttttt

SEQ ID NO: 69005 - DNA, 478 bp, Glycine max
  unsure (1)..(478): unsure at all n locations
acactataatactaagcttggctgcgcacgagctccatttcggagtattatagaagttgatctctttgtaatcgattacaggtattggtaatcgattacaggcccaataagccttctggtaatcgattacaggatgttgtaatcgattacaggctgcctgttcaagtgtaatcgattacattgagtggtaatcgattaccagagcctatcctaggctagtttctaagagaatatctatatntatgctcanatacatcttatatgactaattttcactactaatacactaaattcaatcattcaattactatatacacaagaaatcatatattctatcataaaaacaagaattcaaacaagatcaaacaaaataatctacaatcaatagggtaaatagtaatcaatcaatcaatcaactaatcaatcaaccaatcaattcctaattttctaaatctcttacatctaagagacctaattc

SEQ ID NO: 69006 - DNA, 370 bp, Glycine max
  unsure (1)..(370): unsure at all n locations
acctgcggcatgcaagcttgtanaatggctagacatgatacanngnctttgttntggttttgnttanggataaaaaggatgccccacattatctccatgacacaaatgcaaaacgatgatctggaaactttatgcataactggttatgcatgcacctatgtggacactcaagtgtcaatattttttatggtcatgtgaagctaaagctcataattcatattctctattttaaataaacccaacgtttccaaaatatgttcttatatcaattagagcattcatccgagtcccattagggtgtgcggggaaattacacaacatttacccttcatgttgagacacatctatcagaaattgggtatgatcaatg

SEQ ID NO: 69007 - DNA, 453 bp, Glycine max
  unsure (1)..(453): unsure at all n locations
tctctcccaactttctataaatggggggagaagtgaagtgaaatagggttcttcccctgaggcacttgtctctctttcgaatttgcttggaaaaattgcttccgtgaagaaaatccaagccgaggcgtttacgaaacgtttccgtgaggaatttcacgaaggttttgaccgatcttcaatgttcttcattcgctcttcatcggtcttcgatcctcaacaggtaagtacctctaaccaagcttttcgattcattctatgtacccgtggtggtccacattgngtgtcgtgtatttatattctcgcgtcatttactttttatacccccttttgacgtgcttaagccattttatttaagtcatttatcgcttaacctaaggataaatgaatttccaccgatcatgtgaattatattatccgttaacttcggatacaatgaattcctaccgttcggtc

SEQ ID NO: 69008 - DNA, 272 bp, Glycine max
  unsure (1)..(272): unsure at all n locations
cttcttcttattttcgtataaaanttattatatcactaaattgatcatctctctaacgactgatgagatcaataacaatatatatataaagtatttatctgagactgtacgtgaaatttgtntaaacaatgtaaatctatatattcttaagaataataacaaaaataatatgacttttaaatttatgccatctatcttgtctctgtttagtaccttctaattttaaaatcaatttttccacttgaaatctgtgaaaatttaaataatttttt

SEQ ID NO: 69009 - DNA, 475 bp, Glycine max
  unsure (1)..(475): unsure at all n locations
atataatactcagagctaaccatcaagagcagatgctaaaatcaanggctaactactctctactgaagcaaaacaattcaatgcttaaccatccatggcaaaagctcaaacaatgcttaatcaccatggacaagagctcacataaacataaagcataataaaatagaagaatacaaaatctgtcttcaatgaggactttacacaaacactntgtgaatcaacaacaaccaagacttatccaccatcgacaaaagcaaacaaatgaacaatgcttaaccaccacaaatggcagaagctaatatcatcataacaagcctaaaaggctgaaaacaataagccaaaatcttcagaagcatttaataaaacaccatgtaaactaaaattgctagacatggagaaactaactctggctatgcaaatgcttattccaccattgaatgataaggtggtacataaagtgcatagttgaaatgct

SEQ ID NO: 69010 - DNA, 324 bp, Glycine max
  unsure (1)..(324): unsure at all n locations
tggaccgcataaagagcaaatgaaagtcttatggcttgtagagcgaccaagctgatgccctatgatcaaaacacaaagcagtgaccatgcattgaaagctttccaagaaacacattttgtcggtgctcaacgtaagaattgaaacctcttgcttatgtctgtntgaaacgagaaaacacagatatgataatatagtgattctataagttcttatataaagagaacaagtggtcaagataacttataacgacgcttacttgaattatgaaccatcctacccaaataacggtgctaccaattaatgacacatacaggacctggatg

SEQ ID NO: 69011 - DNA, 429 bp, Glycine max
  unsure (1)..(429): unsure at all n locations
tctgagaattccaagctntataagcaagaattagaaatctatcttgacaaatagctatcaaaaagaaattttcagcctagtcaacaactattgttatttaattctcgattaagattgtttccaggtaagatgaaatccaagtggtctggaccattcatcatcaaagaagttatgccatatggagcagtgatactagaggacccatcaaccaaaaggacatggactgtgaatggtagcagaatcaaacactacctacgtggagatttggagaggataatcactatagtccaactgcaagatctggaagcaaagctttccaagcctatattgatgatgccaaagactcangtcatgaatcacgagtcaagcaagtttcaagaatcaatgagtcgttcaatcaagaatcaagattcaagttgagatttaaga

SEQ ID NO: 69012 - DNA, 328 bp, Glycine max
aatctgaggaattagacaactctgatggatccatagatgatgaaatggccctcgcgtctagaaagttcaaacagatgatgaagaagaaaggataagttcaacactcctttagacgcaccgaatcacgattcaaatagaagacaagggacgaaaacaatgagatcatttgcttgactgtaatagcctaacacaagaaggcttttgtgcccactgtaaagaagagattttctcggacacgaaaagaaaattatgacggcacttgggatgactcaacagtgataaagaatattttcacaatgacaagccacatttgctcatggaatacata

SEQ ID NO: 69013 - DNA, 359 bp, Glycine max
  unsure (1)..(359): unsure at all n locations
ctggattttttagctttaatgaggccctttaatggtgattttcctccatggagatgcacccccgacataggagatgatgtgtgaggaggcgccctccactatggaataagccatggaatatagagcttcactcaccagataagccttgtataataatctttgaaggatgctctcttggaggataagatagatggagagaaagagagaggggggagcactaaattgaaggaatataagagggagagaagtggaactttgaagtgtgtctcacatgactctcattctcanagttacacaagtgttcacatgctctatcatatacttgaagcttcttgaaagcttcttgaaaacttcttgta

SEQ ID NO: 69014 - DNA, 489 bp, Glycine max
  unsure (1)..(489): unsure at all n locations
tcttagtttcaaatgatgcagatgggttagtagctacttcattctctcctctaatgactatggcatcatttctggcgctaaactgctgagagttggaggccatcttctcaattaaatttctggcttcagcaggagtcatgtctacaagggctccaccactggcagcatctatcatacttctctccatattactgagtccttcataaaaatattggagaagaagctattctgaaatctgatggtgagggcaattggcacatatgttcttaaatcgctcccagtactcatacaggctctctccactaagctgtctaatacctgagatatctttcctgatggctgtggtcctggaagcagggaaaaaactttcttagaatactctcttaaggtcatcccagctcgtgatggacctttgagcaaggaaatacaaccagtcctctgccactccctctaatgaatgaagaanagccttcgaaatatgtgatcctc

SEQ ID NO: 69015 - DNA, 406 bp, Glycine max
ttcagatgatgcatatgggtgggtagttaccttatgcactcctctaatgactatggcatcatttctggcactaaactcctgggagcttggagcgccatcttctcaattaaatttctggcttcagcaagagtcatgtctccaagggcctcaccactggcagcatctatcatacttctctccatattactgacgccttcataaaaatattgaagaacacactcgtctgaaatctgatggtgggggcaactggcacataatttctttaatctcttccagcactcatacaagctctctccattgagttgtctaatacctgagatatccttcctgatggctgcggtcctgaacacaaggaaaatttttccacaatactctcttaatgcatcccatctcgtgatggaccttg

SEQ ID NO: 69016 - DNA, 429 bp, Glycine max
  unsure (1)..(429): unsure at all n locations
ggcttctacagggcttagtatccaaattcagttgggacactatctctggatcttgcaacattggtacagcttcctccatcaacaattaaagagcaaagcttaccattaatagtgcatctagtgtggaaaatattttatctttgggtgttgtctaatggctgcatctgacttcctaagagcctcttcaccattatcatatcaccctacatagcttcctcctcaacctcttcttccacttcttcttcttcactaatttcatattcactggtgatttcttnatctgccttcatgatcatggtcctcctgggtgcacaatnataagcaatatttnctctacctaagcattnnaagnattttatgtttctggtaccccttttnataataggtagaattatcttggtccaccctggacactgctgctttcatgcg

SEQ ID NO: 69017 - DNA, 221 bp, Glycine max
  unsure (1)..(221): unsure at all n locations
agcttanggatgaatcaagcaatcttgtcttgttttgtntncatcatacactcatctaccaacggcgatctttttattctctccagctcattttcaaccgatcgtttaagctgtaatctcacttttataatgttaatatgaattactcaccgatcgtttcgtgtagtaatcatctcttaatcactggtaaaatataactaaaccgatcgtatgtgttataa

SEQ ID NO: 69018 - DNA, 217 bp, Glycine max
  unsure (1)..(217): unsure at all n locations
tctagccaaatggacttaccttgaattatttcctttgatagcctatatgagcctngattccctttccttgctatgaagctcactacaagccttatatgaaaaaccatgatatcaccatatccttaaggaattttggagctttggaattgtattgggaataaatgtgggggggggggggggatatcttattcatagactaaattatttcttatcactt

SEQ ID NO: 69019 - DNA, 465 bp, Glycine max
  unsure (1)..(465): unsure at all n locations
tgtatgggnngggggcagcanaaggatgcacatataccacaatacccttngcaacacgtacatgactctctgattcaaggccagctgggttaccaagttaaccaatgcatccagtttgccttcaagcttcttagtntcagatgatgcagatgggtttgtagctacctcatgcactcctctaatgactatggcatcatttctggcgctaaactgctgggagttggaagccatcttctcaattaaatttctggcttcagcaggagtcatgtctccaagggctccaccactggcagcatctatcataattctctccatattactgagtccttcataaagatattggagaagaagttgtctgaaatctgatggtgaaggcaactgcacataattcttaaatctctctagtactatacagctctctcactgagtgctaatactgagaatcttctgatgtgggcctgaaca

SEQ ID NO: 69020 - DNA, 471 bp, Glycine max
  unsure (1)..(471): unsure at all n locations
tctcgagtgagacaattgatacaatgggacacgtcaacttgctatacacttttggagacgataaagattccaagaccatcatgatcaggtatctcctagccaatgctttcacttattataatatattaattggtcgacctacactcaatgaattgggggtcattatttcaactccccatctggcgatgaaatacccgagtacgagtggcaagattatcatcgctagagccgaccaagcaatgacataggaatgttatgcttcaagcctcaagattaccaagggaaagaaggtagcagaactcanagtacaactgatatcatgcacctctccaacaatctatgagaagcagagctcgaccctagaatagccaagagcagagcccactgaagaagtgaagcctttccaacttcgacaagaccatctcaatgcactaagctaggattccagatgagtatagaagtggaagagtc

SEQ ID NO: 69021 - DNA, 387 bp, Glycine max
aagaacgacgaagaaacttccacggaatctatcacggaaatgttccgaagcattacagaagtgtctcggcttggatgtttccttccttcttctcctcactaattttaagtgatgtctgagctatcaagttgctgaaccccaaagctcaaccactctcacgccattatataagaaaatgggggaggtggttgtctgccatctcgcccaggcgagttgggttgcttccacctaaagcaatccctttttttggaatattccagatgggcccaggtgctacgtacactcccagtatgattagtgcacccctatatttgtgtgtttagctgattctttttttctgaaacatcacagaactttacagaatacgcagtggtgagtgtaagcatc

SEQ ID NO: 69022 - DNA, 457 bp, Glycine max
  unsure (1)..(457): unsure at all n locations
tgtgcanatcaaatcactcctacattntcatctctagcatgcatttctctttctttctttacccactcctcatgtttggttttttagggaaaaacaccataactaaacgtgccacaaggcatccctatcgcaccagatccaaatctagaacgatgggtgatcaagaggagacacaggaacagatgaaagccgacatgtcggctctgaaagaacaaatggcctccatgatggaggccatgttaggtatgaggcagctcatggataagaacgcggccaccgttgccgctgtcagttcggctgtcgaagcagacccaactctcttggcaactgcgcaccatccttcctcaaacatagtaggacggngaagggacacactgtggcacgatggcagccctcacctgtgatacaaccgagcggctacccttatggattgccgcccaactactcaccacccgtc

SEQ ID NO: 69023 - DNA, 484 bp, Glycine max
  unsure (1)..(484): unsure at all n locations
tactcagcttaaactgcccatctcctctaacacatagacacaggatttttctctacttctttgctgaggttggcaacacattctaaattcaaactcgttcggcacatgtatctatgacaaagttcttcctaccaaatcaaaggcaataacaacatgcatgtatgcctcataattataaacaaaccagtggagggcattngtaaaaaatgttccacttaagttgttgcggccagtccaaaacttgcatgatattgaatgcaaatttgcatcgagtggaatatgtatccatgcattctctttaactgagatacactccatgtggctagnagagtcatattcggcaaaagagattacaaccaccatgtaaacatttgatcttggatcatattcaagaccatgacttaacaataatgaattctcagctgtaatgaaagagacattggaagaccattgcatcattttacttttacctgctgatggattc

SEQ ID NO: 69024 - DNA, 397 bp, Glycine max
acctgcagcatgcaagctagaagctaaaggaaaacatgagtaaggttttgcttttcttgcccaactcccttgagtggaattcgtataggtcgttatattgcttggtgaccctacctacgtccgatatctgtatttgaacgtgcatgatcatggtttgtgtgaagaaaagtttctaagttagaaaatattttctaacgtcaaaactttctgtttgagtaatataacctcttgtactgatacaacagctgactgaagcttgagagtgagtctgtctcggtgaatgaatcactatttataatgatacatgtggttgaacaatactgattactctgacctctttttatccatacaagtggtaattgtatttctctctcgttagtgttaaggaaacataaca

SEQ ID NO: 69025 - DNA, 416 bp, Glycine max
atgatcttttcttatctggaatatgggcataagcaatgcattcttatattctatagtggtccactgttggatttctttctctccatgcctcctctggtgtcatattttctaaagcatatgtaagacttctatttagaatgtgcacgctccatttattaactttaggccacaattcttcttaaatgccactcttactctagaggcaccgtaccatgttgagaatggttctatttttcctctctgacacaccattttgatgtggagtatatgttgttgacaactccttccatattccatgattcacacaaatagtagaaaattcatctgagcaatactctccaccactgttagttcgaagagactcaatagtcttttcagatactatttctactctagctgtgaagctcttaaatgaa

SEQ ID NO: 69026 - DNA, 392 bp, Glycine max
  unsure (1)..(392): unsure at all n locations
acaatactcaatagttgaccttcatattcatacctgtaagaaccttatgctgagaaaacattaatgatctaattctcaatgaccgaccaatactaaacatgttattgttgtcccccacagttaactgcatgcacaattatcaaatttataaaaattaagaaacatgcataaatcaaagagagccactctaaatcatctgattctctatatattctacataaaaacaagggtaaagaactaatatgggacaatagatatgacattattatcaagatatctgaaggaataatntacctgcatgattattttataattaggataatactgnaaaatattatagccaactacatcttattgttaaatgctacatctccactccaatatgattcaac

SEQ ID NO: 69027 - DNA, 350 bp, Glycine max
atgtgtgtgaatcatacattctctttctttatttgcataccaacatactcaacgagactgtatactactaaatcatgcttaacgctactaaggatcgaaatcatactcttcaccaaacctctaaaaactatcgtttgcagaccctcccccattgtcactcttgattgaagaatgcatacattttttttacatgtaaactctttcgtagacttacaaaaaacccttaatgactcatcctcgtggattaggaacataacccatgcccatctagtatagtcatccactatgatgagttcatatctctaaccacttacccgtgcaattatcaatggaccaaacaaattaatgcg

SEQ ID NO: 69028 - DNA, 210 bp, Glycine max
tttttacacatttttttagtaacacaaatgttatagtgcgaattcatcacatattcgtacaaaatgaaaatcaattacctgctaaatcatatttatataatacaatgcctatttcacttattcactcaagaggtaattcctccccggcctgatgaataatgccggctgtcatgagaattagcccacccctctacccaacggcgattcata

SEQ ID NO: 69029 - DNA, 440 bp, Glycine max
  unsure (1)..(440): unsure at all n locations
tgtatgcaaccatattgcatcntatccagtctntcattatttgtactaaacccagatcaattgtcatttgtcagagaaaagtgttatatagagaaatcacaactaacttaactcaagtgattaattagctgatatattccctanatttgttcgaggtttttgtgttaaatatatttgtaacaagcttagcacatatgatatatatagggtaagtttgtttaaacttatttcttgaacaagtaattattttaataaaataaataacattttatttttattagtgtgtttgtctaaactgctgcttataaaaagttatttttttcttattctgagaagtaaatcatatctgtntattagaaaacactttttgaacttacttcttgacaaagttcttcttgaactctttaaatcatatcaccctacatatgacataggtgagt

SEQ ID NO: 69030 - DNA, 295 bp, Glycine max
agcttgtacctcatacattccttatcctctcgctttctctgaacttagggaaccacaccacacaacacatacaatatctcaatctcacctcccgcacgcattcttcttatctgtgtatattctttactctccaacaacttaattgcaattgttcacaccttgcgtacacttatacttatagattagcctctgcttaggtgacacccttttcttttagttcgcgacaatcattgtcacttttattttcccacaccctcaaccaggtaaaccctatgtactttctcacacaaagtat

SEQ ID NO: 69031 - DNA, 429 bp, Glycine max
  unsure (1)..(429): unsure at all n locations
ctgaagaagcgtanagcaagaagtatgggtcacggctttggtatatgagatctatatgatcgagacaaacaacacatgggagttagtaaatcgtccccatggaaaatatatcattggggttaagtgggtctatatgacatagctcatccctgatggcaccatacataaacacaatgcgaggctagtatctaatggttactcacaacaacccggaattgactacaatgagacatttgcactattatcttgtcttgataccataagagctctaatagctcttgcgtcacataaaggatggagtatccatcaactanatgtcaaaatcaccttccttaacggcgtactttgatgaagagatctatgtggagcatccacaaggattcttgtctgtagcaaatacacaaactgttatactaataaagcactctt

SEQ ID NO: 69032 - DNA, 307 bp, Glycine max
aagcaagaagggaggaagcaacacaagagaggtgactgactgaaccaaaaagaaagaaagaaagaaacagaaggaatcgaaattaagcaaagaagagggaagagaaggggacggaacggaatgccccccacgcgaacgagggatagaaggaaaggaagggaaggagggaaggacgggcaggaaggaaagggcaaaaaacgaagaggggaagggagggaagaaagagaaggaaaaaaaggaagaggaaggaaacaaagaaaggcaaataggcaacggaggaagaagaagaaggaaagaagggaggcag

SEQ ID NO: 69033 - DNA, 315 bp, Glycine max
  unsure (1)..(315): unsure at all n locations
gagaagaactgacgncaaatataggatgttttctgaaggaaaacgattcatgacattcatatcaccgagagcacagtcttttaatcactgtactaaacccatcatcctttaatctaccaaccataccgcataaattcttccacaaaattaaatatcctactcttaatgcaattgaagatactgcacgaatacgagctataaaaaaaaagcaagtattgaatgacccatacaattgatataaccatcacactttcatgacatactaccattccctgcgggcccctatgcctcatgttacaaaaaaacaccacttaa

SEQ ID NO: 69034 - DNA, 296 bp, Glycine max
aacacacatcgtcttcactacagaatgatgaaagaacacaatacaaacgcggccacctccgtatgacataaaacagaccacatagagttatttaactgtatttcatccctgcctacattcatattattatattagatctttatgaacaaagatacatcttaaatgtttcttttacataacctccctctctttcagtgatggtggtgacccctccttcaaggagggtatgtcttctcatcccaatatattctatcctaatattggaagagaaaacaaatccctactctacaatattg

SEQ ID NO: 69035 - DNA, 452 bp, Glycine max
tatcattaggactgacaggggaaataatattggaatgaccaaatgctatatattcataccttgtccattaccaatgaagatctgatttggaccctcaaaaggagaagttcgttggatattctgtgagttatttgtcacatggaaggatgctccagaatctataaaccatgaggatgaagtattggaattagaatttgccatcatagctcgtggaggcctagagttagagttttgagaattggcattgtgattctgacttatgtgtgaactcttggaagcagaagaattgttccagtatattgttttgattctgattctgacaccaattatgattatggttctgcatttgagaccagttagtacgattattgttgttccataattgccattgttgttgtcccataatttcactgtttcagcttgtgaagcttgatctactgattgaacctaca

SEQ ID NO: 69036 - DNA, 250 bp, Glycine max
cctctctaatagcgaagcacacctccttgagaagagaagctagagctacctacacacctcctatgatggctagctcaccctatgaaataattctgaaatacagaaaggatatcctactgcaagagtcgtataaagcctcgaatatcaggctggtatcttattctatagtggcaaatgcagggcaacgaagataacctttctatatttaaagaaagcggctatattagtctgggctgaatctactagagta

SEQ ID NO: 69037 - DNA, 393 bp, Glycine max
ctaagcttggaaatgatttcttacaaaagttagtcatataaagcgactaacagtagccaagttgtcttatggcaaggacgagattataattgatacaacccctcgttcccatcaaggggacgttggagaacccctcacatgaggaaaaaacccaagatcttccttccttccatcgggggaaccaattaatggatgcccctaccatactagccaagagttgctcccaatttgccttccctttctcggcgctcatgcggtgaccttgaaggggacacagggtctactttcatgccgaaagaggtgcgagaccagccatacataaagagaaggcgtgcaacagacaatctttgcaccactcttctcacaccttcggtcaaatgtgtcatgggcatc

SEQ ID NO: 69038 - DNA, 318 bp, Glycine max
cgaggagacactgaatcaattcatgcatatgtccatgtccaattatttgttcacagagtcatccatcatgaacctagagatacaaatgggacaattagccaaacaaatggctgaaagatccactaacagttttggagccaacaccgagaagaatcccaaagaggagtgcaaggttattctcactatgacggatagtgttgataataaaaatataattgatgaggatgtgccttatgacgaatgacaaaataagaatagggagaaatagataagagtaatgagagtgtaatgaggtctcaaccactaagacctatacca

SEQ ID NO: 69039 - DNA, 207 bp, Glycine max
aaaaacggatatctctcaacaaatactagaaaaaaaaactagcaaaattttaaaacccaaccagcataaaatacacaatcaacaccaaaaaaaaaccataaaaaaaccaacaaaacaaaaaaaaacccaaccccaaaaaccacgaaaaagaaaaaatcagaaatgaaaaataaaaatacaacgataaagaaacaaataaaaaatgtg

SEQ ID NO: 69040 - DNA, 221 bp, Glycine max
aaggaaaagtagagtagaggaaaaaggagacaaagagaggaagaacgaagggagggaaaagagagaagagacagaaggggaggagaggaggagaagaggacaaaggagacgagaagaaaaggggcaagagcagaagacaagagaaggaagaaagaaaggaaaaaaaagagaaaggaaaagacgaaggcgagaaaaggagaagaggaaaaggaaggaaggaa

SEQ ID NO: 69041 - DNA, 267 bp, Glycine max
gccgagcacagaaagaaggccgagaatgtcgtggaacggtaacgaacacggaacggcggaaggcaaagacaacggcggccaacgagcccgataaaggccaaaggagaacgcgggacgtagggtgaaggcgataagcccacccacgcagacgaaaagagacacatcgcgggaaggaagggcggaggacaaagctcgcggatgagacaagaaagcgaaggaagccggacccaccacacaagaagaaactatataagcgcggcgccggga

SEQ ID NO: 69042 - DNA, 395 bp, Glycine max
ggaggaggatggaattacgctcagccctcctgcgaattggtgatcacttgcaattagagaagaacatcgcctctatgaagaatagacgggccggggcgcttccataacgttgatgtgggtgatttcgcgaggattttcaaccttgttcgacgttgttcatccgctctttgatgctcttcggtcttcgaccggtaagttcccgaaatcgagcttttcaattatttctatgttcccttagtggccctcagttgtctcacgtgcttttattttcatgtccttaactttatcgacccacttttgacatgcgttgctcacttactcacgttgttttctcgcccagtcaacaatttagataactctccaccgttcatttgaattgtgtatgcgctaattct

SEQ ID NO: 69043 - DNA, 314 bp, Glycine max
  unsure (1)..(314): unsure at all n locations
taaaaaaaaaagaaggatgacgatgcatcacacgaaaacnaaagagcaacngcaccccgcaagagaacgccaatctaattagaacaagacagaaacgccgagccacggaaacgaccccccaaaaacccaccacgacgacccccaacggaagaccccccaaccacccacctgcacccaatacaacccccccaattcaacacaaacaagaccccgcaccatgccaatagaaaataagaaacgaaaaagaaaaaacaagaacgaggcggcaaaacacagaaaggaagacacggagaggaaagaagatgtgataccac

SEQ ID NO: 69044 - DNA, 392 bp, Glycine max
  unsure (1)..(392): unsure at all n locations
gcaactacatattcattntctgagtggtggtgcattacaaacgcatcattctagtatgccctgcctttgatacgatgttttgacggaatgcctaccatatgatatacatacctcttcaatgcaattccttagtcaaatttgccgttttattaggtgaaaaaatgcagcaactcttgatatgccaacatttaatttcacagatgcatttctatatatttactgctctccattctcttttgaaaaaaatactcaatatgtatttgtcatgcctgatttacattctcatcgtatatatacacactactggattcttgaggtcagcgttattgcataagacctaattatctagctttcattagactcctcttctattaatattattcactccattc

SEQ ID NO: 69045 - DNA, 484 bp, Glycine max
gctgatccttgtaaccaatgagagaaagtgtaatgaacttgtattatttataagcaaaactaaaggggcaattcaattatcatcataacattgccaaagacttataaaggaaaaagggaaaagtattactagtcatcctaagcaaattagcaaattagcaaattagcaaatcttatagactcgtaccattatgtatgttgaccaatgttaaaatgaacaggaggctattaagtattagattaaaaatttctagaatataggcacatggtcaaagccaattgcattacccatctaaaagttttacaatattcaggatcatgagaaattaataactagattgatataggatacaaaatattactataattatcattctccaaaaaggtgtgaaatccaataaattgccattgccatatctccctctctgtgataaacacaagtacgcaagcactttatgccatattcaaccagcaatagatgactc

SEQ ID NO: 69046 - DNA, 468 bp, Glycine max
  unsure (1)..(468): unsure at all n locations
caaatgtcttcacaaataatcatcacatagcaganacctagcattactacccatcatatctccccaaaccccatacccacgaaaatcaaaggagaaagaagtccacccaaacctgaatttttgaagtcccactcgtagccacgcacttcacgaccccgaaaatgccctccttctgcgatttggagcagaaatgatggccaaaggttgaagctatgcttggagcttcaatggataatgaagatgaagaaaatggcaacgtgagggagagagagggctgtctgaaaagtgtggtggggctgagtgaagagagagaaaagctctttggttttaaataaaaagggtgttctcttttactattattttatttatgcaaatgccacatgtcttcatttgagtggagcatgaagggcccactatctctttttactgtgacccatactcagtcacaaaagtgaggaaaatctgacc

SEQ ID NO: 69047 - DNA, 366 bp, Glycine max
  unsure (1)..(366): unsure at all n locations
tctcctcaattntctatanatagggggagaagtgaagtagatattggtttatccccttaggcacttctctctctttcgaatatgcttatganaattgtttccgtgaagaatatccaagccgatgcgcttccgtaacgtttccgtaacgtttccgtgagtgatttctcgaatgttttcatccgttcttcgttcttcatcggtgaagtttgcgaatccgagactttcaattcatttcttgttctcttaatctttcatctttatttcgtgcattttcgatgtcttttcttccgtatttaacgcgcttttaccgtttatttaagccgattttttatntaataaatgataaaatgaatttcaaccgatcat

SEQ ID NO: 69048 - DNA, 295 bp, Glycine max
  unsure (1)..(295): unsure at all n locations
gctttcgattcattctatgtacccatggtggtccacatcgngtctcttgtattantattctcaatgcatttactttttatacccccttttgacgtgcttatgccatattacttaagtcatttatcgctcaacttagaaatacaatatatttccaccgaatgtttgaattgtattatccgttaacttcggttaaaataaattccgaccgttcggtcgtgccgtaattcacattggaaatcataaagaggttaaaaataatataatagatgaaaaacatctgttagtaaaaataaag

SEQ ID NO: 69049 - DNA, 110 bp, Glycine max
gagaaagagagagattaatttaaggagggagagggcagagggacagcagcgacgaggaaggagaagaaagaaggagagaagaaacggagaacccggaggaggagaaggaa

SEQ ID NO: 69050 - DNA, 471 bp, Glycine max
  unsure (1)..(471): unsure at all n locations
ctaagcttgatattggtagaaatgcctcataacttctattatatccctccgtttctgaagaacgatttatctcactaacatctctttttataacattaatctctttaatcctctcatttgtactaattactctatcttacatttatcttccttctctattaaaaaagctgcccgattttgatatataaatgcaatttctctgttcattttaccaaactctatataaagatattttatttgattcaccacgacatatttgctgctggaactgatacttcagcatcaacactagagtgggctatggcagacatgacgagaaatccaagagtgagggataaagcacaatctgaattgagacaagcctttctagaaaaggacataattcatgaaagtgatctatagcaacttacttatttgatgttggngatcaatgagacattcatggtacacacacctactccttattgctcc

SEQ ID NO: 69051 - DNA, 73 bp, Glycine max
  unsure (1)..(73): unsure at all n locations
aaggaaaaaaaagaagaaagaaaaaaaaaaagtgacacggccgaaccaanaaaaaccggggaaaaaaacggac

SEQ ID NO: 69052 - DNA, 58 bp, Glycine max
tccttgtcatcgaagatatcaggtggaaatctacatttaagccatattgaactcaaga

SEQ ID NO: 69053 - DNA, 138 bp, Glycine max
gcagacgacggccacaaccgaaaacaatgccacccagacaaagatacgaaaacatataagcctttcacacgcgcacaattccccaaatcaaggcaaaacctatctaaaaatgtgaataacaaggcaaacaaggaaaaa

SEQ ID NO: 69054 - DNA, 442 bp, Glycine max
  unsure (1)..(442): unsure at all n locations
attgacagaaacaagcatccccacaattgtttctcattaattgaaccacccaacgcataataaaatcaccacaatntgaaaggaatttcccaaaaacaagaagtaaaaacatactgcatagacgtgttcaggtaaaattttntgatttgttttagattcttccttcgaatgggtataaaaatagggaattgattagaacctgtgacgagaacagaacagaaatgaggcagcggcgagactcaatcagtgattgtgttgtgcgtctccagcaagatatggtccgtcagattgaatgcatcntataattgaagtttaaacttataattaaaataacactttgagtttaaatatacagtatgatacaaatngatgatgttgttaacatatagataaaaacttacaagaatatgagtagaataatattctgtattctatataacta

SEQ ID NO: 69055 - DNA, 502 bp, Glycine max
  unsure (1)..(502): unsure at all n locations
acttgaactcgctgtcacctcaaagtcctacttacctccagattgttactcgttggatcgaattgcaatggccgctcctcataaccggtgaggtttagttttggaagaagggtataatagagtttcggggggtccattttcaactctaatgatgcgcgaatggtaaagtggcaatggtgtgctgggggtgggggtgtgttatgtactatgacaaagggaaggccttgtatttgagaacaaggtaaaactcctattctaaactactaaaaaattaagtgcaaatttctcttcttctcctcatttctactggtgatagcttatttatagatgagcacattttggataatggacccacatggtcagctagcactacacatctaacaaactagcactataacgattaccatagaaatggaaaggtggataanagataataacaaactgatatatgcaatagtaacagaatgatatgcagaggatattcttttgtagtatattcaca

SEQ ID NO: 69056 - DNA, 504 bp, Glycine max
  unsure (1)..(504): unsure at all n locations
gacacttaaatactaagcttaagaattattgtgatgatgccaaggaatttcanagatcattctgttgtatcaagtggcctcggaataattaagaaggtggggggttgaattaattattactagacctttactaattaaaatttacccttcttaggcttatactatgttgtttagaaagtcaagaacatatgctgtaacttaaccaatagaaaaagcggtaattaaagtgcacagcggacattaaagagtgtatggaagaagaagaccaacacaagagttttatactgtgttggcaacaacctgtgcctacatccagtccccaagcgacctgtggtccttgagatttcttttcaaccttttaaattcctttacaagcaaagatcaacaagggatgcaccctccctttgtctcttcgaacaacctagtggatgtaccctccactagaactgatccacacgagatgtaccctctcttggtctcagtcacaacaaaccaaagtagatg

SEQ ID NO: 69057 - DNA, 416 bp, Glycine max
agctaagatgtatcactaagggtcaacctgtttttatgattatatgactattatgcgccaacgctaataagattatgttaacccctaatcgccaacgcacacacccctactcaatcataaagcatagatcctaatattgtaaacccaaaactaaatatgccgtaaccctaaagctaacgttaactcaagcattcataaccctatactcagaacccatcccatataatcaaccttaaataaggtactctaccccgatactgatagacataaaccctaatctcaaatatataagctaaacgtaaatgctatatacgacaataaacataacccttacataccaccaaccagaactttaacctagcctaacccgatacaacaactaacactacattatcccaaataggaaccataacatg

SEQ ID NO: 69058 - DNA, 373 bp, Glycine max
tctcggtggcctcgccgatcgcaggtaattatattactctgcttattcattcatttgtataatatatcttaatatcttgatatcttaatatcagatgtcattatgcatgggttttaattatattatatattggtacactactgtttagtgtttagggttcaccatggtagattgatttaaaagctggattacttatttgatttgatttgaaagtttatttactggtaatttgcatagtgtggtactaaggtgtatacctataattgagaaattattggatgttaagctttagatgccatgattatgtggatgtctatgttaaatgggcattaatacatcttggggattaattgattacaggattgagtcctct

SEQ ID NO: 69059 - DNA, 295 bp, Glycine max
ggaaaataccacgaaagacctcattaaagctcatagatccaggcttcatataatctttaaaagcatgaatccattatgtgtggatcagagcacaagatcttcatgtaggtgctccttaagactccattaagttatcagacttaccttctcctacatggttggttcttcatatgtatccatgtatctcctcacatgtcttgtgctaaatgttattaacatgatactttagaatttccaccgagtacagttgctataatagctacatcttgatgtctatgtgtcaaattccttgatc

SEQ ID NO: 69060 - DNA, 444 bp, Glycine max
  unsure (1)..(444): unsure at all n locations
ctactataaatgtctnggcccctcataatcatggctcntatagcgggngcatagagaactaatgggtcctctttcaagacatttaacgcactttatagagctagtcttctattgcatactagccttagggggttgcttttctattgtcttccccttatcatctttaggcttanaaagtgccacccctaagatgccttgaccttggtctttctttggatatgagtgagagccataagattttgaagtagacttccttttaagttgttgctctacccttatttcccaatctaagtaagccactacattgtcctttccatggaagtatgggaggttaatgttaacctcttaaggctnntcttccttttctctgctattggagtgaggtctaagatgtggcctatgcctttcttcataattagtatgaagttcctcacttacgctctt

SEQ ID NO: 69061 - DNA, 132 bp, Glycine max
  unsure (1)..(132): unsure at all n locations
acgngatagaatctagagagaaatcactctatactacttctagtttcgganaacgctgcagcaaccccgctggagacaacacctcgatacttgtctatgttgatataacgtcacattggcaggatgtactcc

SEQ ID NO: 69062 - DNA, 480 bp, Glycine max
  unsure (1)..(480): unsure at all n locations
ntgaatgcaaactggatgcattggttaacctgagaactttcgtttttcttgaaggccaaagcataacctgtagcgagggtgtgtggattgtgctcctctgctaaccaccatatagacctttgcccttccatgcagcaacctggagcaattaagcagcctgaagcttatgctgcatatattaacaatagacctcctcaacctcagcagcaaaatcaaccacagcagaacaattatgacctttccagcaacagatacaaccctggatggaggaatcaccctaacctcagatggtccagccctcagcaacaacaacagcagcctgctccttccttccaaatgctgctggccaagcagaccatacattcctccaccaatccaacatcagctacaaccccataaacagccaacagtngaggcccctccacaaccttccctcaaataacttgtgatgcaatgactatgcagaacatgcatttcaac

SEQ ID NO: 69063 - DNA, 478 bp, Glycine max
  unsure (1)..(478): unsure at all n locations
ttaagtgaaaggatgtgactcttcaccattgaatntgaatcttatcgttcatgggcactggtaatcgattaccaaaacattgtaatcgattacagccttataaaataattggaacgttgtaaattcagttagaaaactntttcaaactcattttgctactggtaatcgattacaacaatatggtaatcgattaccagagagtaaaaactctctggtaaaggttttgtcaaaaactcatgtgctattcaaagttttgaaaaactttttaatacttatcttgattaagtcttttattcattcttgaatcttgatcttgattcttgagatcttgaaccttgaatcttgattcttgattctaggctttcttcttgagtcttgaattcttcttgattcttttcttgaactcttaactnngtcttgattcacttgagatgtgcatttgatcacttgagttggtctatgatctatgaagcttttg

SEQ ID NO: 69064 - DNA, 294 bp, Glycine max
  unsure (1)..(294): unsure at all n locations
atattaatagtactaactctattttatcaaatcttatcttatccagattttattccatctagattttatttcctccagattttatttcatccaatcttatcttaacttgtccagatattatcttatttcgtttatgggcttggacttaaaatatatttgtgagcattgtggctgatgacctatgttacagtaccaatattttagtttagggagatttgttcggataggggaataattnttggattttagactgccannttttattactggtcgcgcacactgctcacgttgaat

SEQ ID NO: 69065 - DNA, 365 bp, Glycine max
  unsure (1)..(365): unsure at all n locations
gattataaacttttgcaactaatctagccttatttctaatgattattccatgttcatctaacttatttttaaacacccattttgttcctatgatgggataatgtgtaggtttctctacaagttcccacacattgtttctttcaaattgattcagttcttattgcatgacaatgatccagttatcatctactatggcttcttttatatttttaggtatcaaattatgttgatgacaatacttnttggatccactaaccaattcttatatatntttatgttcgaatttatgtttatgaacatatttttggatccactaacgaattgttgtgcaaggaattctcccatgacatgcatacctagtttga

SEQ ID NO: 69066 - DNA, 385 bp, Glycine max
ctgaaaggcttaaaactgtgaattatttaatgtaaaagagaacataaatgtgggagagataaagactccttagaaaaattctcaggctaagccgagtctcaaagctatatgttctcttggtatgaattaacccttcacaagtgttatgttatccctctcctcttttgctaaaaaaggttttcaattttttattttaaaatagaaaattaataatgcgcccttgatatgtcattatataactactatttttctcttctgtacttactaacaacgaggataatttagggcttcttcattaacagaaaaatctcttcttttgctctccattaaaataaacattttattctttttgcccccatttctataatatcactatggagacatc

SEQ ID NO: 69067 - DNA, 291 bp, Glycine max
  unsure (1)..(291): unsure at all n locations
accactcattntgcaataagctcaaatggtcagcccaatatcgaggggatattagaaacttcatctatgtccatgatcacanagtccactaaacaggtgaattggcgaaccttaaccaagacatcttcaactacaccatatggtttggaaatggaatggactgctaattgaagagacattnggtaagagcaatctcagattcccaatctctgatacataaaaaaagcttaaattgatgctacccctaaacaataagtgcttacccactgcacatccccaatggagcatggg

SEQ ID NO: 69068 - DNA, 368 bp, Glycine max
  unsure (1)..(368): unsure at all n locations
tgatttcaagattgagtcaacaagctcaagatcaagattaatttcaagtttcatgagaaaaaatccagaagattcatgaatcaagagaagtttgatttcatgattcacgagaagaaatcaagaagaattcacaccggaagtattgaaaagaattttcaaaanacanacatagcacaattttggttttcataagagtttttctcacaattttctaagttaccagaagttttactctctggtaatcgantaccaattacttgtaatcgattactactggcaaagattgatntctaaagcttttaactgaatttgcaacgcttcaattggattttaaatggtggtatcgagtacaatatattggtaatcga

SEQ ID NO: 69069 - DNA, 353 bp, Glycine max
ctcgggggtcacgaaaccttggggacctcttgtggtgtgccattgcccaataccaagcttgaccaattccaacccatcttcggcatagtctgtcagtgagaacctttgatgtacctaatcaggcgagcatctggcagtctatctatcaaatgaacaaagactccaacgctaggaagcttgtggtggctggccactatgaacctgattgaatgtgggaaaggcctctggaatcgattacaagggttggaatcattacatgctcaaaatgaaacatgggcttaatggtccttgaatcattaccccggtgtattcatccccgctgaaacaagtcggaacctgaagactctacatta

SEQ ID NO: 69070 - DNA, 381 bp, Glycine max
taatgcaacaattgttattcgtggctatatgagacatcttgcgaaacaaagtctgggtagccatgactcgcctgtgctatttcattcatgccatatgtaacaaagatcgggatcctgtcaagtttgatgagcagtgaaatgaggctgcaattatactgtgccagttggagatgtattttccccctgctgtctttgacataatgattcactcgattgtgcagaggatgtacccgctgagcgatacatgaagatcttaaaacggtatgcaaagaatcaatatcggctataaacatctattgttgagaggcacattgtataagaaagcattgaattttgttagattacattgagaacgctaaacctgttgaacttccttagtct

SEQ ID NO: 69071 - DNA, 245 bp, Glycine max
  unsure (1)..(245): unsure at all n locations
cctggaagtcgcgcttttcctttctcttgaagccatctgcgaacaaaaaaccattaaaactatgatatctaacctttatataaattgaaaacatacattacaaactataaaacattgtgggcgctcagtgagagcaagctcgcttaatanaaatcctgttacaaagtctaaaccacacagggacaacccatccctttgttcaagaatcttacagcttaagagacccttagacccttaatcaatct

SEQ ID NO: 69072 - DNA, 229 bp, Glycine max
aagaaatctcacaaaagctgcaaaaagaaacaacggtgtcaaagaatgcaaggacaggacccaaaacacagcaaaaaacatgcggccgcaaacaggacggaacccaaaatcctaaccgcagacttcccggaaccaaaagaaccaagccctgaggaaaaagaaaaaggcaaaggggaaataattaaacgataataagtaaaaaaaataaaaaaacaccacaaaaacaaaa

SEQ ID NO: 69073 - DNA, 327 bp, Glycine max
  unsure (1)..(327): unsure at all n locations
cacaaacacgatactttataaataanattggcttttgtttcaaaacttttgtgatgaaatgttaagatctacatataaatcgattcatcactaaagataaccttcttctaagcactctaaagcaattacttagtaaagtgttcgccatcataaaaagtgagaaaatgcgaaatatgcttgaaagatgataaaagacttgaacaacctttgaatcttgatgatngaccacctcacactacgtgtgatggttagatgaaattatttgctaatatgggagcgacgactcttaaagatttttttcttttcgctaaaagaaatttggctttt

SEQ ID NO: 69074 - DNA, 411 bp, Glycine max
  unsure (1)..(411): unsure at all n locations
catcgcatacagaaacagacattgtagcgccgtccaactgatgattactcgttaccaccaccacctgctcaaacatattcaacatgaaaaaaatgtgccattaacattattaaaggttcaggaactcacaacactctactcacgtgtttaactgttagatggtacgacactcgagtttaatgctcctcatacgctattcgngtaatgaattccctcttgccttttaccactcgtgtttcctcttaagttcctggatgaaccaaattagacacacaaggtaatataaaataaaatgaaagacaatataatgatcacaaacagatttgatttgggataacaacttggactagattntgataataatatattacattggctctggataacaagtgagccttaatttgggtaaca

SEQ ID NO: 69075 - DNA, 431 bp, Glycine max
  unsure (1)..(431): unsure at all n locations
agctanaagattctgctccgatgttgggccctcttgtctggagcncaacggagaactacggtcgatcatggtggctactactggttgtgggtggtgaacaacaagcttgtgacgttgcaaatggttttggatgaaagaatgacagaggaatggttgttttccaatgctacacgataaataagacttgaaacactcatgtgtttctgctctgtggaacagacgcatctctcacactccagaatacatatctcacagcgcaacggtcagatcgtgtaaatctgacctctttacctgcaaaccaaattgtaagaagatgcaaccgttcactaatgcaggacgatacttttaccgagacatgctcttgtatcttacttgaaaagcttactcgtgaggcttccttgacatagtagatgtatatctacccacacccc

SEQ ID NO: 69076 - DNA, 231 bp, Glycine max
tcatctctctaagcgcactacttcagttcattcgctaagcgagaaaggcgcgctaagccaaaaatcactaactgcgcttagcggtccatacgtgcgctaagcgcacgagcacgaacaaggccacctatttaagcttgaaatcagattttgtgaagagagtttggactgggattcagaactctgcatgtctacggtttctagagagagaaaggtccaagttcctagagttta

SEQ ID NO: 69077 - DNA, 421 bp, Glycine max
  unsure (1)..(421): unsure at all n locations
cactcgccagcgagctatctcgcccggcgagcttgttgttcctcagaacaacagccttctggaagaatcttctggagggcccaagtgggcctggttgcttnttgcatccccattattactaagtatacctccccctgcctttttttggtgattcttttttcgtaaagttacggaaacttacgaatttcgtaacgatactttggtttctttccgtaatgttaccggaaccttgctgaatacataatcatcccctttttgacttacggaatgtaacngaaccttactaattgtgcaccgatgcttccatttgatttccggtgtgtcacggaaccttacggattgtgcatcaatattttcttttgtttacggcatgttcgcgaatttcacaaattgcctaatgatgggtgccaagcacctcaca

SEQ ID NO: 69078 - DNA, 358 bp, Glycine max
ttgcgcaagatgagggcgataagaaattacatctgtggacaatagatacagggcaatgaaaggtgagatgaaggagaactcatggtgcgactgtcattcttacatggccaaacttcccactcaacaccaacaatgtcaatactcagccaatatcagctcttctcattacctaccacccagtcattcacataagccatcccttaataaaccacaaagcctgtctactgcacttccaatgacgaacaccacctttagcacataccaaaacaccaaccaagatattgaattttgcagcaaaaagcctgtaaattcaccccaattctgatgcctaagctgacttgctcccatatctacttga

SEQ ID NO: 69079 - DNA, 95 bp, Glycine max
aaaacacaaagaaaaggaagggagcaagaagaaaaaggaagaaaaaagaaaaagaaggccaacaaaacaggggaaaaaggagagaggaaaaaaaa

SEQ ID NO: 69080 - DNA, 225 bp, Glycine max
gggaaatgcgtgacttttttccgggacttatggggtttctcatggagcatgctactaagtaaagtatggggccctctcttgtataatacgggtaaagttcccacagatagtcttgtacaaatttaaaacttttggtgtaataaagggggagaaagaggggttccaaatgaagataaaaggaatattactttaaattttacaatctattttaatcacaaggttaca

SEQ ID NO: 69081 - DNA, 354 bp, Glycine max
  unsure (1)..(354): unsure at all n locations
atttcaatctctcactaagtagaatggatcatttcttanggccaacgccttaaaatgatcaccacttaagtaaagaatcgcttgataaataagaactacgtaggtctgagttcctcattaaagatacgcaagagcaaaagccccgcttttgtcgaccaccccaagagatncgtaattggccaatgccttaacgtttctctcctttcaaaaacaagagatcgttaatggtccaacgccctaacgtttctcccctttcaaatcaaaagaccagttaatggttcaacaccttanatgaccttttgttcaataaaaacatatcttgcaaaatagacaaaaacaacctatcaaaacact

SEQ ID NO: 69082 - DNA, 448 bp, Glycine max
  unsure (1)..(448): unsure at all n locations
gaattcattaatcttcttggccaactaacaaccattgtgatgtggaggcatatgacgaatagtaagactctttttatttgacttccaatttaggtaaacaaaatgggtagtcaaagttatgaaacccttagtattaatagatgtccataaatcagaagttaaacagatcctgccaggaatagcacacaacagttctttactgatgggtttcttcctctcatatattctcaacatattagtcttaaaagtatntctagaaattggttaattgaggacacaaataacttatcaaagcctgaaactctggatacttaacaaaaatgaaaggcaaattacgcctaatcattagattacacaacaattcgcgtgccatcatttgatctatctctatggcctaaactttccttgatgtctaaatcattngactcatattttcaaattgtttatc

SEQ ID NO: 69083 - DNA, 201 bp, Glycine max
gccgaccgaccaagacgtgactgaaccacaaaagcgagggggcaccaaaaaattatcaaagacccaggggggacacaacgcagagccccaggcaacccaccgaaaagcccccgacagaccagcccaccacccccccgaaaaacagccaccaggccggaaaaccaaagcgcaaccacaaaccacgaaggcacacagaaaaag

SEQ ID NO: 69084 - DNA, 394 bp, Glycine max
aactcgcctacattaaatcttatttaatctctatgcaaaatttttcttgaagaattatcttctaaatctgcaaactcctatgaagaaaaataaggtcacattctggaacgatggcttatctaaagacgtgctatgttgaagaaactcgctataatggaaaaatgactttcctgtgaagcttagcacatatcctatcacattggaatttatgaagaagggcgcacatttaatgcaacttatatgctttacacctcaagacttttatgatagtaaaggaacaatcattttgagagacacaatattcagacatagcatatataatatcgtgaaatcaaaccatcttacttggtgagaatctttcttcttctgtaacgctttcaaacttgtttattta

SEQ ID NO: 69085 - DNA, 226 bp, Glycine max
  unsure (1)..(226): unsure at all n locations
tggataactagcctgattaatgccaaaggaaatcgtgggaagtatggtttaagctataagcccactcaagcagatgttaagagaancatcgcgggaaggaagagtggtggtcaaagctcgcggttgagacaagacagtgagtgaagcccgccctgccacataagtataagctttataagcgcgggtctgggagacgaaagtcaagtggtcgcgatatacgatgatg

SEQ ID NO: 69086 - DNA, 392 bp, Glycine max
gaacataaaccacagagtctggcgacaggtgcacgattcttgatcatggctaggtgggttaccaggttaaccaaagcatctagattaccttcaagcttcttagtctcacctgatgaagatgaatatcgggctacttcatgcactcctctaatgacaataacatcatttctggcactgaattgctgggaagtggaagccatcttctcaattatatttttaacttcagcatgggtcatgtctccaaaggctccaccactggcagcatctatcatacttctcttcatgttgctgaggccttcataaaaatattggaagagaagctgctctgaaatctgtggtgagggcaggagcacaaaatttttaatacctccaaaatctatagctccctccct

SEQ ID NO: 69087 - DNA, 338 bp, Glycine max
  unsure (1)..(338): unsure at all n locations
agtgatgacatgcagncctctagaacccttaccacccactctgtctatatgcccagactcaagaaggccaataaggttagccctctcaatgatttctgaacaaaattcaatggcttcttctgcaatataccctctcacaatagatgcttctggatgaaacaaattctttaagtatncctttaagatcttcatgtatcactcaaccgggtcctccaccgcacataaacaggaccacaacatttgatttctctgaccagatgcacaatcaagtgactcatgatgtcaagatggagtggggaaatacttctccactggcatttatacatgcacctgatttt

SEQ ID NO: 69088 - DNA, 183 bp, Glycine max
aaagggaataaaaaggataaagggaaaaaaagatgaaaggggaaaaggtgaaaaaaaaaaaaaggagaagagaataaaaaaaagaagaaaggaatgtgaaatgagatgaaagatgagagtaagtaaggggaagaaagagaataagtgaggattaaggagaaaagagagaaaataaaaattggt

SEQ ID NO: 69089 - DNA, 202 bp, Glycine max
acaaaaacgggaggaattttaaaacgaaattaaaaaaatactaaaaaaaaaaatggagaaaaagagggagaaaaaggaaaaaaaagaagaaagaaaaaagaagaaaaaatgagaggaataagaagaagaaagaaaaaaagggaaaagaaaagagaagggggaaaatggaaaagggaaaagaagtaggaaaatgaagataaaa

SEQ ID NO: 69090 - DNA, 258 bp, Glycine max
  unsure (1)..(258): unsure at all n locations
tgacaaggttattattactgactttgatattttggtagtgatattgtgttgcggaggaatttccattggattaactcaccatctctcacttgccagttagtatgacatctgttgttggatcacctatgatattcttgtttccaaggggaatctatattctttctgatggcgtangcatgaaacccatccaagaaaaagacattaatttttgactctttcgacaattcgacaacttgtctggatttgtttctgttgacc

SEQ ID NO: 69091 - DNA, 387 bp, Glycine max
tcctctgagtcacctgctgcatgcacgcttacctcccaaacacataattgcatccttcattaacgcatcacacggtactctatctgaaagaggatcttttactctgtgcctgcaacgactgctgtccctatcacctgacagttcatcgcatcaaatatacagaatatatcacaacatataactctcaaagtacatacatggaaagagccacacagtccaacatagcgcactaaccatgattgcacaaactgcttttgaaataaataataccactattatgtgtagagcagctgttcaacattttgtcctaactgaaggagacttgttaatcacttgagagcctgctccacatgcaatactgtcattaatgaagctacattgtgagaa

SEQ ID NO: 69092 - DNA, 293 bp, Glycine max
atacttatatatatatctatctttttattattcaacggttttttatcttagagaatatttagagctacggagaaagatttcttaaagatatacaacaatatgctatgtatgacctttttacttttactatttctattataaatatatttttcatttagtgcgctcacgttagcaagaccatatatatatatatattcctctcgcggatcaaaataaataaaatacatattgagcctcgtggacgagattctcgagggtgatctgaagacaaagacattgtaacacgtgtcgca

SEQ ID NO: 69093 - DNA, 214 bp, Glycine max
tatttataataatttgataaatctgtttgtaaaattactatggattagtgacgggccttttgactcaagaacctaaaagcatcacttttgttgatgaaacagctacatatggaaaagggtattattgttgtgattagattatacctgttaaacccaataagctacacttgtaccatttttgctaatcggactcctgcactcggagaatgactac

SEQ ID NO: 69094 - DNA, 366 bp, Glycine max
tgaatcatcttgtaatgtattatacataggggcatgcgctcgctgaaaagactcttgtccatagtcacatatcatatcctccaagcgatctcccatttctacatcaaacagttcagatttctgcccactctgcatgactgtcattttaccatgccatatccatgtcatacgaattgctcttaatatcatcacacaacagatgctctcgtatgtcatccaagaattcgcgtcttccgtttatacaaatgatgcacggacaataatattttccatcttcatccggttgacctctttctgaagcaaattgtaagaattgctcgacgccttcctccgtttctgggctgatgcaactttcatttcattaac

SEQ ID NO: 69095 - DNA, 410 bp, Glycine max
  unsure (1)..(410): unsure at all n locations
tgtacacacacaaaatatggtttctgtgataactagctttgccactatntcagctacactaagataattgagtgagtggggactcggtataatccatctcacttaaaaacagtcgaaaataattccaataggcctgaccatgattccatattaataataataataactctgagaattaaagactatccatttcctagtaacatgtataaaacgtggtttacacttgtatccaatcacaacatcaccactgtgtagacttctataatagctatctttaaaatcatcccaacgatgatttatcattggatgacagtggaaaactcttatatatgatcagtgtttagccaactctatatatttatccatatatattgaaataaagtaggtgggcttaattgaaagaaaaaata

SEQ ID NO: 69096 - DNA, 174 bp, Glycine max
aaagagaggggggacagcaagcacaaacgccagaaaacgaaaagcagacgcacaaaggaagaatacagaaggggagaacaaaaaaaaaaacacccgccggagagtgggcaaaaccaaaaaacggaggaaaacaggaaaaaaaagcaagccaacaacaaaaaaaaaggggaggca

SEQ ID NO: 69097 - DNA, 449 bp, Glycine max
  unsure (1)..(449): unsure at all n locations
acacctaanatcccaccgaatcataatttgacttctctacacccaattttgccctagaaatggctctttgttcactttgatcaattgttcttctctctagcacaagccaagctttctctcaagtcctagatgacatttcaagctagtattaactcactttaacctccatttaccacagaattgagacttaaccttcactctaaagcctactctttttcactcataacaccacattctcactgtccaagcctaaggtaactctacatatcatctctaacagtgttccatgggcaatttcagcatacaaacatcacaaacatcatcacataaccctaaaacagaatgggtatgtctaactcatccaaacatggcaatttcaacaagctttcaacaagtntcttcacaaataactatcatgaagcagagaactagcaagactacccatcata

SEQ ID NO: 69098 - DNA, 464 bp, Glycine max
  unsure (1)..(464): unsure at all n locations
gagcgtctagatatattatgcgcctgaatcgtgcatccgagtgaaaantatgaccatttgaatttctcgagatcttctggggttcaatctcgagcgtctccctatgtgatgtgcttgaatcggatctccgtgtgaaaagttatgaccatttgaatttctcgagagcttcctgtgtttaatttcgagtggctcgatatccgatgtgcctgaattggacatccgagtgaanatttataatcatttaaatttctcgagagcttccgcacttcaatttcgagcgtctcgatatattatgcgcctgaatcggactctctagtgaaaaattatgaccattttaatttctctagagctgtcgttattaagtttcgagcgtctctatatattatgcgcctgaatccgacctccgagtgaaaaggtatgaccatttgaattctctagatcttcgtggtcatatcgagcgtctc

SEQ ID NO: 69099 - DNA, 457 bp, Glycine max
  unsure (1)..(457): unsure at all n locations
tncatcataagtgcactgaccttgttgatggcccagacatgggttttatgttgtggttaagaatctaactatttctgatgggattcttaagcgctttaattggtccatggtctctggcactgcttatggccatgttcatagctcatatgacatangaaatagagtaattgtggcagagtgtactttgtactgaaggggcgtgtcacctggtatgaaactcctttggggggcaagtacgtgcacaatcaggtggtctcgacgaactctgcatggttccctaagtgagagtgtcgtgtggacacgcttangcctattcctgagatttggttgttggtacgtaccacattacatctgataagtgaaacacgtgcatgcatcattctgtgcaggcttgattggatccatcgatggatgatgagtcatagntgaatgtggatgatgaacaactggtggatgt

SEQ ID NO: 69100 - DNA, 218 bp, Glycine max
gactgttaaatacttatgtactacaatttccacatatgaatatactctttttttattggactaaaaactgagagtgttatataataaaaaaaattttatatcaatattttatacaatatatcatttttctccaattttttatttctacaaccttcaaattatttatctatatatcttgctgtactaccttgtgtaatatcaccaacactcatttccat

SEQ ID NO: 69101 - DNA, 369 bp, Glycine max
tccatggctcaccaccactctaacaagttcatattaattccctgatatattttcttcaacacccacatagatacagaatattattggttaacaactaaaaatgggtcctacaatccaccaatatccatctcctttgctactagcatgcttaccaaaatacattgctattatgagaaccaatcacatctacaaatccttaattggttctggagtcttgccttaagtgtatgctataataatgtgaattcctatacaagagaaccttccctaatccctaatggggaaaatgcatgcctctgcttctttgacaattatagaacatggccaacgatctaaaactcactgcaaagggcacaagtactgtcacaa

SEQ ID NO: 69102 - DNA, 285 bp, Glycine max
atgagtgactggttaaatttaacaatcttaaatcatcattttatttaaaatcatatacagggatattaacagttatggagcaaatataatatattacatattcttaaatttaattaatttttcttatatacttttaaagataataggtttccatcatatcatgtattataattgttttttcgaattattgaaaacttttctacaaaaataatagaaccgataattggataaaaatttctcatctaagaaatggttttggaacatgatgtagattttaaaatccac

SEQ ID NO: 69103 - DNA, 240 bp, Glycine max
ttttatcaaaaaaggggaggaattttaataagagaactatagaagaagaatttccattaggtatatgaagaagggattcattaagatggataatagtaaataaaagaatttcatcagaatggaaaaaaaaaaaaaaaggaaaaatttcacataaaatattcaaaggtttgacgacatttgacatcataatgacctagataaaaagatgaccatactaaaggttccttttgcagcaatttt

SEQ ID NO: 69104 - DNA, 318 bp, Glycine max
  unsure (1)..(318): unsure at all n locations
gcttgacactgctctttcttaccgcgatgcttcatttatattccgctgagtgggcttatagcctaaaccatactctccacgatttcctttggcatttaccaagctaggtatgccgccgtggttttgctaaacccattccgggttataaccgttcccccacataactcgggccatcattactgcttgcttcggacaagcaagggctgccacagaaagagttcacggaagaaatgttgaccaccctaaaagactggaaagcggtttctaacgattcttctgctgcttccacataaggcatanaggatgggcagctcacca

SEQ ID NO: 69105 - DNA, 324 bp, Glycine max
cgaacaagtgatggtgattcgagagaagataaagcatcttacgataggcagaagaagctttatgatagaaggaggaagccactagattttcacgaaagagaacatgtgtttttgaacggttctcccttaaccggagtcggaaaggctcttacagctaggaagttgacacccaagtatctaagtccatatcagattttgaagaagattgcgcctgcagcttatcatatcgccttacctccgacgttatcgaatttgcatcctgtgttccatgtctctcaactgagacggtacaacccacatccatcacatatactcgcagtggac

SEQ ID NO: 69106 - DNA, 370 bp, Glycine max
caaaatcaaccacaacagagcaagtactatctctccagcaacagatacaaccctgtatggaggaataaccctaatctcagatgaggcactccctcagaaccaacaacaacagactgctctttccttacaaaatgctgttggcccaagccgaccatacatttctgcacgaagccagcagctacaccagccccataaacaacccacagttgaggctcctccacaaccttccctcgaagaacttgtgaagcaaatgactatgcacaacatgcagaatcaacaagagaccagagccttccatcagagcttaaccaatccgatgggacaattggctacacaattgtaccaacaacagtcgcagaatattgacaag

SEQ ID NO: 69107 - DNA, 412 bp, Glycine max
tttctaatagatgacgcatgatataacatggtctattatcatctcccactcccattattgtctccggatcaatctctccctttagaggaggaatgttgattttattaccatcaattctgttttgtctatgaacaccatcattccctcttctcctcctttcttcttcattatgaactctattctccatttgatccaaccttttatggagcgcatcatttcgttgtttcattaacctctccaaatgttgcatcaaagcttgcttttggaattgcgacagccccactccatcattatgattattacctgacatctcaaacaaacacatcatactgaacaagacaataatagatgttgtttgaatacctcacccacctcagggtttcacacaattatggctttactctaatgaaca

SEQ ID NO: 69108 - DNA, 403 bp, Glycine max
aagctttggctgtcatcaccttaccactctctcaacattctttatacgacttgctatagtgctaaaattctggatacagcgtcgataacatgatgcaagaccaaagaaagatctcacctccgaaactgttgtatggctcggtcaagtcttgatagcatccacttttgtttgatcaacggatactccatctttagacacctcatatccaagagacaccaccctttcaaccaagatattacacttttccctcttcccatagaatatatgtgctcttaaggtctcaaatatttgtttctaatgagcgaaatgctcctctatagatatgctatacaccaatatgtcgttatattaacaactacaaacttaacccaaaaaggcttgagttcttcgctcaagaacctca

SEQ ID NO: 69109 - DNA, 414 bp, Glycine max
  unsure (1)..(414): unsure at all n locations
cttatatgcaggataccattgaaattcctcatctgacttattatctaactgtcctaacgtttctgttctattggttaatacaaagcatntgcatccaataacatgaatgagtgaaatgttgggttttctaccattatacagttcatatggaggtttctttataatgggtcttattatatgccatattcatgatatatcatgcagtattaacgggttcagcccaaacatattttggaagaagagtgtcattttaataaggttataactatntcttccaagatctattttcctttaacaactacatttgtgaggggtctatgtgccaacagtatgttcatgcatgctatacacaataatcaattcttatttcaactacctcctgacacttcaataatatgatttgagattttcttg

SEQ ID NO: 69110 - DNA, 325 bp, Glycine max
cgcagagttttttccacaagcttttacagagcagatttgatcatggcaattggtacctgtaaccaagcattagttaccttaagcttttatctcattgatgaaataattgtggtactcatgtactctctatgacatacatcctttggcctaaatgtggagttgaaccttttctcattaattttggtcacagggtatgttccaagctcaccactacactttatcattcttcatgtatgagtctataaaaatggtgaagctgctaaattggtggagggcacggactactcttaatttccatttatatacttctcatactgaaaagcca

SEQ ID NO: 69111 - DNA, 363 bp, Glycine max
  unsure (1)..(363): unsure at all n locations
ttctctcaaatggtcttcattcttcttcctcttccacttagttcgtcctttcttgccaaattcgggatcttcatgtgatgtcatgaaggaaaaactcatcgaccaggatcactcagcagctgattgagttggttagattctatctatggaatgtgatctttttcttccatcccattntcgattttcatgattatgaatatgcttacgattgaaaacacattagtttagggattcctttcataattttgactctaatcacaaattggttggatgatattccaacccaatttgttatctcaaagaatttacggattaattcgattgaaacaactccaatgacattgattgaactctcataacatg

SEQ ID NO: 69112 - DNA, 323 bp, Glycine max
  unsure (1)..(323): unsure at all n locations
atctnganatcgcacaacggaagcattggagccttttattggtcatacactttcactcggatgtccgagtcttgggcattactcatctagatgctccattttgaacatcggaagctctcgagaaattctaatggtcataacttttcacacggatgtccgaattgaggacataatatatcgagacactctaaattctacaactgaagtgctccagatattcgaatggtcataacttttcacacggatgttcgaatttgggacatactatatcaagacgcttgaaattgctctacggaagcgctcaagaaattcgaatcatcata

SEQ ID NO: 69113 - DNA, 428 bp, Glycine max
  unsure (1)..(428): unsure at all n locations
catctagatctcctcgaggaaagatagagagccgtgttttgatttgggactatccgttcgcagacatgacagtatcttgcttattacccgatgttgttattcccccgatagtcaaagtgccgcacttcgacaagtataaatggacgacttgtcccaaaaaccatctcaagatgtactatcgcaagatgggcgcacgctctaaggatgagaagctattaatacacttctttcaagatagcttggccggagccgcagtattttggtacactaatttagaagcttcccgtatccgtacttggaaggatctgattactgccttcttaaggcaatatcagtataactccgatatggctcccgatcgcactcagctgcagaatatgttcaagaaagagggcgaaacctntaaagaatactcccagtggtggaga

SEQ ID NO: 69114 - DNA, 428 bp, Glycine max
  unsure (1)..(428): unsure at all n locations
cataatgctnatctctatgcannaaatgtcatgcttatctctctgattctaaaacttttctctgtaaactatttatgcacacacggacgtgtggaatatcctaccatctatatcaacatagaggccatccaacacattctaattgtcacacacatatatgcatctgaaaagaacatacattcttacgctcaaagcattgcgtcaaaattcacacctaatttatatcctaaacagttgctattacaaactacctacatatatgtgaaatatattcaacaaattttattgttcacttacattatcatattggcagctattacatatgcacacactgcttcaaaagaattcggcttatacttatttagaagcactcatttattcccttgcaaaattatgcctttattactattatacactatgcaggttta

SEQ ID NO: 69115 - DNA, 332 bp, Glycine max
taccaaagtgacaatattatcatatatttaatcttgcaatattatatggttctttaataaatgtttctatatataattctgttcatataacaaaaaagaaacgctctttaatatattcattccatttcacaattatactctcaatcaaaatattggagaaataatattaatattttatttctaatttattttcttgaagaatctcaactactaattaaatttatcagaagtcatataattatatatacgatttataagaataggaattatgttaagacgtttcacatcatatgcctcacttcttgagggtgcagtttatatatctataagat

SEQ ID NO: 69116 - DNA, 431 bp, Glycine max
  unsure (1)..(431): unsure at all n locations
attctaaaagtggctacatatagntttttcttctggtaatcaattacatattcttgtgtaatcgantatctgcctttaaagtcaaattcaaaattntcaaattgtttcataaatcaatttagccactggtaaccgattaccagagaggaaatatcatatntttgaaaagataattgttcttaagaaacttttgtaaaatattttctttagccaaacctacgtagcatcaattaaggaatttctgtctaagatcctaactaagtacatcgttcttcttgcatttctgaattcttgacttgaatcgcgctcatctttggcatcatcaaaacttcatatcatatatgcttctacaacatcaaatagtgcactttatgcatgtgaaattacaaaactacccctaatacaaaaactagtctatgttccctaaatac

SEQ ID NO: 69117 - DNA, 368 bp, Glycine max
tatatatattcagtcttccgtacttggcattactctcaggtattacagaaatttctagcgcattgaaattaaatgatgctcattaatcgtaagtagacctcatacttgctgaaaatgatgacgacaccttcggtcccatcgatgtataccgtcttgcttaacgctactaaagcacataaaaagaaccctctcaataggttatttgaggagcgcaataactaaccaaagccagaaactctgcgtcttcgatggtattgcaggcaaccgtctcataatgttatagatactcaagcggttttaatgataaccgtcataaaagccacgacactctaagacggcgtttctaataaccgtctttggatgcctaa

SEQ ID NO: 69118 - DNA, 355 bp, Glycine max
  unsure (1)..(355): unsure at all n locations
ttgcattatcctttgaaatttaagctaaaatggctaaagtaggataaaccaaaaaaggaaatttctgcttntgctaaaactagtaaaccctatcctaatcccctagatggacgtgttaccctttcttggattaagcgtaatcaaagtggacgttgcacaaagtccactctcacagaactaaattacattgtcacttagtgcacaatgtaattctttcacaaatgagaatttaggtcatacagttttcatatctttgccaaactatgcaaaatacaaacatacaactatttatatatctatgtattgcacgaacatcgaggcttaaaatattcaatcaataattaaattctatgtt

SEQ ID NO: 69119 - DNA, 273 bp, Glycine max
tcccgacccaaacccggcatagtcagtcaatgagaacctgtgacgacctaaacaggcgagctcctggcagtcaaccgataaaagaacaaagaccacacagcaaggaggcttgtgtggtggttggccaccaatggatctcgagtaatatatggaatatggcccctgcaatccgatacatagggtgggtaatcaatttcaggcttaaaatgaatgcaatagtaagatggcttctgtaatcgatacaatgatgtgaatcgataccaggcctaaaat

SEQ ID NO: 69120 - DNA, 146 bp, Glycine max
ccgcacattaatggaggacccaaatcacagctgaatgagaagataggggacttcgcttatgcgacccaatggaccgagaatgtccggggcagagacctgggacgcaggggtgcatgccaaaccaactgccattctcccccccgcta

SEQ ID NO: 69121 - DNA, 294 bp, Glycine max
ggatctaagatatcgtggacccaaataaaagagctcacaattaagaattcattaccgtgttttgagtcctatatatggacctaataaaacgagctcgacaagcaacgcatacttaactaagccgatggcctgattatcagaccgaatgaacaaactcgacaattaacaaaaatattactaggtcactgtctgaatatacagacctcaatgaaacgagctttataatcaacacataccttttcaagccatgatccgaatatagattcattgaacgagcctatcaataaaacatct

SEQ ID NO: 69122 - DNA, 118 bp, Glycine max
aaaacgggggactttaacaacaaaccaaaacagtggttcaaaaaagactggagaaatgaagcacaatagggaaaacaaacacaaaatctccaaccaaagataagagaaaaaaggaaaa

SEQ ID NO: 69123 - DNA, 405 bp, Glycine max
  unsure (1)..(405): unsure at all n locations
tatacacanagcaaacgacggacgtcattaatgtaaacaatacattcaaacgcagttcaacgaatcacaaccactagtgaacgtaggagcttatccgaatcagctagcgaatatgatgttcaacaactgtcaagaatatgcatcaaaatcgccggaattaattgtttttcatcttcagggcacattggcgacatattgctctgtggccataggacaatattgttgaacggatatgttctttgcataagaagcctaattgtcacatcaagggtgcagttaacaagtcaccttctgaatttagagacaatataccaactgtagtggtgaaacaaactgatcttcatattatttacattaatgggagtttgaaactgatgcactgacgacgttaaccactactttgga

SEQ ID NO: 69124 - DNA, 278 bp, Glycine max
ccattaatacttttcaaacaatcttcattcataaagcattattaacatctaataggagaaggcaccagtttttaaccgtagcaacacagagcaaaactttcacagtggtaagcttgacagctagagaaaaagtataagagaaatcgattccagcttgtttagtataccctttggccaaccaatcgagcttagtatctatccacagacgcatccattatattattaactttatacacccatctaccacctatacaatgcttatcaagtggtaagggaac

SEQ ID NO: 69125 - DNA, 217 bp, Glycine max
tatatatctaacatgatcatgaagtgtttattattggctaagaaaatataaagagggatgctcccctctattttcagcgaaggaagtgttgatcctaaaacccgagctttgattccctatgatatgaaccctcatggcgcacgggctgacttatgatcgtctaggattaaaccttgatggatgatgctgaaatcgattatcgaaaggatgaaaaata

SEQ ID NO: 69126 - DNA, 387 bp, Glycine max
aattggatgaaggaaagagtggttttcaaaatctgcactctatgcaaacatttgctgttgaaatgtgcagcataacattgtatatgtgcagaaaataatgcttgtgtatggctggttgtcaaaaggagtagacatatggcggtctggacattttctaacagatcacaacggtcaaaatgtacacttatgtactaaagactttcagtaaatttttcgagtcggaccaaccgttaaccgaattgtaatgaaagaaatagtactggcgtatttgtatgtgaaaagctatgaattcgagttgagcatgagaagagttatctgctttccctatttgcttgctttgtacgcatgatgattgatgcggatactcgatgttgtgaacttggaaga

SEQ ID NO: 69127 - DNA, 328 bp, Glycine max
acatgatttaattcacacattttctcggaatgcaaattcaaacatgcaatcatggcgtaataagtaatctactcccacaaaaaaaccaatcagtgggaaactctgcagccttttcatgcctcactacaaaacccgacaaaagaaaaacctaaaaaaaaattagaaaatcctaccagccactcattcacgatttgggggtctattatccatattgaacagacaactgtacaatataagaagccgcaaaatacaatcgagaatagtatattgataccctggataaaggctttctacatatatatttcagctttacataactatttgtatg

SEQ ID NO: 69128 - DNA, 375 bp, Glycine max
  unsure (1)..(375): unsure at all n locations
tctcttggatcttatgcaaatcctctattcatccttctagatcattttgctactcgtgagagggccctttcctctctccagagcttaagctcgttgttaatgccccacagagcccctccgaatttgttctggccatgttcttccctgcgggcccttttggtctcttgttccaaagcctcggtgctggctatatttatgtctctcagatcggcgtgctcctttcgaattctaatatgtgtagatatgaaattttctttgactatttgggctctctcgagttctgtcctgagggcctgaacctcttcgcctccttctgagcttcaacttacacccccttagtgggtctcaaattctggagcncatccacaccttgcg

SEQ ID NO: 69129 - DNA, 354 bp, Glycine max
  unsure (1)..(354): unsure at all n locations
aaactggcctcaccgtgattaaaaatgagaaagaggagctgattcctactcgggtgcagaacagttggagagtatgcatcgactataggaggctgaaccaggttaccaaaaaggaccattttccactgccattcattgaccagatgcttgaacgcctgacaggtaaatctcactactatttccttgatggtttttctggttatatgcaaatcactattgctcctgaggatcaagaaaagaccacattcacctgccccttagcactttngcctataagaggatgtctttctgcctgtgcaatgcccctagtaccttccagcggggcatgattagtatttttagtggattttttga

SEQ ID NO: 69130 - DNA, 401 bp, Glycine max
aaaataaaaagactgcgcctatagtataagaaacacaagctcacggggagcttttcatctgagggggagatcttcctaagatctttaaatagttattctttcttattcatactttctccatgtaatatgctttcaatgaataatatgagaggtttcttattaaaggactctatctcaaagccttatgacgcattatgcccttacatttcacatatttcctctgataagactaacattgcacttaactatcattatatatatcatatatatgtcttcagatttacattagtatccgtttgacatcatcacacaggggagattgttaactcaaaacacacttatgtcttcaagaaaaatcaagactcctatatattctgattagatgcacataaatgcaaata

SEQ ID NO: 69131 - DNA, 445 bp, Glycine max
  unsure (1)..(445): unsure at all n locations
ctcctttctcagaaaatcctaattctttttgacatcatcaaaaacntcatgatttacattttctgtatacacacgcattaaaactcttctttttgatcaacaccgttatataaaactctattcctgttcaaagatttcttttccgttgttcaacaaacactcgtggtttatacaaaaatntatgtatatacactcattactcacacacaagaaattcttttcacacattattttcacacacaaaatgtttgcatacactctntacatattaaaactctgttcttttctttatatatagacatgacatttgtncacaacgcctctttcttttttctattctagccgtatcatgattattttgtggtttattttaggacgacgttcctaaaggaaactctacaggtttcggaattccacaaacattatcgacgataacaacacaaca

SEQ ID NO: 69132 - DNA, 396 bp, Glycine max
tttatatggctaaaatcagagcttttattggaaaaagaaacggagcgcgctattcgtgatttcttggaccccaaagaaaaagtgcaatgtacaggaaccgcctttcggcatttattggatttttgtgaaatgctgaaacggaaggcaagaccaatcatgctttgaatagactgtgatctactgatgaataaatctgctgaatcataaaagggggtagggaccttagcaataagccttggatcataatactctgacatatatatattctgcaggccaaaattcatgttgtagcattgagatcgtagcaaatagaaattaatgttcttctccaaaggtgcaaaagctacctcaccacccaataataggtttctttggtaagaatccagatcagaaatg

SEQ ID NO: 69133 - DNA, 355 bp, Glycine max
aaattactaaaggtgagacatgatattaatatgtccacaacaatcgaacttaaaaatatgggttacattatgaaagaatgacacacacacctgggatgatgtttcacaatgacccaataaaaagtctatcacaactttcatcaacaagtgataaaagcataagccagctttaaaaagacagggacctcaaaaaacacaaacactagccaggatttaattaatttatgtcttatgataaaacaatagttttccagtgctaaaaggcaaaaagcatgtaacaatttgttcctagatagaataaacacaacagggcacacattttagcaatgcatgtgaggagagcatcatcactatt

SEQ ID NO: 69134 - DNA, 418 bp, Glycine max
tgacgaatatcaaggacttttgagagtccatagtatattcccatgagacacatagccataaagtgccttaactgatgaatggcttcgcgtataggactaatgttctcaaaagaaatcgattgagatttatatatcctccctaaaaaggggcaagagaaatcaacacacattattctgccagacagataatttctacactctacactcacttgaaggtatgtgtggtcttaaaaacatcttctacttttgttgtctgtcttcataaaatattaagagacaaacccgtatactcactatgtctactggggaccaagatggctacatgaaacgatgtagacaacataatccccgtgtatatggcttctatgcaaaccttgaaaagagaaataattgagacatttttggataattacaaata

SEQ ID NO: 69135 - DNA, 284 bp, Glycine max
cgaatgaagaccgtcgaggaactgttgaaacctttgcgagatacctcacggagcacgctaccgagatgattcggaagcgcctcggctaagatcttcttcacggatacgacttttccaagcaaattcgaaagacagagatgtgccacacgtggctgaccccttgcatcgtgctttcctcccctatttataacaaaaaaagggaggtggttgccgcccagctcgcccaggcgagctcagctcgcccaggcgagctcagctcgcccaggccagcagggatgcttcct

SEQ ID NO: 69136 - DNA, 397 bp, Glycine max
  unsure (1)..(397): unsure at all n locations
acctatgatcatctgaatctntacactatcattttatatacaaatccatattatgttctaccacccaaaagtgccatatacatgagagcatttcagagggacaatgacaaagaatgacacagtacaatcaaattatttgtaacataaaccttggggagaataggtttcacaaatctttcccagtttttatgtttatcaagtacacatatngatacgctcatgaaagccatgacataaaaataaacgaaaataaacctaagtagttagagtatatatagaactagctaagtctggttcaatattagttaattactgaattagtttggtggctatcttaaaatcagaaaggaagtataagatcactcattctgcattgttacttagtgtacttacccaa

SEQ ID NO: 69137 - DNA, 359 bp, Glycine max
acacactcttagatgtcagagtaaatgcatcgtctctaaaaacccccacgggaaattggggaaaagtagcatgatcaccatgcaagaatttagctttttacatgcaaaacccaaaccctagtagagcaataatcgtagcagccatcgagctctaataaaatgagttatgtctctatcaacaaaaatctttctataatcaagaaatgaactcctgaccaacatgtttaagaaattcactatctatcgatcgtggtaatattgtggtagtgtgaattattaatcattcttcgataataatctttgtgaaaactttactaacatcttataaaagaaactcttatgattattatatatattat

SEQ ID NO: 69138 - DNA, 296 bp, Glycine max
ctggtggggaaagttgggaggctgggactagatgatcagtactgtttatgaaatgatctgtgggcgcacctattggttggtcataccctttggggcatgggaaagtgggaaccgggttgcatgggctgttgagaaatgatcatcaggatgtccgatgaaagaatccactgcggtttaaaaatctgcagcctgtggtccgaaactttgaactcgggcgcgatgaagaaaagctggcatagtttatttgtaaacttgtgattgtgtcgatgtgatgtggagaaccaacttttctggct

SEQ ID NO: 69139 - DNA, 410 bp, Glycine max
  unsure (1)..(410): unsure at all n locations
gtggttctatgtggcgatcgggcaatggtgcacaacatgtttttcacatccacaaatcgcgcataaacccaccatcccttgttgcccacctgcagctgagctcacgtactcccacgtagcccatatcctcaattttctcaacaccgggtccccatcaatcctcccaagcttccccaacatccaagtaaatcaacactcacatagcacaaactatcacagccaagaaaatagggcaaaggcagaaaactctgcccaaaacaccaaccanaatcacagcttttctcacttaaagacctcagtaacaattccttcgttccagttcgttaaccgttggatcgacatcgaaaatttactggaagtctctagtacataagtctacatttggacgcgtgggatctactagtaaacat

SEQ ID NO: 69140 - DNA, 482 bp, Glycine max
  unsure (1)..(482): unsure at all n locations
ctataaatctcagcttcaggtgcttatcgactccagattgctgcanagaacgacatagatctgtatggcgatctgcagaagaacatagaccacagactcttgctataggtgcagatgcaagatttctgattcatggcaagctgagttaccagagtgaccaatgcatcaagtattgcctcaagctctttattttcagcagatgaagatgaatctatggccacctcatggactcctcntaagacaataacatcatttcttgcactagaatgttgggagttggaagccatcttctcantcaaattcctagcctcaacaggagtcatatcaccaagagttccaccactggtagcatcaatcatactcctctccatgttgcttagtccctcatagaaatattgcagaaagagttgctcagaaatctggtggtgaggacaggttgcacacaatttcttgaatctttcccagtactcatacaagctctc

SEQ ID NO: 69141 - DNA, 164 bp, Glycine max
gagcgtgctcgatatattatacgcctgaatcgaacctcagtgtcaaaagttatgaccatttgaatttctttagagcatccgttgttcattttctagcgtctctatatgtgatgaaccttaatcagacctccgagtgaaaagatatgaccatctgaatttctcga

SEQ ID NO: 69142 - DNA, 282 bp, Glycine max
actcacactcgaccctctctcatactggattctatgggatgattcctcctcacactgggaatctctccaattggtgtatcttgacctcagttcaaatgttgccaccgaacagtacctcctcacatcgggaatctctctaagctgcgatatcttgacttgagcgaccaatagtttgaaggtatggcaatttcttctttcctttgtgcgatgacctactcgactcacctcgacctctctgatactccattcatggcgaaaatacatctcagattggaatctctc

SEQ ID NO: 69143 - DNA, 213 bp, Glycine max
gggggggggagggaaaagaaagagaaaaaaagaaggaaagaaaggaatgatgagagaggagagaaaggagaaataataaaaatgagaaagagaggggaaggaggggaaaggaagggagtaaaaaaagaaagggagaaaaattgaaaagagaaggaagagaagaaaataaagaaaaaaaaagaaaagagagagggggggaagggggagaagaaa

SEQ ID NO: 69144 - DNA, 399 bp, Glycine max
ccaaaaacccacttttggaagaggacctcttttgattgattcttttaaacccgaatgatccaaaatgtatcatacgctttgaacatggacggtaatcattgaaactttaaatcatttgtacggaatgataccccatcgtaatcataccaagagtaaaactcttggtaacatgttttgagacaaaacatgtgcgtctacattttgagaaaaacttttcatacttagcttgattaagccttctcttgattctcgaatcttgagtctcgaatcttgatcttgattcttgagatctctgaccctacaaccttgattcttgactcttaactttcttcttgagccttgaattcttctcgattctatctctgacgcttgaattggtcttgatatatcttggatatc

SEQ ID NO: 69145 - DNA, 318 bp, Glycine max
  unsure (1)..(318): unsure at all n locations
agcttgagcttatnttagatgaaccaataagaaatacanacttgagtttaaagaanatgttgtcattggccaaaatagattatttagtgaggattaacctatctagtacccactttctagaataatatctgaatatgcccaaatatttttatgttcgaaaagtaatgagatattttctttatgattcaacttaaagatagaacaatttaaagtaaatatttggaatcaataaaatgttgttggcttgaaataattatacgaatannattgtttagataaattggatgaatgattctttaccattattatttactagtc

SEQ ID NO: 69146 - DNA, 330 bp, Glycine max
  unsure (1)..(330): unsure at all n locations
aatatttattgattatgaanaacccagggtcgttcatcctctttaatatttctttggctctcatcctcttatcttaatcctaatatttaattctggatgaataactgaaaatcacagaaaaaaaagaagatcggacatcttcttcttctctatttttaaagtaactatcantctcaacattcaaattgattattcggaagaccatcagatccatttttccggggcttattacaacaaaactgacaagaaatgctacctggtttgaaagtaacattgacaccgttttccaccacaagcttcttaagtctcacacaccatatgcaaatccaa

SEQ ID NO: 69147 - DNA, 433 bp, Glycine max
  unsure (1)..(433): unsure at all n locations
taagtcacctgcggcatgcaagctgtgtgaagacatcgtgtgtaaaggagcggttcangttaatgcatactgcanttttttaaatattgtgaaagtttctatttacgcagccaagcttacactgttatacctattntcacaactgcataattaaatttagtcaaatctactttagaattttgcatacagtactccagttttgtttagagtttaaattgctcacataaacttcattgtttatattttcaaaatttactttaaatgttttaataaattgtgaaaaacttaaatagttcttataatgtgggtttgagcctcttaacctcaaaagttaacttatagggtgaggcttgtccttcacttatatactcantctatcttggccttatctctagccgatatgagaacttatgtttcttccannntagtttaa

SEQ ID NO: 69148 - DNA, 308 bp, Glycine max
  unsure (1)..(308): unsure at all n locations
ctaagcttctagccaatggacttaccttgaataattcctttgatagcctctctgagcctatattcccctttctttgttttgaagctcattacaagccttaagtgaaaaaccatgatatcaccttacccttaaggaatnttggagctttggaattgttttgggaataagctgggaataagtgtgggggggtatgtttcattggaagatatgattattaggcatgcttacatgcttatttcggcctcgcatgattacatatattgctagttctttcttaacttaaatgttgtctgtaaatcataaattca

SEQ ID NO: 69149 - DNA, 425 bp, Glycine max
  unsure (1)..(425): unsure at all n locations
agcttctanactntatacaagaatgaagctctgataccacttgttagacaagtggcctcagatatcttaagaaggggggttgaattaagatattccaaactacttccctaattaaaaatctatttcactttctattcaagttataaattcccttaacaatgaacttcttaaatattgattcaaataaaacaatttgaatatgaatataaagcaattataaacaaaggagtttaagggaaaagaaagtgcaaactcagaattatactggttcggccacacccttgtgcctacgtccagtccccaagcaacccgcttgagagttccactatcttggtaattcctttaccagttctaaacacacaaggacaatcttttctttgtgtttagaatctttacaacaagagaccctctgtctcttaatccct

SEQ ID NO: 69150 - DNA, 486 bp, Glycine max
  unsure (1)..(486): unsure at all n locations
ttcaacatccaaacatcatgcactatcaaaaacaagaaaacagggcagaggcagaaaactctgcccaaaacacaaaccaataccacagctttccttactcaaataccccagtaacattctcttcgttctaattcgttcaccgttggatcgactctaaaattgtactggaggtccctagtacataagtctacattntgaccgttgggatctgctataaaacgtccagaaccaaatatgtacacccctttccacaaccagccatacacaacattgtctgcacaaacacaattttctgctgcacaaaatatgacagctntttgctgcacanaatgngcagatttcgaaatcccccttaccatcatccanatttgcccaaatgggatcctacaagtcctaaatcatgtataaatcatatctaaaccanagaacagcttcagaccaaagcaactcanaatctaggtatctaaaacccctcaattaatggat

SEQ ID NO: 69151 - DNA, 482 bp, Glycine max
  unsure (1)..(482): unsure at all n locations
atccttaagtcacctgcggcatgcaagctnnttggagtagaaacatgggaccaactcattntatttcataaaagctgtatctagtcaaggtctgagagaccatacaagtttcctagcgatttctaattatgtgggccattaagtctatcatatgctgacaatagccgagaagcccatgaatttcttcgggggcggagtaggtgtctgccatcgccttggccttggctaacaatcggngaagttcctgactcccgttcaaggtaagagcaaaccgatccatccacatggttgcctcttggtgtaaagagacgatcacccttcctctagcttctttttccgcgtatacttgggcatactcgtccgcgatcctatgctcgtgggccgtggctagacctaactcttcttggtacttggcgatgatagctagcatgttggtctncatctcgcataaacgctgagacaagcttcttttggaccttgac

SEQ ID NO: 69152 - DNA, 387 bp, Glycine max
  unsure (1)..(387): unsure at all n locations
ctgacacctgcaatacacatgataataaaaatccacccacatttgatgtatataaggtcaacttagaaggaanaacatgaaattcaaataaccggannaagttgggtggtaagggaaagggaacaaaggaaaaacaagagcatcaaaattctaaataggcatttatgaacatactaatgacattgttctaaatctaaattatagaaagttgtcagataaaagataaatgcatttatgagcattgcattctacctgcatagaccattaagtctagtaagcatggtttctcctcctagaaacataactctgacttgaaaacctggaaacatgtactaaatatcagaattgatgaattcaggaatactcataacaaaatgtcagtaagag

SEQ ID NO: 69153 - DNA, 423 bp, Glycine max
  unsure (1)..(423): unsure at all n locations
agctttgtctatgtgacacaaggggactcctttcacttgcagcccttgctggtggctcgtacttctctccctcctttctagggcaattcttctcatgtcgacgcgcgtaggctcatatcccaatccaaacctcctacggttctctacgaactctactagacttgccacgccattcctatttcggcccaaacccattccgggttcatatacatgccccaacatcacccaagctaccatcaacgtggcacttgatgagggcggctgtactgngggagactccacgtaagcattgctcataacttctaatgcctgaaagtatgtttccaagggctcctccacagtctccacataaggcgtagaagaaggacaactcacaagaatgtntttttctcccaaaactggtaatcaatgcccctttaccac

SEQ ID NO: 69154 - DNA, 406 bp, Glycine max
  unsure (1)..(406): unsure at all n locations
gggacaatgcttatatgtagaaatagctattctttntcctttatctttgttcaagagtttggtaggctatggagtntgtagcatgtgcagatatattgtgaaccaactaaactatatattatatattctatacattttttttttgctaagcatatgtacttaccaaaattcggagctgacacacgttagggtgaacgtgactaaggtggatttctgaacttcgcacgtcagactggaaaaagacctttgttaagaggacaaacaaggagacctactgtcgcaacctacccttcagcgggaggacgagacaaaataaaagcgcgtccttcanaagaagaaaacgtgtggagtcgccactgtcatacnctaatttcatccgggagtatttgttgcaacatgcggattt

SEQ ID NO: 69155 - DNA, 434 bp, Glycine max
  unsure (1)..(434): unsure at all n locations
cgcccaatcagatgatactcaaacacacacctncattattcctcaataagaaactccctacactttcattaacctatatatttattgattatgaaaaaccaagtgtcgtttcatcctttntaattattctttggttctcatcctcttatcttattcctaatatttattcttgtatgaataattgaaaatcaaaagaaaaaaaaaagaaggaatcggagcatccttcctccattctactatttcttaaagttaaactatcaattctcaaatattcaaatttgataatccaggaagaccatcagatccattttccgtggccttattacaacanaattgacaagaaatgctagttggtttggaatgtaagcattngatcaatccgttttcaaccaagcaagtcttctctcaagtctcaacacaccaatatgcaaaat

SEQ ID NO: 69156 - DNA, 346 bp, Glycine max
  unsure (1)..(346): unsure at all n locations
agctntgagccaaaatcccaactcaccatatactttgacccagggtgagaatgttcattcttgcactcgaaagaaaacaaaaaaaagaaaaagaaagttcccgatcaaagatcggaagaaaaaaaaagaagaaaattcccaatcaaagattgtgagaaagcaaaaaagaaagaaaaattcccgatcaaagatcggaagaaaacaaaagaaatatacaaaaaggtctttggaccagacaatatctgaacaatacaaatatgtcacaagtaaacaagaagaggaaggaaaccacgacttggagtggtcctctccctttgatcgccaaccaatatcctgtgcgctagcg

SEQ ID NO: 69157 - DNA, 393 bp, Glycine max
  unsure (1)..(393): unsure at all n locations
tcagcacttctgtagggtttcagggctttccataagctctgattaatctgccatatactcagccagtattaggcctcatgagctttcgcatattcagcagcttattggatttagcttgngtgacttcccttntagatacttgggtgttccccttttatcatctagattaaatgtatgtcattatgctcccttgctttccaagattactggcctgattcanggatggagcaagaagtctttatcttatgcatgtaagttagagttgatcagagcaggtattcaaggaatagagaatatctggatggggattctcctttgccgcaatctgttctggaccggatcaacgcttcgtgccactatatctgtgtggataacagtgtcgcttagacaccc

SEQ ID NO: 69158 - DNA, 418 bp, Glycine max
  unsure (1)..(418): unsure at all n locations
agcttgtagatcaagtgaccagcggatgttgacttctcagagtcgacatgtccaatgacgacaatgttgatgtgnaaccttttcttacccatgattacttaaactagaatcaattcacagaaatacaagtcagaactcaaaatacatataaattaaactatcacaaagccgaataagaagggtaaggtatactccaacttcacacatttatagattagcaataacaaaattgtaacttcatattacaaaagtttcacaaggaattaaaaaatcgcctttgctggatccagatatggtcgcatacatagtaaaagattaagctggataacatgtgaacaaacacacaaaaagactatcgacggttacatatctacaagactccttcaacatgcgtaaaaaacttntaatcctgttaaac

SEQ ID NO: 69159 - DNA, 372 bp, Glycine max
cgcttccattttaagtcatcagagtcacctcccctatgccaacttttcttgcttgtgacaaggatgcccgtcttcactgtaccaaaatcccctttttgatatgacgagaaaaatccttcataagtagtaacatggaaggatgctctatattcaattatccatgtaaaataattagatgcagtatttaaataatattcattaccaataagaaaaacattctcatcgcctgatgtcacaacagtagtggttctaccttcattcttcttctattggtcaatttgactagcatggacagttctagtcttctaagctctcttcaagaatctgcactcaaactttatatggcttgaatttccacagtagtagcaactc

SEQ ID NO: 69160 - DNA, 398 bp, Glycine max
agcttagacgtcacagtgccgatgttgtagagcctccaccatggcttatgtctggtgatgcagagtatccatgatctagctcagcatcgatccatcatgagcatggaggcatttatgacccaggtgtcctagccaggagtccaacattctcttttggggggaggtgaggctcctataacccacgagccgcagctagaggcacaacccacgttggaggtcacactataggccactccacagacttcacctgctgctacatcattagtggaggtctcagaggatgaggaaggcatcgaggacactgattatgtagctgatttaacagcggcgcagagcacccgggatccctagcccactacagcacaagagacaccatagctaacctaggatgccccttc

SEQ ID NO: 69161 - DNA, 368 bp, Glycine max
  unsure (1)..(368): unsure at all n locations
cgaactacccgagcactcgtgcattcatccaatgtttcattgttcccttctaaagccctgtattggaccactagacacggtgcagattgagaaactgccaccaagggcggttgataatcagccagttcccatacccttggctattctgggccacaagactctcccgactaaccacgggccaaagcagctggtcttagtgcagtggcagggacttcaccctgacgaaacgtcgtgggaagactggtcacgctttaagagctntatcaccttgaggacaaggtgttgtttgaagcacgcgggaatgttacaagtagcagctatgaaccgcaagcaaccaggcccaacagtgataacagcaaggagttagt

SEQ ID NO: 69162 - DNA, 404 bp, Glycine max
  unsure (1)..(404): unsure at all n locations
agcttataagaacacaatagcctcaatcatttcctaatatgcatgtgaactaggaagcatcaacaagaatcaagccaatgctattgtgcaagcaatccatggcgcaaaacacaccanacgattatgatgatggatggctcagattctcacaaaggtaaactcatcactttcaaattgagctttctaaactatcatgacatgtagaggagaatcaaggatttcaagtcacaaaatgtcaagaacttttattttcaaaacaattacccatttcttgaacatatttataattcatagaaaaacatgcacaggcgtacatacacacacaattgacccgaaatattaaactaaaaatccgacgaaactaacaacattaacanattaacacaacttacaaattaaccaaa

SEQ ID NO: 69163 - DNA, 429 bp, Glycine max
  unsure (1)..(429): unsure at all n locations
ggggtgatgttgcgcgtactgatgggtaccatgaggtgtntgctgagagttgacccatgcgggtgttgaagagacggcatgggcctctccttccttcctttttgcccctgttgccccgattcttttggcgttcacgtatgtggaggaaacgtaatcaaactttcctctcttcaatcccacctcgattctttccccggcaaacaccagatccgcaaagctggacggcatgtaacccactagcttctcatagtaaaacactggcagagtgtctaccatcatggtgatcatctctctctcaaccatgggaggagctacttgtgccgccaaatccctccatcgctgcgcatattctttataggtttaccctctatctaaacatattctgccagtgagtacgggcaggagccatatcagaattgtactgatact

SEQ ID NO: 69164 - DNA, 356 bp, Glycine max
caagcttggagtttccaagtgccaattcgtcttcttcttttgtccagtcttcttctgacttcaattcatcagtgggctttccttctgtgtccagcatcttgggatgttcccagcctttgatgacagctttccaggttctgctatccagtgatttgaggaaggccaccatccttgctttccagtattcatagttggttccatccagaattggtggtctgttcactggtcctccttctttctccatggtcatcaagaattatctccctagatctcactcagtgacttcgagtgcctgctctgataccaattgaaattctgatactgtggacagatgtcgtacaggatgtcacgacatc

SEQ ID NO: 69165 - DNA, 464 bp, Glycine max
  unsure (1)..(464): unsure at all n locations
ctaagcttgccttcactaaccttgtctgtgactcaagataaccaattaaaatgttaataattagatgtgtactataaaatntaaaatgtgcatgatattaactaagtagtgtaaatttaaacattgaaagagaaattaataaattaaactagctggcaacattttttatttgttggagcgggataatgaatgacagaaggtgaataatattttatataataattaagtacaatactggactcaatgtccacaaggaccttaataaanaaatattttacacaaaattgataaatggggcttgatggagctgcggatagtgtcgatcgcataacaaacatgatggtgtttcattntgcttgcagagaacgaattgatgaatatagcagattaagggtcataatattatatgacatgtatgagattcatcttaagtgtatatgcaaagcaatatgcttaatttaatt

SEQ ID NO: 69166 - DNA, 438 bp, Glycine max
  unsure (1)..(438): unsure at all n locations
agctnngcattggaattgcgaaagccccactccatcattaggattagtacctgacatctcanacaaacaaatcaaacgtaacatgacaattatagttgctgtttgaatacctcacccactcaagtgtatcacacaattatggcttttctctaatgaaacactcttgccttttaccactctaattccccttgagttcttaggcaattcaagagattatggccacaacaaagaacaattcaccaatatgtgtaaggtaaggctagagagacaaggaaaaggttaaccaagaaaaaggctaacaatgtttttaggcacaaatgaaggaaataaaattcagaattaggaattcaagaacaatccttcatgcaccaatatataccttaagagatntttttttaaaagtcttcagcatgaccattcagccatntttttttttat

SEQ ID NO: 69167 - DNA, 399 bp, Glycine max
  unsure (1)..(399): unsure at all n locations
tctttggaccttgaacaagcaactaactcctctntcagaaccatgctatgtgctcgtgactggtccctctcttcccttcgcagcttgagttcactattgctaccccatagagctccgcgaaatttattccggccatactcttccttgcgagccctcttggtctcttgttcaagggctcttgcggtaattgcattctcttcccgtaacccggcacactccttccgaatgtgtgttgcggccaacttgaacttctccttggcaagtttcgcctttcctaactcgcttttgagagcttggacttcttcgtcctcttgcggtgcttcaaaactctcttcgctgacgacttttaacttggcgagccaatctaaaccttgtatatgaactttcagccattcatgg

SEQ ID NO: 69168 - DNA, 425 bp, Glycine max
  unsure (1)..(425): unsure at all n locations
agctngatgtgagaaagcgtggaagagtcagtcttcctacttttgtttgttgaccacagagtggtacctggagatatgtcgcggnggtcaggagaccttgnggacgtcaagtggggtgctattgcccaaaacgaagcttgaccaatcccgacccaacccgggcataatcagtcagtgagaacctgtgacgtaactaaacatgcgagctcctggtagtcaaccaataaaagaacaaagtccacaaagcaaggaggcttgtgtggcggctggccagctatgtatcttgagtggtatatagaaattagcctctggtaatcgattaccattcgtgggtaatcgattacangggcttaaaatggagacaggaagttaaaatggcctctggtaatcgattaccaatgggtgtaatcgattacacagagtga

SEQ ID NO: 69169 - DNA, 480 bp, Glycine max
  unsure (1)..(480): unsure at all n locations
tgacaatgtcatatgataaatgaattgataaanacgtgagaacttatcatagtatttttgtaaaatttagaaaacaaaattaaaccaaacaaataaaagagtatttaatcttatatttatatataattattnttttaaaaatgtataaatgatggttaagataagcatggcaatggagcaccacgagaatgaatgttattacatattcttgttccctaacatcgtctccatcctcgtctcagattctcgaagatgataataaacaaatatatcagagagaacatgaatattaataacaacaatagttatcatagatacttacataagataattgtagatgtgtagaacttagttaatcatgtaagaaatttattgtcactaataattttatttcctgatattaacaaaataaatattattaatatttgtatcatccatacctgctatattaagctaaatagaggaagacctctcattgaa

SEQ ID NO: 69170 - DNA, 402 bp, Glycine max
  unsure (1)..(402): unsure at all n locations
agcttaggaacccaaactnttaagcttcaatgcatgaaaacgcactcatgactagggacccaaaatttggttntagaattagaaaagcatganaatagggacttgtttgtaagaatatgggctgccccatgattggtactttgcacataagcaatgtgggaaatgcttttcaatggtgtgaaggtatgtgtgtaaatataaggggcataaaattcctcgccaagtatgaataaattgttttcctaaatgaatgtatgatagcatggaatgcccttctgaatgcaaatgtgtgcaggatgtaattagctctccaatatgcatataaataaataggagtgaaacaataaaaatttgtatggtgtacttcaaatgtacgtanagtagttatgatagcaaaatgtt

SEQ ID NO: 69171 - DNA, 483 bp, Glycine max
  unsure (1)..(483): unsure at all n locations
tcatgctgaatcaagaatgattcanagatgttntgatgataactttgatgataacaaaagatgatgacaaaggtgatgactaaaagctcaaaggtcaatcacagaatgagttcataatgttcaagatggaatcgagaacaattcaagactcaagaggaacagttgaagaacacttcttgattcaagaggaaagttgaattcaagaatcaagattcnaggatcaagcttcaagaattatgatcaagattcaagattcaagattcaagaatcaagagaagacttaatcacgataagtatgaaaaggatttttgaaagactgagtagcacatggattcttcacanaacatgtgtaccanagagtttgtactctctggtaatcgattaccagattgtngtaatcgagtaccagtagcaaaatgcttttgaaaaagtttcaatttgaattacaacgttccattaatntcaaaatctattatcgataca

SEQ ID NO: 69172 - DNA, 296 bp, Glycine max
  unsure (1)..(296): unsure at all n locations
ctgcagcttatatatatcgatacgctcgaaattaaactatcggtttctgtctaganattcaaatggccataactcttcacacggatgtccgattctggcgcataatatgttgagaggctctaaattgaacaacggaagctcttgagaaattcaaatggtcataacttttcacatcgatgtctgattcaagattatactatatcgatacgctcgaaattaaacatcggaaactctcgagaaattgaaatggtcataactcttcacacggatgtccgattctatcgcataatatgtcg

SEQ ID NO: 69173 - DNA, 394 bp, Glycine max
  unsure (1)..(394): unsure at all n locations
tgaatcggacatccgtgtganaagttatgaccatntgaatntctcgagagcttccgttgttcaatttcgagtgtcactatatgtgatgcgccacaattggacattcgagttaaatgttatgaccatttgaatttctcaagagcttccgttgttcaattctgagcgtctcgttatgtgatttgtctgaatcggacatccgtgtgaaaagttatgaccatttgtatttctcaagagcttccgatgttcaatttcgagcctctcgacatattatgcgcccgaatcggacatccgtgtgaaacgttatgaccatatgaatttctcgagagcgtccgatgtttaatttcgagcgtgtcgacatattatgcgcccgaatcagacatccgtgtgaaaagta

SEQ ID NO: 69174 - DNA, 392 bp, Glycine max
agcttccttgagaaaattcctagagaagctagagcttagctacacacacctctctgataactaagcttgcctcctttagatgagaagctagagcttagctacacaccccctataatatctaagctcacctccatgccaaaatacatcaaaatataaaaaaagtccctactacaaagactagtcaaaatgccctaaaatacaaggctaaaaccctatattactagaatggccaaaatacaagcccaaaagaagaaaaaacctattctaatatttacaaagaagagtggacccaatcttggcccatggactcaataatttgatgatatacaaccattgagtggccgcttcgagatatttggcaccctttggtgcacaatatgtgagggcccgag

SEQ ID NO: 69175 - DNA, 421 bp, Glycine max
  unsure (1)..(421): unsure at all n locations
cttgacttgtgtcatcaagagattataaatatgtgaccatgacatgtatttaaaagaatgatctatctttcattatctatcgttcaatcttctctcaacatctttcaacaatatatctttcaactttnttctacagaattttctgattcatttctcttcatatttctaaaagtttttgttcaatactttctctttgaagaaaagttctttgatcaaaaacttgggttattcatctttcttattctcttctccctctgccaaaataatagaaggactaaccgcctgaattcttttgtgtctcatttctcccttacaaaagattccaaggactaaccgcctgagaattctttgtcccaacacatcggagggtacatcctctctggtacaagtagagggtacatctacttggaaaatgtacact

SEQ ID NO: 69176 - DNA, 372 bp, Glycine max
  unsure (1)..(372): unsure at all n locations
acacatatactgttttcgattaccagagcagatctttagaagatattctcaacagtcacatctttttatgtggatctcgaatggctatcaaaggcctatatatatgtgacttgagacacgaatttgctaagagtttttcagaacaaatatgtcttatcctcttaaaaagaaaaatcgttgtatcctcttacaaattccttggccaaaacacttgtgattcaataaggaattatgtgagtgctcaaattgttcaatctatctctttcaagagagaantcttctgttttcttcttcattctgaagagggattaacagaccgatggtctcttgttgtgaaagattctaaacacaaaggacgcatgccttgtgtgt

SEQ ID NO: 69177 - DNA, 360 bp, Glycine max
tacccacatgaggatgtcccatatgttcttatatctggactgatccacttgttgcccaagtttcatggtcttgcaggtgaagaccctcataaacattcgatagaattctatattgtctgctccaccatgaaacctctagatgtgcaagaagatcacatgtttctgaaggcatttcctcattctttatagggagtggcacaagactggctatattaccttgctccaaggtccatcacgagttgggatgacctctagagaggattcttagaataaaaaatttccctgcttccaggaccatggccatcagaaaagatatttcaagcattatgcaactcagtggagagagcctatatgaatact

SEQ ID NO: 69178 - DNA, 432 bp, Glycine max
  unsure (1)..(432): unsure at all n locations
agcttctannatttatacaaggatgaatctctgataccacttgttggacaagtggccttagatatcttaagaagggagggggttgaattaagataccacaaactatttccccaattaaaaattttactcttctttaatgaaaatttcaatgcactcttattatgaattattgtaagataattcaaactaaacttccttaatgccaaagataaacaacaataaataaagaattttaagagaagagaaagtgcaaactcaggttttttactagttcagccacgccctgtgcctacgtctagtccccaagcaacccgcttgagatttccactatcttgtgaaatccttttacaatctctgaaccacacaaggacaacccttcctttgtgttcagatatctntacaacaagggacccctcgtcccttaatcacttt

SEQ ID NO: 69179 - DNA, 462 bp, Glycine max
  unsure (1)..(462): unsure at all n locations
gacctataaaactcaagctgtgctaagcccattgtgttaatctctgtgtgcctcanactgtcagttaccttcagaaatataagaaatgttattgaaaactgaggtttgaggttgagtaaaaaaataaagctaanatatgtttgtaatttctaataaatattaaattttgtgtttactacctagtaaattctttcttcttttttattacacaatacaaatgttgtttagtcttcaaccttttttttacccatgataaattaataaattttattttttgttccctaataataacaaatgagaaaaaaagatataaaaaaatagatacaaaattcaataatatatcaagaacaaaaaaatgttaaaaaataaaaataaattattatttcattataaacataatgaanaacatattaaaataaacataaaatttagatagttattatggatcgaaatatatttaac

SEQ ID NO: 69180 - DNA, 303 bp, Glycine max
  unsure (1)..(303): unsure at all n locations
agcttcgccttcccacgcattctgcgccaccatctcatgctntggctgccttctcnttttttnttttttttctaaacgcgccacttgcgccgattataatgcattntgcactcgtttttggtttgaaattgataatagttttgaaacatgttcgtgatttctgtcttttgccgatgaatttcgagtgcgttgaacttggttgtaatagaaaatggtaatagatttctgaatgtgcgttaattcgtatttcgttggttgaattatccgtctcaagaattagcataacaggttgaaattgattac

SEQ ID NO: 69181 - DNA, 463 bp, Glycine max
  unsure (1)..(463): unsure at all n locations
agatagtagtgtaactngtgagtgtgtttcctcatctaatgcagctgggggcctgctgtgtattcggaacaatgaatctttcttagtataaaggagggcagtggggaggggtttcataatgttagaaggtgtgtgggttaaagagaataagaaggttttcattattaatgtctatgccccctgtgatttacaggggaaaagagactagtggaatgagctactgcagttgaaatcctctcatcaagatgagttttggtgtgtcctaagtgacttcaactcgataagacatcagcatgagagattgagctcatctcagacagtggcaaattcatctaacatgtctgagtgtaattcctggattcagatatgatttagaggagttagatctattgcgagaaagtcacttggtgcgacccaatggagtgcctgacaagctgacatgttctccatctgataatgctgt

SEQ ID NO: 69182 - DNA, 362 bp, Glycine max
  unsure (1)..(362): unsure at all n locations
agcttgagatgaggaagtgttgaagggtgaaactttctgctnttattgtcgaccacagagtggtacctggagatatgtcgtgggggtcaggagaccttgtggacgtcatgtggggtgctattgcccaaaaccaagcttgaccaatcccgacccaacccgggcatagtcggtcagtgagaacctgtgatgtacctaaacaggcgagctcctggcagtcaacagataaaaggaacaaagaccacaaagtcaggaggcttgtggtggctggccaactgtgaatattgtgtaatatgtggaatatggcctctggtaatcgattaccaagggtgggtaatcgaatacaaggcttaatattgaagaca

SEQ ID NO: 69183 - DNA, 408 bp, Glycine max
  unsure (1)..(408): unsure at all n locations
cgtccttggtttagacatganttatacatgatttaggacttgtatgattcaatctgggcaaaattggacgaggtcaagtgtgatttcgaaaatctgcactattatgcagaattttgctattgaaatgtgcagcagaattttggctttgtgcacaaaatgatgtgtatttgctggttgtggaaagagtactacagattgtgttgtggacgttttctggcagatcccaacggtcacaatgtagaattatgtacttgggaccttcattaaaatttttgagtcgatccaacggttaacgaattggaaaaaagagaatgttactggtgtatttgagtaacgaaagcggcggtgttggtttgtgttcttgggcagagtttctgccttgctctgtntcttggtttgatagtcatg

SEQ ID NO: 69184 - DNA, 391 bp, Glycine max
  unsure (1)..(391): unsure at all n locations
agcttccattgggtgagttttgcttccctttcactctntaattcactccccacaagtaagtgcaatttcccttggttatttggctctccattgatgtgttttggtgctttagttgctcatntttgcaaaattcgtgaaacaatttgcacctgaaatccatgcttgttttgtggagttgaggatttgaatgagaaggccttangcctatgttgtattctgaagcaatggggcatgccacattgcccccattcccttgcaatttatgtccaaacatgcgcccatcaagtgcttggtgaaatgccccaatgatatnatgaatatgatttgcanaattgggatggtggnngctgtttatgtatgtagagacagcatangaaagtcaaaatagatg

SEQ ID NO: 69185 - DNA, 489 bp, Glycine max
  unsure (1)..(489): unsure at all n locations
tcagaccaaagcaattcanaatctaggtatctaaaacccctcaatttagtaggttttcaaggtttgagaagtgaaaatgagaatgaggtaattntggagtaaactctcatctcaaacaagtctataacattaatttaaacttgctcaaactggttttacgatgaaaactccaccgattcaaaatttgacccctcaacactcaatttgccctagaaatggctcttgctttcacctttgtcactcattnttctcatttgctcagcccaagctttcccacaagtcctaaatgacattntaaactaggattaactcactttagactccaatttacactaaccccaaatttagcttctctaaccctcaaaatctcacacttttctacctacaacattgtcattctcacatttaatcctaagttaactnntcccttcatctctaccagttttctatcagcaatttcagcacacaaacatcacatagcatcatcat

SEQ ID NO: 69186 - DNA, 364 bp, Glycine max
agctatgacataaggttgtatgtgttttaaacaatcttcactgcagcttgtagagaagttaaaatggaagcatctttattaattacaattgaagtatataagttggttataacatataggagataatgtttaattacaacagggagtggttattcaaaataacatgatgtggaaggtgggggatggagagaaaattagattctggacagacaaatggattaatcaacaggaatgactagtagaaaggtaccccacgctgtttatcttatcctcacagcagaatcacaccattaggcagatgggaattcacaatgacaagggctgggaatggaaaatttcatggagaagactgctttttgacaat

SEQ ID NO: 69187 - DNA, 358 bp, Glycine max
  unsure (1)..(358): unsure at all n locations
ggtctggtcattagtggagatatgtgttatggagagaagtcactaattatctaggtatattatggaacctagtaaattaattgcgacagcctgtcagaatcaataatgattntntgctaagtgtaacactgaagctatggantttgcttgtctttctatgctaagtcaaacatttaacttgtgttttcaaacctaagatcctctgccttgttgctaagggagcgaacgagacatgagaatcactatcttgacattctctctttggatccaaatgatattttctttctcttgcattttgattctatgcaaatgatggatctgtttgcacagatattgcgagacanacctgacctgtcac

SEQ ID NO: 69188 - DNA, 349 bp, Glycine max
  unsure (1)..(349): unsure at all n locations
agctgggatttccttntagtatggaatctatccttcctaagatggagccaaacctagtcaccttgattaagaactagttcttttcttcctttattgcctttagttgaatacacattngtttggttctctatttggttcttaaccctctcatgaaacttctttacaaactctgacctagattccccttctttatgtataaaagaagtatctagtgggagaggaatgaggtctaacggtgttaggggattgaacccatagacaacctcanaaggtgactgcttggtggttctatgaacccccctgttgtaggcanattctacatgaggaagatactcatcccaagacttat

SEQ ID NO: 69189 - DNA, 334 bp, Glycine max
tcttagtttcagatgatgcagctgagtgtgtatctaccttatgcactcctctaatgactatcgcatcatttctggcgctaaactgctgggagttggaagccatcttctcaattaaatttctggcttcagcaagagtcatgtctccaagggctccaccattggcagcatctatcatacttctctccatattactgagtccttcataaaaatactggagaagaagctgcttcgaaatctgatggtgagggcaactggcacatagttttttaaatctctcccagtattcatacaggctctctccactgagttgtctaatacctgagatatccttcct

SEQ ID NO: 69190 - DNA, 482 bp, Glycine max
  unsure (1)..(482): unsure at all n locations
atctcagagncacctgcggcatgcaagcttatattngccagaggaactatggttaaggattaggacctaccagacatcccttcctattgtttctgtttcacagaatttgaggcattcaccagccaaaatgctcagagtgatatcttaaaacgatatgctttacttctatattatgagaataacaatgttagtttcttcaatagctgtgcatatagaaataatatgtttctttttgtcccagatcttattggggagtttgttgatgtagtccagtggcaattggacagtaaacgcataaaggtgtctctcatgttgaggaatgaatggtagctatttcattntttgctcttttagagttggattgtaagtgattaacaaaataaaagtttatcaatattcacgaaagtgttattgatcttttggtgctaccagaggtaacactcgtacatgtacattgtgggaaggctttgcattgcagctga

SEQ ID NO: 69191 - DNA, 457 bp, Glycine max
  unsure (1)..(457): unsure at all n locations
atatttaatcttgactntntattnttatctaatggttgagaatgatcattcacattctcacataagatgatcattctcacatgatatgccttttctctgtctgtatttgtgtgtgtgtgtgtgtaatagcataaagcaaaggctccaataatataagagaaaggtgaatctaaagttgagaatatggattggtacccccatttaggattagtccgcccatttagtgtatgtttggtttcatgttggttggagaattgatttcaattacaaaattaattntagataacattttacatannttgttttaagtgaaacaactttaaataagttgtgcattagataaaaaaattagagcagagtacaataatctttcatgaggtagtgcagatttacacatctcttcttctttttttacactacacanaactccataacttttgtgatccccgtacactta

SEQ ID NO: 69192 - DNA, 435 bp, Glycine max
  unsure (1)..(435): unsure at all n locations
agctntgaacaatatacttggccttcatttaactgtctttttgcttggcggccacgctcaacanagtactttcgacacctactgtacgttgatttcaccaatgctgntatgggaatgttgcgacaatcctttaaaaccttattgatacattctgagaggttcgttgtcatgtggccatatcgacgtccttctctatcgtaagccatcgtccatttttcttttgagatgcgatcaatccatgttgctatggctggactcagttcatgaaatttttctaaattttgatcaaaaatgtgcttgcaaggagtgtaggctgcataaaattagttatgaataacaatttaaagtataaatgaaagtaaaataaacgtggccatcaaatatngaaatttacccaatttcttcaaccatttcttttgttttgcattattgaat

SEQ ID NO: 69193 - DNA, 351 bp, Glycine max
  unsure (1)..(351): unsure at all n locations
ggcttcttgtataccctaatntcgtccggggaccattgtttggtggcatgcaaccttcgcttgattgccttgaggtacttaacacccatcgttaggtaatccgtgaagttccgcaacatttcggatttcgaaaggaagcattgttgcgcaatccgtaaagttccgcaacattctggaagtgataagggcattgttgcgtaatccgtatagtttcgcaatattccagaaagaaaatgggtgtcgttacgtaatccataaagttctataacgtgtcggaaatgaatcaacaaaaaaacacaaaagagggtgtatttagtaaaaaggggggtgcaaatagaaaatagacccact

SEQ ID NO: 69194 - DNA, 397 bp, Glycine max
  unsure (1)..(397): unsure at all n locations
agctngacaaccgaagaaaaccgtgttgaccaacttaacaaggaggtaatgttatgtggctggaattcaattaatattattgttgttgtgctcattgngttntgcaagaagctctgattgttatcatatgattgaaaacttttatgcataaaattggttacaatgctttatattntgagggtaatcatatatgctaatgaatggtggctgcctntatgaaacaatatgatatctatgagaaaccaaaccgataagttaaagctattctacttattcttacaacttgatttaatttgtctgtacttctcacttccatatttntggtgtctgctcaagcatatattgacattgtgacaccctctaccccgcatatatatattatatatattttataata

SEQ ID NO: 69195 - DNA, 346 bp, Glycine max
  unsure (1)..(346): unsure at all n locations
ttccgcctgacaaacaataaattaggttttattgtaagtaaataacaaatntagactattaaagaaaatcaacgaagaaaactcanatacctgaatatcctcccatatcaaatccttctgagcagtagggacttccttccaggtgtcatatgtcacgttgaccttatcacgagcgacaatccccaaatatgttcttaatttcttcttgtggggaccgtcggccttgccggtagcaggatcgacgttgaccacaggtctttctgccccaggtggtctagtggccaatgatcgtatccgggtcgccttgcgtgttcacttcaacgtaaatggagacgcatcatcgtct

SEQ ID NO: 69196 - DNA, 473 bp, Glycine max
  unsure (1)..(473): unsure at all n locations
gatccttaagtcacctgcggcatgcaagcttaagacgacgaggtgcggngaggagcgatctggctatggaagaaacagagttggaggtgtgagaaagcgaagcttgaacaaattccagactttgcctttagattgttgtgcctgatttttccatgacttccacgcacgggatgcagcaacgtggtcgtcgaccctatctctaaagacaaagcttcagtgtcgggtcccactaactaattctaacaacttaagtccgcggattctagtcttcctattcaaatgccacttcctgctttcacatcccaactntttttttttggccttttctaattnttccatttttttataaaggtggatatgtcnttagagattttttttaaatgttcatttctttaaggcatgttccctcgttaagttgattacctttttatcgaagttttgactcttgtgtanatatttcatattatcacttt

SEQ ID NO: 69197 - DNA, 406 bp, Glycine max
tctcatattcttggtggacagagacctgaatatttgagaagaatgaacatatactgcattaatagctatagtttactgtgtgaaaaaccttatttgtttcaaggttcaagttgataaattcagcctagagttcagatgatcatcagatcaattaagcctagcaatctttcgcatcatgtttttgctgtttcaaagtttaaatagagaggtaaaaccaaatagtcagactaaatagtatataacacatatgcatgccatggttgagtatgtttatctttgataagttaccaagaaaatggctggctgtgataggttcaagccatgtgaaaattgtttcttctagtcgcacgtaatagaaatcataatgaacatcaagcatcgcctctttttcatatagacactattc

SEQ ID NO: 69198 - DNA, 391 bp, Glycine max
  unsure (1)..(391): unsure at all n locations
gaacnnagaggcagctgccgcatgcaagcttgtgtttcaatctggagcgtctttatgtatttctggactcaacctcacatccgaatatgatacaattgatgtgtggctttgcctagaccatatgctcacagtgaggagcgaaaccaatattcactgcactcattctaacataacaacaatgagttaatgtgcgatgaatgtgacactaggattcaatatgaactttgagcctcacaacatattaggggacattattgtagatcccagagacaagtgcacgtcactcgaatttgatgcgatcctcactgctaaagatgaagcgtcgcgttatatctctgtactcatttcgactatcaactaaatagatatcgacgtatagatctgcttacgg

SEQ ID NO: 69199 - DNA, 333 bp, Glycine max
ctacggtaagttggaatattggcccaacgctagtagtatggctatacatgatatatgtcacggcctgggtgggttcacgagataaaaggatgtaccacattatattcatgacacaaatgcaacaatgatgagtgggataatttatgcaacactagccatgcatacacctatgaggacactcaagtgtcgaaatattattggtcatgtgacgctatggctcatgattcatcttctttactttagtcaacccacagttttcaaaataagttcgtttatcaatctgagcatacattcgagaccattttgggcgttcgtaatacgtgtacagcattt

SEQ ID NO: 69200 - DNA, 400 bp, Glycine max
  unsure (1)..(400): unsure at all n locations
agcttgagctcactattgctgccccactacgctctacggaatttgtcacgaccatgctcttccctgcgagccctcttggtttcttgttcaagggcttttgcggtagctgcattntcttctcgtaacccaacacactctttccgaacgtctgtagcgaccaacttgaatttttctttggcaagtctcgcttttcctagttcggttttcagagctcggacttcttcatcctcttacggagcttcgaagttctcttcgttgataatctttaacttggcgagccaatctaaacctcgtgtacgaactttcagccattcatgataaccaccaatgatgccattacaaatgcccctaagttctttatctntccttaacgggctntcccacgccttatggactcttt

SEQ ID NO: 69201 - DNA, 463 bp, Glycine max
  unsure (1)..(463): unsure at all n locations
actcagcttctaggcctcntagctctggctcttgtcatgggtcctcctatgccttgtattgngtcttgggcttccatctggtcatgggtctggagctggtggttgtcatgggcttacgctttgatttccacatcagcatctttgtcgtgctttgatttccttaagagaagaaggaaacaagatttctctcacttaactcttctttctattctctctcttttgtgatggtggctacaattgagagaatactcttagatcatgatggagacattgtttcacgtttgtgagtattaatcctctaaaatcactactccaatcaaatagtaattatctctaaaaaatgtatcacttaagctcgagacccaatgtaatntagatcataaccactacattttaagttattaggtgttaataagtcatatgtctctcacatgagacattaaatcttacanaatctacattc

SEQ ID NO: 69202 - DNA, 361 bp, Glycine max
  unsure (1)..(361): unsure at all n locations
agcttatgttntcaattacgagcgtctctaaattctactggacacaattggacatccgagtgaatagttattgtcgtttgaatatgtttagagcttctgttttcaattacgagcgtttgaatatcctacgggacaaaatcggaaatccgagttaaaagttattgtcgttagaattatctcattgctttcgttgtcaattaanagcatcttgatatcctacgggacacaatcgaaaatccgagtcacaagttattgtcgtttgaatttgctaagagcttcatgtttcaattacgagcgtctagatatattacatgactcaatcagacatccgagtaaaaattattgtcgcttgacttttctg

SEQ ID NO: 69203 - DNA, 482 bp, Glycine max
  unsure (1)..(482): unsure at all n locations
ntgaggagattcanacgaacaataactttgagtcatatgttctattgtgtcccgtagtatctcgagacgctcgtaattcanaacaaaagctattagaaaaatcaaacgacgataactttttacacggatgtccgattgagtcccataatatatcgagacgctcgtaattgaaaactgaagctctgagaaaaatcaaacgataataaactttgactcggatgtccgattgtatcccgtagtatctcgagacgctagaaattcaaaacagaagctattagaaaaagcaaacgacgataactttntacacggatgtcccattgagtcccataatatatcgagacgctcgaaattgaaacagaagctcttagcanattaaacgacataagtttgactcggatgctgatgtgtccgtatatatgagacctcgaaatgaaactgaactctgaaatatcaacgacatactttaactcggtgtcgatgct

SEQ ID NO: 69204 - DNA, 366 bp, Glycine max
  unsure (1)..(366): unsure at all n locations
atactcagagtcacctgcggcatgcaagcttngccatanaccatatgaaatagatatatgtctattgtggtcttgaaggcagtcttgtaagcctatagtgcatcattcagcttgcttggccaatcctttctagtgggagctatattattctccaaaatcttctttagtttcctgttggaaactttaactagaccatatgtctgtgggtgatacagtgaggctatcttgtgtgtgacattgaaatggctcagcaccttttgaagttggctgttacagaagtgatagcccccatcattgattatgactctcggcactccaaagcgagcataaatatttttctttaagaacttcactactgttttagca

SEQ ID NO: 69205 - DNA, 471 bp, Glycine max
  unsure (1)..(471): unsure at all n locations
ctatatatatagaaaanagcttagtacaattgggtgttgaacaatttataaatttcattnttcttagaattgataactttggccaccaccaagccataaacaatttgtagtagcatgtaagcttaaccagaggatgccactttctgctgattaattctgtctattttgcaacattaacaatgcaagggtgaatatactcgatttgttgctgataaaaagagcctcaaaagcctcaagatggaaggctgttctaaccttggaggttntgttctttgttcgtctagtctttctaccctgtggttgtctaatttatactctgtgtctaaaatggtgattaacttttctgtcattttatattatcttgtgtgatgtgataaatctcttaatatgatatatcccttggatcttgcattctagtttctatctccatccaaatctgtattctagtgtctatctaatcaattgatcaca

SEQ ID NO: 69206 - DNA, 444 bp, Glycine max
  unsure (1)..(444): unsure at all n locations
agcttgtgatatttnntcttgccttanatataattttagtttccctantttttaaaattcataaattattttttatttaaaaatagagacatttagttctcattttttaaaaaattataattttaatccctctattttaattagagacatttagttttcacttttgtaaaatttgtgatgttagtctttcaaaaatattaattggtaaaagattaatctaatgagacccaaatttaatgatgtgacacaagaatatttggttaatctatatcataatcaacttaatctcttaatagtcaacacttttagtttaactaaataaccaaaatcgtagattaataaaataggggtaaatgtcttatttaaataagatatcaaatatagatttaaaatataaactttagcattttttttatgataaacatttttgcccactagaatttt

SEQ ID NO: 69207 - DNA, 486 bp, Glycine max
  unsure (1)..(486): unsure at all n locations
ctcagcttaataagcccttaggatctacattgtgtatatatgattgcatggaatgagatggagtgcanaaaaattaggaattgattgttagttgtttagatgaattgacacttgcctgaaacacttgtgtgcttgagagaaacactggcttgtgaggaaaggagcttagtcaatcatccttgatgctggtcatgcttgctaactgatttcgtctcttttgcttaattgcacatgcttgtagaagcaaagcttcatggtgaatcanaggtgattcacaggtgttttgatgataacaatgatgataacaaaagatgatgacgaaggtgatgacaaaaagcttaaagatcaatcaaagaacaactcaagtgaataaagaacaattcaagagttcaagataagaatcaaggagaattcaagactcaagaagaaagtnntagagtcagaatcaagaatcaagggtcaagatctcaagaatcaagatcaaga

SEQ ID NO: 69208 - DNA, 334 bp, Glycine max
agcttctagccaaatgaacttaccttgaattaatttctttgatagccctattgagccttgtttccctctccttgttttgaagctcactacaagccttaagtgagaaaccatgatatcaccatatccttaaggaattttggagctttggaattgttttgtgaataagtgtggggggtttttggttcattggataacttgtttttgtggctatgcttcatgatgtattctgggccatacttgatgcacattgtatattggctaaatggtggacatgctgaatgaaatgttgtctctcaaatgctatagagtgacaacaaatcgcaaaagaagaaaa

SEQ ID NO: 69209 - DNA, 439 bp, Glycine max
gtggggctgataaatgatataacagcaccacggttctagtttagctctctctctctctctccactctgtatgtgtgaacgagatggcggatattgtaacagatgcaggtcatagttgtatatacatccctatagacccatagcctacctgataataatgagaatataatctcgacgcatgtttctcttgaagagcaatcgcattgaaccgtgaggctctagtatgaatgcataattaccttgagtatgttgtaatatgtgccatgactctagaaaataggcattataaatgcaagcgaactgtttgttctgttatatcacatttatacgcatactctcagagtatgatcataacagcagatggatcgtaatcctaaatcagcttaactggaaatattcgtaatcaatattgctgttactcgtagcctgatatgaccatg

SEQ ID NO: 69210 - DNA, 431 bp, Glycine max
  unsure (1)..(431): unsure at all n locations
taagcttgaggctgganaactatattacagcacctatgttctagtttagtcctttctcttctctctctctcctatnttcgnnttttagttntacgcttttctttgagacatcttttcgttttgcaattctagtagcaataaaatttcgttcttcaatttataagttcgttctctattgattaatggaaggctaagtccccagcgttgctttctcttgaggatcaagcacagctctctttgaggttctattattactggtaaattctgttcagtttttccccttcactaattactctgaatttgttcctattaattcatgcatgcttagtgctggattaactggctctgcgcttaatttacagtcatgcttaatgatcgtttgaagtaattggtgatgtgatgctaatcacataatgatgcctatgttgaat

SEQ ID NO: 69211 - DNA, 451 bp, Glycine max
  unsure (1)..(451): unsure at all n locations
ctcaatgcanagatacccatacagntacctctcatacctcctcccagacttggactggacaaaactaagcactgcaaataccatcacaaccatggccacaatacanaggactattggtccctcaaggacaagatcaaggaactcatacaagccagatacctagcctagttggtaaagaagcctgatgacaaccgaactggaggcaagtccgaatggcaccatgaagaccattgtaagaggagaaatgttaataaaaggagagactaaacggaggagagggaggcaaaggcatcacccacaaaggtgtgaacaccaaccctaacaagagccagaagacaaacccacttagaagattagaggcgtgatcaacactattgccaacagattcttctatggagggctatctagctagtcctgaaagcgtcatcttcatgccatcagagacattgat

SEQ ID NO: 69212 - DNA, 444 bp, Glycine max
  unsure (1)..(444): unsure at all n locations
agcttttgcatgtntaggaagttctagagagagattggtccaagttccaaagagttntgagagatnttgctgtgtgaagatctgcagagacgagagctcgaagcgaaagccgttctgagagcttgagatgagtttgtgagtgattgtgagatcctagaggtgaaggagacatcctcaccacttgtatttttgcaatctttcatcttgttcttctctatgtntgaaagcaggtttccgaactatggaaagctaaatcctctgttggatcttccctataggtacctgatgtaaatatatttctatctatgtaatgatgttttatgtgctctctatgccatctgctgttcattcctgtatgcctttatcttgatcacgtagatgcatgctntgttanggtcattcaacagtggaaactggtctgattctaaagtccttgatagtacg

SEQ ID NO: 69213 - DNA, 461 bp, Glycine max
  unsure (1)..(461): unsure at all n locations
tgagagtgtgaacttaattattgagagaacgactagcatnagagtaataattttgcatcaatctctgaaatttagaatgaaatgtatgaaattggaaatgatgaaggccattgttgtatatacaagccacttgaccaaaagcttacctggtatcaatgattatatcatttgtacccatctttgagctaaactgtaattgtattgaaccgtgagccttgagttgtaattcctatttaccttgcttaggttntaagagggcacattggtttaggaaaattatgcattntaagtgcagaggagctggtgctgagcggntaaaagcatcacttagcgcacatactaccgcaagtgattgagctcagcgaccatgaatggcgctaagctacatcanaatccagttaaactgcaagaatattcgcttagccaacagaatcagtgctaagctcatgacccttaaatat

SEQ ID NO: 69214 - DNA, 490 bp, Glycine max
  unsure (1)..(490): unsure at all n locations
atccttgagtcacctgcggcatgcaagcttgttcttgattnttccttagttctttaacattctttgaacaatatacttggccttcatttaactgtctttgggcttggcggccacgctcaacaaagtactttcgacacctactgtacgttgatttcaccaatgctgttatgggaatgttgcgacaatcctttaaaaccttattgatacattctgagaggttcgttgtcatgtggccatatcgacgtccttctctatcgtcagccatcgtccatttttcctttgagatgcgatcaatccatgtttgctatggctggactcagtcacgaaatttttctaaattntgatcaaaaatgtgcttgcatggagtgtangctgcataataatagttatgaataccaattttaagtataaatgaaaagtaaataaacgtgacctcaaatataaatcttacccaattcttcaacatttctttttgttgcattattgaatt

SEQ ID NO: 69215 - DNA, 423 bp, Glycine max
  unsure (1)..(423): unsure at all n locations
atgttagtggctagcaacgataatagaatgtatcttttatgtggttacaagcaaatgagtagacatattattaacctgagctcatgctatccaaatntaccanaggcatgntttttgcctactngaattgctgaagatatgtaggtgatatatatatatatatatatatatatatatatatatatatcataatattctctatactgacgaggtaagtttattgacctacacggngcttcacaaaaccccatattatcttgaagtgggttcaaaccggaactctaactatcttcacctgccattgtcaaggcaactgcttgngtcattcaccatttatgttgggacaccgtgtagccgtcgtgtagctttcataaagtattttcgtctataaatagaagcactcatttttcatttctgaatgcc

SEQ ID NO: 69216 - DNA, 476 bp, Glycine max
  unsure (1)..(476): unsure at all n locations
acctgcngcatgcaagcttggatgaagttgagaatcctctcctctttttctttctcanacttattccactcttccgccaccaccactaagggagagcttcaaactttgctcttctctagccttttctctattttctctaaaactctctactatgagaatatttgtttgaggaactaacgaatgaggggtgatatttatatgctagttaggtagtaaggaaataaaaaggactaatagtagattataaatgaaacaacttataagtcctaaggttatttaacctttatgtttattattaatccaacctctctattntatttttatttgtattttcctctattaatagataatctagatctctcctaggttatttgaagaaaaataatatgtctgtgtcctattttaatataaaaaatcaaatttggtatttgaccacaaacgcacttgccccctttagtgcatcaatttactacaaa

SEQ ID NO: 69217 - DNA, 380 bp, Glycine max
actaattctgtaacttctgttgttggaacagcagctaggcagttagtggtagttatgaagttagtggttgagaactataagtagtaattggcaggtaaagaaacattttgaatagaatctgtaatcaaccttcttcttgtaatttattcttctaataatgaaaagcatgaccacaatgctcatcagaattcattcatttcattgagttcccttgtctgtccaagaacttcgaatgccttagctgagatcctagttctgctacatcaaaaagctaatgatggttaccggtgtggtgccggattattctagacaccaatatatctttctatcatgattatatgattttctgctaagagtttatgactggatggagttaagca

SEQ ID NO: 69218 - DNA, 458 bp, Glycine max
  unsure (1)..(458): unsure at all n locations
gatccttaagcacctgcggctgcagctttccctctttcccataactaggggaaggagggaataataaaaacgttcaaccctcctggtatctgaggatcacttgaaattagtgaaaaaaatcgtttccatgaagaaaatccaagctgaggcgcttccgtaacgcgtccaaaacatttctgtgggtgattccgtgaagattttccgccgtctttcgttcgttctttgtcgntcttcggtcttcaaccggtaaattctcgaaatcgaacttttcaattcattctatgtacccttggtggtccccacttgtttcgcgtacttttattttcatttcatttactttccgctaccccttttgacgtgctntagtaatttatttaagtcactttctcgcctaatcaaaaaataaaataaaattccaccgataatttgaatggtaacatctggtatatttctgtaaa

SEQ ID NO: 69219 - DNA, 444 bp, Glycine max
  unsure (1)..(444): unsure at all n locations
actaagcttctcgggccantcctgcnagggcaaacattggaaagttagttttaccaagaaatgctactcttaaaacaaaaatggcgtacaacctcctccaataaacacaaacatcaatgtaaatttagagcaaactcatgcacatactttcttacgagcattcattcgcacaagatattcttctaactaagaaaaaatgcacccatgcacaatcaaggcaccttcgttacctagattatttatatgtacttccaaggtgtatttgctacctacatcacatgcacttccttggctaaatttacatacatgcatactcaaagcatcttggctaccanaaattgcacacgtgcacattctggtatntccaatacctatgtgtcataccctaatttcgtccggggattattacttgatgacatgcaataaatgaagtcccgagacgtc

SEQ ID NO: 69220 - DNA, 483 bp, Glycine max
  unsure (1)..(483): unsure at all n locations
agcatttaagctagtttattaaatcttaattgattaaanatatagatggaagtagctaacaaatataaaataatagaaatgaacattaatatgatattttaatataaatttcaattnttattctatgatcaaaaatattttttgaggtgttataattttagttctcattttaaactcttgtaatttttatttatggataaaatattttcaattacatttctatttntaattatcatattaattttcataatatgtattatactattaatcttataatatatcttaaaatatctttaataatttataaaataaagtaaaaagatacttcttttactgcatcgatatcttaaaaacaacacctaagtagatattatatttttattgtgtaatcaacgtaatagttaaaataaatagtctattattaaatttattcacaaatgagaaacaagataatctaacatattatatcattttgtgagcata

SEQ ID NO: 69221 - DNA, 374 bp, Glycine max
  unsure (1)..(374): unsure at all n locations
tatcgaggaggtgagcttagttattagaggggtgtgtagctaagttctatcttctcaaggaagattctcaaggaagtttctcaaggaagctacctaggctaatagaagtatgtgtaacacttgtggtaactttgatgaatgaaagtcttgtgagacacaactcanagttcaacttctctccctctnttactccttcaatttcgtgctccccctctctctntcttttcctccattgaagcattctctccaagcttcttattcaaagcacattcttggtggtgaagctccttcttccaagactattccccagtggntggcgcctcctctcacctctttctctttgtctttgcgctacacctcatggtggaaaatca

SEQ ID NO: 69222 - DNA, 467 bp, Glycine max
  unsure (1)..(467): unsure at all n locations
gagtcagctgccgcatgcagcttcttgagaataatcctagagattcttgttcttatctacacacacccctctcataactaagctcacctccttgagaagcttccttaagaagagtcctagagaagctagagcctagctacacatacctctctaatagctaagctcacctccttgagatgagaagctagaactcagctacacaccccctataatagcttagctcacacccatgacaaaaaacatgacaatacaaaagaaaagttcttactacgaagactactcactatgcccgaaatgcaagggtaataccctatactactagaatggccaaaatacaaggcccatacgaaggaaaaacctattctaatatttatcaagatagaagggctcatacttagcccatgggctcganatctaccctaaagctcatgagaaccctaggcctttccttgatctctagcccaatt

SEQ ID NO: 69223 - DNA, 389 bp, Glycine max
  unsure (1)..(389): unsure at all n locations
ntgtggtggggagcaagtaagtgtctgtggatgatctttactactctgacgatacgatattctttggagaagcatgtattgtaaatggcaatgctgtgaatggtattctcaagaggtctgagctggcttctcgattgagaattacttttgcttacagcgaatttggagctgttggtctatctcacgagtgtgtgcttcatgctgcaagctacctcacgtgagctctgctccaatatcctttctgatattgacgagtccgataggggtccatcccattagaaaggtggtgtgggatcctatcattaggacatttgacgataggctgaacaaatggaatatgggtcagggtgacccaatcctgttctggcaagatgcttgagttgaggata

SEQ ID NO: 69224 - DNA, 418 bp, Glycine max
  unsure (1)..(418): unsure at all n locations
agctntgcagaattggtcttcgctagtgtaaggatcaatgtgggtccgaanagaggcaaatttgatcatcctactaggacgactgagaaaactgtggcatatgaagagggtgagaaagagggagaaacccatgctgtgactgccattcctatacggccaagtttcccaccaacccaacaatgtcattactcagccaataacaaacctcctccttacccaccacccagttatccacaaaggccatccctaaatcaaccacaaagcctgtctaccgcacttncaatgacgaagaccacctttagcacataccaaataaacaccaacaaataggaattttgcagcanaaagactgtagggttcaccccaaatttctgtgtcatatgctaaactngatcccatattcacttgataattcatg

SEQ ID NO: 69225 - DNA, 343 bp, Glycine max
  unsure (1)..(343): unsure at all n locations
gtgagctanaatcctgactcaccatanaccttgacccatggtgagaatgtcaatccttaccctcggaagcaaaatagaatagaagggaaatttccaatcaacaaatataaaaaagagaaggaaaattcccaatgaaagagaaaaaagaaaagaaaggaaattcccaatcaaagagtgggagaaagcaaaaagataagaaagacaattcccaaccaaagaatgggaaaagtaaaaaagataagaagaaagctcccggtcaaagaaactagaagaaatgtgcagaaaggtcttttgaccagacaatatctgaacaatacagaattgtcaccaaatgaacaaaaaa

SEQ ID NO: 69226 - DNA, 438 bp, Glycine max
  unsure (1)..(438): unsure at all n locations
agcttaagttaattgaataatattttattctacatttgtaattaaggaaaggaattaagagcaaaggacttctagaggattttgatatgagaaattgtatttttacaccatccttcctcaacctaattttgtaccttttaataaggataaactaattntgtaccttttaataaggataaactattataacaggtcattgaacaccaaaattgataatatctcaaatgaagtgatcctaacgatgcatgatgatttgaggttgacacacaagactaaaagtgcaactaactttactttntttattntttcttattacattaatcattntatctcatatgttgtattacataaannatataattattatatcaaaatcctccaaaagtcaagctcttaattatttttcttatttacaaacaccctccttcttaagactat

SEQ ID NO: 69227 - DNA, 445 bp, Glycine max
  unsure (1)..(445): unsure at all n locations
gatgtanaacagaagggagatcactacaccttatatgcattcatataacacaatcaagatagtgcttctggaagaaagcgttattggaaaaaaagataacactagtcttttagatagcgctgctttagaaaggcattatccaagtttaagcattacatatgctttctttggaaagtgctatgcttgaattattgtcatttaaaagaaagttacacaaataggcacaacgcttgattaaaaagcactatctagtttatttattaacataatgcatccataggaaagcactatctgatttctccttcanatagtgctctatatggaaagtgctatctaaaatgaagagttatggaaacacatggtaaacaatatcccaacaaatcatgaacctaggctaagacatcaagcaattacaagtcctaccaatatgggatgctacaagatg

SEQ ID NO: 69228 - DNA, 348 bp, Glycine max
ctctaagcacgcagcatgcagctctcaccaatccaaaccctttttgctttttgaattgccagcagtcacccctcttctatatggtgcttagatggatactccggcaaatcttattgagtgaagctgcatgaacaaaagctccgttttgaatatttcacaccacacgactataatgatccatcagaatataaacttaggcctattgcttacagataatcacactgagtggtaataggtatatatgcctatatggaatttgaaaacggggaaaagacataccaaggttgaccaaagggcagtgaacatgacattcctatgctttggcttcctagacctctgggagcctga

SEQ ID NO: 69229 - DNA, 380 bp, Glycine max
  unsure (1)..(380): unsure at all n locations
ntataaggtatatgtaagctacatctctagtcaatgtgtggctataccaccgcatttgcggttgcaattaagcattgttgttatatgacgacgccatggtcaccatggcaaaatggcatgacggattatttgccaaccgccatagacaatattngaaaggaggcttgctaattgctatggtggagccgtcagccgcaatggcatgtgtatgtggcaaaaccttggctttccgccattgataatactacagataaggcagctcccaaaagaggccgcaactaaggcgagctaatggtgaccgccattgaggcgactttccaacaacaattaattacgatttcgggaaaatattggcggatatctctaactcgaagccaata

SEQ ID NO: 69230 - DNA, 351 bp, Glycine max
agcttcatcctcagatccctcttgtggactaggtccaatttagacgtccctcttaggtttagactaacttaaattgagtttcgtccgcagatccctcttgtaagactagactcagctcaagcagcttacgaaagtttagccttatttagcctaagcttcatctgtagatctctcttgtaagactagacttagactaaacagcattgttgtaacaacataattaaaaccaaaacttaacccgcagatccctcttgtaagactaagtttcgaccctgcttcaatcaagttctaaggcaactgtacatttcccaatgctaaagtcacctaactatgcacataaatggattatca

SEQ ID NO: 69231 - DNA, 368 bp, Glycine max
gttctcttaatggtgttagagattatactccaatcaaatgcatcaatgtgtagcacaacttacacataaccacaacaacaaaagcagcttatttccttctaccaaatcccacaacttgtgaacaaaaattgttccaaccaagcataatcatataattcattcacttcatcatagaaccgcgaattggttcgtgtgtagcaattcatggtttgtttacatcttgggtcaccaaaatttgtcgttgaattcatgaagaagatgaactaaaaaataaaatagaatacaagccagaacattagaacttagaaccactaacaatgaaacaaattgttcaagaagtcagataacagagatagaacacgcgaaac

SEQ ID NO: 69232 - DNA, 337 bp, Glycine max
agctgccttctctcggagtaaatggttgttctatctaatatgaccgcatcctaagttacaatactgaatctactttactgagatgtatttatatgtatgtttaatctttcatatcagaatcttatattaacatacttgacttttaatacatataatatagattactttatgtgattctttctaaactaacatgtacatgaccaccatacagccgaaccatattatatataggtcatatgtaattatctggcaaatatattaactggggaaaagctgttatgaatggacatattacacgaaatggtactggtgaaatattgcaactgttcaggcaccg

SEQ ID NO: 69233 - DNA, 460 bp, Glycine max
  unsure (1)..(460): unsure at all n locations
cctccttatcttcaactattaatatagtcttttcttatttataattgtgtaaattaggtttaaccatgagttaccaaactatnttatttctttgatatatgtataaaaaaatattacgaatagagttaaagtgtaattaactaaaagtgtatatatttttactgatgttatacaaacaaataatataataatcaaataatattacattaattggcctagcccaatggatcataccgatctgggccttgaggctggaaaacatcaagccaatttgggcccgacactatgcaagattttttctaccaaatccaaatgggaagtagtgaaaacactcctgtgcggtatgatcaacgaaatcttcacacatccgcccaaggagaaaaccataatcaaacttctatggctctcataaacatgaagctagaactttcagcctataagtntatgaaatgtatcatac

SEQ ID NO: 69234 - DNA, 435 bp, Glycine max
  unsure (1)..(435): unsure at all n locations
agctntcaccccataattcctccatatatcgtattacgaatgatgctctcctataacctaagacaaggtaaaaggagataaattgtataggctcaaggttcaatcaaacaatcattacttcagctcataatgggtgcaagggataattcaatcatgcacaaggtaagctntttggctaagtggctatcttcaatcaaaacatggccttcatcatcttcaatttcacgcattcattcaatactcagagattcatgcaaaaatcattactcaatgttagtcgttctctcacaattaaagatcacactctcaccgngtagcggctaatgtgtttcttcacaatcaacctaacaaaccaacaagacatttcaatcatgattctaattccatgttctttctcttttaatgactgcatgctcattcaaggcatatgatcta

SEQ ID NO: 69235 - DNA, 464 bp, Glycine max
  unsure (1)..(464): unsure at all n locations
cgtaccagaataaaatggttgcttgcgggtaagtgaggttgatcttgaagtcctgaaggtgagggccaaaattgagatcacccattgaggtatatgcatcaagctaatgacgttaaaagagtgcttcctgcgaggcaacccaatgctgatttctttcattctattnttcatgcattgcataatttggaatttgcttgataattattgaaaaaaaggatatcagcttataacgagtcatagatattggtggctattttaaatgttttgaggaagtggactgaatatcacttanaaaacattntcatgaatatagtccacttgctaagcgcataccacctcgctgtgcgcatcttctccatagcgctaagcgctcaaaccctgcatctcaagctngattggttcactaagcttgtcatggntgagctaagcccaattcaatcaatctgaatgggctaacatgacct

SEQ ID NO: 69236 - DNA, 207 bp, Glycine max
  unsure (1)..(207): unsure at all n locations
tgtgttgngttgagttntgacgaatggagtggggtgtgtaggaatttttatgggttgctttcggattttcagaatttgactttgattggtggtagtgaaagtgggggtttttatgttatggttccaaaggggggatctagtgggaggaagaaggggtttgataggaaggttctgagtggaattgttgtggttttgggggtggtggtg

SEQ ID NO: 69237 - DNA, 433 bp, Glycine max
  unsure (1)..(433): unsure at all n locations
agcttgtcttctgtagcattatctcattaatatattacctattatataaatttaattctacacaagccgcacataagttctttaatagtatatagcaagtttgtgaggcttaatttctgcaacataaatagaaatctctcattccacaatattaaatatgagtctaaatatatttgtagtccttataatctattctattttttatttgtagttcttgtaaaagtattttttttgttctaatcttcgcacattatatttggtttgtttctcgtccttatatgctatacacaacatntttttttactatgcaaagtgctatttaaagtgttttaaggactaatcacaaaatatacataatttgcaagacttaaatattcatggaatgaagaatgagacacattaatttgcaggagaaaaatgaattaaatcttaa

SEQ ID NO: 69238 - DNA, 431 bp, Glycine max
  unsure (1)..(431): unsure at all n locations
ccttagtagtcctatctaacttatgccggaatagaatgaatcaaacccataaagcaacctctccatgtacatgtagcctccccaaactttactaggtaggagtagtgtgcccnctttttttaactagtcttgtagtaaaaattgaagatatatcctcccatcccttttcactcactattttcttaatacattttcaattttatgacttccacttgatggaaagatttttttgcgcacggcacttctagagactaacaactcatatatatatgttttgtgtgggaatatgcatgtgtatgtgactaatatngtgaataacacaacgtacatttcccattgcacaaatataacattttctttctttactgtctagacaggatagtgcaggtgtatggctcactttcttttgatcttgaggccttgcctcatat

SEQ ID NO: 69239 - DNA, 442 bp, Glycine max
  unsure (1)..(442): unsure at all n locations
ttaagcaccgcggctgcagctataagctttggaatgagtagatctatctcaattctataccatatttcttgctttagatgacagatttatttnttactgtaactttattgtatgactggtgcagagatacatatttccctcttcccttaacgagaacatcaacttgcaatcttttctggttgagcctgacatgaaatatcacctttttccttcattttcttttttcagatttcccactttcgtctatcttgtagtttgaaataatttatgcaacatatataagcatataatttaaaagacaaaattgcatgaacttcgcttaatttctcttgggaaggtgagaacgagaagagaaaaaaactataaataatgaacacataatggaatatcagttcagcactccagaattctacactacagcttgtcatngaaacactccttg

SEQ ID NO: 69240 - DNA, 402 bp, Glycine max
tccacgggatgaattatctgaatcggcattgcttctgatggactcgtcttgtgtgtttgtccacttatgattagctagctacatacatagaatctagatatttttgccatttgctgctcttgctctagttttggcttgcgttttcatatcaaagagtatctcgcaattacttctgttggtgtgacttgcatgtgagttgtaaattcgagctgatgcatgtatctgctacataaccaaaatattgtcggcaacgttatatatagctagctacacttgtgatgagtaatgatcagtgcaaaggtatgttcgagatatctgatcatatattacctctgtgagaaatgctatttacatgatacaatttactgtatgaactctctctctctctctctcttatatatc

SEQ ID NO: 69241 - DNA, 245 bp, Glycine max
tatagaggggggagcacgatattgaacgaataaataacgcggagatgtatatctatgaagtgtgtcgtattatactttcattcaccaaagttacaacaagtgtgacacatgcttatatatatagactaagcatcttccttgagatgctgtctcgagaaaacacccatgagaagctcctttgagagaacttccttgataagcctaagtttaacttcacacacccctctcattcatatctcacctcc

SEQ ID NO: 69242 - DNA, 469 bp, Glycine max
  unsure (1)..(469): unsure at all n locations
tactaagcttaaactgaaactagccggntaaagatcgataaatgacagataacgaacaaagaacgataaagaatgtccacggaattgatcacaaaaacatcacgaaagcgttacggtagtgtctcggcttcaattttctccttctttcttcttctcctcactaattntaagtgaaatctgaatacccagggtgctgaaccccttcccctcagcctcctccaccattttatagccaaaataagggaggaggttgcaaccttgcacgcccaggcgagctgttgcttcctcgagaagattcctgatgggcccaaatgggcccaaggctgaggaacaccctcattntgtgttttttagcttatntccttccgaaacatcgcanaagcttacggatcacgcgacaattgactntaagtagctcagcgtgaccgtcaaaaatcaacatgtcgataaacaaatgtccccggatgaa

SEQ ID NO: 69243 - DNA, 476 bp, Glycine max
  unsure (1)..(476): unsure at all n locations
gatccttaagcaccgcggctgcagctatgctganacattataatagactctctcagttgctaaaccaacaacaacagaataattatgacctttcaagcaatagatacaatctaggttggaggaatcatccgaaattgatatggacaagtcctccacaacaacaaaagattgtccctccttttcataatgctgctggtcgaagcaagccatatgttccttctccaatgcagcaacaacagcaacagccacaacaaagacaacaagcaactgaggctcctccttaaccttccttagaagaattagtgaagcanatgaccatcaagaatatgcaatttcagcaagagacaagagcctccattcacagtctgacanatcanatggcggagatggctacacatatgaatcaagctcagtcccaaaattctgacaaattgcttcacaaattggcaaaatccgaaaatggagtgcatcacctg

SEQ ID NO: 69244 - DNA, 481 bp, Glycine max
  unsure (1)..(481): unsure at all n locations
tctcctctngatgcttctagggttctcttcgccaaataggcactgtggtgtgctctagaatctgtgccctttcttctgcgtacaatctgtctaaaagatagtaaaagtgtgtgtcaaagtgtgtgtaccctaattctgcacaagacaggctttaaataggctatgaattcacgacgttgtgctggtgaccaccctctcgcttagcgcaggtaagtggattctaccttagtgccattcgtgcgctgagcctggttgaagacccctgctgtgcttaacgcactaatctcgtgcttagcgcatggccatgatgctgatgctctgccacaatctccttcgcgctaagcacgctgaagctgcgcttatcgatggatgcacgcttagcccaattgttgagctaagcccaatagtcactttatacacttcatgaacgtacctctcttttacttgaanatgcatagattcatcattaatccaatgacat

SEQ ID NO: 69245 - DNA, 144 bp, Glycine max
gccttgacatgaaagcctcaaagcgcctgacaaggaaatcgttgtattccggaaggccatatacacaggatatattgtggtcctcatcatcctagctgctcactcttaagaacaacaccgctatcaataggaaacatatcatat

SEQ ID NO: 69246 - DNA, 164 bp, Glycine max
tcttgcgtagccgctcttggtgctcaggagatcccattatctatccctcttattactagctattttgaattctttagttcctgaatgtacaaccttcaaattgctgctcgttcccctctttgagaatgaggaggatcttcataggacttcatacaactcatgtt

SEQ ID NO: 69247 - DNA, 459 bp, Glycine max
  unsure (1)..(459): unsure at all n locations
agcttatgcacggaaaatgtaattatgatattgatatgcccgaagaaacaccatttcctagttaaccatgcattangtaccatgttcaattattttttaaagtgaaacgggtttatgatcccaacatggttggctcgtggtgcctaacacatgaaactaagaatgtagtgtgaagtttcacgcttcccccttttttgtttttgttttgtagaggaaaacgcaaggatgagcaaacatgaaaacaaatggtatgcaatttttcagatcaaaaaagttgttgaacgcatatgcatgatgatgccatgactcatgaaaaatgtgaggctggaatatgataacggacaaatgcatgatatgtccattatgatgttatgaagagatgcttatgccatgcatgatatgaatgcatttactgacaccagagccccggaatatatctcttcttacttgcgcatttgg

SEQ ID NO: 69248 - DNA, 472 bp, Glycine max
  unsure (1)..(472): unsure at all n locations
cttgtgacgtaatgcaacatcacctttctggatgcgctntgataactcactgagcataccatgatgttcccaagtttatcacagtatttgtaatgcttnttgtttaaatgtttgacatgtatttcctttcagcatattcttataaaaatgaaaactaataaaggggaaatgattntattcaagataaggtgaaatagttataaggataatacaacaaagaaaagaaaaaataataatatgtacaatagatttagagaatgacaacataagtggatgaatttgttgatgaagtgacgctttccgaatattaatgctagtacacatgttagtaacttcgattggtcgacaatagacttaagagaaaaatgattnttaacacacatttgccctaatttctttttcacgtcttcttctcaagatgctccttcaacttggcagntactccaacttttctatatcgcctctcgggttt

SEQ ID NO: 69249 - DNA, 275 bp, Glycine max
  unsure (1)..(275): unsure at all n locations
agcttcctctaccgtanaaaaatattatctgcctagtgttttaaaaagaattgcgcaatgtcggcagaaaaatatcagtcgtggctatataacgaccgatgtcaggtatttttggttcaattcaatccctgaataatttttggatattgtccaataggaaatgttcgatcggcgtcatcaggtgatgcttgcttnttattttagacctgctggatcggtcatctttcctggccgacatcgactatcattttttttatcagtgtcggagaataatg

SEQ ID NO: 69250 - DNA, 474 bp, Glycine max
atactcagcttcgagggaagagagagaccaacacatagcatggtcttgaaagaggagttagctgtttgctcaaggtccaaaagaaacttgtctcagcgtttatgcgagacagagaccaacatgctagccatcatcagcaagtaccaagaagaactaaatctagccacggcccacgagcatagagtggcggatgagtatgtccaagtatacacggaaaaggaggctagaggaagggtgatcgactcgttacatcaagaggcaacaatgtggatggaccgatttgctcttaccttgagcgggagtcaagagcttccccgattacaagccaaggccaatgcaatggcggacacctactccgccctcgaggagatccacggacttctcggctattgtcagcatatgatagatttaatggcccatataattagaaaccgctaggatgtttgattgcactcacatcttgatagttaaact

SEQ ID NO: 69251 - DNA, 376 bp, Glycine max
  unsure (1)..(376): unsure at all n locations
agcttgtaacatggtctggctaacaaagaaatcatggtttttcttggattcgaagcttatgctctaggagagcattcattccttatgttcttgatgaaccataactcatatttcatagccacattctttgctacagtcaacaacacatagaattaatgtggcacatcagttcttttagattttaattatcaacatagaggaacacattatgttttaaattgaaataacaataatactgtagcaacttatcacatactacaactcacattatctatgtgctgatattaatgtctctgcaaccccattaacttagaaactgccctaatatggnggtaaattgtcctaatccatgagtgctctctcataacctaagata

SEQ ID NO: 69252 - DNA, 405 bp, Glycine max
tagatcatccacgactaattgttaacgtcaatcctgctactggtataggatctgggccccacaaagaaaaatttcacagttacctaggggttgtggcaagagaaaaaattccaattgtccactccaattggaatcttgtcctgcacgatcaaaagaacctaatatgggaagacattttggtaagtggttttaacaacatgtctgtttatcattgtctttataagtcacttttaaatcaataatttacttactgttacataacacctttgatgtgcagtgcaaatttgacatccctgatcgtgacaatgcacaaaaaaggtgatgtcaactatcacatctagatggaggcaattttagtcttccttgacgtctaaattagtctacgctgaccatgatggtcaacaa

SEQ ID NO: 69253 - DNA, 344 bp, Glycine max
agcttgagacaatttccgcggaagcatgataatgtgattcctgtactattattctcgtactcgtctcgtggtgcaagaacgaacctgtcgtatatattactataagcttttatcttttcatggtgagaataaagtatctatggatctctgtctttattaatgtatgctatctttaaagatcgacttctggtcgcggatcatttcccttaactacatttcatatatttacaggatttaaatccacatcttgctcgagaaatttagatcaatttcactccatcacatactaatacctgatgttagacaatgagttatgcacccacttaatatttatgcttatgagc

SEQ ID NO: 69254 - DNA, 378 bp, Glycine max
  unsure (1)..(378): unsure at all n locations
cgcttactctacttctccattcagatngcaccttctcatattgtgaaagcttggctaaaatttcttccttttcattccttgatacatctgctctgtgatctgcttcctagtaatagcaataaccaatcaatctacagcttactaaatcaggaatgccaaaaagttaatttcttatccttattattagatcaatatactcgagcaaaaattttgggaacaatgtgagataagatcaaatgcataatgatcttgagtgatgacaatgttctattagattttctgcattccacaaagtctccaagttattaaagtaactgttgtccttaaagctacttctacaccaccaccaagggattaattctaccaagttcctacact

SEQ ID NO: 69255 - DNA, 465 bp, Glycine max
  unsure (1)..(465): unsure at all n locations
agcttcctcgtggcttctttgagaagctttctcaagaagcttctttgagaagctagatccttatctatccacacccctctattaactaaattaacttccttaaaaataattaccgatgaaaataacgcaacaaatattcaaacatcaaacataattactaatagtatatagatatatatatatcagggtgttacaactctcccacccttttagaaatttcgtcctcgaaatataccttactcaaacaaggatgggtgagcttctcacatctgactttctaattcccatgtggcatcttctcctgatgcacctccccagatcaccttgaccaacagaatctctttccctcttaaggtgtttgtttgcctatcctcgatcctcanatgcaatgtttcatatgtcaaattcttcttcactttgacataatccaattcaatcacatgggatggatcacggatatactta

SEQ ID NO: 69256 - DNA, 482 bp, Glycine max
  unsure (1)..(482): unsure at all n locations
ngtaggattatggngtacccatcacatgtggtactatgtggcagtcgggcgatggtgcacaacaagttatccacatccacaaagcgcgcataaacccaccatcccctgttgcccacctccaactgagctcacgtactcccacgtagcccataacctcgtttctctcaacaccgggtacccatcaatcctcccaagctttcccaacatcaaagtagatcaacattcaaacagcacaaattaccacagccaagataacagggcaaaggcagaaaactctgcccaaaacaccaaccaaaatcacagatnttctcacttaaagaccccaagaacaattccttcgatccaattcgttaaccgctggatgcgactcaaaactttactggaagtctatagtacataagcctacattgtgacccgtgngatctactaataaacatccagaactcattgtgcactactctgttcacagccaaccacacaca

SEQ ID NO: 69257 - DNA, 328 bp, Glycine max
agcttagccctagaggggatggacctttccaagttttggagaggatcaataacaatgcctataggttgaacctcccggaagagtatggagtcaacaccacttttaacatttttgacttaattccttttgcaggtggagctgatattgaggaggaggaactaatagatttgaggtcaaatccttctcaagggggaggggatgatgcaatcctccctaggaagggacaagtcactagagccatgagcaagaggctccaagaggattgggctagagctactgaagaaggccctaaggttctcatgaaccttacggtagatttttgagtcat

SEQ ID NO: 69258 - DNA, 400 bp, Glycine max
  unsure (1)..(400): unsure at all n locations
nntgaaagtgtntgttttcaccttctcgctaagccaatctgttggcttagcgagcgtccgctaagcgcaacactcatgggctaagtgtggggaagacactggaagaagatgagctatacaggttcgctaagtgcactgcttcgtctcactaagcgcaccgcttcagtccatccgctaagtgagaaaggcacgtgctaagccaaaattcactaatgttcgttaagtggtccataattgtgctaagcggtccataattgcgctaagtgcacgagcacaaacaagaccacctatttaagcctgaaatcaaattttagagagagaagttggactgggattcatagctntgcatgtctagagattctagagagagaaaggtccaagttccagagtgttttgagag

SEQ ID NO: 69259 - DNA, 439 bp, Glycine max
  unsure (1)..(439): unsure at all n locations
agctntntggagtaganacatgggaccaactcattttatttcanaaaggaagtcgtatctagtcaaggtcttagagaccatacaagtttcctaacgatttctaattatgtgggccattaagtctatcagatgctgacaatagccgagaagcccatgaatctcttcgggggcggagtaggtgtctgccatcgccttggccttggctaacaatcggggaagttcttgactcccgttcaaggtaagagcaaaccggtccatccacatggttgcctcttggtgtaaagagtcgatcacccttcctctagcctctttttccgcatatacttgagcatactcatccacgattctatgctcgtgggccgtggctagacctaactcttcttggtacttggcgatgatagctagcatgttggtctccgtctcgcataaacgctgagac

SEQ ID NO: 69260 - DNA, 426 bp, Glycine max
acaagtcaagggtggaaagtatgatattagaggataaattgaaggcttatcaaaggtcaaagagaagtttaaccaaacagctgagtaggatggaagagaatatgttgacaatcattgaccagtataaagagaagctaaatctaactactagccatgagcagagactagaggatgagcatgcgaaggtatcggctctgtaagtggaaagggaagcaagacagagggtgatagaatcattgcccggtgaagctgtgaaatggatggatagattcactctcactctaaatgggagtcaagagcttccaaggttgttagccagagcccaggcaatggcggatgtatactcagctcccaaggaagttcatgggctcttcgattattgtcaaaacatggtcgagttgatgtcccacataattaggaatcact

SEQ ID NO: 69261 - DNA, 403 bp, Glycine max
  unsure (1)..(403): unsure at all n locations
aagcnttgttataaagttgttatgacaaatggaagctttatcatgtttccttgtggtttataatgctatcttgttgggggtgttccccttccattcacaaaaaaaaaaaaaatgccacaaaataaatattntattaagactgttagtttaatttagatgataaaatcaaattaaattgattttaaaaattagaaaactaaattaaactaaaaaatagaatatcaaatcaaatctaaataataaattagatgaaaaacactaatttaacctattatataaatatatattataaatggttaaatataaaaataaatctattttgaatagaatttatgataaaagtatagattgaaattatagataagaatatctaagctaagcgaaagaagaagtatatttatag

SEQ ID NO: 69262 - DNA, 392 bp, Glycine max
tctaatcctgctacatcgaacaagattaatggttgtgccatgcacagaataatctatgatttgtgatatgatagctagctagataaatatcatatcatgaattgcttcttttcatatacataacccccacccacgccttcccctgcattatttaatttcagtaaaactatatgaattttttgtccagagcggacttgcttcttatatggaagaagaccaaatttctgctgaattattaaactaagatatttagccttacggtttcaattataagtttcgttgcttatactgagatagccaaataatgatccgtgctctgtgagggtcggcattaatatatgtcttgaaaatatatctttagattgccactaattgtgggcgagcaagtacat

SEQ ID NO: 69263 - DNA, 304 bp, Glycine max
ccacacataagtggtttaatagtctatagcaagtgtgtgaggcttaatctttgcaacataaatagaaatctctcattccacagtattaaatatgagtgtaaagatacttttagtccgtatgaacaatcttatctcttatgtgtaagtctcgcaaaagtactctttttgggttcaatcttcgcaaatcatatttgtgtggtttttcgagcttatatgctttagacaacaattttttttactattcatagtgctatataaagcgttttatcgactaatcacaatataaacataattcgcaaagact

SEQ ID NO: 69264 - DNA, 240 bp, Glycine max
  unsure (1)..(240): unsure at all n locations
tcctatctaacttatgccgcaataggatgactttatctctttggcaacctctccgtgttcatgtagccaccacagactatactaggcgagagtactgagccaccttatctaacactccttgtgtaagcacagaaaatgttgctcccataccttatacatcctagcntattaatcattgtcaatttaagactcatactgaatgcatgcttattacgcctggcactaaacacactggctgac

SEQ ID NO: 69265 - DNA, 467 bp, Glycine max
  unsure (1)..(467): unsure at all n locations
agcttcccaagttnttaagttattcctcanaactgttctatgcatagttcccaaagtcctattaacaacttccgtttgcccatcggtttgtgggtgacaagtggttgaaaataacaatttagtgcccaacttgctccacaaagtcctccaaaaacgcaaatcatcaagcctaggtataggatgcctatatttaatggtgatgttattaagggctctacaatcagaacaaatgcgccatgtcccatcctttttanggaccaaaatcactgngacagcacaaggactcatactatctcttacccaacctttgctaatgagttcatccactttgctttgaatctctttggtttctttttgaatacttctataggctggnctatngngcaaagaagctcccggaatgagatcaatttgatgctcaattcccctcaatagtggtagtccacttggcacatttggtggaacat

SEQ ID NO: 69266 - DNA, 413 bp, Glycine max
actaagcttggctcatttgtgctctcgattatacacgtctaatcgacattctagtaaaagttatggacgttagaagttgcacagagcttcagttgtgcatcgtgagggtctcgatatattacgggactcactcggacatctaagttagaagttattgctgcttgcaattgcttcgagctgtcattttcaattacgagcgtctcgatatattacaagactcaatcggacatccgagtaaaaagttattgacgctagaatgtgctcataacctctattttcaatatcgagtgtgccgatatattacaggactccgacgtacatcccagtgagaacgaagtgtcgtataatttactacagcttctgttttcaattcagcgtacgaatatacaggactcaacgacctcgactaaaat

SEQ ID NO: 69267 - DNA, 430 bp, Glycine max
  unsure (1)..(430): unsure at all n locations
atccttaagtcacctgcggcatgaagcttccatttcaattacgagcgtctncatatactactgttcccaattggacatgcgagcacaaagttattgtcgcttgactnttcttacagcttctattctgaatttcgagcgtctcgatatactacgggacacaatcggacatccgagtaaaaatgtattgtcgcttgattttgctcaaagcttctgttcttgaattacaccgtgtcgatataccacttgccaccatcggacattcgagtaaaaagttattgtcgcttgaatatgctcagagcttatgcttcacacttgagcgtctcgatatataacgagacttaatcggacatccgagtcaaaaggtttatcgttagagttgctcaaagcttcatcttcaatacaagtgtttcgatatatacgggattattcg

SEQ ID NO: 69268 - DNA, 166 bp, Glycine max
tactaagcttatagcaatacacatggtcataacgtttcactcggatgtctgattcattcgcataatatatcgagacgctcgaaattgaataatggaagctgttgatctattccaatggtcataacttttcactcggaagtcctattgtgcacatgatatattgaga

SEQ ID NO: 69269 - DNA, 481 bp, Glycine max
  unsure (1)..(481): unsure at all n locations
agcttgtgaaatcaatggaatccaagatttcgtttgacacaagtcattcaattctgttcttagaaatgtgacctaagcgcttatgtcataatgatcctgagtttgtattatcaattctacgcttagtaacaccacgtatgattcaccatagaaagctacagtatcaagtaaatatagattatcattaaccaagagtgacctagttccaacaatatatgacttaaaagacaatctgaatatatgtatttcaaatgaacacaaataacccaatttgtccaaataagaaactgaaatcaaattctatctaaatgacggtacaacaaaagtgtttttcaatccaagtaatagccggtgcacaataataatttaaaatgacctatggctntcacctccaccaatttatattctcaacatagattcattttgggtgagtaatttcttacgcgatctattatatatatatattatattatatatatat

SEQ ID NO: 69270 - DNA, 430 bp, Glycine max
  unsure (1)..(430): unsure at all n locations
cttattaatatatagcctaatcctcaacaatacaacacacaaggagataatgcctatcaacctcccaaacagatattggtacccaagactgaaaccaaatatatgtagacatttttttaattgacaaaaatacaaaaagcacaaggtatgcatgtaactatacaagtatgggaaagtccaaaaaattcccaacatagaaccaaaatccaatccagttgttccactaatactaataagtttcacccaacaacagcacatgtattgtcatagaaaaataactgtattagagactctgaatgtttgtagcattaaattgtactnttttcaacgacaataaacacattggcatagaggaacatgtttctcaacaatattgatggcaacaacgattgttattgcgataaatataagtatactcacgatacttatg

SEQ ID NO: 69271 - DNA, 408 bp, Glycine max
  unsure (1)..(408): unsure at all n locations
agctnntctagctttcattggtgtattttgatctctctttggtgctctaaattgtgggagtatgctcaaatatatagggcaatnttggtttgttntcttgcttgattaagttgaattaagggtgtgtatgggatggccctaggcctataatgcatttttgaacaatgggacatgccacattgtccccgttctcttgctattaacgcctaaacgcgcgcccaccaagtgttcggtgaaatgcctcaatggcattagcgcatgacttttgtaagaaaacaacccatggnngcatttggtttgtacataatttctatttttggaatatgttttcattcccgaaaaaggctagagtaattgccccacatatatcctangcctaggaactataaatttatgccaaaagaacac

SEQ ID NO: 69272 - DNA, 503 bp, Glycine max
  unsure (1)..(503): unsure at all n locations
tattccatgcaactaatataatatgatagatttgacatatcaatatgatactcaataatatgcagaataacaatatgatagcaatacatgatagatntgacataataatatgagtttgttagcacaaacacaggaataaagagaattctctcaaacaaaaagtaattggtacaaaaattcttatacatgtaacttccaaactaataaaggcttctctaatataatatgatagatttgacataacaaaatgataccaataaatctgcaaaacaacaatacgatacaaatacatgatagatttgacataataatatgagtttgttagcacagacacaggaataaagagaattctctcaaacagaaagtaattggcactganattcttatacatgtaacttccaaactaatagaagcttcctaatagcaactttttgtagctttctaactaactactattgcaaagctaaaataaacagatttccatcagtctactaatcttatat

SEQ ID NO: 69273 - DNA, 454 bp, Glycine max
  unsure (1)..(454): unsure at all n locations
agcttcatgatgttgaatcaagattgattcaaggtgttttgatgataacaaagatgatgacaaacatcccaagagaatgagttcaagattgaatcacgaacacttcatgaatcaagagagaatgagttcaagattgaatcaagaacacttcaagaatcaagaggaaagttgatgtctagattcaagaatccagtttcaagattcaagtttcaagaatcaagaataatcacgttgaagattcatgaatcaagagcagactcaatcgagataagtactataaagtttttcaatacattgagtagcacatgaatttttccaaaacctttaccaaagagttttactctctggaatcgattccacgtattgattcgtgaccagtgccaagatgtttaaaaagcttcacctgattaaacgtccattgtntaaatgggtatcgatacatgtttgtatcgtt

SEQ ID NO: 69274 - DNA, 486 bp, Glycine max
  unsure (1)..(486): unsure at all n locations
cgatgtcattcanaacacactatgtagacctaaatgaagactatacatgcattgtttatgtaattgtattcattatgcgatataatttgttgtaacccgttactaaccaattaatattatcaagtactcgtttggttaagcaaggaaattgttggtccaacaaaaatcatttacgcgtgcagtatacatcattgtcataattgacaacacataatgacatgcatgcgtattacagtttgagcacgacaacacattggctgacttcagtacacattctgaaactagcagtcgatcgacaacacattggctgacttgactacacattggcgacaacacattggcttacttgactacacatttatgcgtgtctatttttttgtaaaaaaaagtaaacaatggctcggccacaaccatctatatatatggcagactaggctactaaatcacacattatcttgctntcaaataaatctccaactgatacac

SEQ ID NO: 69275 - DNA, 460 bp, Glycine max
  unsure (1)..(460): unsure at all n locations
agcatgtatcttggacccacaatcccattttccccttcctttcttcatctcanagaaagttcattgatatgcgtatctaaatgtctagatgtgtttntgtctgttgttactttcttaatatcttgtatagtgctggctgaatcagagtctatgaagtttatcttcatagagctgtcatgtctatatgtgtgtgttaagattaatgacaatcatctcatagaatagggtgtctgaaattacttcccaccatttagtgaagaattcaatgttgctagagttattaaaagattggcgaacaacaaatgactaatattggtgttgatttctactagaatgaaggaatctatttcgaattatagaaaacaaaaatgcaattgacctaccacatgaaaatgatggtttgggatcaatgtttaacctaactgcctatcaagtttatgatatatgcttcacgactttc

SEQ ID NO: 69276 - DNA, 463 bp, Glycine max
  unsure (1)..(463): unsure at all n locations
gcttanagaatgaagaaaagaaatntagaactaanagtgagagctttgcacaaagtgatgaggaaacaagaagaggaagaagattaanagcctcttaccaaagctttgagggaagaagcctcaaaaacacttgcatgaagcttggaagaagaagaagaagaagaagaaaatggattcctgtctctcccttgaggaacttgtgcaaatggtggagaatgaaggttccaagtttgattnttttttttgaagaaatgaagagataagacttatggatagtgacaagatcaatttgacaacatgaatgacccttgcataggccatgctcaacgtgcccaatgctgcctaatatggngtatttaagctttgattnttaactagaaatgactaaactagacttaagccaaaatgatataaaaaaaaactacttttgctaaaatgggganatctatcataatcttctata

SEQ ID NO: 69277 - DNA, 422 bp, Glycine max
  unsure (1)..(422): unsure at all n locations
agcttagagggccctggcaactgaggcagtatacggtgaaatatgttatggcagggtattatagtaaatactctaatacagcgggatatacatgttccattagagttgtcaaaatgggtcgtccaacccggcccagagggccaaggtgtgaaaatcaggtcaggttgagcccgcccgaattctttttgggttatacatttcctagcctggcctatcgggtcaggccaaactggcccactcttattttttatcataattatatcaaatttaaaaagtatatatttataatacttccncaacatgtcaatggcccattgaagcaggccaaattgacctatttctttttggaactcaattttgagagagtccagccaggcacatcagccatcggaccggaccaattttataactttagttgtact

SEQ ID NO: 69278 - DNA, 353 bp, Glycine max
tctaagctttgagttggccttttacttgcagaaatgagagttctccatttacaagatattctttccgttcttactgattttcattttgtgggtttttggtttgggtaatctggtgggttccttctatcttctccttgtttgtttttgttcattttccttgagaatacattgactagttgtcgcctaaattgaagtgtctcttttaggaggtgagggtgacgatcaatgcattcacttcactagcaacgaagtgagagccttgtctttcgcttatgtcaatcaatcaacatcaacgttgtcgatcagttttttgtgaggttctgcaaagtcaaaggttgggcataatcccctta

SEQ ID NO: 69279 - DNA, 238 bp, Glycine max
  unsure (1)..(238): unsure at all n locations
agctngcagaaggcgtgattgacgctttgtagataagactaactgcgcgattaaagaacgtgagattaccgcagcactctatgagctaacgccatgaggacgaccgagtactatgatccgcacatgatcagcgtacgctgcgttatctatcagtagtggcatcggataagttcagacgatgattgcgaacatggcgcatttaacacattattgctaatgtgcgctagactgaccatcc

SEQ ID NO: 69280 - DNA, 330 bp, Glycine max
tactcttgactactgtgatgtgacacgcctgctaatatactagtgagctatcaacgtgtccagtgattctatccaggccaaaacgacaggctggtggcttgtttacctccaatgaaggagagttcaagatgctatgcttgcaaaacacttgtaaaccttaaagcttgacagactttctacagatatagaggacacgaatggaacagactgatctacaccatatgtacactggatgcgaactgtcacccacgtagaatctgccgtgaaacttctcaatcaggactactatagtaggctcacactcacagaatgctggttgattgctataat

SEQ ID NO: 69281 - DNA, 378 bp, Glycine max
  unsure (1)..(378): unsure at all n locations
agcttcatgaataatagcctcaacatacttcttattcccagaaggaaattcaataaataggcctccttnttttttaatggagagggttaccacttctggaaaacccgaatgcaaatcttcaatgaggcaatatacttaaatatttgggaagccatagaaataagaacttatgtacccaccatggtggctggaaatacaacaacagaaaatcctagggaaattgaagtgaggaagaaagaagacaagtacaatataacttataatctattcatggaagaatctattcatgtttcatttgatgagtctaatgctattcctcgaagaaaggatattttaaatgatattgcagaatctttataacanatgcatattcatgga

SEQ ID NO: 69282 - DNA, 435 bp, Glycine max
  unsure (1)..(435): unsure at all n locations
gtataagcgcgggtctgggagacanaggtcaagcgttcgcgatgtgcgaggatgatattccgagtacttaggatttggtacgaccatgccctcctgatctccagctgggaaataggcgagtggaggaacgccccggcatttatgcaacgagcataatgtaaacctttacggatgtaaaagctctatatttgggcctaggctgtagagatcttccttatgttaaagctttgagtcttttgattctgaatatataatacaaggatctttcttcatctgttcctgggctctacccattctcattcatttgcatggtgacttctttctctgaaacggcagatccgatgacgagtcccccgaaggtactaatacctgagacccggctatcgacttcgagcgagaaatgaatcatacggaatatgattgagatgangatgt

SEQ ID NO: 69283 - DNA, 462 bp, Glycine max
  unsure (1)..(462): unsure at all n locations
ctgcggcatgcaagcttcaatagctcaatgagcaaggggaaatgatattcaatctacaagtaaagatacatnnttttgtaggagactattgtgacgaagttntatgtgatatagtccctatgtaagcagagcacattttgttgggtagaccatggcaatttgacaagatagcaatccacaatggtctctccaatgaaataaccctcacccttggaagcaaaaaagttcaaacttattcccttgacatcttcacaagtggttggtgatcaagcacaaataacactcatataggatgaggaaaagaatagaaaaagaaaattagacaacctataatggtaaggacgagttaagttagaagtgtctctcaagagttagctaaaagatagcatctgcaatagggaaacattaaaaaacttccttctagaactctcagctaagtgcacatgtatttgtactctgctg

SEQ ID NO: 69284 - DNA, 422 bp, Glycine max
  unsure (1)..(422): unsure at all n locations
tcctaagttctgtaacaagcttagaacaatatacttggccttctcttaattgtctntgggcttagcgaccacgatcaacaaagtactttcggcacctactatatgttgacttgaccaacaatgttattggaatgctgggacaatctttcaacaccttattcacaaattctgataggttggttgtcatgtgaccatatcgtcgtccagatgtatcgtaagccatgctccatttttcctttgaaatgcgatcaatccatcttgctatggctggactcaattgatgaaacttttctaagttntgatcaaacacatgcttgcaaggagtgtacgctgcatcanatctgttatcatcgaaagttgtacgtagacatgaatctcagataaataatgtataaaataaaccttacccaatttcttgaaca

SEQ ID NO: 69285 - DNA, 306 bp, Glycine max
  unsure (1)..(306): unsure at all n locations
tctttcctgaagagacgaatattcttcgtctttccagcttttattgacaatactagtttgcctagttcctcaatgcctgaatctgaggatgatctatgaagactattagatcgcattagaggctcagcttctttctcaaaggcaaccaaatcagtctcagacgatcttcccaactgttttgtaaccacccactcgttagaacnttcatagcgaagtaatccagatatcatggcattaaaattaaataccgacatattgttctcaaatagaaggtaatgaactattaacggaaatgaccgtggagct

SEQ ID NO: 69286 - DNA, 428 bp, Glycine max
  unsure (1)..(428): unsure at all n locations
ctaagcttctacggaagttgtctcaagaaagcttctcatggaagctacctattctataaataaaagcatgagtaatacttggtggaactttgatgaatgagagtcttatgagacacacttcaaagttccacttctgtccctctggtattccttcaatatcgggctccccacttctctctgtcttttcctccattaaagcatcctcttcaagctgcttatccaaggcaattcttggtggtgaagctccttcttccttggcttattccctagcggatggtgcctcccctctcctattctactttgacttccgctgcatctccatggtgaaaaatcaccatcgaaggaccacattgaagctcagagatccatcctncatagaagctgcacaagcaagcttccatcaagtggtactaaaagacaagagcttc

SEQ ID NO: 69287 - DNA, 296 bp, Glycine max
accagcagcatgcagcttacaacgatgcgatcatagaatcagattatggatcgaatatctctatccacacagactacgtattctcgagcatccactgtttctgacacctggtattctcttacgcggatggcgttagcaaactatttatgaggcaatatttcctcattttagggaacccctaatcaataggtgcataacagcccaccacgctggctggaaaaaccacatgggattatacctacggaatactcatcttaagaatataaacgacatccactgattaaataattggatct

SEQ ID NO: 69288 - DNA, 281 bp, Glycine max
ccctactggtgtcttgtagccatctgtcaccattaatggtggtcgaaggagaagttttccctcgtcccatggtgggcgacaaattctcttacctagtttgaaagaaccttgtcgtggtggcgatcttccatgatctcctccacgaacaatgatggagattcttgcgaagacactctgacgctcaagggcgtagcctagagagaaatacgtttatacgtatctgggttacaatgagaatataatacctgaactgtgttcatcttctatatatacagggggaa

SEQ ID NO: 69289 - DNA, 377 bp, Glycine max
agcttgcttgtggagcttctatggaggctggatctttgatcttcaatgaggtccttcaatggtgagtttccatcatggagatgcagcacaaggcaaatgataagatgagaggggaggcaccatccactagggaatataccatggtagaatgagcttcaccaccaagaatgtgccttggataataagcttgaagatgatgctctaatggaggaaaagaaagagagaaggggggagcaccatattgaatgaataaaagagggagagaagtggtactttgaattgtttctcataagactttcattcatcaatttacaataagcgtacacatgcttatattatagactaagtagttccttgaaaactatcttgagaaaact

SEQ ID NO: 69290 - DNA, 425 bp, Glycine max
  unsure (1)..(425): unsure at all n locations
aactaagcttgatagttccccaatntatgggttatttggagtaaagtttgttaatatatctttctttatgggtaacattgtctctagaacatttccattggatttattgatgaaatctatacattttcaggtgaaaaagaggctaagttttgaattgcaaaaagtagaagttgggctaagcgcatgtccaccgctaagcgcaacttcagcgtgcttcacgcanaggagaatatggcagagcattagcatcaaagtcacgcgctaagcacgagattagtgtgctaagcgcagcaggtgcgttcagccaggctaagcgcaagactggcgctaaacccaatctcacttacccgcactaagcgtgaaggtggcgctaagcgcagcgtcgcgatttcagaccctatttaaagcctgtcttgtgcataatt

SEQ ID NO: 69291 - DNA, 461 bp, Glycine max
cagctgcggctcaacaggcacacacatcacggatctatattctctcattctataggattaacaaggctcgagaagtgaaaatgagaatggggagaacttggagcaaactcttacctcacacaagactataaactccttcattacaagcagaggactggttatacgcccaatattccaccgaatgaaaatttgacttctcaacattcaattgtaccctaaaaatggctcttggacccactgtggccactcatatcccacataagccagtctaagcgtactcataactcctaaatgatctttcagactaggattaactccctctaacgccccaataccactaaatccagaaattgccgtgctacactcatagactttctcattatccactcaaacaccacattctccattctaacctatgtaactcttccttcaatcgagcagcttcctagcaccctagccat

SEQ ID NO: 69292 - DNA, 376 bp, Glycine max
taagacgaggaagtgtcgaagggtgaaacttgctgctcttattgttgacttcatagaaggacctgcagatatgtcgcgagggtcatgagaccttgcagacgtcaggtggcgtgctattgcccaataccaagcttgaccaatccctaaccaacccggacataatctgtcagtgagaacctgtgatgtacctaaacaggcgagctcctggcagtcaacaggattaaggaacgaagaccacacaaccaatacgctcgtgtgggctggccagctgtgaacattgattgatatgtgagatatagtctctcgtaatcgaataccaacggtgggtaatcgattactaggcttaaatatgaggacaggaggcttagatggtctc

SEQ ID NO: 69293 - DNA, 362 bp, Glycine max
  unsure (1)..(362): unsure at all n locations
tgcaagcttgccacccagctcgcccaggcgatctcatctttgtcaggcgagcaaggttgcttcctccagaagcaacagccttctggaggaaggatctggaaggcccaagtgggccagattgctatttgcaccccccttnttactaaatgcacccccttctattatgttggtaattctttttccgtatcattacgaaactttacgaatttcgtaacgatacttatgttccttccgcaaggttacgaatccttacggattacatatttactctttattagctttcgaagaagttacggaaactcacggattgcgcanaaacacctcttttctacttcccgcacattacggaatttcacggatcg

SEQ ID NO: 69294 - DNA, 386 bp, Glycine max
actcagctcgacaggaagccatcttgcggagctctggaagagattattgtgtgattgtgaggtttctagaggtggaggagacatcctcactactattacttcttcaggctttcattatctcttttcattgttgtaaaagaagcttccctactatggagagctaaatcctcagttggttcttcctatggggtacttgatgtaaatacttcaatatttatctaatgatgttttatgtgtacgctgcgctatcagtactcaatgctaatgtgcctttaccttgatcacgtaactgcatgctgagttatggtcactcaacattgggaaaaggcttgatccttagaacctgataggacaaggctagcttatcgtacatgcgcgagacatct

SEQ ID NO: 69295 - DNA, 428 bp, Glycine max
  unsure (1)..(428): unsure at all n locations
agcttctattataagctaaaccatttatcaatattcacaagttgagtnttattcagaaaattagagtttatctcttttatcttagtgagagtgattctcctaaattcttgagtgattcaagaacaccctggctgtatcaaaggactttcacaacctttgtgtgttgccctcgccggaaagagtgattctttccttcctttcatcttcaaccttgttctttcaaaccacaattccagaaaatccacttctgcccagaattatctggtggccataactcccattttacgcactcaaattaagtgattcttgagcctagatngaatttcaaaacgagacctttcacctcgttgtggaatcacctcatttggagccctgtagcttaagttattggcatttctatatttctgtcaaccaccacttaacctacg

SEQ ID NO: 69296 - DNA, 445 bp, Glycine max
  unsure (1)..(445): unsure at all n locations
tcaatcatttccaaatatgcatgtgttttatgaagcatcaacaagaatcaagccaaggctattgtgtaagcaatcaatggggcaaaacacaccaaatgattatgatgatggatggctcaaattctcacaaaggtaaactcatcactttcaaattgagctntcaaaactatcatgacatgtagaggagaatcaaggatttcaagtcacaaaatgtcaagaacttttattttcaaaataattacccatttcttgaacatatcctataattcaaagaaaaacatgctaagtcgtacatgcacacaaaattgaaccaaaatattagactaaaaatctgacgaaactaacaacattaacaaattaacacaactatcaaattaacaagaccaacaaaactagcataaccatagagcactcctcccttccatactttataacacacattgtc

SEQ ID NO: 69297 - DNA, 366 bp, Glycine max
atgctatgctcttatagactctctcaatcttgtcattataaccgttacaagagctatagcctttagaataaccttgaacaccatttggaatagagttaacttttatagaagcttgagaccattgggaagaagtacatctgttgattgtggtcagatactatctactggtcatgcgaataccaaatgagtgtgatctactaccacaaagctttatgtgaaaggatgtgactcttcacaaatcaatatgaattttaacgttcaaagacactggtaattgattaccaacaccatgtaatcgattacacactttgaaaatatttgaaccgtggtaattcaccttgtatccttttgaaaaccattttgctt

SEQ ID NO: 69298 - DNA, 416 bp, Glycine max
  unsure (1)..(416): unsure at all n locations
taaggaggatacctaagctctctgctgaatggtactcatattttctgaanaggaagcctatggacccaaagatcaccaaggaaattgagaagaatgcaactttgctttcacacaatctctcactgcataatgccacataaagtgatcacgacaagttaaaaattcaggactaggataaggggaccaataatttgcaacttagtgctaccacgcgaatgaataaaaagacattggttcatgatgtcacatcatatgaaacatttagagtttgatcaatgtaacttcctgtcctactatataaaacattattgtcgagtattccatgatngagaatcacacatcatggcacttgaactcaaaggtctcatactctnttctctgttattatatcagcgcaaaaatatatctattactat

SEQ ID NO: 69299 - DNA, 334 bp, Glycine max
  unsure (1)..(334): unsure at all n locations
gcttgcggngaagagagaacagaatatttcttttgcggattatgacacagcgagacaaagagagaatgcttccgggaatataatatatgctttttatatatttaactgaagggcaaaattgacctttcattgaattgctgggtgcaccaccaatattgctgggtgcacctagcatatcccatactagtacccactattctaaacacagtaaccataattcaaatcgtttctcttaacaaaactaatatgtctaataatcatatttataacggacattttattaacggagtccaatttatcttggaatctctaatggattatttaactctgaaat

SEQ ID NO: 69300 - DNA, 327 bp, Glycine max
ctaagcttatcaatctgaattcattggcatggatgggcttcttgaccttattaattaatactatgaaacgtttatttatgtacgttaggatcttatctttgttcaaaatatcgtacgctacacttgtgatatcaacaccaatattactcccaaatatgtggtaaaaaagattggagcgtgtcctctcgactaacggatcttgtggggagcatctgagaaagggagtcttgaatactattccctatgaattcagctctaacatctagatgagattctgagaacttgagttttgaattaagcttgtaacctcctctagtgacctagtct

SEQ ID NO: 69301 - DNA, 282 bp, Glycine max
  unsure (1)..(282): unsure at all n locations
agctggaatcactgtctaaactaatatctagtagattgaaatatntggttagtatgtgctcattctatgtcacaaaagtcaaagctaattaatcatgtttcatttatatgccaaacataatcacagtagattaaaagatatagaaaagccaccttctatttctgaaaaagagtgactatttccagtatttgcattgttgttgctatcaatttaacttgaaggttcactactaaaaaaagcctttctacatcggacaattaacatcagctattgcgaaaactg

SEQ ID NO: 69302 - DNA, 312 bp, Glycine max
  unsure (1)..(312): unsure at all n locations
tcatgatgatgaatcaagttgattcaagtatctctgatgatatatataagcccaagacaatgatntcaagattgagtcatcaagttcaagatcaacgatacatctagattaatttcaagattcaagacatgacatcaagaagactcacgattccagagaagatgatttcacaatggaagtattgaaaataagtttttcaaaaaccaaacatagcacaattttgttttacaagaacagtttttctcacaattatcgaagataccagagttcttactctctggtaatcgattaccagcttgctataatcgatac

SEQ ID NO: 69303 - DNA, 339 bp, Glycine max
  unsure (1)..(339): unsure at all n locations
agcttcttagtttcagatgatgcagatgggtttgtatctacctcatgcactcctctaatgactatggcatcatntctggcgctaaactgttgggagttggaggccatcttctcaattaaatatctggcttcagcaggagtcatgtctccaatggctccaccactggcaacatctatcatacttctctccatattactgagtccttcataaaaatattggagaagaagctgttctgaaatctgatgatggcggcaactggcacatagtttcttaaatctcttcagtactcatacaagctctctccactgtagtgtctaatacctgagatattctttctga

SEQ ID NO: 69304 - DNA, 464 bp, Glycine max
  unsure (1)..(464): unsure at all n locations
cttctattttaaaacttctataccaccccatttctctccccctttggcaacatcaanaagccaaagtgtgtggcagtcaacgcaagatgatataagatataactaaagtatttataatcaatcgtaagtcacaaccaaatataagccaatcatccatatagtaaaaccaaatataatccaagcatagataagtcaataccaaatataatccaagcataaaagactaagtgccaattatcgaaagataacgatagttcataaaatgataacataaaaaagcatagccgaatacacggcttataataaaacataataataatctaaaaactaagaaagtggtggtgatggtggaagatcgaagctctgacaaatataagtcacatcttcttcaaactgggtgatacgggtatccatgccttcaaagcgaccatcctacgaatcgaatcgttcacaacatatgtgcg

SEQ ID NO: 69305 - DNA, 456 bp, Glycine max
  unsure (1)..(456): unsure at all n locations
agcttcatttggctttggatcccaagtagctntttctttgtcaatattttgtgaaggattcacaacagcttttcctctaatagtactcataatctaaataaatttttatgaataaataaatattaatttattaaaacaaaagacaaaaatagtaaagtggtgttttttattttatcatatatgttacatacacacttaatatcaaccaatacatntttatccctattatactcatcaaatatatcaagaacaagtcatataaactatataataaaaantaaaatataataagaacaaatgagaaagtaaaacatattatntaaaaaaaaaattatgatacatttgtnttggaagccacttanaaaatattttgtaacggtgataaaataagatatagtccataatagatgtaatatctaaacatagctaaatttaacacactctataaataaatat

SEQ ID NO: 69306 - DNA, 378 bp, Glycine max
tcatgatgttgaatcaagattgattcaaggatgtttgatgattacaaagatgatgacaaacatcccaagagaatgagttcaagattgaatcaagaacacttcaagaatcaagagagaatgagttcaagattgaatcaagaacacttctagaatcaagaggaaatttgatttcaagattcaagaatcaagtttcaagattcaagtttcaagaatcaagaataatcaagttgaagattcaagaatcaagaaaagactcaatcaagataagtactaaaaatgttttcataacattgagtagcacatgaatttttcacaaaacctgttaccacagagtttttactctctggtaatcgactaccactttattgtaatcgatta

SEQ ID NO: 69307 - DNA, 445 bp, Glycine max
  unsure (1)..(445): unsure at all n locations
agctngcagatgctatggtgacatggattgaagcttgtgattatctaaacccatctgggccaaaatctgaagcattgcccaatggttcagcaaagtaaattcttcatacatgtggctctaacgagggcagaggatatgcctatagctatcattttacctctttcaggttttcttttcatagaacaataaaagttgagcgactccttaatgatttttatattttgctcagggtggaatgtagcaatattatttaactttgaaatttgatagcgagattgttgcttttggaaaagatttcccatgcatttaacgctgtctgttattggtgttggcttcatcatctatganaagaggaacatcacgcacgcatattctttttttcttatgtgaaaaatgttgtaccgaggttcataacaatgtgttaataacttacagattcttgcag

SEQ ID NO: 69308 - DNA, 450 bp, Glycine max
  unsure (1)..(450): unsure at all n locations
tgtgctaagtgtgtgatgggatgtgtagagggttctatggaacctatacttatagtatttgagcgtgactattggtccttgtttgtaagggctattatagtttctgtagataattcctaacttgcagataatagctgggagcttacagataatgttagagataaacattngcttgttcataaaaggtagaagataatcgtaccttgtagataatgtgtgaccttatagataattatttacctgcccatagattagatattctaacacatttgaatattattacgttagagataacctggttgtttgggagcccaactgctaacggctaagtgttcgctctcttgtggcatggttgacctggaagcgggacatgtgtctttgagtgtcatgtaggatgtcgtacgtattatttgtgtcttggataatacatcagcccaccaagctcttatc

SEQ ID NO: 69309 - DNA, 331 bp, Glycine max
ctgcagcttgcgctctgtctcttctccatcaagcttcacctctcttcttcatcaatctccgctaccttcaaagtccctatctgcatctgagcatcgtgtgtgtcgcactcgagcatcgtcacaagtcgtctgcttcttctccttcgccaccatacctaagtatgtgtccgctcctttgcgttggcttctccttctcgatgtcgtcttctccatctaagctatcttgctctctttgttctccatgtaccttgaagctgtctggtctccatctgaaccatcgtttgactaagcttgagcatcgtcttcgtctgcactcgagcatcgtcacaag

SEQ ID NO: 69310 - DNA, 441 bp, Glycine max
  unsure (1)..(441): unsure at all n locations
ttccttgtatctttctcatatttttctatatatatctatcgctaagtgatntattcaaactagtagactattttcagtcttttatctatctaaatttctctatgtaacaaccataacaaataaacaatcaattgtagcacttatatgaagtgatttaaggtgcacagtgcaccccatatgcgactcctcaacgtacataaactaaacaaacactacacgttntataaggaactgtaagacatagtccctatcgagaacatttaataagaaaaggacaaaagggtgcatgaccatgaattatcaacataacatagtgtataaagtaaaaggcagacggatgaaatttgtcaaataagaagagcatatacataccatgtttgttgacactatgtctgtcataggaagaaacacgtggtattatgtcatcagagagaatcatgg

SEQ ID NO: 69311 - DNA, 418 bp, Glycine max
tgcagctaccaaatgacaaggctttcgcttatttcattctggaagttttatagacgtggggtcatctggtgaaggctacaatatcaatatagggcagggacacatgcatgatgttacttctattccacatggcatttctaattcacacatctttgaatttgctgagaggttccctttcacaccaactacaacaacatacaatatcttgctgaaggcctgaggtactgattattaccatgcaaaagcattaatcaaagagatggtaacagtacgtccttcccctaatcagataagctggtcaattttgatgatatatgcggagcatatctcatgtggagggtgcactgaggtaaaatataaaatctacaatatttgtttcacatcaattagcaacagttttttgaacctttatagtcaa

SEQ ID NO: 69312 - DNA, 427 bp, Glycine max
  unsure (1)..(427): unsure at all n locations
ttcgtttgtatgagttgtatttatgtcaactaatttctttttacattctttctaactcctatctttgttctttatttgctagcttatatcttatatattgctctggtattatgccatcgttgccatatatatgttgtcgattagtcaacactccctgcctcaatcgatgcatgctctggttatgtgagtctttcgggatttattttctagttttgaggatattacaagtattgatttctatataattgaggattagtagattatatgggtttgattatttttgaattaggatttgagcacgactcaaccagctcataagaaagaattgactctcacccgccctgatgagaattgagtctctcctgtgaacccatcatattatctngaaaaatagtttgatacacatctcatatgttattccatagag

SEQ ID NO: 69313 - DNA, 427 bp, Glycine max
  unsure (1)..(427): unsure at all n locations
acctgcggcatgcaagcttataagcgcgggttcgggagacanaggtcaagcgttctcgatatgcgaagatgatattccgagtactttggatgtggtacgaccatgccctcctgatntccagctggggaaattggcgagtggaggaacgccccggcatttatgcaacaagcataatgtaaacctctacggttttaaaagctctatagttgggcctaggctttagagttnttccttttgttaaggctttgtgtcttttgtttttttttataatacaaggatctntcttcatctgttcctggtctctacccattctcattcatttgcatggttacttctttttctgaaacggcagatccgatgacgagtcctccgaggtactaatacctgggacccgtttatcgacttcgagcaaaaatgaatcaacaga

SEQ ID NO: 69314 - DNA, 365 bp, Glycine max
  unsure (1)..(365): unsure at all n locations
ggccacccagctcgcccaggcgagcagggttgcttcctccagattcaactgccttctggaggaatcttctggagggcccaagagggcctggttgctatttgcacccncatttttactaagtacaccccctgctatgttttggagattcttttgtcgtaaagttacggaaacttacgaatttcgtaacgatacttgttctctgtccgtactgttacagaaccttgtggattacataaacataccctttatgacttacggaatgttacggaacctcactaattgtgcaacgatgcttccatttgatttccggtgtgtcacggaaccttgcggattgcgcatcaatattatcttttgttttccgcacg

SEQ ID NO: 69315 - DNA, 431 bp, Glycine max
  unsure (1)..(431): unsure at all n locations
agcttgccacccggctcgcccaggcgagctaggttgcttcctacagaaggcatcgccttctggtggtggaacttcctggaaagcccaagtgggtctggttgctatttgcgcccccctgtttactaaatacacccccttgccttttttgctgatntatttttcgtaacgttatgaaaccttacgaattacgtaacgataattgttttctttccataatgtcacgaaaccttacggattacgtaatcatcccttctttggcttccagaatgttacgaaactttacagattgcgcattaacacttccttttgacttccggcatgtcacagaacttcacggattgagcaacaatgcttttctttgacttccggcatgtcacggaacttcacggattgcctaacgatgggtgccaagtacctcgaagtggtcaaac

SEQ ID NO: 69316 - DNA, 343 bp, Glycine max
  unsure (1)..(343): unsure at all n locations
cttatgtgatnagatgtgactcttcacattagaatctttatatcttcgatcaaaggcactagtcatcgattaccagaacattgatatcgagtacagctntttgaaattaagtggaacggtgtagattcaattagaaaactcttgtaaacaatgttgctactggtaatcgattacaacgatctggtgatcgattaccagaagagaaaaactctntgtgagacgtggactgagaataatcatgtgctactcaattcttgagagggaagcttgatacttatcttgataagcactttcatgaatgtggaatcttgagtcttgagtattgatcttgattcttgagagc

SEQ ID NO: 69317 - DNA, 341 bp, Glycine max
  unsure (1)..(341): unsure at all n locations
cttgactgcggtttctattgttctcaccatcttcaaggatgcgtggagaatctgtagcacttgtgagccttgtcagagagcaggcgtctcactttcatgcagacaacaaatgcctcaacaacccatgttgttctgtgaggtgtttgatgtccggggtatagactttatggcgcccttccctgtctcttttggttttgcttatattctccatgatgttgattatgtttcanaatgggtggaagccaaagccaccagaactaacgatgctaanggttgtgtggaaatttgtagatctaatatgtnttgcaggtttggagtccctagagccatcgncagtgatc

SEQ ID NO: 69318 - DNA, 445 bp, Glycine max
  unsure (1)..(445): unsure at all n locations
tcatgatgatgaatcaagtatgattcaagtagttntgttgatgacataaagcccaaaagaatgatgtcgagactgagtcagcatgttcaagatcgcgattaaagaatagacatctagaataatcaagattcaagagaagatgagttcttgattcaagagaagaaaccaaaaagcttcgtttcaagacttcggaagggaagtattgaaaaagagttttcgaagaccacacatagcagagttttgttctacgcgagaagattttccaaatttttctaagttaccaaagtatttactctctggtaatcgattaccaattacccgtaattgattaccagtgatagaagttgatttcagaaagcgtttaactgaaattgcaacgttccaaattatttgtaaatggtgtaagtcgatacaatatattggtcatcgattaccagtgtatctg

SEQ ID NO: 69319 - DNA, 348 bp, Glycine max
agcttgtatgtgtaaagtctcacgattgtcacgtgttgattcatcaatcgttagtcgcggctatacgagacatcttgccaaacacagtcaggttagccataactcgcctgtgctatttcttccatgccatatgtagcaaagttgttgatcctgtcaagtttgatgaactcgataatgaggccgctattatactgagccagttggagacgtatttaccccctgctttctttgacattatgattcacttgtatgtgcatctggacatagaaatcaaatgttgtggacttgttatattccgatgacctacttgttgacacaaatgaatatcttactatgttataatattct

SEQ ID NO: 69320 - DNA, 379 bp, Glycine max
  unsure (1)..(379): unsure at all n locations
taattntcctatattgttcgtatatctcttgattggaggtatatttctatgttcttctgatcacttcgtactttcatatatatttattattgataaatacatctaaaatgtgttactctcattgagaggggaaaggtggaaaacttacactattggtataacaaccactgtaccaacttcaattctatttaccaagacaataatatttttattctcttagttcgctgattttaatgaatggtaatttatgtccatattaattattcttatcttcttatcaacgacgatagtgaagatgctccacccgattgagagacatgatatgctcataaagtattaccacgtctcattatcatcttatcaatatttatcgccatat

SEQ ID NO: 69321 - DNA, 392 bp, Glycine max
  unsure (1)..(392): unsure at all n locations
caagctttgccaaggaagaaaagaagatgaatttcnaggcttcaagatttctcacaagatgttcttaaaagttgtaaaagttattgaaatgcaagtcaaggtcttgcttttatagactcttcatgtctggtcaagaaaaccattggaagagttataatcttaagaaaaatcctgacaaccattggaagagttacatctcttgactttntgttcaaaacttgtcactggtaatcgattaccaaaaccatgtaatcgattacacaaagcattntatgagaggatgtgactcttcacaaatgaacttgaatatcaacgttcagatacactggtaatcaattaccagcatattggaattgattacacattctaaaaaacaattggaaccgtgcaaa

SEQ ID NO: 69322 - DNA, 435 bp, Glycine max
  unsure (1)..(435): unsure at all n locations
tcatgatgaatcaagcttgattcanagaagttntgatgataacttaagtgatgacaaaaaactcagaggtcaagaacacttcatgataacaaagatgatgatctcaagaatcaaagaatgagttcaagatgttcaagattgaatcaagaacatttcaaggtcaagaggaaatatgatttcaagaatcaagattcaaggttcaagcttccaagaatcaagatcaagattcaagactcaagattcaagaatcaagagaagaattaatcaagataagtatgaaaaagtcttttcataaactgagtagcacatggattnttctcacaacttggttaccaaagagtttttactctctggtaatcgattaccagattgatataatcgattaccagtagcaaaatgtttttgataaagtttgcaacttgaattacaacgttc

SEQ ID NO: 69323 - DNA, 295 bp, Glycine max
  unsure (1)..(295): unsure at all n locations
tgaggcatgcagcttcggaagatagtgatgaggtacaatctctatttgcagattcttgaaagagcccgagtagtcgaagagaagtgcaagtccatagccatcaaagtctgaaaagagtatgatgaactaatggacgtcaatatggccaccgctgaagcctnggaacgagaaaccaagaacgcccgataggaagaacacgtgccagcaaagttttgaggggctttatacggcagcaatagtaagctcaagctccgaagaggtgaaaggaatcatcatgggtcaaacgcatgatctt

SEQ ID NO: 69324 - DNA, 338 bp, Glycine max
accttgaaactcagcttccctatccgtacttggaaggatctgattactgccttcttatggcaatatcagtgtaactccgatatggctcccgatcgcactcagctgcagaatatgttcaagatagagggcgaaacctttaaagattactcccagcggtggagagatttggcggcacaagtagctcctcccatggttgagagagagatgatcaccatgatggtagacactctgccagtgttctactatgagaagctagtaggttatatgccgtccagcttcgccgacctagtgttcgccggggaaagaatctaggtatggttgaaaagaggaaagttcga

SEQ ID NO: 69325 - DNA, 380 bp, Glycine max
  unsure (1)..(380): unsure at all n locations
agctnttggtacaaagaagaagaagaagttcanatagattcaaggcttgtaaaggattgtaatgaaatgattggaaaagtattcaagatgattgaaatgcaaaacaaagccttgcttttatagactcttcatgtctggtcaagacaaccatttagaagagttataacttttagaaaaacttataaccaatttgaaaaagtcagaaaccttttgaagagttacatcttttgatttatttgaaaacagtcactggtaattgattaccaaattagtgtaatcgattacacaaagcatttgtgtgagaggatgtgactcttcacatttgaatttgaatttcaacgttcaaaggcactgtgtatatcgataccaaacattgtaat

SEQ ID NO: 69326 - DNA, 438 bp, Glycine max
  unsure (1)..(438): unsure at all n locations
tatcccatgatattgttaccaatttcttctgagtaatgtccccattccatataaaattatgaattcctctctccaaagattgaagcaaatntatcggccatgagtaaatgtgaaaggaatataataacattacttgaataacagattgcacaagttgaactcaaaccattatggagaaaaatgcacctttccacgaaaccaagtttggcataattntatccactattggacgtagaaaacttcttttatgacgaccttgaaagataggagaccccaaatacctaaaggggacagagcccattgtgaaacccataacttcccttattaataaatatttagcagcaggaatactatgagcataaaatngacatttggtcaaactaagaagctgaccttannaccctataatgcacttaattacccacttcanaaagcatt

SEQ ID NO: 69327 - DNA, 356 bp, Glycine max
  unsure (1)..(356): unsure at all n locations
agcttgttgaacagtntactattttgattgattatgcagtggtttgctctgatttgaaaattctgtgtttgtgtatgaattgagttgatcgattgcatggattgagtgaattgcgatgcttatatcacttgctttgaataagtatgtggtaattaacagagaaagaacattaattcaaccccttagtttttcaattcacgatcaggactagccttgtgttattatcatacaaataaaaccctttgcgagttgtttcgcctgttaaaagcacatttttataaaaagattgttagtgaattagtttggtagaatacaacagagcacttcactggtatataaatatatcccactcagat

SEQ ID NO: 69328 - DNA, 359 bp, Glycine max
ctgagctggagagaaaccttggcggagaagtaaatacctgagtctagagtacccttaatgtatcatagaacatgagaagcggcttgtgaatgatcagcggtaggttgggccatgtattggctcaattactgaacagcatgggctatgtcaagacgtgtgttcgtgagagaaatgaggcggtcaaccaaacgacgataggaagatgaagcttcagtagataacgtatcttctaatgtggcatgcacacgagtaacatattccatacgagttgtgttgtggcgggaaccaagcataccacaatcggagagaatatgcagagtgtatttttgttgacacatatgaatgccatgctgtgacat

SEQ ID NO: 69329 - DNA, 147 bp, Glycine max
  unsure (1)..(147): unsure at all n locations
agcttgagcctacaggggatggacctatacncgttttggagaggatcgatatcactgcctattgggtgaacctgccgtacgagtatggattcacccaccctactaacactattgacttagtgtcttttgctggtggcgctgtgattg

SEQ ID NO: 69330 - DNA, 488 bp, Glycine max
  unsure (1)..(488): unsure at all n locations
gatcttagagcaccgcggctgcagcttagcttgtacannagaaataattattcttcacatataaataaaaaataaaaattgagctccacaaaaaacaatagtttgaaagacaactcaagaatgttggcgaaatcaggaagtattgctacaaagataacattgccaaagagctggaataaccatcagcctaaaaaaatntatggcaagcaaagcaagttccgaccttcttaagaactacatttggaagcttcaaaccaacaatattggagacacagttatttaaactgtaaaactaagtccactgcttctgggacacagacaatgcatctggtacttcactggggtcaatgcatctaggagaaacacaanggccagtacatcttggaaatagacggggccagtgcatctaggataaagactgggccagtgcatgtatgacaaagactggacagttgaagccattgttgagagagacatgaacaaaaact

SEQ ID NO: 69331 - DNA, 436 bp, Glycine max
  unsure (1)..(436): unsure at all n locations
cacacaattactcacactttcatattacgacggtaaatgcngcgaaaggcatgagtaatgcatcataacttcaactaacataattaataataataaaataaaaatgattaatcaaatttgcatgcgtgaagaagcatttctataacacgaaattaaccaaaaaattgtgataaacaaaagctctcggctcccacgacactacttcaacctactgctcccccctctcatcgtcaccgtcggaactgaagagaacaaaatacataagacaacctaatcaaagaataaataatatcaataataagacaatagaattgattatgaggtgaggtgaggtatgtgtggatcgtgttgtgagtgatggattcaaccttaacattcaatctaaaatgaatgccacataccttatggctacacatattcgacactatcattattc

SEQ ID NO: 69332 - DNA, 331 bp, Glycine max
  unsure (1)..(331): unsure at all n locations
acctgaggcatgcaagctggaagaattgcgagatcatcttccttgatatctccttgttnatnanngccatcaatccaaagagatgacaatttagagagtgatccaagactttcaaatggattttcactgaatttattaattgagtgactgagaattgttaaatctatctcccttgagttgcggagatttcccaaaaaagttggaattgttccttcaagttgattatatgacaaataaagtgcataaagagaagccatatttcccaaagaatctggaatgtatccttcaagttgatcgtttgacaaatgaagttcaacaagagaagtcaaat

SEQ ID NO: 69333 - DNA, 438 bp, Glycine max
  unsure (1)..(438): unsure at all n locations
gtgcatcgcggaacaatttcactatagaagatgngtctttattggattcctaattttcaacttacctatgtggaagtgacatcatggcagttaggtcccagctttccattgtggattcagtcacaaaaccaacttcattatgttggactatctaacacggagattttcgattctatttccacacagatgtgggaagcactatctcacgttttgtatttaaacctctctcgtaatcatattcatggtgagattgggactacattaaagaatccaatatctatcccaactattgatctaagctcaaatcacttgtgtggtaaattaccctaatcttacagtggtgtgcttcggtcagatccttcaagcaattattctttaatccatgaatgatttctatgtacgatcagaacatgcaaccatctatatttctgaatctgc

SEQ ID NO: 69334 - DNA, 495 bp, Glycine max
  unsure (1)..(495): unsure at all n locations
ttaagtcacctgcggcatgcaagctntgananaacaagacacgaatcatctatctattcattcttttatgtaaagctnnttgtaaattcttgtaaagatacaaagtcctctcaaaacatcttgtataataaaagtgtgaagtgatatatacatctgtaagataatcatactttttaatcggtgtgaaatcttttaaaaaatctagttgatttgtttagagccagcgatgatttggtaagataaagaatattgggtttaaatcaagcttggagtagagcttgtaagtctaggaaaaaaatttaaatttctaaaaacataattcaatccatgtgttatttgcttctacaaagtataagcttgaggttataagggatttggttgacaatgccgagaatataacattgtttgataactattgtgtttcaatggtgccaacattggccattccccaaatacatgcgtgagaatgagggaatgtgatacaatataatcgtg

SEQ ID NO: 69335 - DNA, 495 bp, Glycine max
  unsure (1)..(495): unsure at all n locations
ccttaaaactcagcttcttttaagcttctatccatgcactctcttggtggtgatgcttttccttccatggctttttccctagtggatggggcctcatctctcctcttctcctttatcttctgctgcaactccatggttgaaaatcaccattgaaggaccttagtgaagctcaaagatccagcttccatagaagcttctcaagcaagcttccatcaatttgtcctagtaaatttctattagcttttttttacaaggtaatggacaaagctttcaaaattatggttactcttggcaagatgaagtacatagttggacctttatggattgtgcaattatggttatatgtgattctaggcaatcatataaccccaatgttgatatgaaaatcaaaggatctcaattgacatacctgactcctagtagagaattctgtacatatgaatgttataccaaatatatcaagggttttcttaattttaattgtttnacaacaac

SEQ ID NO: 69336 - DNA, 322 bp, Glycine max
  unsure (1)..(322): unsure at all n locations
gaaaaacaccacacccaaacgcgccgcgagggaaccctatcgcacgccacccaaaactagaacgacgggcgagcaagacgagacgcacgaacagaggaaagccgacatgtcagctctgaaagaacaaaaggcccccacgaaggaggccacgccaagtaagaagcagctcatatagaagaacgcggccaccaccgccgctgccagtacggctgccgcagcagacccgactcccttggcaacgacgcaccatcctccctcacacacaggacgacggngaagggacgcactgcggcaccgaggcagccctcacccgcgaacaacc

SEQ ID NO: 69337 - DNA, 269 bp, Glycine max
agacaactcatgaatgttggctaaatcatgaagtattgctacacaaataacatcgccaaagagctggaataaccatcagcctagaaaaatatatggcaagctaagatagttccgaccttcttaagaactacatctgtgagcttcaaaccaacaatattggtgacacatttatcaaactgttaaactaattgcatctgttcatggacacatacaacgcatgtcggacttcactggggactatgctattatgaaaaacacacaggctcttt

SEQ ID NO: 69338 - DNA, 276 bp, Glycine max
aattcattcactaccaactatcaatatgtcatctatatatataaaatgacgcatccattatcatcaacatgtttcacatacacacatttatcactaacattaacttgaagagcatacaaaagaacaacttaatcatactattgtgtcaatgctctggagcttgtttcaaaccatacaaagatttaacaatttatttttaagaaaaaatattttcaaagaaagtcacatctctagactccataatagtgccattagaaatttcagatacttctgaat

SEQ ID NO: 69339 - DNA, 473 bp, Glycine max
cttcctgtcttcgatagtgtgagttggaataattggtaaacttctactattacaaagtttcaaacaaatgacatgagtaatgcatcacttaaaaaaataatccaacctgcaatttaatttaatacaagatttaggacacatacctaaattggggttgggcttctatacagaatcacttcttttggatcattcacagctacaaaggttgatgcacttcgatgatgacaaaggaacacgacggcagagcggcatgggagatggcagggtgggttgcaattaacgaagggcacgatctcagtcatggtatgggcatggtcgggttagtgagtgaaggattcaaagagtgaatgaagggctgagtcactgatgctcataaatcagcaagcaaacagagatgggttctgggtttgactgtctttgtacgaaacttgtaattacaaatctggcattgcatctctattttcttattctac

SEQ ID NO: 69340 - DNA, 466 bp, Glycine max
  unsure (1)..(466): unsure at all n locations
agctntccgcaagacttacggaaagatcttagtgttgaccatagcagaggtgtccatagaagccattgcagcacttacccaatactacgaccagcccttgagatgcttcacattcggggacttccaattagtaccaaccattgaagaatttgaggaaattctaggatgtcctctcgggggaaggaaaccatatctttcctccgggtgtctcccctctttgagcagaattgcaactgtggtcaaggattcagccagaggtttggaccgcataaaacagactcggaacggcatagcgggcctgccacagaagtacctagaagacaaggcgaggggtatggccaatcaaggagactggngtcccgttatggatgtgttagctnttgctaattttggggtcatcctctttccanacgtggaggggttggtagacctagcagcaatcgacgctttccttgcctaccaccat

SEQ ID NO: 69341 - DNA, 466 bp, Glycine max
  unsure (1)..(466): unsure at all n locations
tgtgcaaatcaaatcactcctacatctcatctctagcatgcattttctttctttacccactcctcacgtttggttntttagggaaaaacaccataactaaacgcgccgcaagggatccctatcgcaccagatccaaatctagaacgatgggcgatcaagaggagacgcaggaacagatgaaagccgacatgtcggctctgaaagaacaaatggcctccatgatggaggccatgttaagtatgaagcagctcatagagaagaacgcggccaccaccgccgctgtcagttcggctgccgaagcagacccgactcccttggcaactacgcaccatcctccctcanacatagtaggacggngaagggacgcactgnggcacggtggcagccctcacctgggatacaaccgagcggcttacccttatggatggccgcccaactattcaccacccatcttgcaagaagatgc

SEQ ID NO: 69342 - DNA, 382 bp, Glycine max
accaagagatgcgtttcttaagacaaaagtggccttcaaattactggtattactggcgcagacactaatatgtttatgtcagaatactagacgctgacaaacattcttcattgaacacaaaagcttcatctttactcaacaaattgcacagcgatttgactactttgtagaaatatgtatgaatcgccagtagaaccctgcatgccctaagaggctcatattcccctaatatcatgggaggaggagattttcaaaacatcattttagataggacgcccaatgctgtgacagaatttactcccaacgctattccttctgaaccatgaaaggcgtcctccaaaggaaacaaataatatcttcttttctataatctcctcaggtt

SEQ ID NO: 69343 - DNA, 410 bp, Glycine max
  unsure (1)..(410): unsure at all n locations
attgcgacgctgcatttagagctactcttgctcnttgcacgggtaagtggattcgggcttagcgtcagtggtgtgctgagcctggctaaagatgttggacaagtggcctcagaaatattaagaggggggtagaattaagatttcattgactattcctaattgagaatttccttttctttattattcccaagattcaattatttctttgttaacaagttactgaaatattaaatgaaggaaagtaactcaaagaaatataaacacaacagaaagttaaggagattaaggaaatgttaagacaacaaaaattacaagagataacggaagagagaatgcaaaaccggatctatactggttcggccacaacccgtgcctatgtccagtccccaagcaacccgcttgagatttcc

SEQ ID NO: 69344 - DNA, 426 bp, Glycine max
  unsure (1)..(426): unsure at all n locations
atatatatggnttagatcaagcctcccgncagatttttccttatgttcatgggatcaatgcttcagtgcgttttgataaaaaccctacggatcaatgcatataccataaggtcagtgggagtcaaatatcgtttcttgctttatatgtagatgatatttgacagccaatgatcggcgtttgctacatgtggtgaaacaatttctctccaagaattttgacataaaggatatgcgtgatgaatattatgtcatcagcagtgacatgcatagaaatagaccttgaggtattttagatctatcataagaaacctatattaacaacactttagagagatgttggatgaaagattgtccaccatgcgatgctcccattgtgaccggtagattgtttaatttcgaaccagtgcccaatgaatgactttgata

SEQ ID NO: 69345 - DNA, 496 bp, Glycine max
  unsure (1)..(496): unsure at all n locations
acctgaggcatgccaagctttgacccaagaccgcanaccaccataattcttgtcccattataagaatttccatccctgtcctcggaataaggatctgtcataccctaatttcgtccggggaccttngcttgatgacatgcgacctttctttggtccttgtgaggtgcttggcatccatcattaggcaanttgtgaaattccaggacatgccgaacaaccataaaaaatattgatgcacaatccgtaagtctccgtgacacatcggaaatcaaatggaagcatcgttgcataattaagtgaggttccgtaacattccgtaagtcaaaaaggggatgattatgtaatccgcaaggttccgtaacattaccgaaagaacacaagtatcgttacgaaattcgtaagtttcctgtactctactgaaaaagaatcaccaacaaaagtcaaggggggtgtattagtaaaatgggggtgccacaagaatttctaactcgccctt

SEQ ID NO: 69346 - DNA, 465 bp, Glycine max
  unsure (1)..(465): unsure at all n locations
tcttttcttctctcgcttcccaaaaccactctctttatatgtatcttctctcttantcaaagggccttgtcttttttatttcgcttaattaatcgaatcatcatcttcgntttctttattctttttttttatgcatatattcggacaaaatcaatacacacttgatacaagcatgtgttttgcttgcagggtatacaacaagacgaagagattcgaaggattcaaagagaaaataaggccaggtattgctttaaccttcgctaaattagctatcaggttcagtttacttacctaagtgttgagagtgaacactgagaattaagaatttcttttacacaaactgcttttgagaatctactagtattcctttgcattatgattcaccattggtgaatgaaaactcgtgaatatagatagatacgatttgggatgattcatccttgttgaacctatgaacccttctgt

SEQ ID NO: 69347 - DNA, 447 bp, Glycine max
  unsure (1)..(447): unsure at all n locations
tttctataatagggggagaagtgaagtgaatttgggttcagccccttaagcacttctctctctttcgaatatgcttggaaaaactgtttccgtgaagaaaatcccagccgaggcgcttccgaaacgtttccgtaacgtttccgtgagtgatttcgcgaaggttttcgaccgttcttcgacgttcttcattcgttcttcatcgntcttcagtcttcaacgggtaagtacctcaaaccaagctttttgattcattctatgtacccgtagtggtccacatttggttacatatatttttattctcgtttcaattactttttataccccctgttgacgtgcttaagccattttatttaagtcatttctcgcttaacctaacaataaaataagtttccaccgatcgtttgaattgtattatccgtaaactttggttgaaatgaatttcgaccg

SEQ ID NO: 69348 - DNA, 334 bp, Glycine max
tagaacagacttctttgctatcctgctgacaagacaataggtgcttgcttggcaacctgtcaattgactcttccttatgtatatatatatggatcggatgaaacaaaagctatgttatgaggaacaattttcttctccaaaatcaagcctggagatgcctatgtcttcgtatttaccgaattttcttttacaacaaccaaacgattttttttcatcaaggacttagagcctgactgagctcttttgtgacctcctctttttaaagcccacgaacagcctgctcatcttttttttaaaatactcgattaggccgcccccccatgtcatctcactt

SEQ ID NO: 69349 - DNA, 352 bp, Glycine max
tactcctgacagatccaagcatggccaacactttggcctctataatgccaacacagggacagatcaattggagctcctcgaaatggacgcccaacactcctatcaacaagtgaccatggttatggctctagctctgtagggggctgcggctgccatcgctcgtcaacaaggcgggcacgtgctgacgcaatcactctacgatgcctttctgcgacatcttccccttcttacgaagtgccttcatggcgaagatgggttgcatcctcaaatgtatgatgcctgctttgcgcgagccatctgagaaaaaggatcaaaacgtcattatcccttcatgtaaccaattatatctaac

SEQ ID NO: 69350 - DNA, 417 bp, Glycine max
  unsure (1)..(417): unsure at all n locations
agcttcaacctagaggagacggaccattccaagtgttgtatattatcaacgacaatgcctacaagattgacttgcctagtgagtataatgtaagtgccactttcaatgtgtctgatctatctctttttgatgcagatggaggagccttggatttgaggacaaatccttttcaagaaggagggagtgatgaggacataaccaagggcaaggaccatgaagcacttgaaggtcccatgaccagaggcagacttaaacaagcccaacacgtcatagagacaaggctagtcatttgtatagctgccattgatgatgattgaaggcccaagtggagaaagatgaangcccagaggcagatgcactaccaagactactaatttgtgttgaaggcccaaactaacttgaaggcctcaagtaaat

SEQ ID NO: 69351 - DNA, 465 bp, Glycine max
  unsure (1)..(465): unsure at all n locations
gagagagaccgatcataagcacataacatggncttatattaagagttagttgcttgctcaaggtccaaaagaaacttgtctcagcgtctatgcgagacagagaccaacatgttagctatcattaccaagtaccaagaagaactaagcctagccacgacccacgagcatagggtggcggatgagtatgcccaagtgtacgcacaataagaggctagaggaagggtgatcgactcgttacaccaagaggcaaccatatggatggaccgatttgctcttaccttgaacgggagtcaagaacttccccgaccgctagggaacttgtattgtcactcacatcttgactagttatgaaactttctgaataaatgagcttatcccattgttttacgccaaaagtcagtgcgaatcagatcactcctgcattctatccctagcatgcattcataanttttacctactcctcac

SEQ ID NO: 69352 - DNA, 483 bp, Glycine max
  unsure (1)..(483): unsure at all n locations
ctacagcagaatttagtaatgacccactaacctagaattaatattcttattgccattaacctanggaattaaaacaaacttaatggctgagtgtaactgaaattgtggcaaccaaaagtcacccccaacagccaacaagtcagccaccatttggtctcccaaaaggctgatgcctaggttgccaattgggcccttattacaacttgaactaaagcccttttagttgattaacccaaaacatatttttggccagccaactttacaaggattgggccattatttagacaaactaaacactctaaanatgaaataaagtggtgtcatttagtcctcctccatttgggccatgatacaactcacaaccttggacttttctccttgaaacttgggcttgtattcaaatagtatggacaacacttgttgaagagcttncttggctttccttgctctagcccttgtcataagtcctccaagtcttcaagt

SEQ ID NO: 69353 - DNA, 494 bp, Glycine max
acctgcggcatgcaagcttgaatatgctgatacgaacataaataaatttgattaaaacgaatatgctcacctttattcacgttataatgatatgcacacttcgatatcattatctgtgatcgaaagagaagggatttgagaacttgaatttcatatagaccagtaaatggttagttttatgaacattctagtttctttcgtgactactacgaaatgtttagctactaattacaatacaggtaaagaggttaatctagtgagctcacgaattcaaaaaatagtataataatatttacggagagacaccgatgcttatggatttacataagaacaacggaatatcctggtctttcatataaaaacattctatagaataattaacataatatcctatacatgagttagaataaaacttactatatgcctatccgtaagtcccaatgtatcgatctgtggtgatggtgatcaataaactaccatatccctggagacct

SEQ ID NO: 69354 - DNA, 483 bp, Glycine max
gaggatgcttcaatggaggaaaagaaagagggagagaatattatatggtggagcacgaaattgaaggaggaataatggagagaagttgaactttgagttgtgtctcacaagactctcattcatcaaagttaaaacaagtattacacatgcttctatttatagacttggtagctttcttgagaaaactttcttgagaagcttctttgagaaaacttccttgagaagctagagcttagttacacatacccctctcataactaagctcacctccttgagaagcttccttaagaagattcctaaagaagctatagcttagctacacacacctatctaatagctaagttcacctccttgagatgagaagctagagcttagctgcataccccctataatagctaagctcacccctatgccaaataacatgataatacaatagaaaaagtccttactacaaagactactctaaatgccccgcaatacaag

SEQ ID NO: 69355 - DNA, 492 bp, Glycine max
  unsure (1)..(492): unsure at all n locations
agctngccacccagctcgcccaggcgagttgggtttgttttctccagaagcaacagccttctggaggaatcttctggagggcccaagtgggcctggttgctatttgcacccccattattactaagtacacccccctgcctttatttggtgattctcttttcttaaagttatggaaacttacaaatatcgtaacgatacttgttttctttccgtaatgttatggaaccttgcggattacataaccatccccttgttgacttacggaatcttactaatagtgcaacgatgcttccatttgatttccggtgtgtcacgaaaccttacggattgtgcatcaatattttcttttgttctccggcatgtcccggaatttcacaaatagtctaatgatgggtgccaagcactctacaaggaccaaacaaaagttgcatgtcatcaagcaaaggtccccggacgatattatgagatgacaccttgctctgcatgctgaac

SEQ ID NO: 69356 - DNA, 468 bp, Glycine max
  unsure (1)..(468): unsure at all n locations
ggcttctatggaggctggatctttgagcttcaatggggttctttaatggngattntccaccatggagatgcatcggaagacaaacgaacagacgtgagagaaggcaccatccattaacgaataagccatggaagaaggagcttcaccaccaagatgaggcttggataagaagcttggagaggatgcttcaatggaggaaaagaaagatggacagaaagagagaggggggagcacgaaattgaaaaaagaactagagagagaagtcgaactttgagttgtgtcgtcacaagactctcattcatcaaagttacaacaagtgttacacatgtctctatctatagactaagtagcttccttgagaagctttcttgagaatacttccttgagaagcttctttgagaaaaccttcttgagaagctagaacttagctacacacactcctctaatgactaagctcacctccttgag

SEQ ID NO: 69357 - DNA, 427 bp, Glycine max
  unsure (1)..(427): unsure at all n locations
ngctntaagcacccatgagtgtttcagtctcctatttccaagagtgtatgtagggttctcttcgagccacactttcaagagcagtgtatggggttttgtgggttcnagcgaggggtttccggcactattgaaaataatgtgggacaatgtggatgtcgagggagcggttttcggaagatttcacgcgggaggaaaaagacaagagcgatttcaagaaggaggacaaagagaagagggagggcattgttttccagcgcgcgggttgtgaaatgtcaacgtttaacttataaacataacaacatcgtttttttaaggataaccgatgttaactgaatatagataacatcctgtttggaaaagccgatgttaacatcaaatagattacatcgggtttttaataataccgatgttaagatcaactccctaa

SEQ ID NO: 69358 - DNA, 476 bp, Glycine max
  unsure (1)..(476): unsure at all n locations
gacagagacagaaggannattgcttatattcttcacatctttcttctaataatacaccacctatatataggtatatgcgcatgctacaagacaaaagctaataacagaatctctaaggcactaaataacagaattataaaagcataaggtactactgctcctaacagaattgagcactactgctcataacagaatggagcactacaaaataacggaattggtaccaaaatcccttaaacataatccttcgagtgcagaggtggtttggtttgcctcttgttgagtccttatcttcctcttcctatcatccctggcccatcaaaaacaccttgtcctcaaggtgttaggacttcaaaccacggcttaagaagtagaaccaggatcccaaattataatgtgtgaaggaaaatagctcgtgagcgaatgaangttagtgttgcggatgcanagccatttggcagtgtcgatagttgcat

SEQ ID NO: 69359 - DNA, 420 bp, Glycine max
  unsure (1)..(420): unsure at all n locations
agcttctaactccaatgcataattaagacttctattntgagcttattttaactcactagaatgtttgtagtgagctagcttgttcttaactcatcanaacacttgcattaatatgttctttatatatattttattgaaacactgggcagatatgttagtcatcataacattctccatcatccttatattctgtattggtaataatttgtcataattacaaccctatgaagtagactcaacagaaaggagttgcaacacatagtatccaggagacattagattttcctttcacatttttgacataatcgtgagtgtcgtgtaggtatgccaatgtgccacgttaaaaagtctctcgtcacactaggatataacagttggttcatctctgcatgtnttttcttttattacctacctaactac

SEQ ID NO: 69360 - DNA, 477 bp, Glycine max
gctggattcctttagtacggatcatccttctatttggtttctacccagtcaccctcattaagaactagctctattcttgctctattgcctttaggtgaatacacctttgtttggttctctattcggttcttaaccctctcatgcatcttctttacaaattctgacctagattccccttctttatgtataaaacaagtgtccagtgggaggggaatgaggtctaacggtgttaggggattgaacccatagacaacctcaaaaggcgactccttggcggttctatgaactcccctgttgtatgcaaattctacatgaggaagatactcattccaagacttatggttgcctttcagaagagcccttataagggtggataaagacctattcactacctctgtgtgcccatctggttgtagatgacaagtggtagacataacaagatcagttcctaacttactccataaagttttccagaag

SEQ ID NO: 69361 - DNA, 443 bp, Glycine max
  unsure (1)..(443): unsure at all n locations
acctcagagncacctgcggcatgcaagctngtaacgaggccaaaagtttatcatttagcttcatcctccaagtattctatttctttgatgatggcaacaatatgttcaaactttggatctagcgatctaagaattntctccataatttttacattatcaagccttttacccttctctttagttgattggtgattgctaagactttagagaaatagtcaaagatgaactctctttatctcatatgcaaggtttcaaacccaactcttaaagtttgaagatgtaccttcttgacttgatttgtgccacaagtagtagagtattcagaagtccgagtgtcgaatctacaaagactttgtttatacttatattaatacanacccaattctaaagtaatagataaagaatttaacatgagataagacaatataatatataagataaag

SEQ ID NO: 69362 - DNA, 478 bp, Glycine max
cgaagagaacccatcaattggtctatggttattgagtctaatttcttatactcttcaatagcacaaaccacataatcaaatttagcgattaacgagcgaaggatcttttccaccacacgaacatcttccatattgtctccataacgcttcatttggttcacaatagccaacaccttgttgccaaaatctgagatagattcagattccttcatatgcaatgattcaaactctctacgtagagtttgtaggcgcaccttttttaccttatcaacaccttcaagggaggttttcaaaatctcccatgcttctttggatgtggttgcatttgacaccaactcgaacatagcttcatccaaaccttgatgaatgaaagtaagtgcttggtaatccttcttcttcgacttcacacagtctccttctcatttggtgacaaaatagtctcattctgaggttgcgcataacctttctctacaatctc

SEQ ID NO: 69363 - DNA, 463 bp, Glycine max
  unsure (1)..(463): unsure at all n locations
agctnggaacatatgaactgaagcttcagaaaatgaatatcttctcaaggtagaggactccaatgcccagaatatgacacatggtggccccggcagcaacgatggttgctgactacatggtcaaactcaccagagagacgaacacaatggtggtagtggatgttgttgaatcagactggagagaaatatgtctgacaaaagataaaaaaaggagagaagcgcacgagaaccgcacatgagagagggtgggccacaatctatacccaataccacttgggttaggttgcccttgacagggcgcaccgtgaggttgccggagaaaatggtcaccggcacagacggtggtttatggcgacaaaagaagcaagcaacaatgaactgtggcggagagacaacaaagtgggatcatacctgctnntgctaccatgtaaaatcatggactacaatactgaactacagaagt

SEQ ID NO: 69364 - DNA, 410 bp, Glycine max
  unsure (1)..(410): unsure at all n locations
gttcattgcatcttctaaaacttcattattatctcaaaaagcttctatttttatctccaaactccatgaacacaagttcattttcttgctttatctcaaaaagctttgttttttgcctctatccctcttgatgtggctttgatgtgtgtcgttttccctctccgtcttcttctacgttttcttnttttacctctatatatttgcatttgtatgtgttttttttgttgtttgttctgcactgcatgttcattgttacttctaaagctacgattttttcctccaaaaagctttgatttttgggttatgacgctatcaaatattgattttatatctcagccttatatatctgcggttgaatatttgtcttcctttgctttggagttctttagtctggcttattttgtttgtag

SEQ ID NO: 69365 - DNA, 318 bp, Glycine max
ttatttgcatggtccgcttgaacaactatgaaccttcgtatatgactatgtggtttttatagatctgatctattcatgcttcttgcttcatgaatgcgtcatatgcttcaatgtacgtcttgtgactgattaactgtgcatgaccgtcttatccccgatacgcaccttaggctctttgatgttgccaatacgtgagagaaataggaattgtacctagatcttgcatatgtaatcaacctaatttcatgtacagcataaactccaacacctctggggacaatgggatcttaactgagtgaccactatgaaaaagtgtcc

SEQ ID NO: 69366 - DNA, 483 bp, Glycine max
  unsure (1)..(483): unsure at all n locations
tgcaagctngacataataattttcttaggtagggggcattacctcaattattagcttcctcgaaagcactaataaattcttgatcactacctataaagtcctttgcaaaacatgtttccctaaatgtatgatataccacgccgttgactgatctaatgtcactgtaagactgtgcacctttggcaatggatagcatcattctaaggtaaaacagttcaccatctgaaggtgggacccatatgagtctgcctattgattcccttgttttcttggctgccagcatactttgcgggcgacataaaccaatcttgagatatattgatgatatgtaagatcccgtccatatgaacatattttgttagaatgcatccacgctgagaacatggattctttgattgtgacttttgataggacttcacctatttagatgatcatcttgtncagaataacatgctgtttgatttcatagtggaatatatcttc

SEQ ID NO: 69367 - DNA, 347 bp, Glycine max
ttagagtcctttatcattgtggacggtgcgccatgttctcagaatgttgcataatataatgctcaaaatcacaacgctcaaaattataatgctcaagatcaggatgttcatcatcaccaattacagattgcacatattcaccagctatggaatgctcaaaatgatcaacaggtctaaaatgatgcctaactaatctatgaaatgtcctatctatctcacgatcaaagggctatgattcagatggattgcctctaggcatacactacattcagcatgcacactactaggtgccttgtcatgtatataatggcgtaagtttgaactacagctacccttatatgatattc

SEQ ID NO: 69368 - DNA, 484 bp, Glycine max
ctttatactcagctcggaggacgcttcatggaggataagatagagggagagaatttataggtgggagcacgatattgaaggaataaaagagggagagaagtggaactttgaagtatgtctcacaagactctcattccttaaagttacaacaagtgttacacatgcttctatttatagactaggtagcttccttgagaagctttcttaagaaaacttccttgagaagcttcttagtccaatggcttcctcaattttggtggttgttctctctttggtgattcactcaatttggagtgcttcttagtccaatagctcttaaggtggttggcccctttcttcttgactcaaattcttcaagggatggcatcaatccttcttccaatttcctatatggcaacccacaaacaaggaaacaaagagacaagctataaataagaccaaaaaaatgaaatgaaagctaaaccaatggatttttaacaagaaa

SEQ ID NO: 69369 - DNA, 381 bp, Glycine max
  unsure (1)..(381): unsure at all n locations
agcttatatcataaaaggacgtggcttaattctattgtttnngttattggttagaacatagttgatagttgatagctttagagaattgttctacaaagaatgctatgtcattgatttcttggatttatcaattacaacataccaattgcctatttataggctcaagtcaccaacctctcaatggtggcgaatgcttctacattactttaggactttatagagtcttcatgatacaataatatcatgatagttctacagtctttnatcttatacataaactcatagttctagactgttctaccatattcatacacattatagttctagattgcctaccatattctatagctctaggatattctactattttgatacatatta

SEQ ID NO: 69370 - DNA, 462 bp, Glycine max
  unsure (1)..(462): unsure at all n locations
cagaaattgtcacactcagacntggtatattatgttcatgcaccaaacggtntgacaaaggtcttcactgatgccggcctgatgaagtattggtttccattgacaagcatgccaagatatggtcaagatcggcctctagtgagtgatatggttgccaaaaaccaaagattactagtggtcacttctattgcttctaaggaacaaagtgaatgcattgcttaccagtggaatctcatggttgaaaatcagtgtaagaggataccatctattaaacctatctcattcttaagaattaatttattattgtttcctcttggcaacttactctctggtcatgttcttatctttaattttatacatggagatggcggtagaaaagcaggaagttgttcaaatagggcataatcatcttccctaacgacaaaagcaaaccttggtgtggtaactatttcatcacttcat

SEQ ID NO: 69371 - DNA, 484 bp, Glycine max
  unsure (1)..(484): unsure at all n locations
agcttatataagatgtgcacactatgctatagtttattttaaacggtgcttggcagctaagcttaaaggccttcaaatttaaactacgtatacatttgctgctntggatatttcattgctgtcagaaaagatgcaaacagttgcgtctgaaacaaggtattttgtttgcagcgggaaggagaatttgtgacgtgctgatgatgtaaaactaaactactctagttccggtctctaattataataaatccagtatcgggcagtaaaaaaaaaagtaatatttgcttataacaaagaagacaaagaaaggaatgcggatatcagtattctcaatatatcgaattctattgcctcgacacatataaactaacttaatgccacattctaaagagagtgaatctcttttctcttgccctatattgtggttcttctttttgtcccaactcagatacatttttacttactacccgactcccatgtgcgtgtt

SEQ ID NO: 69372 - DNA, 469 bp, Glycine max
  unsure (1)..(469): unsure at all n locations
tggcttctgatcctcttagaccagatcctatctcctcnntttcgtctcatggtcatgacagaggagcctctctgtcatctctgccagcttctcttcatttctctgcctgccactgtttgccacctctgtgttgatacaatctacatcggcttcttcgccaatcaacttctcctatgcaattttggagaaactctgatcagaattttctggcttggaagcatcaagtagaaccagtgctaaaagcacatcgacttcatcgattcgttgtaagtcctgaaattcctctgcaatttcgttcactctccaataacaatgcacggattgagaatcttgcttatcatgcttgggaacttcaggctcaactcttacatatcttggttgcagtcgtcactttcagcttcatttcttgccaaagctagatcatgtaaactaagcttgttctaacattgtgacaagatccatactaact

SEQ ID NO: 69373 - DNA, 500 bp, Glycine max
  unsure (1)..(500): unsure at all n locations
cactatatatactcaagctntccatcacctttgtanaagtntgttaagtcatggcagcctctgattttccttatacttggtggagtgggccaatcaggaatagcctttattctcttagggtccatgggaaccccttgatcactatttaaaaaattaaggaaagtaatgtaataaaacttacctttttctatattttcatgttgattattcctacaaaaaaatacgacaaacctaagttgtcccatatgagcacctaagtttgtattaaaaccaaaaaataagaacaaacctacctaatgagtccctatgtacatgaatcatgaagatgttgggtgcatgactaattntacaaaagaaggttgcaacactcaacacattcatcatatcacnttatttagggatttggtgcttaataatacctanggttgggtagcttatgtcttttttctggngtaggaactgagatcattgtgattgcttgtaagaattctatatgcata

SEQ ID NO: 69374 - DNA, 338 bp, Glycine max
ttctctagaagcaaccgccttctggaggaatgttttggaaggcccacatcggcctgcgtgctatttgcacccctattataactatatacatcccccttgctctatcttggtgagtcgttatccgtaaagctacgaaactttacgactttcataacgatgcgtagttcactctccgtaatgacacgaaaccttacggactatgaaatcaacccctatttggtttccgggacgtcatggaacaatacggagtgcgcacgaacactttcatttatattccagcatgtaacggaactacacagatagactacactgctttctttgactcgcgcgtgtcacaa

SEQ ID NO: 69375 - DNA, 203 bp, Glycine max
cctcatatatttaatggagagggttaccactactggcaaacccgaatgcgaatcttcattgaagcaatatacttgaactttcggtactagcacctatcgtcataccctaatttcattctgggaccaatagttatcggaatgcgacctttcgttgaccaccttaagaagtctctgggcagaaaccaactccattttgtcaaaaa

SEQ ID NO: 69376 - DNA, 407 bp, Glycine max
agcttatatatattaaatatacattaaatatctttttgttatatatatatatatatatcgacgttaattttttttaacataattaatctattagcttagttggttagagtgttgtgctaataacgcaaaagtcacatatgtattgccaatttgtatgggttatatgtaagggtatttctagtttcttctcttattgttgggtgtatcggaaaaattgatgggtgcaagaagaatatcctgatcgccaactcgtgaggaacagttagcccagtccacgaataagtgactttcaaaacagatggggtcggatactcataacaaattaaggtcgacgagtgatttactaatgactacaactctttcggaatttatatcatattcattaaaatgagaaaattgttaggtct

SEQ ID NO: 69377 - DNA, 446 bp, Glycine max
atagagataaggagaagtacatatattatatagaactattattgtatttaccatacttttggtttcctcatcacaaggatcatggcttccatgtatatccattcactctctcacagtctcacttccacttttcagtacttcccacgcactatcagtctactaccagtaccgcactgtctgcttttaaagcagagagatgcatgatatatcccagaatttaattgtagacttttgcttctccctgaccaaacaggatccagagacaaacagtctatatggaccacagatatagcagctttcaccaacttaaaaaaattaacatagaaaaataaaataataaaaccctaaatatcatgacactaaattagctagatcataactctaaaagcatattgggactaaagaagagatcccactcggagatgaaggttgtttgagtttggaca

SEQ ID NO: 69378 - DNA, 373 bp, Glycine max
  unsure (1)..(373): unsure at all n locations
agctntatttatattaatcncaccatgtatttctctatatacctttagatactaattnttttattatgaataagtgataaggtatattcttaaaantctgatttggataaattaatttagtttggcctgtaaaaaaatttagttgaagttgtgctgcaactcatactagaagataattacagcaacttacagatttctgattcagtaaataattcaatcaataatggaaatgaaagtttgagaacctgtgagatgcataagcttttcattgcaatcatttccatcagcttcgtttaaagcattttctatgtccattgcagtgaacatgtgcacagaatggcacccatttgatatccagatagtctgagacact

SEQ ID NO: 69379 - DNA, 451 bp, Glycine max
agacttgcataatcgattagagatagtctgataatttattaaacatagttttttcgctgaagaagtttctaactttagaaacaatctttctatctctacatgatgatgcatgatgtacatataaatagattaagactaagatgcaacaattaatacaaatgtcactcaaggagttggacatgtaaaaagacaaaactctttaaacttcaaagcttagtcttcatgttgctcccccttatctctaacactagtttctcaaattcatgattttggttcttcttgtttttaatcataacatttgatctccttaattttaaaaattggtgattctggttcatttattagattattaattgataattgtaattagtagaaatattaagttaattattaaattaattaaaattattattcattacaaaaactttaataaaaaattatgaatcctaat

SEQ ID NO: 69380 - DNA, 478 bp, Glycine max
  unsure (1)..(478): unsure at all n locations
ggaccttaagcacctgaggctgcagctaataagtcctaggatcccattgtattatatgatctcatggaatgagatgaagtgcaaaattgggaatcgattgctagttgtttggaggaattgacacttgcctgaaacacttgtgtgcttgagagaaacactggcttgtgagtaaagaagcttagtcaatcttccttgatgcctgtcatgcttgctaaccaatttcatttccttagcacattatcacattcttctatcttgaaattatgacaaatgctaatttggtggagatgatgatttgtgaaatgttgcaatcatctcatgtactatgattggtactttttgaacaagccattaatctaacttagcatagttagctntcttttgcttgacgacaagcaatgctttaaatttacgggagtgtgataactgatgtgcataagtagattatgtgatcaaaacatataagaattagcaatat

SEQ ID NO: 69381 - DNA, 310 bp, Glycine max
tgtaatcgattacacacatactgtaatcgaggaccttatgagtccttctagaaacagtctcaagcgccacatgtttacatctggttcttgaatggctaccagaggcctatatatacgcgacttcgagacacgaatgatgccaagagtttttcaaaacaccaaggtcttatcctcttaaaaagcaaaatcatcttatactctcacaaaatccttggccaaaacacttgtgactcaataaggaattatatgagtgctcaaattgctcactctatctctgtcaagagagataccttcttctttaattctttag

SEQ ID NO: 69382 - DNA, 285 bp, Glycine max
  unsure (1)..(285): unsure at all n locations
agctatacaaagctctctggtttctatttctttataactcgcgntattcatctatatcattcccttctccctttgccaaaaagaattcgccaaggactaaccgcctgaattcattttgcgtctctcttctcccttctccaaaagaacgaaggactaatcgcctgaattctttcgtgtctcctttctcccttgtcaaagaattcaaaacgacacagtttgcaaattctttagattcttctcattcccttatacaaaagtgttcaacggactaatcgcctgagaatt

SEQ ID NO: 69383 - DNA, 482 bp, Glycine max
  unsure (1)..(482): unsure at all n locations
atacgacactttatactcagctcgaataaacatcgaaagctctcgagaaattcaaatggtcattattntttacacggatgtcagattcnggcgcataatatgtcgagacgctggaaattgaacaacgaaagctctcatgaaattcaaatggtcataactttncactcggatgtccgattcaggcgcatcacatatgcagacgctcgaaattgaacaacggaagctctcgagaaattaaaatgctcataagttttcacactgaggtccgattcaggcttataatatatcgagacgcttgaaattaaacatcggaagctctcgagaaattcaactggtcataacttttcacacggaggtcagattcgggcacataatatgtcgagatgctcggaattgaaccacggaagctctcgagaaattcaaatggtcataaantttcacgcgcagggccgattcaggcgtatcacatatacagactctcg

SEQ ID NO: 69384 - DNA, 378 bp, Glycine max
  unsure (1)..(378): unsure at all n locations
agctattatgtgaaaggatgtgactctccacatttgttttttaatttcaacgntcaaaggcactggtaatcgattaccaaaacattgtaatcgattacaacttatctgaaatcaattggaatgttgtaaattcatttgaaaactttttcacatccattttgctactggttatcgatcactacaatctggtcaacgattactatagagcaaaaactctttggtaaacatgttttgagaaaaaatacatgtgctacttagtatttgagaaaaccttgtcatacttatcttgattaagacttctcttgattcctgatcttgagacttgaatcatgatcttgattcttggaagcttgaaccatgaatcttgattcttgattc

SEQ ID NO: 69385 - DNA, 323 bp, Glycine max
aacaacaacaaatacgttggcgattatttgtcattaggaagacatcacttgctcgcaaccaagcatcttaaaagctctggatgtgccaaagggctaccttgcactctatgttggagacaaaatgacgcagtttgttatccccctttcatacttgaaccaaccttcctttcaagatttgttgaatcaagcggaggaacaattcgggtatgaccattcaatgggtggtctcacaataccatgcagggaggatgagttcctaactgtcacctctcactttgataaccagtatatcatgttaatggagacacagatcgactagatga

SEQ ID NO: 69386 - DNA, 406 bp, Glycine max
  unsure (1)..(406): unsure at all n locations
agagcgacctgaggcatgcaagcttctntgagataacttccttgagaagctagtgcatatcttctacacccctctcataactaagctcacctccttgagaagcttccttaagaagattcgtaaagaagctagagcttagctacacatacctctctaatagctaagctcacctccttgagatgagaagctagagcttagctacacacccctataatagctaagctcaccctcatgacaaaaaacatgaaaataaaaaaaagttcttattacataggacactcataatgccccgaaagacaaggctaaaaccctatactactagaatgggctaaatacaatgcctagatgaaggcatatcctattttattatgtacaaagataagccgtctcatacttaggccatggg

SEQ ID NO: 69387 - DNA, 468 bp, Glycine max
  unsure (1)..(468): unsure at all n locations
gcccaactactttgtataatgtcatatctaaactaaatcatgatggtgntatttatatgtgncttagaccagtacaatcatattcatcatagnttgaaagctttcataaaacatgaaaatgattctgtgcatgaaaagctggaaacaacgtgttgaacaaaaactttctaaacatagcatcctagacaatgtcattttgagtaacaacattctgagtactgtagtcaacacaacaactttctaagtgttgatttatcattacataatcactaaaatatatatttatttatgtgatgatcttctaaacatgagcaaatgcacattgacattagggtttcataatcatatccaacatttaataatgagcgttgtgacgaagctaaccacttagaaagtcatactccgtaagtgcttggacctttgtgtaaaactttcttacaccaagtctatctcgagtataggtcaaaa

SEQ ID NO: 69388 - DNA, 422 bp, Glycine max
  unsure (1)..(422): unsure at all n locations
gtcacctgcggcatgcaagacttaccaacattattggtctgaaataactgttctctcattattgaataaagtcttgggtcatgtttataaaagaaaataatggtatttagaaaagacaattattaaaggtgatctatcaaattctacaatgaaaattagtcattgataaaaggataaatagtcacttgtgtccctaaatgtataattcagcaacaaatgtgtccctgaaagatgaaaatataaaanttagtcctaaaagtgttaaaagtacaacagatatatccgcccgttaacttctatatgtcactattaatgaaatagtctacccggcacaaagggacgaatntgacaaatgcgtcctaganaaatgaaaatataaaatttatgttttaaaagtgtaaaaagtgcgacaaatataccta

SEQ ID NO: 69389 - DNA, 445 bp, Glycine max
cggggatcaccatgacatatctttagaatcatcctctcttggattgccttctaccttgtttatcatcaacaagctttgcaacttactctggactcgctgtttcacttcaaacacgatactgatctcacttctccatcttttattgaaaaccatctcattcctatgaaaccagatacaatcaatggttataaaaaagtagtcacccaatcacgtggtagattccttcgtgaattgatattcaccttgatccaatcacacacaacattaagaagctcccctagatattccttactcgaccgcacactactagaaaatatagtttctacattggttattaagaacttttaatatcggttattaatcgatgttgaaattcccgatgctaaagtatcaatattaacatcggttgtttaaaaatcgatgttgttctagccaaaaacaaaca

SEQ ID NO: 69390 - DNA, 377 bp, Glycine max
aaataatcatctagcatctatcatctatcattcagtctatccaccactatcttctttcatctctttctatagaatatactgagtcatttcttggcctctttctgcacgtttttgataacaaaagctctttgttaacaaacgtgcgctattcatatattcattctcttctccctttgccaaaagaacaaaggactaactgcctgaattcttctatgtctctcttctcccttacaaaggattcaaagaactaaccgcctgagaattctttcgactgtgtccttccccttaagcaaaagatctcataggactcaccgcctgagatatctttcgttccccctttaccaagagtcataagacttaccccctgagaattcttt

SEQ ID NO: 69391 - DNA, 494 bp, Glycine max
  unsure (1)..(494): unsure at all n locations
agctngtaggattatggggtacccatcacatgtgtgtctatgtggtggtcaggcgatggtgcacaacaagttttccgcattcacaaatcgcgcataaacccaccatcccctgttgcccacctccaactgagctcacgtactcccacgtagcccatattctcgtttctctcaacaccgggtccccatcaatcctcccaagcttccccaacatccaggtaatacaacattcaaacagcacaaactatcacagccaagaaaacagggcaaaggcagaaaactctgcccaaaacaccaaccaaaaccacagcttttctcacttaaagaccccagtaacaattccttcgttccagttcgttaacgggtggatcgactcanaaattttactggagatctctagtacataagcctacattctgaccgttgggatcttctanganacatccagaactcattttgcactactctcttcacaaccagcanatgcatagcatttt

SEQ ID NO: 69392 - DNA, 427 bp, Glycine max
  unsure (1)..(427): unsure at all n locations
atgatggngacccggtgttgagagaaacaaggatttggtcttcgtgggagtacgtgagctcaggtggaggtgggcaacaagggatggtgggtttatgcgcaatttgtggatgtggaaaacttgttgtgcaccattgcccgaccgccacctagtaccacatgtgatgggtaccccataatcctacaagcttgagatgaggaagtgtataagggtgaaacttcctgcttttattcgttgaccacagagtggtacctggagatatgtcgcgggggtcacgagaccttgtggacgtcaggtggtgtgctattgcccaaaaccaagcttgaccaatcccgacctaacccgggcatagtcagtcagtgagaacctgtgatgtacctaatcaggcgagctccttgcttgcaacagataataggaacaaagacca

SEQ ID NO: 69393 - DNA, 299 bp, Glycine max
agcttgtatgattatggcgtacccatcttttgttttctatgtggcggacgcgcgatggcgcacaacaagttatccacatccacaatgtgcgcataaacccaccatcctctgatgcccacctcctactgagctcacgtactcccacgcaacccatattctcgtttctctaacaccgggtccccatcaatcctcccaagcttccacaacatacaagcataacaacattcaaacatgcacaagctatcacagcctagcaagtcagagcacagacagataactctgccaacataccaaccaaa

SEQ ID NO: 69394 - DNA, 461 bp, Glycine max
gaaagtggaactggaaacatcgagagagaagaaaattagtgttgtggtcttcggggagaacaaatgtttgataaaatttcacagcaacgctcaaacaagcaatgttggtaggcattatatatatgttatttaattcaattgtgagaactgaaattaatttatatagtcaataaaatgagaatatattctattttaaaaatatttatttatgtaatttactgacagcatgttttatctatattacaataaacaacatgaatgttttaatatagataaaaaatgtcgtcactaaatcataaacataattttataagataaatataatatataaaataaaaaacttatataaatatacatattctaatttatgtaaaaatagaattcaatcttatatgttatattctagaatataatatataagattataaaaatataataaatacataaatcgatgtgaacta

SEQ ID NO: 69395 - DNA, 490 bp, Glycine max
agcttatgctgctcaacattacaataatctcttctttctcttatcagcaaaatcaaccacaacagaacaattatgacctctccaacaacagatacaaccctggatggaggaatcaccctaatcttagatggtctagccctcagcaacaacaacaggagccttctccttccttccaaaatgttgtgggcccaagcagaccatacattcctccaccaatccaacaacagctacagccccagaaacagccaacagttgaggctcctccacaaccttccctcgaagaacttgtgaggcagatgaccatgcacaacatgcagtttcaacaagaaaccagagcctccattcaaagcttaaccaatcagatgggacaattggctcacaaataaatcaacaacagtcccatatttctgacatgctgccttctcaaatctttcaaaataccaaaaatgtcaaagacctcaacccgtagcacctttctcatcttgcaatg

SEQ ID NO: 69396 - DNA, 477 bp, Glycine max
tcagatgatgcagctgagtttgtagctacctcaattatctttctaatgaccatagcatcatttgtagcgctaaactgctgggagttggaagccatcttctctattaaatttctggcttcggcaggagtcatgtctccaagggttacaccattggcaacatctatcatacttctctccatattactgagtccttcataaaaatatgggagaagctgctctgaaatctgatggtgagggcaactggcacatagatttttaaatctctcccagtactcatacaggctctctccactgagttgtctaatacctgagatatccttcctgatggttgcggtcctagaggcagggaaattttttttctaagaatactctcttaaggacatcccagctcgtgatggaccgtgaggcaaggtaatacaactcagcctttgccactccttctaaagaatgaggaatagccttcagatatatatgatc

SEQ ID NO: 69397 - DNA, 464 bp, Glycine max
  unsure (1)..(464): unsure at all n locations
ctagagcaattcanatgctcataactnttcactcggaggggccttttattttgtataatatatcaagacgctcgaaatcgaacaatggaagctctttagcaattcaaatggtcataactaatcactcggaggtccgattcacgtgcataatatatcgagacgctcgaaattgaacaatggaagctcttgagcaattctaatggtcataacttttaattcggaggtccgattcaggcgataatatatcgagatgctcgaaattgaacaatggaagctcttgagcaattcaagtggggataacttttcactcggaggttcgactcaagtgcataatatatcgagacgctcgaaattgaacaaccgaagctcttcagaaatttaaatggtcataacctctcactcggaaggccgattgaagcgcattatatatcgagacgctcgaaattgaacaacggaagctcttg

SEQ ID NO: 69398 - DNA, 462 bp, Glycine max
  unsure (1)..(462): unsure at all n locations
agctntccgcaagacttacggaatgatcttaattttgccatagcagaggtgtccatagaagccattgcagcacttacccaatactacgaccagcccttgagatgcttcacattcggtgactctcaattagtaccaaccattgaagaatttgaggaaattctatgatgtcctctcgggggaaggaaaccatatctttcctccgggtgtctcccctctttgagcagaattgcaactgtggtcaaggattcagccagaggtttggaccgcataaaacagacttggaacggcatagcgggccttgcacagatgtacttagaacacaaggcgaggggtatggccactcaaggagactgcgtgccgttatggatgtgtatctgtgctatctatggcgcatcctccttccaacgtggagggtttgtagacctacaccatcgacctttccttcctacaccatacaaggaa

SEQ ID NO: 69399 - DNA, 432 bp, Glycine max
  unsure (1)..(432): unsure at all n locations
ataaatcctcctacatctatctctacatgcattttttntcttacccactcctcacgtttggttttttatggaagaacaccataactaaacgcgccgcatgggatccctatcgtaccagatccaaatctataacgatgggcgatcaagaggagacgcaggaacagatgaaagccgacatgtcggctctgaaagaacaaatggcctccatgatggaggccatgttaagtatgaagcagctcatatagaagaacgcggccaccacctgcgctgtcagttcggctgtcgaagcagacccgacttccttggcaactacgcaccatcctccctcacacatagtaggacagtgaacggacgcactggtgcacggnggctgccctcacctgggatacgaccgagcggcttactcctatggattgccgcccaactattcac

SEQ ID NO: 69400 - DNA, 479 bp, Glycine max
  unsure (1)..(479): unsure at all n locations
ttagagncacctgcggcatgcaagcttgaatcggacctcagagtcataaagttatgtccatttgaacntctcgagagcttgcgtggttcaatttcgagcatctcgacatattatgtgcccgaatctgacttacgtgtgaaaagatatgaccacttgaatttctcgagagcttccgatgttgaatttcgagcatctcaatatattgtcagcctgaatcggagctcagtgtgaaaagttatgaccatntgtatgtggcgaatgcttccttggttcaattccgagcatctcgaccttttatgtccccgaatataaccttccggtganaagttatgaccattctaatttctcgagagcttccgttgatcaggttccagcctatagaaaattatgcgctcgaactgacattcgtgtggaagaatgaccatagaatttcttagagcttcgatgtttattttcgacgagttttatatatacgcctg

SEQ ID NO: 69401 - DNA, 469 bp, Glycine max
  unsure (1)..(469): unsure at all n locations
cctatagaaggttcgntcctaatttctctacaactgtatcacttctcaatgagctagcgaagaagaatgtggcatttaatctgggtgaaaaacaagagcaagcctttgctatgcttatagaaaagcttactaaggcacctgttctagctcttcctaacttttctaaaacttttgagctagaatgtgatgcctctggagtgggagttggagctgttctgttgcaaggtgggcaccctattgcttattttagtgaaaaacttcatggtgcgacccttaactaccccacctatgataaagagctgtatgccttaataagagcactccgaacttgtgaacattaccttgtttccaaggaatttgtcattcatagtgatcaacaatcacttaagttcattagagggcacagcaagttatacaaaaggcatgcacaatgggtagagcacctatagcaatttccatatgttatcaa

SEQ ID NO: 69402 - DNA, 353 bp, Glycine max
  unsure (1)..(353): unsure at all n locations
agtcgaccgcggctgcagcttcggngtcccttgcatggattcctccgtattctgatctcccgcatggtggngtcgtgtctggcggcatggacacactcgtgtgtgtctgggacttgaagactggtgagaacgttcacactctcaatggccttcatctgcaagtcactggcattgcctttgatgatggggatgttgtctcctcttctgctgattggtagggtttttcaattatattatagcatcaaccattctatttgnttttgattatgctccactttgcttaggttccttgattacttaaagtctttcgatactgcttctgttcaatattgattcactttgacacttaactg

SEQ ID NO: 69403 - DNA, 355 bp, Glycine max
  unsure (1)..(355): unsure at all n locations
aggtgctgcttgtcttgggaagaccctccttatatattccaactgctggcagcagatgcgagattagtatgcactatgatacaaccggagaactctaaaatggnggtatggttcggtcgccctacatactagttatatgcatattgaaacaatgtactttgcagggctaccgcagatgaaattttgctactgataccttcacgcgcaatacgttatagtcaacgcttattggacaatatagttagtacttacaagacgacatgtcagcttatattgaatacttagagcgctatagcgcataccaagattagagcgctacgacaagaagcattctatccttatcagcataaacacg

SEQ ID NO: 69404 - DNA, 379 bp, Glycine max
  unsure (1)..(379): unsure at all n locations
aagtcaccgcagctgcagctggataactgtgctgaatntaatatttattgtttngcngctcctgtgttgattcgacctcctaccacaggttatatttaatagtgtattaaaaagtgaatttgcattacctgcttttctatattcattcgatctcacctgtcttatttattaattcaaggtatcaaaaaccacctgataaatgtaagcatatataaattaaggtcaaaactctcacataagtaagtatacgcttgtatcatgcttttaagacttagtgatccgtgggacgcgcggatatgatagataaactaattgagtaatttatatgacggctgaatgaacagtaacttcttatattactatctgactttgaacatta

SEQ ID NO: 69405 - DNA, 448 bp, Glycine max
  unsure (1)..(448): unsure at all n locations
acgttttaattagatagctcattacttttgatatgcttttagctaagctattgtgaaggcgattaacttatatcatgtcaacgcgttagacttgacttttataaaatttagctttcctatattcgcctttgtttcatgctttgagtaacgataaatttgatttttatagattatagcttgattcatagagaatgcttttcttaatattttatgagcctatcgntcaatgcatagaggagctagactatatataaagttcgtatatgaaataggcatttaagtaggttaagaagtcaagttaggctttcaaataggttcggtcacgcctaatataaaagcatatgataggtactatgctaggctcatgattgagcttttaaacatgctatactgatttaagcaaagttttggtcggctaagctatttccaccttgttaacattaaacat

SEQ ID NO: 69406 - DNA, 437 bp, Glycine max
  unsure (1)..(437): unsure at all n locations
gtcacctgcggctgcaagctngtattttctatanattataaccattcttattttgtccaatctatacattgaaagcaaaaggcccactacttatgtgcttgatatgtatctgcttactcagtttttgtggttcacattgaagctcatgctgggagtgtcaacgatcttcgcttttcttatccaaacaaacagctttgtgttgtgacctgtggagaggatatggtcatcaacgttagttgtcacataaactgtcatagatatcaatatcaatattaataaaaaaaccaatttcaagtgttctagattcttcacgtatgggatgccgtcactgtgccaacaatatacttttagggtcngaacacctgttattctgttgcctctcacaataagattcggtataattatttagtggttgtttggcgctgcccctgtttcat

SEQ ID NO: 69407 - DNA, 462 bp, Glycine max
  unsure (1)..(462): unsure at all n locations
gcttctttaagtcatcaacatgacgagaccagattatgtcgcattataggcgcgngctagtgagctatattactagagagttctcaccgcccacttctctagactagtttcgtacccatccactatatgtagcactaattttatattctcctaggtgtgaaacttaactttaaatcatgaagtcagccatccattggtaggattttcttatactaaaaacatcttttgagtcaaataaaattattataagtaacaatttctttaattaaattaaaataattttgtcaaataattcatatgtctgatttgaatattatagataatgtccttgntccaacaaagattatgactaagcactttaaaaagccaggttatactcaaatccacagcatgacccaaatagttgccaactagagactaattgtggaacatgaattactaattggatcggtctttatcaat

SEQ ID NO: 69408 - DNA, 448 bp, Glycine max
  unsure (1)..(448): unsure at all n locations
agtcgttttctcgtctaataaaaaanatantttatttttccaccgatcatttgaatggtgatattcattaatttctgctcacacgaaatccgaccgttcggtcatgccgtaaccacgttggaaaccaaaaagaggtgcaataataacataatgaactaacatattgtagcaaaataaaccaaacaaagcaatccgacgtctctcttagggatttctctttcttaattgaatcgactaataactaaagtgaaactaacgctaaaatcaacccgcaaagccaagcgtcgcctcaaaaatcactaaataaggattttaatattcaatacctcagtttttcttacacagtcaaaaggatgatttctatgtccaacggcctataatgatcacgcttcaagtcaaagaaccttctgttcaaccataagacatactacataggtctatcttctct

SEQ ID NO: 69409 - DNA, 500 bp, Glycine max
  unsure (1)..(500): unsure at all n locations
ttaagtcacctgcggcatgcaagctttgagccaattaagacgacaatatcttttttctcttatgacntgacgagtcccgtcatatattgagacgctcgaaattgaatgttgatgctctgagcatattcaaacgacaattatattttactcagatgtttgattgagtcccgtcatatatcgagacgctcaatattgaatgttgatgctctgagcaaattctaacgacgataactttttactcggatgtctgattcagtcccgtctcatattgagatgctcgaaattgatcgatgatgctctcggccacttctaacgactacaacctattactctggggttctggtcgagtgccgatacatatctagacgctcgatactgggtgttgatgtttcatcccttttattcgatcattcctttttactcggatggcttgattgagtccgacattttgtcctgacgctcgcaatggattgtgcagctcttgtcctatataatctcca

SEQ ID NO: 69410 - DNA, 445 bp, Glycine max
  unsure (1)..(445): unsure at all n locations
acttcgagcatctcgatatattacgagtctcatttattctttcgagtaaaaaggtattgtcgctngaattggctcatagcttcaacattcaatttcgagcgtctcgatatatctcgggactcaatcagacatccgactaaaaagctgttgtcgcttgaattcactcacaggttcaacattcaatttcgagctgctcgatatatgacgggactcaatcatacatccgagtcaaaagttattgccgtttgaatttgctcatagcatcaacattgaatttcgagcatctcgatatgtgacgggactgaattagacatctcgagaaaaagctattgtccttcgaattagctcagagcatcgacattctattctcacgtctcgatatttaccggactcaatcatacattcgagttaaaagttattgtcgcttgcattggctcagagcttc

SEQ ID NO: 69411 - DNA, 201 bp, Glycine max
aaagaaaaaaaaacgaaaaggaaaaaaagacaacgagacaaaaaaaagaaaaagaaacacaaaacgaagaacgaaaaaaaaggaaaaaaaaaaaaaacaaaaaagacaaaaaagaaaagaaaaaaaaaagacgaagaaaaaaaagaaaacaaaaaagaagaaagaaaaaaacagcaaaaaaagaaaagaaaaagagagaaa

SEQ ID NO: 69412 - DNA, 381 bp, Glycine max
  unsure (1)..(381): unsure at all n locations
agctnggttcccaacactctgttcaagctctctttcattctataggtaaatctaggatctctatcagatactatgctagatggcacaccatgtaacctgataacctcacttatatacaaggtggtcaacttctcctaggaaaatatgatatttatgggaatgaagtgagtagacttactcaatctgtcaacaataacctcattataatctaaaccgttaggggctctacgtggccctaccacataatccatggaaattctgtcccacttccactggggtatctctaacgagtgtaacttccctgaacgtctatgacgttctatcttatccttatgacagactacgcatgcatacccaaactcactaacctctattttcatg

SEQ ID NO: 69413 - DNA, 425 bp, Glycine max
atcctgacacaccttacaccttgacccacgggttgattgtctattcttaccctcggaagcaaaagaaaatgggatagggaaaatctccactcaaagaggaagcaaaaaaggagagaaggaaaatctccaatcaaaggaaaaaaagagaggaaagggaattcccaatcaaagagtgggagaaagcaaaaagaacagactgaaaattcccaatcaaagaacgggagaaagaaataagagatgaagaaagggaacaaagttcccgatcaaaaaaaaaaataatatgcacaaaggtctttgtaccggacaatatctgaacaatacagaattgtcaccacatgaataaaaagattgatagggaaccatgacctaaaatggtcttctccctttagttgccaggcacaatcttgtgcgctagcaaccttttt

SEQ ID NO: 69414 - DNA, 500 bp, Glycine max
  unsure (1)..(500): unsure at all n locations
agcttctntgagaaaactntcgtgagaagctctatcttatctacacacacccctctaataactaagctcacctcctagagaatcttccttgagaagattcctaaagaagctagagcttagctacacacacaccctataatagctaagctcacctccttgagatgagaagctagaacttagctacacaccccctataatagctaagctcacccccatgacaaaaaagatgaaaatacaaataaaaattccttactacatagacataggggtgaatcaaatcttatctttattaagaaataacattggttatcttgtcaaagccaaaacataaatacaaacgcctcagtggttcataattatgtgtgacatcaactcgatcatgtggtggaaataatcataaaggccatgatcttcatgcggagctgggtatacatccgccattgccttggctttggtaacagccttggaagctcttgactctcactcagagtgagagcgat

SEQ ID NO: 69415 - DNA, 480 bp, Glycine max
  unsure (1)..(480): unsure at all n locations
agagtttatcgaggctnggattntgtgaacctgtgatgtcatctttttgcgacttangtttgacgagtcttatgtgcaacgcatgtgttgtgctcttgcatacatatcactcatcatgggtggcatgtactggagacatcgtgccgtgaatcagtaggactaaccaagggcggaccttgggttttgcaagccctttggaggattgactagggaattgtctaaactgggttttgggcgccatgctgttgcatacatgtcactcaccatgggtggcacatactgcagacttagtggcgtgctcttgcgtacatgtcactcgttgtgggtggcatgtactatagacgtagtggcgtgctcttgcatacatgccacttgttgtgggtggaatctactagagacttaagggtgtgctcttgcgtacatgtcacttgcttggggtggtgtgtataggagacgtaatggcatgctcttgcatacatg

SEQ ID NO: 69416 - DNA, 440 bp, Glycine max
  unsure (1)..(440): unsure at all n locations
agcttgcctcanagagatccaagattgattattttgctgaaggaaccagctccgctcctgaatatgacagccatcgntttaggagtgctgagcaccagcagcgcttcgaggccattaagggatggtcatttctccgggagcgacgcgttcagatcagggacgacgagtataccgacttccaggaggagatagttcgccggcggtgggcatcgctggttaccctcatggccaagttcgacccatacatagtccttgagttctatgccaatgctcggcctacagaggagggtgtatgagatatgcgatcctgngtgaggaggttagtggatcccattcgatgcggatgctcttagccagttcttgggatatcctttaccgctggacgaggggcaagaagtgctattatggtccaaaggacgaaccgggccgatgggttgatg

SEQ ID NO: 69417 - DNA, 462 bp, Glycine max
  unsure (1)..(462): unsure at all n locations
gaagttttgtcttttatgtgcccacctctntgtgtggattttgtattgattatcgcatcttaatctctatctatctatatgtacatcatgcatcatcatgtaaaggtaggaagatcgtttctaaagctagaaaattcttcagtgcataatactctctattttaatcgattaccaggttgttcgtaatcgattacaagagttgcttgtagctcgtagagagattatacgttcgatttaatcaattactagttatctataatcgattacatagttcagttgataccatgtctggttgttcatgagtctctgctttaattgattaccacgtgattgtaatcaattactttgttcttaaaagagttcccataagtgttcgacggtcggtaagagcaccggatcgctcacgtattataaaacagtaagtgaatactgagtatcgaactctcgagtctcatcacatgc

SEQ ID NO: 69418 - DNA, 470 bp, Glycine max
  unsure (1)..(470): unsure at all n locations
agctngactaggcgagttgattntagccttagtttcactttatttattagtcaattcaattaagaatgagatatcccaaagagaaaacgtccgattgatttttcgctctattttactaaaaggtattttttattattatattattattttacctcttttttgatttccaacgtagttacggcacgaccgaacggtcggaattcattntaaccgaaattaacggatgatacaattcaaatgatcggtggaaatttattttatttttagattaggcgagaaatgacttatataaatgactgaagcacgtcaaaaggggatatagaaagcgaatgaaaatgagaataaaaatacatgatataaaatgtggaccaccacgggtacatagaatgaattgaanagctcggtttgaggtacttacccgttgaagactgaagataacgataaacgaacgatgaatgttgaataacggt

SEQ ID NO: 69419 - DNA, 454 bp, Glycine max
  unsure (1)..(454): unsure at all n locations
ggtaatattttggtggtactntattgttaccattgatgaaggtaagtttcatacgaaggtatagagttcccttcttggtcaactagttccgcatcaaaactcttaattccaacatgaccttttggaaactttatattctcaaatgtttttgttgcaattgatcctggtcccatttcaaaactcccagttacaaaaatagctgtcttgatatgattttcaagcttttgatatagtgaatatgatgtacttggtagcaacaatagtattgagaatgaaagtatcattgcattagagataaactccatgttaacctgaacataaacaagtagtgtcacaaaattagtaatgaattgtctatgatgttactttttttaaggtagctcaattacatataattcatacacatgattaaaagaatangtagatngatangtcagtttgaaaaaaaagtata

SEQ ID NO: 69420 - DNA, 424 bp, Glycine max
  unsure (1)..(424): unsure at all n locations
ctccctttccaatatcttatntcatgcttaaatacgtggctatgttcgtgcttgcgcgcttagagcaattctgaaccgctcagcgctcattaggggacttctgcttagcgcatgcttttctcgcttagctgatggactgaagcggtgcgcttggctggatgatccttctcttagcgcaaatgcacaaattatccttcttccaaattcttcctttcactcagccgagtagcgatgcgctcagcggatggctcgctatgccagaagattggcttagcgagatggtgcaaatcatcacttcacttacttgctctattatcatgaaattgagagactatgactatttatcacaccatatggacatactaatgtattattactctatcttgaacaaaaacttgttactgtactactagagaaccatata

SEQ ID NO: 69421 - DNA, 289 bp, Glycine max
gtttctattgtgtatagtacactcgccctagtatgagtctaacatatattacgcatcaataggtgtggtcgtagtggtcattgtaataccctaataattacaacttagagatcattgcttgtgtaattataatttagatttaattgcgattgattttttatacataagacaatatgtgctttgttcaattaagcttcattagtgattaatcaagcgattaagaaacatagctgagagtcattaatataagctttacttctaataatgccaagttacaatattgaaaatt

SEQ ID NO: 69422 - DNA, 392 bp, Glycine max
aatgtaaaaaggcatgaatattatgacatgttcgagacgcttctattagaatttaaatttggctgccccatgaggaataccttgcacctaggtagcatggaaaatacctttcaacggtatgtatatatgtgaatatatatagcatggaaatgccttgcaaagtgtgtgaatatatggcataaaaataccttgcaaagtgtgaatgtatagcaaataatgcatctcaaaaatctatatatgtaggataggtagcgtaaaaatgcctttataatatgatatttgggataggagcataagagccttcaaaaatgacccatgtaaaatggacgaaatgcttccaatgaaatatagggaatgctttagtgagatgagacaaaagtcctccaataagc

SEQ ID NO: 69423 - DNA, 363 bp, Glycine max
tctaagtcacctgcggcatgcacgcttgcacaatgttgataagaagacacacttttattgtttcttgtttgtgacaactttgcgttaatccacatgagtttttgcatgagaaataaattctgaataaaatatatgatgcacaactaacctggtagaatattgtctagaaatactcccacattattataaagcgatatgataatatttagagtttttcttgtgaaaatactcttgcacgacaacaaaggaataataattatgaaaatagattcttgtctatttgtttggcttgagaaaaatatatgacatattatttaggttcaggaaactctgtattaaattttatacaattcagagctgtct

SEQ ID NO: 69424 - DNA, 456 bp, Glycine max
  unsure (1)..(456): unsure at all n locations
acatcttgactagctttccaatctgacattcacttcatattctgccttcttctattctcagattgggaatgcctctaacagcacctttgtcaatgattntcttcatgcctcttaagtgcagatgtccaaatctttgatgccatattttgacttcatcttctttggaggatagacatgtggaggagtaactggtttcttgaggtgtccataggtaacagttgtcctttgatctgctgcccttcattagaacttcactcttctcatttgtcaccaagcattctgactttgtgatagttacattgaatccttcatcacacaactgactgatgctgatcaagtttgcagtcagtcccttcaccagcagtactttgttcagattaggaagtccatcatggactagctttcccattccagtgatctttcctttagagccatctccaaatggcacatatctag

SEQ ID NO: 69425 - DNA, 356 bp, Glycine max
gttgtttgtggagaggtatttttttggcaaagaatgggactgtaaactactgtccagctcgcttacaagaatggcccaaggaagcttgcctcatagacgatcaggaaggacatggctgccaaaggaactaggtctagctcggattacgacagccatccgtttgagagccctggcaccgacaaacttcgaaaccatcaccggactgttgcatacatgtgagctcacctggcaggtcaggacgacgacttacggcgtccatgacgataatgtcaccggtggcggcgccttgctaatacataggccatctctccaaaataacctgatttatgccaagcttggcactaagaggcgtgcgt

SEQ ID NO: 69426 - DNA, 372 bp, Glycine max
  unsure (1)..(372): unsure at all n locations
ttaagtcacctgaggcatgctaactagggattgcaattgggcatctatatttattatcctatgctgtctctacatacacgaaacagccccaccatcccaatattgcagaatcatattcatatatcagttggtgcgatttcacgcgatcactctgatgggcacatgtttggacataaattgtaagagaatgggggcaatgtggcacgccccattgcttcagaatacatcatatgcctaaggccttctcattcaaatcctcatctccacaaaacaagcatggatttagatgcaaattgcttcactaatnttgcacaatatgagcaactttagcaccaaaacacatcgatggagagccaaaaaaccaaaggaaat

SEQ ID NO: 69427 - DNA, 424 bp, Glycine max
aaatctgcttcccaaatccggcatattgtaaagatccaagtacattaagcataccttgtattatagggaacaataagtttgacaatgccatgctagatttacgagcttctgttagtgttatgtctccgtctatttttaattctctatctcttggtcctttgcagtcaactgatgtggtaattcatttagctaataaaagagttggctatcctgctggcttcatagaggatgtcttagttagagttggcgaactgaatttccctgctgagtctcatatgacgaatatggaggagggattttctcaaggatcagatcccatcatactatgcagaccttatatgaaaactactacaactaagatagacgcatgtgtaggcgcactatctatatgagttggtgatataacctgacattttattagtct

SEQ ID NO: 69428 - DNA, 290 bp, Glycine max
agctggagttgctgcacgtgatgttcaacgttatgtcaacggaataagatcgggctgcactatgcacaaggcacgataaaatgtcgtatgaagaattgaagctgcaggatccacgatgtctgatacaatgtccaggacatcctgcccgataatactggagttgctggacaatgcatgataaaagtcaagtagtgaagctgctggatccacgatgtcggatacgatgtcctgacatctgggccgataatactggacataataatcggggataatcttaacagactattgtg

SEQ ID NO: 69429 - DNA, 296 bp, Glycine max
agccacacaaccataggctgttatgtcactttattaaccttgccacatatgcacaattgcttacaagccacaacgtccactgctcttgagacacaatgtagtcttcccatactcaggaagagttactattggaagataaactgaatcttcaggtcagacatcagcactattttatattgtaattcattactcaatttctacgggtatacttaataacatgcatcgtttggtcaggactatttaccgatacacacaagctatatataaaacggtacgtaccagtatcgtattcacag

SEQ ID NO: 69430 - DNA, 91 bp, Glycine max
agcttgtgccaatctcacatagcagaactcttgtctgtgtcttcctatgaatcatacatgagtggagagatgactctgactatactccatg

SEQ ID NO: 69431 - DNA, 446 bp, Glycine max
  unsure (1)..(446): unsure at all n locations
tgaattaacctctgctaaacagacatctnnttagattttatttcactgccaatactgcatggggtttactaaggtcactgaaatccacttcaaaccctgcaatcaaatcatctcaaggtctttggctgccaatggtgcgcttaagctgttaagtttgatttatatgcaacatccttaattctctgttacaccataatagggccatgatagcttctccaactttgaattaattcttttgtccacagattgttgtcagtgtgacccattttaagaaaacccattctcacaattcataggctcactccctcttatagaaacttgtctcccttttcatcctttgtcgagcagatactttgctgcatttgttggatggtaagtggacacacaaacataatcaaaggcatgcatgtctagatatttgtgatgtgcgattcagatgataattt

SEQ ID NO: 69432 - DNA, 424 bp, Glycine max
  unsure (1)..(424): unsure at all n locations
agcttagcgaatcagccttgcttagccactggtatctcatcaagaggatgagtgttcatcctcacaagatgaactcgcttagtaggttaagagcgcttagcgagttcgtctgaaaatgcatatattcaagcaatattgatgaactcgcttagtgcagcatgctcgcttagcgagatcatcgcgttttctagaaaaaacgcacacaacgcagtttgttttcttccattnttgagcctctaaaaggcatatcaaacatgcaaaccagtcaaaactatctacacaacataatcattcacacaatcctagattttaactaatctaatatcattaaaaccctataaattacaagctaaatctatggttttctaacctaaggttcaaccaaattaaaagaggagactaaggaatgacgaacttacttgga

SEQ ID NO: 69433 - DNA, 483 bp, Glycine max
  unsure (1)..(483): unsure at all n locations
tgcgcatgtttccttacgaacgttcacttgcggaagacattctattatctaatanaaatgcacccatatacaatcaaggtagcttcattacctagattatttacatgtacctccaaggtgtatttgttatttacatcacacacacctccttggctgaatttacatacatgcatactcaaangcatttggggtaccaaaaactgcacatgcgctcatcttggtatttctaatacccctacatatacaaacttcacgatgaatcttgactgcctacacaataaagtgctacatttcatgctttttttcaagtttttactacctaaagccgcatgcaaattcaaacatatnttcctttgttgactaaaatnttgattcaaattaaaaggtatatantttttttgaatatgttntcctcacataacatgcaacatatntatatatattntntttgtgagacattttgactaccaaaaaatatacata

SEQ ID NO: 69434 - DNA, 502 bp, Glycine max
  unsure (1)..(502): unsure at all n locations
acctgaggcatgcaagcttgtgtttctctcacagatattacatgcattgcgttcttcggcatnatatccacttaaatntccatatgttggaaagccattaatagtacaaaacaccattgaccgtaacctgaaggtctcctacagattctcatcccacacatcaaccctaacttcccacaattttctcaagtcttcaatcaacggagagagatacacatcaatatcattccctggctacctaggacccgctatcaacatacacaacatagtgtatgtttggttgatgcacaaccaactagggagggtgtaaatcatcagcaaaatacgccatgaactatgcgttgctgctaagttaccataacgattcatattattcgaagcaagaccaggccttangtttcttgactcgtctccaagacgtggatacagacgatcaattgtcttccattgtggagaatcagctggatgtcatagcaatncatcactatttcttgcatctaca

SEQ ID NO: 69435 - DNA, 372 bp, Glycine max
  unsure (1)..(372): unsure at all n locations
gatggtgaccctgtactgagaggaactttgattttggctacataggagtgcgtgagctcagtttaaatgtgggcaactgaggatggtgtgcttatgcctgacttgtggaaatgggagagctgatntgctccatcgtctgatcgccaccaagtaccacatatgatgggttccccattatccaataagctcgatgtgagacagcatggaagagtcaatcttcctactttttgttttttggtcacagactgagacctgaagatatgtcacgggggtcaagagaccatggcgactccatgatgggtgctattgcccataaccaagcttggtttatcccgactcaacccgggcatattctgtcagtgagaacctgtg

SEQ ID NO: 69436 - DNA, 393 bp, Glycine max
  unsure (1)..(393): unsure at all n locations
atgctattggagtacaaacatggtaccttctattttttttcaaaaagaaagtcgtatctagtcaaggtctgagagaccatacaagtttcctaacgatttctaattatgtgggccattaagtctatcatatgctgacaatagccgagaagcccatgaatctcttcgggggcggagtaggtgtctgccatcgccttggccttggctaacaagcggcgaagttcttgactcccgttcaaggtaagagcaaaccgaaccatccacatggntgcctcttggtgtaaagagtcgatcacccttcctttagcctctctttccgcgtatacttgagcatactacgtcgcgatcctatgctcgagggccgtggctagacctaactttacttggtacttggcg

SEQ ID NO: 69437 - DNA, 470 bp, Glycine max
  unsure (1)..(470): unsure at all n locations
gatccagcagaggaagagcctacaacctatttcatcttgtcacacccacggaattcaagcacaagagacttggtcattatcatcttgaaagaatgctaaacatgaaaaaaaggaaatatgcaaaagaaaatttgaagaagtttcaaatggaggaatgcaaatctactagcacactaatgaatcaaaaggagaagtttagaaaagaagaaggtgttgataacattgatgaatgatattatgagagcttgattggatgtctaatgtatctcactacaacaaggccaaacattctatntgctcaaaagaacaaaactggaacttttgttgacaatcaagtagtcattgctattgcaaacaatcccgtgtgtcatgggaagactaaacatttcaacatcaagttctattatttgataaagatgagacaaagtggtgaagtgaacttaatttattgtaagtctaaagatcaactg

SEQ ID NO: 69438 - DNA, 489 bp, Glycine max
agcttcgtcctcagatccctcttgttggactagtattatcttatttagcttacgaaagtttagactaatttagcctaagctttgccctcagatctctcttgttggactagaattagaccaaacaacattattgtgacaacatatttaaaactaaaacttaatccgcagatccctcatttaagactaagatccaatcctacttcattcaagttctaaggcaacagtacatttcccaatgctaaagtcacctaaccaggcacacaaatggttgatcagaccaagagcatacaaactttaagcactaaaagaagcattgtacacaagaaacacaatcaagtagatattaaagtcattacatcagttgctctttagaaatcctcaacaagggtgtgtagctcagtcattacagaaacacccctaacattaatgagattacacaacctaggtatctctatcaatggtgcgtcttttgctactctagagcttatt

SEQ ID NO: 69439 - DNA, 368 bp, Glycine max
actaagagtcggccagtttattgttcaacgcctgatgaagcttatatcatcttcgagtcgagtgatccctgtatccatggcatcaaaacgctcacccacaaaagctcgaaggtcgcggagctctatgagtactttagtcagaagagaaaaggaatcatcccgttgtggtggaggagatggggtacgttcgtcacgaataggtggtggtggaggaagatccctttcgcttctttgatgattctgccatctgaaggtgcttcggctaattttgatcggtgggtttggaagagaattgaaaaagatgaagaatgggtctttgttgaagtgatttggtttagaaatgtgatagatacgcggatttgaagatt

SEQ ID NO: 69440 - DNA, 347 bp, Glycine max
  unsure (1)..(347): unsure at all n locations
agctggtccgcacaaaaacactaataaccgtgatatatgttctatttcttaaacggccctctctgcttgtatcaggtaacatggaccatacaaaagcataaaatcaacacattactgtactgtctttcaaagaactacatatgtctgatttcctcttcgatggaggatacctatgagcataaaccccgctntcgtcgacctcataaataaaaagagaataaatctacgatacatgatttcacgcaactctaaatcaaatgctgttgtccttcgtgacaaacgcgagaggtgctaatacctctcttaagcataaacataactctccgatctggaatatactttatgac

SEQ ID NO: 69441 - DNA, 459 bp, Glycine max
tgccaactccctttattctgatcaggctttatttgtggcttgatggcgcttgtgcgcttagcgcgaatctggaccacttaacgtgcattagtgaaattcagcttaacgcgcgtcttctcactcagcagatggactcaagcgatgtgcttaacgggatgacacctcgcttagcgaacatgcatagctcatccttcttctaaattcttcctcgcgctcagctacaagaatggtgtgctcagcggatggctcgctgagtcaatagattggcttagcgagcagatcaaaatcaacatttcacaaacttacctaaataactctgagagtggaggatatgattataaatacataaaatgagagtactaagttattatgacctatctttaacatatagtattctcaacactactaaataaccataaatgggaggagttagatacaattttcacagatttcttacac

SEQ ID NO: 69442 - DNA, 457 bp, Glycine max
ctgcagctaggtatgattaatgtatgactccttttcttttttctatataacatgcgaaggacagacatcaagaatgtctacaatacatttgaacatgggtcaaggaatcacattgacaagtgtacttaagaccttacttgaatcagttaatgaaattcatgtccctattgagaaaaaaagttcgcactatacgtacctaattatagtctttcgactatacggcacattggcaacttgttgttctgtgaccatggcgcaatataggtggttgcgtttgttcttctcataataagccttatgttaacatccaggttgacagttacaacgtatctctctatattatactaaattattgtgtcccattgtttatatcacatgagatcttatctttatacgtaacgtaattcgaaactgagcatgagatttaccactttttggaggatgcacatcaccttgc

SEQ ID NO: 69443 - DNA, 451 bp, Glycine max
tagagtggtgtgagactcgatgtgtcttttttccttggcttgactctctttttataactggtggagtggacttgggcctgcgtactcgtgcttagtatgggtgcctatatttgcgcttagcacgcctcttcctcgcttagcgccaatgcttgttttcgcgctaagcgcgtcttgtgttaggcccttttcaattattttctagttttgcatttcttttgacttttaatccctcttttacgtatctgcaaaccaaggataggaaaattttttaattcttaacaattaagcatgaataactgctaaataatcatttctaagaatattttaattatatctttagtataaaaatagctcatatttagtagttatcaacaaccaatagttgaagttccacaagtcgctgaagatgatcatgtagatcaagttggtaacaaggaacaacaagtcaatg

SEQ ID NO: 69444 - DNA, 325 bp, Glycine max
aactggggcccacacagagggacaggatgagggaggaacctatgctgtgacaggcattcctgtacggtcgagtgtcccaacaaacctcacaatgtgaatactcattgtataacgaaccttctccttacacaccacccaggaatccacataggctcatcccgaaatcaaccacaaaggctatctatcgcgcttgcaatgacgaacaccacctttggcactaaccagtaaaacaccttcaaataggaattgtgcagcataaagcctgaatggctcacctctgataccgttgctatatgcaagacatggcccatatgcactcgataat

SEQ ID NO: 69445 - DNA, 271 bp, Glycine max
  unsure (1)..(271): unsure at all n locations
tagcttctagccaaatggactcatcttgaatatattttttttatagcccctgtgagcctatnttcccctttctttgttttgaagctcattacaagccttaagtgaaaaaccattatatcaccttacccttaaagaattttggagctttggaattgttttgggaataagtgtgggggggggggggcatccctcttttcttcatatgatttcaatatatattttattcatatatcttctaccttatatttactattttcatcattctattttc

SEQ ID NO: 69446 - DNA, 482 bp, Glycine max
  unsure (1)..(482): unsure at all n locations
taaggctgaagtaactagctcgcctgagtgagctgctgtgctttctccacccctcatttcctataaatagacgtgagggggctgaggagaagggtccaacatcatatgttgagaggttttcacttaaattagtgaaaagaaggagaaagaagaagaaaaatcaaggtcgaggcgcttccgtaacattttcgtgatcgttcttcaacgttctttgttcntttgaccggctagttttatttttgaagttgtgaattcattctatgcacccttagggattcatccttgctttacatgtcttcatcttcattcttttaccattggtggtctttttctttgtttaaagcgaagtttgaccgattaattatgccataatctcacttaatcactgttaaaatgaatttcaaccgatcatttgtgttgtaatctcgtttaatcattgctaagataaatngaacaatgtctgaacattgaagtctttgaaa

SEQ ID NO: 69447 - DNA, 302 bp, Glycine max
agctttctaagttttgtatgatccaaatcttgttcttctacaagtgaatattctacagaatacataagtgtgctatatcttcttctatctctattgcctctgccgaaaagaattctacacgcgactatatcgctcgcagttctcttgagactatcctctcgctcatacaaaagaataaagggaccaaccgcctgaatctttcggttcttcctcccttccaagagaattcaatggactaaccacctgagaagactgttgatcttcctttcccttaacaacagattcacaggataaccgccgag

SEQ ID NO: 69448 - DNA, 455 bp, Glycine max
ttttggtggagaagctccttcttcttggcttattccctagtggatggtgcctggcctctcctattctcctttgccgcctactgcatctccatggtggaaaatcaccattgaaggacctcattgatgctcaaagatccagcctccatagaagctccacaagaaagcttccatcatacagttttttttaataccatatatacagagacattatgtgtatgtactgaaatagtgtgtgtatggtgtttactgtgaccacttccattcttacccagtgcctcccccaaatttgggacaaatatgctttgaaccacgcttcctgtggatgatgctctcttacaacctaagtctaggtagcaggagataatattgtataggctcacggttcaatcaatctatccattcagttcacactgtgtacaagggataattcattcaagcacatggtcagctttttg

SEQ ID NO: 69449 - DNA, 438 bp, Glycine max
agctttaacaatttattatagaacatcattattcttattatcaataaaatatttaaacaatcacatttggctaatgaataaattatgatgaggatatattagcacactcttctctgctatgagcatgttgctggcaaagtccacattattctctacctgctcgttcaattttgtcttcgtccatttccagacgaatgcgatgtgaaacacgattaccattcgcagtcctttctctccttggattaggaccccactgatctccttcatattcttgccacattaatacgcgtgacaataaaccaaaggagttttccgtgatgtgcataatgtgttgtaattgaataacatcgcgcactcgtcatgagatcacattgacagattacaggctacctgacgtgaaacacggatgcgttatcttgaatcaccaccctcttcatt

SEQ ID NO: 69450 - DNA, 426 bp, Glycine max
  unsure (1)..(426): unsure at all n locations
cgtacatataattttttatatatataatgntcaaaaagatgaactttgaaaattttgaaaccatatttgatactcgaaagtatggaaacacatcatttactgcactgttatcttttatggacagaaataaaggttaagactatgaactaaatattttggagaacttaacttgtctcactcagctgagactattgtatatataaagaagaaacatgttcatgacaagatgtgacaagatacggtgtagactgcatccccttgtacagcagagaagagtgctgaataagaaagattctaaagcctattttaaaaacacatattaatctaacatccctccaagctggagcatatataacaaacacatattaatgtaacatcccccccaagctggagtatattatatatatgctccaagtttggaacaat

SEQ ID NO: 69451 - DNA, 380 bp, Glycine max
  unsure (1)..(380): unsure at all n locations
agctncttctntcttatcgtctgtatcgcgacattcttctcttcnccctcctcgccgacccacaccctcgcacctccattggcttcttgcacctcttattctacctgttcgtgagtaaaaggagtctacaagatcacctactttgaccattttttccaagaggtaagtagtatgactacgtccttttccctttttttctattcgttggaacatttccagataacttgattcacattgtgtttggttgtatctggaacaagctacttgtaattggacaagccatcgctgttctcccttctctctatttcttgtcacatttaaagatagctcggactggattgtttctgtgtgtatcccgaacaacctatctgtaattatac

SEQ ID NO: 69452 - DNA, 460 bp, Glycine max
  unsure (1)..(460): unsure at all n locations
gaattatgtcaagtatactcggaccactgtccatggtggcattccggagcctaatatgaattggtctctcaggttccaagcgacctggtctacccatatatagggaatttaaaaatatcgtcaaccaagccaagtagaaaggttcacttaaagtacccaaatgcctatatatgaagtgagtgcaagggctcaacatttcaataaggtgacctttgataaaattttccaaataaaacagactagaataaactcaaaggcgttcaacaagacataggataaggtgaatcataaagctggtcccgtctagaaaggccactctaagaagaatataatgaacagtactacctaccatgctgtcattngcaagataattagtacttaacattacagcgtgggtagctcaatatcagatttcaaaacaaacatggttttttaaacttcgcattactcacatttaact

SEQ ID NO: 69453 - DNA, 395 bp, Glycine max
agcttcaaaaaactatagaagatattgttctcgtcttgtctctccaatacagttagggaagcggaaccgatgctacagcccgcaataatcttgtgccgagacagaaacacgactgtgttcggtctgaggtatagttctcaaccctacccttatggtttgcctgcggacttcactccctgtaccgctctagacgatctgagccaagcccctaccttcgaggggcaactcccttcttatgccgactatcctctgtaagaagatgatgaatgagagggctatctatgccctctactttccctcaaggattccggctcccatgaatctgaccatccagacatatgtagtcatgtcccgtcttaatcacacacgttaataatacggtcctcttgataaga

SEQ ID NO: 69454 - DNA, 423 bp, Glycine max
ctcgccaggcgagcaaggttgcttttctattttcatcagccttctggaggaatgtgctggagggcccaagtgggcctgattgctatttgcacccccatttttactaaatacacccctacccttttcttggtgattcatttttcgtaaagttacggaaacttacaaatttcgtgacgatacttcttttctttccgtaatgatacggaaccttgcggattacataaacatcccctttttgacttatggaatgttacggaacctcactatttgtgcaatgatgcttccttttgattttcggtgtgtcacggaaccttacggattgtgcatcaatattatccttttgtctttccgcgcgtcatggaatttcacacatcgcctaatgatgggtgccaagcacctctaaatgaccacacacatgttgca

SEQ ID NO: 69455 - DNA, 456 bp, Glycine max
  unsure (1)..(456): unsure at all n locations
agctgtctcagcatttatgcgagacggagacttttatgctattatcatcgccaagnaccaagaagagttaggactatccatggcccacgagcatagaatcgcggatgagtatgctcaagtatatgcggaaaaagaggctagaggaagggtgatcgactctttacaccaagaggcaaccatgtggatggaccggtttgcttttaccttgaacgggagtcaagaacttccccgcttgttagccaatgccaaggcgatggcatacacctactccggcctcgaaagaatcatgggcttctcgctattgcatcatatgaatactaatggccacataatagaaatcgtaggaactggttgtcttcagacctgactaaacgacttctttttgaataaaagaatggtccatgttcgactcaaaaagttgggaaataaataccctacatttatcatgatagatgt

SEQ ID NO: 69456 - DNA, 394 bp, Glycine max
gcttatattatgagtcttataattgtgcaattttctttttaaaagttgtaagctactaagtcaaggctgtgagttatgaagtcatgtacgtttccattagcatttagtatcttggaataaggtattaagcattatgtgattagtcaaatggtcactctattctagtataaataggggatcatactctggtatttggtgtggcaaagaaataaaatcttcttccaacataatatcccttattcccccaatatccccaagttccacagcattcttaagttccacagtttccctaagtcccaccattttctcaagaacataatcatggaacaatccttcataacacccaatttcctctgtgccgctcgcactatacccgaatgcataatgacttcag

SEQ ID NO: 69457 - DNA, 374 bp, Glycine max
cacaacaagggatccgggtccattatgcgcgcataaacccaccatcccctggtgcccacctccaactgagctcacgaactgccacgtagcccatatcctcgtttctctcaacaccgggttcccatcaatcctgtcaagcttgcaccacattcaagcggaacaacattcacacagcacaagctatcacagtcaagctatacaaagcctaggcaggaaactgtgccaaaacaccaaccataaatcacacgtgttcccactcaaagaccccagtagacaattccttcgattcaatatggtaaccgtcggatcgactgccaacatatatctggaagtctatattgcttaaccctacattttgaccggtgggatgttct

SEQ ID NO: 69458 - DNA, 254 bp, Glycine max
  unsure (1)..(254): unsure at all n locations
gctatgaaggataaaatgttgtgcaatacacgcgctatggtgcattcaataacgggctaaaatatgttttcgttctttctgtagaatatacaaagtttattcttactctctgcaataaaaaaattatccatttttcatcattgtataattaaaatatgcgactgtttgatcaacaactaaggttgaacgaatataaatctacatggcactctntaatttaattgctacaatacaatcttgggaattaacaacca

SEQ ID NO: 69459 - DNA, 317 bp, Glycine max
acctggagatatgtcgcggtggtcaagagaccttggagacgtcaggtggggtgctattgcccaaaaccaagcttgaccaatcccgacccaacccgggcatagtcggtcagcgagaacctgtgatgtacctaatcaggcgagctcctggcttttcacagattagaggaacatagaccacaaagcaaggaggcttgtggtggctggccatctgtgaaacttgaaagatatgtgagatatggtctctggtaaatcattaccgagggtgggaaaccgatcacaagggctataagtgatcacaggatgcttagatggcctct

SEQ ID NO: 69460 - DNA, 303 bp, Glycine max
  unsure (1)..(303): unsure at all n locations
ttagagcgnctctatatatcacctgactcaatcatatatacaacgaaaaagngctaatcgtgtgaatattctcagagcttcggtattcaatttcgagcgtctcgatatattacgggactctatcagacatccgagtaaaaagctattgtcgtttgaattagctctgaggttcataattcaattgcgagcgtctcaatatattacgggactgaatcacacatcccagcaaaaagtcagtggcgattgaatttattcacagcattagagtgcaatctctttcgtcttaaggttttacacgactca

SEQ ID NO: 69461 - DNA, 418 bp, Glycine max
  unsure (1)..(418): unsure at all n locations
gcatgcaagcttctctcctattgtgctataaatatttggttatgttatgnaaaaaaggctcacccgctgatgcacttctctctctctcccactgccaacgaaaattatttccgcgaagacaatccaagccgaggcgcttccgtaacgtttccttgagttatttcgcgaagactttcgaccgctcttcaagatctatcgttcggtctttgttttcttcaatcttcaacgggtaagtacctcaaaccaagcttttcaattcattctatgcacccgcggtggcccaattatgtttcatgatttatatactcgctttcattgcttatcataccacctttgatgtgctaagcatctatttagtcatttctcgtaatctagatataaataaactccactatcgtctgaatgatcatcgttattt

SEQ ID NO: 69462 - DNA, 477 bp, Glycine max
  unsure (1)..(477): unsure at all n locations
attcttntactctgganacctcttctttctcatgtgaattcattcccaatctctgggttggtaaacaacctttttgcgacccttgtttgcttatctagcatagctctcattcctcttttcaatttgggccttgactctctcatggagctttttctcacagtccgctttggcttgtacttcctcatgcttaaaaactgaaatattaggcattggcaacaaatcaagaggagttagtggattgaaaccataaataacctcaaaaggagaacaactagtggtgctatgtatagccctattataagaaaattcaatatgaggtaagcaaacttcctaatctttaagattctctttcaaaatggtccttagcaagatacccaaagtcctattcatgacctcctgttggtcatccgcttgagggtgacangtagtagaatatagtaacttagtacccaactttccccataagggtcttcaaaa

SEQ ID NO: 69463 - DNA, 388 bp, Glycine max
  unsure (1)..(388): unsure at all n locations
ttagagacgaatcgacgcatgcaagctagcaatgaaagatattgtctatntatgagtctggtgtcaatctacacacacacaccaaggccataattcataataggtaacatacaaatgatcatagtcattggcgcaaatattgacttctgtaactactactaagctngcaatggaagatattgtatatatagcgatgaactctcattcagtaatacaaatctgctgaatgtgcacagtcaaatctacgaactcgtgagtccaactcgaaatatgaaatttctattatacatcttttacttggcattatgtaacaaaacatgcaaaaacaatcttgactcatcttctgtttacggagatgcgcattgagttgatatatcttgcttgtctg

SEQ ID NO: 69464 - DNA, 448 bp, Glycine max
  unsure (1)..(448): unsure at all n locations
acttgctaagcaaggatgaaaacttattttctataagttctagnccactaatgtgacaatttatcgcttcaaattctctcgctcatttttctcttcattttcttgtattaaataacagagtttaagtaatttttttatagactttagtgaaaaaatctgattttccttgatatgattgttgtctcatagttggggacattgtcatgtgtcacattcttgtggagagaaaataataagagtacaaataattgcatgtgctcctttctctacagtgctaacgacttggaagaatattctntgataattcttccattttgtcctttcttattctaaattcaaatgttggcaattcaaaatccaagacacacactgaattactaaagacgagtttgtcacttcccttttttgtaacatgaatctactcatgaatggacgtcattatacttga

SEQ ID NO: 69465 - DNA, 407 bp, Glycine max
  unsure (1)..(407): unsure at all n locations
cttagtttcactttagtnatttattctattcaattaagaatgagaaatccgcaaagagaaaaaatgtccgattgattttttcgcttttattttactaaaaggtattttttgattattatattattattttacctctttttttgatttccaacgtggttacggcacgaccgaacggtcggaattcattttaaccaaaattaacggatgatacaattcaaacgatcggtggaaatttattttaattttagattaagcgagaaatttcttatataaattggctaagcacgtcacatgggggtattataagcagatgacaacgagaatataaatacatgaaacataatgtggaccaccacgagtacatagaatgaattgaaaagcttggcttgaagtacctacctgttgaa

SEQ ID NO: 69466 - DNA, 389 bp, Glycine max
  unsure (1)..(389): unsure at all n locations
agtcacctgcggcatgcaagcttcatgctgatgaatcaagttgattcatgatttttgataatgacaaagatgttgacaaaaagcccaaagaatgattncaagaataaatcaagaacaaattcaagaatcaagagaagtttgatttcaagattcaagataaaatgaattcaagttccaagagaagaaatcaagaaaacttcacaagggaagtattgaaaatantttttcaaaaaacaaacatagcacagttttgcttttcaaaagattcttcacaaaaatctctatagtaccagagtttctactctctggtaatcgattaccagtatcctgtaatcgaatactagtggcaaagattgatttcaaaaagtcttcaactgaatttgcaacgc

SEQ ID NO: 69467 - DNA, 443 bp, Glycine max
  unsure (1)..(443): unsure at all n locations
tcacatgcattaagtgattattttatgggtgagttggaaaataaattgaattaaattgggaggagcctaatccaattaaattctagagggggaggtgagcatttgcttactacaccccattgccacatcatatagtcacactntgtgcatgtccttcatgctttacatgcctcatgacacctaagcacacttagtggagaatcatggacttgatcttggattagtgggctgaaccttagctaaaattcaataatcataattagtaaaattntggctccaaaatttggttccacaaattcaatttcaaattcaagtaaaatttgaatagaaattcaaatttcccttcaattctgtgtgacactaaggctataaaatagacgccatgtatgtgaaattttcaactttgatcacttgagaattacacttcatatttcagaccccat

SEQ ID NO: 69468 - DNA, 441 bp, Glycine max
  unsure (1)..(441): unsure at all n locations
agagaagacctcgcgcgcatngcaagctccattggccatgtactcatacactatactattgtantctggacacgcacctaggaggagaaccatgtttggatgctcgatgcagctcaacacctcaacctgtgatgtgcattacattcaaccaatacaaccaaacatggcatacaaatgttttagccctttctggctagtatgacttgatcatcacttgaatgttcggccaacaaatcattatgagtttcatttctttgattgatcctgatcacaacaaacatatattttacgcctactttttttattagtaaaaatcttcaaatttgaaaagacaactttatttaattactccctgggctataatggccaatcataaaaaattactagaaatttttaattaattcttaatataagtggccgattaattcgtgaattataaaa

SEQ ID NO: 69469 - DNA, 383 bp, Glycine max
tatatgagtataggtccgcctcgacatcttgcgaattaaaactgcaccggaaagtaaacataaacagaactgtgagatggttatctatgagactttcccatacagctcgaagagcgaaaacctaagaaatttttatttgatggagaaatgttacaatgattgaagaccattatggggacctaatctaacatgccatagactagcagtactataataagaaacaactgaattggacaccgcactagagttattattaacagtatctaccgtactaggctagccatgatctgaaattgatagtgaggtagacaacatcatatgagagctcgcttgaagcttgagattacaacatgagtaaagactatctgctccatctacttctt

SEQ ID NO: 69470 - DNA, 236 bp, Glycine max
agactacaacataaactaccctcattctttgatttatttaacaagagggcacacttttcaaggattaccatatgaggacccctatgaacattcggcaacatgcattgaaatctgtaacactgtaaagattgcatgtgtgccagatgaagccatatgactcaatctatattcaatttccttagtatgagaagccaaaaggtggctacactcatttaagggtaacaatctgataacct

SEQ ID NO: 69471 - DNA, 416 bp, Glycine max
tggcctagatgcacggaagaatttgttcaagaacaccctcttaaggtcatcctagctggtaatggacctgagagcaaggtagtacaaccaatcttttgtcactccctccagagaatgaggaaaagcctttataatgatatgatcttcctggacatcacggggcttcatggtggaacagacaatatggaactctttaagattcttatgaggatcttcacttgcaagaccatgaaacttgggcagcaaatgtattataccagtcttgagaacatatggaacatcgtcatcaggatattgaatgcacaaggcttcataagtgaagtcagctgcaaccatctccctaagagtcctctcacgaggtggagattgagccatgtccttagtatgaaaattagcatccgaatgctcaaaatcag

SEQ ID NO: 69472 - DNA, 472 bp, Glycine max
gaacttaagcgacgcagctgcagctgagcatgaatttgtttatattcttttttagacccctatagttgctccactctgcttgaatcccatggattacagttctatttattgatgttgccatgagagcatatcttatcaaagcatgagtacatgaacacttcctgatcatagagagagagagagagttgctctaccacttccagatctacgagataaaaagtgttacgtccacgattccatatctacttcaaagagaatatgaacattctggacacataactatatctgagtttgtaatcgcatagagaatagataagaatgctgtgcagaatcctaaatcaaaaatgatactcgtgagttgggtgctggtattttgccataacagaggtttacactattgagatgctatttttacaaaataataataatatattgctgcttaggacacgcgtaatataagttggtaatgatc

SEQ ID NO: 69473 - DNA, 464 bp, Glycine max
cctacgtcggtgtctccctaatgtttcttatggttccaagatttgaagagctgccatgcattcccccttctaagtcctttctcttgtggaggatatctcataaccgaatgcctactgatgaaaatcttattaagaggggttgcactatcgtctcttggtgtagcctttgctgctccacttctaaaaccacccatcacctcttttgtgattgcgcattttgcgaaaaatctttgtgcttggcttcccagcaagcttcagtgttgcattaatttatcttctatgcatactgttctttcttgctgtgaatctttctctagcagctatgtacaggacgtcgccttggctttctagctaacactatttgggcgatctagtttgctataaacaacagtcgttttcaagatacaagcatcaccttcttggttgccactcaattgatatctgcagcatccactctctctgga

SEQ ID NO: 69474 - DNA, 437 bp, Glycine max
  unsure (1)..(437): unsure at all n locations
ctatgtctagtcaagtacanatatgagtatacataatactcncaacttctaatgcatacganattactnttatgtggtttcgttactaaatcattttaggacattgcccgagactaaattgctctttctaaatnggaatgggtgatgctaaatacntttccatcgtgaatctctctagtactttattgatatatgctntctgagaaaagcctaacaatccttgtgatctatntcagaatatttctatccttatcactagctagcctcacccatatctttcattcccaaagtgttagagaaaaacttcttagtctcatgaaaaataccaagatcattagttgcangcaagatattattaacatacataattagaanaataaccttactcccatngaccttcagatatatacattgatcaatagtatntttcttaaatc

SEQ ID NO: 69475 - DNA, 382 bp, Glycine max
  unsure (1)..(382): unsure at all n locations
aactagctnttctatcttatatagcatttcgtcatccaactgaatgcgtattattaagcagggatttgatgaatctaatattggagaaagggcatagcagagttcctgtctattatgagcagcctacaaatattattggacttgttctggtatgtaattatgcataccagcactgtattntctttattccttcagtattgaacagtcattttctgctatgtgaaaacttataaaaaccacacacagtatgagaactattttntaagcttcaacctgttaactttctttccatcaagatgattagcagaagttaaattattttgtctgttcgaccaanactatgttgctatgttntgataaaccctaaggcgatcattttcac

SEQ ID NO: 69476 - DNA, 311 bp, Glycine max
  unsure (1)..(311): unsure at all n locations
caagctgcttacagacgtctntgattaattaaattatntaatacctagtgtttactntctataaaagaaactatagagattcgtataaataatgtacaacatccaaaaatatatgaaaacattatatattgaattcaagtcgttaaagcacaaagtctatccaatgaatatacatagaacataatattaacaaatgtntggattagagatgattacactcatttgcgcaaccagaattattattattaaatttacaattttaaaccgattttctgatataaaatatattaaatactttttaaataaatatc

SEQ ID NO: 69477 - DNA, 454 bp, Glycine max
  unsure (1)..(454): unsure at all n locations
ctactcatcaactttactttcgcagcaagggaaatgatcgtttattcttaaaatatatatttcagctgcgaacatgttcaacatggctgaataaaaactcaacagctgtgatcagaacattaataatctggagaacaattaagctttgcatattgcatccaacaaggttgattaaaagcagaatactctaataatatacgtaataaagagtggcattatggaataataatatctacgagaaaagacanactaacatatgtataaaactagccaatgcaaggaaagtacaaaacactacacccggctaaaattgcattaattcagtcagcctaagaacaagttcaaacttctgaataacgagaaatttaatgacctacaaaatgcaccttcagagtccatacatattctagtgcatctcttcttttcccatccgatgtgcgatacaaatacatct

SEQ ID NO: 69478 - DNA, 154 bp, Glycine max
  unsure (1)..(154): unsure at all n locations
cttaagtcacctgcggcatgcagctngaacgggaagaagccatcagcanagcacctaagggtctttggatctgtatgctatattcgtattccanacatgaagaggcacaagcttgaagacaagactatacgaggtatcttccttgggataacaa

SEQ ID NO: 69479 - DNA, 422 bp, Glycine max
  unsure (1)..(422): unsure at all n locations
ctttctacttattacatttgtgaggctacccattagtatttgcctttgtgaaataattaggtgattntccccattttctctctgatactagactgtacctaccttctccagacctcacttggtgagagccttgtgcacatggtagcccttttgttataattatatacccataattagttttgaatgaaatattttgttttgacaaataagaatgattacttctacattcttttatatatccttggctccttgccaatgttggtaataaaaatcctttaaccttcagtttctgatatgacacagttgatgtaaacttcttttatattcttttgcaggtagtctttgatactctaacgaagtttgatggcaaggaatttaggcagttactagcacgggaatatactcaaatggctggtcgtgct

SEQ ID NO: 69480 - DNA, 377 bp, Glycine max
cttacagtcacgcggctgcagctgatagttcccaattatggtatttggaaaatttgaaataatctgttatggtaacgcgctctaaacattcatggattaagatgaactagctttcaggaaagagcttagttgaatgcaaaacacagtggactacgctatcaccgtacgcactcacgtttacgcaagagattgcaagcatactcaatcggcctaacggagacaggactacgcagaggcctagcgctactgaatgcctacctaatcactacccctacgctgccgatcaacctataagctgctggcgataggacaagatggcaatcaaccaccatgcattggaaagctaagcaaaagacatggctgactagtgcttaaaa

SEQ ID NO: 69481 - DNA, 443 bp, Glycine max
  unsure (1)..(443): unsure at all n locations
agtgtggtgtttcaccttctcgctaagccaattagctggcttatcgagcgtctgctaagcgcaacactcatgggcaaagcgtgaggaagactctacaagaagatgagttgtacaggttcgctaagcgcaccgcttcatctcactaagcgcaccgcttctgttcatccgctaagcgagaaaggcacgcgctaagccaaaattcactaatgtgcgctaagcggtccataagtgcgcttagcgcacgagcacgaacaaggctacctatttaagcctgaaatcagattttagagagagagtgtaaactgggattcagagctttgcatgtctagggtttctagagagagaaaggtccaatttccagagagttctgagagatattgttgtgtgaagatctgcagagaccagagcttgaatcacgagccggtttgagagctngagatgag

SEQ ID NO: 69482 - DNA, 408 bp, Glycine max
  unsure (1)..(408): unsure at all n locations
agcttctccttctatggcttattctctagtggatggcgccttctctcacctcttctcctttatcttccgctgcaactccatggttgaaaatcactattgaaggaccttattgaagctcanagaaccagccttcataaaaagcttnntcaagcaaatattccattcatatgccaccccacgggtgaaagtgacatatatttgcaagaagcacaccaccattgtcttccagtggngtgccaccccacgacaagtagcgtgtatgcaacagcacgacgccccanacccaggtcaaacaattccttggatgatcctnncaagggtctcacaaacccaagcctaccctttgtgagtccnacttattacaccactatgtctccagtatgtgtcatttcataagtgacacgtatg

SEQ ID NO: 69483 - DNA, 498 bp, Glycine max
  unsure (1)..(498): unsure at all n locations
tgacactntntgtccttggcacaattgttaggattcaaactattcttacactggacaagttgaaccaattccaaacaaggtcatattccatcganttttttggtcatttaaggcatacattgatgtgtttgcatgttgtaaacccattgtgcaaatcgatggaacatggctatatggaagatacaaagggacactattaattgcagttgcacaagatggggctaacaacatatttccattggcatttgccattgtcgagggtgagacagtagatggttgacacttttctttacaaaacttgagaacacacgtgacaccacaacatggtatatgcttaatctctgataggaacgagtaaatcaaaagtgcatacaaacaacctaacagtgagtggacaacagacaacttgtcacatgtgttctgtatttgacacatcggtcaaaattacaaaanacatttcanaaatgacgaccaaatataaagcgtcttgagtatggg

SEQ ID NO: 69484 - DNA, 231 bp, Glycine max
ccaactctactctatatataactcattgagactggtgtaaccatggtggatttgaataatctgcatgaaatcataaagtattaattttagagccatcattgcaccatatagaaacaaataaaataaacttcaaaatcaattatttataatatactcatgttgcttcatgctatgtaaatttatgctggctataggtgaatttacacctatatcgctatcaacaatatattc

SEQ ID NO: 69485 - DNA, 291 bp, Glycine max
actcagctgcatactttaccgtcaatactcgtacattgtctgatataaagaagctgacgacgttcatgcgtgtccaaatgatcatgatgaatgagaattgattaacatcggctaatgtaatattctgcaaagacagatgtcaccaaagcattgtagtgacaactacatctttctctgattgaggcatccgttgtctgttttatatggtatccttacgacttcatacagatcatgtttgttgccagcatcatcatccaccacccttatcttctctgtcttctcacgattatt

SEQ ID NO: 69486 - DNA, 450 bp, Glycine max
  unsure (1)..(450): unsure at all n locations
aagtaaattacactgttctccattgagagacacttaaattacagtcttttccctctaattgtaaaaaatacactcacctccccaagagattaaatgtgtagcactttaattgattttaatgaaaatgaacttcttagcagtggcaagcctttcaaatttcctatctctgcaactctcaatgccaatggtatccaaatttgaatagtttattattgattttaggactcaagaaaatgaaatgaagttttgaattctccctactatcagttttgaaacttcacagaatccttcatttcagcttctaaagtctaaaaggttatagtacgaattcaaaactaactaccactgatgctgagagtcacagaanaaagttgtttctaattctataatggactaatgtgtaacacattagtcttctaagaatggagtgtcatttcataataaataaat

SEQ ID NO: 69487 - DNA, 455 bp, Glycine max
  unsure (1)..(455): unsure at all n locations
agctngngtgaagttaagaatcttctcttcctttcatctctcanacacgtgccactcttccaccaccaccaaaggagaagttcanactttgntctctctagcttttctctattacactcaacttctctactatgacattntggatgaaaactaggaataagatgatttgagtagtggaccanggataataacaatatgagaaactgtagtccatgtctgaccttaatatcatgctactcttctaccttncatttctaacttatttgtttatttaataatttcttgcattattactattacattccatanatctatctcatccgtgtagaactgccagttgactttagaaccctttctgggtgtgtangtgccccacaaatgtgtgccccacaatcatgactacaaatgcctcgtaaaacaaagtataattttaaaagttttttccctctttctct

SEQ ID NO: 69488 - DNA, 412 bp, Glycine max
  unsure (1)..(412): unsure at all n locations
tcttaatgttntagaattcaatagctcaaggaagcgaatgtcattgatagtgaaagatgaaaaagggagaattttcctactctgtaaaggtgctgacaggtttgtgatatactactctgtaaccataacattntggagttcttacaattgcatttaacccgtcatattttcatgcagtgtcatgtttgagaggcttgccaatgatgggaggggagttgaagagaaaaccttggaacatgtgcatgaatatgctgatgcaggtctaaggaccttgatcctagcatatcgtgaacttgatgaanaccaatacaaggaatttgacaatgaaatttctcaagcgaagaatttgattagcgaagatcgggaaacactgattgaggaagtatctgataagatngagaggaatctaatc

SEQ ID NO: 69489 - DNA, 325 bp, Glycine max
  unsure (1)..(325): unsure at all n locations
agctngttgagacacactatnttctaacaagttattattatgtgaaatttattgagacccacgaattatgagtaggagcaagattcacatttcatgagtctcaataaattccagccataagaagagtatgttaacatttttcaagattgacatataaaatggtggatgaatgtgttattaattaacttgaattgcacgtgactttaattntacaggaagcagatgtactgtggcttataagtccacttataaagtttaatccaagtaatgaactcacaatttcatgtaatgtcttaagtgatggacaaagtggaagttacctaca

SEQ ID NO: 69490 - DNA, 371 bp, Glycine max
  unsure (1)..(371): unsure at all n locations
tttgtgagaacttcatgtgctactcaatgttntgaagaactttttattatttatcttgattgagtcttctcttgattcttgaatctcgagtcttgaatcttgatcttgattattcttgattcttgattcttgaaatcaaatatctcttgattctggactcaatcttgatatcattctcttgggcttttcgtcatcatctttgttatcataaaaaaaaaattgaatcaatcttgattcatcatcataatgaagcttacttctacagaactccttccatatagggacctagatgagctattccaactttgtataagagtggagcaacaacttataagagagtcttcttcagaatcttatgggtttcactctta

SEQ ID NO: 69491 - DNA, 230 bp, Glycine max
  unsure (1)..(230): unsure at all n locations
agctngtgcgaatcanatcactcctggcatttatctctagcatgcanttcttttttctttacccactcctcacgtttggttttttagggaaaaacaccataactaaacgcgccacaaggcattcctatcgcaccagatccaaatctagaacgatgggtgatcaagaggagacacacgaacagatgatagccgacatgtcggctctgaaagaacagatggcttccatgatg

SEQ ID NO: 69492 - DNA, 495 bp, Glycine max
  unsure (1)..(495): unsure at all n locations
tctnttggaccttgaacaggcaactaactcctctntcaaaaccatgctatgtgctcgcgactggtccctttcttcctttcgcaacatgagttcactattgctaccccatagagctccgcgaaatttgttccggccatactcttccttgcgagccctcttggtctcttgttcaagggctcttgcggtaattgcattctcttcccgtaacccggcacactccttccgaatgtgcgtagcggccaacttgaacttctccttggcaagttttgcctttcctaactcgcttttgagagcttggacttcttcgtcctcttccggtgcttcaaaattctctttgctgatgacttttaacttggcgagccaatctaaacctcatatatgaactttcagccattcgtggtacccaccaatgatgccattacgaatgcctctaagctcctgatctttctttaacggggtttcccacgccttatgggttctntgtatagtcttgga

SEQ ID NO: 69493 - DNA, 402 bp, Glycine max
  unsure (1)..(402): unsure at all n locations
agctttatctaatattttaatcaagtgtaccttacttgattaatagacatgaattggacaatggattatcaaaatccattagtagccgcattgcacacagctatgcctactgatcactttcccngtatcacatcaggaacatacattgcatacaaatgtcttacctgtgctgctatcctgcattgacaaaacgaaatgaagtctcggcctgtttgaatataatgaagccaaagaacngtcaaaatgggtcctgcttatctacctcattttaacaatgaataattacgaaatttgatatatctctaacatgcaaatttctactcattatcaaagtgtgtttgactacacattttaaactcaaatgttgtgtgagaaaagtcacgcgctcataataaaacctaa

SEQ ID NO: 69494 - DNA, 458 bp, Glycine max
  unsure (1)..(458): unsure at all n locations
taaaagaatgttactcagaattcttcatgtgagatgtgacaaattatgaagaatgtcgttgaccacttggacactaataattaagatccttcttttcttgctgtgagcattctttcattgtgctcacctaaaatagacccgtgagtgatttttatttcccacgaaaaatggtcttgttaacctgatcctgcattgcatatataaaacaataatatcaaaaggaaaattaaaaaaggccaatntatgacataaaattaaacaaaactgtgatattttgattctacattaaaattacacagaaaaagtatcaaaatagtaggcatcacaaaactaacataaaaaagtagagaaaatgggttgaaataaaaataacttgatcgaaagagactcttctaaagaattaagagagttcacattggttaatttgctgtgaatctcttaccttcatcatttataat

SEQ ID NO: 69495 - DNA, 381 bp, Glycine max
  unsure (1)..(381): unsure at all n locations
agcttcattnntttctttccttctcttctcanccttcagttctctctattaagggtctatttcaataaacttctttgaaagcacttctaagataaaaaaaaatgagatgagttgtccataagttaaaatgaactctccattagttactccattagctaatttgtagaaattctctcatataacttttctgaaagatgagatgacatctataaattagctaatgtatgacccatttgagcttatggagaagctcctttcatattnntattcttattttcttctcctagaagtactttgtagaanagctttacccaaacagacctcaaccncttcacaacacttttgtcaccacccatgcactcccaccacaacaaccaccac

SEQ ID NO: 69496 - DNA, 375 bp, Glycine max
  unsure (1)..(375): unsure at all n locations
ngcttcanagagatccagtaaggataaagcggctgaatgaacctgttccgctcccgaatatgacagccatcgttttaggagcgctgagcaccagcagcgcttctaggccatcaagggatggtcatttctccgggagcgacgcgtccagctcagggatgacgagtataccgacttccaggaggagatagttcgccgactgtgggcatcgctggttacccccatagccaagttcgacccagacatagtcctcgagttttatgccaatgcttggcctacggaggagggtgtacgagatatgcgatcctgtgtgaggngtcagtggatcccgttcgatgcggatgctctcagctagttcctgggatatcctttantact

SEQ ID NO: 69497 - DNA, 512 bp, Glycine max
  unsure (1)..(512): unsure at all n locations
gctgtagaacggctggtcatgatatatgtcanggtttagccagcggttcaaggataaaggngttgtcctacattatttccatgatacacatgcaacaatgatgattaggaaatttatgcaaactggcatgcatgcacccatgtggacactcaagcatncaagttttatggtcatgtgacactanggctcangattcattntccctatntaagtcaacccagtgtttccaaaatatgttattntaccaattcatgcattcatctgagtccattntgggtgttcgggaaaatttcacagcattcacccttcaggtgtattacacacattntctttcananattggtatgaatcagtgaattttttcaaaaanagctagaagtatccttctcaaagcatgttgcttttaactgaagaatatgtttgtcttttctgggtggtttgtttttcttttcttttttcatgaggatttgtcctaacaatgatattttggaggattttgtatcacatgtgat

SEQ ID NO: 69498 - DNA, 489 bp, Glycine max
  unsure (1)..(489): unsure at all n locations
cttgtctaacagctggtatcgagcacagtatagatccaaatactattcatagcatatgcaatggcacaaaatgggagagcctcatgttccttggcagacaaagctgctgttccaagcctgtgggcactgtgaaaaataaatatttagtcgaaagagtaagttaataatcacttattcatgctttgtatatttgttgagaaaataatcactttnttttcaaaaattccctcatgatgggaaaaataagcaattgcttcttcaaaataagtaaaaccgaaccatgaaagtcataaaaaatccccactctgttcatgagtacagaacttaaaaaaatgtaggtgacctttaacttatggtggtaatggaagtgtggagtacagcgaaaatgggactttggttagtgaactattatctattgatcacagaatatacctagaagcagntgctattccccgagcaattggatctcgaaaactgagtttatcgagt

SEQ ID NO: 69499 - DNA, 378 bp, Glycine max
  unsure (1)..(378): unsure at all n locations
ctctcagtcacctgggctgcagctgaacagaaccgaaaatttaggtatctgaagattgttgtattttatgaaaatagagtggacgnaaaggttggattttgaaagatttttagggttggattttgaaggaatttttgccggaaaaacatgattatttatttaagagaaagatgaaaatatttaatagcgagtataacctcgcaataacacaaaatgtagtntataataagagtttaacctcgaaatcctcatattacattttttgaggaggtntaccctgataaaatactgttgactaatttcgtgctagaaatatccggggattaatcttgtgataactctcctggacttaaactcactctctcttggtttatgtgt

SEQ ID NO: 69500 - DNA, 401 bp, Glycine max
  unsure (1)..(401): unsure at all n locations
atgaaggtctttcatatgtatgagtctctcttgttgngggaaatccctgaaaccattggacacatggtggcattggagaaattggatttgtcaaanaatggtttaagtggacaaattcctaatggtttgttcatgctgataaatctgaacatactatatctttaccggaacagcctttccggggagatacctagagtggttgaagcattcaacttgacagaacttgatctttcagagaatatacttagtgggaaaatacctgatgatttgggaaggctcaataacttataatacttgaatttatatagcaatcagttatttgggaatgtaccagaaagcattgctcgtctgccagctctgacggactttnngtgttttctcaacaatatatcaggtactct

SEQ ID NO: 69501 - DNA, 266 bp, Glycine max
  unsure (1)..(266): unsure at all n locations
aatgatntctatacaaaagttagtcgtataaagcgactaacataagcattgcgcatagcggggcatgatcntgccttgacnngngacaangggagattctttggttgatacatccaagagcatacacgatgtagaggcatgctcggtggcagaggacctgctacanngggatgatgggataaggccttgatgatgtttgtgatgcgagaaaagggggaggagatgtgtgtatgcaatcggctgataaagtgtgaatcatgtgatgc

SEQ ID NO: 69502 - DNA, 403 bp, Glycine max
  unsure (1)..(403): unsure at all n locations
gatcaagattcaagactcaagattcaagaatcaagagaaggttcaattaagataagtattaaaaagttttttcaaaaactgagtagcacatgaattnttctcataaccttttaccaaacattttttactctctggtaatcgattaccagtttattataatcgattaccagtagcaaaatggttttcaaaaagctttcaactgaatctacaacgttccaattgatttcaaaatgttgtaattgattaccagtgtgtttgaacgttggaattcaaattaaattgtgaagagtcacatcctttcacaaaaaagctttgtgtaatcgattacactgcattggtaatcgattaccagtgatagtttctgaacaaatcaaaagatgtaactcttcaaatagtttttgac

SEQ ID NO: 69503 - DNA, 153 bp, Glycine max
  unsure (1)..(153): unsure at all n locations
tcttaagtcgcctgcggcatgcagcttcttntatagactaggtagcttccttgagaagctntcttgagatatacttcttgagaagcttctttgagaaaacttccttgagaagctagagcttagctacacacacccctctcataactaagctca

SEQ ID NO: 69504 - DNA, 458 bp, Glycine max
ctctatgtgaaaacctccataagagttgttataaggacctacaaaagaagtgttagtgggaccagaattttatggtctctagccacaaggctgatttgaacctgagccacccctatagccttggtagcttccttaaaggtattgttgagttctggcttggttctacagataatgggccttctcttcttttttttccatcaccaggtactgaacattggtcattctgttggttaccaccacagaaatcacatctcaaaatttgttgaacttggtgagcttgatgtgctttctgtggtccaccttggtgatattgctgaggaactcggcctatctgctttgttaaggcctcacattgttgcgtcaagatattgttttgagctagaatttcactctgagtgtgaagctccattataccttttctttcagtcagagcttatcatgatgaacttgatattact

SEQ ID NO: 69505 - DNA, 247 bp, Glycine max
  unsure (1)..(247): unsure at all n locations
cctgcagctgcagcttcgtcatgatggtggctcgattgttgtcagggtgataatgcttgtccttcttccttggaagagctgacctngtctgttatgtactcgtcaattgtggatcggcctgnctanttctctttctgtgctttgccaatctgtcaaccttgttcaaaccttgacatttttcatctaatgtacccttgctcgctctgtactcattcatgtgctggaggttcttgactgatgtcaacaa

SEQ ID NO: 69506 - DNA, 497 bp, Glycine max
  unsure (1)..(497): unsure at all n locations
tattattcatagcactgtanaggctccattagtatctagctatactatggtcctgtctggataaatatttcattaagtacttatagcagaagaaaatatcacgcttctcttacaagttaaaattagcttatgcattagccaatatattgaagttttctcattttaactatgtcaaaagcttattttaacttatgcataaactaatttatttaacttataggatgagaaattcaattcattntacagtctaatttcttcttatccaagcagggcttagaatattgtatactaacgccagttattttagttatttcatgtataataagtctccaacatttccacaaatagaagaattccaggactagccactaatgctgtcagactcgtgtaattatcactaatgttattcctgcatttaatttccatatcaaataattagcactatatacaattatctcttttatcgttttcatacacatacttntcanaaatattca

SEQ ID NO: 69507 - DNA, 443 bp, Glycine max
  unsure (1)..(443): unsure at all n locations
gatgtaccctcttctaggtgtttcctcttctaagagggaattggatccttgtatgactgactctctgtccttgccatctacaaattacaacatatgagagatatgcaatttctatctcgttagcaaagaaagagcattgaaaaaaaaatctacatgagtggaagaatgacatattctgcatcaaatgggtaggtctcaccatggcaaaattgagccctgaaactcattgaagcttctggaagtgcatttgccatggagagttggacccatgtagttgagatagcctctggaggtcatttcactctggcaaatgataacctcatagcagctgaatagatcttgagacaaaagaatatctttggaagtcctttcgcctcggcaagatgaattttcgccatgatgaaaagntacccggcgagaattctttggctctatgattcaat

SEQ ID NO: 69508 - DNA, 464 bp, Glycine max
  unsure (1)..(464): unsure at all n locations
agcttctcaaggagggtgaacttagttttagatgggtgtgtgtagctatgttctagcttctcaaggaagttntctcaaagaagcttctcaagggaagtntcttaagaaagcttctcaaggagctacctagtctatanatagaagcatgtgtaacacttggtgtaactttgatgaatgaaagtcttatgagatacacttcanantccacttctttccctcttttattccttcaatttcgtgctcccnccttctctctttcttttccttcattanagcatcctcttcaagcttcttatccaaggcaattcttggtggtgaagctccttcttccttggctttattcctagtggatggtgcctcccctcttctcttctcctttgcctttccgctgcatctcatggnngaaaatcaccattgaaggaccctcatggagctcanagatccagccctcatagaatcttcac

SEQ ID NO: 69509 - DNA, 482 bp, Glycine max
  unsure (1)..(482): unsure at all n locations
tattatggtgtgcgcttgttgtaacatgttatgtttgctactgagttttaattctctgaccctctgaatgaccaaattggctttcgatgtcttcatgagacttgtagagaagtttatcctttacattcaagcactggtatcatgttatttggaccattacaacataatcaatccttaaagcattgcagttttgttatattgtgaggacaaactgacatctctatcttcatggtcagtttcttccaagatccaagccttatttgcccatgacttctccataaaagatatatatatctttctcttagctttctacaaccactgagatcatcccagattcactcttgtagctcaagtagttntcaaattattgcacacatatganactgtcaaggcaaaccagcgtctttaacttcatggctcagtttgtccatgatcaagggtgtatatgaccgtgacttattcataacagttgaatatctttc

SEQ ID NO: 69510 - DNA, 130 bp, Glycine max
  unsure (1)..(130): unsure at all n locations
acccgatcttagtcacgagctgcagccatgatggtttcgtcatgctctccatttcagttttaactgctagngatgttagtgaattctcattctaaccctttttggagcccatgaatgcgtttcgttcatg

SEQ ID NO: 69511 - DNA, 352 bp, Glycine max
  unsure (1)..(352): unsure at all n locations
ctttaaactcagcttttatctacgcattctcttagtggcgaagctccttcttcatggcgttattcctgaaaaattgtatctcttttccttagtaatttaggcactactcatatgctccatttagagttntgtagcgccctatatgtcttgcacaaggcaaataggtcaagtaagcacaaaaatttgaaaatatgcaacaattatcaattaagcccaattatttgcctaagacccaaactgagttaaggagagaaaataagactcccagagaggtcaaataagctaagatgaatagaagaatactaaactaaaaacatttaatcaaattcccccatactgtatcttttgcact

SEQ ID NO: 69512 - DNA, 317 bp, Glycine max
  unsure (1)..(317): unsure at all n locations
agcttatntccttggtgactnnttatatcctanacggcatatcagagcttaagcaagtatcatggcacaagttcttcaatntgtttctgaagggttaaagcatgattaagattcttaaaccgcccacaatagtaggctccatagaataccataacagagcacacatctggtgataaaaacataccatatagtaaataacagcttacaccataacctgacaggtgcagactctgtagagtttcaccatcaaatctcatcctaagtctataaagtcaaaatataataaccatgtatgatagttaaattaacttccacct

SEQ ID NO: 69513 - DNA, 315 bp, Glycine max
  unsure (1)..(315): unsure at all n locations
ggttatctaatacacagaagacgaaggaagaagacgatcctttttgtaatgagaagaacgaaacctaggaagaagaatcttgctgtgaggttgctgggtgcactggagaagaacgaaagcgcggaagaaaacattttntataacggaagaagaagaanatgttttttttttaaatatgttaacttttattttnttaatgaagggtattttatgaagttcattcaattgctgggtgctcctagcaacacgcctacaaacaaggtgtgttcatattgtcttaccaatctttgcctgaggagctctatggtgttcaat

SEQ ID NO: 69514 - DNA, 368 bp, Glycine max
  unsure (1)..(368): unsure at all n locations
tctaagtcacctgcngcatgcaagcttaataatannatttgcatanagttagtttagagggattggaatgtcattggagtgagtgaaggatagtgcctcattccttaacctacaacttgtgtctgtatagtttaccaacttgngtatccccattatggcaaacccaaaaaggagtgtgacttgngatcaaatttgttaaaaatgtgagcgtagattggcaaagtggaaaccaaagcaactatcattttggggaagagtgatgtttgataagtcaatttaaactcaattcctattacatttctctctttnttcatgatcacgaataaggtggaactcaagctagtgaaactacaacgacattttctatg

SEQ ID NO: 69515 - DNA, 463 bp, Glycine max
  unsure (1)..(463): unsure at all n locations
tcctttcggtgaagccctctaacagatgcatatgtacaccaagtttgtgaaagacctcctaagataggaaatgatattaataatgaaaatattgtggtagaacaaaattgcagttatattatttagaaaattctaccacacatattctacgatcttggaagtgtgactattccatgctccatcaagacggtgtctgtatgaaagactctcattgatttgggggcaagcattaacttgatgccaatatcgatgtgccgaaggaatatgaatctgaagatagttcccaccaagataactttccaattagcatatcattctatcacaaagccatatggtgtggttgaagatgtcctgctanaggtcaaacaaattcaccttcctgtagatgttgtcatcatggatatagacgaggagtcttatgtaccccataatctantgtgaccatttttgctcacagctaaat

SEQ ID NO: 69516 - DNA, 474 bp, Glycine max
  unsure (1)..(474): unsure at all n locations
ntatagcacagcaacacagaatctaggtgtcgaacacccctctcattcaatggctttctaggtgtgaaaggtgaaatttacaatgaggtgaatttgaggcaaactctcacctcacaccaatccataacgtcaatctaaacttgcccaaactggaattacacctcatattccaccaaatcaaaatttgactcttcaacacccaatattgccctagaaatggctcttggctcactatggacatttgattttctctctagctcagcctaacctttctcacatgtcctaaatgacatttcaagctagtattaactcactctaacctncatttaccacagaattcagacttagccttccaactctcaaagtctcactctttgtgcactcataacatcacattctcactaacaaccttaggtaagtctacccttcgcttcacagaattcatcaacaattcgcataaaacatcacaacatc

SEQ ID NO: 69517 - DNA, 361 bp, Glycine max
  unsure (1)..(361): unsure at all n locations
agcttcttgcgtagccgttcttggtgctcataanatcccannaacaaattcctcttattactagctattttgaattctttagttcctgaatgacaaccttcanatggtgctcgtcccctcttcttttctgaaaaaagaaaataaatgctgtcaaacatgcatgaagtctaagaaaataatataaagaaacatggtgagatccaattaaaagccaactcctatcntcagagccttttggtaattgcttgctcttatgtggggggttgttaaaatctatctttgcttcataaaaactatactatctctttattaccatttgatgtatgataaaacatggtctcactgctcatctctctctctc

SEQ ID NO: 69518 - DNA, 427 bp, Glycine max
  unsure (1)..(427): unsure at all n locations
cttggaatggtttattattggtttggtgatagggattgagtttgagtttgcttcggggcttaagagattcttaatgctgaaggcactgctagaagccattgcaaggagttntaaggagaaaagttcaactatgagaagggaggtcataagaaaaataaatntaaaaacatatgaagtaacacttgaattctgaagctaagtaaagcctcttgaaagcacaaccataaacttccaaaaatgacaagattgagaaagtatatgcttcttttgaacaaccaaataatgcactgagttgtccaagttatagaaaatagtgatagttntatgttaaatgcaaattatntctaatgtttgcatgtcactccctattcgctatgtatctaaactatgattnntaaatgcagttatggtcatggcacggtgagtc

SEQ ID NO: 69519 - DNA, 340 bp, Glycine max
  unsure (1)..(340): unsure at all n locations
taaaatactttttaattaatattgaatttttattcctttattaatacatatgtgaggggtagagggtgtcacaggtctgcttatccttaatgcactccacacaagtttatagtcttcanaatctagagtattgaatacctcatctttcactaaccttttaatcctctcaatggagatatngtctaatctttgatgccataacatagagggaatctcattaatattacaccttntaaactagtttgaacatgcattaaactattagtggcataatttttgtaaccaagaagataaaaccatcatacaagaataccattccaacacaatcaatcattcaaaa

SEQ ID NO: 69520 - DNA, 306 bp, Glycine max
  unsure (1)..(306): unsure at all n locations
gaatctaagctacatgcttctgatgatgaagcnagacagattcatggtggtttaatggtgacgcaaagcctcagagagtgattctacgattgagccgacaatgaatcaacattgcgtcttccttctcccttctctaaggatgcatatccacgcagtgcgagaactcttttgattcttccctttatctttaacaaaagatttgacaggactatttgtcttacatgtcgctagtatccccattcacaaagattcatacgactagctgtctgagaactttgcctttacacattgaaggagacatacttt

SEQ ID NO: 69521 - DNA, 357 bp, Glycine max
  unsure (1)..(357): unsure at all n locations
attcttaattattccaagaccactngatccaacactagtaacacattattctaaatcatactcttntntaanttgattannaaatntatttggaannnactataaaattttacaagagaaattatttaaatggtgatgtangaagccacaagaaatatatcatttcaatanattttaactaataagatagtgtanagtgtgctaaaagggagttgcaaaaaatacattataacatttctattataggatatctctaattattgtgaatttaaggagatattangcatattntaatgagtcaagatatttatttctttgattgatntgatgctggattgtaaaatatatcatatgttt

SEQ ID NO: 69522 - DNA, 62 bp, Glycine max
ctctccaaggcggatcgcccggtggcagggtttgctatcttagttctatatagtctacgtca

SEQ ID NO: 69523 - DNA, 489 bp, Glycine max
  unsure (1)..(489): unsure at all n locations
tcacctgcangctgcagcttctgcagagaggaacgtggtggtctattatacagagttcgatgagttctatgaggaactcantgacgccactgngacgacgagttgactgactttggngatgacaacattgatgttgccattatgaangaattctatgccaacctctatgaccccgangacaaatcacctaagcatgtgaaggtgagaggtcatctgattaatattgatgaagataccgctaatactttcttaatgacctctattattgtggaagaaggggaatcactctgtgcttattcagattncactcctgangctgatctangagttgctgctaactctgtatccgagagggatcaacttatgttatggcaccgatatatttgagaaacatacccctactcaactggatgttttcttttaactgatcactcccctttgattatctgcagccaacattatgatatataaatgattatggggcctatt

SEQ ID NO: 69524 - DNA, 89 bp, Glycine max
  unsure (1)..(89): unsure at all n locations
gctcacctgggcgaactgtaaccgcctcanaatgagcttttctctataaatagccatgacggcggcgggggggggtgcgttagcttcct

SEQ ID NO: 69525 - DNA, 417 bp, Glycine max
  unsure (1)..(417): unsure at all n locations
agcttatgctgcanacatctacaatagacctcctcaacctcaacaggataatcagtcacaacagaacaattatgacctctccagcaacaggtacaatcccgggtggaggaatgatcccaaccttagatggtgaatccttcacaacaacagcaacaacaaccttattttcagaatgctgctagcccaagcagaccatatgttccttcaccaatccagcatcaacaacaataacaacaacaaccccagaaacagcaaacaattgaggctcttccgcaatctttccttganaacttgtgaggcnatgactatgcaaacatgcagtttaacaaaaggtagagcctcattcgagctaactatcaatggacaatggctcacaataaatcacacaatccagaatctgcagatagctctcatctg

SEQ ID NO: 69526 - DNA, 343 bp, Glycine max
  unsure (1)..(343): unsure at all n locations
tagcagccaactcctgaggatcaggcctccggaatgcaaatctggaatatacacaaagtgtttccccctcttccacaacaacaggggtctttcgagttcctccttgaactcatcaaactctgtatagtcgaccaccacattcctctctggcaaaagcttcctaggcacaataacatcagtgtatctttcccaagcctcttgggaagtgaatctggatttgtcaaatctgactttggtaggtgtagaaggtgcctttcttttcctagaagccatcttgcaaatataagacaaaacacacaagattagcataggtttattcttaagaanatagaagaaataaact

SEQ ID NO: 69527 - DNA, 101 bp, Glycine max
tctcagagtcacctgaggctgcagcttgaccaatctgctacattaccttgaccaggtgatttgtcatccttaccctcgaagcaagaaaaggagaaagaaat

SEQ ID NO: 69528 - DNA, 322 bp, Glycine max
  unsure (1)..(322): unsure at all n locations
ctacattctatgtcctactaagccatcgttggctctatacttatcaataagacctggtggacgattctgctctgactaaatatgtgatcgcctcatagactataatcatacttaacactttgtgtcttgtcattgcatgattactatggngtttttgagagcttaggtactattcaagaactttataaaactttatatgagagaatgatcgaataacgccacacagatgatcactgaatggcttcttcaatgctgcttttaatatagctctcattatctagtacctgttggtgcatctaatgcttgctttaagtgcacatgt

SEQ ID NO: 69529 - DNA, 210 bp, Glycine max
gcttgaaaaacacctgacgtaattcacgccagtctccatttttaactatataagcatctagtcgacgatcaaatatctagaagtgcacgtatgccagcttgctaaacaactcacaaagaagccaatatatattttgtgcctaacatggagcctaatcctaagcggtgcttacaaggagtttgagaaatgataaccctgttcatgatggga

SEQ ID NO: 69530 - DNA, 395 bp, Glycine max
  unsure (1)..(395): unsure at all n locations
cttgcttctacactttcaagttgtaatacgtacaattgatatatacatatattctactagtatggaaacacatatgcaaggaagatagaagaataggattaaaacattttggcaattactgacatgtggagagatgtctaaagatagtttaataaaaagacaagatcgtagcatgcaaaaaatgcaaagacaaattctgtgagcatgagacattggatgtttcagatataaaagagtttttaggtcttttatccactttggtgcctctctgttggcttaatgttctttcaaactgttggctattgatggtgaatattagctacataatgacacctagtgagttacttaagctatggttgaatcanagttaaaaatgtacttctagaaattttaat

SEQ ID NO: 69531 - DNA, 320 bp, Glycine max
  unsure (1)..(320): unsure at all n locations
agctngcctgtccgatgcagcagtaatgatggctcgagttatgttggtgtacggnntacaacccggaagtgggttatgcaaagaccatggcggcataactagccttgataatgccaaaggaaatcgtgggaagtatgggttatggctatagcccactcaggcagatataaagagaagcatcgcgggaaggaagagcggtggtcaaagctcgcggttgagaccagacagtgaacgaagcccgccctgccacataagtagaagctttatatgcgtgggtctgggagacgaaggtcaagtggtcgcgatatacgaagatgatg

SEQ ID NO: 69532 - DNA, 427 bp, Glycine max
  unsure (1)..(427): unsure at all n locations
actcagcttcagaaaaagatggcctcagcanattccttatttccataatgtgaattctatcaatagacctccaatctttaatggagagggttaccacgactggaaaacccgaatgcaaatatttattgaggcaatagatctaaatatttgggaagccatagaaatagggccttgtatacccaccacagtagaaagaattacaatagatggtagttcatcaagtgaaagcataactatagaanaacctaaagatacatggtctgaagaggatagaaaacgagtacaatacaacttaaaagccaaaaacataataacatctgccctgngaatggatgaatacttcanggtttcaaattgtaagagtgctaatgaaatgtgggacactcttcgattaacaaatgaaggaactacagatgttaaaagaact

SEQ ID NO: 69533 - DNA, 360 bp, Glycine max
gtacctataacacactaataggagggcttatattgtgatggataaaaacatcatctatcaaaaaatttgaaggcttttctgatatagatatcaatggatgatatgtttcgcccaaggggttcgaaatcactttgtgctgaaaaagcaattcacaaaacttggatacaatagtatagaagtaaactgtagaacaagaaaactaattatatataaacaataaagaagaaccagtggttatatactctcccaacatttgggctatgtccagttctccttcaaacttacaatgaagtattctctatgccacttctggctaccacgagtactctctaggccactaatgacactacccttgatctc

SEQ ID NO: 69534 - DNA, 179 bp, Glycine max
  unsure (1)..(179): unsure at all n locations
gcaagcttgtgtaagtaacaatatcttgtngacttggtatttttgggtgaatgaanagcaccgtctcaatatgcaaatatccatatagatatggatattanggaagaggaactacatattgataattataatattattattattattaatataataaatgataaatttctctctataat

SEQ ID NO: 69535 - DNA, 414 bp, Glycine max
  unsure (1)..(414): unsure at all n locations
ataccttcatctgacttatcatcaaattttcctaagttatcttttccattattcaatacaaaacatttacaaccaaagatatgaagatgtgagatgtttggttntctgccattgaataattcatatggagttttctttaaaatgggtcttattaaagccctatttaaaatgtagcatgcagtgttaacggcttcagcccaaaagtattttggaagaggagtatcatttaataatgttctagaaatctcttccaaagatctatttttcctttcaacaacaccattttgttgaggggttcttggtgcaaaanagttatgctcaatcccatgcttatcacaaaataattcaaattctttattttcanactcacccccatgatcactcctaatagatataatcttgagaattttctta

SEQ ID NO: 69536 - DNA, 375 bp, Glycine max
  unsure (1)..(375): unsure at all n locations
agcttcttagggtctcgtatatcgcgggatggtcctagccctcgaagctangatcatggcctttcttgacacgcgacacaagatggctgaaggactaaatcaaagctctatatcggaaaatggaggattatttgcaaatttgcagcgacagtngaagcgaagatggagaccttatcagaaacgatagcacatctagaagcanaccgatataatccacagcangcacaacctgaggcgacttcgttcccagcatcaggatcacacacagcaccgcatcggatgaagctcgatgtgccgagattcgatggctccggcccacaggctggatcttncagataacgcaattcttcgagtatcacacaacaccagatcatg

SEQ ID NO: 69537 - DNA, 374 bp, Glycine max
cctctatatgacttatcatatcatgtactgtcatacccatttctatgcctgcattggctagttcttctctatcctcatgggtagatagaatgatttcttcaatagctttagcagagatagattgatttcttcaatagctttatcatactgtaggattcaatttcaagcttcataagcattgttgaagatttcaacaaggcattaatttcttcatgcagctcttcaataacaagaccttcatatatctccactacatctactgctttcttgatttctgctttataatcagatgtggataagaagattcatagcttcattcaaaagccaacctcttgaatctctcaacagccctttcgaaatcaaaattggtaaca

SEQ ID NO: 69538 - DNA, 409 bp, Glycine max
  unsure (1)..(409): unsure at all n locations
agctngtangaatatggngtacccatcacatgtggtactatgtggcggtctggcgatggtgcacaacaagctnttctcatncacaatgcgccataaacccccatctctgttgccaccttcaactgagctcacgtacttccacgtagcccatatcttcgtttctctcaacaccgngtccccatcaatcctctcaagcttncacaacatncaagcaaaacaacattcaaacagcacaagctatcacagccaagcaaaacagagcanaggcagaaaactctgctcaacacatcaaccaaaatcacagcttttctcacgtaaagaccacagtaacaatttcttcgatccaaatcgtaaaaccgtggatcgactcccaaaatntactggaagtctatagttcataaagcctaca

SEQ ID NO: 69539 - DNA, 375 bp, Glycine max
tccttaataagattcctaaagaagctagagcttagctacacatacctctctaatagctaagctcacctccttgagatgagaagctagagattagctacacaccccttaaatagctaagctcaccccatgacaaaatacatgaaaatacaaaaaaaaaatccctactcaaaatgcctcgaaatacaaggctaaaaccctatactactagaatggccaaaatacaaggcccaaatgaaggaaaactgtagaagcaaagcttcatggtgaatcaagagtgattcatagatgttttgatgataacaaagatgataacaaaagatgatgacaaaggtgatgacgaaaagctcaaaggtcaatcaaagaatgagttcagat

SEQ ID NO: 69540 - DNA, 399 bp, Glycine max
  unsure (1)..(399): unsure at all n locations
ctgcaagagggcttcgaagctaggcgcaacttanagattgctangaagagggctgccaaaggcagcaggaagggtggcaaagctggatgatnttgtaattattattattcgtacaaattttattgntntgggcatttttntgttgatagtgtgtttcatttacttatttttttgtgtcgtcaattggttgacaacacacgtctagtagtaacaacaactctttaattgttcataagacaaaacatttggataataacaactaaataaacacttgatatacaanactttttttgaaatagaaatagcaacaatgtacgaattttgataagtanaaacatgactacgcagattttacacgcatttagagcatgatctcatcaacagatcttggnttcattg

SEQ ID NO: 69541 - DNA, 199 bp, Glycine max
  unsure (1)..(199): unsure at all n locations
ctgtaaggtcaaataaaagactgctttctcatcaaaggaccgggaagttgaatgactgtgaaatcttgaaatgttcactatntcctcagaacacaaaatgatgtgaagaaacatttcaaatgtgactctatgtctacttaccttggcggataactgtgttacaaaactttagtactagaaccttatgatgcaactactt

SEQ ID NO: 69542 - DNA, 379 bp, Glycine max
  unsure (1)..(379): unsure at all n locations
atatgagcaattgaatatccttcgataatgtctgatcctgtttaccctatgcgtnggacatcttaaagtggttggacctaatcctctaatgtctgggaccaaaattatattgcctttgtggttgaacatttggtccagaatgggccgtttgaatcctctcaattggaaaacctgacagggttacttttctccctcttaagagtgggcttcttttgtgcttatacaaagaggcttgtattctacctcttcctttaacaaaatgttgtcatcccaccttctcaatttgagcccatatgaaaatatgaacactatcttaaattctacttgtataagggagagcacgtgagtaanatatagttgatttctctgtactaaacac

SEQ ID NO: 69543 - DNA, 562 bp, Glycine max
  unsure (1)..(562): unsure at all n locations
ctgcagcttgtcttcgagaggtgtgtttattanggacttctgaaggttttngaaagcttgaaaacgtagtgagtntagtctggttccgttccatcaatgaagtatcacgcctaagctgggaaagtgtgcaggagcacngctttcaccanctgaagtaccagccgcaaccatagccaatgccatngaagcaggtggagatgcannagcagcagcccaagctggagatatcatagcaagagcggnctganagaaatatcagttaacanaagtagcataacggaacagaaaatgaaagtgactatgttgatacattgaactanngacaacccttccattagaatataaatactttcaacctttttgaaacactacccattcaagtcanataacatatttgcccncattctctttgctattatcaangctaaatacatttgtcatcaatacaatcacttgngcctcttcttcactatttcatcagtcatcatactataatatttccaccttttgtttgctaatttcgtcagagatntntttaatttatacactttacatacatatc

SEQ ID NO: 69544 - DNA, 394 bp, Glycine max
  unsure (1)..(394): unsure at all n locations
tataaaactaagcttatgccagccgacccctntttatttcagtggcttcagtttgtatatgtaaagcatcacaagaaccatgcatctaataagcttgaaaaaccaattaaccgaaagaaccattcaactgtgatatntaatcagagaccctagcaaaaccaatgtaggaacgaatattaatttcccatacaacttgcatctatattcagcttcacataattcatttatatataggaactgattctcatttattagctagctacaagaaaaaaaataacattagagatgaaacaatctatatataaattttaaaaaatcatcactaaattntctgtgactctaacgaagaanaagcaattntaatttatcactaaatggcatgactaattnttta

SEQ ID NO: 69545 - DNA, 117 bp, Glycine max
  unsure (1)..(117): unsure at all n locations
gctgctttcggaccttgaacaagcaatcaactcctctntcagaaccatgctatgtgctcgcgactggtccctttcttcccttcgcaactngagttcattattgctaccccatagagc

SEQ ID NO: 69546 - DNA, 455 bp, Glycine max
  unsure (1)..(455): unsure at all n locations
tgtcttcacaataatcatcacacaacaganaactatcataactacccctcatatctcccaaaaccccatacccacgaaaatcaagagggaaagaagtccacccaaacctgaaattttgaagtcccactcgtagccacgcacttcacgactccaaaaatgctctcctttcacgatatggggcagaaatggtggccaaaggttgaagctttgcttgaagcttcaatggagaatgaagaagaagaaagctacgtgagagagggagagaaaaggcttctgaatttctgctttggctgagtgaggagagagaaaagctctttgggtttaaaaataaaaagggtttttcccttttttttccattattttattcaagctctgccacatgtccctatctgattggagcanaagggcccactttctctttttgactgtgacccatactcagtcacaaaagtgag

SEQ ID NO: 69547 - DNA, 246 bp, Glycine max
  unsure (1)..(246): unsure at all n locations
aaaaaaaaatgtttgatcaatacctcgacaccctatcatggaggaaatatgatgaattcagaggaatgcttatgttatgcatgacacatatgcattttttagacacaagagcccggaagatcatctctttttactcactaacatttgggcatcatggttcaattgcagtcatcaccacagngcctcatgtatgcatttaaaaaagtgatgctgacctttcgaccttccatgacagatgacgagaca

SEQ ID NO: 69548 - DNA, 318 bp, Glycine max
  unsure (1)..(318): unsure at all n locations
ctaaatatatttattatccgcaagatgcatgacaagatatcttcttagctcacaattaaataattcatcccaataaattctaactcactattgcatctggatcgcatagggtggcttaatttattatctttacattatagaaatgagacaattatcgagttggatcctttcatgaatcatccattataaaatagaatatatatattactgagtacaaaggatctttgacactattaatcagaccttgatagtttcataataaccatatacatatattcgcacactggaattatatgcatanatctgatatattgcata

SEQ ID NO: 69549 - DNA, 257 bp, Glycine max
  unsure (1)..(257): unsure at all n locations
gagttatctctgttatcttattgagagtgaatctcctaaactcttgagagatgcaaaaacaccctgactgtatcaaaggacattcacaacctttgtgcggtgccctcgccggagagagtgagtcttttcttccttatatattcaaccttggtcgttcaaccacaatgtcagatattcacttctgtccnaattatctcgggccataactgccggttacgcactcanattaagtgaatcttgagcctaaatcgaatttc

SEQ ID NO: 69550 - DNA, 334 bp, Glycine max
  unsure (1)..(334): unsure at all n locations
ctttttttcttcgcgaagtgaaccatgctcaagaaataaagaagagacttctctctatctgatgctttctgacnatccaagtgggtatttcatatccatcataagttatttttacgtattctcaattgagttatgtcattatacagaaataacctggtaaggaggcacactgagatatcacatatcgttctagctctttaaaagcggatttctttctttagattatcttcacacgaccattaaagttgtacacacgattttattgtaaattttcactttgttgataaaactataagtgcatttctactgagcctactagacgtttctgtacagc

SEQ ID NO: 69551 - DNA, 409 bp, Glycine max
  unsure (1)..(409): unsure at all n locations
cccggatcttgaagttcaagacaagtcattttattgtttattatagtagtgaataatgtttctagaattttcagagtctatntggccaaattcatatctaatctaatcaaatttatataagctgagttaaataaactttcttattgtttgaatacttacctcaattcattcatatatagattaatttgaattagatcaaacgagttaaaatatttaaatttgttcattatttttaaaattcagtattctttataaactaaaataaaatatacttaaattcaggaattatatgagtgtgatgttaaagacttaaataacattntatctagaactgtcagacctcgtcatgaagaaacaagtacattatagtctccttcatattcatccgttgagcacaaaatagtaatac

SEQ ID NO: 69552 - DNA, 512 bp, Glycine max
  unsure (1)..(512): unsure at all n locations
agcttcaagaaaaagatggcctcagcanattccttatttccagaagggaattctatcaatagacctccaatctttaatggagaggggtaccactactggaacacccgaatgcaaatnttatcgaggcaatagatctaaatatctgggaagccattgaaatanggccttatatacccaccacagtagaaagagnttcaatagatggtagttcatcaagtgaaagcataaccatagaaaaacctatagatagatggtctgaagaggatagaanacgagtacaataccaacctaaagccaataacataataacatctgccctaggaatggatgaatanttcagaagttcaaatggcaagagtgctaaggaaatgtgtgacactcttcgataacacatgaaggaactacagatgttaaaagatctaggataaatgcactaactcatgagtatgaattatntagaatgaatacanatgannatattcagagtatgcannagagattacacatatagt

SEQ ID NO: 69553 - DNA, 291 bp, Glycine max
  unsure (1)..(291): unsure at all n locations
tccgagtcaaacgttatggccgaccgtatattctatgggcattccatttcaactattaatcggcatgatatattacgggcctcaatcggacatgcgagtcaaaactttagcccgtcagaattcacccgagtcttccatgttaaattttgagcgtcgcgataggatacttggcttattacaagatcccgaggaaaagttatggcccgttgtatntgcgatgggcgttaattntatcctaagagcatctcgatatattatgagcttcaattgggaatccgagccaaacgttat

SEQ ID NO: 69554 - DNA, 396 bp, Glycine max
tccttaagaagaatcctaaagaagctagagcttagctacacacacatctctaatagcttagctcaccttattgagatgagaagctagagcttagctacacaccccctataatagcttagctcacccccatgacaaaatacatgaaaatacaaaaaattccctacaacaaagactactcaaaatacctcgaaatacaaggcaaaaaccctatactactagaatagccaaaatacaaggcccaaatgaaggaaaaacctattctaatatttacaaagataagcgggctcatacttagcccattggcttgaaatctaccctaaggctcatgagaaccctagggccttcgcttgaatctctggcccaatctgcttggagtcttctattcaatgcccttgc

SEQ ID NO: 69555 - DNA, 506 bp, Glycine max
  unsure (1)..(506): unsure at all n locations
tcatgatgttgaatcaagttgattcaagaagttttgattatgactaagatgatgacaaacaacccacagaatgatttctagattaaatcaagaacaattcaagaatcaagagaagtttgatttcaagattcaagaaaagatgaattcaagtttcaagagaggaaatcaagaagacttcacaagggaagtattgaaaagatttttcataagaacaaacatagcacagttttgtttttgaaaagagtttttcaatctatcttaaaatcttattctgcactcgagaaccaagcatattgaaattagacaccatntcttgagagatcatgttcaaaaagggcattgtgtacctagaattgttgacacatagaatcagttagctgatatctntataaaacctctccctatagaaactntattngctattannaagagaataggactcttagatatanataacttagaataatatctattttggtnggctattctctattagttttcttatg

SEQ ID NO: 69556 - DNA, 396 bp, Glycine max
  unsure (1)..(396): unsure at all n locations
actatttttctcgatagttcttcattcttcttcctcttttcactntnngtnttccattntcttggacaanaatttgtgccttttccattggtgatgatcatggaaggctaaacacttcatcaatccaaggatccactccaaccaaggctgaatttgagttctgngttagtatttctaatctttngncaatgtcatctttctcttcaatcctatnntcgattntcatgataatgattatgcttangaatgaanatggattangtatggattcattntctaattntgaaattattcccagattgttgaatgattntcaacctaatttcaatctcaacaattanggatngatcgattgactatctctatgtatttactgactttacactgacatattat

SEQ ID NO: 69557 - DNA, 500 bp, Glycine max
  unsure (1)..(500): unsure at all n locations
ctaagcttatgcgacccgatgatagggnttaatttgttgtcgccaaagaagaaaatatgaatcctctagcttctatgagattgaattcggaanagcgaaagcagaagaagaaaagatagagtttatcaccattgattattgactaagctctagatacatacaacaactcagtccctttgaatgcctagaccaaatttatattggtaatggacaaggttttcccattcattccactggttcttccatatttatttcttctattaattctaaagtgtctatgtccttgaattagctgctttttgtgcctactataacaaaaaatcttatcagtggtcagtaaattggtctagacaatggtgtatattttgaatttcatcctaattattgtcttgtcaaatcacaaggagctaatgagatcttacttaaaggctcacttggacctgatgggatatatgtcttcccaaatcttcatctncaaggctcaattcctgctagtatag

SEQ ID NO: 69558 - DNA, 242 bp, Glycine max
tcttatcacgagctgcacttaaattaataaacgtcaaacgctgaatcatatctattgttatcataccaggcaatttgatcaatttatactgtgaatagtttgcatgtatcatactccttgtatcataccacaagaatcttgaaaaactttttacttaattctggccaactttgtactcaatggatccctctataatgaacttctaacttaatctgctgacatcattgatatttattcttgct

SEQ ID NO: 69559 - DNA, 390 bp, Glycine max
  unsure (1)..(390): unsure at all n locations
ngagatgagggaagtgtgaagggtgaaacttcctgctnttattgttgaccacagagtggtacctggagatatgtcgcatgggtcaggagaccttggggacgtcaggtggtgtgctattgcccaaaaccaagcttgaccaatcccgacccaacccgggcatagtcggtcagtgagaacctgtgatgtacctaagcatgcgagctcctggcagtcaacagataaaaggaaaacaagaccacatagcaaggaggcttgtggtggctggccagctgtgaattatgtgtaatatgtggattgtggcctctggtaatcgattaccaagggtgggtaatcgattacaaggcttataattgaagacaggaggctaagatggtctctggtaatcgatta

SEQ ID NO: 69560 - DNA, 388 bp, Glycine max
  unsure (1)..(388): unsure at all n locations
caccaaagatgtaagacaanaatttgaaagaagtgtatatttttgaacaataagagctaatatacaatcagatacctgagagtgataatttatgttgctatgatccctaacaatgtataatagtcccttgtagattacatttatctntacatgatcttgtatatattattacacanaaacttatgaatctgattgatatgntaatacctaataatcagtaatggattgatatgtaatcaatattgattctgatttctccattatanataaagatgagatgtggtcatctaagacacanatatacagtaaaactaaaacactgctatatggtatcaaagcttatggtattctngacagaagaataacannattcgtcctcacaacctac

SEQ ID NO: 69561 - DNA, 468 bp, Glycine max
  unsure (1)..(468): unsure at all n locations
agttagtatcatatacgacaagttagaatatatttccattgagctggcatatatgtactaaataaattcattaaggcaacaaaatggaacggcccaccaaaccacacacatgagctggtggaccaaaccctaagtaaggagtggggcctgttatagctacagatgcttgagtcattatgtgggtatgcttcctaagaaactatgttttctttatatgaatatattaatataccttccttccaaccaatgaaatcatgtataaaatcaaactcttgtttgtaacatagctacttaaaagttaaataactaattaatttactttgttgacaagcctctngtgtggcaatttatttacaggggtacaccttttagagaaagtgatattaactcaacagatggcaacatatagaaaaagttgttgtatcccctaataagtacttatttaggtcataactttttagttaattt

SEQ ID NO: 69562 - DNA, 415 bp, Glycine max
  unsure (1)..(415): unsure at all n locations
ctcaatanagcaagcacatctgttctgagttaacagaaaacttgggtacccacaataagcaatttaactataaatgggacaatntcactttaccactttaagcataaaaataagtacggtattactaatctctttcttctatatttcaaacaaataagcaacaaagatacatttctagtttagacgtggggatgatcaatatgtccaaacacagggaacatgtcataatctatagtcaggccctgcggacaactanagatatgctttgactgcatacattatactggagatagaccaatgctatgactttacagcaaccatgcctatcttacatataataggtacaatgtaaaactaccagatgatcganacacctatgtcatgcctcccgcatattacttgatttcgtatcctt

SEQ ID NO: 69563 - DNA, 434 bp, Glycine max
  unsure (1)..(434): unsure at all n locations
cgtggcctactcctcctctgcgtaatccanaacacatcttgcttcttattcatatacaaacccggatcaacgatgatcggcctcgcacgctgatgactaatcatcacaaaaacccaatcacataaatcaccaaaacaaaacccacacacaaaatcaaaatcaaaatcaaaacaacaccatcataaaaaaaaaaactcactctttccatccaatgtcactcgtatgatcactgaaattcagatcccgcggcaggtacgaaaacgtatgcagcagatctaaccatcaaaaaacaagagagaaaaaagacataagcaaacaaaattatagagacaactgttaaccagttacatactcaggactcgaattcgagaatgagacaactgattaagctgaaacaacctcgtaccatctggtgtgacaagtgggtaatcgga

SEQ ID NO: 69564 - DNA, 275 bp, Glycine max
  unsure (1)..(275): unsure at all n locations
tgatgcagatgggtttgtatctacctcatgcactcctctaattactatggcatcatttctggcactaaactgctgtgaagtggaggccatcttctcaattaaatttctggctcagcaagagtcatgtctccaagggcttcaccactggcagcatctatcatacttctcttcatattactgagtccctcataanagtattggagaagaagctcgttctaaatctgatggtgggggcaactggcacataagttcttaaaatctctccagtactcata

SEQ ID NO: 69565 - DNA, 404 bp, Glycine max
gctttaactggaattgcaacgttccaatcggtttttaacaggtgtaatcgattacaatatattggtaatcgattaccagtgtatctgaacattgaaattcaaattcaatcgtgaagagtcacatcttttcataaaatgctttgtgtaatcgattacatggttttggtaatcgattactagtgacaagttctgaataaaaatcatgagatgtaactcttccaatggttttcaagttgttctcaacgtcataactcttccaatggttgttcttgaccagatgcgaagagtctataaaagcaagaccttgacttgcattccaataaattgttcatatattcttttacaacctttgaatctctttgaacatcttcttgaacttcttcttcttcttcctttgcaaaagc

SEQ ID NO: 69566 - DNA, 251 bp, Glycine max
  unsure (1)..(251): unsure at all n locations
gatctctnagtcacctgcngctgcagctgctctaattacattgtgtttgatttatgggattgtgntgttgtcattttgncttaagaatagtatcccacttggtaaactaactttccagatgttagccttcgcaggagatggccccgacgaagcttgcctcatagaggtccaggaaggacaaggctacagaaagaactatttccgctccggagtatgatacgcaccgctttaagagcgcggtacaccagcag

SEQ ID NO: 69567 - DNA, 427 bp, Glycine max
ctcagcttgtgcaatcatatcactcctacatgtcatctctagcatgcatattctttctttacccactcctcacgtttggttgtgtatggaaaaacaccataactaaacgcgccgcaagggatccctatcgcaccagatccaaatctataacgatgggtgatcaataggagacgcaggaacagatgaaagccgacatgtcggctctgaaagaacaaatggcctccatgatggaggccatgttatgtatgaagcagctcatggagaagaacacggccactgccgtcgctgtcagttcggctgtcgaagcagacccgactctcttggcaactacgcaccatcctccctcatacatattatgacggggaagggacacacttgggcacgatggcagccctcacctgtgatacaaccgagcggcttaccctta

SEQ ID NO: 69568 - DNA, 230 bp, Glycine max
  unsure (1)..(230): unsure at all n locations
gattatgtggacaagcttctcagcatagcanacaaaatatgtcttcttggcactgacattctaactctcgaattggtcaaaatatacttggtacaattctagaaaaataagaagccacattaacttccttggagaactcagaagatctttctactatcaccttggcagagcttttgaccgcacttcatgctttggaacaaagaagactcatgagacaagaanggactact

SEQ ID NO: 69569 - DNA, 401 bp, Glycine max
  unsure (1)..(401): unsure at all n locations
tatataattctcaagctcgcgtgagttacattcgtcccctctctcacgcaaaatctttattcttcttgacatcatcagaatattcgtgaattacattctgccaccttgtgatgatgactaccacctgcttgttacgatcctcaacatagacaaaacatctatgtgcatatagttgactccccctcggattctgtatgagtgcttatatgagacagctgaagagttcatatttttcatatgttaacaaattgtctcataaagaagagagatgtgtccttactatttgatactttatctttttctcgccctgtgtcgccttcgaaagcatatcatgagttgngaggagaaagacgttgccacttgctgaatacagacatatattatatctgttgtcttggtga

SEQ ID NO: 69570 - DNA, 442 bp, Glycine max
  unsure (1)..(442): unsure at all n locations
gatacttanagtcagctgctgcatgcaagctngcaagtngattgtcttcanatgtgttcanactcatcaacagtagtcgactttgcacattgccacacaattcctttaagttccttgcttttctattgcttaataaaatttttccaaagatgcaaggcatanaatctatgaggtgcaccangcatgacttcttgcanagctggaataagtcccttgaaaaataaagtagtccataacttatgtcattaacttgcattaaatccctaacttattgataataatggcaatcatttcatgtcataccttttgcatgtctgacatgaaattncacccattctgtacataatccccaagatctttatgcaacanagttaaaaaacatttccannatttctttgttctccacgtctaccacaacataagcaataacaacgatgtggta

SEQ ID NO: 69571 - DNA, 473 bp, Glycine max
tcagcttctggtcttcttcctaaacttaccatctatattgttatttcctagagccattttgggtcattaaagacttatttgtattgtacttaagatgtattcaaaggttgcttgtacataaatgttttaagaggttgtgattatctctaggtacaaacatagttggcaattggatacttcgtcttctttccttcatgattaggtgagtgacaaaatggttccttgcaacaattaattatacctaaaagttatttgtatccagcatttccatctacaaaatcattagaagactctagagactgtacctttggcatatttttaggagaaaggtccattggtattggaatgtgagggacatgttgtactttgttggtgatattcgtcgtgtatatgacatgtcagtggatgttctgcaatgtctgcttatggatattatgtttctatacatacgatattttccttcatgcatgctg

SEQ ID NO: 69572 - DNA, 309 bp, Glycine max
  unsure (1)..(309): unsure at all n locations
atccttaagtcacctgggctgcagctttgtataccatacatgtttttaccttaatatattgacttatntntgaaatgctttacttatcanatgtcanaagatataattcaatanaaaatgatttcgaatggttatctaaatattatctaatataaaattattttatacatataccaataagattactcaccgggtaccatgcancaagtaaaaatagttgtataactaatatgatatnntttttactgacttatagggacttaacaanccaacaaaaaaaaanaacacagaaaacacacctataccctt

SEQ ID NO: 69573 - DNA, 433 bp, Glycine max
  unsure (1)..(433): unsure at all n locations
actcagcttatctgctcgnttggaataggcaaagttggaaagaatggatgctgttgttgttgttgtgccacacgagagggagccccaacttgtcttgcttgagcttctccaagtagcctcctcctcttttgtgactccaaacattgaagaagttgctccaattccctcacaaactctatagcccctccaattatagaagcttgatcaccctatacatacacaaaaaatgaaggaaggataaaatatgacaacatatgcaagaattgctatggtattcagagaaatcaaagagttctggtataattggttttttgaggcaatatatagctgaatgagtgtctttttgttcataacaattaacgacatatacaggaggactttaacaacaatctatgcactttgcttaaattaattgagtttgaccttctcaata

SEQ ID NO: 69574 - DNA, 357 bp, Glycine max
  unsure (1)..(357): unsure at all n locations
tttaatcatcctgctgggacgaatgagaaaacttgggcaaatgaagacggtgagaatgaacgagaaacccatggtgcgactgtcgttcctacatggtcaagtttcccaccaacccaacaatgtcattactcagccaataacaaaccttctccttacccaccacccagttatccacaaaggccatccctaaatcaaccacaaagcctgtctaccgcacttccaatgacgaacaccacctttagcacaaaccacaacacccaccaggaaacgaattttgcaacanaaaagcctgtagaattcaccccaatttcggtgtcctatgctgacttgntcctatatctacttgataattcaatg

SEQ ID NO: 69575 - DNA, 456 bp, Glycine max
  unsure (1)..(456): unsure at all n locations
tcaagcttctaagcacctcctcagaaatgcttagattctntaaccactttattttcccacacaagggatgtctgacaaggtcaatgctccccccatggacatacacaacatacaatgtatgaacgtgggcaccatcaagtacaatgaccatggatgaattaaggctcctaagcatcccctcggaaatgcttagattctttaaccactctatttttccacaaaagggacatccgacaaggccaatgcaccccccccctccccacgaacatacacaacatgcacttgtcaatgcatttccaacatcaataacattccattttaatggcatcaccaataaccacaacaacctcattccatattgacataaccatcaataataacatcgattcatgttgacatgatcaccatgtaacatgtcatctcaaatcaatatcatgcgtaatatcaacagtacca

SEQ ID NO: 69576 - DNA, 190 bp, Glycine max
  unsure (1)..(190): unsure at all n locations
ctgcagctatgctgaacattatataacccctcacgcaaaccccacaacaaatatttgattttcagcacagatcatcaaggtgaaaatatcaatctcacacacacagctgtcctctttaaatgtgctgccaacagcctatttctcttaagcngacacacacacacaaacacagaactagctctctcccttc

SEQ ID NO: 69577 - DNA, 499 bp, Glycine max
tagactaagtttagcctaccatcctcagactaatggccaaactgaatggaccattcagtcattggaggaccttttgagggcgtgtgttttagagaagaaaggaagctgggagagttctcttccattgatagaattcacttataacaacagttttcactctaccattggcatggctcccaatgaagctttgtatggtagaaggtgtaggacacccctatgttggtcagagcccagagaaggccttaccttaggaccagaagtggtacagcatattactatgaaagttaagttaatccaagaaaggatgaggactgctcagagtaggcagaaaagttatcatgataagaggaggaaagatctaaaatttgaggttggtgatcatgtattcttgagagtcactccatggactggggttggtcgagcattgtaatcccgaaaactcacacctcgctctattgggtactttccaaattcttaagatatgtggccctatggcata

SEQ ID NO: 69578 - DNA, 422 bp, Glycine max
  unsure (1)..(422): unsure at all n locations
ntatcataagtcctaaatgacatttcanactaggattaaccctcatagcatcacacttttccactcagaggactacattctcactttctaaccctaggttaactctacccttcatccctagcagttttccattagcaatttcagcacataaacatcacaagcatcgccataaaaaccctaaaacagaatgggtaagcttgactcacaccaaacatggcaagttcaacatgctttcaacaaattccttcacaaataactaccacaatgcataaacctagtaaaactacccatcatatctcccaaaaccccatacccacgaaaatttaggtgagaagaagtctacccaaacctgagatttcgaagtcccacacgtagagatngcgctcacgaactacgaaatgcttcctttcacgatttggagc

SEQ ID NO: 69579 - DNA, 77 bp, Glycine max
agcttgcctgtccgatgcagcagtaatgatggcccagttatgttgggtactgtacaacccgaatggttagcaaacac

SEQ ID NO: 69580 - DNA, 472 bp, Glycine max
  unsure (1)..(472): unsure at all n locations
ttcaccagatcatataagaataatgcattcaggctatctgcatatatatccttccaaacgtcanattctctgtctatatattcaacctttccatcactggcacgtggagtgaatcttcctccatggtgcaatactaaagttatattgtcattcattctacacaatcagaaaccgcaaacattgtcatatattatgaaaaaaaacctacctcagaaagcgtgaagacattgacattgtcaaaaagcgcgaagacacaatcagaaacaaaaacattgtcatctataaaaatagagcatcataaacaaaaataataaaggatcataaacctccctacgaagcgcgaagacaatgcagatgaaacccctcgaacatataaaaccccagatcataccaccataacaatgcatacgaattgaatgagaccaccaacctgacatatagcgcgaaccctcaatcacgagaatgcatggga

SEQ ID NO: 69581 - DNA, 275 bp, Glycine max
  unsure (1)..(275): unsure at all n locations
tcttacagcacctgcagctgcagcttggtttaaatntcgagcgtctcgatatattacgggactcaatctgacttccgagtgannaagtattggcggtagaaatagctgcgagctttctgtttaaatttcgagcgtctcgatatattaccggaatcaatcggactttccgagtgaaatggttatggtcgttcgaatttgctacgagcttcnagctttaaattcgagcgtctcgatatgttacgggactcaatcngacttncgagtgaaatgttatt

SEQ ID NO: 69582 - DNA, 490 bp, Glycine max
  unsure (1)..(490): unsure at all n locations
tgtagcanattcgaacaacaataactattcactcggaaggctgattgatgtctgtaatatatcgagacgctcgacatttaaaaccgaagctcgtagcaaattcgaacgacgataacatttcactcggaagtcctattgagtccgcggatatatcgagacgctcgaattttaaaaccgaagctcgtagcaaattcgaacgacaataacatttcactcggaagtcctattgagtcccgtaatatatcgtgacgctcgaattttataaccgaagctcgtagcaaatatgaacgacaataacatttcactcggaagtcctattgagtgccgtagtatatcgcgacgctcgaaattataaccaaagctcgtagcaaatctaacgacaataacatatcactcggatggccgattgagtcccgtaatatatcgagacgctcgagattaataaccgagctcgtagcaattctacgacaatacatatcacttggagtgt

SEQ ID NO: 69583 - DNA, 324 bp, Glycine max
  unsure (1)..(324): unsure at all n locations
gctntgtcgtgctcatttgtgcattgctttgaggtcattatatattttatgtcgatatcgattgtaagttactactttgagatatgaccaagatgacaactttccttgtgaaagttgtgttcatgttacatggcattttgattaatgccattgttcattctatcaatgattggatgtgacatgcctatagagagtgcatttctgccctgttgctgttgccactttgaaaaaattgattgtagatatgtgtaagtttggttagaatgaccatgttttatggattgcttgcatcagacagtgactctgctattatatctgattttt

SEQ ID NO: 69584 - DNA, 387 bp, Glycine max
  unsure (1)..(387): unsure at all n locations
tctttganaaagttgcgaacgatgtatgctagggccttgtcgatttttgcaactcaatggatacatatttcaattcaccagtcgtcgattgcaaggattccacggaagattccaaggccataagtcgtgcttcagtacgatccatgattgcaccaccggaatgttggaccagttgttaggaatctccttgtcactctaactctagattgagttaggctacactcacacacatgaacaatcaacaaaatgaaaaagtatctgtgaatgtatgatngatttgatgatgccaaagaagaatcaaacaaggctgctacatttgtttcaagattaatacaagattgctttaacaaacaaagccttgattcaagatttcttcaagatcaagcc

SEQ ID NO: 69585 - DNA, 111 bp, Glycine max
cattatctctcatggcatatcatacactgactttctgactggtgatcaaatgcaatggaactctgttctgttactgaagctcagctaggactgctgttaagctaatttctt

SEQ ID NO: 69586 - DNA, 383 bp, Glycine max
tgacatgaaatgtataatacctacgttctgaaaggcttgaatgcaatcaaaagtttcagcagaaaagaattccatatcaatgaacttaggatcgataatggaacgagatgagaaaagatttgagtaccgtttctgctgttcttcggaagaaaatagtgtggacgaagataaggagggtggaataggtgttgtggatgcgctggtggctccggaacgatgagctcttgaagccgaagcggaggcggatgaacccttacgtgtctttgacgattctaccatttgaaggagtatttgcagagtttaatcggtgaaatcaacagacaaatgataaagaagaagattgcaagttacgggagttgatttgatgaagaaatgagtaagat

SEQ ID NO: 69587 - DNA, 123 bp, Glycine max
  unsure (1)..(123): unsure at all n locations
gtgccttatgaatcctcccgtgcttatgccaccagttccttgaaggcctctcattntgtacattgacatcttggacgaatcaatggggtgtatgctggncaacatgacgaatccggaagaaag

SEQ ID NO: 69588 - DNA, 449 bp, Glycine max
  unsure (1)..(449): unsure at all n locations
tctcccccaatattctataaatagggggagatgtgaagtagataagggttctgccccttaggcacttctctctctatcgaatatgcttaggaaaattgcttccgtgaagaagatccaagccgaggcgcttccataatgtttccgtaacgttttcatgagtgatttcntgaaggttctcgaccgttcttcgacgttcttcattcgttcttcatcgctcttcagtcttcaacgggtaggtacctcacacctagcttttcaattcattctatgtacccgcggtggtccacaattggattcatgtattattattctcgtttcatttacttattataccccctttngacgtgcttaagccattttatttaagtcatttctcgcttaacctataaataaaataaatttccaccgatcgtttgaatagtattatccgttaactttggttgaatgaa

SEQ ID NO: 69589 - DNA, 393 bp, Glycine max
  unsure (1)..(393): unsure at all n locations
agcttccatcagaattgtctaaagataactatgttattgattttctcttatatntttactnttataggcttcatatagtccatgtatttgaacaatatgccgccactacataataacttataactaacatagtggaagactttattttatttcaaactctttgaataatttatgggtaaactatatttntagtctctaaattntttaaaatttctaattttagccccctaaataaccataacatttgaaagtaanaaaagtaatacattcatctcatataaacagggaatctcattntcaatcatcatgaatcaccatanagaaataacatcatacatcattatcaatgtatcatccccatgaatcatcatcaccatgcatacgattcataaa

SEQ ID NO: 69590 - DNA, 499 bp, Glycine max
  unsure (1)..(499): unsure at all n locations
gccattcctgcgaagacaaacatttggaaagttagttctcaagaaatataacaatcattacaaacaagggccaaacaacacttctcatggcacgagtgtcaacatgcactttataaaataatcatattgnggtcatgctattttatgacacatacgtatttgcacacataaaaattgtgtatgaagcattntacgacacctatccatgcatatattttttgtnttttgacaaaccttttcatgctacatcctatatatatacacacattatttttggaaggcttcttttgttacctactcacaaatacacatattttgaataacacttttacgctacccatccaacactgtgtaaggcacttcatgctatatatattcatattatgcaaggcattttcatgctatatatattcatatattgcaaggcagtttattcaactttctgcaaggcagtttatataacactcgcaagggcatatcatgctatatatatattcac

SEQ ID NO: 69591 - DNA, 356 bp, Glycine max
tcttctcatccagaactaaccgctcccgcatcaacgacttctattacaggaccctagtcagtcaccctctgttatccttcttctcctatgttctccatagccaccgcggtccaccatcgtaagacctccaaaccaccgcaccacatcaatttccattgtgctgcaagcgtttgattaattgcatgtgtgagaaaattgggagaacactcttctagtttactcttgtctagtggcccaatggaggctcactgttagatacaaacctcactttctttgcgcaacaccgaaccaagagagtgagctaccccaccacacacagcttagccaaacggcgtttagaaatacatggcttatat

SEQ ID NO: 69592 - DNA, 131 bp, Glycine max
  unsure (1)..(131): unsure at all n locations
tgccaccttcacccaaacagcaaatgtcatattcatcaagcatgtcatgtggtgcaacaattaaatcaacctgagtttataatgcagaanagaatggtagangntttcaattaataaaaggaatcactaaa

SEQ ID NO: 69593 - DNA, 368 bp, Glycine max
tctgatcataatgttgaggaactgcttcctgttgtttacactccatcggttggagaagcatgccagaaatacggaagcatttttatgcgtcctcacggtctatatataagtctgaaggagaagtaagcctttttcataacactgctctttttggtatttcacttagcatttgagaaaatactaagagtttgaattcttcagaggcaagatccttgaagtactgtaaaactggccagaaaagagtattcaagatattgttgtgactgatggtgagcgcatattatgacttggagatcttggttgccaagtaaaatatactgttagtcgtcttaatctgcattacacacaaagacaattatagtaacata

SEQ ID NO: 69594 - DNA, 479 bp, Glycine max
  unsure (1)..(479): unsure at all n locations
tttctaaaagttgctacatatagtttatacttctggtaatcaattacataccgtgtgtattcgattacaggcttttaaattcaaattcaaaattttcaaattgtttcataaatcaatttagccactggttaccgattaccagagaagaaatatcatatttttgagaagataattgttcttaacaaacttttgtaaaatattttctttagccaaacctaggtagcatcaattaaggaattctttctaagatcctaactaagtacatcgttcttcttgcatttctgaattcttgacttgaatcgcgctcatctttggcatcatcaaaacttcatatcatatatgcttctacaacatcaaatagtgcacttaatgcatgtgannattacaaaactaccctaatacaaanactagtctaggttccctaatatacaaggggttgaaagaatctacattactatgggaccctccctacactatgg

SEQ ID NO: 69595 - DNA, 502 bp, Glycine max
  unsure (1)..(502): unsure at all n locations
gacctataaaactaagcttaactacttgtaaaatgaaatatctaaaataaatcatgtttgtgataactagaatttntaaaaccaattcaattatatgcatcanagtatgaaggctttcataaaacaggaaaacaattttctgcataaaaanatggaaacaacattntgaaccaaaacatttaagtgttgcatctgcataacatagacttagtttttcataataataatgttatgataaattcttttatttaagtaatgatcttctaaacatgagaaaatgcacattgacaataggttctcataatcatattagacatgtaataatgagtgttctgactaatcacttagaaagtcaaactctctaagtgcttaaacctttgtgtcaagactttacgaacactaaggtaatcttgagtaaaaattcagaaagggtaaagtttcacgaaaagttggcaaagttacaattcaacctctcttgtgacattctgatatcagagcctta

SEQ ID NO: 69596 - DNA, 54 bp, Glycine max
agcttatttgcctaacaagccaacttacaacagcaagccccaagagacttatca

SEQ ID NO: 69597 - DNA, 355 bp, Glycine max
  unsure (1)..(355): unsure at all n locations
actcaagctttcactcgaatgttcgattcggtgacataactcatctagacgctcttatntgatcaacggaagctctcgagagaatcgaatggtcatactttttcacacagatgtccgattcgtggtcataatatatcgagacgctcgatattgaacaacggaagctctcgagaaatcgaatggacataacatttcacacagatgtccgattctgggacataactctattacacgctctaaattgaacaacggaaactctcgagaatatcgaatggtcataagctttcacactgatgtccgattcggggacataatatattgagacgctcgataatgaacaacggaagctctcgag

SEQ ID NO: 69598 - DNA, 366 bp, Glycine max
  unsure (1)..(366): unsure at all n locations
gtcacctgaggcatgcagcttaggttgctcattgactccagatggctacaaagaaggacaaagatctgtatggtgatctacagaagaacatagaccacagactcttgcaacaggtgcagatntctgattcatggaagctgagtactaggttgactaaggcatcaacgtttccctcaagctttgtatttccagtagatgaagatgaatcagtggccacctcatggactcctctaaggacaatagcatcatttcttgcacttgaattgtgggagtttgaagccatcttctcaatcaaattcctagcctcagcaggggtcatatcaccaagaagctcaccattggcaacatcaatcatactcctctcca

SEQ ID NO: 69599 - DNA, 493 bp, Glycine max
  unsure (1)..(493): unsure at all n locations
tcccgacccaacctgggcatagtcggtcagtgagaacctgtgatgtacctaaacaggcgagctcctggcggtcaacagataatatgaacaaagaccacaaagctaggaggcttgtgtggtggctggccagctatgaacttgattgatgtgtgagatatggcctctggttatcgattaccaagggtgggtaatcgattacaaggcttaaaaatgaagacaggaggctaagatggtctctggtaatcgattaccacagggtgtaatcgattatcangcttgataacgaggtcaggaagctaatggagcttctggttatcgattaccagcggatgtaatcgattaccacgcttataaagggaactgggagatggtggaggcctctggtaatagattaccagtctgtgttatctacttcacacaggaatggtcactggtaatcatcaccaagtatgtgtaatcgatacacagtgcatttttgagaatttatgttctg

SEQ ID NO: 69600 - DNA, 524 bp, Glycine max
  unsure (1)..(524): unsure at all n locations
gcttcatgcaagtgnntttgaggcttcttccctcananngcttggaagaggcttntaatcttcttcctcttcttgctgcctcatcactttgtgcanagctctcactnttagttctaaatttcttttcttcattctttgaagcttgagaccatcaagatctgnagtccctcgttccttttagccattttttgcaaactntatcaaggtaagggnggtcttttcacttctttaaccttgatctttgtatctttggaaggtagacctcattgtatgtggtattgatgttcaaaattntcgagctactgccttcgatggaactatgtggaaagttntcttctttgatatttaaggggtaaaattgattatntcagtgtcacaacatctcgttagccttaatttcactcanattggagtttctagcaaaagtatgaataaacaagttaaggacatttttgtgaattaatttgcacaaaatgactgctatatggtgatgactatttaaaattgactcaaatagttgttgg

SEQ ID NO: 69601 - DNA, 271 bp, Glycine max
accttaaatactacccgccataggactgcctgtcatctgttgtaatcgtgtttaatgaacaatctactgtaactcataagaaggccgctcctcttatccaaaagatgtacactctcctcatctatacaaactctgctaatacttatcacaatgagtaagccttcaaccacccttgagcctgattcagtggcatcgaaggggcttctagagaccaattccttaccactcgtatatcatcaagggcccagtgacccagcttacactcttccca

SEQ ID NO: 69602 - DNA, 430 bp, Glycine max
tgagccaaaatcttgactcaccatataccttgacccagggtgagaatgtcaatccttaccctcagaagcaaaaaaagaagagaaggaaaatttccaatcaaaggacaaaggagaaggaaaatttccaatcaaagaggaagcaaaaaaaggaaagaaggaaaatttccaatcaaaggaaaaagagaggaaaggaaattcccaatcaaagagtgggagaaagcaaaaagaaaagaaagaaaattcccaatcaaagaatgggagaaagaaaaaaagagaaggagaagaaggaaagaaagctcatgatcaacgatcgaaagaaaacaaaagaaatgtgcagagaggtctttggaccacacaatatctgaacaatacggaattgtcaccaaatgaacaaaagaaagaaaaggaaaccataacctataagtggtct

SEQ ID NO: 69603 - DNA, 381 bp, Glycine max
gttcattaatcatacctataagctagaatgcttcctccactccttcagctaaggccatgtactctatttcagttgttgaaagagcaacaactgattgtgattgcttccactgattgtgaccaacaagtaacacatatctgttaggattcttgtgttacattctgcaatctacatctactagctggatgctgctcggtgcatctcttgacctaatcacttcaagatctttaatacctatgtcacttacagttccatggcctgcagactccataattgttatatactaagctgaccaagcagattgtgcaaccatccatcatatgctcacacactgcatagggttatcatttaacttctagtgtctatgtgataagatgttga

SEQ ID NO: 69604 - DNA, 357 bp, Glycine max
gtgctgagtgtatgaatgaatgatgtgtacaggggttctatggaacttgtatttatattagttgagtgtggttgttggtccttgcttgtatgagctattgtagcctttgcagataattctcaggtgttgatcatagccaggaacttatagattatgttatagatgaacatttgcttataaactaaaggtagaagataatgctaccttgtagataatgtgtgggcttatacataattaaatgcctgccaacagataagatattagaatgttttcacatataaatatgttatatataacccgcccgttggggagcccgactgctgagggctatgcgttcacgctcctttatcatgactg

SEQ ID NO: 69605 - DNA, 90 bp, Glycine max
  unsure (1)..(90): unsure at all n locations
gcttcttatttgntggtggagaatcttctctttccattgtttattaatatatggcgcctcatctcacctattctgctttatcttccactg

SEQ ID NO: 69606 - DNA, 405 bp, Glycine max
cgatcaggatcggagaatcaagtgtttttatcatgtatgctagcgctttagctgccgaggaaatgaaaacattctcgtgtccgtcaaaccacaacttctgttgagttcgaaggagaaaacctagccgacgtacattgttaatttttacagaacaccgaacatataagcatgctctaccgtaaaataatattatcggtcaacgttcgttacaacaatagtggaatgtcggcaggagaatatcagtcgcgactttacaatgaccgatgtcaattattatattttgtattcaattcctgaataataataggatgatgtctaataggaaatgttctatcggtgtcctccggagatgcttctgtaataaacctagatcgttgatcattcctcgtcgacgtcggttagcat

SEQ ID NO: 69607 - DNA, 400 bp, Glycine max
  unsure (1)..(400): unsure at all n locations
aagcacgagctgcagcttatgcttaataatcttaaattatttttactatttttttttaatctttatctaatgtaacattattgtttgtacactatttttctattaaatataataaagtgatttaaaaacagtgagattaataataacaatgagttctttgtagtattaacaccattaatatagatttgttataaagggcattttaaaataatgggatgaatgaataggtgctaatgaatagtaagtaatgacatgaacaaataagtcatgttctattcaaaagaaagttaggatcatggataactaactanatgcattgaaanaaaagttagagctaatctcttcacaaatatcaagaacacatttattgtctacttaaggtatacaatatataagatat

SEQ ID NO: 69608 - DNA, 455 bp, Glycine max
  unsure (1)..(455): unsure at all n locations
actctccgaagcaacaagtgataagcaacacacatatctattaagttatgcaagccagaataagcacgcgaagaaattataagcacatggacaaggcacacgaagaatgcgtatgaaaggattatgtttatggaaaaattaaaaaagtccgaatagtcattctacaatttataactccatctatcaccatcctaaatctatgaggacaaaaacaagattaaataatgaaatggaatggattaagttttatcttcttcaatgtcatgtttacaaattatataaacaacagaataactgttccattttcctccattccactcttttaccgtaatctaaacataacctaaggtaattcctagttcttaacatttgtctcatggatgtggttattntttccataaactatatntcttctaaaatgtgacttcataacacanaagatgctatccctgtgc

SEQ ID NO: 69609 - DNA, 324 bp, Glycine max
  unsure (1)..(324): unsure at all n locations
tctgagtcacctgcngcatcaagcttatcttatgcctgctctgacttacccccgtgccaccttgatattaagccagccctacttcaagggaactccacctatgaaactatccgcaagacatanggaggagatcccatcttggcccctgctcacctcaaagatccgtcccccatgactaccccaaccaaacatagtcctgcatattccgacttcacccacacccgtaaaagaatctgttccttcgtggagataaggaaagattgcgccttgaaagaggtgagacagtcagggcctggcaatacccatctcgatttacgattatgt

SEQ ID NO: 69610 - DNA, 461 bp, Glycine max
aggcatagttatttccagtttcctacaaatatcaatgaatctcgccacatgatgatccttgtccttcttataaggtaccaccggatatggtacttccgtatcctcatttgaagcttttcttttcttcttctctcttgctttttcacttctactcttttctttcccttctttattgttttcaaccttttctctttcttcatttccttgttctttttctacctctatatcttcttcttggtcgcttatttttttctccttgaccattaatggcttttcactctcctgatttgtcacatctattacctcctctctctttttcttagtgccatcctttacaacaaatatgttctacaaagccaccctattctcattctcaactaccaaatgcttcttgtttctttcatcacacatcgcttcctcttgggatcctttctgtgttcgcccaagctattgatgacttt

SEQ ID NO: 69611 - DNA, 344 bp, Glycine max
  unsure (1)..(344): unsure at all n locations
atccttaagtcacctgcggcatgcaagcttccatagggtgagtttctagctntccatggatgtattttggtgctcccaaattgtatgtatttgcttgaattcgagaaccaattcatccttgaatttgacttgattgtgggattgggggctgaangggatggccttaagcctatggtgcattctgaagcanttgggcatgacacattgccctcatttccgactttttcatgcctaaaggtgcgcccaccaagtgttcgntaaatgccttaatggcatttaacacaattctatgttntttgcttatggaaatgacttggacttgagtggctgncattngatgaatt

SEQ ID NO: 69612 - DNA, 386 bp, Glycine max
cgagatgaggaagtgttgaagggtgaaacttcctgcttttattgttgaccacagagtggtacctgcagatatgtcgcggtggtcaggagaccttgtggacgtcaggtggggtgctattgcccaaaaccaagcttgaccaatcccgacccaacccgggcataatcggttagtgagaacctgtgatgtacctaagcatgcgagctcctggcagtcaacagataaaaggaaaacaagaccacaaagcaaggaggcttgtggtggctggccaactgtgaatattgtgtaatatgtggattgtggcctctggtaatcgattaccaacggtgggtaatcgactacaaggctgtaaattgaggacaggaggctaatatggtctctggtaatcg

SEQ ID NO: 69613 - DNA, 480 bp, Glycine max
  unsure (1)..(480): unsure at all n locations
agctntttaatgctggcatgttcagagatcctggaagtgctctatctatgtgtcaagagaattaaatgaaagcttcaganatgtcaaggactcacaggaagagatgtatgggcgatacttcgaactctgtctgaagcttatagttagagatactgtacactgctgaacatagtgcagcacagcatatttcatcagcctattgaagagctcgngctctgccataccgcgacacgtgaattcacgatcgatcatggaaactgaaccatctcggccgacagaacgcgagaccaaatttgtgaattgacacattttaaagaggtgtatgaatcaaatagttaaccttcaaggtcttctctttaacaaaccagttgacaatatttggtctaatcatatgggaccaccagcagcactatccctgccttctttttgacttgtcgttgtgcctatagccatttacatctagtatcttgagtacctaat

SEQ ID NO: 69614 - DNA, 342 bp, Glycine max
ctcagcttaatgaattcacccaaaagtagaagtatgctggaatgtgtatattaaagatattatcgctcatactgcatgaatgatggagatacaaaaccatcgcagtaacattcactttaattcttaacattgtatacgtgagtcaccttatattaacttgaccaagccattactttagtcgtcctgagttataacaacattatatcttctatatagatgataggttaaattctttgtctcattgaacgagttaatgacgctcaactagctgatataagaagactatacactgtctatagtaaagattatccatacatgctttattagaattcttaatgatgt

SEQ ID NO: 69615 - DNA, 260 bp, Glycine max
ccacagccatgctacaacatacacatgtttgaacgtactcttagctacatctttctaagtccgagcgattctattatatctggactccgtcaacatattaagtgaatcagtgatgtcggatgaatatacgcaaccacctgctgatcctaatacgcgatgttatcaaattcgggacatagatagacatcctaattagacaagcattgtgcctgtattggctgaataccatgaatgaccattatacatttggcatgaatgtc

SEQ ID NO: 69616 - DNA, 121 bp, Glycine max
  unsure (1)..(121): unsure at all n locations
agcttcatgatgaatcaagaaatgatcannagaagtttgatgatnacatatgtgatgaccaaaagctcaaaagtcaagaacacttcatgataacaaagatgatctcaagaatcatagaatg

SEQ ID NO: 69617 - DNA, 410 bp, Glycine max
  unsure (1)..(410): unsure at all n locations
tttgaatcctagaaaaaccataatttgttggaagcctaaccctattacaagcctagaaagcccatcggattcattntgtgtgttcattgatgtatgacatgagatgaaatgcaaaagttgggacttgtgttagttgtttatgatggaatgagcctaaacacttgagcttgagtgaaacaatgactgtgaggttttggttaatgatccttccttgatttctgccatccttactagcttatttcagttgtggctctaatgtatatgttcctatctttgaaaagctgcatgtttgtgaaaatcaattgattgaagcagtccatgatattcagttcatatggttgaatttctctgtgaagcanacaccatattgagtgatcactgtagtttgtcacttgaggacatgtgaactg

SEQ ID NO: 69618 - DNA, 171 bp, Glycine max
  unsure (1)..(171): unsure at all n locations
tcacttgaccgcgatctctaagcgactgggctgcagcttaagaattatttgatgatgccaaggaatntaagaaaatatttgatgatgccaacgaatntcanagatcattcaagatgaatntcaaggatgaagaaagcaagatgtcaagcaagcaagatctcagattagaat

SEQ ID NO: 69619 - DNA, 411 bp, Glycine max
  unsure (1)..(411): unsure at all n locations
tcttgagtcacctgcggcatgcaagcttagaatagaagctnggagccatatttgatnggattgctgcacatgtagctgctgatctgattatgtacacaaggtcaatgtggtgggagcaaaaggctgaagagttaaattgagcaaggtgttggttttctcttcaaaatttgctcatttttgcattntggtgtcttgtcatgtcattgagccattttttttttttggctttctgaaaaatggtaatatgggggtagagttcagtttggttgggaaaagtggtaagtcatcacngtggggtacanattgtatagagagaaaataaagaacttccttctttctatgtnttcctctaatgtattagtcctctngaaaacannaagtgtaaacgcatattaatatgatggtgacaag

SEQ ID NO: 69620 - DNA, 407 bp, Glycine max
  unsure (1)..(407): unsure at all n locations
actcagcttttatccaggctcatcttggtggtgaagctccttcttccatggcttattccctagtggatggcgccgcctcttacctcttctcctttgtcttccgctgcatctccaagggggaaaatcaccattataggaccccattgaagctcaaagatccagcctccatagaagctccacaagcaagcttccatcaagtggtaatcagagcacaagagcttcaagtaggtgctccttagacctccattaattatttttctttaccttctcttccataggtgattcttcatatttctccatgtatctcctcacatgtcttgttctanatggtgttaacatgattctttagagtatccaccgattaaacttgctatagaagttagatttgatttctatggttcaaattc

SEQ ID NO: 69621 - DNA, 65 bp, Glycine max
  unsure (1)..(65): unsure at all n locations
atagagtcattctaacttcattcaaattaaaagataactatntacctatatcaaaacaaaatcat

SEQ ID NO: 69622 - DNA, 505 bp, Glycine max
  unsure (1)..(505): unsure at all n locations
ttcttgacctaacgcacanaaggacaaacttgaatgtgcctctcacgttatccatgttaaaaagaaactacttttatttttaccgctggacaaaagatactccctctttaaacttgaaagctatctatgtaattggtgtaacattattttaaatatataaatattattgaaaattaaaataaaatattgtcgtgagttataatagctaaagataaaaatggtttacaaaatattataataactattaaaatgaggggaattattttataatgttatacaaccttcccatatgacccacaaagaaagaaatgggcaaatagcccattgaatgcatagtgggagagagagaccaacaaagtattaggaagcagaggaagttgcatacaacacggcctatgtgnttggaataatgtgtgtgtggcacatgcttgttcaccgcttctatgttaggacaacagatacaggccaatacttatatgcacgctaactacagacctttatttta

SEQ ID NO: 69623 - DNA, 431 bp, Glycine max
  unsure (1)..(431): unsure at all n locations
ctgcagctgtnaacaccaagatgaagacaaaatttgaaagaagtgtatattttgaaacaataagagcaatatacatcagatcctgaagtgatattatgtgcttgaccctacatgatatagccctgtagatacattatcttactgatctgatatatatacacaaaactatgatctgatgatatgaattacctataatagaattgatgaatgtatcatatgatctgattctcatataataagagaatgggtctctagaccaaatacagaaactaaacctgtattggataagctagtatcttgacgagatacaaatcgtctcacactatgccaatgactttgtatatctatcacaccattccatcaagactctgttcgcacattacatcatgaccttacatgagctttctttcgaacttatgttgtttgaattt

SEQ ID NO: 69624 - DNA, 430 bp, Glycine max
  unsure (1)..(430): unsure at all n locations
aaaataaggagattaagttagtatcatatacgacaagttagaatatatttccattgagctggcatatatgtactaaataaattcattaaggcaacaaaatggaacggcccaccaaaccacacacatgagctggtggaccaaaccctaagtaaggagtggggcctgttatagctacagatgcttgagtcattatgtgggtatgcttcctaagaaacattgttttctttatatgaatatattaatataccttccttccaaccaatgaaatcatgtataaaatcaaactctgttttgtaacatagctacttaaaagttaaataactattaattntactttgttgacaagcctcttgtgtggcaatnttatttcacaggggtaacacctttttagagaaagttgataattaacttcaacagatggacaacatat

SEQ ID NO: 69625 - DNA, 348 bp, Glycine max
  unsure (1)..(348): unsure at all n locations
gtcacctgcggctgcaagcttgtatcgatacaanagtcttgtaatctattaccagaggagattttcaaaaaataatttccaagagtcacatctattcaaatgggttatgactgaccatcanaagtcgtattatatgtgactnggaaacaccaaatagaggagagttttattgcccaaaagtttatcctctcanaagattaagagagattttctaaactgaaatgtcttattctctcanaaagattccttgtcanacactcgcatattcaataacaaatcttgattgatcatcattggacaatctatctctttcaagagagattccttcttctcttcttcttacttctg

SEQ ID NO: 69626 - DNA, 489 bp, Glycine max
  unsure (1)..(489): unsure at all n locations
cttgatgcaccttcatacatattgtgtgatggcatatttgactgcatctttactatcaaattccatgccaacatataattcttggccaacattaaagttcgacggcatctccaaaccgcacatgtcctcctcatcaggataagtccagttgatattgttataatgtgaggcatcattccaaaatggattttcaattcgttgtgcacctaacagttcanaataaaataaaaaatcaaataatacttatttatcattaaatacaattgtcatcaaataataaatgtattgtctaatttttgtatacaacacattataccttctgctgggtgaacaattcttactgcgtgaggaatgatggtgacttcatcgtctgtgtcagatatatcgtcaacactgtcatcttcgtctaaagactcttcaacatatgagttagacacangataatcatcatcatcatcatcgtctttcgcaatatgtanaatactcata

SEQ ID NO: 69627 - DNA, 514 bp, Glycine max
  unsure (1)..(514): unsure at all n locations
agcttcaaaccanagcaacacanaatctnggatccaaatttcctcaatttaatgggatttcaaggggtgagaagtgaaattgagaatggnggtatattggagcaaactctcacctcacacaagttcataacatcaatttaaacttgctcaaactggatttacacactaaattccaccgaatcaaaatttgactcctcaacacccaaattttaccctagaaatggctctttgttcactttggtcatttggttttctctctagcacagcccaaactttctcattagtcctaaatgacatttcaagctatgattaactcactntaacctncanataccactaaattcagaattggccttccactctcaaaacctactcgttttcactcatacaccatattctcactttctacgctanggtattctanccttatctcaacaaatttcataagcattcagacataacatacaagctatataanacctaaactgatgttagctaactctcaactgcagtc

SEQ ID NO: 69628 - DNA, 108 bp, Glycine max
gaattaaatttgctcttcttgatcaaagtctgaactggcgtattgtttcattcagggcggcgactacttcgcgaaatttgattcaatctaaatgctgttgtggagcat

SEQ ID NO: 69629 - DNA, 99 bp, Glycine max
  unsure (1)..(99): unsure at all n locations
attaactctgaggttattaaaatccgatataatcaatccctaataagataaaagacaaaactatatttattccttggttcaacgaactnttaggtaatt

SEQ ID NO: 69630 - DNA, 61 bp, Glycine max
cactgtgccaccaatcataattttttatatactggtgtactacatccttgtgttagcgcta

SEQ ID NO: 69631 - DNA, 280 bp, Glycine max
  unsure (1)..(280): unsure at all n locations
ttgcctntaaggcttggacctcatcactcactttttaatctattatcttatcgtctctcacgaggcgtagatgtgtgagccaatcctatccttgtgttcagactctcagccacatatgattgccgtcgatgatcccattactgcttccctaagctctctgtgcttatataccgccgcattccatgccgtgcgaactccttagagtaccctcgcgttgtgggcaccagaaccccgcgcgatgaaaggcgagatgctttcgtctgatggcactcctctcatg

SEQ ID NO: 69632 - DNA, 453 bp, Glycine max
ctataagtgcgggtctgggagacgaacgtcaagtgttctcgatatgtgaagatgatgttccaagtacttcggatttggtccgaccatgccctcctgatttccagctgggaaattggcgggtggaggaacgccccggcatttacgcaacaagcataatgtaaacctttacggtcttaaaagctctatagttgggcctaggctttatagttttcattatgttaaggctttgtgtcttttgtctttgaatatataatacaaggatctttcttcatctgttcctagtctctacccattctcattcatttgcatgtttacttcttttttctaaaacggcagattcgatgacgagtcccccgaaggtactaatacctgtgacccgtctatcaacttcgagcaagaaatgaaccatacggaagatgaaggagatgatgatgtgggacttccttctgagct

SEQ ID NO: 69633 - DNA, 481 bp, Glycine max
  unsure (1)..(481): unsure at all n locations
agctntagatcccatgatagtagctctaacagcannaagctcttccatattaagctatttatgactgatgtaagaatcgccttttgtggatacccttcggacataggatttgtgctgagatgcttacacattctggaacaccatttgtgatgacgctattctcttagaagtatctcttggtgctgatgcatagaaatataagtgaaatctatttagtattttcattttctgatgcttctttcttggaactgcagaataataacactcacataaagttttaagtgttagatcaactactatcctgatagggcttataagccattgtagggggaacataagtaatatatgagtcttcttgcttgggaagtgaagctaaactgccatagcaggctaatcttgtgaagcactcatttggacatattattggttgaccaatgtgttacgtgcaatgagaacagataaatgacgttgacaacctcat

SEQ ID NO: 69634 - DNA, 415 bp, Glycine max
  unsure (1)..(415): unsure at all n locations
ctcagcttctatccagacactctnggtggtgaagcttctccttccatggcttattctctagtggatggctcctcctctcacctcttctcctttatcttccgctgcaactccatggctgaaaatcaccattgtaagaccttatcatagctcaaagatccagtctccatagaagtgtcgcaagcaagcttccatcaagtgataattacttctttgttggaacaagagaacaagtgtaatgactntgttgggctaaataattatgctatatcatctgaaaatttcccgttgaaagaattggtaatgtggaacatacattctaatgaatagcatgatgtatatgactaaagatatcaaacccttgacatntaatgcatgattagactaggaatgagaattggcaaataacgttgctatc

SEQ ID NO: 69635 - DNA, 308 bp, Glycine max
  unsure (1)..(308): unsure at all n locations
atcctctgagtcacctgcngctgcagcttcacatatccagcaattcatntcctaatatcatgatctacccttaaccaagaanacagggcagaggcagaatactcttgccaaaacacattcacatattacaactttccttactcaaagtatccagtgacattctctttgtttcggttcgttaaccattggatcgactntgaaattttactggaagtctctagtacatacatctaaattctgaccgctgggaactgctagaaaatgtccaaaacccactatgtactaccttttncataaccagcaatgca

SEQ ID NO: 69636 - DNA, 231 bp, Glycine max
  unsure (1)..(231): unsure at all n locations
actgtgatgatgctggcaagccacgtggagtatctgacttctctgatgatgttggcatggagaagtttgtccacttcttctctgacaactgtgtgtcgntcttctcccatcattcttttcttttgtgatattgatatagcctggggacacatggcaagcttgtggcatataatgttggagtggattccccacatgtcagctggttgtggcagataatgcgtatgtgctcat

SEQ ID NO: 69637 - DNA, 344 bp, Glycine max
  unsure (1)..(344): unsure at all n locations
tacatcaagtggtgatcagagcacacaagctntaagtatgtgctccttaaacctccattaattattggctgtaccttctcctccattgttgttacttcattattgtccatgcatctcctcacatgtcttctgctatatgttgttaacatgattctttataatttccaccaattaaacttgctatataagctagatttgattttctacggttcaaatttattgttcttgctcttgaaccatgaattatgttgagtttatgttcctttgagttttggctagctatcttttgtggctgagaactgaatcataaaattcttacaaaaacattaaagtagaataaaatc

SEQ ID NO: 69638 - DNA, 348 bp, Glycine max
  unsure (1)..(348): unsure at all n locations
agctntactagactcaagacccagaagaatgataaccactcctgcttactctaaggatgttcgtaactaacaatagctgagctggtgccatctgtagggcccttcattatcgcaccactatagccttggctgccattagcttgtgcattctcatttctattaggatatgttgaatagaatcacacaatttgttatcccaattctcagtataaacttagcatcaatgtaataaggcacaaccatgaatgaaatattatcatgagtcctctctcattntctctggacgtactggccctcgaagccagctatgtcatagtgaacagcttctctgngttgtctacacatttg

SEQ ID NO: 69639 - DNA, 359 bp, Glycine max
  unsure (1)..(359): unsure at all n locations
cgttccactgccacattatttgattaataacaatctggttcacatataccaatttaccggtgaatgaatgaagacataacatcatagatgtgaaaaaaatgaagaatctatataagattggtatttactatataagtagccccaatgatcataaaaacaaataaggagctgaagattagtaattattcattctagcaattcttgtatggaaaaaaattacaatacttagttgtttagtgttccaacaaaaaaaagacacactttaacaagaataagcacactactcagaggataagtngtcttctaaaccaaatgtatgtgaaatggaaaaggtttaaatggggaagggaaaacttgat

SEQ ID NO: 69640 - DNA, 307 bp, Glycine max
  unsure (1)..(307): unsure at all n locations
cacccgacgaagacactgacaaaaacttatcttcttcttcttggacaaagtatggcaggctggnggcaagtaaaattttcttcccatcagaccttggatgcaactgtgatcgtatgcccatatcagctagatcttgatgggtattcaagccatcctttatcctaccttgaatggtaaggagcgtcccaatcacactgtcacaaacattnttcttcacatgcataacatcaatacaatgtctaacgtcaagatcagaccagtacggaagatcaaagaaaatggacctcttcttccatatgcaactctt

SEQ ID NO: 69641 - DNA, 99 bp, Glycine max
  unsure (1)..(99): unsure at all n locations
tgtngattcatatcnctgacttcaccactacatcatcaattttaacctccatattcttatcgatgacatcatggaaaattagattcatgaccttcttga

SEQ ID NO: 69642 - DNA, 126 bp, Glycine max
  unsure (1)..(126): unsure at all n locations
agctgcacttgttanattgatgcaaaataactgtgattccacttatgctctgaaaggtgtggcaacaaanattgtggatgaatgtaaaggattgcctattgcaattgtgacagtgggaagcacgtt

SEQ ID NO: 69643 - DNA, 401 bp, Glycine max
  unsure (1)..(401): unsure at all n locations
gcgactaacagccaacctactaccatccttactcnaaaaccagatggtcatagtaagcccgggaaaggtctatcaaccttcattttcctaatggtacaatcctaacgccatatgcacctatcacggtggcgtctcggagcactccatcgagctaatttgagcttctaagcacaaagtacaaagtttgattgatgcaggatggcttacatttcaagaggatagttcaaatgtaaggactaatccactttcaaatcatggaagctcgctgatgaacgtggtggaagaatggatatcttatgagttgaaacagataggggatgtgtcgactacaaaatgattcatatttgaggcgccgcacgacgctgatgtgataaatgtgatggtataagggagatcaatgc

SEQ ID NO: 69644 - DNA, 407 bp, Glycine max
tcttgagaaattcaaatggtcataacttttaactcggatgtccaattcatgcgcatcacatatagagacgctaaaaaatgaacaacggaagctctccagaagttaaaatggtcataagttttcacaaagatgtccgattcaggcttgtattatatcgagacgctcaaaattaaacatcgaaagctctcgagaaattcaaatggtcataacttttcactcggatgtccgattcaggcgcatcacatatacagacgctcgagtatgaacaaaggaagctctggagaaattcaaatggtcataactcttcacactgaggtccgattcaggcttataatatatcgagtcgctcgaaattaaacatccgaagctctcgagacattcaatggtcataactattcacacggatg

SEQ ID NO: 69645 - DNA, 385 bp, Glycine max
  unsure (1)..(385): unsure at all n locations
ctgatgtagctccatgtggagcttgtaggccttggatcttcttcaacaatggagtcctttacttcttgaggtatgattgcagcagaatggagaagaagaagagttgagaggagacgccacttcaaggagaagatgagtctagaataagctcaccaccataggaatccatagataagagcttgaaggtaggagaagatgaatgaagggagaggaagaaaagagcacgaaatttagtgcctctaaagaagtttgaagtttgaagtttaattctcaaatgatcaaagttaaaaaaaatgcacacacaagacctctatttatagcctaagtgtcatacaaaattggagggaaanttgaatttctattcaaatttcacttgaattttgaa

SEQ ID NO: 69646 - DNA, 267 bp, Glycine max
gtatcctggctgaattcattatctctggtaaggagcacgcctgattcatgaatacatgcccagactctatgatcagaaccctataataagagatatgtacttagacaaccatgcattattattgctaagtgagttgctaatgcataactgattgctgatccgccaccaccaaatgccatgttgatggcgtgcatcacatcttactgcagactctcagaatctccaccaatataatacatttcattgtgatcatatatatccaacaca

SEQ ID NO: 69647 - DNA, 367 bp, Glycine max
  unsure (1)..(367): unsure at all n locations
catttttatacgtctactcactccaacaagtaagtgtctcaatcttgagctttctagctttccattgaccgtattatggcatctttttgtgctctagactgcgggaatgcgctccaatgtgtggggcaaatttggtttgatttcatgctgcatttggttaagttagggggttgtattggatggacttatgcctttggtgcattatgtagtgatggngtatgccacattgcccctatactcttgctattcatgccanaacatgcgcccaccgagtgctcggtgaaatgcctcaatggcatatgagcattggtttngtagcatggaattgtanggactgtgtatatgtatagggacaacatggaggatt

SEQ ID NO: 69648 - DNA, 405 bp, Glycine max
  unsure (1)..(405): unsure at all n locations
aacagnncctttcttagtttcaatgattcaaatagccaagcaaaggtgctgcttgcttctataaaagcatcttctgaaggcattaacttaattggagcttcaagggttgtgcttcttgatgttgtttggaatccctcagtggaaaggcaagctatttgtcgagcatatagacttggacaaaagagggttgttttcacatatcatcttcttgcacagggcacccctgaatgcacaaaatattgtgaacaagcagaaaagaaccggttatctgaacttgttttctcaaatagaaatgctgaaagtcataagctcaagagtagtggagtaatgcttgaggatattgangatagagttcttgatctcatggntcagcataacaaactcaaggatatgtttggtgaatgt

SEQ ID NO: 69649 - DNA, 359 bp, Glycine max
tgcccatggatagtaaggatcgagctttgggcatataggccccaaattgggaaggaccggcaaaataattcatatctattcgaatggtgcttatgaaatataggaattaactccctcagaaacgtactttgagtataaaagtgaaatatctgaaaaaatataaaccaacattgctctaagtttaaataagtatagaatagacacaaagtaatggaaacataaaaatggcgattacagtaaaattgccacacaagggcatgtgtcaatattacatctaaagtagaatcggaatacacaattcctaatatagaaattataagttctacttatgcatgactaagctctcatatagtttctta

SEQ ID NO: 69650 - DNA, 387 bp, Glycine max
  unsure (1)..(387): unsure at all n locations
taattcaacaaatatatatctcagttaaaatgagagattacctctgcggatcaccaagagtnaatgcgttgcttcttttgggtgccgaagacaccaagaatcccatacctttaatttcctctctcaaacctgaacagattgtccatatcagtataaagaaatcacagagcaggtgaanatacaggaaaggtgcccaccaacatacttnacctaatataccttaatgctttcgcagctgatcatctcaaattatggaaccatatccaatgttaccctaaaacaagctaagcagtactgaaacatgactggacataaaaagaacttctaaaacaaaatgactccagtgactagaaacggacgctttctatcagtatacagcgacttaac

SEQ ID NO: 69651 - DNA, 422 bp, Glycine max
  unsure (1)..(422): unsure at all n locations
tcaatacttcaagttcatcgaattcccaatcaaactcatagaaaacctatatgaaaaaagaaaaaagtgataaaaaaaaaaaaaagtaagcatctagaaaacctgatatggtactaacctaccttacttgtatgtaaacatgtcatataaaaaactatccgaagcaatccaaaattggggacatctttgcaaaacttttctcaatcataattaccggctctggctctgctagaaatattatttgaacttcagtgctctgttcaaattcatcttccttgaacggctggtagaagtctattacaaaaataacaattaaaggatataacanagcaaatcatatcgttaaaaaaataatggtagaaactcacaacgcaaccaacacttgtattnttntacacaatccaacttcagatacttcaatg

SEQ ID NO: 69652 - DNA, 424 bp, Glycine max
  unsure (1)..(424): unsure at all n locations
tcgcacatcgttcgcgtgtatggtatacactccacaagggttgaagtagaggaaaccttcaaccctataaggcaacgtggcggacaaaagtgggcagttaacttgaatggtcatcattgtcaatgtagaaggtatattgcgcttcactatccatgttcacacattattacagcttgtggttacgtgagcatgaactactaccaatatatagatngtgtttacacaaatgagcacatcttaatagcttactccgcataatggtggcctctatggaatgaagcggctattcctccttctgatgacgcatggacacttatcgctgacccaactaaaattcgtgcgaaaggtatgccataatcaacatggataacgaatgaaatagattggcttgaccatctgatcaccgacaaacatgtatatatgt

SEQ ID NO: 69653 - DNA, 339 bp, Glycine max
  unsure (1)..(339): unsure at all n locations
atcatgtaaacctgttcttctatatcaccattcatgaacgccgttttcacattcatgtgatgcagctcaagatcaaaatgagctactaatgccaaaattactctaagagagtctttcttatatacacgggaaaaggtctctctgtnatcgattccatctcttagagtgaatcctttaacaacaagtgcttgccttatgtctctcaatgttgcactctgagtctttctttggttttgagacccatctacatctgatggctttgacaccaacaggcaactcaacgagaacctaaacttggttagatgccatagaatacatctcatccctcatagcattata

SEQ ID NO: 69654 - DNA, 325 bp, Glycine max
cattcccgtgcttggttacttggtaagccttgaaaagtaagtatgctgtgccaagagcccccgtgtaaaggctatagttcttgacacgctttccacgtgaccaccatgtgttcctcacctcctgttgaacagttagagataacaaagcacacacacgtaaacacacactgacccaccatagcaaactcgcgaaagttactaacttgagcctacccaaaagcgaagaacgtaaattgaaagaaacccataaattcgaacaccccatatatgaagtttatgagtaccgattggttgatgtgaaatgcacatgcttggaactttgtga

SEQ ID NO: 69655 - DNA, 507 bp, Glycine max
  unsure (1)..(507): unsure at all n locations
ntggcttgcaagtgganacagagatagatacatacatacaagggcttcanaatgatgtggtccttgggtgcagtcatangaagggtacccttcaagtgatggaaccactcattngggtggcatcataaggcacaacananaatgcagagacatnagccgtcttgtcatctttgttgcattctggattgccttgattggtcaactcagctttgctttaaccgaggaaacccattgaggtgaggatcttaaactntgcagctnntttctgattgtgcattgtgctaatggagttgctgtaattggcaaagttgtagttttaagtgcaaatntaagcctttacatgcaatttctcanagggatacttctatactgctnntctttttctctttagaaaaaattgccatggatatntagctntcaacantttatgcatttncttgtgtgtgtgtgtgtgtggactctatngatagaacatgaacctgtantntattctcctttttgtgtatg

SEQ ID NO: 69656 - DNA, 369 bp, Glycine max
  unsure (1)..(369): unsure at all n locations
agctntctaagacatgtntccacagnctgacctttgtatttggaaagataacaactttgttgtctcgctaagcgagaagggcgcactaagcgcaattccaaccagagagggaattgcactgagtgagcaggggcgcgctaagcgagccatagtgcagtggaagttgcgctaagcgtgaattctcatgatacgcgtgaaaagtggactccagcttatcgagatgagcttgctaagcgagatctataggttataaatacattctcagcatgaaaaacatgattttttactctctttttctcaaaacaccacccaaaccctanaacctcattntccatcacccaagaccaccgatggctggcgtgagccacc

SEQ ID NO: 69657 - DNA, 441 bp, Glycine max
  unsure (1)..(441): unsure at all n locations
ataaagagagaggggggagcacgaaattgaatgaataaaagagggagagaagtggaactttgaagtatgtctcacaagactctcattcatcagagttaccacaagtgttacacatgtttctatttatagactaggtagcttccttgagaaactttcttgagaaaacttccttgagaagcttctttgagaaaacttccttgagaagctagagcttagctacacacacccctctaataactaagctcaccttcttgagaagcttcgcttgagagattcctaaagaagctagagcttagctacacacacctctctaatagctaagctcacctccttgagatgagaagctagaacttagctacacacccnctataatagctaagctcacctccatgacaaaatacatgataatacannaaaaagtccctactacatagactactc

SEQ ID NO: 69658 - DNA, 148 bp, Glycine max
  unsure (1)..(148): unsure at all n locations
cctcatgcactcctctaatgactatagcataagtaatggcgcttaactgctgggagatggaagccatcatctcaattgaatatctggcttcagcacgagtcatgtctccaagggctccacacactggcagcgtctatcatactntctc

SEQ ID NO: 69659 - DNA, 415 bp, Glycine max
atctggcccacataaatgaaatattccatacttacttgggggtagtggcgcgggagaaaatccctattgttcatgctacttggaaagatgtccccgaatctttaaaagttattgtatgggatgacattttggtaagtccactcaactggtaacgagtttacttttgggtatatttaatgcctgtggaaatgtggtttatgcagctactgattgaaaagtatatattattttaggccaaatttgatattcctgaaggttaacttgcaagaagaatgttatgtccacggctgcaacacgatggaggcaaattaagtcctccctgacctccagatatctatacactgacagagacgatcaacaaaacattgatccatctgctaagtatggcttcgatcgagacacatgggaagcatat

SEQ ID NO: 69660 - DNA, 393 bp, Glycine max
  unsure (1)..(393): unsure at all n locations
actcactcctatattaagatagaatatccaatctaataagtgaaattgtcactcttcttacccactctggtctcaattagacattntcaatattctctatcttatntattcccattggatgagcactacttctacaactagccaagaaaattattccgaccatctcaaactgctatccttatatctctatttatatactngattntctttactgcatatcctttntaatctatcatcatttatttctatttctaaattaaattntcaataatttttcaagtgaaattatcaataacattatattttaccgatataatatgaatttaactatgatattctatataacaatatttattattatnaagtttattaattatatannaataacattca

SEQ ID NO: 69661 - DNA, 456 bp, Glycine max
  unsure (1)..(456): unsure at all n locations
gcacaagacattctattaaccgaaaaaacgcacccatatacaatcaaggcagctccgttacctagattatttacacgtatttccaaggtgtatttgttacttacatcacacacatctccttggctaaattcacatacatgcatacccaaagcattntggggtaccaaaaattgcacatgtacacctcttggtatttctaatacctatacatacacaaactttatgatgaatcttgactatctacacaataaggtgctacatttcatgctcttttcaagnttttgctacccaaagccgcatgcaaattccagtatattntcctttgctgactaaaaatgtattcaaattaaaaggtatacaatttttggtaatgtatcttctttacataacatgcaacacatttatgtatatntttttgtgagacattntgactaccananattatatgtacataca

SEQ ID NO: 69662 - DNA, 455 bp, Glycine max
  unsure (1)..(455): unsure at all n locations
atcttgaagctgaataatattatattggtagatatacaacactgtnaagtatatgaaatatcataatatataaatggaggaatataaatgaactaaaatattattaaaataaattaatgaaacgaactgaattattgttttttaaaccattgtattatgaattaaatgctagataaaaaaaataatanggatataatttgtaattnttaaattattntaaaaattaanaactaagttttttatgtaaactttgataataaaaaaatggttctattctttttaagtggtatacctaatacaaatccttaanaataatntggtataaataaacactatatcgtctaaacaaaaatattcattttctaataataaaaataatatataaatactcattcatannataaataaataatttattaaatattttgaccattttcatgtttanntatttttat

SEQ ID NO: 69663 - DNA, 396 bp, Glycine max
  unsure (1)..(396): unsure at all n locations
aagctggtttatgatgttaattntattcaaaaataaatattttcttttgcttaaaaaatgtactactactatagtgttttagatgtcctcaaccaatggaccagatgtggacccgtcagaattgaacacgtcattcactatcataatgggaaaatcagtagaaagggcctgtggataatgaatattgatgtcatttttttctctttgaatgaattgtgcaccccagaggttctttacaataggttcccattattttgaaggtttttttaaccaacaaaggaagaaacgagatgggtaacctattaagtttcctatgttatggattcaagaaaagttgataactaagcagtaaanaaaattcttgcaaaaatagaaagtcttaatgaggaaatgtga

SEQ ID NO: 69664 - DNA, 342 bp, Glycine max
  unsure (1)..(342): unsure at all n locations
gactaactcgcaatgttgtgttctaataatttcttggatcatcatatcggctacatttgaggtagtatttttttagctacacccgtcgattggcttgagaaatggcaacccaatgaacaaatattcggcttcctcagctgatattcgcgagggaagagttcttccttatttgtaacgagacaatgtattgcagaaatatactgagccatatcaagggaacatttttattcattgtccttgcattatattntcaatgatttctggattgtaaacttggcataatagagttattatcttntacatactgttctgtcttgcttacgcgatgaatatgtgtctgtg

SEQ ID NO: 69665 - DNA, 395 bp, Glycine max
  unsure (1)..(395): unsure at all n locations
agcttgagcctgaataactnaaggcnncccttttccaagtgagtaatactaattaattaatttctcgggtaccctataagccaataatatatgttatttttaattaatctgcataaatattcattgatgcacccttatgttgaagatgttcaataattatttttctcggttcttagatggggatgctgcgaatcaagcttgacgaagcaaagatagagaatgagattttgaaggctatgctgaatcatgttaatcaacactgcactgctcttcagaatcgcatactttgtgagatgcagcagcatcaactattttcatcatcacctcgcaatgataataataatcatgacttgcaggtaattacgtttgacttagaaatttgtttgatcaatatg

SEQ ID NO: 69666 - DNA, 221 bp, Glycine max
ggacaatcaacaagaataaaaattcaaaatcagactatatatacccgtctattgcagaaacagaccataataatgtttgtgacaataaggaatacacagcaatatatgtattacaaactatcactctgatgatacaattaacaacagatacagaaggcaatcatttagtgtatctcagcaaacttgtcgtatttgtcaatggaatatatgtctcacgattc

SEQ ID NO: 69667 - DNA, 401 bp, Glycine max
  unsure (1)..(401): unsure at all n locations
ggtgtatgaattagattgattcaggtgttttgatgataacaaagatgatgacaaaaagcccaagagaatgacttcaagattgagtcaagaacaattcaagaatcaagaatcaagaataatcaagatcaagattcaagactcaagattcaagaatcaagaatcaagaatcaagaaaatactcaatcaagataagtactaaantttttttcaaaacattgagtagcacatgaagttttcacaaaagcttttaccaaagagtttttactctctggtaatcgattaccagtttactggaatcgattaccagtagcaaagtttggtttcaaaagctctcaaactgaatntacaatgttccaattaatttcaaaatggtgtaatcgattacaagatattggggatcg

SEQ ID NO: 69668 - DNA, 141 bp, Glycine max
tatgaacatgattatgttttaccagctttaattaagctataaaaaataggtttttgtatttaatatttaaatacacagtttttgaactgtataaaaatgtcatctttacggatctaaccatcttaaattggtaaaaccctt

SEQ ID NO: 69669 - DNA, 331 bp, Glycine max
ccaatatgctggctagcgagctccgctagtgcaacactcctgtgctaagcgcgaggaagaatctagaagaagatgagttgtacaggttcgctaagcgcaccgcttcatctctctaagggcaccgcttcagttcatccactaagcgagaaaggcgcgctaagccaaaaatcactcacgtgcgctaagcggtccatacatgcgctaagcgcacgagcacgaacaaggctacctatttaagccttaaatcaaattttgtgaacagagtttggactgggatttacagctctgcatgtctagggtttctagagagagaaaggtccaagttctagag

SEQ ID NO: 69670 - DNA, 406 bp, Glycine max
  unsure (1)..(406): unsure at all n locations
ttcgtgttaaaattggatttagtaatgatgtcttgtttggagattgaggatctaaataaaaacaagcttgagccttgtagctatatagaaattaaattaatttggcatgctactttgtttttagcagtacgttttcctcatctttctttcatatatcttggtctagcatcatcataattaagttagtttttggtttctagccataagctagagtcttgtgaaagtatcaatactagaatgtatcatatgtgggacaaanatcacctgtctcaattatatgtttcaatacgttaccatccaattcattgtacagtacatgtaagtttcatccaattaacatatagttatctacgtggacgagaatcactgtcgcaatatatgtctaattctgcacatttaaaatatg

SEQ ID NO: 69671 - DNA, 330 bp, Glycine max
  unsure (1)..(330): unsure at all n locations
agagttagataacgttatgaagcatttctaagagacttatgttcatcgaagattacctcatcatcctagtttggatcctttagaagttntgtctgccatcagacatatgnttgcttcttaatcaatcttcattagacaagggtggtcgtctaccgtgttctccccgtgcctcataaaccctttcttttctttagtcttaaaaaattacttcttatcttgactnttctctagatctaaacattctaacttgtagtggccaggctntttgcacttatagcaaactatggagcttttgtctttggtcttcttggtctgngacattcttcataa

SEQ ID NO: 69672 - DNA, 407 bp, Glycine max
  unsure (1)..(407): unsure at all n locations
agctntgcagaattggncttcccggctaaatggtctaagcacgtctganaagaggaaaatgtgatcatcctgctttgatgaatgagaaaactggggcaagtgaagaggatgagaatgatgaaggaacccattttgaggctgccattcctacatggtcaaacttcccaccagcccaacaatgtcattagtcagccaatatcagctcttctcattacccaccacccagttatccacaaaggccatccctaaatcaaccacaaaagccacctaccacataaccaatgctaaacaccaccgttagcacgaaccagaacaccaaccaaggaaggagatttgcagctaaaagcctgtagaaatcaccccaattctggtgtcctatgctaacttgctnccttatctactttgat

SEQ ID NO: 69673 - DNA, 388 bp, Glycine max
  unsure (1)..(388): unsure at all n locations
cggaaggccaaaaagaatgtcaatcttgctacttcagttaagtcacagatgacatgtgttgaatntgaaggtggaggacgaggaataaaaagaaaatgatctatagaatgaaacgcctttcttattcaaaagaaagtagtgcatagcttctgcattgcattcatatatgtagactcttatagacttagtcgagactattccgtacgattataagtgatgcaacccttagacactaataccatgaacactaaattcatttaaacatgagatacatgataaactatttctaagtacattaagttccattggtttgaacaacacacaactactgtattctttcactattaattcgaccccctattttctgctttatttgggatggatagga

SEQ ID NO: 69674 - DNA, 421 bp, Glycine max
  unsure (1)..(421): unsure at all n locations
agcttgtgggagtgtctaatgangccaagccccnatcttttcattctaaggaaatagctcgcatacttgggatgaggtantcaacaaattcctcaataagtattttctagagtccaagaccacacaaggaaagactaaaatcttgcctttctatcaactattggatgaaccttttagtgaagcttacgattggtttagaggctttctgtggaagacttctactcatggctcttgtgagttgatgcaaattaacatgttttttatggtgtgaggccacgtaccaatcaaatacttgatgaatttgcgggcataaagatcgaattgaagactccagaggaagccacatagcttattgaaaatatggcggctagtgatcatgtcataattcagaatacgactcatggatgggtaactaagtgga

SEQ ID NO: 69675 - DNA, 330 bp, Glycine max
tagttggtaactcagttatcctagatagatagcatgtgttgatcttgtgcatgactaagatgataacaattcttgagatcttgaattattacacactttttattgatcttctactcaaatcttcaagcaaatattattccgtacaatatcattgttacgaactcttttaaataaagaacatgccataatgtactatgcatgtgtgattctttatacctagtctatgttaaactaactatgtgtttcataacagtgtgcatatgtgaccacatcttgagcaacttaagcaggtgctaatcctcagaaaaatgataaggcaggaaatctata

SEQ ID NO: 69676 - DNA, 373 bp, Glycine max
  unsure (1)..(373): unsure at all n locations
gtcttaaaactggactgatgcatttgcatccaaagtttcatggccttgcangcgaagacccccacaaacatctgaaagaattccatattggctgctccaccattgaaaccccagatgatcagaaggatcacacatttctgaaggcccttccccattccttagagggagagacaaaggactggctttattaccttgctccacagcccatcaccgagtgtgatgacgtcaaaagagtattcttagaaaaaattattgctgcttcgagaaccacgaccatcaaaaaggatatttcaggccatagacaactcagtggagagagcttatatgaatattgtgagagatttacgaaactatgtgccagtcgccctcacca

SEQ ID NO: 69677 - DNA, 465 bp, Glycine max
  unsure (1)..(465): unsure at all n locations
tgggtacccgtcacatgtggtactngtggcactcaggcgatggtgtttgtcgactatccacatccacatatcacacataaatccaccatccncagttgcccaccttcaactgagctcacgcactcncacgtagctcttatgnnctcgttcctctcaacacccgggtcccccatcaatccctttcaagcttccataacatccaagcaatntcaacatccaaacatcatngaactatcaaaactaagcaaaatagggcagaagcaaaaaactctgcctcaaacacaaaccaataccacaacntttattattcanataccccagtaacattctctttcgtctaattcgttcaaccgtggatcgactcgaaaatntactggaggtcctagacataagctacatttaaaccgtggatctgtagaaacatcagaaccaactgactactcttcacaacagcaatcacatatt

SEQ ID NO: 69678 - DNA, 306 bp, Glycine max
ctactatttcatgcatggaagcttctttgtctcgtatagagcaggcatggacagaacacacttctaaaatcactatttatatatattctcacaccctactccaatattaatcatttactatctaacacatatctctacaatatccttatacatatctcccttatcacatcatcacaacacctcactactaacttaatctatcacttcaatctccaacataaacattaacactatcattcacaatcacattacatatatcgccctagaactcttataacatttcacacattatatcaatctaccatt

SEQ ID NO: 69679 - DNA, 423 bp, Glycine max
  unsure (1)..(423): unsure at all n locations
tgtcggccattatttaaagaaacattcaattgagtaaatgcgatggctttctgctgttaatgcgctaccctttatagccctgtagtttggagctatacccaatacagtgttccaagtgttgttgtgtgttggtgaatttctttcaagtttcaacttcatctttcaatcgtgtaagcaactgatcttatcatcaatggaacaacgacgaatcaactcttgtctactcttccctcaattattgggataaagagaactgatctttatctcttcttcataaagaagaggttagctaanagtacagactacctggaacacgtatggcgttagggaaaggaaatctganactttaacaagtaaaagttagcaataatgtaactcctgcacttgacagtgactctggtcaatggccataactctcttaca

SEQ ID NO: 69680 - DNA, 258 bp, Glycine max
  unsure (1)..(258): unsure at all n locations
atcaatagacgttctactctttaatggagaggtttaccactactggaaaacccgaatgcagacttgtattgaggcaatagacttaagtttttagaagccatagnaatagggccatatatacccaccacagtagaaagaattacaacagatggtagcacatcaagtgaaagcataacaatagaaaaacctanagatagatggtctgaagaggatagaagacgagctcaatacaatctaatagccataaacataataaca

SEQ ID NO: 69681 - DNA, 416 bp, Glycine max
  unsure (1)..(416): unsure at all n locations
caagcttctttacttgacattgttggtatgaaaaattatgatgacattatcagctgcattttcctanttggagggaaaacgtataaacaatgttgtttgggctctaaaatggttttgaggtatttttctgagacgtgatgcaatccctcaagttattgttactgatagagattcaacattgatgaatgcaatgaaaactattttccccaagtcaaccaacttgttgtgttggtttcacattgataagaatgtgaaggcaaaatataaaacctttgtgggtaaaacaaatgcatgggattatgtcatggaagcatggaggagtctcgtggattgccttctgagcaccggttcgatgagttaagaagtatgnatagcttgctcaccatggtcaatatttgttgactatgtcaaacaaa

SEQ ID NO: 69682 - DNA, 148 bp, Glycine max
  unsure (1)..(148): unsure at all n locations
gaaataagatctgacttgtcatcatctgtgcacgtcttcaggtccatgctgttcagatgtggatctgagaatagcaagtcacactgtgcgatgctcngatcngctgacagatgctctgtctgcacatctctgtcaatatgatcgctga

SEQ ID NO: 69683 - DNA, 339 bp, Glycine max
  unsure (1)..(339): unsure at all n locations
ttcattgcaagggatattcaacttctcagatgcctactcgggtcttgatgttgcatgtntcaatttcactaggcttatctcatcaagacttccactatattattgtgttaagattttctttattttttctagttatctgagactatagaatcattaatattatgagattgtatgtaatgtgatgttgtaatgaaaaaaatattctaatttaaaattaatatattttttacaaattagctatggctggttcattataaaaatagataaaatactaaagacaataccaaaaaacattggttgatctaaaaccgatgtagaaagtgtatttacaacatcatg

SEQ ID NO: 69684 - DNA, 387 bp, Glycine max
  unsure (1)..(387): unsure at all n locations
atactaagactcaatngtnacttacctcttcatctcttttatgttaaagnntgtgacattgtgcatggcacaataaacaaggaaataactgctgcctgctcgtacaaagatgctgttccaaggattctgcagacgaatttgtgatgtccccagcacaaactgctagacatgaannttttagcatgcnntaaaaattgttcctaccccaccnnccagcaacctggcaagatntaaagttctattggaacaagtaatacagggctgaaaactgtaaataagactgatanacttgtgcaccctatgaagatnntagttctaacattctgttcaatactannattcatataccagaaagtaggtttgactaatctttctggattctatatg

SEQ ID NO: 69685 - DNA, 306 bp, Glycine max
tggcatgttgttggatgaatttatgttgtgacaaattactttggttttcataagcaaaattaagggagttctttttataaaattgaaattagcgtatattacagtgtgattatcgtaccgacgaggtgggtcgttacaactagcatttgctcaaccttcctaacattcgcaaattggacaaaaccatatatggttctcttgcaaagatatttgactcatgaaagaccgactgctaaccttcacaacattttcttgtcgttgtcagaagcctctcgtgggtcctacttgtctatgatgtatcgcttg

SEQ ID NO: 69686 - DNA, 403 bp, Glycine max
catctgtcattctgatgcacatgtagtatataagacaacaaacaacataatgtaaaaaggaaagaaagaagagattcaacacaaagatttttatactagttcaccccaaccttgggctacatgtagtcctacccaaaatgatgagatttcaactaacacaagcaacaacatgctagaatacaacaacaacaacaacaactgtttccctcaccacaacaccataccttggtcttagtttcggaacctttacaacataatcccaaccacaaaatcatgggagagacaaaccaagtattcttcacctctttaggtgtgcttaacccacacaatgatttagttcctagaggggagacatctgaccatataatcacacctattcttggaggcaaccttcaacttcact

SEQ ID NO: 69687 - DNA, 365 bp, Glycine max
  unsure (1)..(365): unsure at all n locations
gcctcggatgttttgaacctgtgtggagcttangtttgacgagtcttatgtgcagcgcatgtgctgtgcttcttgcatacatgtcactcactgtgagtggcatgtacttgagacttaatggtgtactcttgcatacatgtcacctacgaagtggcatatactggagacatggtggtgtgctctcgcatacatgtcaccgtgggtggcatatactatagatgtagcatcatgaatcagtacaagccaccaaaggcgaaacatgggctttgtgagccctttggatgattaataagggatttgtcttgaccagngatatgtgtagtatgctctcgcatacatatcattcattgttggtggcacatact

SEQ ID NO: 69688 - DNA, 261 bp, Glycine max
  unsure (1)..(261): unsure at all n locations
tcctgactcaccatanaccttgaccaggtgagaatgtcaatccttatcctcggaagcaaaaaagaatagaaggggaaatttccaatcaataataaaaggaaagagaaggataattccaatgaaagagaaaaagaacagaaaggaaattcccaatcaaagagtgggagaaagcaaaaagaaaagatagaacattccaaccaaagaatgggataagttaaaaagaaaagaagaaagcttccggtcaaagaaactagaagaaat

SEQ ID NO: 69689 - DNA, 262 bp, Glycine max
  unsure (1)..(262): unsure at all n locations
ttattttgcaatgcttcttgattttggataagcattaaggtttcatgaaaggtaaatcatacgagggggctaacctctgatcacccatattgcgaaacccagctcggtgtaaaatatttcacacactattaaatccacagtgcanaccactactgcagcataattgaaagcaaccttctactctatctaattagtttgaacacaactaagcacttcccaaaaaagattaatgcttaatacaatagtcgttcattttatttca

SEQ ID NO: 69690 - DNA, 485 bp, Glycine max
  unsure (1)..(485): unsure at all n locations
accgcagcatcaacttattgacttatctnnccnnnnttgttatataaataagtatcgcttagaaaactgtttaatttccccccanaagcaacatttttcaatgctttgtcatattttttaatatttctttacgtagttatatctaaaacagtattttatagaaacaataaggagatttttttaaaaaaaaagctatatatattggaataaatgcatgtgcatttttttaatatgtattcacacatatgaaaacaactaaaggcgatataataaaaaaaaatagtacttcgtaaagattataaaaacaagaataatttatagcatgactccggataaatgacatgagtctcgctacggttatgaattggattatcaattaataaaagagaatcgcaattactagacaaaaaaaagaatagaatngaatatgggaaacattatcatatatttctctttctatcacatatatatctatcatatgactc

SEQ ID NO: 69691 - DNA, 419 bp, Glycine max
  unsure (1)..(419): unsure at all n locations
tttctagcctgaaatcgctggtgctggcagcttgaacatacgaacttgtataaattactgggaattggtcactacgttttttgagcttaaacttttactgaattttctagacatctggaccaaaattataaaaaaataaccaagcgatttggattaaaggaaaaaataagaaaaatctcacaagttggcagacaaatcagtgtctcaggaaaaaaaaaacaaaagtgaaaggaaagtgtgcttgttgttttggctcaaaatttgttctataattggtgcctattctataccaatcctagttatgatatctcaattgaaaattattgtgaaaacaagtgccaaaactagaggtntcttaagtctttttttttagagtgtntctactctactctagagccatcctagggttctctttgagt

SEQ ID NO: 69692 - DNA, 145 bp, Glycine max
  unsure (1)..(145): unsure at all n locations
ctctgtcgcgcanaatcatgatcgttggctgacatatttctcaatagcttagttgcctcttcagggtcttcagctnntattttccccctgctgaagcatctagcggntgcttggntgtggtctcaacccatctattaacatattc

SEQ ID NO: 69693 - DNA, 336 bp, Glycine max
  unsure (1)..(336): unsure at all n locations
aaaatatcacttggggtggagtactgtagcaaaagcacaaatctanacatagcatcattctcaactaggaaatgtagcttatctgacaatgccacaatcccaattcccaggacaggaagcaccaggagtcttgcaacagtaataccaatagtagttgtaagtccaagactagagtcactcggtccttcagcaagcataccccccaatatatgcatcacagaaggtaccattgccccagctaaaatctccaaactgtcagtaatgaaagataacggagcatcatatccaaagaacacatgcttcatctgatgcactgtgccaatgatgatggccaat

SEQ ID NO: 69694 - DNA, 432 bp, Glycine max
  unsure (1)..(432): unsure at all n locations
tgtttgtttggccagcgattcggggataaaggagatgtcccacattatttccatgatacacatgcaacaatgatgattaggaaattntatgtaaaactggtcatgcatgcacctatgtggacactcaagcatcaattttttatggtcatgtgacactagggctgaggatatcatttccctacttaagtcaacccgatgtttccaaaatatgctcattgatcaattcatgcattcattcgagtccattntgggtgtttcgggaaatattcgcagcattcacccttcaggtccatacacattnnttcaaaactggtgttatgatcagtgaatctttttcaaaagaaaagttggaagttatttcttttcaaagcgtgctggttttcagctgacaatttattttcttttctcatctataagtatattattgttatt

SEQ ID NO: 69695 - DNA, 308 bp, Glycine max
  unsure (1)..(308): unsure at all n locations
cttaagtcacatgttataattgcttcattgggctttgacatactcctcatggatcaatgtatataccacaaggtcaatgtgagtaatatatgtttcttgtnttacatgtagatgataatttactttgcaccaatgatcggcgcttgctacatgatgtgaaacaatctatctctaagaaatctgacatgaaagatatcggtgatgcatcttatgtcatcaacattaagattcatagagatagacctcaacgtattntatgactatcacaggacctatattaacatgattntacagagatttcggatgaa

SEQ ID NO: 69696 - DNA, 369 bp, Glycine max
aaaaaaaaattgaaattgtcaggttggacgcgtgcgtgggttgtataaagaaagaaaggtggattcagagggaagggaaatattatgaataatggttgtaagaaaaaaaaaactataaaaacagaaattgtggataaaaaccataaacggtataacaaagttgtatacataaataaataaataaataagaaaaccaaaaattcccccctcaaaaacaaggataatatgataattttaaacaaaaacaattaaacttatatatcttgatttttttactggaatatctcccgattacatcatggcgagttatcttataaataataatttacgtaacttttatctatcttaaaaaggaacttttataaatat

SEQ ID NO: 69697 - DNA, 229 bp, Glycine max
  unsure (1)..(229): unsure at all n locations
ctatatattattacaggttaatgatatatcatattattcttatagctcatatattgccatcgatgctattatatggtcctctcaattatatgaatcangaatccacatctctgaatttaatttattcattntagaaattcaaatatagtctacttattatgaggtggtgggaaaaggttagcccactgtgtaagatctaacatattcaaagatattttcatacaccaat

SEQ ID NO: 69698 - DNA, 418 bp, Glycine max
  unsure (1)..(418): unsure at all n locations
tttttatcagttcntcataatatggaggaatagtgagctctgttgaagtttggatccaaagttctcttgagatttaaaaagatttgtatgtagattgatattagtgtcgagaagcttgtgttttgtgtttgtgtgcttcatcgactttgcactgattcttgttatataatttgctttcaactcactatgcagagtgtagagtagcttgttcagttgtttgatagaatggaatcaaagtaagagttggaacctacacattgagtttcagtacaacagcattaactaataactatccttataatacagtaggaagcttttattgaatattttaaggtctcacctagtctaggaacgtatcagcttcatttttttgtgcttcacatgctaacggttttgacaaanagagtgtcatctatac

SEQ ID NO: 69699 - DNA, 368 bp, Glycine max
ctcttcactcgcatccactcaatcagatttaagaacatgcaccttacgatttgtctttaaatagctcccatgtcccttcaccaattcccattcaacatcaatcaaaattacacacatttagctacccttactttctatggcttccaacaaactcctggccaccattttggtgctttctctcctctcttactcaacattcactcatgccaattgcccaccacccactccatcttcaaagcccacaccaccaactccaataccaacaccacccacaccaaagcccacaccacccactccaaagcccacaccacctactgctaagcccacaccacccacaccagattccacaccacctactccaaagccta

SEQ ID NO: 69700 - DNA, 224 bp, Glycine max
  unsure (1)..(224): unsure at all n locations
tctctaaaagttatatacatattcatgcagatgtgatgttggttcgatcttgaactgacatacaaaaaggacgcttagtgtgagaaacacatgccataatgtgatccttaggttctcggctgatggagagttgtgttcatggcaattgccaaatatcattctgcgaaatgttcccacctttcatatctatntatctttgtacatgttagacatcatgttatgtg

SEQ ID NO: 69701 - DNA, 424 bp, Glycine max
  unsure (1)..(424): unsure at all n locations
ctgcaaattccgtgcctatttcgtgttattcatttattttattatattatattctcatgccagagatgtgaaaagctggcggattcacttctaatttctaatattgatttgaacttttctacgaccttaggtgtgggaacagtctcattagcgtctttagatttttctcttatttggagtaaattatagataatacactcgtgcatatgttatgtttatacataaagattaccaactattatttaaaataaagctttttttattgttctgattacgtttctaaaattatagcgtgtgtaaaatgccctctattttatattaagttggcatataaacgattattaaaatgaaagtncattattctgatacgttctaaattatagagatgtgaactcatttattatatatgtataattctgagcca

SEQ ID NO: 69702 - DNA, 314 bp, Glycine max
cttttacacaatatcgattgataacccatgacgtgatgcatgtttctctacatattaagtgtcacaacgattaatattaaccctataacacatatgtattaaagaaagggcatcacatactacaatatgggcgctagaatatctcctttgacaatataatcatcatcagtcatcatgcaccctggaatgcacctacttaatatattttatatatctagtctacacagtcgtcatccacaatattaactcggcaattaataatgatttgacgtcatttaatgttatatacttagttacctgtcctaacacaatat

SEQ ID NO: 69703 - DNA, 445 bp, Glycine max
acacccgtgctgtctaaggcacccacacagagggaagctccccatgttccaactccgaacacggctcgaccggccggtaattccaacacgacaaggaacttccctccgaggccattgccggaattcaccccgctcccaatgacgtacgaagatcttctaccatccctcatcgccaatcatttggccgtggtaactcccggaagggtcctcgaaccccctttcccgaagtggtatgaccttaatgcaacttgcaagtaccatgggggtgtcccggggcattccgtcgaaaaatgctcggcccttaaatacaaggtccaacatttaatggatgccggatggctgtactttcaagaggatcggcccaatgtgaggaccaacccgctcgccaatcatggagggggagtaggtaatgcagttgaatcgatagccccacagtctaaacctt

SEQ ID NO: 69704 - DNA, 385 bp, Glycine max
  unsure (1)..(385): unsure at all n locations
tgggattaccaagccacaatgatcacaaaattcaagtttatgtagtttatcaccacctaacagaactttgttctcaagttcatgtaatcctctttcactaacatgacctaatctcaaatgccaaagntattgtttatcaatcaatgcattactagctatcgatgcatgttctacaatagtggaaccttcaagaataaacaagccattacttttattcttggtacccttagctataattaaagatccattcgagatcttaagaacaccatgtaaaactctagttgaatatcctagatcatcaaacatgtntatggaaataagaatatctttgagttctggaatgtaccttacatttttcagtagatactctctattatcaaacatc

SEQ ID NO: 69705 - DNA, 431 bp, Glycine max
cattatgctcttaatgtctttagaggttacttcctctttgatatctttcgtcttgaatggaattgccatgacaggtttattgttactgtctttgatatttggcaattgatattgtgttgcgggaggtaattccgactggattaactcaccatccttcacttgccaatttgttatgacattttgtgttggattacctatgatgtcttgtctccaagggtagtctatatcctttctgatggcataagcatgaaaccaatcaaagaaaaggacattaattttgactctttcgacaaattcgtagaactcgtcttggagttgttttctgtatgtaccctcgtaatggtggaaacaccatcttctttaggttcattctcccgagaaagaaatccttctataggtttcttatcatgctaagttgtagatacatcata

SEQ ID NO: 69706 - DNA, 383 bp, Glycine max
gtcacttgcacaaacaaaccaatgacatatattcacattccagtggaagttaaataagcaaaaatgtaattgtgagagaatgagataaggacatcaaatttatccatattattagcattgcaactattgtttatagtaatggcataaacttgaaaatcctaatgagtcattggagacatctaacaacaaccttcaaaattgcctcatgtatagtgtcgcttgctaacgccagaattcacaagcgattctcttcaaacttcaaccagcctgcatcaattagaccttgcaccttatgtttaagggtcctacaatgctcaatggaataccccacgactcctccatggtaagcacacgttgcattcgagtcgtatccttgaaaaaat

SEQ ID NO: 69707 - DNA, 328 bp, Glycine max
  unsure (1)..(328): unsure at all n locations
ggaccactcatttattagataggaagtcgtatctagtcaaggtcttagagaccatacaagtttcctaacgatttctaattatgtgggccattaagtctatcatatgctgacaatagccgagaagcccatgaatctcttcgggggcggagtaggtgtctgccatcgccttggccttggctaacaatcggggaagttctagactcccgttcaaggtaagagcaaaccgatccatccacatggntgcctcttggtgtaaagagtcgatcacccttcctctagcctctntttncgcgtatacttgggcatattcatncgcaatcctatgctc

SEQ ID NO: 69708 - DNA, 426 bp, Glycine max
actatgtggcggtcgggcgatggtgcacaacaaaatttccacatccactaatcgcgcataaacccaccatcccctgttgcccacctccaactgaactcacgtactcccacgtagcccatatcctcgtttctatcaacaccgggtccccatcaatcctcccaagcttccccaacatccaagtaattcaacattcatacaacacaaactatcacagccaagataacagggcagaggcagaaaactctgtccataacaccaaccacaatcacagcttttctcacttaaagacctcaataacaattccttcgttccagttctgtaacccgtggatcaactcagaaaatttactggatgtctctagtacataaagctacatcttgatcgtgtgatctactagaaaacaccatacttcatctgatcactctt

SEQ ID NO: 69709 - DNA, 395 bp, Glycine max
tagaattaaaataacttaatgccattaacctatggaattaaaaaaaacttaatggctgagtgtaactgaaattgtggcaaccaaaagtcacccccaacagccaacaagtcagccaccatttggtcttccaaaaggctgatgcctatgttgccaattgggcccttattacaacttgaactaaacctaactaaagcccttttaattgattaacccaaaacatattttgggtcagccaactttacaaggattgggccattatttatacaaactaaacactctaaaaattgagacacagtggtgttatttagacctccttcatttgggccatgatacaactcacaaccttggactttactccttgaaacttggcgttgtttcaaatagtatggcaacac

SEQ ID NO: 69710 - DNA, 413 bp, Glycine max
  unsure (1)..(413): unsure at all n locations
cgatgaatgtgccaatcacaatgtagactttttatgagatttctgccatgagcagaatatcatgttcttntatgatattaaggatcttagtaattttaaggtatgcattcttttgattttttttcaatcttgatttgtttgtttcaattcttaaagagcatcgtaatgctcaatgtacaagaacatcgactatgagaatataaaatataggtaaattcagactataagggtatttgccatgttgcccttgctctggaaggtcattgtacgccacgagaggttcgtctagtctaaccactttttttttattattataatgaaataatgttcatttgtatgatagaaggttggcttctgctttgctaattactctctgtaacctgtgggttctctttaagtcataatactcacaa

SEQ ID NO: 69711 - DNA, 331 bp, Glycine max
ctattagtgtgagttatttcttcattggagacacatgggatatgcagactttctgttataaataaaactctcgtgaacgtgcgtatgtgtgcaattgtttacctttcacaaaagaaacctatgatttcttgcttatttgtcttaacaagagagatccaaagccttaatgattgtaggaatacaacatcaccgatgggtgaagagggaggcgatcttctggcatatctaccgatccttgatagcaagaatcggcatgggtggtatgcacatatgaatgtgatacttgtgtatcaagaagtccttgagatcgtggagaaagggtattcaccgt

SEQ ID NO: 69712 - DNA, 406 bp, Glycine max
taatcgattaaagtgttcttcctaacatctggaaataactcaagaacaatgtaatcgattagatgctcttagtaatcgattaaagtgttcttgttcacttgtgaacaactaaatgagagaaaagtaattgattaatccatttggtaatcgactaaagcttagactcttgaataaatcaatcattgtctcaaacaacagtgtaatctattacaaaactacagtaatcgattaaatcgatatgagactcatctcttttagctttagacaacttgtggtaatggattatgatgaggcgcgcatcgattataatagagagttttgtctgagatgaaacttctcttacttagaaatctatcttcaacacaccatgatgatgcatgatgctatatagatatcaaatttacta

SEQ ID NO: 69713 - DNA, 375 bp, Glycine max
  unsure (1)..(375): unsure at all n locations
gctgtgaggttactgactcaagtctacatgcgaattttagttatgtgacgaagaatttgcttatagcttaaacattcaatttcgagcgtctcgatatatcactggacataatcagacatccgagtgataagttattgtctctagaactggctcataggctcaacattcaattgcgaacgtctcgatatattacgggactcaatcagacatccgagtaaagagttattgtcgtttgaattggtcagaggtcaacattcatgtcgagcgtccnatatattacgttactaatcagacatncgataaacagtattgtcgtttgattagctcagagctcaacattcaactccagcgtctcatatatactggactcatcag

SEQ ID NO: 69714 - DNA, 366 bp, Glycine max
gatgctcaatcggacatctgagtcagaagatatggcagcttgaatttgcaccgagcttccttatttactgttaattgtctcgatatgatatgagactaaatcggacattcgtgtctaaagttatggccgttcaaaatggcaacgggttctctttttcaatttcatgtgtctcgatacagtatggagatcaatcgaacaaccgagtcaaaagttatggttgaacgaattaatccggagctttcttttccaattttgagtgtctagatatattatgagcttcaagtggacattcgagtcaacaattttagcattttgaagttcccagggattccttgttcaattctagcatctcaatgtatggacctc

SEQ ID NO: 69715 - DNA, 410 bp, Glycine max
  unsure (1)..(410): unsure at all n locations
gatctcctttatgtgctctaaattgtgggagtgtgctcaaatatatggggcaattntgatttgttttcttgcttgattagggtgaattaggggtttgtatgagatggccctacgcctataatgcattttgaagtaatggggcatgccacattgtccccgttctcttgctatngacgcctaaacgcgcgcccaccaagtgttcggtgaaatgcctcaatggcattagcgcgtgatttttgtagggaaacaacccatggggcaatttggtttgcacatatttttgggaccatgcattcatttcgaaagagctagagtaattacctcgcatatgtcctaggcctaggaaccannagttttatgctaaagtacacaaaaagaggtgcacattgtgtaaaagtaccctctttttg

SEQ ID NO: 69716 - DNA, 323 bp, Glycine max
  unsure (1)..(323): unsure at all n locations
aacacaaacacanggacaccacaatccccaaatttattntgtctggtgatggcaaaggtggctgccttctttgaaagatcacctactctgctccacatcgtttatttgataataatgctaatgatagcaaaaattataaaacatcatattagaatctataatatgatgtttgcattcacatcactggnggctaaactttgataatctattaacaatggtgcangaccaccaaccataaggataccaggttaatcatgtcaccgaatatggagttagtacctctttctagccatacgcctaagttttcacaactttacatttat

SEQ ID NO: 69717 - DNA, 423 bp, Glycine max
acaagtggcctcagatatcttaagaaggcgggttgaattaagatattgcaaactatttccccaattaaaaattctatttcaatttcaatgcaagttgcaagttcccttaaaaatgaacttttaaataataattcaaatagaaaaatctgaatataaatataaatcaataataaatgaaattctgataccgatgacagatgtcgtaccggatgtcacgacatcacacttcagaacatgcagattatatttgacagtatgaacagattaaacaagtaaataacacaagagaattgtaacccaattcggtgcaacgtcacctacatctgggggctaccaagccagggaggaagatcactataatagtgttagttcaaagatctaacagccactggttacaaccttctcacctaaccactacccatg

SEQ ID NO: 69718 - DNA, 410 bp, Glycine max
  unsure (1)..(410): unsure at all n locations
acctagatatntacacgtacttccaagggtgtattgttacttacatcacacacatctccttggctaaattcacatacatgcatactccaagcattttggggtaccaaaaattgcacatgtgcatatcttggtatttctaatacctatacatacacaaacttcatgatgaatcttgactatctacacaataaggtgctacatttcatgccctttntcaagttgttgctacctanagccgcatgcaaattcaagcatatnttcctntgctgactaannatgtattcanattatatatatgatttntggaatatgtntatttcatacaacattcaacatatttatatatattttttnggagacattntgctaccaanantatatatacatacattcaaggattcgctatcata

SEQ ID NO: 69719 - DNA, 368 bp, Glycine max
  unsure (1)..(368): unsure at all n locations
tatgtaatcctttatgtagatgttggggtgaatgcacactaagatggaagagactcgctaatatgcccaacgntcctactgcaatataatgagaagctatactgaaacaaaaagataaaaacctttcacgcctcacacagatttactgattgtatccttctggtcaatccataaggatccactactacaaaagcaattatttaagtcacgagacctacgactgttgtgcaaaaccgtcttaatataatgcacagtggcaattttgtaattaaggggagaaattttattctttaagtcgcacgttctaatgcgggtacgaataaccgacttataatgagttgttattgtagacaacgacngtcttactg

SEQ ID NO: 69720 - DNA, 361 bp, Glycine max
  unsure (1)..(361): unsure at all n locations
atgctctattcaatggagtggacaagaataccttcagactgatctacactngcacagtggccaaagatgcgtgggagatcctganaaccactcatgaaggaacctncaaagtgaagatgttcagaatgcaactattggccacaaaattcgaaaatctgaagatgaaggaggaagaatgtattcatgacttccacatgaacattctcgaaattgccaatgcttgcactgccttgggagagagaatgacagatgaaaagctggtgagaaagatcctcagatccttgcctaagagatttgacatgaaagtcactgcaatagaggaggcccaagacattngcaacatgagagtagatgaactcat

SEQ ID NO: 69721 - DNA, 352 bp, Glycine max
atgtccgagcgagtctcgtaatatatcgacacgctcgaaattgaatgtttaagctctatgcctatccaaacaacaataacgttttactcggaagtccgattcagtgacgtaatatatcttgacgctcgacatcgaatgtagtacctctgagccaactcaaacgactattactttttactcggatgactgaatgagtcccgtattatatcgagacgctctaaaatgaatgtgaacctctgatccaattcaaacgacaataacattttactctgatgtctgatgagtcccatatattatcagacgctcaagaagaatgttaacctctgtgccatacaaacacaataacatttac

SEQ ID NO: 69722 - DNA, 290 bp, Glycine max
  unsure (1)..(290): unsure at all n locations
cctttcttttctcatgtgcacncaaacccaatcttcgtgttcgaagacaaccttctntctccgtttgtggctngttagcatagctttatttttctctcaattgatcttngactctctcatgaagcttcttcacatagtccgcctttgcttgaccttctttatgcttaaaaacagaaacattaggcatangcaaaagatcaagaggagttagtggggtaaaaccatanacaacttcaaaaggagaacanatagtggtgctatgaacagctctatggtaagcaaattcaaca

SEQ ID NO: 69723 - DNA, 410 bp, Glycine max
gtccgattcaagcacataatttatcgagacgctctaaattgaacaacggaagctctcatacaatgtaaatgctcataacttttaactcggaggtccgattcaggcggataatatatttagacgctccaaattgaacaatggaagctgttgagcaattcaaatggtcataaatagtcactcggaggtccgattcaggcacataatttatcgagacgctcgaaattgaacaacggaagctctcaagaaaatcaaatggtcataactcttaactccgaggttcgattcacgcgcatataatatcgagacgatcgaaaatgaacaacggaatatctcaagcaattcaaatggtcataacttataactctgatgttcgattcatgtcataatatatccagacgcctaaattgaac

SEQ ID NO: 69724 - DNA, 264 bp, Glycine max
tcatagttgatatatgcatgtcaaggaaataatgtgggacattcccttttattcctgaaccattggccaaagcaaattaccctgacatacatcatgttttgccttctataaagcctctgtgggccaaaaccttaatccttctgtcctaagcctcaaccctaagtaggatattttacccttatcttcggaaaaaacaagaacaggacgatctcaaattacatgataggaagaaaaggcttcacttactgctaagttataatgtgc

SEQ ID NO: 69725 - DNA, 224 bp, Glycine max
actccgatgtctgattgagtcccgccatatatcgagacgctccatattgaatgctgaagctctgagccaaatcaagcgacaatatctgtctactcggatgtctgattgagtcctttaatataacgagacgctcgaaattgatggttgaacctctgagcaaactcaaacgacaataacatatttctcggatgttagattgagtcctgtcttatctcgagacgctc

SEQ ID NO: 69726 - DNA, 415 bp, Glycine max
atgctgaccatattgatccagtatatgacggatgaggtagaattcattttatagtttaatcctacttgctttttacgaagagatataatatcaatctctaattatagtgacctgattttcctagatatgaccaatagattgtgtgtcaaacttaaacttcatttgataataagattttggaagcaatcatagtcttaaataaatactctggtacactcttgataaaagatatagttggctcaatggaagtgtcaatatacaatattgatgcatgtgacaaatccatgtaatctgcttatacctatgacttatggaataggatttaagcctcttaatagtaagagagcggtatgtattcataataatcaatatcatgctgtacactacagccttgcgctactataattaaatatct

SEQ ID NO: 69727 - DNA, 295 bp, Glycine max
gttaacaagatccggtggagattaatttatctcagcctcatttgtcacaagatagtgacatggagtttatggtaaatatttgtcacaacaaagtagttttatctcaacctaatttgttgcagcactccatttttatatattacaattattcatgtttggcatttacatgtaggtccctgcaactattgttccaccaatagcaaggaataagctagccataacaagagccataaaaaggaagggtgctgatatagatgatgcagaaaactgaagaagcatcttttgttgcattttg

SEQ ID NO: 69728 - DNA, 507 bp, Glycine max
  unsure (1)..(507): unsure at all n locations
aactcactctctaactatctaacttccactaatatatatgggtactactaagaaggagggatgggcctcaattgngccaactaattgntcgacggtcggcaagtgcatcggatcgtgcaagtagtataaaatggtaagtgaataccgagtatcgaactctcatggaactttgtttacctggtaaagcttgtggtcagtaaataagtgcctttggatgaaagtttggtgcgtggtatggacaagtatgcaactaaactattcaacagtaaagcacgtgagtagtggtgtgtgaagacnagataagaacgtgtcggtcttcttactggatgaatgatgttataaagatgttctcgacctaataatgtttntgtgttctatgaatgtctctggactacancaccccgatgtttcgtgcatggttagcctaatcctagtcaagcgtcatactcagatccctcttangnactaaactcgatcagagtcgcataagacatacatactaacaac

SEQ ID NO: 69729 - DNA, 386 bp, Glycine max
  unsure (1)..(386): unsure at all n locations
catatgtggtactaggtggcaatcgggcgatggtgcaaatcaactctctcacattcacaaatctaacatgaacccaccatccccagttgcccaccttcaactgagctcacgtacccccacatagcccttatccttgttcctctcagcaccgggttcccatcaaccactccaagctttcacaacatccaagcatattaatatgcaaacatcatgaactatcttaaactaataaaacagggcagatgcagacaactctgcctaaaacacattttaacaccacaggtgtccgtacttanataccccagaaacattccctctcgttcgattctctaaccggtggatcgactctaaaattttattgaggttcctagtacataagtctacat

SEQ ID NO: 69730 - DNA, 407 bp, Glycine max
  unsure (1)..(407): unsure at all n locations
ctgatttggggttatcactgggcggggacttttgctctcttcttttcctcggcccactactgcggctcttctgatgttgatggaagcatatccgaacctggcttttcgtaatccagattcaatcctttctccggcgaagacgagatccgcanagttagctggcatgtagcctatcagcttttcatagtagaacgtgggtgacgtatctaccataattgtgatcatctcccttttcgtcatgggcgatacaacttgggctgcgagatccctccatctttgggcatatgtcttaatggactcatgctctcacttagtcatactctgaagctggttccgatcgggagccatgtccgtattgtactagtactgccctaatgaaggcagtgcaagtccttcatgatcggatc

SEQ ID NO: 69731 - DNA, 397 bp, Glycine max
  unsure (1)..(397): unsure at all n locations
aaatatatgattataatttattaaaaaatattattttcattattatatgctttatgtcaaatcttcaatcattttaaagaatataaaattatttttttaaggttttattttccaattcccacacatgaatgtatctatcaaatattaaattagtaaaaaaaatatttcaaataaatgatgagaaaattaagtactccaatatacaaactttaaaattaattaactcctttaaattaatgagctaaagttaagtttttttttttcttccacaattgaggcttaaacttaaattcttaacacaactacactccaaaatatcaatagatgtngtttaaaaanattcataaacatcaatattcacaatatctaggtataaattctcatgcatcttaatttg

SEQ ID NO: 69732 - DNA, 425 bp, Glycine max
atcaatggtgatactattacagtttacatgaacagtattaatatactataattcctttcaattctgtgaatttcaattggagactgcaaaagtttatgtcatggagctatgttattatgtgtctacatatttctaacttaataaatataatataggtatcgatataagttattaaattcattaaagaagactaacctatattatgtattatgtgcaaccaacagggagtgagttatctgattcctaactaatagagagaaacaaaataacatgtgtgtataaatatcataataataaaatataacttactttaacataactcacgtcatttctgcatttgtcgttcacattacatacatcacacacaacacattattatatcacacattcacgtctcagataaaaacatatctcagtcatcatat

SEQ ID NO: 69733 - DNA, 342 bp, Glycine max
taaagatcagcttttacatatacacataagtgagcacttttgaacacataaacactgatgtgacaacctgttgaacaactaccaaaaggtgtggatgtaacattgatatgatcaactataataaagaaacctgtaatgctagtgatattatgtgtattcacaagagtctcaatatgactctggagttgatactgatcctgactcattcttgcatagcaattaacagttgtgactctaagctatggtttgatgctatgaaagatgaattggaatctatggtacataatatagtattggatcttgtagagttccctaatgggatacagtctaatggatgtaaat

SEQ ID NO: 69734 - DNA, 436 bp, Glycine max
  unsure (1)..(436): unsure at all n locations
cgcgaagtgaacctcggatccctgtcagatacaatactagaaggaattccatgcaaccttactactttcttgatgtacaactccacgagtttctccattctatacttcatattcactgggataaaatgagcagatttggtgagtcgatctactatgacccacacagcatcatgtccacgactagtcttgggtaaactagatacaaaatccatagatatgctctcccatttccattccggaatctccaatggcttcaattctcccgatggtcgctggtgctcaaccttagccttttgacatgtcaaacatcttgctacatattcggctacatctttcttcatgccatgcgcaccaaaacttctcttcaaatcttggacatcttagtcattccggatggaaacaagacgactntatgagcttctncaagatcttactc

SEQ ID NO: 69735 - DNA, 428 bp, Glycine max
  unsure (1)..(428): unsure at all n locations
taaagcgcatattntcttcaccatgctacatccactagaccgcattatgttactatggacagatggaaaagaggacttgtaattgaatcgggtacaattgaagccggttatggctcctcaatgtgtaagtcgaccattttttccactcttcattatgtaactttatgtcgattctttactcgttggattaattcttttgtaagaaaaattgtggattaaattatcaaccaaaattggcaacattttataagcgactttgtcctctctgtcatgttcttgaatcctccatcgcttgttatgaagacacaagcaaattgaatccttcgattcaatttttgtcgattctcccaatgtttgaataaacaatgggaactgattgtttgcgtctgagatggccactagccaaattatgatcacgaattttcgtg

SEQ ID NO: 69736 - DNA, 459 bp, Glycine max
  unsure (1)..(459): unsure at all n locations
atgtgcacgaaaccaccggtaggagaattctcaacgttggtattgttttcagncatcaataatagaaaatccgtgttttctatgtttcgtggtttctttgagtatacttgggaggtcgtaaaacctatttaaagtaatatantttagtatagtacagtacagctcttaaaagctacaagcccaagacaacacaagaatgtcttcacaacaataatcatgtctattattgaaacaaatacctagtatcatgcggagtaatgaatatccactgtgatccatgtgcctcagcanaatcaactanggtgtncaagctgattgttcggcttactgcatgctgaagataaatccaaatccatagtaggaaacttatgangcagattctaatntatataaacaaagaacaaggcaaacaaggacactttgagtgatatgtagcaacaanatatgcactatattaac

SEQ ID NO: 69737 - DNA, 73 bp, Glycine max
  unsure (1)..(73): unsure at all n locations
ttgcttgtatcttgattntaggaattaaattgtcatcatcaaaaagggggagattgtaaaagcactgactttt

SEQ ID NO: 69738 - DNA, 155 bp, Glycine max
  unsure (1)..(155): unsure at all n locations
gacaggaggctatngctcagctgatgttatactcgggcaggatctcttctataccactataggaaaatgagtacggatcatgtgcaccagcatgaccaccttgactcaaatagggatgaccgntgntggtcatcaacacctagcccagtgaccac

SEQ ID NO: 69739 - DNA, 369 bp, Glycine max
  unsure (1)..(369): unsure at all n locations
gatatagagtctgtggaacatggctcttatatgtcttctcctagtcttcctagtatatgttgcccttatctaatgcaccttattacttttgtgatggaatctatgaaaagtacaacctcatttcgaagaaccttggatacgatagtcttctagtccttgaactgagcattgctctagaacattctaatgagttntgggtatatcagttgtggatcattggagtagccacggataccacaatatagtaaggtatgtnttatgttgagccctaacccttccagcactccaatgtcanagaagtgctctatatgaatagtgtattcagcttctgtgaagacagtggtggtgtctatggtgatgacatttaat

SEQ ID NO: 69740 - DNA, 101 bp, Glycine max
tcttaaacaaactagtttatagaacaaaaaagaaagaaacaatgtatgggctggttctatctatttatagaacgattctggtgtacctcgatgttctttcc

SEQ ID NO: 69741 - DNA, 416 bp, Glycine max
attcgtttattagaaatccaataagcattatcaagatcctctcctcccaagaaagtgtcaccatttgttgctttcacctggacacaaaaaagttattagtgacaatttccaacattatttccaattactggctatgaaatataggcatagaataaacaagtgttaatacctcaaaaacaccattagaaatctctaagatggacacatcatatgttccacctccaagatcaaaaactgcaatgagaccctccttgttgttcatcccataggatagtgcagcggcagtgggctcattgatgattctctgaacatcaagaccagcaattctaccggctatctttgttgcctgcctctgagcatcattgaagtaagctggtacagtaattacagcttttgaaactcgactttcaagatat

SEQ ID NO: 69742 - DNA, 270 bp, Glycine max
  unsure (1)..(270): unsure at all n locations
catattgctccaagtgtacaaatctctatctttcattntgtcaaacatgtngagtgcctaaatcaccaaagtcgaggtaagggattattagatataaagtcatatcatatattcacatattttgcaaacatacagcacaanaactaacctggtaatatgacatactatgcattacatcatatatgacaaacatataacttgacataatttaacatataatatcaatcctttatacatttttgcaaaaaaaaaatctttttttattaacat

SEQ ID NO: 69743 - DNA, 340 bp, Glycine max
gatccacagagttatttctaccctcatacctcagcaaaatcctcttcgttccgattccgtaaccattggatcggcttaaaattaactcggggttcctaatacaaaaatgtaaattctgaccggtgtgatctgctaagcaatgtttagaacacgacatatactacctttcccgtggaagcaaaaactagcactgcacaaccattattttctgcataattggcagaatctgctgtcaatatgacagcttgctgcataatcatgctatattcgaatgcaacatacatgcatacaattccactcaaattggatcctacaagatctatatcatgtataaatcatg

SEQ ID NO: 69744 - DNA, 137 bp, Glycine max
  unsure (1)..(137): unsure at all n locations
gctggaatcatntatcctatctccgacagcaatgggtgagtcccgtccaggtagtcctcgaaaagactggtctcacagtgatcagaaatgagaaggaggagctgattcctactcgggtgcagaacagttggagagtc

SEQ ID NO: 69745 - DNA, 277 bp, Glycine max
ctatgttctaacctaaatcactaagcccgtgatccctcatcatgcatgaaatccaagcttcgtctacagatccctcatgtaagacttcacccatgttagacagccctcttaagtgtagactaacttaaactggagttcgtccgcagatccctcatgtaagacaagactcagctcaagtagctgactatagtctagcctaatttagcctaagctctgtccgcggatcccttatgtaagactaggcttaaactatacaacattatagttacacagaaaa

SEQ ID NO: 69746 - DNA, 365 bp, Glycine max
  unsure (1)..(365): unsure at all n locations
cgtcattgcaatgcggaaggtattttgcgcttcactatccatgttcacacattattgcagcttgtgggtacatgagcatgaactactaccaatatatagatgttgtttatacaaacgaacacatcttanaagcttactccgcacaatggtggcctcttgtgaatgaagcggctattcctccttctgatgatgcatggacacttatccctgacccaactacaattcgtgcgagaggtcngccaaaatcaacatggattagatatgagatggattgtgtcgaaccatctgagcaccgaacacaatgcaatagatgtggagccgatggcatatcatgcgcttcttgtcaatgcaatctgagcatggga

SEQ ID NO: 69747 - DNA, 454 bp, Glycine max
  unsure (1)..(454): unsure at all n locations
ctcaagctctcacctcacctaattccttgatcagagtgtctatttttctcagcttgaacactctttngaactgaatcagacttctattgataatttgctatcatgtcttcttctctaaacaagacatccctgctgataatngaattgggacctgcaggatcccaataaccagaattatatcccttcacttctttcggataacctaagaagattcccttcttagctctanggtcaagtttgccttcattagaatgaacatatacaatgcatccaaaaattggtaagntttcatagcttggagcttttnctgtccatctttcctctggtgttttgaatcaattgcacttgaaggacatctgttattagatagcatgctgtattcacagcctctcccaaactgtttgcaatttgcatagacacatacatctaccctttccaaatggtctgtcatcct

SEQ ID NO: 69748 - DNA, 375 bp, Glycine max
ctatttaaacaacacaatttaaataaataggacatattatatgatacaaataagtcttatatatagcatattttataatcaaatatcaaatatttagtaacgggataactattgtgtataagcaatatacgatgacaaatgcacaagtgtgacacacatagtgaagctaaacaatcattaagaaaggatcttcatatgctatattccttgagattcagatctccttacttcttactataatgagattaaacacacatttatcagaaatgaaaccgtgcccactaaatgggctgcaaggttgaaacactatgatagaattctattgcattatataaataagataatactctcttttattcaaaaaatgtaccatat

SEQ ID NO: 69749 - DNA, 291 bp, Glycine max
atgattagccataataacctgattgaataaaatgaatattacaggaacttgtggatggtgaaaataaaagtatgggcaaatatgcgcatgaactgtctcacctccattgttaagttcataactcgtaactatttaatcttgaccatttttattgaaccaaagcttaagcactttaaattagtgctttttgatgaatatgacaacgtgacaacatccctttgttaaaatataacactaattagcatgtgatatattgatcacaatgcaagaactgctactaaaatctgaaaa

SEQ ID NO: 69750 - DNA, 279 bp, Glycine max
tctataatacgcgcctttccttcgtagggcagtaatataatgagatgtttatgaacggaataatggaataattctttggactactaaatgttctgaactttgcactaatatttgaacttgtgtaatctgctaaagagaacctcctgtgcaaaaatggtacagattcattgttaaatggctgatcaagtgcaacttaccttcaatgctttgaattctgtttatggtgacatgtcataactgattttcattctggagctttgccgataaatttctgaacat

SEQ ID NO: 69751 - DNA, 414 bp, Glycine max
  unsure (1)..(414): unsure at all n locations
attggtagaatcttgggtgcnttgtaaaatttgtgaactctttgcttcaaccatattcttttatagttcatcctacataaatacaccttataaattattatcatacatcaatatcctaaatacttcaatatcactaaacaaaactcatctccacattagttactcctcctcaccccataaccttctattagaaaattgagcaaaacaaagaaaaagtattgaaataaaaattaaaattcttaaaattacaatagcagcctcttcaggaacaatgctttcatcttttcgagttcgagtgtcaatataaatttctggcctagaaggttgcactctcttagcctctggtgtctaacattagttagaaaaatcaatcttcctatttgtattaagcatgtaatataataaatacaaaag

SEQ ID NO: 69752 - DNA, 527 bp, Glycine max
  unsure (1)..(527): unsure at all n locations
acaatcgttgcatgtntcttgtctatcaatacatggaaagttgtagcttattttatgcctngaataatgatgaggaagttcacgaagttgaatggaagtagaaggtgaatatcattaaaggaatggcacatgctttgtcctacatgcatcattatngtactccaccaantgttcatcgngatgtaacangtagcaatggtctactaaactcacaattagaggcttttgtctcagactttggcacagctagactccttgatcccgattcttcanatcanactttggtagcaggcacatatggctacattgccccaggtcaagttgctatttcaattatatactagcannaattgtgcatgacttccaagaatttgatttgaggtatagctngagaagtaaccttntcatttcttgacattacagaaacttgctatacaatgaatgtcacggannaaatgtgatgttacagtttggagtggtgactnttgaacatttatggaaagcatctgagagctatctcatcttat

SEQ ID NO: 69753 - DNA, 280 bp, Glycine max
  unsure (1)..(280): unsure at all n locations
tggtctcacccctccccttttttatgttttacgacagacatgctcgcttttatctagctaataatggtgttntctttgcaaagttgtgttattaatcgtatatcctctctcttaaaatcctataaatgcatagaaacttangcgaattcatgatatacctcacgactatgaacaagtcttaaacatgacataaatagctcagttagagatactacgctgcctcctangagcacttctttaacatctatagtcggacgccgngtggtgatcaatcgatcat

SEQ ID NO: 69754 - DNA, 388 bp, Glycine max
  unsure (1)..(388): unsure at all n locations
actatgaatgacanattccttgggataaaggtagtgctgccatgctatcaaagcccgtactaaagcatacaactccttatcataagttgaatagttaaaggtaggaccacttaacttttcactaaaataaacaattggatggccttcttgcatcaacacatccccaatcccaacatttgatgcatcacactcaatttcaaaagatttctgaaagtttggcaacgcaaagtatggagacaatatttagcttctgcttaataacattgaaagcttcttcttgtttctcttcacatttgaaaccaacacttttcttgagcacttcatagagaggtgctgccaattgcttaaatcctccacaaatgtctataaaattgctatccatgaaact

SEQ ID NO: 69755 - DNA, 257 bp, Glycine max
gtagctacctcatgcactcctctaatgactatggcatcatttctggcgcttaaatgctgggagttgtgatgcaatccttcctatgaagggaccaatcactagaaccatgagcaggaggctcccataagattgggctagagctgcttaataaggccctatggttctcatgaaccttatggtatatatctgagcccatgggccaaggttgggtccaattatctttgtacatattagactaggatgtcactatatttggt

SEQ ID NO: 69756 - DNA, 327 bp, Glycine max
  unsure (1)..(327): unsure at all n locations
gatggcctatgtggataactgtgtggtgggtaaggagaaggtttgttattggctgagtaatgacatttgtgggttggtgggttggccgtatangaatggtagtcacagcatgggtttctccctctgtctcaccctcttcatttgccccagtcttctcagtcgtcctagtaggatgaatcaaattgcctcttttcggacccacatcgatcctttcactggcgaagaccaaatccggaaagctntgagggtgtgcagcccaccatcttttcatagtagagtatcgataatgtgtctaccatcacgattatcgtctcgctttccatcatt

SEQ ID NO: 69757 - DNA, 438 bp, Glycine max
tatatatctcacatcttttacttctaccgccggccaagactggctgttattgccagcatttactattatctagttttccattgatggataaaagctaaatttaacctgttactccttaaaatttccacctataagattgataaagaaatatctctgagagtgaataccagccttgtattttatctctaacttactgggtatatggtacaggtatgagtatttgactctacaacgcatgtggttcatcactatttacattattactacaataaccaagtacactttgtggtatagaaaattggtacaaagtacgcaacacaattacattaagtatgttctattcatcttactaaacacgataattatatctaataagcaaagagatgataaaaatgtcgattaacaacttctaccacagataattgctagctctcttga

SEQ ID NO: 69758 - DNA, 178 bp, Glycine max
tcttgtccttggcttgaacaaaaaatctcactcttttactaccaagattattttttgccaacattcgctatattccctttgcataactatcttgcttggtagaatatttcatctgtgataaagatttaacgcataatctttgacacttggcaggaatatgacaaaaacactttatgct

SEQ ID NO: 69759 - DNA, 366 bp, Glycine max
  unsure (1)..(366): unsure at all n locations
ctcagcttctaaggaggtgagcttatntatgagaggggtgtgtgtagcttatctctatcttctaaggaagttttctcagagaagcttctcaaggaagttttctcaagaaagcttctcaaggaagctacctagtctataaatagaagtatgtgtaacacttgttgtaactctgatgaatgagagtcttgtgagacatacttcanagatacacttctctccctcttttattccttcaatttcgggctcccccctctctctttctctccctctttcttttcctccattgaagcatctttccaagcttcttatccaaggctcatcttggtggtgaagctccttcttccatggcttattccctagtggatg

SEQ ID NO: 69760 - DNA, 324 bp, Glycine max
gagaggttaatgaaacaacgagatgatgctctccatgatatgttggatcaaatggagaatagagaccatatgaattgctcaagagcttccattgttcaatttcgagcgtctagatatataatgcgcctcaatcggacctccgagttaaaagttatgaccatccgaaatgctcatgagcttccattgctcaatcttgagcgttacgatatattatgcacctgaatcggacctgcgagtgacaacttatgaccatctgaattgctctagaactgccattgttcaattttgagcgcgacgacatattatgccacctgaatcggacct

SEQ ID NO: 69761 - DNA, 520 bp, Glycine max
  unsure (1)..(520): unsure at all n locations
atactcagctatatanagctgttggaggatataattgaagggatgcatatctgtttcatcattntaaagatggtttgtgttcatgtggagactattggtaagaagaataactcanactcatgccagcagttgctgttagctgacacttccccagattaaattgactgcttgctagttttgttaaatagcatactgatcttggatctcttgcattaacttttatcagtagagacaacatgtacattntggtgatcaatcacatcttttgattgtagtctgctgatatatgtgtaagagctgatacttccttaaactntgttattgaaaaaatgactttctttctatttanngtgaatngtgtggactgtgaacaaatgaatctgtttaatatggttaagttntttttgtccattnttcatgcctttttattttaatataatctngcttctctctngtaagatattanngaatagaattgcaacattgaacaacatgcttctgactatgtaaaaagatcctt

SEQ ID NO: 69762 - DNA, 430 bp, Glycine max
  unsure (1)..(430): unsure at all n locations
gaggatgcttaatggggaaagaagaagtgtaatttatatgtgggagcacgaaattgaaggaagaaaaagagagcgaagntgaactttgagttatgtctcacaagactctctttcatcaaagttacaacaagggttccacatgcttctatttatagactaggtagcttccttgagaagctttcttgagaaaacttccttgagaagcttctttgagaaaacttccttcagaagctagagcttagctacacatacccctctcataactaagctcacctccttgagaagcttccttaagaagattcctaaagaagctagagcttagctacacacacctctctaatagctaagttcacctccttgagatgagaagctagagcttagctacatacccnnctatatagctaaactcacccctatngccaaaaacatg

SEQ ID NO: 69763 - DNA, 489 bp, Glycine max
  unsure (1)..(489): unsure at all n locations
cctcttagtanggaatctatccttcctaagatggagtttaacccagtcctcctcattaagaactagctcctttcttcctctattgcctttagttgcatacacctttttttggttctctatttggttcctaaccctctcatgtaacttctttacaaactctaacctagattcccctgtagaagcaagcttcatgatgaatcaagattgattcaaggagttntgatgataatgaagataatgacaaaaagctcaaaagtcaagaacacttcatgttaacaaagatgatgacttcaagaatcaaagaatgagttcaagattgaatcaagaacacttcaaggttcanaagggaaattgatntcaagaatcaagtttcaagaatcanngttccagaatcaagatgaagattcaagagaagactcaatcaagataagtattaaaaagtnntttttttcanaaactgagtacacatgaatttttctcaaaccttta

SEQ ID NO: 69764 - DNA, 494 bp, Glycine max
  unsure (1)..(494): unsure at all n locations
agcaacacanaatctaggtgtccaaaacccctctttttaatggattntctaggctcgagaagtgaaatttataatgaggtaaatttgaagcaaactctcacctcacacaagtccataacatcaatctaaacttgctcaaactggatttacacctaaaattccaccgaatcaaaatttgactcctcaacacccaattttgccctagaaatggctcttggttcactttggtcatttgtttttctctctagcgcagcctaacctttctcataagtcctaaatggcatttcaagctaggaattaactcatttaacctccatttactatagaatccagatttagcctttcaactctcaaagcctcactctntntccactcataacaccacattctcactntcttaccctagggtaactctacctttcatctctaacagttttccattaagcatattcagtacatgaacatcacaagcatcctcataaaaacccctaaac

SEQ ID NO: 69765 - DNA, 428 bp, Glycine max
  unsure (1)..(428): unsure at all n locations
gtgcgngattggtctttgccagtgaaaggatcgatgtgggtcttataagaggcaaatttagtcatcctgcttggacgaatgagaaaactggggcaaatgaagagggtgaggatgaaggagaagcccgtgctgtgactgccattcctatacagccaagtttcccaccaacccaacaatgtcattactcagccaataacaaaccttctccttacacaccgcccagttatccacaaaggccatccctaaaatcaaccacaaagcctacctaccgcacttccaatgacaaacaccacctttagcataaaccaaaacaccgaccaagaaatgaattttgcagcgagaaagcctatagaattcaccccaattccagtgtcctacgctgacttgctcccatatctacttgataattcaatggtagccataaccct

SEQ ID NO: 69766 - DNA, 488 bp, Glycine max
  unsure (1)..(488): unsure at all n locations
gtgagtccctccctcanacctcctttaattatataatattatattttttgtgaaaagtatattattaataatatataacaataaatatattttttatagtaaaaataaaattaaacaatatatactagttagtatataatgatgtcgcaacctacccttttgcgggcgagcgaggcgaggctctcgggagcgttttccaaaggagaaaaatgtgcggagtcgccaccaacgtttatttgtggaaaacgtcggaaaaactgaaggaaaccggtcataaagaatattccaagttcgggagttgtatttacgtttgaggaaggtattagcacctctcacgttggctcaaaggacaacagccttatntntagannatgtgtgaaatgtgttaccctaactntatttctctntttatttttgaggtcgacanaagcggnggctcttgctctacgtaccctccattgaagaggaaatcagacctacgtagttct

SEQ ID NO: 69767 - DNA, 364 bp, Glycine max
  unsure (1)..(364): unsure at all n locations
gggtgcggtattgttntcttttgatggtagaaaaattataagatccatgcagattatttattgngcgtgtgtatcgaaatcatttgttgtctattctttccattaataaatgggaagtatcagttttgattaatgttagttttcatgtcttactttaatacttggtattctagtgttatgaactcgtttatatttgagttcctagaccattagaagttgatcaccgntggagattgggttttaattctttaaaactttaacagactgaatgggagcatcagataattctgcaagttcatgtaagtaaaagattaaaaggggccagatagcctctatgtagtggctagttgtcaatgttgactaa

SEQ ID NO: 69768 - DNA, 246 bp, Glycine max
aaagatgtaactcttcaaaagggttttgactttttcaaaatgggtttaaggttttctaaaaggtataactcttctaaatgggcttggtgactagacatgaagagtctattaaagccaggctttgtgttgcattttcattaattcattcattcaatcttaattacttttccaatcaatccatattttccaattcattctttacacaagcaatttttccacattgatttctgagtctctttgaacttc

SEQ ID NO: 69769 - DNA, 441 bp, Glycine max
  unsure (1)..(441): unsure at all n locations
attgtcttcaacttcaaatcctggaggtntgtaccatgttttactgtttcatctaaaaggccattgaggaaagcattattcacatccaactaaaataactcccaattattagtaagggtaagagtaatgataagcctaatagtgataggtttaacaacaggagaaaacgtctcatgaaagtcaaaaccatggacttggtgaatgcccttggccactaaccgagctttgtacttgttgatggacccatccgcattttctttgatccgaaaaacccattcacaccctactgcccttctattagagggcaagggaactaaatcccaggtgtgattctntattaaggcagcatattcaagttgcatggcagaaagccacattggatcagtgagagcctgtttaacacctttntggttcactatgagccananataatgaatgatg

SEQ ID NO: 69770 - DNA, 420 bp, Glycine max
ggaagcttttgtggttagtgcttgtttacattaacccttatttatttatgagaaatgctcttttgttcaacaactaacattttgtctttaattgcataacatatgacaactagtggtggaagcttcatggacacaaattcttgatgaaactttaactttcggaaagttggtttgtctgagcctttgttagctactaactcagctaatcatgggccatcctttgatttatctacgggcatgcatatgcttagactatgcagtctaattggaaatatactgaatgctccaaattagtatgtgctatttatttgacaaccagcattcgtgtcatacatggtgatattccaattagacaagctcgagaatatggtaatcatatgctgccaaacagctgacacactagaatggtgattctatcac

SEQ ID NO: 69771 - DNA, 359 bp, Glycine max
  unsure (1)..(359): unsure at all n locations
cgagcgtctcgatatattacgggtttctattatacatacgaganaaaagttattgtcggttgaatttgctctcagcttcaacattcaatttcgagcgtcccgatatattacgggactcaatcagacatccgagtaaaaagttattgtcgtttgaataggctcataggttcaacattcaatttcgagcgtctcgatatattacgggactcaatcaaacatccaagataaaagttattgtcgtttgaattggctcataggttcaacatttcaattcgagcgtctcgatatattactggactcaatcagacatccgagtaataaagtattgtcgtttgatttggacagagcttcaacattca

SEQ ID NO: 69772 - DNA, 425 bp, Glycine max
  unsure (1)..(425): unsure at all n locations
attgtgtgcttgatcttaatggaanaatcctgcaagtgtaggtattggatgtagccaaggttanggtgtgtgttggatctttatttactgttctcatttagttttagcagttacatatttattcttaactttgaaaaacctttgtttcacaaaagctttactcttatatttcatcaaaagattnttacaaagtagttntaatgttcagaagcaacatccacctttgtaaagaaaagtgaaaatcaaaatatgtgagataacatnaatggtgatttgaagagtagtttcgaaagtagtagtagtatctagttttacttggaaaattattnttaagctatcattttatctaagtacttaagagagaaaattcttgcttctaaataactttttgattntaataaagaagtttcanaagaaaaaatcat

SEQ ID NO: 69773 - DNA, 453 bp, Glycine max
  unsure (1)..(453): unsure at all n locations
gacactattaatactcagcttctaaggaggtgagcttagttatgagaggggtgtgtgtagcttatctctagcttctcaaggaagttntctcanagaagcttctcaaggaagttntctcaagaaagcttctcaaggaagctacctagtctataaatagaagcatgtgtaacacttgttgtaactttgatgaatgaaagtcttatgagatacacttcaaagttccacttctttccctcttttattccttcaatttcgtgctccccccttctctctttcttttcctccattaaagcatcctcttcaagcttcttatccaaggcaattcttggtggtgaagctccttcttccttggcttattccctagtggatggtgcctcccctctcctcttctcctttgccttccgctgcatctccatggtgaaaaatcaccatttgaggacctcattggagctc

SEQ ID NO: 69774 - DNA, 436 bp, Glycine max
  unsure (1)..(436): unsure at all n locations
gctgaaccatttatcaataacacaagttagttttattcataaaattagagnttatctcttttatcttagtgagagtgattctcctaaattcttgagtgattcaagaacaccttggctgtatcaaaggactctcacaacctttgtgtgttgccctcgctggaaagagtgattctttccttcctttcatcatcacccttgttctttcaaaccacaattccaaaaaatccacctctgcccagaattatctcgtggccataactcccattttacgcactcaaattaagtgattcttgagcctaaattaaatctcacaacgagacctttcacctcgntgtggaatcacctcatttgaagccctgtagcttcaggtattgccatttctatatttctgncagccaccacttaacctacattntaccatcccattcatccattt

SEQ ID NO: 69775 - DNA, 471 bp, Glycine max
  unsure (1)..(471): unsure at all n locations
ggtcctcggtgaaatcattagctgccacgagataagaatctttatatacgtcagaacttgcacatatgttttctaacacaagcaatgagtacccttcacagcggtaattctttntatgtttctgcaacacatgcaccaaagaatgaataagaaaattacatggtttattcctagctgagttgtaacaaaagtaaagtataaataaaaatactactttacctcattttaatcagaattgagatggtattttacatttgagtcagacagtgattaattagtctgccaaaaaagattattcagtttctgtggttgtgtgcaaaatcaaaccctgcagctgcaataaagaggtatggagtagaattagggaaaaatcaaaaaataaaaataattacagagaagccgagaacaggagagaatggaaaggacaacctttaatgggagtgtgagagtaacagaatgtttacatcacca

SEQ ID NO: 69776 - DNA, 397 bp, Glycine max
  unsure (1)..(397): unsure at all n locations
ttgtatccctacttttcaagggatagctngctttctgattgtttnttattntcttgtgcctagctntttagttatcatgcatattgactattgagctcctgttaagtcttattgggctacgattggttgggtcttgttggatcctttggttgttagggttggatccaaaacaaataacaaatatattttttggtacagctgataataatactaaaacttcattctatcttagtttcgtcatgcagtaaaataaaaaaaatcttagtttcgtcacatttcattacatgctaatactaaagtaaattcatataataattacttgtttctaacattattgtctacgattcctaagacaaccatgtatgtagtttatatttctttccgatccctacaaatc

SEQ ID NO: 69777 - DNA, 392 bp, Glycine max
tgtctcagcatttatgcgagacggagaccaacatgctatctattatcgccaagtaccaagaagagttaggtctagccacggcccacgagcatagaatcgcggatgagtatgctcaagtatatgcggaaaaagaggctagaggaagggtgatcgactctttacaccaagaggcaaccatgtggatggaccggtttgctcttaccttgaacgggagtcaagaacttcccctcttgttagccaaggccaaggcgatggcagacacctactccacccccgatgagattcacgggcttctcggctattgtcagcatatgatagacttaatggcccacataattagaaatcgttaggaaacttgtatggtctctcagaccttgactggatacgacttc

SEQ ID NO: 69778 - DNA, 446 bp, Glycine max
  unsure (1)..(446): unsure at all n locations
tgttaaagaacttagaananatcaagaacaagcttgttcgcacatcgtttgtgtgtatgacatccactccacaagggttgaagtagaggagaccttcaatcctattacgcaacgtggcggacaaaagtggacagttaacttgaatggtcattattgttaatgcggaaggtattttgcgcttcactatccatgttcacatattatcgcagcttgtggttacgtgagcctgaactactaccaatatatagatgttgtttatacaaatgagcacatcgtanaagcttattccgcacaatggtggcctcttgggaatgtagcggctattcctccttctaatgacgcatggacacttatccctgacccaactacaattcgtgcgaaaggtcggccaaaatcaacaaggataaggaatgagatggnatgggtcgaaccatctgagcactgac

SEQ ID NO: 69779 - DNA, 478 bp, Glycine max
  unsure (1)..(478): unsure at all n locations
cgtatagtaacattatagttgctaaattaatatggatggtgcactctacatatttatggngttgaactaatgtttcctattaaatttgacaacagctgacctcaatctcactaagcttggtgggtggaaactttaacttatatggtggaggccaacagtgcagaatgttaggaacataagctgctattcaaaggttactacttagtggttagaggtactcctatttctaaggagcataccttgccgccaaattaagctagatatgaaaggctggatgttctgccacttacgactagtatttgtgactttattatgttctcactacatgactgacttactatacatttaaacaatngaaagttcttctagtatagctctttaagntgttctacatagaacttgctgtggagttgatagctncaatanatcactagtacaanttaaagatgatatgaagtcaacttagtttctcaatccc

SEQ ID NO: 69780 - DNA, 506 bp, Glycine max
  unsure (1)..(506): unsure at all n locations
ctcaagcttctttcggaccttgaacaagcaatcgactcctctttcagaaccatgctatgtgctcgcgactggtccctttcttcccttcgcaacttgagttcattattgctaccccatagagctccgcgaaatttgttccggccatactcttccttgcgagccctcttggtctcttgttcaagggcccttgcggtaattgcattctcttcccgtaacccggcacactccttccgaacgtgtgtagcagccaacttgaacttctccttggcgagttntgcctttcctaactcgcttttgagggcttggacttcttcgtcctcttccggtgcttcaaaattctcttagctgacgaactttaacttggcgagccaatctaaacctcgcatgcgaactttcagcccattcgtggtacccccaatgatgccattacgaatgcctctaagctcttgatcttntcttaacgggggtnntccatgcctatggattctttgtatagtcttggaact

SEQ ID NO: 69781 - DNA, 466 bp, Glycine max
  unsure (1)..(466): unsure at all n locations
gaagctagtgaagtaacaagctggcttagttgtattatgttnttcataaaagcgaggaatagactttgctgaaantttctctccatttgtgaaaatgagttaattcgagttatactcaaattggttgctagcttggatttagagcttgaacaaatggatgtgaagattgcatttcttcataaagattagatgaagagatctacatggatcaactagaagggttcgaggagactagaaaggagaacatggtttcgaaattgaagaagagtctgtatggattgaagcagactccaaggcaatggtataagaaatctgactcattcatgacgaatcatggatatatcaggactaattcagataactttgtatatgtcanaatattttcaagtcaacaaattatcatcctcttgtatatgtagatgaatgctgtagcggacaaatagaagattaacattctggacataaa

SEQ ID NO: 69782 - DNA, 409 bp, Glycine max
  unsure (1)..(409): unsure at all n locations
cgtctccttgaactnntaaattgttagccaattgtgttgcgtgtgattgataagggttgggaacacgcgtgttgtcttcagtgttagcgttggagtgtttgtcgtgttgttggtgatgatgattatgctccaagggaaggccagtgcagcgtgtgggcttcatagaggacatgagaatgagggtcagaggacgcacaaatgtggtcgtgacgaaggccttgccacgatggtgacggcggcgtgccaaagtgaatacatgagtgactaagacgaactaagtgagtgattaggacgaagaagaaagccttgacgaggtgcgtaaccgggaaagtcacaaatgatggaggaggatacgagatagataatgaggagaaaatcagagtgactgagagacactatggttgagttg

SEQ ID NO: 69783 - DNA, 416 bp, Glycine max
  unsure (1)..(416): unsure at all n locations
ctactctgatgatgcatcgttggacaatttggacattctatatctctaagactcctaaccatgacaaggattgtaagtttttgttgggtcacctttttttgagcttataacgtgattctttattgatgcattctttaaatatgactacaaaggcctgaagaagttgtaggccgagaaaaagaaaaaagttattgtttttatgttgagaacaattctccttatgtgcctctattgaatatcgagcgggccggccatggttcaaaaaggaagaagcctgacaccattcaccttgaggatgagaatgctcangccaaaaaggctaaggctcctactccttctactctagggtcaccgcttgtgattactaaaaagaactcagatatcttgtcaatgatggatggtcggncttcactatg

SEQ ID NO: 69784 - DNA, 399 bp, Glycine max
  unsure (1)..(399): unsure at all n locations
ttcatgttgcccttaatgatgcatattgtacaaacatgagtgttattaaatgcacaaatgcccttggtgtggggtatcatggtacaaagtgaagggtgaagacgagtgtagtattcatgaaaactcaaagaaagtccccccaacaaaggtgttgtggtatcttctgatcattcccaggtttaagcgtctttttcctaatgtagatggtacaaaagaacttacatggaatgcaaatgggagaaactgcgatggaatgctccgtcatcttgctgattcctcctagtgaaagaagattgatcgtttgtatctagatttcgacaaagagccagganatcttagacttcgactngccactcatggaatgaatccatatggcagtttaagcactcaacatagntc

SEQ ID NO: 69785 - DNA, 323 bp, Glycine max
  unsure (1)..(323): unsure at all n locations
tattcctctgaagcccttcctactcttgcaccagcttaaaatacttgactnttggatagttggaatattgcaaatcacatcatacgttgacttcaaagagaaagcacaatcaaaagtacccttgcaatttgaaatttcctgcacaatggtctcaggtaagaaatcttctttactttactaactgcaactagaggtagaatagaagcatacaagaacccacacatgatagtacatgcagagataaatgattcgctattattgctagntctctactctttacacatggtagagcactgtcttcccttacacttcgtgaacttatt

SEQ ID NO: 69786 - DNA, 387 bp, Glycine max
  unsure (1)..(387): unsure at all n locations
cttccttaacttcctcaaattcagaatctacctcaatttcttcaatggctgaggagtcatctgttgaatcatccattaagcacacatttgcaatttcttcttcactagaagagttggaggatattgatgcattgttttcccaagctatataggacttttttggttttccatccttcttccctttctttacaacaatatgttctttgaggtaaacagacaattcggctcgatgtgcccttacattcaaagcatatgaaggtgttgttggtttccactttcttcaaagttttagacaatnttatatctttggacctcttgaggagatttccaaacttcttaacaatcaaattcaaattctctacatcttcatcatcactagaagctttt

SEQ ID NO: 69787 - DNA, 397 bp, Glycine max
  unsure (1)..(397): unsure at all n locations
agtctcacgattgtcacgtgctcatgcaacaattgttatttgtggctatacgagacatcttgccaaacaaagtcaggttagccataactcgcttgtgctntttcttccatgctatatgtagcaaagtcattgatcctatgaagtttgatgagctggaaaatgaggccgcaattatactgtgccagttagagatgtattntccccctactttctttgacatcatgattcacttgattgtgcatctggtcagagaaatcaaatggtgtggtcttggttatctacggtggatgtacccgattgagcgatacatgaagatcttaaaagggtatacanagaatctatatcttctagaagcatctattgttgagaggtacattacagaagaagccattgaatt

SEQ ID NO: 69788 - DNA, 229 bp, Glycine max
  unsure (1)..(229): unsure at all n locations
tcgattcattctatgtacccgtagtggtccacattgtgtttttcgcatttttattctcgntntgnttactttntataccccctgttgacgtgcttaagccattttacttaagtcatttctcgcttaacttaaaaataaaataaacttccaccgaacgtttgaattgtattatccattaacttcggctaaaataaattccgaccgttcggcgtgccgcaaccacgttgga

SEQ ID NO: 69789 - DNA, 167 bp, Glycine max
  unsure (1)..(167): unsure at all n locations
gctcgtgtctcttcatcgcaatctccattntcgatgcctttgtgaattgaatcnnttgatctggcctttattgtgtcccgaatatcgaatttcctggctattgtggagtttntgcaatggtggtatcaacattggcatcagcttttgactttgtcaggttgcccctg

SEQ ID NO: 69790 - DNA, 422 bp, Glycine max
  unsure (1)..(422): unsure at all n locations
cgacaataatcttttcctcggatgtctgtatgtgtctcgaatatatcgagacgctcgaaattgaatgttaaacctatgagccaattcaaacgacaataactttntactcggatgtctgaatgagtcacgtaatatatcgagacgctcgaaattgaatgttgaagctctgagcaaattcaaacgacaataactttttactccgatgtctgattgagtcccgtaatatatcgagacactcaaaattaaatgttgaatctctgagccaattcatacaacaataactttttactcggatgtccgattcagtgcccgaatatatcgtgacgctcgaaattgatgttgaacctctgagcaaattcaaacgacaataactctttactcggatgtctgattgagttccgcatatatcgagacgctcgaaa

SEQ ID NO: 69791 - DNA, 509 bp, Glycine max
  unsure (1)..(509): unsure at all n locations
cgcanaagatatgaaagggacaattaaggcagaaaaattgntgtatgtctaaatgtntagattaatattcctatgattaatgaatccatcccttctataatggaggtaatttatctagggataagtgtaaatgtttctgtaagtttgttaggggcattcgaatgtcacaaaatttcatccctgcaagctgctaccgcaatatgctcattgtgtatttgaatagctcatatgcttcctccctactggatgtgaaacagatattaatgtttacttggatggccttgaagcttatggcatgtgcagcaactntctacatcattaaagtgtatactgtacttgacaagaaactngagcaagttgattctactgtggctnnttggtctcgggaaagaattgaagctttttcatctatttttaaatttgtagggagtggaaagagcagattcatttctttgtgcctctattgatttcaaccatactagacctntcaagtattcatgggaccatgt

SEQ ID NO: 69792 - DNA, 480 bp, Glycine max
  unsure (1)..(480): unsure at all n locations
tcacatggagctacatctatgaagctcttaataaaattattattgtgcaaataaaccccanagaaaaatctggtcatggtttcaaaggcaaaagggttgtacatgatgaagaagtcactattttctatttttttttggaaaagtgggccatgagactcataagttcaaggacctccctaaaaagggcaacccatcaaaggttccatccaattcttatcaacgcccacaagctaacaaagaaaaagaacccaaaaagatttgggtacctaagatcaagataattcctattgtagacctccttgatagcaagaaagaaacactagtcatggtaccaatccatatgatagttgaaaaagctatattccaatccataagccttatgtctagtggggtggtcactttcaaagggaatcagaaagttngataactggtganggaaggtctgtattctcatatcctctataacaatgtttaattgta

SEQ ID NO: 69793 - DNA, 400 bp, Glycine max
  unsure (1)..(400): unsure at all n locations
ntaacctcatcgtccctcacagtctntagattngngatttctatttcttccttgtgttcggactctcagccacttatgatagccgccgatgatcccattactgcttcccctaagctctctgtcctttcttcacgccgcatcccatgccttgcgaactccttggagtaccctcgcgttgtggtcactgaaaccccgtgcgatgaaaggcgtgatgctttcgtctaatggcgctcctctcatgcggtagccaagctgtcttatggcgagaacgggattataattaatacaaccccttgttcccatcaagggagacattggacatccttcgcatgaagatagaatcttgattcttncttccttctagcgagggaaccaattaacagacgccccccccatgcta

SEQ ID NO: 69794 - DNA, 395 bp, Glycine max
  unsure (1)..(395): unsure at all n locations
actttaaactcagctcccatgtctgagtgggctcgtccagngaaacatctacttattctcttaagggttntctcaagntntaaatgatctttggatagatttttgaaatatctttgtaggtttttgtaaacttttgagagaatagatgagttagataaaagcttatgttaagtttttctaagagattcagggtcatcgaaatttacctcatcttcctgatttgattcagaaccctcagaagcgatatcttccatcagacatatgttggcttcttcattgtcttcatcggatgaggtgtcatccaggtcttcccacatgttcataagatccttcattctttagacttacaaaagaatattgtatcttgacttttctctagaattggacattcttac

SEQ ID NO: 69795 - DNA, 437 bp, Glycine max
  unsure (1)..(437): unsure at all n locations
tatgaaactcaagctgaggantatggngtacccatcacatgtggtactaggtggctgtcgggcttggtgcacaacaagntttccacatccacaatgcgcgcataaacccaccatcccctggtgcccacctccatctgagctcacgtactcccacgtagcccatattctcgtttctctcaacaccgggtccccatcaatcctctcaagcttccacaacattcaagcaaaacaacattcaaacagcacaagctatcacagccaaacaaaacaaggcaaaggcagaanactctgccaaacaccaaccaaatcacagcttttctcacttaaagaccccagtaacaattctttcgatcccaattcgtaaccggtggatcgactcaaaattctactggaggtctatagtacattatcctacattgtgaccgtnggatctacta

SEQ ID NO: 69796 - DNA, 422 bp, Glycine max
  unsure (1)..(422): unsure at all n locations
ttagcttaactcttcatgtagaacaacatgattaacattntatttattaaanacangcaaaattttaacgtattataacaaatctaatataataataatactaacaatgaatatttattcctttaaaaaaacattgagtatttatttatgatnttttaaataagctagcctcttgaatgacctaggacctaatttgttaactaaataggttctaataaaaccttttatttggtctaatttgagtctgatgtaaaataatgacgtttctgtaaaataaaataaaatctctatgcactnttatatagacagcacaacggtatttttaataattataacaatggcaatcatcttttatttgtgtctacggatggtactacatgggtggtgctaggtgcacccagcaacttctcattaattcaata

SEQ ID NO: 69797 - DNA, 485 bp, Glycine max
  unsure (1)..(485): unsure at all n locations
acacataaacctcagcttaagtacgtatgaactaaagcaaaacttattttttcttttctnttagaagatntaagtaatcaagcaaactntataatactatatatatatctatatatataccatcaaagataattcctatcttgtgttatgaaatccactntttctatattaaaagagaaaattaatatataatgacagcgtaattcttttaatattatcaattaataacaaatgaacatttatgataattgataaatatttaatttcataattaataatcttaaaacgaatatattataagccagatgactgacatggacatatttcgtatatatggtaattgataaatactacactacatcaacagatccattcattatttgattaaataagcgataaccaaactccaatcaatcattgaagattacatcataatgattaaaaattgtgacttatatacaacttattttataatttccttgaat

SEQ ID NO: 69798 - DNA, 377 bp, Glycine max
  unsure (1)..(377): unsure at all n locations
ctgatcatcacanaanattggcaactacttttatggtatttgaattcattatgggaatgatgtctaaatggatttgagggataaagaggtttaacttagctaaaaagatgtaactgatttgattgctatagttattgatatggtttaatgtttggcttattgtttcctacatcaaaggggatatggaaatagttaatgcataagcaatgaaaacaaaaggtcgcaccaactaagtaaggcaaggttggagtgttatagatcagctgaagcttacgggcataacaatgttaagctaacattgtgagtctactttctacaaactggcatangtgaaaatggaggcatatagttgtgttttcttcacattgtaagtctac

SEQ ID NO: 69799 - DNA, 441 bp, Glycine max
  unsure (1)..(441): unsure at all n locations
tctagagattataaatatatggccatggcatgtatttcaataatcaataatctatctttcaatcttctctcaacatcattcaatatctttcaactctttctacacaattttctgattcatttctcttcatttttctaaaagtttttgttcaacactttctcttccgagaaaagttttgtgttcaaaaacttgtgttattcatctttttcattctcttctctctttgccaaaagaatagaaggactaaccgcctgaattcttttgtgtctctcttctccctttgccaaaagaacaaaggactaactgcctgaattctttngtgtctctcttctccttacaaaagattcaaggactaactgcctgagaattctttngattctctccttcccccttaaacaaagatctcanaggactaacccgctgatatatcttttggttccc

SEQ ID NO: 69800 - DNA, 463 bp, Glycine max
  unsure (1)..(463): unsure at all n locations
tcatgcttaactatgtatggcaaaacttcattactgtntttcatgacatacaagtgagcttgtaacaaatcttctacacttggagtgatcacatgaagtcctcttgaacccttaccacctactctgtcatcatgccgagactcaggaagcccaacaggtttagccttctctaagtattttgaaccaaattcaatggcttcttctgcaatgtacctctcaacaatagatgcttctggatgatatagattttttgtatacccttttaagatcttcatgtatcgatcaaccgggtacatcctgttggacaagtggcctcagatatcttaagaagggggggtngaattaagatattacaacttatttcccaattaaaattctatctcctttctattcagtataaattccttaaaatgacttcttaatattgatcaatagacaattgaaatgaatataacaatataat

SEQ ID NO: 69801 - DNA, 481 bp, Glycine max
  unsure (1)..(481): unsure at all n locations
gcttctctgtactctaaggttatcatcatcatcatcattattatttataatctatnntcttcctatcnttgnntttttntggtgacgtactcttttacaaccaatgtataatgggttgatgaatagtggaacgatttcaaagaaatggaaattgttatgtntattaattaacatcatataagaaaattaggagagagtgacctcagtgtttgtgttgataaaaatgcagtaggatctagaaaataccattggtgatgcgaagaattatagttgtaaaagaatacaaggaaaataattaagagaacttttgagtgaatctgcataggctatttgaactctatgtctaactatggtaattgcaaaatgggcaaatcatgcatagatctatgtatatatgtaatgatncataaatgcactcttgcttctgcttgctgcacttatatgattatagttatgaatggcttactgcagtgaaatgaaa

SEQ ID NO: 69802 - DNA, 378 bp, Glycine max
  unsure (1)..(378): unsure at all n locations
cgacactctatagaactaatagaggcctattatagatcaatatatcccaaggccctgttggacttctctgggtccactangtgtcttgtatgcgctatccctgcaatctggtaaatagcgttagaaatcagctgagccatatgtacactcacctatgtcaggatggcgtagaccaactaacacttctgcaggctgaggtctgagttgtggccgctggggaaaatgttgctaagcagcaatgtcatccacatctaagtaatagtggtcacatgatccacacccgtctccccgctactgtccgagcaaagatctgacccaacacgcacaacaactatgcgatagcctcctcatcgaagcttgaggcctgactcctcatct

SEQ ID NO: 69803 - DNA, 348 bp, Glycine max
  unsure (1)..(348): unsure at all n locations
cggtaggaggggatcaagaagaattatattaataaatcttnctatatataatttaactagtttagaactattttctgttacacaataatagtacgtagttattatatcctagcaccctcctcaagccggagagtgtatatatagatagcactccccgctaggaacaactgctgaaatggagagaagtctacgggcattgtaaaaagtactgcatgctgatttgatgaagaattcgagaatctagaatagatgaaaagatgagactaaaggttctcatgaactatatgacaattgagggtggattgactatcacagcaaggaatagtgagggtgataatgggaaccatg

SEQ ID NO: 69804 - DNA, 208 bp, Glycine max
  unsure (1)..(208): unsure at all n locations
aactcatgcacaacaatgaagaatgaatgttccaagtntgatttttttttggagaagtaaagagataaggcttaatgcttggtccaaacgaaacttgtttacgcttaatgttgacaagatcgaattgacaacattaacgaccattttatagccatggtggacatgccaaatgtttgcatataaggggattgagcctttcgaatgtata

SEQ ID NO: 69805 - DNA, 420 bp, Glycine max
gacaagactatacatggtatcttccttctgtatatcaatatctctaagggctaccgtgtctacaacttgcaaactaagaaactcgtcattagtcgagatgttgaagttgatgagtacgcttcttggaattgggatgaagaaaaagtggagaagaacgttcttatacccgctcaactacctcaagaaaaagctgaggaagaagacccaggtgaaccaccttcacctccaccacaacaacaagatcaagaactatcatcaccagagtctactccaagacgagtaagatctttggtggacatatatgaaacctgtaacttggccatacttaaacctggaagctttgaagaagcgttaaagcaggaagtatgggtcaaggcaatggaagaagagatacagatgatcgagaaaaacaacacatgg

SEQ ID NO: 69806 - DNA, 435 bp, Glycine max
  unsure (1)..(435): unsure at all n locations
nggcattggacttgcngaaagcccactccatcattaggataattacctgccatctcaaacaaacaaatcaaacgtaacaagacaattataatcgttgtttgaatacctcacccactcaagtgtatcacacaattatggcttttctctaatgaaaacactcttgccttttaccactctaattcccttgagtttttaggcaattcaagagattatggccacaacaaagaataattcaccaatatgtgtaaggtaaggctagagagacaaggaaaaggttaaccgagaaaaaggctaacaatgtttttagacacaattgaaggaaatgaaattcagaatttatgaattcaagtaacaatccttcatacaaccaatatattaccttaaagaagttttntttttttaagttcttcaagcatgaaccattcagcccaattt

SEQ ID NO: 69807 - DNA, 487 bp, Glycine max
  unsure (1)..(487): unsure at all n locations
tggaccttgaacaagcaatcaactcctcttccataactatgccatgtgctcgcgactggtccctttcttcccttcgcaacttgagttcactattgctaccccatagagctccgcgaaatttgtttcggccatactcttccttgcgagccctcttggtctcttgttcaagggctcttgcggtaattgcattctcttcccataacccgacacactccttccgaacgtgtgtagcggccaacttgaacttctccttggcaaagtttgcctttcctaactcgcttttgagagcttggacttcctcgtcctcttccggtgcttcaaaattctcttcgctgacgacttttaacttggcgagccaatctaaacctcgtatgcgaactttcagccattcgtggacccaccaatgatgccattacgaacgcctctaagctcttgatcttttcttaacggngtttcccatgctnntatggatctttggatagtctgg

SEQ ID NO: 69808 - DNA, 461 bp, Glycine max
  unsure (1)..(461): unsure at all n locations
tcggtattccatttcgagcgtctcgatatattacgatactcaattggacatccgagtaaaaacttattggtcgtttgaatgtgatcagagcttcaacattcaatttcgagcatctcgatatattacgggactcaatcagacatccgagtaaaaagttattgtcgtttgaatttgctcagagcttctacattcaatttcgagcgttccgatatattacgggactcaatcggacatccgagtaaaaagtcattgtcgtttgaatttgctcagagcttcagtattccatttcgagcgtctcgatatattacgggactcaatcagacatccgagtataaagnttattgccgttgaattttctcagagcttcggtattccatttcgagcgtctcgatatattacgagactcaatttgacatccgagtaaaagtttttgtgtctgatttgatcagacttcaacatca

SEQ ID NO: 69809 - DNA, 469 bp, Glycine max
  unsure (1)..(469): unsure at all n locations
agcntgtaattttaccttatgtagataagttgacgtgacatgctaaaataattacactttttatcccatcttgactatcgaaagcatccttcaagtacacaaaaatacgttattgtaaattggcaaattgattgtacattatatacatgatcaacacaagtatgaaccacacatacaacaatgtaagggtaagttacaaaacaagcatactaaaacaagataaaacttaagaatttaaacatgatccactatcatcacatatagaacataacatatagaaattatacataaagaataagtcttagaatttccataatagagcatctcataataatcatcaactcatcaaccattacataaagattcaaccaacatacaccatcgtcatcatcagacatcaaagcattccatgaatcatcaagtaacactatcataaaatcataattattttatgcacatgtctaattat

SEQ ID NO: 69810 - DNA, 396 bp, Glycine max
  unsure (1)..(396): unsure at all n locations
ntgatgcaagctcctgtgggtccggataggtgctgcanaatctggagtaggctaaatatcactcccctggctccagaaccactggggtctctaagaactcgttaagagtagttgcatcaaactttatgagcttgccccacactttgacctatctcggggatttgtcttcaggatcaaacaggttagcatagaattccttgaccaaggccacattaatgtggttatctggctacctggtcaaggccctgttccacctacgtcgtttgagcttctttctaaactcgtcgtactaagtcacataaaggtccatattcctctctaggaggatgtttctggcatgaatgttctgctcgtaacgctcccatgcgatctcagacacaaacctagatgtgtcat

SEQ ID NO: 69811 - DNA, 376 bp, Glycine max
  unsure (1)..(376): unsure at all n locations
attcttggtggtgaaactccntcttncttgtcttattccctagtggatgaagcctcccttctcctcttctcctttgccttctgctgcatctccatggtgtaaaatcaccattgaaggacctcattgaagctcaaagatccagccttcatagaagcttcacaagcaagcttccatcaattggtaatcagagcacaagagcattaagtaagtgctcgctaaatctccattaattattatgctttaacttctcttccattgttgattcttcatatttctccatgtatctcctcacatgtcttgagcttaatgttgttaacatgattctttatatattcactcgctaaacttgctatagaagctagacttgatattctat

SEQ ID NO: 69812 - DNA, 348 bp, Glycine max
  unsure (1)..(348): unsure at all n locations
tactcaagcttctggattcattacgagcgtctcgatatattacaggattcagtctgacttcttagntaaaagtaattggcgtttgaatctgttcagagcttcagttttcaattacgagcgtctcgatatattacaggattcattcggacatccgagtaaaaagttattgtcngttgaatttgctcagagcttctgttttcaattacgagcgtcttgatatattataggactccatcggaaatccgagctaaaagttattgtcatttgaatatgctacaggggatccgtttcaactatgagcatctagatatactaccgggcgcacacggacatccgagtaaaaatgta

SEQ ID NO: 69813 - DNA, 492 bp, Glycine max
  unsure (1)..(492): unsure at all n locations
gggagggggtgatggngacccggtgctgagaggaacaaggagatggactacttatgtgtgcgtgagctcaatttaaaggtgggcaactgcggatggtgtgcttatgcctgcgcttgtggaagtgggatatttgttttgcgccatcgcccaattgccacctagtaccacatatgacgggtgctccataatcaaataagcctggtgtgagaaagcgtggaagagtcagtcttcctacttttatttgttgaccacagagtggtacctggagatatgtcgcggcggtcagaagaccttggggacgtcaggtggggtgctattgtccaaaaccaagcttggccaatcccgacgcaacccgagcatagtcagccagtgagaacctgtgacgtacctaagcatgcgagctcctgacagtcaaccaatataggaacaaaagtccacgaagcatggaggcttgtgtggctgctgaccagctattatctgggtgtatctgaa

SEQ ID NO: 69814 - DNA, 493 bp, Glycine max
  unsure (1)..(493): unsure at all n locations
tatgcgcatatttccttacgaacgttcgcttgcacaagacattcttttatctatacaaatgcacccatatacaatcaaggcagcttcgttacctagattatttacatgtacttccaacgtgtatttgttacttacatcacacacatctccttggctaaatttacatccatgcatactcaaagcatnttggggtaccaaaaattgcacatgtgcacatcttggtatttctaatacctatacatacacaaacttcatgatgaatattgactatctacacaatanagtgctacatttcatgcgtctttcaagtntttgctacctaaagtcgcatgcaaattcaagtatattttcctttgctgactaaaattgtattaaaagggatatatntcttttgtaatgattttcttacataacatgcacatattatatatatatattttgtgagacatttactaccaaaatatatgtcatacatcagtatttgtatctacca

SEQ ID NO: 69815 - DNA, 409 bp, Glycine max
  unsure (1)..(409): unsure at all n locations
ggagagggtaatgaaacaacgagatgatgctctccatgatattgtggatcaaanggagaatagagggcatatgtaatgctcaagagcttccattgctcaatttagagcgtctagatatataatgcgcctcaatcggaccttcgagttaaaagatatgaccatttgacatgcttaagagcttccattgttcaattttgagcgtcacgatatattatgcacctgaattggacctgcagagtgacaacttatgaccatatgaattgctcaacaacattcattggcgatcttgagcgtcactattattatgcacctgaaacggacctgcgagtgacaacttatgacgcttggaattgctcaagagctttcatttgtcaatatctagcgtctcgatatataatgcgccgtaatc

SEQ ID NO: 69816 - DNA, 432 bp, Glycine max
  unsure (1)..(432): unsure at all n locations
cgaaggcatgtaacccactatctnttcatagtagaacaccggtttcgtgtctactatcattattatcatctcccactccatcattgngggcactacttgagctgccagatccctccatctttgggcgtattctttgaaagattcatgctccttcttacacatgttctatagctgcattctatccagagccatatgagaattgtactgatactatctaatgaaggcaaccattatgtccgtccaagaatggactcgggaaggttctagattagtatataaggtaacgactgccccaataaggctttcctggaagaaatgaatcaacaatntttcacttttcgagtatgcccccattttcctgttgtacatcttcaggtgattcttggggcaagtagtcccttcgtatttatcgaaatccgcaccttgaacttc

SEQ ID NO: 69817 - DNA, 469 bp, Glycine max
  unsure (1)..(469): unsure at all n locations
tatgctgcanacatctacaatagacctcctcaacctcagcagtttattcagccacaacagaacaattatgacctccccagcaacaggtacaatcccgggtggaggaatcatcccaaccttagatggtcgaatccttcacaacaacaacaacaacaacaacaaccttgttttcagaatgttgttggcccaagcagaccatacgttcctccaccaatccagcatcaacaacaacaacagcaacaaccccagaaacagaaaacaattgaggctcctccgcaaccttcccttgaagaacttgtgaggcaaatgactatgcaaaacatacagtttcaacaagagaccagagcctncattcagagcttaactaatcagaatgggacaatggctacacagttaaatcaacaacagtcccagaattctgacagaataccttctcaatctgtccagaatcccaaaaatgtgagtgtca

SEQ ID NO: 69818 - DNA, 429 bp, Glycine max
  unsure (1)..(429): unsure at all n locations
tagtactgaatgaagtttattctttctctaatgagtatcatactttataccctctntatctcttctcttgtagtttccatagcagccgacaaatcatccaattcacagtttcagtccctcagtcatgaagaaaccatagtttccccaaatggagtctttgaacttggttntttccctctgggaaattccaacaaaagctacctcgcaattcggtacaagaactattcggatgaaacctttgtttgggttgcaaacggttcctacccaatcaatgactcctcagccaagttgacactacacagttctggcagttntgtccttacacacaacagcaatcaggtttggtccacaagttctctaaaagtggcacagaatccattggcagagctattagactctggcaaccttgtgataagagagaanagtgaa

SEQ ID NO: 69819 - DNA, 433 bp, Glycine max
actcagcttaatatcttcttcatccggatcctgatactgacccaataacttcttgatgcattcatgcattatcctttctgtcaacattttcttcttatatagttctccaatcaatctgatattacccaacatacgtcttcttgccttggtacgtttctcttctctttccccattagacagcttgacctcaccctcatcaaccttattagcttcttcttgctctctttcacccctctcaaattcttcctggcacttgtttaacaataatctcttaaaagttatcttttcattgtcttgactgagatcaggtaacgcagctgctagatgaaaacagaaattggcatacatttcacagaaggtaggctccatcaaggccttctcacagaattgtgagatgacaccattgagagtgacaacattgtcaatattaact

SEQ ID NO: 69820 - DNA, 433 bp, Glycine max
  unsure (1)..(433): unsure at all n locations
acagccataactattgacatggtgttacttttgaggcccatgatatatcgagaggctcgaaattgataaatggaagttctcgagaaattcaaatggtcataacttttaacttggatgtccgattcaggcacataatatatcgagatgcacaaaattgaaaatggaattctagagaaattcaaatggtcataacttttgcctcgaatgtcagattcaggcacataatatatcgagacgctcgaaattaaacaagatagctctggtccaattcaaacggccataacttttgacatgagtgtatgattgaggcccatgatatatagagacgctcganattgaataatggaagttctcgagaaattaaaaattgcataacttttcactcggatgtccgattcagacacataatatatcgagacgctcgaaacttaac

SEQ ID NO: 69821 - DNA, 398 bp, Glycine max
  unsure (1)..(398): unsure at all n locations
ctaagcttagcacaagaagaatatgactggaaaaagatagattcttatataacacanaaacatgattcaagagtagatctataaaatttgaaccatagaaatacaagaacaagtgtagatctaagatttgattggcttctcccaattcaattaaatttctctcctaacacacacacacacacacacacacacatcaaatagtgcacttaatgcatgtgaaattacaaaactacccctaatacaaaaactagtcaaggcgccctaaaatacaaggactaaaaaatcctacattactagggtacccttcctacactatagagccctanatacaaggacgcaaaataatgaaaccctaatctaatatgtacaaagataagtgggctcatacttagcccatg

SEQ ID NO: 69822 - DNA, 494 bp, Glycine max
  unsure (1)..(494): unsure at all n locations
ctaagctgaagaggagccggtttgagagcttgagaagaagttatgggttattgttatatccaagaggtgaaggagacatcctcaccacttgtaacttttcaatctttcatcttggtcttctctttggtggtaagaaggcttcctggtatggaaagctaaatcctctgttggatcttccctgtaggtacctgatgtaaatacatttctatctatntaatgatgttttgtgtgttctctgtgctatcttcttttcattccagtatgcctttatcttgatcacgtagatgcatgctntgttagggtcattcaacagtggaaagtggtctgactctanagtccttgatagtgcagggctgagttgtcgtgctttcacgaggaatngnnngtgcgataagtcagtgagtatgtgtgtcttaatgcnngcctggttgatatagaatattctttttagcattangcacctattaccgaaaacaatgtggtttctacttgtt

SEQ ID NO: 69823 - DNA, 205 bp, Glycine max
  unsure (1)..(205): unsure at all n locations
ctaagccctagccaatggacttaccttgaattaattccttngatagcctttanngtgcctatgttccccttactttgttntgaagctcattacaagccttaagtgaaaaaccatgatatcaccttacccttaaggaattttggagcttaggaattgttttgggaataagtgtgtgtgtgtgtgggggggtnttctcccctcttca

SEQ ID NO: 69824 - DNA, 422 bp, Glycine max
  unsure (1)..(422): unsure at all n locations
caacttcactattcctagttagaaattccaatattctatattacctgctcattagctgtaggaggaaggcctccaacatacacccgcctagcatgtcatgtagcctgtaaattcagtacatcaaagataggccataatcagggaaagtcatgctaaacttaaaatgaaacttaaataagactgtagtcagtctcagcaagcctccatactcggaaagactaaacttaaaatgttgtgttgacgaagttagtgtgtttctactctttntctataatgactctttttcttctcaatgaaagagaatattttctcccagcagcacagtgatactaaacaaacaaaagcgcaatataaagatacacatgttaaaagaagacagaacacacctttcacctacagcagcacatgatactgtaatatct

SEQ ID NO: 69825 - DNA, 467 bp, Glycine max
  unsure (1)..(467): unsure at all n locations
gaggattatggggtacccatcacatgtgtgactagggggcgtgtcgggctanggtgcacaacacgntntccacatccacaaattgcgcataaacccaccatcccctgttgcccacctccaactgagctcacgtactcccacgtagcccatatcttcgtttctctcaacaccgggtccccatcaatcctcccaagctttccccaacatccaggtaattcaacatccaaatcatcacaaactaacaaaccaagcaaaacagggcaaaggcagaaaactctgcccaaaacacaactcaaaatcacagctgttcacatacaaataccccagtaacatcttcttcgttcccattcgttaaccgtgggatcgactctaaaatattactggaagtctctagtacataagtctacattttgactgctgggatctgctagcaacatccagaactattctgcactactctctcacaa

SEQ ID NO: 69826 - DNA, 364 bp, Glycine max
  unsure (1)..(364): unsure at all n locations
ccgtactgacatgttaagggactcaatcttacatcttaganaaaagatattggcagaggagctggctcatagattcaacattcaatttcgaccgtctcgatatgttaagggactcaatcagacattcgagtaacatgatatggtcctttgcattggctcagagcttcaacattcaatatcgagcgtctcgatatgttactggactcaatcagacattccagaaaaaagttatcggcgactgagttggctcagagctataacattcaatctatagcgtctcgattgttacgggactcaatcagacatccgagtaaaaagttattgtcctttgtattagctcagagctgaacattcaattcgagcg

SEQ ID NO: 69827 - DNA, 355 bp, Glycine max
  unsure (1)..(355): unsure at all n locations
ctcatttctgatatgagttaatatttttctttnggttatattactgttatgancncattttccttctttttaggagatatgactatgtccacattgcggttcctttctatttggcaattacattagatacataatacattcttgacattaaggctcttatttacgtcctaatttgttntaggcactaatgactttgcttcttgttagtttatgctctttcattatangctgtggttattgacaaggaggattcttttctcttttggcctcatttaggaccacgttcatagtaccatgtatctcctaaattttttcctctcattgttttcttgcatcactgcaaataaaatgcact

SEQ ID NO: 69828 - DNA, 192 bp, Glycine max
  unsure (1)..(192): unsure at all n locations
actattaaactcagctaaagataatctatgacttgaaacagcctccatcattggttctgatgtttcatgatgtcatcacttcattnnggcttgaagagaacatcatggatcaatgtatatcccanaagatcagtgngagtaagaattgctttcttgtgttatatgaggatgacattttgcttgctactaatg

SEQ ID NO: 69829 - DNA, 370 bp, Glycine max
  unsure (1)..(370): unsure at all n locations
ctataaanagttatatcaaatgtcacaatgggtgattgagaattggttntctgtcccaaagaaaattgaaaattaatcatttaacanaaaaaaaggctcagttgctgaaaaaataaaataggatgtaaataagtctaattccattcacaagaggtatcttaattcataaagataaggataagacctcacacaataaagaaacatttatatataagtaacttgttaagccttgatatagaattggttatgcaataaaaataggtcagggaaacagcttatgatatactatcaatttccaccgatatatctgctatgtaatctctattctccttctgcaggcggctaggactgttcctaacaataagtgagt

SEQ ID NO: 69830 - DNA, 398 bp, Glycine max
  unsure (1)..(398): unsure at all n locations
actattaatactaagcttcacatcagaccacttccagngtgctggaactacttcacatgtttttgatgttgcctatgcaggttgaaagtcttggaggaaagaggtatgcctatgttgntgtggatgatttctccagatttacctgngtaaattttatcagagagaaatcagaaacctttgaagtattcaaagagttgagtctaagacttcaaagagagaaagactgtgtcatcaagagaatcaggagtgaccatggcagagaatntgaaaacagcaggttcactgaattctgcacatctgaaggcatcactcatgagttctctgcatgcattacaccacaacagaatgggatagctgagaggaaaaacacggacttgcaagacgctgctcgtgtcatg

SEQ ID NO: 69831 - DNA, 119 bp, Glycine max
  unsure (1)..(119): unsure at all n locations
tctgctctgcttgttgtatgggcaagattcatagatttccttctaagctctctcaaactgtatacagttctcctttagaattaatatacagntgattgtggnngtctgctcctatgaat

SEQ ID NO: 69832 - DNA, 269 bp, Glycine max
  unsure (1)..(269): unsure at all n locations
actgnctatctctacctatattaaagtgtagtacgccacaccctggaagaggtgatgatggtgcaatcatttcttattttacttgaaaattgaaagtctacttatcaaaattggcaaagtcacatgaccaaaaagaaaattacatgagctgtgattaaattgttaacatgatattttatttggcaggtcttattctttggaatcagacacggcatgcttggataggaaataaatggtctctgatcctcactgaacacgtgcgagatccc

SEQ ID NO: 69833 - DNA, 269 bp, Glycine max
  unsure (1)..(269): unsure at all n locations
actaagcttgatcatattagccttaaaagaaacccaatatgannttttgattcaangccaagaaacttcaagcatttagaaaacatctcacattgaataataaacacaaaaaacataatcaaacccacttaccccaagcaatatcatcgacacacgatcctgtttggatgtgagaaaattaaaatctgaacatcacgaggtctaatcctccatatctttggtattaccacgcaccttcgncttcagactcactccaccctcactctgtt

SEQ ID NO: 69834 - DNA, 306 bp, Glycine max
  unsure (1)..(306): unsure at all n locations
tattcttgcagcatcatatatatgagcatgcaacatgtttagtttttctgcattntttttaattaattgttccatattccatgataattaattcatctcatggctttataatgcggataattaattgttccatattccatgataattaattcatttcattcatcttttaattntgcagtattggttaatccaagtttttntgtgttactacaagaatattgtataagattcaaaattgtttaacattaaaactatcttgattatttaatcatttaatattcacacaagatattattatatatttta

SEQ ID NO: 69835 - DNA, 165 bp, Glycine max
  unsure (1)..(165): unsure at all n locations
cttcctttgcagcatattcatatgtgtcgcaacctacccttcgtcgtgagggcgactgtcgtgactcgcgggtgcgtgttccaaganaggaataagcgcggagtcgccaccaacatttatttgaggaaaacgtcggaaaaactggaaaagacgtgatctacgaac

SEQ ID NO: 69836 - DNA, 268 bp, Glycine max
  unsure (1)..(268): unsure at all n locations
ctaagctatanagttgatgttagactgccaggttagttagttgaatgtctttctctgtgtttatctgcatgctctttcttctntgtggggttttaaatatagacaggcagcatttctgaaatattatgtatgttgaaactgtaaggacacagaaaacggtggaatttcagacaggccagatgatgccgtggatgtctttcatacattcttcggngcggctgtgagagtacttccatcattttgcctttttttgattgatctgttgagc

SEQ ID NO: 69837 - DNA, 444 bp, Glycine max
cttggcttccgtccgactatccttatattcccatgcttttgtattatttccattcaaccccactagggggacacatgggtaaggccaagaccctcacaacgactccaggataattccttctgggacagtatgcgccgtgacgttcaccgcctggtctcagagtgtcgcatttgtcaacaaatgaagtataagagtaagaaacccatagacctcctccaaccaatacccaccccttcaggattgtgggaggatttatccctggatttcatcactgggctgccgccgtcccatggattcacgaccatcttgattgtcgtggacaggtactcgaaaggcacccatcttggagtcttaccgccaaagtactccgcccacaaagtagtcagcctctttctcgacattgtctgcaagttgcatggcttcccccacaattggtgccgacag

SEQ ID NO: 69838 - DNA, 416 bp, Glycine max
  unsure (1)..(416): unsure at all n locations
ttacgtactcctactatagtttttatctttctcataatagaataaggtacaatcaatgagaaaaccaggaacaaatgtattccagtnataacctacaataatacattaagaatacgttgtccggattagtttgtgtaaaacaagaatcaacttgtcataagtttgaattttcttgtgtcaggtgaagtaatgttaagtgaaggtcaaagtaaattaatcaaaataaccttaaaatatgtcatgggatcataatagtatatatataatgtaagaatttttctttaaattcttgaacggtaagccatattggagtcaaaggaaacgtgtatagaanatttcctatatccaaaattctcaacccggcatttttattgtctatatttaactttctatctaaactctgatgtgctatcatg

SEQ ID NO: 69839 - DNA, 463 bp, Glycine max
  unsure (1)..(463): unsure at all n locations
cgctaaacgtagagaaagaaagagtgaaacaaatcgtttatctgttgccatgatgcnttgctttgctctgttatgttgtttaagatttaaaaagtcaacgaggaaataagcttgattntgttttgcaggaaggaatgtggaaagtttgagggatgaatttgttggaggtaattgttaaaagcagggagggaagaaatgaaggtagggaaaaattgtgtagagagtggttttaggcagggttagctactacctgttgctttaggcgggtaaaaattgttaaggctgggattatttcacaatagtctctatatgctgttatttatcttattttctctggtgtcctcaatttcgatagtaaggagttnggctcccatttacatcaatcaataagaacctatcagttcatttccaataaaatgaaaactgtaatgaataacaaaaagtgatgcaatacagaatctta

SEQ ID NO: 69840 - DNA, 442 bp, Glycine max
agcttaacaaacttagaaatcaagtgttcatgtattcctaaatatagggggagaaaacggatgcacattttatctatatacaattgtttgttgcttgcttgaatcttgatttcaggtattgtattgtcatcatcaaaaagggggagattgtagatgcaattggttttgatgttttgatgatgatcatgatgatgtgttgcaattgatgcaaatgggcttttcaagattaaaaattcaagacaatacttcaagattacaagtcacaacatcaagatgatcactataatattaggaagggaattcctaattgaattagcaaaggtttggccaagtgatttaaaataaaagtgttcttcaaaggttttattctctggtaatccattaccagaggatgtaatcgactaccagtggccaaatacattctattacagctataaaaatt

SEQ ID NO: 69841 - DNA, 484 bp, Glycine max
  unsure (1)..(484): unsure at all n locations
cactattatactaagctgcctaattaacctaaattgagaagaaatgattattattcacttaaaatggatgtactaagtatttattacctatacttaacagaaaatacttataacactacaaaataaccataaattggaggagtttgatacaatttacacaagtttatacacaaaagttagtcgtattgaccgagtaacagtgctgtagctacgcttagtggtaggtgcgagttgagtccataggttccgcttagcgcgattgctcctttaggcacttcaagactttagcctcttttgatttgaaattttacagattntatcattaattccaattaaagagactccaatgacaggtatctagacatatcaagaattatttancaattcctacaaaagaactataaattgnggaaactatacatgttntgaaaaaagtttttatacaanattagtcgataagacactaacagagcttccttgcatg

SEQ ID NO: 69842 - DNA, 499 bp, Glycine max
  unsure (1)..(499): unsure at all n locations
tatgcgcatatttccttacgaacgttcacttgcacattacatcttatcaactaagaaaaatgcacccatatacaatcaaggtagcttcattacctagattatttacatgtacttccaaggtgtatttgttatttacatcacacacgcctccttggctgaatttacatacatgcatactcaaagcattntgnggtaccaaaaactgcacatgcgctcatcttggtatttctaatacccctacatatacaaacttcacgatgaatcttgactacctacacaataaggtgctacatttcatgctntnttttnntcaagttttgctacctaaagccacatgcaaattcaagcataaatttctttgctgactaanattgtattcaaattacaaggcatatattttttcgaataatgtttcttcacataacatgcaacatnattatatcatatttttgtgagacattntgactaccacaaantatatatacatacatncaagtat

SEQ ID NO: 69843 - DNA, 406 bp, Glycine max
  unsure (1)..(406): unsure at all n locations
cgagctntctagtcttttattggctctgggtgaaaacttatttatgggaatggtcagtaactaattatatatgtcctgaatttggctactaccaataaccgctgataaaacattgtgatgcatttaaatactgaacttagaaactaatttcctatgcatatttttggtttcttttcaacctgacaagactttatgcactattaaggaacaacttgcagcaatagcaccaacaatggaacaattatggcaacataaagaggaaagaataaagggagtttcagatgtagagttacagatccaaagaatatgtggagagataactgtggactcgaaccctgatcagaccgaatcaagatcatttgcagttgacgacgctgactttgtcatgaagaagatggatgaatat

SEQ ID NO: 69844 - DNA, 241 bp, Glycine max
  unsure (1)..(241): unsure at all n locations
gtcacctgccgcatgcaagctttaactagacgatacctcatacaaacttaattcttcatatatattgtttcgcaaagttttgtgttggcgcttaacttaaataccctcacactgagagttgtttctctatataaataaactngtatatgaaatcttggagaggctataagacaaaatagcactttggattttattatctggggtataaaacagtgttgaacgcctgagagtgctgcaaaaa

SEQ ID NO: 69845 - DNA, 482 bp, Glycine max
  unsure (1)..(482): unsure at all n locations
cgtagaatggctagacatgatacatgtcnaggtttggttnggctcaaagataaaatggatgccccacattatttgcatgacacaaatgcaaaaatgatgatttggaaattntatgcaaaactggtcatgcatgcacctatgtggacactcaagtgtcaaatttttatggtcatgtgatgctagggctcaagattcatttcctctattntaaatcaacccaatgtttccaaaatatgttcttttatcaatntgtgcattcatccgagtccatttcgggcgtccggggaaaacttcacagcattcacccttcaggtgtatacacatttttttcaaaaactagttatgatcaatgagattttttcacagaaaaagtggaaatcatctcttttcaaagcatgtcgggtttagctagacaactatgttctttttctctctttttttttattggggattcttttctggggggtttttcttcttttttt

SEQ ID NO: 69846 - DNA, 465 bp, Glycine max
  unsure (1)..(465): unsure at all n locations
gctcgccgctagagctgacccatcaactgccctaactcttttagactgttgatccctaagctcttgaccttgacttgatagaacctctttttaagcgaaggcgtttgacttgatcccatgttntactaaagtgaaacaaaatctagtgcgaatcaaaactccgacatctatcatgggtggaatggattaatgcatgaagaaatgcatatgatacagatgcaatntatgaatacgggagcccgggaaattgtctccttcttagatacaacgtcttgtggtagcacagtgcccgacgtatgtatttaaggtgacatggaccctccgttggtttgccaaagagaggggatcaagacagaacccgtgaacgatgcatatgtgaaaggcacaatacgtggatgtacatagtacggaaatattcacaagcaaatataagaaanagggtacatgacacttatgcatggcagt

SEQ ID NO: 69847 - DNA, 331 bp, Glycine max
  unsure (1)..(331): unsure at all n locations
ctggtaatcgattacaagaatctgggaatcgattaccagagagtaaaaactctggtaacttagataatctggtgaaaacttctttcgaanaacagaaatgtgctatgtttgtttttaaaaccatctttcaatactttccttgtgaagagcttcttgatttcttctcttgaatcttgaattcatcttttctttgaatcttgaaatcaaatttctctcgaattttggaattggtcttgacttcattctgaaaacattctcttgggctttttgtgcatcattttggttatcatcaaaccacctggatccatcttgattcaacattgtggagctt

SEQ ID NO: 69848 - DNA, 467 bp, Glycine max
  unsure (1)..(467): unsure at all n locations
gtgtggaaaggtgagactttctacttttattcgntgttcacagagtgatacctggagatatgtcgcgggggtcacgagaccttggtgacgtcaggtggggtgctattgcccaaaaccaagcttgaccaatcccgacccaacccgggcatagtcagtcagtgagaacctgtgatgtacctaaacaggcgagctcttggcagtcaaccgataaaagaacaaagaccacaaagcaaggaggcttatgtggtggctggccagctgtgaatcttgagtgatatatgggatatggcctctggtaatcgattaccaaaggtgggtaatcgattacaacgcttaaaaacgagatcatgaagctaagatggcttatggtaatcgattacaaaggggcgtaatcgattaccaggcttataaataggactggaatgttgaaggggcctctggtaatcaatcatcagtgctgggtaatc

SEQ ID NO: 69849 - DNA, 501 bp, Glycine max
  unsure (1)..(501): unsure at all n locations
tcacncttcgtcccagacttagtccaaacttatcttcttttaacttctcatcctctagccttcaccacttctctcgcacctctatttcccatctccttccttcctttttcgattccagttgctagtcattataggatctccattggagctcatgcttccaagaagatataacatatgtcaacctatatctaaacatgcaatccaacttcatataaattttttcataaaattagtaaatactcaacaaaatatcatggtggattattcgtacttccattatgatggttcgcttatcctctacgaccaccaaaatgggtagtgagtcatataccacctacatcttcctcactacctcctctctatgatgaatcagaacttatggcgtatgtggtatgtttaagggtgtcatcattggtagggtacatcatgcaaatgcaaaagcttaacgtcatagctttcatggaagtcaaggtcgaccctgtgcatagcttaacgtcacaa

SEQ ID NO: 69850 - DNA, 290 bp, Glycine max
  unsure (1)..(290): unsure at all n locations
acgtactcacacgtggcccatattcatggttctctcaacaccggggccccgatacttctccccagctttccatcatccacggctacaacatacaaacagtacagactatcacaactagaaaacatggcagagcggatcacggtgacactaacaccaaccaaaacttcaggtgttttcacttaaagaccccagtcacaatttcttcattgcacttcgntaacggcaggatcgactcanatattttactggacatctgtaggacatgagcctaccatatgaccggtgcgatc

SEQ ID NO: 69851 - DNA, 461 bp, Glycine max
  unsure (1)..(461): unsure at all n locations
tcagcaccattaaaggtaaagactcttcccgtggtctntggatgtctagttaggtcattcgggcctccaccatttggctctttcttgggtcgtgaacaatctctctgagtgtgtcccttttttcaacaattaaaacatgttacgcctatatcgggacaattcgaggagatgtgccctggcttaccacacttgtaacaaatgatatgagtggagaacgtattgggtttgctaccgctaccacctgcaaatcccctagcaatagtcctctgattgtcatggcagttaccatattgcttatgaggaatcgaatatggttttcctcgatgttgaggctcattctttttgttcctcattggacctgtactcctatagtaggccgccctgtctcgggagtcttcatcccaaattcggcacatattaaccaaaagtgtgaactgacgaacaccttggtaattcacagc

SEQ ID NO: 69852 - DNA, 374 bp, Glycine max
cgactgagcatgcacatcgtggaccagacagcaatctcttcttcttgagaaccatgctacgagcaggcgactggtcgctaggcgaccaacgcaaccggaggtcactattgcaaccacatagagcgccacgaaagaagatccggccttactcatccttgcgagccgtcaaggcctcttagacaagggctcttggaggaagagcattccctacccggaacccggaacacaacttccgaacgagggaggcaaccacctggacactctccgtggcgagtgctgcctgccctaactcgcttttgagagcctggactcaacgacctctaccggggctaaaaacacgcgaggtgacgacgtaaacttgcgagccaatgtaa

SEQ ID NO: 69853 - DNA, 474 bp, Glycine max
  unsure (1)..(474): unsure at all n locations
ctgtagagagcaaacattatcgctttatagaattttgtataaaattattttttgataataatcatacaaaaataatgttgtatactgcttcataagctactcataanatattagattcagggtaagtagaatttgttttgccaactcaaaacatgaatagatgtatgcctctgaatgtgtaaagcagtttatcaagcttgaaaattcttatatcaaagatataatcattttacaaagtaagatgctcaaggaaataattcaaaagcacacaaatcataagcaataagaagggtaaaacacacaaaggaattatcctagttcactccacctggtctttgtctgtccctacaattgtaaagctgttcactaacacaagcaccaacttgatatttttttttctttcctaaagccttcacatgatcctacaactcattattctctatgtctctgtaagttatctccccaagtattctt

SEQ ID NO: 69854 - DNA, 455 bp, Glycine max
  unsure (1)..(455): unsure at all n locations
tgctgcatgcaagcctggctcacttcacgcttaagctttatatctattctctagcttacttgctctgtgcacgtcgagtgacttaagccaagtacaacccttcattaagaatggctcaacctatgcttaaacacggctccacctacacttaagcttgaaaagctggagtccattatccctagcaggttatgatacacaagaatgacgcatccataagactaaaacctaatcttcctctcgttgtgcaaaaaaagaccatgactcacagcaccgattcaaagaatactcaacccatatatacacattacacagctctcaaagaatcttcaatatatctttcttgttatggaacaatgacaatcacctatntagtgaacatcatagcttttacatccaatcttcattattggcatcaatgcctcatctgctctaaaaaacaaaaggatatggagtag

SEQ ID NO: 69855 - DNA, 473 bp, Glycine max
tctagccaaatggacttaccttgaattaattccttttatagcccttttgagccttgtttccctttccttgttatgaagctcactataagcttctagccaaatggatttgtgcagggcattctgttatgctattcattattcaaagcttttgttttagggttttcgtttttctgcttgaggctactgttcacgtaatgcaattttacgttttctgcttctaattacagctacgttcttgcttcttcttctatattcatttacgtttctgctcatttacgattctggttaaaggctcattcgcattttctgtttgaatccatggaaggctagattttctggtgttgcttccttatgaagacgaagcccaactctctttgaagttttgcttgtaatgtggttcctggcagtcttccttaccagtatcccaatatcgtgaacataatcagtgcacgcttcgtgttcgattaatagcc

SEQ ID NO: 69856 - DNA, 266 bp, Glycine max
aacatcacacacttgagaatggaaacctattaatactagatgctttgaagaaatgagtaacgaacctacacgctatcactcaaattctttatgtaaaaaactctttgtatattcttataaagtgttgaaagctctcaaaacatcttgaatactctaagacaaaaaactaaatgcttagaatttacattctgtttgtaagatgattaagatttattcagtttgcaaactcaacaacatatttttctatttgtattaaaccaacagtg

SEQ ID NO: 69857 - DNA, 463 bp, Glycine max
  unsure (1)..(463): unsure at all n locations
gaactattaaactaagctctgaggtctttttatatgtatcctcggaatgtttttgcaaaatgtttcatatgatgaggcaacgaaatctgctgtttcatatggaaagttttcttccggcatgaaaatagtttgtagatactacaaagtattttaaaccttggtgtgagttagactaatatagatacactatagtatttgatgatacactgcaagtgaaatggtcatccatttattgttctattaatgcactcacaatgtctctacatgattagctgaagatttttctatatgatttggtcttctagactacgccttgtcactggtatatgctcanagatatctttgatactctttcgatccacttttaagacttgatgatcacttctttctcttcagaaagtaatgatgaggaggatcaccatgagcactggaatggatctatgagtagaagtcagtcaaaaca

SEQ ID NO: 69858 - DNA, 376 bp, Glycine max
agcttatgctgactataatacttgtattgatttctgtgttccacgcgtatgatggaatgatagttggagaacattcacgggatacagatcttgatgtaagaaatattcttagcttgaatcaaattgttatatcaaagttggcgactcactgacgaacactgagttttcatgttaatcctgagagggctatagaacttacaaatatccgtgctgcctcctaagaggataatgtgaagctgactctccccgcgcccttgtatgtattaatccgacaaaattatgctcttacattttcctcgctttaaaatgagaatgcttattactacataaccaaggaagggtcatgcattttatgcattcatgcatatgattattc

SEQ ID NO: 69859 - DNA, 471 bp, Glycine max
  unsure (1)..(471): unsure at all n locations
ctgtggcaagtcagtggttgagggacaaagctggacggcgaagttgatttgtgagattcataatcatgaattggtcaagtcattatttggacatccatttgccggacgattgagtaaagctgaaaagacacttattactgatatgacgaagtcaatggtcaaaccaaaaaacattctgctgactctgaaggatgatggctatgttggatcaattccagccatttatgcacgaattcattgataatattgttgatgtcagagctgatggaaatngtggatatcaggcggttgccggtttattaagtatgggtgaagagtcttggtcgttgatccgcacccatctgcttatagaacttgccaaattcacacaagactatatcaaactctgtggtggcacagaccaattcgaggatctaaggatgtcactacatgttgatgggttaccacggatttaatttgtgtttttatttt

SEQ ID NO: 69860 - DNA, 306 bp, Glycine max
  unsure (1)..(306): unsure at all n locations
tcatgcatgtgtnngttgcattgttcttctctccaatttagccggggttccaactcagggttnttgttttgttctttcttttataagaaaacaattatactntggcttggagagggtagcaagggataaattaatgtttgngatgaagaagcacggccatgtgtcattttaaatcttgactagagactctttatatttggattttgggacanaacctctgataacacgctccctgatgtttttctctttttttattatattaccctaacttttgcctangcccgccttttgggatttcaacctact

SEQ ID NO: 69861 - DNA, 491 bp, Glycine max
  unsure (1)..(491): unsure at all n locations
gctcgttccacatcattcgcgtgtatgatatccactcgacaagggttgaagtagaggataccttcaatcctataacgcaatgtggcgaacaaaagtgggcagttaacttgaatgaccattattgtcaatgaggaaggtattttgcgcttcactatccatgttcacacattattgtagcttgtggttacatgagcatgaactactaccaatatataaatgttgtttacactaatgagcacatcttanaagcatactccgcacagtggtggcctcttacgaatgaagcggcaattcctccttctgatgaggcatggacactaatccctgacccaactacaattcgtgcgaaaggtcggccaaaatcaacaaggataaggaatgagatggatngggtcgaaccatctgaccaccgacaaanatgtagtatatgtggagcataagggcacaataagcgccgatgtccaatgcaatctgatcgtgggagtaattca

SEQ ID NO: 69862 - DNA, 385 bp, Glycine max
  unsure (1)..(385): unsure at all n locations
gcttgaatcggacctcagtgtgagaaggtatgactattttgttttctcgagagctttcgntgatcaatgacgagcatctcgacatattatgcgctcgaatcgaacatccgtgtgaaaagttatgaccatctgagtttctcgagagctctcgtggttcaatatcgagtatctagacctattatgtgcccgaatctgaccttcgtgtgaaaagttatgaccagtttgaatttctcgagagcttccgatgttaatttccagcgtctcaatatattgtgagcctgaatcggagctcagtgtgacaagttatgaccatttgtatctctcaagagcttccttggttcacttccgagcatctcgaaatattatgggccagaatctgaccttc

SEQ ID NO: 69863 - DNA, 476 bp, Glycine max
  unsure (1)..(476): unsure at all n locations
gcttcttatccaaggcaattcttggtggtgaagctccttcttccttggcttattccctataggatggtgcctcccctatcctcttctgctttgccttccgctgcatctccatggtgaaaaatcaccattgaaggacctcattgaagctcatagatccagcctccatagaagctccacaagcaagcttccatcacttttcacacaaaggtcagattcgggcacataatatgtcgagatgctcggaattgaaccacggaagctctcgaagaattcagatggtcataacttttcacacagatgtgcgattcgggcgcataatatgtcgagtagcgtcgaattgaacaacggaagctgtcgagaaattcatatggtcataactnttcacacggaggtcagattctggcacataatatgttgagatgctcggaattgaccaccaaagctctctagacattcaaatggtcatagcttttcac

SEQ ID NO: 69864 - DNA, 440 bp, Glycine max
agcttgccgccacggagtaatccgactatgctcttgtgtggtgtaacaagcttcataaggagagagcaagacatgaatagcctatggttgattcatggacagagaccaaatagatcatgaagaagcgatatgtgccggctatgctactcaatggactatgaaattaagctccagaaacttatccaatgcaacaactggtgtgatgagttatctaaggagatggaggtcttctgaatctacctaacattgaggagatgaggaggtcactatggctccatttcctaatgagttgactaatgataccgcgacgtggtgaactgcagatctttgagaatatgatattgcttcccaatgttttacgtaatcatcaattaaaaggaaggagtggtataggattctaccacttgttcttcttttgaatacaacggaaaaaatgggct

SEQ ID NO: 69865 - DNA, 472 bp, Glycine max
  unsure (1)..(472): unsure at all n locations
tctttcttgttctcagtcagttaatcctttgggctaacagggtggagcaactctcgtggatatagcatgtgaccctgagttggtaaagctggccattgacttaacttcttgtctggtaaattcataccttcttatagacgtcatagccactctgactatatggntgtggacatgagcaaaggggatttagaaattaccttggcatacagattattataatcattggatgtcttaatcatttactaagttgctttcgaacatgaatattactatacttgcatgtatctttaattgctgaagaatcaatgatagcttgactttatcaaagtaattgaagcatgtaacaaagagccaaagtctaccttgatctctatacatattgtgcattcttaatctgatccttgtacatatagtacattcttaatgtgatccttctacatataggacattcttagtttagttcctatctatt

SEQ ID NO: 69866 - DNA, 424 bp, Glycine max
  unsure (1)..(424): unsure at all n locations
agctngagcaaactattaggtcaagcataaatgcgtattgaataaaagaacataccattaatgatggagtttacccattggaccctccccataatagatcacaaggatcctttctaagaaagaattttacttttgattttgtccgcaagaggtccacaagaggagtgcatttgcaaagaaaagaaaggttgagagtactttgatgggtagagagtagctacctgtactcatgtacaaggatgtttattttactaacgatcttaactcttctttaccttgtgaggttgtttccttgttaaaagaatttgttgatgttcttccagaataaattccatatgtattacctcctttaagagttattgagtatcaaattgacttcattcctagtgcttcacttccaagcaggccaacatataagtcaagt

SEQ ID NO: 69867 - DNA, 435 bp, Glycine max
  unsure (1)..(435): unsure at all n locations
gtctggccttatgccttttattctggcgacttagtattgtgagttcgaggagaagcaagacaaatcccacgagcatgaaagttgggacctaactgggaaggcccattcagaattatggcgagcctagacaatggagcatatagacttcaagaactagatggaaaagcaatcccaagaacatggaatgccactcatctaanaatttgttttagttgaaccatgacaagaacaggtgttgtactctntttcatactcaagtcttttgtcccaaaatattaaaaatcagggttttggattgagagattttaacgaggcacacctgaggtatagatggaatttatactcaaatgattgaattaaataaaatttcccctcattcaatctggttattcttgtgcatacactaatgccacaaatcattaaaggctcattaaa

SEQ ID NO: 69868 - DNA, 488 bp, Glycine max
  unsure (1)..(488): unsure at all n locations
tgcaagcttcttacatagtccgcctttgcttgaccttctttatgcttaaaaacagatacattaggcataggcaaaagatcaagaggagttagtgggttaaaaccataaacagcttcaaaaggagaacaattagtggtgctatgaacagctctattgtaagcaaattcaacatggggtaaacaagcttcccaagtttttaagttcttcctcaaaactgtcctaagcaaagttcccaaagtcctattaacaacttccgtttgtccatcggtttgtgggtgacaagtggttgaaaaataacaattagtgcccaacttgctccacanagtcctccaaaaatggcttacgaacttagagtccctatcactaacaatgctccttggcaaaccatggagtctcacaatctccttgaaaaacaaatcagccacatgggaagcatcatcaacttttttacatggaataaaatgagccattttaaaaacctatcaaca

SEQ ID NO: 69869 - DNA, 482 bp, Glycine max
  unsure (1)..(482): unsure at all n locations
gctctcgaganatacaaatggtcatatcttttcactcggattgccgattcaggtgcataacatatcgagacgctcaaaattgaacaacagaagctctcgagaaattcaaatggtcataagttttcacatggatatccgattctgtgttataatatatcgagacggtcgaaattgaacaacgactcgagaaattcaaatggtcataacttttcactcggatgttcgattcaggcgcataacatatcgagacactcggaattgaacaatggaagctctcgagaaatacaaatggtcataacttttcactcggatggccgattaaggcgcatcacatatctagaacgctcaaaatgaacaacggaagctctcgagaaattcaaatggtcataacttttaactcagatgtccgattcggggatataatatatcgagacgctcgaattgaacaacggaagctctcgagaaatcaaatggtcataact

SEQ ID NO: 69870 - DNA, 347 bp, Glycine max
  unsure (1)..(347): unsure at all n locations
tcactacgcatagctccattctcgaaagtggaagacacatgaacgataacgcaattcatggggctccgaaatgattgagaatggagaatggcactaagcaatcactacgcatagctccaaaatggaaggtggaggacacatgaacgaaaacgcaattcatggtgctccgaanaaagttgagaatggagaattgcactaagcaatcactacgcatagctccaaactcgaaggtggaggacacatgaatgaaaatgcaattcattgggctccgaaaagattcagaatggagaatgcaatcactacgcatggctcgaaactcgaaggtggagaatacgtgaatgaaaatg

SEQ ID NO: 69871 - DNA, 480 bp, Glycine max
  unsure (1)..(480): unsure at all n locations
cgctaacccatggaagctcataatatatcccatactttttggggtgttccattcttggatggccttgattatctcaaggtccacttggaccccatttctaccaactacgaacctaagaaaactatattttctacacaaaaggtacatttctctatatttacatagaaggtgtctttcctaatgactgaaagaacttgcctgagatgtcctaagagatcatctaagctcctactgtacactagaatatcatcagaataaacaactacaaatctacctatgaaatcccttaagacatgatgcataagcctcataagggtgtttggtgcattattgagcccanaaggcatcactagccattcatacaaaccaaacttggtcttgaaagcagtcttccactcatcacaccttgtcatcctgatttggtgaaaccactttaagatcaattcttataagatattgtcccatgaactcatctgcaaa

SEQ ID NO: 69872 - DNA, 218 bp, Glycine max
  unsure (1)..(218): unsure at all n locations
ggttaaagacctcccatagagatggagctagacattagattctgcctacnacacacaaaagagtcctttccaaaaaagaaaaattgtgatggtgtggtccttttaatgttcactatatgagtccttttgaagcaacagagatagatgaccaatccttagacggcaactggttggttcctggcctcatcttcaagaatgtcctttgtggtgacgatcca

SEQ ID NO: 69873 - DNA, 411 bp, Glycine max
ctagatgaaggttcactgtaaccaagcaagtcttatacctagcatgatcacagattcacctccgctccttatgttcccatgaacccgggtatagggccctttatcactcacagtgtgtgcaaatagtgttggtgtttgtgtgtatcaaatgaataaatatttacctcatgcatacattgtaaaacgcactaaaagcaataaagagtttatatacacaagaacataatgaatggaaactaacaaaggggtaagtcacgataaaacattgcacaagattaaatggcctaactctctaaaaacagtccccagtggagtcgccaactgtcgcaacctacccttcagcgggagggcgacgtgagactcgcgggatgcgtgttccacgaaaggaatacgcgcggagtcgccaccaac

SEQ ID NO: 69874 - DNA, 333 bp, Glycine max
  unsure (1)..(333): unsure at all n locations
atatgcgtttgaatatgaagctacatgttgagggctgcccatggacctcccatataagccaagatcttttaaagaatcacttgactgccgacgagccacggagagtgcattacataaacaactgtgagattcttgatgggtcagagtactgccttctcatgtcaagacgttattaactacgatctaactctgtctccttggaggctgattgttgacaaacaatagttgatgtcttcacatacatccctatgtatgacctgctttaagagttatcgagtatcatattgacatcattcctagtgcttcactancaatccagccaacatatgagtc

SEQ ID NO: 69875 - DNA, 382 bp, Glycine max
  unsure (1)..(382): unsure at all n locations
taacctaacatcatacaactaagaaaacaaanagtcatctatactattgtttaaagaatgaaaaataaaaatagaaatggactaacttacttggatttttcttgaaatgaagcaatgaagatgcaagcaagcaatacacacgcagcacaaagtacacaagtgctcaaggataaaaatgtgcaaaggtttgggtgcacaagtaatacccaaagtgcctctgtctttgatttttaaaaactgaaattagtatggtgcgcttagcgcacagctgcgcttatcgtgccaacgtgacgtttgagtttaagacccaagcgcttaaactatcctcgcactaagcccaacttgaagttgtaaagtctcgtaagcatataaggcttatcgc

SEQ ID NO: 69876 - DNA, 432 bp, Glycine max
  unsure (1)..(432): unsure at all n locations
agcttgttatcaattgagaagttattggtggcattaattattgtagcangatcaaagaaaggaagctccagattttcttgcccaccatcatctttctcctctgtccatgttccattttcttaaaaaaaaaaaaaagaaatcagaacattgaatacaatgtccaccacatgtaaagctaatacacttagcagtnttaagtaaaaactccgagcaaaagatgggtggtagagaaattggtagttttattaaactatcaaatcgcagaaaagtattgaatttatggacatgaaacttaatttctgttcaaaataaaccaaaaaaaaaagaaaaagaaacgcatgaaacttaatttctattcaaaataaacctaaaaaaaacttgttttctctatcttatggttgataacagataatgtgaagtgtgatgactaca

SEQ ID NO: 69877 - DNA, 470 bp, Glycine max
  unsure (1)..(470): unsure at all n locations
cttatacttcccgtagatgagatctacagaaatctntactaccctcacattctaactgaacctagaatattcccgaaaccctaatagaagaggttactcgttccctactttcatgcatgaatcttcacgctctcacgcttcatacgtagtcctccatgtacattgaggccttcgttatccttttgggcctctcctcgtgctgctgtgctcttacttcctgcaacccctcttctctattcgtaacactcccctctccttcaaataacaccttgtcctcaaggtggtgtaaggccttgaagctggaccattcctcccacgaagcttccttgagtggtaaatccttccattggaataagaccatgcgcgtaggtcccttttccaacggaattagtttggacgcgatgatggccaacggagtaacgactgggtcgttatctacagctgctggatgaaaacaggataatcatgtg

SEQ ID NO: 69878 - DNA, 410 bp, Glycine max
agcttcttagtctcagatgatgcatctgagtttgtatctacctcatgcactcctctaatgactatggcatcatttctggcgctaaactgctgagagttggaagccatcttctcaattaaatgtctagcttcagcaggagtcatgtctccaagggctccaccactggcagcatctatcatacttctctccatattactgagtccttcataaaaatattggagaagaatctgctctgaaatctgatggtgagggcaactggcgcatagttatgtaaatcgctcccagtactcatacatgctctctccactgagttgtctaatacctgagatatccttcatgatggctgtggacctggaagcaaggaaaactatttctaacaatactctcttatgtcatcccagcttgtgatg

SEQ ID NO: 69879 - DNA, 444 bp, Glycine max
  unsure (1)..(444): unsure at all n locations
tctttaggacctagaacaagcaatcaactcctctgtcagaaccatgctatgtgctcgcgactggtccctttcttcccttcgcaacttgagttcactattgctaccccatagagctccacgaaatttgttccggccgtactcttccttgcgagccctcatggtctcttgctcaagggctctngcagtaattgcatactcttcccgtaacctggcacactccttccgaacgtgtgtagcagccaactagaacctctccttggcgagttttgcctttcctaactcgctctcgagagcttggacttcttggtactcttccagtgcttcaaaattctctgcgctgacgactgttaactaggcgagccaatctaaacctcgtatgcgaactttcagccattcgtagtacccaccaatgatgccattacgaatgcctgtaactcttgatct

SEQ ID NO: 69880 - DNA, 305 bp, Glycine max
agctcgtcaacctgaaatgttattctgtattacacaataacctaagactaggagtgccaatgagatatctaaatttgttcttagaatcagttatatgtatacaactgccaaagctagaggattgttgagtctttttttatagtttttttactctactctagagtcattctgagtttctctctgagtcctaccctagtgctatgtccttttcatttgcttaaatgatgagtcatccttgaaatattcgcgtggtaaaactccagtggctaactttcatttcattttttatgggccttgttgattgc

SEQ ID NO: 69881 - DNA, 452 bp, Glycine max
  unsure (1)..(452): unsure at all n locations
ttctggaaaatgatttctataccaaatttagtcgtattaagagactatcaaactcccccaaatttacagttntgcttgtcctcttgcaaagaaaaaatagttcacttgtcctcaagtgacaaagacagtggccaatcaaaagaaaatggtgtttgattcatcaaggacatcaaccatatgaactgaatatcatggaatgcttaaatcaatcacttctcacaagcatgcaacttttcaaagataggaacacaagtattagagtcacagctganataagctagtaagcatgacaaaaatcaaggaaggataatcaaccaaaacctcacagtcattgtttcactcaactcaagtgtttaggcttattccatcataaacaaccaacaaaagttccaacctttgcatttcatctcctaccatacagcaatgaacacataanaatgaatccgaaggac

SEQ ID NO: 69882 - DNA, 457 bp, Glycine max
  unsure (1)..(457): unsure at all n locations
tgactngagtcatcaagagattataaatatgtgaccatggcatgagtttcaatgaatgatctatcatctatcatctatatttcaatctatctttcaatatcttctttcatctctttcaacagatctttctgaattatttctcttcatctttctaaaagtttttgttcaacactttctcttccaagaaaagttctttgttcaaaaacttgtgttattcatcttttttatttcacttctccctttgccaaaagaacaaaggactaaccgcctgaattcttttgtgtctctcttctcccttacaaaagattcaaaggactaaccgctggagaattcttttgattcttccctttcccttaagcaaaagatttcagaggactaactacctgagatatnctttgtttgctcttacaaagattcagaggactaaccacctgagaattctttgtcccaacacatt

SEQ ID NO: 69883 - DNA, 440 bp, Glycine max
gcacatatggagagggttatgaaacaacgagatgatgcgctccatgagatgttggatcaaatggagaatagagatcattatgaagaagacaggaggagaagagggaatgatggtgttcctagacaaaaccgaattgatggtattaaactcaacattcctccatataaaggaaagaatgatccggaggcctacttggagtgtgagatgaaaatagagcatgttgtctcatgccacaactatgatgaggaccacaaagtgaagcttgccgccacagagttttccgactatgctcttgtgtggtggaacaagctacacaatgagagagcaagatatgaagagccaatggttgatacatggactgagatgaaaaagatcatgatgaagcggtatgtgccagctagttactcaaaggacttgagaatcaagctccaaaactaacc

SEQ ID NO: 69884 - DNA, 479 bp, Glycine max
agcttatgagaaacaaaatgcctcaatcatttccaaatatgcatgtgaattaggaagcatcaacaagaatcaagccaaggctattgtgcaagaaatcaatggggcaaaacacaccaaatgattatgatgatggatggctcaaattgtcacaaaggtaaactcatcactttcaattgagctttcaaaactatcatgacatgtagaggagaatcaagggattcaagtcacaaaatgtcaagaacttttattttcaaaacaattacccatttcttgaacatatcctataattcaaagaaaaacatgcaaagtcgtacatgcacacagaattgacccataatattaaactataaatccgacgaaactaacaacattaacaaattaacacaactaacaaattaacaaaaccaacaaaactagcaaaaccaaagaacactccccccccatacttaaacaacacatttgtctcaatgtagcacaat

SEQ ID NO: 69885 - DNA, 476 bp, Glycine max
  unsure (1)..(476): unsure at all n locations
tcctatgatttaagagagaaatttgatgaataggtttatagttcctactacttgnttgtcttctgatacaagttttatttatgcatgacattggaacctccaacttgatcttaacatctatgaaaggatgggttctatgtcctcgatttttgtagtcccttgcctttggtttcccatgtactgaaattcctcttgattgtcatatcgaatcatagcacactcagtattaacttctaacactcctcttactggaatcatgactntatcattntaaaagttattagtattggaagctatgttttcgataatctctatagcttctcttggtgtcttcaaagagaattttccactagctgaggtatccaacataaacttgctttgagcacttaatcctcccaagaacatattgatttatagggtcttgatcaaatcatgtgtagaaagttgcctcatcanatcatggaatcattcccatg

SEQ ID NO: 69886 - DNA, 472 bp, Glycine max
  unsure (1)..(472): unsure at all n locations
cgccgcatgcaagcttncnctcttccacaccatacgtagaagcagctgttgaatcattggaaacaactctccaatctttcgaggtggtgagttgtgcctctgtggagacgagcccgctgctaccttctctctctaatgcggccataatggtggcacatgtgatgctcaagcacggatatgagcccagaatgggtctaggcaatgactgcctcgggaatgccaacgtantcgatattaggggaaatccgtacaagtatggattgtggtatgaacccgggatgccgggaaggaggaatgcaccgtcaagattctcgacagataggacatggccccgaccatgtagccagtgtttcaccagtgccggaatcatgttcgacgaagaggtggcaacagtcggagaggattgcccttaagacctgccaagttttgacggccatgccatcccgattcccaagtggggaactggcgcgtg

SEQ ID NO: 69887 - DNA, 484 bp, Glycine max
  unsure (1)..(484): unsure at all n locations
tgcccgcatgcaagcttgatcgaaccctagctacgaccatcanagttatttccggctaccactgtaagcttcttagaaatttactccgattaaagctttcttttggtcaaccgcaataagacttcaccatgtaaacccaatttgaacctcagatcaagcttcttctcttttttttgtgcctgagaagctactccttcacttgcggttcttcttcttcaatttgattcgattcacactacattacctttatttattttttaattnttaaataagtgtaaggacgcattttgtcgttacgtctttgttattgtgttaaattaagagatattcatttttttgagttgtggctgaatcttgtggttgagtgagggagagaatgtcttgtggcacgcagaagagtttgagaaaagcacttggagcacatccagtattgtgtaagcattgtattttntgantctggaaggaatatggagagcgttgaaag

SEQ ID NO: 69888 - DNA, 400 bp, Glycine max
  unsure (1)..(400): unsure at all n locations
tcagcggacatgttgggagttctcgtgggtgtcgatgaacgcggaagttgctggcgtggagcgcctcttcttgcttctgctgcttcctcgcttcttctggtgtcgtcgtttcatcacgcacggaacctggtgggcgcatgaatgcggaacgaagagaaagaatactcacaagctgataagagtggntgaagtggcagcaacgagtttggcgaggggttctaaggattgcttgacgacggcgtcgatgtcggagacttcggtgaatgattcaatgaacgtcttcctgtagaagcgagacagcatggctctgaccctaccccgtttctggatgtcggtctgcttcttccccatttcttcttcaccagagaaaaaattaaaaatgaaaagcttgattgagaaa

SEQ ID NO: 69889 - DNA, 501 bp, Glycine max
  unsure (1)..(501): unsure at all n locations
gtcacctgccgcatgcaagctggcttgtggggcttctatggaggctggatctttgagcttcaatgaggtccttcaatggtgattttaaaccattgagatgcagcggaagacaaaggagaagaggtgagaggaggcgccatccactatggaataagccatggaagaaagagcttcaccaccaagatgagacatggataagaagcttggagaggatgcttcaatggaggataagaaagagggagagatagagagaggggggagcacgaaattgaaggaagaaaaagggagagaatttgaacattgagttgtgtttcacaagactcgcattcatcaaagttacaacaagtgttacacatgcttctatgtatagactaggtagcttccttgagaagctgtcttgagaaaacttccttgagaagcttctttgagaaaacttccttgagaagctagaacttagctacacatnaccctctcataactaagctcacctgcttgagaagc

SEQ ID NO: 69890 - DNA, 392 bp, Glycine max
  unsure (1)..(392): unsure at all n locations
atgatttctaaaaaaatgttttaaaacttgtcactccccacatagtgatttttggaagcttcgtaattcttaatcgncatattgttcgttatgctggcaagcgtatataataatgatatnnttttttattcacagcaagcataagtgcgtacgtgcgtccatggcagttttttagttgctaactgcttaattacatatgttctgcatattatatattatatattcgatattcatggtcggtgtagtgtgttcgcatgcaatcctaggagttattcatcttgtatcactagtgtcgcgaaatctgtataaactgaacgcccctccacatcttaccatatcttgggagcgcaataataatgatatttttattcacacatgctaatgcgacgtgc

SEQ ID NO: 69891 - DNA, 440 bp, Glycine max
  unsure (1)..(440): unsure at all n locations
ccagagaaagagtccacggaggaaatgctctctccctcanatgtctggacaacgggttctaatgactcctctgcggcctctacatgaggcatagaggatgggcagctcaccaagatgtcttcctcgcctgatacgatgaccaaatgccctttcactacgaatttcaactttaggtggagtgtatagggaacaactcccactgagtggatccacggccgccccaacacacagttgtagggggggttaatatccattatctggaaggtaacttgacaggtgtgagggcctatctgtaccaagagatcgatctcccccctaacctctcggcgggtgccgtcgcatgcactaaccaccattgaacttggctttatgtgggaagcattgaatggtaatttcttcaaagtgctcttaagcatcacgtctaaactggaaccattatc

SEQ ID NO: 69892 - DNA, 357 bp, Glycine max
  unsure (1)..(357): unsure at all n locations
gatgagatcaaatccaatgatctctacacaagatatggtcttgatgacataaaactgtgtagaacacaatagtctgccctcttctagtacaagccctattgttggatttaagcccagtgctggattaattcctggaatctagattaanaaccatcaaattaagctgattgggcccacgttatcacactgcctgaataatttgacaattaagactaatcactacttaaaattgcgcgcacacggtaagaaataggagaaaataatggcacatcagtcttccaggaactggtggtacgagcacacgatgattcatcaaacaccatcttattctcccgatgctacctgacgtgaatctta

SEQ ID NO: 69893 - DNA, 362 bp, Glycine max
atggcattgcggattatattagatgaggtgacacatgtgactagtcatgagagtgaaaaccaataatggtcgaggagaaagaaattaacgacctagaaaaaaatatatatgtggaaaaagagaacgaaaatgaagaataagacaaagtctaacataataaagaacggaaagaaaagagtataagtgagaaagcaagagaaaagaagaaatgaaaagcttcaaataatgatacagaagtaccatatcctgttggtcctttcaatatagacaaggagcttcatctggcgagatttcctgatatcttcaggatatcaggaataactatgcctcttggtgaagctttgcaaaaatgccctctattt

SEQ ID NO: 69894 - DNA, 448 bp, Glycine max
  unsure (1)..(448): unsure at all n locations
attccttactattgttcaatacctataaagtattatttctatgttntactacttgcaattttactcaaatgataaggggttaataagaggaaggtcaacttattgaagaagctgaacatagccctacaaatcaagggaaaaataaactagctttgcggaagtgtcgtgcggaattgattaccagcttacagttattgggtgattatgagtccttactgacaccacctcaacttgttcttgtggaagccaatcaagctgctgccaaagctattatgttcttatcaggaaaccctgttggtagtggatgcttcatatatatgagcacgaatgacatgccgatgaaatgttgtgagtaaattcttatgttgtggtaatcagaatctataaagttctttcttttctgtagcattcgtacttctaattgatatgtatccgttttattaattta

SEQ ID NO: 69895 - DNA, 323 bp, Glycine max
agccacctgccgcatgcaagcttccagagcaacgagaatctaagccttgttttgtacacctgtcagcgtcataaagattactcacacataagctgctctctggtcaacggtactatgacttcaccatgttaactctatttgaacctcagatcacgcttcttctatatttgttgtgcctgagaagctactccttcacttgcggctcttgttcttcaatctgactccactcacactacattcctttattattcttagttataaatacagtaggatcattttgcggtacgcttgttatagggaaataagacaatacttttttgagt

SEQ ID NO: 69896 - DNA, 213 bp, Glycine max
gtgtatgatcggagcctgatatgagaataggcttctatggttgtgtgatgtcctcggcctacgccgggcattacacccatcttattgcataagatgcttgcatactaaataccctgttcggattataaggtgcactgaatcgtgacgggctcatgaaagcacaacgtatacacctaatcttctcgagatgttaaaagagagagctgcggcatc

SEQ ID NO: 69897 - DNA, 426 bp, Glycine max
  unsure (1)..(426): unsure at all n locations
gcttatccagaatgttggaagaaggtgtgtgtattgtatnggatgtgacatccgagaatgagtaaacattaatacgaatttgacaacgtggctcaatatgattggttcgattcatgataactgtactcctaccaatatcaattattgtgtctgctgcattacacacatttgtcaagggaacgacaaagagctatgtgcggtttgaactcacatataaactgtttaaggagtgatttgaaaaataataataattattaaacatatttcatcttaaaacatttgctatttcttgaccttgtagattatgattgtttacacatacagagtgaatataatctaaaataaagcatgaatatttgtgtttatttaataatatcacgtgtttgagaataaaggaccgatgtcattaccgaaatatataatctg

SEQ ID NO: 69898 - DNA, 305 bp, Glycine max
catgcacttatgtgtgctaattatcctgtgaagaggacgattgatctacgtctagaataaattgtgggaaagaaacgtaatatacagactatggttctctacctggaagatggaatcaacagtctatttacctcacccctatgagcgaccttctcatcacctgtataattcttccataagaagtcgactgatctcgcaagttgagcgtgttggaataacttatgatcataaactaccgcacatcttctgcttaatgaggcaatcatgcttaagcacaacaaccttattctgattgtaatggtgat

SEQ ID NO: 69899 - DNA, 283 bp, Glycine max
caccttcttcactcggagaacaacaactatctgtttcgtttcgagagacggccatgactcctcttcaataacgacggatttctaccttaaaatgctgtccacaagaatatctgtaggttctgagatccaccgcttgcgaactgcaaaatctcaccactgcattaacaactgacgagacagagacaccacatacttggttgatctttaactagtggcaatggatcattagtcaatcaggacttacccacggacaacagttcaagatggtggagcttggcgaccc

SEQ ID NO: 69900 - DNA, 440 bp, Glycine max
ctaagctcgaaaattaaagatagaaaatcttccataatatataagcttgttgcacaacctagagacattggatctaagacagtctgttgtgcgtatgatgccaagagagttctacaagcttaaaaagttaatgcatcttctagctcatgataagttgtttgggttattatgcgggcttcaaatggaaggtggcattggagttctaacgtccctacaaacactacgtgacatggatgcagaccatgatgcataataagtaatgaaagagttggaaagagctacacaattaagggtgttgggcttgaccaatgttcgtgaagaattcacaagttctctgagctccttgatatacaagtagcaacacctggagaagctatacattaatgcaaaatatatacttggggtcaatgattagcaattgatgtatgtgcacctgtact

SEQ ID NO: 69901 - DNA, 446 bp, Glycine max
  unsure (1)..(446): unsure at all n locations
agcttattatccaacgcttcatctgttggagagactctcttttccatggcttattccttaatggatggcgcctcctctcacctctttatctttgtcttgcgctgcatctncatggtggaaaatcaccattaaaggaccccattgaagctcaaagatccagcctccatagaatccccacgatccagcttccgtcgagtggtaatcagagcacaagagctctcaatatgtgctccttaaacctccattaattgtttgctttaccttctcttccattggtgtttcttcattttactccctgtatctcctcacatgtcttgtgataaattgtcttaacatgattctttagaagttccaccggataaacctgctatcaagctagatttgatttctatgggtgaaatatactgntcttgttcttgaccattgattggttgagtttaatttct

SEQ ID NO: 69902 - DNA, 466 bp, Glycine max
  unsure (1)..(466): unsure at all n locations
cctagtagtcaagcttctaagcctgtgtggattgtctagtcctccttgaagtaacctcgagaggattatctgaatgtggcggtgaccttgagggtgttgccataagcctgtggaaataaaaaaaattcagtatggcaaagtcagttatgtaatacacaataagttgtaaatttaattataaatttatgcattacaattaanagacatggaatatgtatatggtactttgtgcttacgcagttatgtaagaatgttcttccataaacccttgtcatgatcagaacgatttgcatatacatcatcttcttgttgttcatcattaatcaaaagcatgtctttggagaaaggcggcatgtcactgacatcaagtgctgaaccatcaatattgtgaccgatagaaattgttctcccttgctaaaccactgaccatctagagttgtttggatcttctacatagacacttgct

SEQ ID NO: 69903 - DNA, 477 bp, Glycine max
  unsure (1)..(477): unsure at all n locations
gcttgagcatattcaaacgacaataacatttgactcggatattcgattgtgtcccgtaggatatcgagacgctcgtaattgataatggaagctctcagaaaaatcaaacgacaataactgttaactcggatgtccgattgagccctgtaatatatcgagacgctcgtaactaataacggaagctctgagaaaaatcaaacgacaataatttttaacttggatgttcggttgagtcccgtaatatatcgagacgctcgtaattgaaaactgaagctctgagcaaattcaaacgacaataacttttgactcggatggtcgattgtgtcccgtatgatatcgagacgctcgtaattgaaaacggaagctctcagaaaaatcagacgacaataacttttaactcggatgtgcgattgagctcctaatatatcagatgctcgaattgtaaacggacctctaaaaagtcnacgacaatacttt

SEQ ID NO: 69904 - DNA, 407 bp, Glycine max
  unsure (1)..(407): unsure at all n locations
gttaattacgagcgtctcgatatcctacgggacacaatctgacatccgagtctcaagctattgtcgtttgacttttcttagagcttccggttttgatttcaagcgtctcgatatattatatggctcaatcggacatccgagttaaaagttattgtcatttgactattcttanancttccgttatcaattacgagagtctcgatatattacagggctcaatcgaacattcgagttaaaagatattgtcgctagacttttttcagagcttccggtttcaattacgagcgcctcgatatactactcgacacaatcggacatccgagtcaaaagttatagtcgttggaactttcttagagcttccgttttaaattcgagcgtctcgatatattataaggctcaatcggaca

SEQ ID NO: 69905 - DNA, 479 bp, Glycine max
  unsure (1)..(479): unsure at all n locations
agctntcattntcaattataagcgtctcgatatatttctggactcaatcggacattcgagaaanatgttattatcgttagaatttgctcagagcttccgttttcaattacgagtgtctcgatatattatgggatttattcggacatccgagtaaaaagctattgtcgtttgattttggtcagagcttctgttctgaattttgagcgtgttgatatactatggatcacaaacggacattcgaataaaaagttatcatcgctctaatctgcttagagcttttgtgatgtgaacctgaggagaagcagatcgtttgatacaggctacggaggttttggtgatgccacttccaaagacggaagataagtcatggtagacgccactttcgatgaaggaagataagtcanggtagacgccactttctgtgaaggaagataagtcatggtagacgccacaacgattaccttgatatgtctgataag

SEQ ID NO: 69906 - DNA, 413 bp, Glycine max
  unsure (1)..(413): unsure at all n locations
gcgacaataaattntactcggatctccgattgtgcccattattatcgagacgctcgagattgaatacagaagctctgagcaaattcaaacgacattaactttgttctcggatgtacgattgtgatccttagtatatctaggcgcctccaattgaaaacgaagctcgtaacaaatacaacgacaataacttttaactcggatgtttgactgagtccagtaatatatcgagacacttcgaatagaaacagaagtcttgaggacattcaaacgacaataactatttactcagatgtcagatgggccccgtagtatatcgggacgctcgagattgaaactgaggtctgagaaattcaacgaaataacttttactggatgtccgatgagccgtatgtatgagatgcccaattgaaata

SEQ ID NO: 69907 - DNA, 112 bp, Glycine max
gagcttctatggaggctggatcttttatcttctatgaggtccttcaatggcgatgtttcaccatggagatgcagcggcacgcacacgacaataggataggggacgcaccatc

SEQ ID NO: 69908 - DNA, 472 bp, Glycine max
ggccttcagacacaacattggaaagtagtctcaggatattgcttattttaacacaaaagtgatatgctaatcttttcgatttataacaaactcatgcacacattaatgtagcacatttatgaacatgcgtatgtgtaaataatcctactatttatgtcaacatacagggacattcaacacattctagttaccatacatatatatatatatatatatatatatatatatatgtacatctttgaaaagaacacacattctcgtgctcaaggcattgtgtcaaatattacacctaatcacatcctatatattctgctatcacaaactacctatacatattcgaagtatttaacatacaaacttatgttgtttcactcacatttatttatacgcacattgtaaagcttattacgtcatgcgcatacttgcatatgaaaaggaaattgcatgccatctatatacatttgatggataa

SEQ ID NO: 69909 - DNA, 429 bp, Glycine max
  unsure (1)..(429): unsure at all n locations
agcttgagcanattcanacgacaataacctatttactcggaagtcggattgagtcccgttatatatccagacgctcgaaattgaatgttgaagctctgagcaaattcaaacgacaataacctttttactcagatgtcggatagagtcccgtaatatattgagacgctcgaattggaataccgaagctctgagcaaattcaaacgacaataactttttactcggatgttcgattgagtcccgtaatatatcgaaacgctcgaaattgaatgttgaagctctgagcaaattcaaacgacaataaatttttactcggatgtccgattgagtctcgtaatatatcgagaggctcgaaatggaataccagagctctgagcaaattcaaacgacaataactttttactttgatgtcttatgagccccataattta

SEQ ID NO: 69910 - DNA, 399 bp, Glycine max
gctccacattcaatactcagcatttcgatatattacgggactgaatcttacatccgagttaaaagttactatagtttgaagttgctcagagcttcaacattcaatatcgagcgttttgatatattacgggactgaatcagacatcagagtaaaaagttaatgtcgcttgaattatctcagagcttcggtattccattttgagcgtctcgatatattacggaactcaatctgacatccgctaaaaaaattactgtcatttgaatttggtcatagcttcaataatcaatttcgagtgactccatatattacgcgactcacgtctaccaccgagttaaaagctattgttcgttgaattatctcagagcttcggtattccatttcgagcgtctcgatatatta

SEQ ID NO: 69911 - DNA, 412 bp, Glycine max
  unsure (1)..(412): unsure at all n locations
ctttaatgtactcttaacanaactcaatagcttcttctataatgtacctttcaacaatatatgcttcaagacagtgtaaattctttgtatagccttttaagatcttcatgtatcacttaactgggtacatccaccacaaataaacaagaccacaacatttaatctccctcactagatgaacaattaagcgaacaatgatgttgaaaaataaaggcaaaaaatacatctccaactaacacaagataatagcaacctcactttctatctcatctaacttgagaggatcaatgactctgatacatatgacattgaagaaaaatcacaggcgactgatggcaagcctaactttgttatgcaaaatgtctcatatcaccacgactaatagttgttgcattaagacatgacaatcatg

SEQ ID NO: 69912 - DNA, 458 bp, Glycine max
  unsure (1)..(458): unsure at all n locations
tgttttcaccttctcgctagtttttctgctgttttancgagcgtccactaagcgttacactcctgtgcttagcgcgaggaagactctggaagaagatgagctgtacaggttcgctaagcgcaccgcttcatctcactaagtgcaccgcttcagttcattcgctaagtgagaaaggcgcgctaagccaagaatcactaacgtgtgctaagcgtgccattagtgcgctaagcgcacaagcacgaacaaggccacctatgttagcctgaaatcacactttagatagagagnttggactgcgattcagagatntgcatgtctatggtttatagagagagaaaggtccaagttccagagagtcttgagagattttgctgtgtgaagatctgcagagactagagctcgaagcaggagccgatttgagagcttcagatgagtttgtgagtgattgtgagatcata

SEQ ID NO: 69913 - DNA, 194 bp, Glycine max
gatatgagtaacaatatatagacgcgacactccatactgccagaagatgctatctatgcattcaaaaaatattactcttgtttgacgtatatcggattgaatcactagttatacttataggctctcagatggagccagaaagccaacaatttagggactaatcttataaaatatatttggatacccaaaactcc

SEQ ID NO: 69914 - DNA, 470 bp, Glycine max
ctcagctctagaaggtagagttgattcttgattatttgtgcatgtttttggctaacactaattcttggtgcatacctgttttcttcaatttacttataaaggtctggtagtttgtgcatatgaaattctcttgagcatgtttaattacttaaaagtttatataattgtcaatggagatccatgtgagtttataaataatttctgcatgcaaattaacttgggtttcctatctaaatcttttgaataaatcaaatgctcttgcaagatgattttgcatcgaagaatagcagttgagaggaccaatcaattattaaagagtttcatgcttttctcagtggcaacaaaggatatattggatgaaacaactacaattaagctcttggaaaggtagtagttgaatcttgatatgtatgctgcatgttttttggttggagaataattctcggtgcatacttgcgttcttcaatttt

SEQ ID NO: 69915 - DNA, 397 bp, Glycine max
tctcaaatcaataaaattcatattattgttcttagtctacaagtctatgtacatacatgacttaaggaaaggaggagataaccaagtatagggaagctacaacttactacatacatagatagtgcaaatacactacaagctataccataggctaacaaaaatggtattgtcaaaatattaattattaaatttcaactcacctctagctgggatcgcttgtagtatgattatttttactagtaaaaccatctgtaggtgcctaaactaatagaaagcgttttcttcataaaatatcatatcatagataaatctttgaataagttgaattataaattcatacctcttgatctataacttctaagactatatatattgtggacttttgtaaatccattta

SEQ ID NO: 69916 - DNA, 458 bp, Glycine max
  unsure (1)..(458): unsure at all n locations
tatgtaactagttatattagttnggttctatatacaattgtgactgatttgtaatttacagaagagattccaactttcaagttgtacacaattctcgttgtatataaggtccttataagtgatgcccgaagttaaaataaacactcctttaagttatctagcatcaacaaaataagcaagaataacagtgtttctttttacaacgtgatatttaagctgtatttgtatttgcgtttaccacgataaagctttcttgccggttaaaaaaccataaaacttcccttcagttaaactctacacaaagtaaaattcaatcacaattgctagggtcatctttttctgggaaagtaaattccacaagtagttgccgaataggataattttgagataaacaaaacaaatatgcaaagagggtgtgtgtagaaatctacgagatatatttaaccatacccttgatg

SEQ ID NO: 69917 - DNA, 460 bp, Glycine max
agcttatagtgtgtatttttaccatgtagcgacacataatagactctggctgaaccatggattaatctttgtcaaggactgtgagcgcacacgatatatgtctccctattgatgagaaatatgtgatatccaaagaccaattaacatctgaattcgatcattagatcatagaacacaaagcgttattatttgtaccaatgttgatgatagcttattgtgcggtataacttattatcttgttcctgtcatgttttcgatatagactacaggattctttactgaagacaaacatatttaatgggaatgataacatgatgtgcaacaaaactctccctcaaagtattaatacacttgcatatgcaatactcggactcgaatatctaacttacataaaatacttattacgcatcattgaacacgcgtacgatatagtaatcttatgatatcttactggcccata

SEQ ID NO: 69918 - DNA, 458 bp, Glycine max
  unsure (1)..(458): unsure at all n locations
agaaccaacacacacctccttattcgtccaattattcatcattcttcggaataagaaactaggccttgacagtgattgtgtttatagctcgatagtgaacacaaatgcgccaagacctatcatgctttttaaccaatagaactggcgaagagaattgactntatgttgggtcaaatgatcccactctaaacattgactctacctgagcttcaaatatttgcttttggtaatatgggtaacggtaaggtcaagcgtctacagggtcagagttacggagtatatgaatggcgtgattagtaatgcgtgaaggtggtagagttgttggtatctgaaacacggatgagaacttgcacatcaaggactcaatttctgggtataagagtgtatcaattttggttgaaagaagcgcgaaggcaattactccaatgagaacttgcattgtctgtttggaacataca

SEQ ID NO: 69919 - DNA, 474 bp, Glycine max
  unsure (1)..(474): unsure at all n locations
gctgcagaaggcctagcccttggctgagcaatgcacttctctatgaaagccttaaccttaggatctttgaccttgttctatgcagcaggtctaactccagaagaccgatgttatcngttatatgttaacatcggttatttagaaaaccagtgttatcatttntatgttaacatcggttttgaaaaaccaatgttaacaataattcattcaacatcggtactttcaaaatcggttttaaaaccgatgtagaataccgtaaataaccgatgttgaaagtgtattttctaattatgtgattagaatggtgagttgtgaaaagtttgcttacttggatcaatctcgatgctgataatctctagcacaatatttcttgttcctatcctattattgatggcatacaaatgcttcaagatagtctctntcacatcctctntgattatattcctcattgtcaccacacgctctgaccttgaa

SEQ ID NO: 69920 - DNA, 489 bp, Glycine max
  unsure (1)..(489): unsure at all n locations
agctaggtgttaataaaatatntaatatatgaaaagtttatatatcattactattttttcttgaaccataactgctgctacagcctgacatgagtgggtcatgtaaccataaaaggacgtacaatggctgaaaaaatgagggaaaaaaaaggaaaattgcatctaataatcaacttagaaaaataaatatgattgtttatatcctcatacnaaattttttctaattttcctaaacgttataaaaaaaattaaataaaaagtttatatacacattcaatttgtttaaaatatatacacaaaatgaaatatgttcttggctaggtaagaatgattggaaaagaatgttatacaagaatttaaatttattcgtacatgtgaaattttctgaaatggaataataaactctcaaatatttctttaagaggttacatcagttattataaaaatcaatcaagaaaacttgtgaatatacaatntnnttttattttt

SEQ ID NO: 69921 - DNA, 490 bp, Glycine max
  unsure (1)..(490): unsure at all n locations
tggagggttcaagtcgctcataagtattgagtataatatctgaagcttgngtcatggctaaagtttcttcgacaattaagtccctcatccctccgggatagggaaagtcacagtttctcaataaattctctaatcctggaatgtttccggatgcacttttcaaattttttgcatctcaagtcaattgtgaaattgtcaaaacttgataagagtattgttctagcaaatctaattgtcattaattagaacgtaataactcagactaaataataatcatagactgtatatacatcgactaagatttaaaattgtgtcactaaaagaagttcacgaccttcttaaaacttcacaacacttgtgtcttttaattgttatcattcatgtgtaactttttgggtttgaagtcatgtaatattattagtgtatttgcatgtctataactgatgaatcaaataaagcttaaatatattcaaagtattgataataatca

SEQ ID NO: 69922 - DNA, 425 bp, Glycine max
ctgccgcatgcaagcttacttaataaagatatgctcaacagaggatataagactcatctagtcaactacttctgcaactagaagactctattgcagggtcaaaggctaattatgaagcttgatgttgatgatgcaaggaccttatggaactagaccatgtggtacgacacctaaggtgcaagtccctccaattctacacatgttcctacttcacaacaaatggattttattaagtattacgtccaaacaaagtataccacttttatgatgcagatgcctactttgtgaagaaccttgatgatgacttcatggagtgtttgatgaagctcaccatttacttctaccatcgcgtcttcgacattaagaagaagactatggagaaactagaagccctcatccaacacctatattgattgctacatgct

SEQ ID NO: 69923 - DNA, 93 bp, Glycine max
tatcggataacatggaccgtgcaaatgcatagaatcaacatgtaaccttatcactcttgcaagaactacctaagactcctctcttatatgcta

SEQ ID NO: 69924 - DNA, 481 bp, Glycine max
  unsure (1)..(481): unsure at all n locations
ctaagcacctgccgctgcagcttgagccatttaacgataaaactcttactctgtgtccgatgagtctcgaatatatcgacacgctcgaaattgaatgttgaagctctaagcctattcacacaacaataacgttttactcggatggccgattcagtgacgtaatatatcgggacgctcgagattgagagttgaacctatgagccaactcagacgacaataactgttcacttggatggttgattgggcaccgaaatatatctggacgctcgaaaatgaatgaanaagctctgagccaantnaaacgacaataacctttttactcgtatgtctgatagagtcccgtaatatatcgagacgctagaaatagaatgttgaacctatgagcctatttaaacgacaataactntttactcggatgtatgattgagtccataatataccgagacgctcgaattgaatgttgaccttagagtcattcaac

SEQ ID NO: 69925 - DNA, 458 bp, Glycine max
agtgccttatgaattcttccgttcttatgccaccagtacctggaagggctctcattttgtgcattaacatcttggacaaatcaatggggtgtatgctggggccacattacgaatccgggaaaaaagagcgcgttgtttactacctatattagaaattcacgacctgtgagatgaattactccttgctcgaaagaacgtgttgtgctttagtatgggcatcccatcgcctaaggtagtacatgctgagccatactacctggttgatatccaagatggacccggttaagtacatctttgaaaagccagctctcacgggacgaatcgcccggtggcaagtcctgctatccgagtttgatatagtctacgtcacccaaaaggcgataaaaggaagcgccttatcagattatttggctcaacagcctcttaacgactatcagcccatgcatcctgaattcccg

SEQ ID NO: 69926 - DNA, 451 bp, Glycine max
  unsure (1)..(451): unsure at all n locations
gctcgaccaatcccgacccaacccgggcatagtcggtcagtgagaacctgtgannaatcttatcatgcgagctcctggcagtcaacagataaaaggaacaaagaccacacagcatggaggcttgtggtggctggccagctgtgaattttgtgtaatatgtggattatggcctctggtaatcgattaccaaaggtgggtaatcgattacaaggcctagnnnngaagacaggaggctaagatggtctctggtaatcgattaccaaggggtgtaatcgattaccaggcttaaaaacgaagtcaggaaacttatggagcctctggtaatcgattaccagcctgtgtaatcgattacacagaggaatgggtcactggtaatcgattaccacgcatgtgtaatcgattacacagcgtagttttgatatatcatagtctgaggctgcgtaattcaagt

SEQ ID NO: 69927 - DNA, 466 bp, Glycine max
agcttgagatgaggaagtgttgaagggagaaactttctgtttttattgttgaccacagagcggtacctggagatatgtcgcgggggtcaggagaccttgaggacgtcacgaggggtgctactgcccaaaaccaagcttgaccaaacccgacccagcccgggcataatcggtcagtgagaacatgtgacatacctaatcccgcgagctcctggccgtcaaccgataaaaggaaaactagaccacagagcaaggaggcttgtggtggctggccagctgagaatattgtgtaatatgtggattgaggcctctggtaatcgagtaccaaaggtgggttatcgattacaaagcttgaaaatgaacacagggggctaagatggtctctggtaatcgattaccacggggtgtaatcgattaccatgcttgtaaactaggtctagaagctagggaagtctctggtaatcgatta

SEQ ID NO: 69928 - DNA, 346 bp, Glycine max
gcttgtggagatatgctgggaccactcagtttattcaaaatgtatgtcgatttattcaaggtcttagagaccatacaagcgtcctaactattactaattatgtgggccattaagactatcatatgctgacaatagccgataagcccatgaatctcttcaggggcggagtaagtgtctgccatcgccttggccttggctaacaatcggggaagttcttgactcccgttcaaagttagagcaaaccgatccatccacatggttggctcttggtgtaaagagacgagcacccttcctctagcctctgtttccgggtatactctggcatatatcttcgcaatcctatgct

SEQ ID NO: 69929 - DNA, 455 bp, Glycine max
  unsure (1)..(455): unsure at all n locations
ctgccgcatgcaagcttctaaactatgtacaagaatgaagctctgatactacttgttagacaagtggcctcagatatcttaagaagggggggttgaattaagatattccaaactgtgtcccctaattaaaagtctatttcactttttactcaagttatgaattcccttaatgacaatcttcttaaatattaactcagacgaagcaactcgaatatgaatattaagctataattaataacgagattaagggaagagaaaatgcagactcagttttattctggttcggacacacccttgtgcctacgtgcagtccccaagcaacccgcttgagagttccactatctagtgaattccttttacaagatctaaacacgcaaggacaatccttcctttgtgtttagagatcctttacaacaagagactcacagtctctntttcccttagagaatgagaag

SEQ ID NO: 69930 - DNA, 462 bp, Glycine max
  unsure (1)..(462): unsure at all n locations
tcactcctacatctcatctctatcatgcattttctntctttacccactcctcacgtttggtttntagggaaaaacaccataactaaacgcgccgcaagggatccctatcgcaccagatccaaatctagaacgatgggtgatcaagaggagacgcaggaacagatgaaagccgacatgtcggctctgaaagaacaaatggcctccatgatggaggccatgttaggtatgaagcagctcatggagaagagcgcggccactgccgccgctgtcagttcggctgccgaagcagacccgactctcttggcaactacgcaccatcctccctcaaacatattaggacggtgaagggacacactggggcacgatggcagccctcacctgtgatacaaccgagcggcttacccttatggattgccgcgcaactattcaccacccatcttgcaagaagatgcgggccacatt

SEQ ID NO: 69931 - DNA, 427 bp, Glycine max
acctgcagcatgcagctttaataatggtaaattgagtgtctgtcttctaattttctaaatttattaggtatgaactcctttctttcatgttaatgagacctgaacttttttaattagaggtctaatggattttgttgctgaattactgccctccaatagaatctattctaattcttttgttcttcatagaataactgttgaaacgaaaaatacttgttttaaacattgtaagaaatcagttaatatcttccatgctagataatgatgggacagaagtgtatgtatgattcaagtaggatcgattcgttaatcctaatatagctgtaacgtgtacggagggaaaaactctaaaactgcttgttgtaacaataattttattttacaagatatttgtaaagactgataaattgtcttctgttaaattaaa

SEQ ID NO: 69932 - DNA, 452 bp, Glycine max
ttattatatagatacgacagcatagaatatgtcagcggttaccaactaatatgtgatagatctctctggagtcacatgtagatgtctgaacgtatacacctaaactgatgcgtgttactgcttgtacatcaacattccaaattactatttttatctactcttgtattcatatccaattgatggaaacggggaataataataatttaacataaaatacttgggatcttttctttgaaaagggtttcggctataacttgtattccagtatggttattgcaacccactgatctaattacaatgacacagtcaatcattactcagcaataatatataactagctccatatggaccttattaaatgtgaagttaccaacctaaatctataatcaatcaatctctaaagcctcgccatgacagtggcatggcgtgatatgaagatttatattaattca

SEQ ID NO: 69933 - DNA, 264 bp, Glycine max
  unsure (1)..(264): unsure at all n locations
acacgcctatcgcggacgagacattgccgactattctgtagcaacactgtctgatgcgagaagaacaagcgcgccgtatactgccttgnggataatcttacgccctcagacattggagaggggatgatcttgctaactttcctgggatcaaacaccgcatncggattgctcagggagacaagcagancaaacaaccccgtggcatgccatgacggtctggttaaagacatatttcattgccacctccacagtacccttacccgg

SEQ ID NO: 69934 - DNA, 499 bp, Glycine max
  unsure (1)..(499): unsure at all n locations
gacactatatcaaactcaagctctagtcaaacagaataatctgaatatgtcaaagaattgngtgttgtttaatcataacaagactgtctgtgattggtttaaagatacaatctttgcagatgagaatgcttcagagacattaagaaagctagcagatgggcctaaaagaaatgttataacctggcgaggatacgacataaataggtattcattttacacaaaagcacaagatgacaaaagtacaatgcaaaacagcggggtcaccctaagggctgaatctcaacactttgcaagtgtcaatgatgccaatccctgtgtagcgtccatcccttactttgggttcattgatgaaatttgggagcttaattatgtgaaacttatagtatgtgttttcaaatgtaaatgggttgacagcaacaccggtgtgcgcaccgatgatataggatttaccctggtagatctaaagatacttggttaccacaatgaccctttcatcatg

SEQ ID NO: 69935 - DNA, 297 bp, Glycine max
gttgacgagaccatggggactatgcttggggagcttgaccaatacagcaagaaagagcgctgccgtttctacctaagcataaacggcacgagctagtgagatgaatacctcttgctcgaaagaaccggttgggctctaatatgggcatcccataccctaaggtaggacatgctgagccatactacctgtgtgatattcaagatggacccggataattgcatcttgtaaaagccaactctcacgggacgaattcgcccgtggcttgtctgctatacgagattgatatattctacctcg

SEQ ID NO: 69936 - DNA, 286 bp, Glycine max
ccatcacatgtggctctatgtggcggtttgtcgacggtgcacaacaagttttccacatccacagtgcgcgcataaacccaccatgccatgttggccacctccaactgagctcacgtacgtccacgtagcccatattctcgtttctcttaacaccgggtccacatgagtcctcccaagcttgcccaacatcatagtaatacaacattctaatagcacaagctatcacagtccagcgagagtgggcaaatgcagataactctgtccaaaacaccaaccaaatcacagc

SEQ ID NO: 69937 - DNA, 440 bp, Glycine max
atattctatatcttaaattctatatttagaacttatggtggccgtgtcgatctgataacggagaagtgaaaatgagtgaagaacaaggaacactgataatagtgtcatagagggggtaatgaagcctcgctattttgaggagtctattctcaatgttgtgaatgaccaagggtcccaagtatgtccattaccatgcaccttttcactttatcactattttcaaactatcataaaccctctgtagagctcctacgtcagcttcattgttccatcatcaaaagatcacgagtccattgatgtgtcttatgcctatatctgagagatctgaagtgaggatacagggtccaaatcctatatgggtcatcaaagtggttggtgctatgaacgtggtgatgtgcgcgatagagaaatggacgatctgggtctactgaatggttgag

SEQ ID NO: 69938 - DNA, 491 bp, Glycine max
  unsure (1)..(491): unsure at all n locations
ccgatttgcgtttttctggcgaaaggatcgaagtgggtctgtttagaggcttatttgatcatcctactntgatgaatgggaagcctgtggcaaatagagaggattagaatgaggaaggaacccatgttgtggctgccattccaaatttcccaccagctcaacaatgtcattactcaactaatatcatcccttctcatttacccaccatccaaccatccacaaaggccatccttaaatcaaccacaaagcctacctgccacacatccaatgccaaacaccacccttaacacaaaccaagacgccaaccagggagggaatattctagcgaaaaagcctgtagaattcaccccaattccggtgtcctatgctaacttgctcccatatctactcgataattcaatggtagccataaccncagccaagggtccttcaacctccattttttgaggatacgactcgaatgcaacatgtgcttaccatggaggagttct

SEQ ID NO: 69939 - DNA, 469 bp, Glycine max
  unsure (1)..(469): unsure at all n locations
agcttgtgtcacgattcactgtgacagtcanagcgtcattcacttatcagatcaccaaatgtaccatgagaggacaaagcacatagatgcgaaactacacttcatcatagatgtgattgaatctgagaaggtgaatgtcgataaggtttcaacataatataacccggctgatatgtttacaaaatccctctctagtgtcaagttcaagcactgcttggacttgataaattttgaggatgcctaaagcagattggtagaagtgcatccctgaatcgcaagataagcacttgttgattgggagtcaaggtggagatttgtggtgtgtgactcacaatcacaaatggcacaagtgggaagactttaagaggtgctatcataactaaattcagttatgataactgaattggttctggcaccacagcatagctagaatgcggtgtgcgcatatatatatatatatatatatata

SEQ ID NO: 69940 - DNA, 417 bp, Glycine max
tgagatgaggaagtgtagaagggtgatacttcctgcttttactcgttgaccacagagaggtacctgtagatatgtcgcgggggtcatgagaccttgctgacgtcaggtggggtgctattgcccaaaaccaagcttgaccaatcccgacccaacccgggcatagtcagtcagtgagaacctgtgatgtacctaaacaggcgagctcctggcagtcaacagataaaaggaacatagaccacatagcaaggaggcttgtggtggctggccagctatgaattatgtgtgatatatgggttgtggcctctggtaatctattaccaatggtgggtaatcgattacaaggcttaaaaatgaagacaggaggctaagatggtctctggtaatcgagtaccacgcttaataagggaactgcgagat

SEQ ID NO: 69941 - DNA, 340 bp, Glycine max
agtcacctgcggcatgcagctagtcgtggatattatcattctgtttgctttgtgttcacactctggtgtgatatactaaaatctagtttggcgtattctacgcttcgatacataatatggatggatagtgctatggtctttgctggtgccctaatttatttctttacacatattctggctttttatgctgccaaagggggagagaacaatggcagaaattatgataaacttaagcataaattccactcttgaggtgcagtcatggttgcgatcatgcattatcaaatttatatcatatatcttgatgcacattttgcatcataaaaaggagagattgtat

SEQ ID NO: 69942 - DNA, 418 bp, Glycine max
  unsure (1)..(418): unsure at all n locations
aattcatatagcatagacaaaggatacaaagaatgccaacgattatgatgaatactacgtacctgactatgaagggggacttggatcaaagtcttctagtgaaaattacatggatgacaaacctgattagtctgctgttacaaatgatcttgagtcacggaaaagaaaggttactctcgaaatatcttcaatataatgctacaagtgataattacgttcttgatttattacaattatagtttatattatgcacaagtntaacttgagttatatatctcatttttatgattaatcattgtaattgatacgtgaagaaatcatcgatatttaattctaaaagagtttattatgattcattcatacaccactctcttgataaataagtgaatgagtctattcctaataatgcatcttatgc

SEQ ID NO: 69943 - DNA, 462 bp, Glycine max
gccgctgcagcttgtgaccatatctgcccatgggaattcttaagcatgccagactacaagcctgattgtagactataactccccttccatctcttggcgttcttactttatcttcgtccgacttggcattttccaagtcatgatgttcttcattgggagaagaaggcttcattatcatgtgatccagttatggcgtaagctgaattgacgcacggaaacaaaaagatatggagcaacatagtttcacagttccacagcgtttcaagctatggagctcatgatcgatgacaagtgaaacgacgcttggaaaggaaaaaccttgttcacaaacccgggtatgtttatgatcgacgagaataacccatcaaggatcaacaccgtgatcgttgatacagcgagaattggatggaatatgatgcacgatgcgaagacattcgcggattaaatgacccagatgtacag

SEQ ID NO: 69944 - DNA, 487 bp, Glycine max
gcagagatccaacacaagttgtcaatccctatcatctcctcctcaattactcttgctacaaacaaatttcaataagcaaaaaagttcaataaccaaagtaccaatcttagataatcatctctgtggctagctacagaaagttctttgtattcttctgtttaagagtatacaaaatacaaatttaagtttacattaaagaaccttgcctctgttggttttcatgaacaaaataatttattttaaattggatgttctcatgttgtaccccctgctaggatccttaacaaaagtcattaaaaccaatcatgcagaggattaaaattatgatataaatttggtgccacaataaaaacataaggacattacaaaccaaaaataaaagaagacttctgtgtaacaatgacatgatatcaaaccgcagtcctcatactactggattgtcatttaatctaagagtaatattattcaagaaatggaacatgaaatg

SEQ ID NO: 69945 - DNA, 376 bp, Glycine max
agtgccacacgtaaatagttgaatgggaaaaaaagaggctactgtccgcttctattgtggatgaatttggataggcacgtggtgactgttctcacatttattgcataagcttcattctattgtattatacatgacaacagacgctcttcatgggctggggtctattaagcacattttagtcatgctttcttcctgaacactcataggcaaggttcaagtgatgtgatgtacacctcattgaagatacgtcgcctcagagcgagaacttggaacctttctttctccgccttagctcctaaagcatgcttttgtggtagcgctgccttttactactctgatcactctggaagtatatagaggagatgtaacaacttac

SEQ ID NO: 69946 - DNA, 496 bp, Glycine max
  unsure (1)..(496): unsure at all n locations
agtcacctgccgcatgcaagctntaagcgtctttttgctaacgaagacgacgcttatgacctatcatggcatgcaaatggaaggatttctgatggaatcgtctgtcatccggctgattgctcccagtggaagaagattgatggtttgtatccggatttcgggaatgagccaagaaatcttagacttggactagccagtgatggaatgaatccatatggaaccttaagcactcaacacaattcatggtcagttctgctagtaatttacaatttgcctccttggttgtgcatgaaacgaaaatacatgatgttgtctatgatgatatcgggtccaagacagccaggaaatgacattgatgtttatctaagctcgttgattgaagacctgagaaagttgtaggacgagggggtcttagtggttgatgcgtttcgcatatagacgttgtatatgcgagcaatgcttntnttacacttaatgactntccagcatatgggaa

SEQ ID NO: 69947 - DNA, 485 bp, Glycine max
  unsure (1)..(485): unsure at all n locations
agatcacacataggaactcatcactacaaggaaacaccctatggatcataacttatcaatttggatttagatgcatgttcaatgacttgatatggtcacaaaatagctgccattcttaaagtaaccttccgcttttatcaaatttggtactgtgtataaacaaaaaaggagctttttttaaaattaatttgaaataactaaatttacagcagattgaaggacaaaaaattattccaaaatgcagcactcctatgaaagtatgaatagatttggctcaaatcaaaccaaaatcaacaatcaaacatcatgatcaacatcaaccagcagagcaatactagaatatgcaattcagagatgaaacaacagcttacattngntcagcttctcttgcgtttgtcatctngccaaagtaaacagcaatccagataagcatcaattctagaaaatagtgaaaccttaaattcacagacagtaaatactggagt

SEQ ID NO: 69948 - DNA, 484 bp, Glycine max
  unsure (1)..(484): unsure at all n locations
gcaagctggaaggtgcgtaccccaccatttttcatagtacaacactggtaatgtgtgtactattattgtgatcatatctttctccgtcattggaggagccacttgagctgccaggtctctccacctttgggcatattctttcaaagattcgtgccccttttagcacatgttctgtagttgcattctatccggagccatatcagaattgtactgatactgcccaacgaaggcaaccattatgtctttccaagaatggactcgggaaggttccaagttagtgtatcagataacagctaccccaataagactttcttggaagaaatgtatcagcagtttctcatcttttgcgtatgcccccatcttccgacaatacatctttagacggttcttgggggaactagtccccttgtacttgtcaaagtccggcaccttgaacatggngaatgaccatgttgggtactangaacaacccttctacgtcagt

SEQ ID NO: 69949 - DNA, 409 bp, Glycine max
  unsure (1)..(409): unsure at all n locations
cagtacactagagagctntctaataggtggtatgtcccacttatgctctttctatctaatttccatcttgtaaaatcagaatttgaaaggcctcttaaatttaaagaggtacctttaggataccacaaacctacattggttatgcccttaagatacttaatgatccttttaacggtagttcggtgagattccttatgattggactggtatcttgcatataagcaaacgcttagcatgatattcagtctacttgtagttaagtagagaagtgatccaatcatacctctataccttgaatcatctactgatttacctttctcatctaagtcaagttaggttgaagtagccattggagtagatgcttttttgaatntttccacaccgaatttattaatcggctctatacaat

SEQ ID NO: 69950 - DNA, 480 bp, Glycine max
tgcaagcttcacatcagaccacttccaggtgctggaactacttctcatggacttgatggagcctatgcaggttgaaagccttggaggagagaggtatgcctatgatggtgcggatgatttctccagatttacctgggtcaactttatcagagagaaatcagacacctttgaagtattgtaagagttgaatcttagacttcatagagaaaaacactgcgccatcaacagaattatgagtgaccatgtgctagagttcgaaaacagcatgtttactgaattctgcacatctgacggcatcactcatgagtgctctgcagccatcacaccacaacaaaatggcatagctgaaaggaaaaacaggactctgcaagaagctgctagggtcatgcttcatgccaaagaacttccctataatctctaggctgaagccatgaacacagtatgctatatccacagcagagtctcacttataagagggac

SEQ ID NO: 69951 - DNA, 487 bp, Glycine max
tcagcttcagttcatcaaatgaaagctgaaaggtagtcaaattttatgaccgatttgatggattacacataaagagtccaggtcataatgaatgtaaattgttcatgtcaagaataatgacgaaggtggtaagacaatttgatttcttgacttggtcaatgcactgattagaagaaacaaaaaaaagcaatatctcgaatgttgacgtgggtaggcagtgatcgccggtgcacaagagatgtggtacaaataaagagtgcgtcctagcaagcttttagcacgagggatacatgaacaaatcacatatgcacctgcctaagagagatccagaggctgtgtaggtatgatgtaacatcccaattttcttagattggaaagcattgtgtataaattgcttgtgtgtgagtgatatgcagtgtacgacgattattcttatcataatcatgtatattatagatgataccctcattagacagtcaagtgacct

SEQ ID NO: 69952 - DNA, 359 bp, Glycine max
ccgcagcatgcagctgccaccactgcccgagagctagttttctcaaagccccctttggaaattcttgagcccaatgggcctgtgtattgccccctgaactaaacccctgccttttgtattttttcgaagtacggaacttacaattactacgatcttgttttttccgtatgtacggaaccttacggattacgtaaacattcctattttgcctttcggaatgttacgaaaatttactgattgcgcactaacactttcttttgacatacggcatgtcacggaacttcacggattgtgcaacaatgttatcttttgactatctgcatgtcacggaacttcatgaattgcctaatgatgggtgc

SEQ ID NO: 69953 - DNA, 482 bp, Glycine max
ctagggacatcctctgttatgactgaaagtacacttgttggagctcttaattcactcgaaatctacttatatttataggtaagtggtcaacacaagacaaatacttaccctggaaagaatatgcggaccatggcagaacgatatgaagaagctttatggacatcctctgttatcactgaagggacacatgttggagcacttaattcattgaggtataaaatagtagtaacttcctgtattcttatgcaatttaaatatataattcagtgcctggttatcttgccatattgtgcagacctggaatatttggaaaactacagcagatgatgctgaaagaataagaaacagacatggacttctggaaaatgttacaagccgaagctaggccagatagtaaaacgtttgctcttactttctctgcacgttccattcttatcttagtaaaaaaccatttaagacttctttcatttctgagacaatca

SEQ ID NO: 69954 - DNA, 469 bp, Glycine max
  unsure (1)..(469): unsure at all n locations
agcttttggagtagaaacatgggaccaactcattttatttcaaaaaggaagtcatatctagtcaaggtctgagagaccatacaagtttcctaacgatttctaattatgtgggccattaagtctatcatatgctgacaatagccgagaagcccatgaatctcttcgggggcggagtaagtgtctgccatcgccttggccttggctaacaatcggggaagttcttgactcccgttcagggaagggcaaaccgatccatccacatggttgcctcttggtgtaaagagtcgatcacccttcctctagcctctttttccgcatatacttgggcatactcatccgcgattctatgctcgtgggccgtggctagacccaactcttcttggtacttggcgatgatagctaacatgttggtntctgtctcgcatagacgctgagacaagcttctntttgaccttgaacaagcaatcac

SEQ ID NO: 69955 - DNA, 479 bp, Glycine max
  unsure (1)..(479): unsure at all n locations
ttgatggtgacccgatgctgagaggtacgaggatattgtctacgtaagagtgcgtgagctctattgaaaggtgggcaactggggatggtatgtttatgtttgacttgtgaaagtgggagagttgatttgcgccatcgcccgatcgccacctagtaccacatatgaccagtgccccataatccaacaagcttgatgtgagaaagcgtggaagagtcagtctttctactttttttgttgaccacacagtggtacctggagatatgtcgtgggggtcaagagaccttggggacgtcaggtggggtgctattgcccanaaccaagcttgaccaatcccgacccaacccgggcatagtctgtcaatgagaacctgtgacgttcctaaacaggcgagcttctggcagcaaccaataaaagaacatagtccacaaagcaaggaggcttgtgtggtggctgccagctatgaatcttgagtggtatct

SEQ ID NO: 69956 - DNA, 382 bp, Glycine max
gatggagaagaagacacatagtgctcctctgttaaggcgcgcactattattgagaacatatcttcctcactccgttggaggagacactggtgctgacaggatgatgtacatgtgtacatctggtgtcaggaaatcacggacgttaacataacatgacgtgtacatcgcgttctatcaaagacccgtagttagaaaagatctgataccgtccgacgaatgcaaacctgaggcctaataaaagtggacatcggatcgtcactaaccaatgttatagatctccgctacccctcgttgactacattggcagagatgtcgcatacactgtttatactatgagtccgccccgctcatgcgaacatacagatttatacggccgatgggg

SEQ ID NO: 69957 - DNA, 440 bp, Glycine max
  unsure (1)..(440): unsure at all n locations
ctaagcttactactactgagattcttccacactcaagatgagtgtcnttttgaccataaactgagagactccgttatcaagaaagagaattatcctagaattgaactatgctagatgtcaataaccaacctaacacaatgttcctataatatatgcttttaaaaactcaagagactatgaatgcaagaacttttttattctgcttgctcttgatatctacacttctatggcacacaatccaaacattgaatgctcatatgtgattgggaatatccanatctatattgccacacactgttggcttcacatccgaaaactagagttgattgtttaattttactagcttctttccttttatgcactaatttggagtctctatatataaaagaaagatatataaatatttgtgctccacagagatcatagaagacacatggact

SEQ ID NO: 69958 - DNA, 206 bp, Glycine max
gtctgtccaccttagggcatacacttacacagaggcgcgctccttataacacatgttctgtcactgcattctatccggagccacattcaaattgtactgatactgaccaacgattgcagccaataggtccttccaccaatggactctttaaagttcctaattagcgtatcacatgacagctacccgacttgactgtcgcggaagaa

SEQ ID NO: 69959 - DNA, 181 bp, Glycine max
  unsure (1)..(181): unsure at all n locations
cttatagagctaccgacgtctaggagaagagatattgcacatttgtgggccattggatacactttcatggaatggtcgacaatattntatatcattcatagacgataacttcctatatgcgtacttgcttcttatatatgataagatacaatctgtggatggtttttaacatataatgttg

SEQ ID NO: 69960 - DNA, 345 bp, Glycine max
atttgatcattctactaggacgacttataaaactggggctaatcaatatggtgaggatgagggagatacccatgctgtgactggcattcctatacggacaagtttcccaccaaacccaacaatgtcattactcagtcaataacaaaccaccttcttacccaccactcaattatgcactaaggccatccatcatctaccacagagtctgtctaccgcactttcgatgacgaacaccacctttagcacaaaccatagacaccaactaataagtgaatttgcagcgagaatcttgtataattcaccccaattccagagtcctatgctgacttgcttccatatctactt

SEQ ID NO: 69961 - DNA, 423 bp, Glycine max
  unsure (1)..(423): unsure at all n locations
ctaaggataagtcttcctgttgctcnctctatctctaacactntaatgttgcatattgtatggaaacatcgagcgcaatacagttcccaccccaaaccctgaaccaataccttatcaatcacaatattatctttagtcccattattcacaattatcccatgcaacctatgacactttagctttatcccaacaaaaaaaatatttgaaccaaaaaaatgttttacctaacttctttttgcatcattttccacctatttttttgagtcccatcttggggatcatactcacacgtacttcagtacccctacagtggagccttcctcatcaatccgaccaaacgagcttcagttcacagcaaatccaggcttacctaacgaagaacacggtccctttagtgaggatgaagacaaatttattcacaat

SEQ ID NO: 69962 - DNA, 456 bp, Glycine max
  unsure (1)..(456): unsure at all n locations
tctgagtcacctgcngcatgcaagcttagtgagtcatgctctcttatcctgtgtgatgtttaagctaagcgagggtgtctcgcttaaccacagtctatgtntctatatagtcgtgctaagcgcgccctgtgcgcttagcacatatctattattatctgaaggcgcgctaagcaagcctgtctcactaagcgcctaactctatcttcctattctgattttctgttatctatattcaataaaccttaatctaactgcattgctattgctatgcttggtgcagatggcctccaggaagagaagagcgtccaccttcctacctcatgaaccctatgacactacacggttcagttttgaggactcatgggagtgatatgagtagaacattcacaccatgatcattctccccagaggaatgatgactggctatacacattacgatgaattctgatatgatct

SEQ ID NO: 69963 - DNA, 376 bp, Glycine max
  unsure (1)..(376): unsure at all n locations
aatactcagctgctcacatttcttcagcattctctgagaaggtatctntgttctgaacacttaagcaaagataagagcagaatctagctgttcttttgtattggtaaaagcttgtgcaactcatgttagtccttttgtggaagttgatgctatgggcactttgattcctatgcctaacctttccttccctgattctttgattttcttactcataaaaaaaattatgatacatattttttgggccctaataaaatatatatattgtattggggcctaaaaaattttcttttggattgtgtccctatatgtcaaaattagccttaaatatctaccgtacccgggattattaactgttacatggtcgtcactggacaca

SEQ ID NO: 69964 - DNA, 381 bp, Glycine max
  unsure (1)..(381): unsure at all n locations
agcttgagatgaggaagtgtcgaatggtgaaactttctactnttattgctgaccacagagtggtacctggagatatgtcgcgagggtcaagagaccttgtggacgtcaggtggggtgctattgcccaaaaccaagcttgaccaatcccgacccaacccgggcatagtcggtcagtgagaacctgtgatgtacctaagcaggcgagctcctggcagtcaacagataaaaggaacacagaccacaaagcaaggaggcttgtggtagctggccaactgtgaattttgtgtgatatatgggttgtggcttctggtaatcgattaccaagggggtgtaatcgattacaaggcttataaatgaagacaggaggctaagatggtctct

SEQ ID NO: 69965 - DNA, 471 bp, Glycine max
  unsure (1)..(471): unsure at all n locations
gctcaaggannaagttgaagatagttttgaagaagttttggtctttacatgcccaactactttgagtggcattngtattggttgttatctggattgatgcatcttantacatttgatatctgctctgcatcatcatagtttgtgagaagaatattttctatagaggcaaaaactctctcttttaatcgattacatcctcgttgtaatcgattacaataagttgtctgaagcttgtagagttaagtctcgtatcaatttaattgattaccaatatctggtattcgattacattgttgtttgagacaaagactaatttagtcaagagtctctacttcaatcgattaccaagtggattaatcgattacttctttctcgttcagttgttcagaggtgaacaataacactataattgattacttaggttatctaatcgattacattgttcttgaggtngtttctagatgttggatg

SEQ ID NO: 69966 - DNA, 398 bp, Glycine max
  unsure (1)..(398): unsure at all n locations
gcttggcanacagaaccctctatcctagccctcttcttcactatttctgtcaaggaatgncagaacctaagaatgacaattgcgtccatcatagttaaatagactaacgaagtgatagcgaagagatataaacttaataatatctaaggtgcttctcttatttctgtagtgtgtttacgagatatgctaacagagtttcagcctggcaatttggaatctcacaattaagaaagacacatttctactcatcttcctgaattacttcaaaaattatgttagatactttaccagaagttaagatgtattattccttcgaaccaaggntaattattggcactcaagtttcatctttactcacatagggtcaagatacacataatcaaattccagacccactc

SEQ ID NO: 69967 - DNA, 390 bp, Glycine max
  unsure (1)..(390): unsure at all n locations
tgctaccacagnttgagagtgcaaaccaaccatgatactatattatccaaagtgctcaaagctaagcaacatccatctggggatctttctgatgctcatcttagggcataattctgagttctcgtctggtgcactattcatgctccatggatagtgataaatgatagcttgcaatggaggatacgaaatgataattctattaaagtctggtcccaaccttaaataaattctggtgatgactgtgacatctcatatcctataatagctggccacaaaagcctcctagtgagtactcttagtgagcgaccaacaaagacctggaagaaagatgttctataatttctactattaccgcatgtatagctgttaaagttcttatcattacactat

SEQ ID NO: 69968 - DNA, 493 bp, Glycine max
gcatcgccgctgccgcttgaatgtctcgattgtagttatcaatagcggtacatagttttactatcatgatgcggatgggttgagtggtcagtgatgtgtggctgctgaccactataggaaacacattgcaccacgtttctttgttgtgggaatggctatttcctgttagcactttgacccctcccttatctggccaggctctgataggctacaagctcgccctatattggactgaacaaatcccttagctggcctagcccattcattttcttccaaacctgaataattaacagattttttcccgacctgagggcgagtgcaccccgagcttatactgtggatttctatcattttctccccaatctaaaacactcggacaacttatgataagacattctgtcccaagtcaacttctcattatacatagctatcctcgctatttgaggggagggggttgatcgacttcatagtgctcttacatcatcaacaactg

SEQ ID NO: 69969 - DNA, 455 bp, Glycine max
  unsure (1)..(455): unsure at all n locations
gctccacctcttaactcctcttaaccttttccgccactcttctatatatgttcttaatatttaaaaggcacgaatatgacaagtaaagtaatttaaagtaggagacaaatttaatgccgtacttggaggttggagcattatatattacgtttacattaccctttcttcatgttaagctatgagcctatgagcttattatgctctatttcttttctttctgagngtatcctaatcataaccaaaactcgagcttcattttctgttcactacatgtatattgcagacaaacatagtaagggccccatgactccaacttggacacttagaaaaaaatcatttatttgcctcggacctttgtcaaacaaataaaagaatacttgaccgtttattctgtttatttaacttaatattcatgacctctacgttttcatagatatataagaataatattcact

SEQ ID NO: 69970 - DNA, 489 bp, Glycine max
  unsure (1)..(489): unsure at all n locations
agtcacctgccgcatgcaagcttnctctaccgtaagaaaaatattatcggccagttgttttaaaaagaattgcgcaatgtcagcagaaaaatatcagtcgtggctatataacgaccgatgtcaggtattcttgtttcaattcaatccctgaataatttttggatattgtccaataggaaatgttcgatcggcgtcatcaggtgatgcttgctttttattttagacctgctggatcggtcatctttcctggccgacatcgactatcatattttttatcagtgtcggtgaataatggtttttggccgaggtgagctgatgttattctagccgagtaaatgagaacacgccagtgtctgccgaaacacagcttcagttgagctcgcacgaaaaaacagagccgacctacattgttagtgttgtatgcgacaccgaacaacaaaaccaaacctcctctaccagaaatactattatcggcctgcgatggaaatg

SEQ ID NO: 69971 - DNA, 405 bp, Glycine max
  unsure (1)..(405): unsure at all n locations
tttgcttcccttttacgctntgtttctctccaacatgttagtatctcattcttgagctttctagctttccattggtgtatcttggtcttcttttagagctttcaattgtgagaatatggccaattccgtgagacaatatggggcaagtatgtgctttgtttctttgaattgaggggttgtaagggatggccttacgcctangttatgctgcgatataatggagcgagccacattgcccctattcccttattattggcacccaaaagtgcgcccaccacgtgctcagtgaaatgcctcactgacatttgggcatggttttgtgaactttggaatgggagctgatttgtgtgtatatggacaacatgtatagggtaaaataagtgcctcaataaagcacttatacct

SEQ ID NO: 69972 - DNA, 477 bp, Glycine max
  unsure (1)..(477): unsure at all n locations
agtcacctgcggcatgcaagcttcaacatcagaccacttccagggtgctggaactacttatatggacttgatggggcctatgcaagttgaaagccttggaggaaagaggtatgcctatgttgttgtggatgatttctccagatttacctgngtctactttatcagagaaaaatcagacacctttgaagtactcaaggagttgagtctaagacttcaaagagaaaaagactgtgtcatcaataagaatcacgagtgaccatggcagagagttngaaaacagcaagtttactgaatactgcacatctgaaggcatcattcatgagttctctgcagccattacaccacaacaaaatggcataattgagaggaaaaacanngatttgcaagaagctgctatggtcatgcttcatgccaaagaacttccctataatctctgggctgaagccatgaacacagcatgctacattcacaacagag

SEQ ID NO: 69973 - DNA, 462 bp, Glycine max
  unsure (1)..(462): unsure at all n locations
tcaagctcgctctanattacattagatgttgtatttatgggaggaggttatattgccatttttctttaagagtaacgtcccactggtaaaactaactttccaaatgtttgccttcgcaagaatggccccgaggaagcttgcctcaaagaggtccaagaaggacaaggcagccgaaggaactagttccgccccggagtacgacagtcaccgctttaggagcgttgtacaccagcagcgcttcgaagccatcaaaggatggtcgtntctccgggagcgacgcgttcaactcatggacgacgagtatactgatttccaggaggaaatatggcgccggcggtgggcaccactggttactcccatggccaagttngatccagaaatagtccttgagtttatgccaatgcttggcaacagaggaaggcgtgcgtgacatgagatcctgcgttangggtcagtggatcc

SEQ ID NO: 69974 - DNA, 404 bp, Glycine max
  unsure (1)..(404): unsure at all n locations
gcaagcttgcatgatntacattctcccnctttctcaagataatgcttaattcttctcgacatcatgaaaatcttcatgatttacattctccccctttatgacgatgacaaccacctgtgggttaggagcaacaataaagaaacaatgtctattcgcatatagctgactcccccttggctttgcaatgatagcttatatgagacagttgaagatttcatattcttcatatgtaaacagattgtctcataggcaatagataattcttcttactattttatcctttatctttctctgtccctctgccaacatcaaacacaaatcatgaatcgagaggagaaagatgtttccacttgttgcaatgtattataatcaagtgataccaaaagacattgtgacaatcattc

SEQ ID NO: 69975 - DNA, 218 bp, Glycine max
gctcatcggattatgccgcacccgtcatttgtggtactacgtggcgatctggcgatggtacatatcaactatcccatgtccacaagtcaagcataagcacaccatccccaattgcccacctttaaatttagctcacgtgcacgttgtagccttctctctattaatcttagcccgcggcctacgacaatctatccaagctttcacaatatatagacaat

SEQ ID NO: 69976 - DNA, 489 bp, Glycine max
  unsure (1)..(489): unsure at all n locations
acctgccgcatgcaagcttggntatctccttcttcactacatcaagaattatcggttgagtcttctctggggctggcttactaggttatctccatcttctaaatttattcgatgcatacatgtggatgggctaataccaggaatgtccgccagggtccagcctatagccttcttatgcttcttgagaactgacaacaacttctcctcttgctcatcagcaagggaggcagatataatcacttggaagactcttgctatcatccaagtaaccgaattttaaatttgatggcagaggcttcaattctggtgtggtcggctggacagcggtagaaagagatgtgttctcatcctttacctcataaagaaagtcagaggtatgtgtacttcctgaaacatggttagtcctatctgactctataanatcaatctcaggaggagaacaccaccaccaggcatgcaatcaatatcactctcagagtcactctcagc

SEQ ID NO: 69977 - DNA, 461 bp, Glycine max
  unsure (1)..(461): unsure at all n locations
tcacactntcaattgtcgaagctgaatcatatctgcatgttgttgtngtgctcaaagactttggatgaagcaacaatgatgtaagctccattggagcttgctggcctaggatcttcttcatcaatggattcctctgcttcttggaagatgaatggcagcggaatggagaaaggaagagagagaggagacgccacttcaaggagaagatgagtctagaataagctcaccaccataagaggccatggataagagcttggaggaagaaggagatgaatgaatggagagggagagaagagcacgaaattctgtgctctatatgagctttgagatctgaagtttaatattccaatgatcaaagttgaagaaaatgcacacacatgacctctatctatagcctaagtgtcacacaaaattggagggagattcaaatttcacttgaatctgaaattgatttgtggagt

SEQ ID NO: 69978 - DNA, 489 bp, Glycine max
acctgcacgctgcaagcttctacttatgtggcagggcgggcttccttctctttcttgtctccaatgcgagctctgaccactgttctttcttcccgcgatgctccttttcatgtccgcctgagtgggcttatagcctaaaccatacttcccacgatttccttgggtttttatcaagctagttatgccgccattgtctttgcctagacccatcccgggttcataaccgctccccaacataacttcggccatcattaccgccgcatctgacagacaaggttgcccaaagagggagtccacggaggaaatgctgaccacctcaaaagactggaaagcggtttctaacgattcttccgcggcttccacgtaaggcatggaggatgggtagcttaccaagatatcttcctcgcctgacacgatgaccaagtgcccctccactacagaatttagcttttggtggagtgtagaaggcacaactcccactgagtggat

SEQ ID NO: 69979 - DNA, 488 bp, Glycine max
  unsure (1)..(488): unsure at all n locations
tacccanacatgctngtgattaagcaaataanagaatagattgcttgctatcttgattatctatcatagaaattattatttggttcaaaatgagtaagacaatttttttatacttattatgaatatgaaattattttacattatcaataattgtaattttttagcatttatatcattatcttgtctctaactcaacctttagttaaatactaataacttagtaaaacaacattggcaattaattgttaataggaaaaagtggcaaaaaataataaaggatgttagtgcttagcactactgagtttaaaaaggttggctaagattntgntaaaacataagcacttagacaatgaaggaaagctggagttgctgcacatgatgtccaacgttatgtcaaggaataagatcgggctgcataatgcacaatggcagataaagtgtcaagtgatgaattgaagttgaatgattcacgatgtccgatacaatgt

SEQ ID NO: 69980 - DNA, 441 bp, Glycine max
  unsure (1)..(441): unsure at all n locations
tgtagtccaccatcttctcatagtttaatactggtaatgtgtctactatcattatcattctttcttcaacattgaggcgccacttgagttgccaggactctccacctttgggcgtattctttgaaagatctgagcccctatatgcacatgttctattgttgcatcctatccggaaccatatcanaattgtactgatagtgcctaatgaaggcaaccattacgtccttcaagagtggactcgagaaggttccaggttactgtaccaggtaacagctaccccattaagattttcttagaaggaatgtatcacgagttcctcatcttttgcgcatgcacccatctttcgctaatacatctttagatggctcttggggcaagtactcccctgtacttgtcaaagtgcagcaccttgaacttgagaggcgtgatgatattgggtat

SEQ ID NO: 69981 - DNA, 365 bp, Glycine max
  unsure (1)..(365): unsure at all n locations
ttagtctatactttcgtaagctattttagctaagttttttctaacacgaaggatctaaggatgaagcttagtttaagttagtctaaacctacgagagctgtctaaattaagcctagtccaacaagagggatatgaggacgaagcttggattgattcagtctaactagggattgaggtttagtaatttatgctatagcatagaacacaaaagcatgattgattagagaaacatcatcatatacatcagctggtttgttagaaagacccaacacttttagctactactggcaatcttacttacttgcnattttactgtttttagcctagacttaatttaataactgtccaaatcatcaattatcaat

SEQ ID NO: 69982 - DNA, 329 bp, Glycine max
ctcatcagagccaatagcgagaatcagcctcagaggaaatatatgtacccttcacataatagataataatattgatgttacacaaactcatcttttgaatatattataacaccccaatatatcacttttagtctttaaagtgctacaaacactgcattataactgtaatttatgagacccgtgtgcccatgcattacttattgtacctctggtataatgatgactgaaatgtcgtaagttgactcctctataaaaatggcacactatccccctgctgcatggcttcaacacgatgataaacaagattatgccaacgctgctatgatata

SEQ ID NO: 69983 - DNA, 275 bp, Glycine max
cccataagttcacgaaaccaaaatactcttcctgaataacaaaatgcgcctaactgtaattggctctggccaattccaatctaaagcgattgtcagaatggccctgattgcaaacatgcttgagatattcccacatgtctcttgcagtataaaatgatagcatgttctcgaccattatatgctcactggtccccataagccaagaaataatgtgggcatcttgcgtgctccaagaagtcaactcacccacggttgtgggtatagaggaagaccta

SEQ ID NO: 69984 - DNA, 380 bp, Glycine max
  unsure (1)..(380): unsure at all n locations
agccttgtggttagattatggatggcctttatggatgattgngtggttggtatgagaagggctgatattggttgagtaatgatgctgttgagctggtgggggaatttccatgtatgaacgacagtcccaacatggggttctccttcattctcaccctcttcatttgccccagatttcgcattcatcaaagcaagatgatcagatttgcctctttcttgacccactttgatcctttcaccggcgaagaccaaatccgcaaagcttgaaggtgtgtaacccactattnttccatataagggttgtggttgggggcgaaattgatgcccctncaaattgtttagcatgggtataccatcaactgcttgcccttcagtggcata

SEQ ID NO: 69985 - DNA, 368 bp, Glycine max
  unsure (1)..(368): unsure at all n locations
tataaatggtgtgatgtgttccattgtanaccatgggaccattgctatgtgcaaagaatgtgaagataccataatagctcaatattgcagtaagtccaccacagacaaggaaatctaggagggctagttggttcactctgtgagaatcaactttcctacaacaatatttatagagttctacagttacccacgtaaaagcgtgtagttccctcatacacgtcacaaatttattattttaatgttaaaatttatcgatatgtacgtcattgttattggttaaatgcaagtttaaacccttaaataacggccaggattgaagtgtcttttaaatgaaaaaagatgagtataataagaaatcttatgatatg

SEQ ID NO: 69986 - DNA, 451 bp, Glycine max
  unsure (1)..(451): unsure at all n locations
tgagaattcttactctcttctctctattatcatctttcttgcaactcttccatagtaaagcccttaatggccatgagtggctaaaccccctatttatggcctgacaggcctaaaaagtcaaagagatgtatgatgtacttcatatttatcaatgcaacaagattcttttctacgtttctctaggaatttctattctattatccttactgcttttatcttgcattattcatctttatattcttttaagggttagacactcgggagaaggtaacttctaaataagatttaaagaaaatatgcatacattagttttatgggttagacactcggaagaggataacttctaatagaacatanagaaaggatttcatgagaaagtcattgctaggaatagaatgatcatttatgcgcatgtattcttgcaatatctaaattatacttatgcatttat

SEQ ID NO: 69987 - DNA, 465 bp, Glycine max
taagcgcatataatgcacaagcctatactacttgtgctgaaattcaaccgttgaaggagaggaaaacaaatgcaagagattctgaaaccgtttgtttgaactacatagcaaagtccgttttatatagactcgatgcaatatatacaaataaatacaggagataacattcctatttacatcatacgatatgcctataattacaaagatcctaattaaataagataacagatcataaaatataaaagaaaaataaatcctatgagattatcttggatactctaaatattctaagatataaaaatgatatcattacagagttctaagattttctatcactcccctcaagctaaagcttattaagctttcagcttgtgagaaagatgacaattcatttcctcacacataaataggaagactaaatattgagctccaccaatacaatagtttgaaaggcaactcaatgat

SEQ ID NO: 69988 - DNA, 457 bp, Glycine max
  unsure (1)..(457): unsure at all n locations
tgcaagcttgctntgatgcttgccgttctgtgtccactgtttctgctctttgacttgtctactctggacgctggtttcttgactatgaaaaaactaagacaccatcatgattgcatgttatatgaagttggtgatgacgaactangacccacatctgtgtaatttgttttggactaaggaaccactccttcaagatctcagtacatagaactctcggacgcccaaacaggtctttagacgataaatgctcggacaacgattcttatggcagtctacaanggtgtcttgagctcactaagaagagttgttgtcgtgaagagaatcttccctgacttcgagaatgccgagagaggttttaccaacgaggacaaaagattaagcccgtagattctctagaacttggtccagtcatacggttgtgttactaaaatgcaagtaatatttgtcttcggttctt

SEQ ID NO: 69989 - DNA, 498 bp, Glycine max
  unsure (1)..(498): unsure at all n locations
agctcacaattgaatanaacgttcaataactgctggtaatcgattactatatatgtgtaatcgattacacagcgcagattntgaattcaaattttaacagctgttgtaaatcatttttggccattggtaattgattaccagagagtaaatctcttggaaaacactttttaacttaaattacttggccaaacctgttgctaaatcaattaggaattcccttcctaaaatactagtgatcatcttgatgttgtggcgtgtattgttgaatctttgtcttgaatataaacttgaaaagcccatttgcatcatttacatcaaatcatcatgatcatcatcaaaacaccaaaggcatttgcttctacaatctccccctttntgatgatgacaatataagtcctgaaatcaagatttaagcaagcaatgtatatatataaaatttgcgtgttacttcccctatantttggaattaatgatcacnttgattctaacttttatcac

SEQ ID NO: 69990 - DNA, 145 bp, Glycine max
ctgcaagctgttggagtagaaacatgggaccaactcattttttttataaagaaagtctaatctattcaaggtctgagagaccatacaagtttcctaacaatttctaattatgtgggccattaagtctatcttatgctgacaatag

SEQ ID NO: 69991 - DNA, 440 bp, Glycine max
tcacatgattggtacatgatgtgggacttgtttgattcaatctttgctcatatggatgagggaaagagtggttgttgatatctgcactttatgcagaatcttgctgttggaatgtgcagcagaattttgtataagtgcagaaaaacgcttgtgcatggctggttgtgaaaagggtagtacatatggggttctggacattttctaacagatcccaacggtcaaaatgtagaaatatgtactagagacttccagtaaaattgtcgagtcgatccaaccgttaacgaactggaacaaagagaatgttactggggtaattgaatgtgaaaagctgcgatgttggtttgtgttttgggcagagtattctgactatgccctagtttcttggctgtgatatgttgtgatgattgaatgttgaattagttggatgttgtggaatcttg

SEQ ID NO: 69992 - DNA, 490 bp, Glycine max
agtcacctgccgcatgcaagcttctacttatgtggcagggcgggcttccttcgtcttcttgtcttaatcgtgagccttgacttccgcctttcctttccgtgatgcttttccttatatctgcttgtgagggtttgaagcctaacccaaacttcccacgatttcctttggcgcttatcaggctagttatgccgccattgtccttgcctaaacccattccgggttcgtaaccatttcccaacattacccgtgccaccatcactgccgtatctgacagacaaggttgcccaaagaaggaatccatggaggaaatacttaccacctcgaaagactggaaagcggtttctaatcgctcctccgcggcctccacatatggcatagaggatgggcaactcaccaagatgtctttctcgcccgatatgataaccaaatgcccttccactatgaacttcaatttctgatggagtgtagaaggaacgactcccactgaatg

SEQ ID NO: 69993 - DNA, 477 bp, Glycine max
  unsure (1)..(477): unsure at all n locations
catgaaaactgtctgtgcagagacagagatggaaagatgttattacccagttacctaggggagatttgcgatccgttcctagtcaactacactattttggcactaggtttgatcacatgtcaatgagctagttacagaaatgatccaacaattgaatcagctcggctaagggtctggtttccgattcaaccaaccgggccgagccgagtttaataacactgattgggagggttccttacttagtattgaaaatcatgctttcaatctgatagtaggtagtaaagttcttattcatggagtatgtctcattaagattctcccgcatttcacaaatggaggtagaaaacatacaattatagcttatttttgaatcagagtgctataaccaggnttatgataagagcatcctcaatatgccatgcctcaaactttgaccaccactntctatatggcataacatcatatgcctttgcaagt

SEQ ID NO: 69994 - DNA, 344 bp, Glycine max
tgcaagcttatatacacccatctcactagattctcactttatatttcttaccttcttctctcacttatttccaacgaccactccattgccttcagcagcggcgtcaccacccaccgacatcattctccttatgccatcaaaacacaaaaatcaaaacaaaaaaaaaatcaataactaacaaaatcaaaacacagctttctttagcttgttaggatccttaacaactttcttcgattggttcttttgattccagtgcccttgcgcttcaacctaaacaacaggatgtgatgggggaattaatgaaggcgagaatggaaggaatctattagctgaggaaaacaaat

SEQ ID NO: 69995 - DNA, 332 bp, Glycine max
  unsure (1)..(332): unsure at all n locations
agaacattgaccctttctagggttgatatacgtgtttaggatactaactatgattcagtgaagtggtcaggataagtctcgttgccaacgataaactgaaggtctggacatttgttaggtgacagattgcgtccaatcaccgcttgtctttgtcactttaaacgtagataacccattcgagtgaagggtttagacacctacacactgtganggtgggctctaaagcttgactgtggatcacacatgatcgatcctttatttcggacatacttgagtctacttgtgcaagattctatgataggaagcgggagtttcaaaacttcatctatgca

SEQ ID NO: 69996 - DNA, 461 bp, Glycine max
  unsure (1)..(461): unsure at all n locations
tagctttcattggtgtatgttgatctccttttggtgctctttattgtgggaatgtgctcaaatatgtggggcaattttggtttgttntcttgcttgattaagttgaattgggggtttgtatgagatggccctatgcctataatgcatcttgaagtaatggggcatgccacattgtccccgttctcttgctattgatgcctaaacgcgcgcccaccaagtgttcggtgaaatgcctcaacggcattagcgcgtgattgttgtagggaaacaacccatggggcaatttggtttgcacatatttttgggacatgcattcattttcgaaagagctagagtaatagccccgcatatgtcctatgcctagaaactcaaattttatgcaaaaagaatactataagaggtgcatattgggtaaagtaccctttttggcctcaataactatgggcccactacaatatttt

SEQ ID NO: 69997 - DNA, 409 bp, Glycine max
atgcaacattagttaactctaggtgtacgagacatcttgcgcaacataatcttgttcacgatcactcgcctgagcttgttcttccatgctatatgtagcaaagagactgatccagttatgtgtgaggagatggaagatgacgcctgccttatactgttacatctatagagactaggttatcactctgaccctttgcatctggcaaaacaagctacacatgtgttttacgtgcaagacccttgtgatgaaatgtggtgcgtggttctgcaaggcacaacagttggtgttaatgtagaagatgatgatttattcatggacaccgatgtttgcctctgatcgctaaatcactggtaacgttgtcggagacgaagtatctgttacattcatgcacatccaagatatcatgatg

SEQ ID NO: 69998 - DNA, 468 bp, Glycine max
  unsure (1)..(468): unsure at all n locations
gtgaaaatgataaacccccaaagattgggtatattatagaatgaacacgtntgattaagctgacgaagacgataaaaatttatccataaacaaaaacatcaaagaagatgaacccctactcgtggagtttttatataaaaactgacgtagtagtatgctataacaccttctctgcatgcaattgagactgactaaaaaaatgtaagcatctgtattgtgagaaacaaataaaacatatctgtgtgagataaaaatcgaagccttttggagataaaaatcgcagctttagtgttgcttcagcttctctgcatacaatagtaaagagattgcgagaaatcacgaaacagaatataaataattacacttttgtattgtctaaagtcacacagaagaccaaccctccctcctagtttcggataaaaatgacagctntggtgtgttgcttcaccaagaacactatatataaat

SEQ ID NO: 69999 - DNA, 218 bp, Glycine max
agcatgtggcatggatggcttacatctttctgtgtctcatgcctctcatcaaggactaaggcttttcttaagacctatatttgatgaattctggccgttgggggcaattaatgcttgcctaaaatgcccatcccttctttatacaaagagtctatgtctatacgctggcgtgacatacactaaaacacataagggcttctaccattatagcatatttt

SEQ ID NO: 70000 - DNA, 473 bp, Glycine max
  unsure (1)..(473): unsure at all n locations
tagagataatccctgcaagacctattttattgttcttgtgttaaagtntcttgatgcacagcggagctatataatacttagtggttcttcagacatgatcttcactcttgtttaggttcacctcaactttcagtttatgttgttgcttcaaaggttaaaaacacttcatatgatttttagtgctgtaatatgaattgttactttgccttcttttntttttttctggaaattgatgtccgatgattagaagtcaaaagctaaaattggacagctatgaagattcattggaatatatgaatatttttaaatagtatgtttttttaacaataataatgttaaatagtgaaagaagataaagaagaataacatatagtgagggaccttttccgttgctagctacgtacacaatgtttgccttgaatttctctctaattcatgatacaacatgttatgatacttatctatacgattat

SEQ ID NO: 70001 - DNA, 218 bp, Glycine max
  unsure (1)..(218): unsure at all n locations
actttcgcctttccttaccgtgatgctntaccttatatccgcttgagagggtcagaagcctaacccaaactccccacaatttcctttggcgcttataatgctagttatgctcccaattgcctagcctaaacccattccgggttcgtaaccattatcctatcttacccgagcccccatcactgccgaatttgactgacaaggctgaccagagaaggaat

SEQ ID NO: 70002 - DNA, 343 bp, Glycine max
  unsure (1)..(343): unsure at all n locations
gcgaaagccncactccatcattatgattagtttctgacatctcaaacaaacagatcatacgtaacatgttaattatttttgttgcttgaatacctcacccactcaagtgtatcacacaattatggcttttctctaatgaaacactctagccttctaccactctaattccccttgagttcttaagcaattcaagagattatggccacaacaaagaacatattaccaatatgtgtcacgtaatgctagagagacaatgaaaaggttaaccaagaaaaaggctaacaatgtattgaataatatctggatgatgtccattacgaaatgtcagcgtggtaaatacatc

SEQ ID NO: 70003 - DNA, 426 bp, Glycine max
  unsure (1)..(426): unsure at all n locations
agcttcttgcgtagccgctcttggagctcagaagatcccaaagacaaatccctcttattactagctattttgaattctttagttcctgaatgtacaaccttcaaattgttgctcattcccctctttggtttctgcanaaaagaaaatccatatcaaagaaaacatggatgaagccctcaggatgccatgtacatgtgtatntctgaagatatagtatttatattccatcaagcatacattgactgctgattacatgtaatagactttttataacatggttgccccaaatcacaattaanaagcacaactaccaatctttcagaagcctttggttaattgtcttgtcttcttctgcgggggggtttgnttaataattatatactcttgctttcaaaaaaacacttatgactacatcttttttcatta

SEQ ID NO: 70004 - DNA, 391 bp, Glycine max
  unsure (1)..(391): unsure at all n locations
ttacagtcacctgcggcatgcaagctattcgcaagatatatgggaagatatgggattttgctatgatagaagcgtctgttgaagccatgccatccctcattcaatattacgaccacccgctgaggtggttcatgtctgggaactctcagttagtaccanccataaaaaaatttataggtatcttgngatttctgctcggaggaacgacaccctactttgtttctgtgttctaccccttcatgactagactagccaaagtggtccaagtctttgctcaagaattggacctagtaaaacaaaataaaaatatggtggtctgaataccaaagaagctcttatgatagaaaagtgaatgcttttgcggaacaacgtgaatgggcttcattcattg

SEQ ID NO: 70005 - DNA, 450 bp, Glycine max
  unsure (1)..(450): unsure at all n locations
gagcttctatggaggctggatctntgagcttcaatgttgtcctctaatggtggttttccaccatggagatgtttctgaagacaaaggagaataggggagaggaggcgccatccactatggaataagccatggaagaaggagcttcaccaccaagatgagccttggataagaagcttggaaggatgcttcaatggaggaaaagaaagatggagagaaagagagaggggggagcacgaaattgaaagaagaaaaaagggagagaagttgaactttgagttgtgtctcacaagactctcattcatcaaagttacaacaagtgttacacatgcttctatttatagactaagtagcttccttgagaagctttcttgagacaactttcttgagaagcttctctgagagaactttcttgagaagctagagcttagctacacacacccctctcatact

SEQ ID NO: 70006 - DNA, 483 bp, Glycine max
  unsure (1)..(483): unsure at all n locations
cttaagtcanctgcgggcatgcagcttgtatgattatggggtacccatcacatgtggttctatgtggcggtcgggcgatggtgcacaacatgttttccacatccacaatgcgcgcataaacccaccatcccctgttggccacctccaactgagctcacgtactcccacgtagcccatatcctcgtttctctcaacaccggggtcccatcaatccttccaagcttccacaacatccaagcaaaataacattcaaacagcacaagctatcacagccaagcaaaacagagcaaaggcagaaaactctgccaaaacaccaaccaaatcacaacttttctcacttaaagaccccagtaacaattgcttcgatccatttcgttaaccgttggatcgaccccaaaatcttactgggagtctatagtgcataagcctacattgtgacgcgtgggatctactancanacattcagaactcattctgcactac

SEQ ID NO: 70007 - DNA, 449 bp, Glycine max
  unsure (1)..(449): unsure at all n locations
tcatggtgaatcaaaggtggtttgatgataacaatgatgataacaaattatgatgacaaaggagatgacaaaaagctcaaagatcaatcaaagaacaactcaagtgaaccaaagaacaactcaagtgaatcaagaacaattcaagagtttaagaaaagaatcaagaagaattcaagactcaagaagaaagtttagagtcaagaatcaagattcaaggttcaagatctcaagaatcaagatcaagattcaagactcgagattcaagaatcaagagaaggcttaatcaagataagtatgaaaagtttttctcacaaattgagtagcacatgagttttctcaaaacatgtttaccaaagagtttttactctctgggtaatcgataccagattattggtatcgattaccagtagcaaaatgggtntcagaaagctttcatttggatttacaac

SEQ ID NO: 70008 - DNA, 464 bp, Glycine max
  unsure (1)..(464): unsure at all n locations
gcttagtctctgcagatcttcacacaacaaaatctctcaaaactctctggaacttggacctttctctctctagaatctctagacatgcaaagctctgaatcccagcccaaactcccttcacaaaatctgattttaggcttaaataggtggctttgtttgtgctcgtgcgcttaacgagattatgatccacttagcgcacattangtgaatttcgcttagcgctcttttctcgctcagcagatgggctgaagcggtgtgcttgatgagatgaagcggtgcgctcagcgaacctgtacaactcatcttcttctagatccttcctcacacttagccactaagtgttgtgcttagcgaatgctcgctaagccaacaaattggcttagtgaggaggtgaaaaacaacactttgccaaattgcctaattcacttngaaatgagaagaaatgattattaaatacacaaaat

SEQ ID NO: 70009 - DNA, 424 bp, Glycine max
  unsure (1)..(424): unsure at all n locations
tttgagatcaaaccttgccactagtaatcgattaccaaagagtaaaaactctagtaacttannaattttttagagaaactctnttgaaaaacaaaactgtgctatgtttgttttttgaaaaatcttttcaatacttcccttgtgaagtcttcttgatttcttctcttgaatcttgaattcatcttctcttgaatcttgaaatcaaacttctcttgatttttgaatcttcttgatttcttctcatgaaacttgaaattaatcttgatcttgaacttgttgactcaatcttgaaatcattctttgggctttntgtcatcatctttgtcatcatcaaaaatacttgaatcaacttgattcatcatcatgaagcttgcttctatagtccttccaagaacgaatctgggaaacttccaagttagtatac

SEQ ID NO: 70010 - DNA, 438 bp, Glycine max
  unsure (1)..(438): unsure at all n locations
atggaatacttacnttgtggtgatgatcaatatctcataatggaatcaaaaaaatgcgaaaaaggatgaccctnaggctgcgaactcgtcactcccgtgggtatggcttttgaaaggggggaagggaagtttttgaatgcaaaaacgtcccccctctcgtcattcttatattttggtgcagaggtggctcgcccaggcgagcctagcttcgccaggcgagctaacctgcacttttttttttttttntttttttttggggaacattaaccatgtcccctcccttctcagggattagcattttgcctaacttgaacttacttaggtcagaattaggcgctgattacttattttatcattaatcttttcccaacaaatagaaaagaaagcttgcaaatcaaaggatacgggctgctttctctacattcctgcttgttccac

SEQ ID NO: 70011 - DNA, 248 bp, Glycine max
  unsure (1)..(248): unsure at all n locations
gctactcggggctttatggaggctggatcttgagcttaatgatgttctttaatggtggttntccaccatggagatgcagtagaagacaaaggagaagaggtgagaggaggcaccatccactatggaataagccatggaagaaggagcttcaccaccaagatgagccttggataagaagcttggagaggatgtttcaatggaagaaaagacagagggagaaaaagagagaggtgggtgggggcgccttt

SEQ ID NO: 70012 - DNA, 425 bp, Glycine max
tcactaaacaccgtttatagtccttctccttaaacggtcccttatgctgtgatcggttaacatggaccgttcaaaagcataaaatcaacatgtaactttaccgcttttgctagaactacgtaggtctgatttcctcatcgcaattgatgatacgtatgaacaaaagctctgactttgtcaaccaccccaagagatcgttaatggtccaataccttaacgtttctctcctttcaaagaaacaagagatcaataatggtccaacgccttaaatgacttttatgtaatcaacatctatcttttgataaaagataacaacaacttaaccaacgttcagttttcatagaactacgtatgtctgatgttcttatcacaattgaagaatacgtaggagcaatggaaacacccttgtcgaccacaaaaagata

SEQ ID NO: 70013 - DNA, 486 bp, Glycine max
  unsure (1)..(486): unsure at all n locations
tgcctcacagagatccagganagacaaggcggttgaaggaaccatttctcctcccaaatatgacagccatcattntaggagcgctgagcaccaacagcgcttcgaggccatcaaaggatggtcattcctccgggagagacgtgtccagctcatggacgacgagtatactgacttccaggaagagatagttcgccggcggtgggcatcgctggttacccccatggccaagttcgacctagacgtagtcctcgagttttatgccaatgcttggcctacagaggagggtgtgcgagatatgcgatcttgggtgaggggtcagcggatccctttcgatgcggatgccctcagccagttcttgggataccctntantgctggaggagggccaggagtgcgagtatggccagaggaggaaccaggccgatgggtatgatgaggaggtcatcgcccagttactgtgtataccgaggcatgattttcctggact

SEQ ID NO: 70014 - DNA, 142 bp, Glycine max
accagaagacagggttgacatgcacagtgcttgtattgatgagacagaatctactagaggttgcattagtattgtagtgcattgcttagagatcaaccatatctaagttcacatgagccactgtagtactctatagatgatt

SEQ ID NO: 70015 - DNA, 292 bp, Glycine max
ggatcatgagcttgaagggagaaatttaggatagaggtcgatctgtgagtattggattgtgcctctacccattcaattaaatttattttcagccacacacatcaaatatagtagcatgtgaaacgactaaaataaccctacttcaaacactattctacgcgccctaagagacaaaggctgataaattatatatttctagggtaccctaccctacttatcgagctctctatatcaggaccacaattaatgaaatcttaatctcctatgcaccaacattagcggggtcatactt

SEQ ID NO: 70016 - DNA, 496 bp, Glycine max
  unsure (1)..(496): unsure at all n locations
ctttaactcgaattgcaatgttccaaatgttntttaaatggtgttattgattacaatatattggtaatcgattaccagtgtatctgaacgttgaaattcaaattcaattgtgaagagtcacatcttttcataaaatgctttgtgtaattgattacaaggttatggaaatcgattaccagtgacaagttctgaataaaaagtcaagagatgtaactcttccaatggttttctcaagattttctcaaggttataactcttctaatggttttcttgaccagacatgaagagtctataaaagcaagaccttgacttgcattntcaataattttacaacttttgaacttctttgaacaacttttgagatatcttgaaaccttcgcttctaatctttcttcttcttcctttgccaaaaagctttctaagtttnntgtttgcaaacctttgtcttctgcagaannacaaagtgtgctatatcttttcattctcttctctcttt

SEQ ID NO: 70017 - DNA, 454 bp, Glycine max
  unsure (1)..(454): unsure at all n locations
agcttattgtgtaaacacctattgagtgatttatatacatttctatcaaatatatattatttgtgaaagacaagagtgacttagagacaaataatatttggatcttaatctcaaggggagattaagtatagtgctagaagtggcctagagagtactcattgtagtcaaaattgacatagaggatacttggttgtaatcaaatattngattaatgaaacccttcaaggtttgaaggaaaattgaacatagcccaagaattagagtgaaccagtacaaaatctttgtgttttcattactgcatctatataactagttattttctttaaatcacttccacattatcatattaagggtttgtgaattagttttctaaacacanagttattttgaacccattggatgaaaccctctgcccatcgatatttgtctgagagaagttttcacacacacatat

SEQ ID NO: 70018 - DNA, 444 bp, Glycine max
  unsure (1)..(444): unsure at all n locations
tatagttattggagggagaataaaacaatccanaatcaattgttcccttcaagtaacgaagaattctttttgcagcttttatatgagaagaggtaggagcctccgtaaagcgacacacaactcccaccgcatatagaatatcgggccttgtattggttagataccttaaactccccacaagactcttgaagaccgtggagtctaccttctctccttcatcaaactttgataacttcaagccaccttccatatgtgtgttcacgggattgcaatcaagcatattaaatttcttcaacacttcttttgtgtagcttccttgtgagacaaagatatcattctccgttggcttcacttccattcccaagtaatatgacatgagtcccatatctgtcatatcaaattcacgagacatggacttcttgaagcttcaaacanattgggtta

SEQ ID NO: 70019 - DNA, 473 bp, Glycine max
  unsure (1)..(473): unsure at all n locations
tagaacaataaactnggccttctcttaattgtctntgggcttgtctaccacgatcaacaaagtactttcggcacctactatatgttgacttgaccaacgctgttattggaatgctgcgacaatctttcaacaccttattgacacattctgataggttggttgtcatgtgaccatatcgtcgtccagatgtatcgtaagccatgctccatttttcctttgaaatgcgatcaatccatcttgctatggctggactcagttgacgaaatttttctaagttttgatcaaacacatgcttgcaaggagtgtaccgctgcatcaaattgttatcatcaaaagttgtacgtagacatcanactcaaattaaattaatgtataaaatcaaccttacccaatttcttgaacatctctntttgtttcgcgttgttgaatttgcgattgaaangctggctatgtgtcggacgcagtacacatga

SEQ ID NO: 70020 - DNA, 470 bp, Glycine max
  unsure (1)..(470): unsure at all n locations
agctntgtgtaatcaattacactgatttggtaatttattaccagtgattgtttctgaaattntgactgggcgcttagcgtacagggcgcacttagcctaactacaaaaacttaaaagatagtgttcgcattcggcaagtgcaccaaatcacgcaagtagtataaaacggtaagaattgagtatcgaactctcggggaacttgtgttacttggtatagctatttccgtaaataggtgtctagtgtgaaaagagatgtgcttactatgaacaggtgtgtgaactaactattaaaagggaaaaatcacgtgagaaatgatgtgtaaagacaagtagatgacatgttggtcttcctaataggtgcctgatcctagaaggatattctctacttaacaatgctcatgcgttctatggcgtctcatgatagtctagcctaatcctgaccaagcattgtctgcanattcctcttgtgg

SEQ ID NO: 70021 - DNA, 473 bp, Glycine max
  unsure (1)..(473): unsure at all n locations
ctcttatccaggctcatcttggtggtgaagatccttcttccatttcttattccctaattgatggcgcctcctctcacctcttctcctttgtcttccgctgcatctccatggtggaaaatcaccattaaaggacctcattgaagctcaagatccagcctccatagaagccctacaagcaagcttcaatcaagtggtaatcagagcacaagagcttcaagtaggtgctccttanacctccattaattntctactttaccttctcttccattgttgtttcttcaatttttatccatgtatctcctcacatgtcttgtgctaaatgttgttagcacatgagttnttgacaaaacctttaccaaagagtttttactctctggtaatcaattaccatattgttgtaatcgattaccagtagcaaaataaagttgaaaaagttttcaaactggaattacaacgttccaaatattttcaaa

SEQ ID NO: 70022 - DNA, 461 bp, Glycine max
  unsure (1)..(461): unsure at all n locations
agcttgaagctcaagggaaaacttgaagatgttttataagaagttttggcttttacatgcccaactcctttgagtggtatttgtattggttgttatcttgattgttgcatcttagtacatttaatatttgttctgcattatgcatcatcatggttagagtgaagaaaattttctaagttagaaaaatttcttcaaaggcaaaaactctttgttttaatcaattatagcctcattgtaatcgattataggggctcaattggacattcaattcaaaagttatggtcatttgaatttggtcggatcttccattntcaattntgagcgtcttgacatattatgggccccaatcggacattcgagttcaaaggtatggcctttttgaattgcaaggggaatcctttntcaattntaagcgtcttgatatattatgagcctcaattagcaccatgtcttcacgagct

SEQ ID NO: 70023 - DNA, 365 bp, Glycine max
  unsure (1)..(365): unsure at all n locations
tgcaacttatttatgcttcttcttttgtaataccttaggatataagacattaagttagcaatttgattttttaaggttagattggtagtagaatacataaaaatttaaggctttgttaggagttgttaggggtagataattttgattgtggtgcatgtttgatatangcctattagaggcctaaaagaggaagttgaaagacttcctcatctgtgttttttctgtaaaatgtgatgaactcgctgagcacggatggtgtgctaagcgagttcattaattaagccttgaatntatacatttccatatgaatgcgcttagccagcatgcatttgctaagcacattcaaccaggttgtcaaaatgtca

SEQ ID NO: 70024 - DNA, 412 bp, Glycine max
  unsure (1)..(412): unsure at all n locations
aaacatatgtngggagaggtcagctcttatatggatctcagtgtctagaagaaatggtctttggctcccaacttggagataccctaagttcacaaaaaaaaaaaaagatttaaggcattcaagcggtcagtgaattctgactgaactgttggatgaagatcagacgtctcgtatttatcttggtaaatcagacttataatatgcatccangaatttgaaccgttgatcttcattcaatggtgtagaattacgactgtgaatgtgaatgcctgttttcctctatttatagtcaccacagtgattgcatttatgcacaggataattggatatcatttaanaatgacaacaaatanataaatcatggtactgagtagtgaatagattgcacattgcttatgaattaattaatgat

SEQ ID NO: 70025 - DNA, 451 bp, Glycine max
  unsure (1)..(451): unsure at all n locations
ggacatcttgacttgctntccattttttctttaccacaaattctgccttcttctattttgagattgtgaatgcctctaacagcacccttgtcaatgattttcttcatgcctcttaagtgcagatgtccaaatctttgatgccatattctgacttcatcttctctggagaatagacatgtggaggagtaactgggttctcgaggtgtacataggtaacagttgtccttggatctgctgcccttcattaggacttcactcttcttattnggcaccaagcattctgactttgtgaaggttacattgaatccttcatcacacagctgactgatgctgatcaagtttgcagtcagtcccttcaccagcagtactttgttcagactaggaaagccatcatggactaactttcccattccagtgatcttttcttacaggcatctgcaaatgtcacata

SEQ ID NO: 70026 - DNA, 454 bp, Glycine max
  unsure (1)..(454): unsure at all n locations
gcttgtgcttagacctcgatcggtcgtctntcctggccgacgctttctgtctattttttcgatcaatatcggcgaataatattttttttgccgaagtaggctaatgctttcctggccgaattaatggcagcgtgccagtttatggtgaaacgaaacattggatgagttcgcacgataaaacctagccgacctacattgtaagtattatatgcaacacacgaatcagaagactttctctgtcgtaagataaaacactatctgaccacgagcgtgtgttttacaaaaattgcgcaatgccggctgaaaatattattctagccatttcacaccacggaggctttgagtttccattcacccccgatgaaattgcatgtgtggaattaaaatgggaccgcttaatcgggatgctctttttagactctaacggcatcttgcttccgacgtgcgtatcttt

SEQ ID NO: 70027 - DNA, 456 bp, Glycine max
  unsure (1)..(456): unsure at all n locations
ccggatcttaagtcacctgcggatgcagctaggtctattccactctcttcttgaatcttttttaaaaaattccttcacctcattntttttatcaccataggatcctcaacccaaatctcatccttatgtacacctttcaatgcatttttcctccaattaatagttgagtggaaaagttatgtgttgcaatccctttcttttatccatgtatccctagacttttggtgtagcaatgattcattatacttggcacacctccaaaagtcttcttgaagttgtaaccttctcttgatgtcatcttcccctaatcccccattgtcctaaataatatctaactcattgaattctctttcaagttgttgtttccttttttgaaaatgcccaaacacctccaaattccattnttaagcacccttttaacacactttaatttttctttacaacaaacgcacccca

SEQ ID NO: 70028 - DNA, 454 bp, Glycine max
  unsure (1)..(454): unsure at all n locations
gctctcttcgagaaacttccttgagaagctagaacttagctacatacacctctctaataactaagctcacatccttgagaagcttccttgagaagattcctaaagaagctagagcttagctacacacacctctctaatagctaagctcacctccttgagttgagaagctagagcttaactacacacccctataatagctaagctcacccctattccaaaaatacatgaaaatacaaaaaaaaaagtccctactacaaagactactcanaatgccctgaaatacaaggctaaaaccctatactactagaatggccaaaatacaaggcccaaaagaaggaaaaacctattctaatatntacaaagaagagtggatccaaccttgacccatggtctcaaaaatctaccctaaggttcatgagaaccctannggcgctcttagtagctctagcccaag

SEQ ID NO: 70029 - DNA, 439 bp, Glycine max
  unsure (1)..(439): unsure at all n locations
agcttcctctgccgtaaaaaagatattatcggcctgtgtttgtaaataattgcgcaatgtcngctgaaaaatatccgtcggggctatataactaccgatgtcggctattgttttttctattccacccctgaattatatttggatgatgcctattangaaatgttcggtcggggtcatccggtcatgccttcttttgaggcctcgatctgtcgtctttcctagccggccgacgtcggctagcattttnttcgatcaatatctgtgtgaatcatgtttttttttgccaaggagggcttatgttttcgtggccgacaaaatgagaacatgccagtgtcggccgaaacacaatcccgcacgaaaaaccctagccgacctacattgttaatttttcaggcaataccgagcgacaaaacttcgtctaccatgaagaaatattatc

SEQ ID NO: 70030 - DNA, 382 bp, Glycine max
  unsure (1)..(382): unsure at all n locations
ctntttgttcgatgttgcctaaaaaattacaatgcagttcggttaggtttcttcgtgcgaactgaaccgaagttgtgtttcggccgactggcatgttctcattntgtcggccaggaaaacattagcccacctcggcataaaaaacatgattcaccgatattgacaggaaaagaaaaatgctagccgacgtcggccaggaaagatgaccgaccgaggtctgaaaaagaagcatgaccggatgactccggtcgaacatttcctaacagatatcatccaagtattattcagggattgaatagaaaaaacaatagccgacatcggtagttaaatagccgtgactgatatttttcggccgacattgcgcaatttcttttacaaacgc

SEQ ID NO: 70031 - DNA, 427 bp, Glycine max
  unsure (1)..(427): unsure at all n locations
gcttgagatgaggaagtgtagaaaggtgaaactttctgctnttattcgttgaccacagagtggtacctggagatatgtcgcgggggtcaggagaccttgtggacgtcaggtggggtgctattgcccaaaaccaagcttgaccaatcccgacccaacccgggcatagtcggtcagtgagaacctgtgatgtacctaaacaggcgagctcttggcagtcaacagataataggaacaaagaccacaaagcaaggaggcttgtggtggctggccagctgtgaaacttgattgatatgtgagatatggcctctggtaatcgattaccaagggtgggtaatcgattacaaggcttaaaaatgaacacaggaggctaagatggtctctggtaatcgattaccacggggtgtaatcgactaccaggcttgaaaac

SEQ ID NO: 70032 - DNA, 456 bp, Glycine max
  unsure (1)..(456): unsure at all n locations
tctaagggaagtttctcaagagagcttctcaaggaagctacctagtctataaatagaagaatgtgtaacacttgttgtaactctgatgaatgagagtcttgtgagacataactcanagttcaacttctctctctttntcttccttanatttcgtgctcccccctctctctttctctccctctgtcttttcctccattgaagcatcctctccaagcttcttatcccagactcatctgggtggtgaagctcattcttccaaggcttattccctagtggatggcgccgcctcttacctcttctcctttgtcttccgctgcatctccatggtggaaaatcaccattaaaggacctcattgaagctcacagatccagcctccatagaagctccacaagcaagctttatcatcctcaaattctctgtttcttgaaggaaactccatccatangccacctatc

SEQ ID NO: 70033 - DNA, 470 bp, Glycine max
  unsure (1)..(470): unsure at all n locations
agctgggagaggatgcttcaatggaggaaaagaattatggaaagaaagagagaggggagagcacaaaattgaaggaagaaaaagggagagaagttgaactttgagttttgtctcacaagactctcattcatcaaagttacaacaagtgttacacatgcttctatttatagactaggtagcttccttgagaagctntcttaagaaaacttccttgagaagcttctttgagaaaacttccttgagaagctagagcttagctacacacacccatctaanaactaagctcacctccttgagaagcttccttgagaagctagagcttagctacacacacccatctaaaaactaagctcacctccttgacaaaatacatganaatacaaaaaanaaaagtctctactacaaagactacccaaaatgccctctaatacaaggctaaaaccctatactacaagaatggccaaaataca

SEQ ID NO: 70034 - DNA, 420 bp, Glycine max
tgctggaactacttcacatgtactttatggtgcctatgcaagttgaaagccttggaggaaagaggtatgcctatgttgttgtggatgatttctccagatttacctgcgtctactttatcagagaaaaatcacacacctttgaagtattcaaggagttgagtctaagacttcaaagagaaaaagactgtgtcatccagagaatcatgagtgaccatggctgagagtttgaaaacagcatgtttactgaatactgcacatctgaatgcatcattcatgagttctctgcagtcattacaccacaacaaaatggcctatttgatatgaaaaacacgtatttctagaggctgctaaggtcatgctttatgccaaagaactttcctataattcctgtgctgagccctgaacactcatgctattcca

SEQ ID NO: 70035 - DNA, 400 bp, Glycine max
  unsure (1)..(400): unsure at all n locations
gagtctagtccaacaagagggatctgangacgaagcttattttaagttagtctaaacctaggagggctgtctaaattaagcctagtccaacaagaggaatttgaggacgaagcttggattgattcagtctaactagggatcgagggttantatattaggctacaacatagaacacaaaagcatgattgattagagaaacatctttatatacatcagctggtttgttagaaaaactcaatacctttacctattgctatcaatcttacttgcattnttactgtttntagcctatacttagtttaattatgttctacataatcaattatcaatgtttctttcaacaatgctttatttatgaatttaaccctgtctaatactnagtcccttgagttgatactca

SEQ ID NO: 70036 - DNA, 299 bp, Glycine max
tctccaagcttgttatccaagacactctcctggtgttgattcttctcatctcatggcttattctctaatggatggcgtctcatcgcaccttttctcctttatcttccgctgctactccatggctgataagcaccattgaaggaccttattgaaactcaaagattcagcctccatagaagcttctcaagcaagcttccatcaacacatttgcatgtaggaggaatagtgaattgggaagatgacatttcacgacctcgcattcttgctctctctctctcccacgtaagtgtctcctctat

SEQ ID NO: 70037 - DNA, 465 bp, Glycine max
  unsure (1)..(465): unsure at all n locations
gcttccatttgtatactgcaaccataataatattatctttccgttttccctcccgtggatgtagccttgatcaaggtgaaccacgcaattntgtgggttctttctctcttttcttctctntgacctttgctgcaaaattctgtgtgtatgacatttctggcctgctgcatttttagttgctttcttggttgctcttcatcactttcataacaaactgtgatcaagagctcaagttgcaatcaagggaattcaagattctcgcttgaatataaagatcaagttgcgggagtcttgtttctggttctttcgctgcttcttggtgatcaagaacactcaagatattatgtcaaacacaatcacgattgagaaattcaatggaaagaacagcttcaatctgtggcgcatcaagatgcgtgctttgttgaacgaacaacgtgtttgggcttctgttgcatctgcatctat

SEQ ID NO: 70038 - DNA, 487 bp, Glycine max
  unsure (1)..(487): unsure at all n locations
tagaatactaagcctcgcaatgattagtggtttggtccttgactaaagtgtaagtctatagttaggcagaattaggagtatgtaggtagtgacattacagctttatgtgactaatatgaccattttcttcaccattacatttttgtgcttttagcagcaattctaggaagacctacatagaaaaggaaaaaagtttctgactgggggtacttatcttcattgtatatctatttgaacatcaattgctttaaataaaactaatattactgtgttggaaacttgctacactatattcctgggtttccttgagttcattaatgcagctggtttttccggcaagagcaggatatacatacttaacccatactgtcagaactcanattggcaaggattgttcagcaattattgtctcacgtgagggaaatggaacttgtcagcatcaagtatttacaactggtcccatcaatgcagtaccataataaataat

SEQ ID NO: 70039 - DNA, 384 bp, Glycine max
  unsure (1)..(384): unsure at all n locations
atgtgtgccctgagaagagttgtgtccaccatgacccttcaagggctcttggagacttaactgggataaagaaacactcttgcaaaaagcacggtgagaagaagtggaagtgcgagaagtgctcgaagcgttatgctgtgcagtcagattggaaggcacattccaagacctgtggcaccagagaatacaaatgtgactgtggaactatcttttcaaggtaactaaattaacctagtaatctgaatttgctcattccatttgtcgntcgcacatgaatatatatttatgttttntactaaatgattcgaaattttttgatgaatatgtcacaattaattactctnttttcttganagctgagagaacacggttaataaaaaacac

SEQ ID NO: 70040 - DNA, 442 bp, Glycine max
  unsure (1)..(442): unsure at all n locations
nntctagctttcattgagtgtatttgatctccttntgttgctctatattgtgggaatgtgctcaaatatatggngcaattttggtttgttttcttgcttgattangttgaattatgggtttgtatgggatggccctangcctataatgcattttgaaacaatgggacatgccacattgtccccgttctcttgctattgttacctaaacgcgcgcccaccaagtgttcggtgaaatgcctcaatggcattagcgcgtgacttttgtaaggaaacaacccatggggcattttggtttgtacatattttctttttttttgggacatgtattcattcccgaaaaaggctatagtaattgccccacatatatcccaggcctaggaaccgaagtntttatgcaaaagaacacaagaagaggtgcatgttgggtaaagttatccttttt

SEQ ID NO: 70041 - DNA, 456 bp, Glycine max
tgcttatagaatataaaataagagaactctgacttttgtagaatccattcgtgtttcctttgatgagtctaatgttatttctccaagacacgatatgttagatgatattgcgcaatctttagaacaaatgcatattcatggagaagattctcaaggaataggagaaagaagcaatgatgatcctccaatacaagtcatagctaatgataatcttccaagagaggaaaacttcaagagatcatccccttgacaacagtattggtgatatctcagaaggggtaacaactagacactctctcaaagatgtatgtaataacatggcttttgtatctatgatcgaacctaatcaattaaatgaagccgtaatagatgaaaattggataatatctgtgcacgaagaactacaccaacttgaaagaaataatgtttgggagttagttgagaaacctgaaacta

SEQ ID NO: 70042 - DNA, 438 bp, Glycine max
  unsure (1)..(438): unsure at all n locations
ctcagctttagggatntgatgagattctgagtttgtccatcagtttatatttggaaggctgtggatcttaacaatttaacaccatgtgaccgcattatacctgtccacatagtgcttagaaaattgtatctctgtctaaaatgattaactctggccatccatgcaatctcacaactgtgttcatgaataattttgcaacgttttgatgcactgaatggatgtcctaaagctatgaaatgggcatatatagtaaatctatctaccactactaatatgacactcatcccatgagacttctgcaaacctgtgatgatatccatagagattgactgtcatgctctatccggtatacgtagaggttgaagaaaccctacacgtaactgatttattgatatgaatctttgacagtggtgcatccctaatccactacgtgactcc

SEQ ID NO: 70043 - DNA, 471 bp, Glycine max
  unsure (1)..(471): unsure at all n locations
atccttaagcaccgcggctgcagctgctttntaattatcggcatgttatttgttacattntcctacccatactnttcgcataatgctaaataacaaaagataagcaaaatctgtataattagataaaagcatcaacattaagaagccagcagatgaaaaggaacggtaccgaaggatgccgagtggaatgtcgtcatgccatctatcacattctttttccctgtgatgacagttttgcccttcccgtcacctatgaacatcacattcgttttttttctccccaccttcaaattattctcctcatacctgaaaattccatcatatccaaaagtcagcccacatgtcatagcttttatcaactggaatcatgcatcaccataaaatacgaatatattttaaatacacatcggtgaaaaaagaatcacataaaccaatctcaacagcaccagcagcataattaatcgaacatgt

SEQ ID NO: 70044 - DNA, 438 bp, Glycine max
  unsure (1)..(438): unsure at all n locations
tgtaggattatggggtacccatcacatgtggtactatgtggttgtcgggcgatggtgcacaacaagnttttccacatccacaatgcgcgcataaacccaccatcccctgttgcccacctccaactgagctcacgtactcccacgtagcccatatcctcgtttctctcaacaccggttccccatcaatcctcccaagcttccacaacatccaagcaaaacataattcacacagcacgagctatcacagccaagcaaaacaaagcataggcagaaactctgctcaacacatcaaccaaaatcacatgctttctcacgtaaagaccacagtaacaattccttcgatccaattcgttaaccggtggatcgactccaaaattttactagaagtctatagtgcataagcctacattatgaaccgtgggatctactataaaacat

SEQ ID NO: 70045 - DNA, 454 bp, Glycine max
  unsure (1)..(454): unsure at all n locations
agcttaatgaagccataagaaaagatnttgcagtgtttatctttctactatnntttggatggatattcaggttataatcagattgatgtagacccccaagaccaagaaaagacagctttcacatgtcccttcggtgtttttgcttatcgccgcatgccatttaggttatgtaatgctcctgctacgttccaaagatgtatgatggctatctttgctgacatggtagagaaatgcattgaagtctttatggatgattnttcagtctttggtgcatcttttgagaattgtttagcaaatctagaaaaggtgttacagcggtgtgaagaatccaatctggtacttaactgggagaaatgtcattntatggttcaagaaagcatcatgttgggacacaagaattcgaanaaaggaatcgaggtggataaagcacaactagatgttattgataaacttc

SEQ ID NO: 70046 - DNA, 450 bp, Glycine max
  unsure (1)..(450): unsure at all n locations
ggcttgtggagcttctatggaggctggatctttgagcttcaattaagtcctttaatggtaattttccaccatggagatgcagcggaagacaaaggagaagaggtgagaggaggcgccatccactanggaataagccatggaagaaggagcttcaccaccaagatgagccttacataagaagcttggaaggatgcttcaatggaggaaaagaaagagcgagagacagagagaggggggagcacganattgaaggaataaaagagggatagaagtgaaactttgaagtatgtctcacaagactntcattcatcaaagttacaacaagtgttacacatgcttctagttatagactaagtagcttccttgagaagctatcttgagaaaacttccttgagaagcttctttgagaaaactatcttgagaagctagagcttagcatacacacaccct

SEQ ID NO: 70047 - DNA, 423 bp, Glycine max
  unsure (1)..(423): unsure at all n locations
agtggtatcagagcacaagagcttctgtgtgtactccttanaccttcattcattgtcatattaaccttctgctccattggatcttcatntttctacatgtatctcctcacatgtcttgtgctgaatgttgttaacatgattctttagaatttccacttattaaacttgctattgaagctagatttgattntctatggatcatatttcttgttcttattctcgaaccgagaattgtgctgagtttaagatcctttgagtcttgtattgctattcttctgtggccggaacctaaaccatatgattcttacggaaacattatagtagatgaaaacctcaaaaatctatagggacatgttcattattgtaggttgtcatacagagcatgtctactcatgaaacttgtcacataagattccttatgct

SEQ ID NO: 70048 - DNA, 357 bp, Glycine max
tgtgcccgttggatcttgagtcgttacccatatacacgtgctattgactgatgacaccacgctgtgacctccattcgtccggagcatcgctcttagcacagcttccaaacacttgcaggtgagagatccggggcttgcttacactccatgcttcttgcggtgtcttctcatgcacgctcaccgccgaggaacagatggatatgtggactgcacatgccactggttcaggccgaactccttctgcatgatcttgatctcgagcatgcatgcaccatgaacagatggtgcggctcttctatccggactccattcagaagggcgatcttagcactgacgatgtgcgacggataacatggt

SEQ ID NO: 70049 - DNA, 451 bp, Glycine max
  unsure (1)..(451): unsure at all n locations
cttatacaagaatgaagctctgataccacttgttagacaagtggcctcagatatattaagaaggggggggttgaattaaagatatcccaaactatctccccaattaaaaaattatttcactttcttttcaagttatagattcccttaacaatgaacttcttaaatattaattcaaatcaaacaatttgaatatgaatgtnaagcgataataaacaaaggagattaagggaagagaaagtgcaaactcagaattatactggttcggccacacccttgtgcctacgtccagtccccaagcaacccgcttgagagttccactatcttgtaaattccttttacaagttctaaacacacaaggacaatccttcctttgtgtttagaattcctttacaacaagagacccacggtctcttaatcccttatagaatgagaagaagaagaagaatgaatc

SEQ ID NO: 70050 - DNA, 441 bp, Glycine max
  unsure (1)..(441): unsure at all n locations
tctaaacttatgagggatcgaggtttagtattntatgctactacatagaacacaaaagcatgattgattagagaaatatcttcatatgcatcagcttgtttgttagaaagacccatccctttttacctattgttgtcaactgtttcttacttgcatttactgtttttaccatagaagtagttatttttgtattaaccatccattatcaatgttgctccaacaatgccttacttctgaataaaactgtctaataagcaagttccgtgagttcgatactcgaatcacttcattntaattttaaatacttgacgacctggtgcattttccggagaatcggatttcccttgaacatatttgtataaaggaaaattggaccaaacagtaactgcaggggaaatccatcaaagtatctatgggcgccgtgccggggaacttaattca

SEQ ID NO: 70051 - DNA, 315 bp, Glycine max
  unsure (1)..(315): unsure at all n locations
ctttgacataaatttggctcataaaaataattgttggccccatttaaaataataaataggaagaaaaccttcattccgggtttaacttatcctggtgttaaactgtgcaacaaactagccatttctgctatacatggtntttttttctcttttttaataaaaatactgctcatcctttgaatttcaacatggaaacaccacactagggaaatatagcaaaatagcatctttatctatctgatacatacaataattgtacaaatctattccatacattctataatgttacaacatggacttcacattatattaact

SEQ ID NO: 70052 - DNA, 499 bp, Glycine max
  unsure (1)..(499): unsure at all n locations
tcgccctacgcctccgaatntatgtcctcttgaacgaaccccttatatgtcaaagtcaaccatctctgtccncatccattcatttctgccgccgaacaggtgatctggatcttgacctccttcccctgcataaaagggttacagtaaataaacaaggcaccattgtaacataaatatgaagcctgacaaattcacctgtgcagcttaatcttatatgatgatggaagtttgtctgaaaaacataaatcttaatcttgaanaactctggcaacaaacctggaagaatcaagagaagtatatggagaatgcctgcgctgagaatgcttgctatgaggagaccgcacaagttgtctaaaaatgaaaccaccgtactgactnggtgagtttaaagtatacataagttcataaatacaactcaacctggtacagtgtcaacacttcattggaagaaagcctatacaatacatnctatctgtttctaatgagtatgatcagaatc

SEQ ID NO: 70053 - DNA, 457 bp, Glycine max
  unsure (1)..(457): unsure at all n locations
agcttgacagcaatactccagnttaccctctatttctcttttcaatgtngttgctactacaatatcatcttcgaaaggcatgcattgnggtagcttcttggatatgcttggcacttcactaggactacatgctcatgctatcttatgcagntacgcaaaatcccattgatctcagaacatggacaatgcatgtccattataccatatgttaaaatataatttaattttgaagaacgggcggcaataattgaaatcctaaccacataatcgcaatggctctgatataatgtcaaagggtatctccaagaaaagctttagtgtttgcttggttttccattagaatgaagcttatagcctgatggatgaacacaagctaatctggtaggtggaggtttagggctagtcttatatctctaatatgctctatgagtnctgtgtgtgtgggttcaaatagtga

SEQ ID NO: 70054 - DNA, 458 bp, Glycine max
  unsure (1)..(458): unsure at all n locations
ggtcaacagtatttanagtacactattgacacatctttgcatactaatctttcttgagaacaatgtttataaaccattggacaacaatctactgctttctgtgaaaacataagacttattagtggacaacaatttatgtgaacttataactacttctaagatcacttccattgtgaaaagttttcaaagtttatctaacacactattcaaccccgcttctagtatgatttgttgtatgtcatcatagtccttggtctttccattaatctaacttagcttagggttagtttagtttattttagtttcttttgctcgaggacaaacaaaactttaaatttgggggagtttgataattgttgtgcatgcttaacttcttcatttaatttacacattangtataatactgtttcatatatatagcttagtttgataccatttaacagagaattaacattttc

SEQ ID NO: 70055 - DNA, 403 bp, Glycine max
  unsure (1)..(403): unsure at all n locations
tagcacacttcagacttctttctatagatcccaacgggtaaatcatggaaaagtgtcttgtgaagtgtaagaccaaattttgagaagaaccaacggttaatgaaggctgggcagcggttttaccgaggcagctgcatctagctctctctagaagcttcattaagaggctttctctagaaagctcctcgtggcttctttgagaagctttctcaacaggtttctttgagaagctagatccttatctatccacacccctctattaactaaattaactttcttanaaataattacggatgaaaataacgcatcaaataatcaaacatcaaacataattactaataatatatagatatataaatcagggtggtacaattatgtggctcataaatagaaattaagtagt

SEQ ID NO: 70056 - DNA, 399 bp, Glycine max
  unsure (1)..(399): unsure at all n locations
acacttaaaactaagctgaaccaaaaccggtgagagtgtgaccttactctgtgagtgatctactaactgtgagtaatgatctntgcatgaatctcgaaattttataatacaatgtataaatgaggacatgatgaaggccatgattgtacatacacaagctcttttgaccaaacaacttaccttaaatgataattgcatcctttgctccctttttgagttgaatgatattgtcaaaatttgaaccctgaactntaaatgattatctcctaatacctcgtttagattctaggagagcatatggttcaaggtaaatttactctaaatntgggggagacaagtttaaaaaaatgagaagaaaaaggttaagcatcagcacacacaacatataagttgtatgtt

SEQ ID NO: 70057 - DNA, 461 bp, Glycine max
  unsure (1)..(461): unsure at all n locations
ctgcaagctattaaatagtctaacctacagggctgtttttttaagcctagtccaacaagaaggatctgaggatgaagcttgagttaagctagcctaatgagggattggggtttagtactttatgctacaacatagaacacaaaagcatgattcattagagaaatatccttatatgcatcagcttgtttgttagaaagacccaacacttttacctactgctgtcaatcttacttgcttgcattnttactgtttttagcttaaacttagtttaattccattctaaaccatcaattatcaatgtttctttcaacaatgccttatttatgaatttaatcatgtctaatactagttccctgagttcgatacttggattcatccattntaattntaaatacttcacgatccagtgtgttttccggtgtttcatttcccttgaatantaatgtngagaattggagaaa

SEQ ID NO: 70058 - DNA, 497 bp, Glycine max
  unsure (1)..(497): unsure at all n locations
ctcagcttatggcgaatcgaaggtgattcanaggtgttctgatgataactaaagatgctgacaaaggtgatgacaaaaagctcaaagatcaatcaaagaacaactcaagtgaatcaagaacaattcaagagttcaagataaaaatcaagaagaattcaagactcaagatgaaagtttagattcaagaatcaagattcaaggttcaagatctcaagaatcaagattcaaggttcaagatctcaagaatcaagactcaagattcaagaatcaagagacggctcaatcaagataagtatgaaaagtttttctcaaaaattgaatagcacatgatttttctcaaaacatgtttaccaaagagtttttactctctggtaattgattactagaatggtgtaatcgattaccagtagcaaaaatggtttgaaaacgtnttcaaattgaatttaccaacgtccaactaattttcaaaagtggtatcgatacaatggtttgtaatc

SEQ ID NO: 70059 - DNA, 354 bp, Glycine max
  unsure (1)..(354): unsure at all n locations
acctggagatatgtcccgggggtcatgagaccttggggacgtcaggtggggtgctattgcccaaaaccaagcttgaccaattccgacccaacccgggcatagtcggtcagtgagaacctgtgatgtacctaaacaggcgagctcctggcagtcaacagataaaaggaacaaagaccacaaagcaaggaggcttgtggtggctggccagctgtgaaacttgattgatatgtgagatatggtctctggtaatcgattaccaaaggtgggtaatcgattaaaaggcttataaatgaagacaggaggctaagatggtctctggtaatcgactaccacggngtgtaatcgattaccatg

SEQ ID NO: 70060 - DNA, 463 bp, Glycine max
  unsure (1)..(463): unsure at all n locations
cataagaacanaattgccttaatcatttccaaatatgcttgttatttatgaagcatcaacaagaatcaagccattgctattgtgcaagcaatcaatggggcaaaacacaccaaatgattatgatgatggctcaaattctcacaaaggtaaacttatcacttccaaattgagctttcacaattaccatgacatgtagaggaaaaacaaggacttcaaatcacataatgtcaagagacttttattntcaaaacaattacccatttcttgaacatatcctataattcacagaaaaacatgcaaagttgtacatgcaaacaaaattgacctaaaatattaaactaggaacccaacaaaattaacaaattaacacaactaacaaaattaacacaaccaacaaaactagcataaccaaagaacactctccccatacttaaacaacacattgtcctcaatgtagcacaat

SEQ ID NO: 70061 - DNA, 461 bp, Glycine max
  unsure (1)..(461): unsure at all n locations
tgcagctttacaaagggttgtcctaatttctctattcttgccaatgtgacattcacttngggtgaaagacaagagcaagactttgctttgctcaaagaaaagcttaccaaggcacctgttctagctattcctgactattctaaaactnttgagctagaatgtaatgcctatggagtgagtgtgggagctgtatttgtgcaaggtgggcaccctattgcttatttgagtgaaaaacatcatggtgccaccctcaactaccccacctatgataaagagctttatgtcttaataagagccctccaaacataggaacattatcttgtttccaaggaattagtcattcatagtgatcatgaatcacttaaatacattaaagggcaacgttagttaaacgaaaggcatgaaaaatgggtatagtacctatgagctcaaactttaggaattgataacatcactacatc

SEQ ID NO: 70062 - DNA, 487 bp, Glycine max
  unsure (1)..(487): unsure at all n locations
ctatgaaactcagctgcacacaagtttgtacaaatgaagtcttgcgaagttcatgttactaactaactaacactaatatatagagtgttattaactaactaactacccaattaaactaattacacataacacaagcccaaactcgtaacacaattcttcaagtgcagaggttatgacttccaagctcaatttgaccctcgagataacagaattgaccaaagcttattcatcacaaaattgaagttcttttttttcagctttccagggactactcacacgttccattttgaattctgtagtgccctctaggccctacacaagacagataggtcaagtaagcataacatctgaaatttagctacaactctcaattaagctcaatcatgtgcctaggattaaaactgagttaaggtgagacaataaggttcatagagatgtcaattgacgtaagaaataatagaaaatattaaactacanatgctcaatc

SEQ ID NO: 70063 - DNA, 455 bp, Glycine max
  unsure (1)..(455): unsure at all n locations
gatcttaagtcaccgcggctgcagctttctttacaatcnatctgtctactgtctattaattctaaatgcaagttcacattctgggtctttctttgtctaatatacatacttgctcaaactcatgaaaaaaaacacaaactccatcagaatcatgcactcaattcaaaataaaagcatacaaccattttcataagtcaataaaagtgtttcactgccatatcattaaaaaccaagttaaactgttcaaaatgcttcagaataagaaaaccaactatccataaataaaactagcagtgtatataaatataaacaaaattatgtactaaaaccataattaaaataataataaaccaaaaagcaaaaagtgtcatcaggaattaaaattcttgtgactagtcctgcgtgtctcgtgtctgaacatcctcctcgtctgttaagtgaagcacatgggtagc

SEQ ID NO: 70064 - DNA, 335 bp, Glycine max
  unsure (1)..(335): unsure at all n locations
tgaacttccggaacactctcgcatccatcctgagtctattgttactattgaaacccttcgtgggcttggctgatgcagtaatagcagaaaaacttccttccgaagtggtggataatcaaccnctcacgacacctntatctattctgggccagaagatggttccgacagaccaggggcccaaacgcatggttctggtacaatggcaaggcctgcatccggatgaaacatcgtgggaagagtgggcgtgcctttaggaacaacatcaccttgaggacaaggtgttatttgaagaccgcgggtatgttacgaatagcaactgtgagtcacaggcctcg

SEQ ID NO: 70065 - DNA, 54 bp, Glycine max
ctgtagacaaggaatcaagaagccacctataaagaacctgattctgctcttccc

SEQ ID NO: 70066 - DNA, 455 bp, Glycine max
  unsure (1)..(455): unsure at all n locations
agcttaataaatattatgaataatataattatactatctaataattnttcattaacatttaccatttatatttgagtatcaaacacatttcttgtccttatttatactacgtattatttatttccaatttgactgttgtatgaatattttagttaatctttatatattaaaattcacttccgccttttattggttcatattttgtttttattaatgtaaccaaaacatatatgttattctattaaataaaagacctaacggctaacaaataacaacaaagttaacgataaaatacggtggttgaatgattagcaagcaaggaaataaacagaatatcaattaaggggaaactaaaaaaataattctcatcccatgtcagccggtattattgtgcatgacactaaatttgtgctttatgttcaaaaaggataacccgattcttcacaaaaattgag

SEQ ID NO: 70067 - DNA, 467 bp, Glycine max
  unsure (1)..(467): unsure at all n locations
ctccttgagacaatgganaagaataacaatcacttgatttaatttatatgtttggtaggatcaagattcacttgaaattctttccaataacaaagataaatgttcatgtctgagtttaagtggaagaaaaatggccgtgttgagacactcgaagaaataacaatttctatacaacttaagtgtgtgatcctaagcagttctcacgatgtgtaattcttatcattcacaattatgacgaaaagttattaatacggattcatgctttggttgaacatttgcattaactttgtaccccacccacattaacccatcatatcatggctattggtttttcgaacaacatatatgttctcacccatctttcaatcagtgcatttgcctcttgccatctgcttgtatcaatctattgttttattacatatatggacctatttccttttcttaatgtttaacactctttgtcggtg

SEQ ID NO: 70068 - DNA, 461 bp, Glycine max
catgcaagctttttcttgttatgcacatatctcattttttatagtataagttcactagtttagacacctactatacaaaaacttagatgatgctaaaattctaattattcacacagaaaagaaacaaaaaaagaggaagaatctaacaatttttgaatgatttaatcataaaatatacttatgtaacacatttatcacgacctgaattggccaaaaaaaaaaaggaaaaatattagggttttgtgtttcggaaaaattttaggacaatggaatcgattaatgaaaagagaatattgaggagaagatgaatagggattgaacaaaggtaggtgttgatcggaattggtgactcgtgacacataacaacaacaacggtggacggagaggttgattgatagtgacaaccaagagaataagacaaacataatcagaataggtgaatgggtagcgaacttttttta

SEQ ID NO: 70069 - DNA, 397 bp, Glycine max
  unsure (1)..(397): unsure at all n locations
cttgttacaaagagtatactgactagtagtgctaccttgggtattgttaagagcactggagcagcttgatgaatcccttcctgtaacaggatgnggcccgatttctaaaaacagtgtacttgtgaaacttacgcgtctgctaccatactgtgctttactcttctgctctatcattcattcacaaatgtcagctatcatggattgatatacttgatcaagctctttgctttaagctagaacggcgtcatctaagtctcatagcattcgatcttatgaaaatcaaaggtgcttcagtacgcttcgtacaagcgtcctatgagactccttgaggaacctctcttatggtgacatgactatctggaccactcgcctatngtctattttgtacgtcaacaac

SEQ ID NO: 70070 - DNA, 464 bp, Glycine max
  unsure (1)..(464): unsure at all n locations
agcttgagagatngcatggganaactgatctgattcttatagagatcatcaatgaacacagagaggcaaagtcaaaagctatagaagaccaaggtgaagcagaggaagatttggttgatgttctcctaaaatttcaggatggtgatgatagaaaccaggatattagcttaactattaacaatatcaaggctataatcctagtgagtataacaacatcttctaaatcctttcttttatcaatataatctcactcctttctatagaacttagacaaatgtttaatagttacaccagaatatatctcacacatgagctcttcaaaattgtgctgtatgtgataatttccgtagtgtattactggatgccttcggcttataatatttgaatttaactcctttcaagtgagagggtccttntagaggattnagttctatgttataactattaatgtaaaaagcatttgt

SEQ ID NO: 70071 - DNA, 414 bp, Glycine max
  unsure (1)..(414): unsure at all n locations
ctaacgtgtgagtagttactcggggtggttatcaaatatttattcatctcatcattngaaataatggttaaccattttcatctatggatgtttttttattgttatgtatgtagattatgtactttttgtaccttgtatttataaaatgcttatttgtaagattaaaaaaatgtgtcccaacactttttcaatcttntttgtctntttttctattggaaattctttcataattaaagttggttcacattcaagtaaacatacaaattcanatacataggagattatggagcactttccaagggtttggaattggtttatttgaccttgagacttacacactccacttatgaaagtgaagattggagtacaagcagctctgtgaatgtaactcatttattgacatccaccgctcac

SEQ ID NO: 70072 - DNA, 425 bp, Glycine max
  unsure (1)..(425): unsure at all n locations
gatgacagagatgatgaccaaaaccaaagaatgattttcagattcagtcaaaaagttcaagatcaagataaatttcaagtttcatgagaagaaatcaagaagattcaagaataaagagaagtttgatttcaagattcaagagaaaatgatttcaagattcaagagaagaaatcaagaagacttcacaagggaagtattgaaaagatttttcaaaaaacaaacatagcacagttttgtttttcaaaagagtttttctcataattttctaagttaccaaactttttactctctggtaatcgattactagtttcctgtaatcgattactagtggcaaagtttgatttcaaaagcttttaactgaatnttcaatgttccaattgatttcaaaatggtgtaattgattacaagatattggtaatcgatac

SEQ ID NO: 70073 - DNA, 480 bp, Glycine max
cgcttctcctgaatatcaaatgccatttgggaaaaagaaatggtcaaattaggattggttagaagagcactaactgaaattaaattgaatttgaatttaggaatgtaggcaacattatgcaagaataaggtattggttaagcaaaccgaaccaatggcaatgataggtataacatcattgttaggcagagtgacagttttatcagaaacaagttggtaagatcaaaaatgatgaagagaacaagaaatatgaatgttggcaccagaatctaaaagccaacaatcatgaagaaaattagaagtggatatagaaaggatcataccactggcagaagaaacaccttgaggaatgacagcattggtagcatgactttctaaaagattcatcaattggctatattgttgggcagtaagttgaaactgtgaacctgagtcaccagaggaagatggtgagtgagacatatcaacagatactttgtga

SEQ ID NO: 70074 - DNA, 280 bp, Glycine max
  unsure (1)..(280): unsure at all n locations
aaaaacgagagcacaggaaaaaagaaanggtgttgacagcgagcagcgcaagggaaaaaacaacacagaaagaagagaggaacaagaaaaataggcagacgaaaaaaaccggggcaaacaacatgcccaaacagaaaaaaaacacgcccagaccggcgaaatgcgaaaaaaaagagccactacaatggggagagccagccacgggcatacaacatggagccaaatggacagacgaaaaaaatcagccaagcgagtagcacaggaagacctaagcagcaga

SEQ ID NO: 70075 - DNA, 357 bp, Glycine max
gtatttatagccctcgatcaatgcaaagaaagatcagaccacctctaggaagtgtttggctatttgccggaactatgaaacatattattccaaccctgtttcctcaattgatgatacacaaacacgatatactagaataatgaaataaccacgataccaacatgatgttaaatgaagcgagcaactccttcaaacaggaaccatatggcatcattatgacattgccaacatggactgatgtttcctaccaccatgcacagaatcaataacactaccacgctttggtatagcctaagaaccattctacaaggaattatatcctctaacgaatgctctagagtgctatgaatacatctt

SEQ ID NO: 70076 - DNA, 417 bp, Glycine max
  unsure (1)..(417): unsure at all n locations
catgcacgcatcttattcgtgaatttcaagcaacccccttagataacttaatataaaagtactatttgtcaccttataaatgtgattgtgagcagccacaatgctcaaaagttctcctacaaaggaatcagctgctccagttgtgtcaattgcttccacctcaaaaccagcaacccattctttaaagtcctgtgcaacaataaggaacatctatatgattaaacataactaaccaagtttggattagcaaatagatgggaggaaacatttgagctccacttttatgcatttaggattagatatttacactanaatagtgtntaggacttggcccctgtgactgataagatccaatcactagtggaaccttccgttaaaactaactatnttggggagaacctagcacttaaatactac

SEQ ID NO: 70077 - DNA, 454 bp, Glycine max
  unsure (1)..(454): unsure at all n locations
atatattgtgttggagccaataaatgtatctcttattccttactagattgaaactgcttagaattatttacttctgtaaagtgtaattccacttcagtgtaagagtacttggatttttagagcttaaatgttaagcattccttattgaaatattatctacattgcactcatttggtaaatgaaactcatagtaagcaaataagcccaggacccaaacatcattgagggtactaaaaaagagcatatcagctataatgctaacaaactattatgatcaataaagacactagatatatattaaaaaaatgtggtggacaaactgttccggcacttgagtagtgtgatccataatggaatntggtgatgactggatcatcanagctagcatatctctcttgaaatctattcaaacgatcatgggtgagtgcaccactatgctgcgtcacacataaag

SEQ ID NO: 70078 - DNA, 388 bp, Glycine max
atatataccagcgtactaatgtatatatacttggttttttttaatatgaatacgttagcgagttatacctagatatttgcttaaaatacaccaataatatacctagatattttaattaatatataattagagttatattattattattattattattattattattattattatgattattattaccaaatactccaagtattctatgataaaagcaaattcactttgacaattaaaaagttacctttcttataaaatatgatttgtctatgagtctagcatattctgattaatatataggaaaaaataaataataatagtcaattcaattgaaaactgatgaaaaccatatatttattttttggaaaacacatgaattgtccatgtc

SEQ ID NO: 70079 - DNA, 440 bp, Glycine max
  unsure (1)..(440): unsure at all n locations
tcgtttagaaacatcttacttttgataatgaaaacctataaatactagatgctntgaagaaatgagtaacgaacctacacgctatcattcaaattctttatgtagaaaactctctgtatattcttataaagtttgaaaagctctcataacatcttgaatactctaagacanaaaactaaatgcttagatttcacatttgtttgtaagatgattaagatttaatcagttagcaaatcaaacaacatatctnttgatttgtatagaaccaacagtggcttggtaggacagagaatattcggttgttaaagctcgatgataaacttagttgtgagagctaaaagtaactnttgtgaaattagtgaaacttgattgctaaccaaaaactgaacttagtctgaatggtagacacataccaatataaatatgtgtcgtactttctt

SEQ ID NO: 70080 - DNA, 418 bp, Glycine max
  unsure (1)..(418): unsure at all n locations
gcttcttctttagacctcanggatcggtcatctttcctggtcgacgtcgaatgtcatatatttcgatcaatatcggggaataatattttatggcgaggtgggctaatgttttcatgaccgaataaatgggaacatgccagtttcggccgaaacaaaacatcggttgagctcgcacgaaaaaacctagccggccaacattggtaattttttatgcaacaccaaaaacaagaaaacttcctctgccctaaaaaaaaaacatcacaggctagcgatgcgtttaaaaaaaaaaatctgtccgggctatttcacgaccgatgtcgccaattgagttttctattcaatccctgaatgagattngcatgatgtcgattaggaaatgttcgattgcgtcatcccgggatgcttcttttagacctca

SEQ ID NO: 70081 - DNA, 471 bp, Glycine max
  unsure (1)..(471): unsure at all n locations
tntacttatgtggcagggcgggcttccttcactttcttgtctcctacgcgagctctgaccactgtccttccttcctgcggtgcttcttttcatgtccgcttgagtgggcttatagcctaaaccatatttcccacgatttccttgggtttttatcaggctagttatgccgccattgtctttgcctaaacccatcccgggttcataaccgttccccaacataactcgggccatcattaccgccgcatcggacagacaaggttgcccaaagagggagtccacggaggaaatgctgaccacctcataagactggaaagcgngttctaacgattcttctgcggctttcacataaggcatggaggatgggcagcttaccaagatatcttcctcgcctgatacgatgaccaagtgcccctccactacgaacttcagcttttggtggagtgtagaaggcacaactcccactgagtggat

SEQ ID NO: 70082 - DNA, 443 bp, Glycine max
  unsure (1)..(443): unsure at all n locations
gaatgctctattcatggagttgttattttatcttcagactgatcaacacatgcacagtggccaaagatgcatgggagatcctgaaaaccactcatgaaggaacctcccaagtgaagatgtccagattgcaactcttggctacaaaattcgaaaatctgaagatgaaggaggaagaatgtattcatgacttccacatgaacattcttgaaattgccaatgcttgcactgccttgggagagagaatgacagatgataagctggtgaganagatcctcagatccttgcctaagagaattgacatganagtcactgcaatagaggaggcccaagacatttgcaacatgagagtagatgaactcattggttcccttcaaacctttgagctangactctcggatagggcttgaaagaagagcaagaacttggcgttcgtgtccaatgat

SEQ ID NO: 70083 - DNA, 450 bp, Glycine max
  unsure (1)..(450): unsure at all n locations
tcatctcccgttctttctaaaagcatgatgtgaaggttggagtatacgtggtcgtcagagcggcgatgggtggcaaacccgatcttatcgtcggacgcaaatccacacgtggtcacactgattctgaaagagtgtgtcgatcaccacgacttcaacgagcacaacgatgtgatagaggagaacatttcttggattgcagttggtggtcggagaaaggaacattgtattgaggtttggaagggaagaaacattagagaaagaattgcgtacgatgtcgactatcgaggttttctgtttttattgcagtgtgtgtatctctatggtagacccccacttatcttaatgggtaattataataaattcatatctaacggatcacctttatttctcacggtgcaggacttatctagcttgtgcacactagaacgcatcatanaaatgggcaattta

SEQ ID NO: 70084 - DNA, 454 bp, Glycine max
  unsure (1)..(454): unsure at all n locations
gcttcatatatttaggtacgatcagtaaaaatatttcttcaatactggaatcaaataattntgtgtccaataatcctaccttattagcaatgtgaaacaatttatctgagtattctttgattgtctcgctttgaatccctcattgaattcaacacttgcatgctttgaatccttttatctccaacacattcttccttcaggtatcccaacttgctcttgtggttttgagtcatgattatggtaaaattgatttttgagacacaagcaaagagacatgtctttgcttttgccttcttgatttgtttctttatgagtttttatttgggccacggtgaaattttctacaatggaggaacattataatcttcttccatgacttcccaaagatctaaatagcctctaggtaggattccattccaacaaccaagaggtcatagctttctccatcaatgat

SEQ ID NO: 70085 - DNA, 431 bp, Glycine max
  unsure (1)..(431): unsure at all n locations
tgagatgaggaagtgtagaagggtgaaacttcctgcttttatttgttgaccacagagtggtacctggagatatgtcgcggnggtcaggagaccttgnggacgtcaggtggggtgctattgcccaaaaccaagcttgaccaatcccgacccaacccgggcatagtcagtcagtgagaacctgtgatgtacctaaacaggcaagctcctggcagtcaacagataaaaggaacatggaccacaaagcaaggaggctggtggtggctggccagctatgaacttgattgatatatgagatatggcctctggtaatcgattaccaagggtgggtaatcgattacaaggcttaaaaatgaagacaggaggctaagatagtctctggtaatcgattaccangcttgaaaacaagtcaggaagctaggagagcttctggt

SEQ ID NO: 70086 - DNA, 454 bp, Glycine max
  unsure (1)..(454): unsure at all n locations
agcttgtgaaatctcaggatggaccatngtgtctttcccagctcatcaaagggtgagatntatttgatagtatgatgaanaattgcaagaatctattattccgaaaattaaaaatataaattgttacttgtcccttttttcttggctaggtttgaatctgttctcaccactttggaagatgcggttaatgatgcccccaagcaccagagtttcttggccgcattnttgccaaagctataacagagcatgtagtctctttgaaagagattgggcggttaatacatgagggtggagaggaaccggggagcctcttagaagctggacttgcagctgatgttcttggaagcaccttggaggtaataaaaatggagaagggtgatgctgttttgagtgagatctgcacgagctccaacttgctggtggagaccttccggccgctggaacctcttacatc

SEQ ID NO: 70087 - DNA, 451 bp, Glycine max
  unsure (1)..(451): unsure at all n locations
tcttttggaccttgaacaagcaatcaactcctctntttaactatgctatgtgctcgcgactggtccctttcttcccttcgcaacttgagttcattattgctaccccatagagctccgcgaaatttgttccggccatactcttccttgcgagccctcttggtctcttgttcaagggctcttgcggtaattgcattctcttcccgtaacccggcacactccttccgaacgtgtgtagcagccaacttgaacttctccttggcgagtgttgcctttcctaactcgcttttgagagactggatttcttcgtcctcttccggtgcttcaaaattctcttcgctgacgacttttaacttggcgagccaatctatacctcgtatgcgaactttcagccattcgtggtacccaccaatgatgccattacgaatgccttaagctcttgatctttcttaac

SEQ ID NO: 70088 - DNA, 418 bp, Glycine max
  unsure (1)..(418): unsure at all n locations
tagctatgaaagtgttgntattcaccttttttctttccaatcaagctctgaaaagtgttgtttgtcaccttttcgctaaactaatttgctggcttagcgagcgtacgctaagcgcaacactcatgggctaatcacgaggaagactctgaaagaagatgagttgtacaggttcactaagtacaccacttcatctcaataagtgcaccactttagttcatctgctaagcgagaaaggcacacgctaagccagaattcactaatgtgcgctaaacggtccatgagtgcgctaagcgcacgagcacgaacaagaccacctatttaagcctgaaatcagattttagagaggggacttggactgcgatttaaagcttcgcatgtctagaagttctagagagagaaacgtccaagctccagagag

SEQ ID NO: 70089 - DNA, 475 bp, Glycine max
  unsure (1)..(475): unsure at all n locations
cgcatgaccaagtttcttatgccatacccaatgaccttttctgtcttattgtaggcaagacacattntgatatgatagctcacctaatctaatcttatattgattacctttccttttagaaaaaaaaagtagggacccatcattgttttggatgatgcactcatccttcttacaggaaacatcatatccactgccacataatttacttatgcttagtagattgtgtgttagcccttcaaaaaataaaaaattatcaatagaaggatatggaggtatgataacgattgtcgaattgttcacaaacaaatttagtagggaattntgtagcatacgattaacctacggtgaaatcataaatatgattcaatatagttcctacattcatgtacttataaatagacatggcggaatttcatcgatacaagtcgttggcaatctcgtaaataatgtgaatatccccatctgaattgataaa

SEQ ID NO: 70090 - DNA, 463 bp, Glycine max
  unsure (1)..(463): unsure at all n locations
tagctttcactcggagatctgattcaggcgcatattatatcgagacgcttganaatgaacaacggaagctctcgagaaattccaatgctcattacctttaactcggaggtctgatttaggcgcctaatatatcaagacgctcgaaattgaacaacggaagctctctagaaattcaaatggtcataacttttcactccgaggttcgattcaagtgcatgatatatccagacgctcgaaattgaacaatagaagctctcgagaaattcaaatggtcataaccttatactcggaggtccgatttaggcgcataatatatcgagacgctcgaaatttaacaatggaagctcttgggcaattacaatggtcataactntcatctcggaggtccgattcgagtaaaaaatatatcgagacaatcgaaattgaacaatggatgctctcgagaaattcacatggtcataac

SEQ ID NO: 70091 - DNA, 489 bp, Glycine max
  unsure (1)..(489): unsure at all n locations
acacttagatactcagcttaacctctggtgctcatttctgccncanatcgtgaaaggagatctattttggagtcgngaagtgcgtggctacgagtgggacttcgaaaatccaggtttgggtggacttctttctctcttaaatttcgtgggtatggggctttgggagatatgatgggtggttttgttagttttctgctgtgtgatgattatttgtgaaggcatttgctgaaaacttngtgaaattgccatgtttgggtgagttagacatacccattctgttttagggttcttgtgatgatggttgtgatgtttatatgctaaaattgctgatggaaaactgttagagatgaaaggtagagctaacctanggttagaaagtgagaatgtgatgttatgagtggaaaaagagtgagactntgagagttggaaggctaagtctgaattctgtgtaaatggaggtaaagtgagttatactagcttgaatgtcat

SEQ ID NO: 70092 - DNA, 371 bp, Glycine max
  unsure (1)..(371): unsure at all n locations
tctgacattcgtgtggagagagacctcaatgcaaagatcttccatcgccttgattgcatcttactggctcacaactgatacaatgtcttgcctccactgtcttcttatacaccgtcgccgccaccacctaaatagtcctttnttggggggactagaagcacaatttgatcatggatgatattttttttcaataaactagaacgttgtgtatccaaattatatcattggtgtagatatatttttagttgctcattatgtaaatgtgcataaatgttgagatgagattttacttcatgtatatttacatgtcagtatcatcaaacacacacatcaattgacatgagattgtttagcatttaactagtgatctt

SEQ ID NO: 70093 - DNA, 379 bp, Glycine max
  unsure (1)..(379): unsure at all n locations
ggatgaattangtatgatagttaggaacaaggccgtatcggttgctaaaggatacaaccaaaaggaaggcattgactatgatgagacctatgcgcttgttgcaaggttggaagccattangttgttgcttgcttttgcttgtattatggatttcaggttatatcaaatggatgtaaagagtttttttctcaatggatacattgaagaagagatatatgtagaccagcctccacgttttgtagactctgaacatcctaatcatgcttacaagttgaaaaaggcactgtatggtttaaaataagcacctagatcttggtatgaatgattgngcaatttcttagttggataatcttttgtaggagatcaagttgacaaaaca

SEQ ID NO: 70094 - DNA, 464 bp, Glycine max
  unsure (1)..(464): unsure at all n locations
gcttgaagaggatgctntaatggaggaaaagaattagagaacgggggagcacgannatgaaggaataaaagaggaagagaagtggaactttgaagtgtgtctcatacgactctcattcatccaagtaacaaaaagtgttacacatgcttctatgtatagcttaagtagcttccttgagaaacttcatcgagaagctctcttgagaaacttccttgagaagcttctttgagaagcttccttgaaaatctagagcttaactacacacacctctctattaactaagctcacctccttgagaaacttccttgagaagattccttgagaagattctcagagaaactagagcttagttacacacacctctctaatagctaagctcacctccttgagatgagaaactagagcttagctacacactccctataatagctatgctcacccgcatgagaaaatacatgaaaata

SEQ ID NO: 70095 - DNA, 480 bp, Glycine max
  unsure (1)..(480): unsure at all n locations
tctanacttaatacatgaagctctgataccacttgttggacatatggactcagttatgttaagaagggggggttgaattaagatacaaagactattccccaattaaaatttcactctctttntntggattaacaatgcacccttaacatgagttactcaaaagacaattcanaataaacttcttaaaagaaaaagataaatagaaataaataaaagaantttaagggaagagaaaaatgcaaacttgatttatactggttcggccacttccagtgcctacgtccagtcctcaaacaacccacttgagattttccactctctttgtaaaactccttttacaaagtctgaaccacacagggacaacccttcccttgtgttcaggagtcctntacaacaagagaccctcggtctcttaatcccttttcagaagtaagaagaagagaagaagaaatccctcttgaaagagatagattgtacaat

SEQ ID NO: 70096 - DNA, 390 bp, Glycine max
  unsure (1)..(390): unsure at all n locations
ctccctacacctttcttattgagagcgagagagattntttaagtgagtgtttctttgaatttttctcttctcaattaagaacatgttggggtttggtgtataagaccaataaagctcatttccaatggatagcaagttttttttcttggttgatgtgctttaaattatatttatggaatcatagtactacctccttcccgtatcttttgatttttaagattattgcacatagattaaaaaatatttaatggaactaaaaatttctatatttggactaaaatgtcctcatataatacttggatattngatacttgcaccaccattagtggatattaataaggatatatattgagaaaatgcactaattatactntgcaattctaaaacatc

SEQ ID NO: 70097 - DNA, 471 bp, Glycine max
  unsure (1)..(471): unsure at all n locations
actcagcttcaagtacacgttgttntctttctaacatggctagggaatctttgaagactnttatcttctcccataagatgtggtccaagaccaataaccagttgctttttataagtgaatttgtcactgtcattatcccttttcaaagaggttaattaaagaaattcaaatttgccaacaaaacataggttgaacaaagacccatcgatcaatggttggtgagtcacaagaacgacacacacgtgctagcctccgtcacattcttggatttcaatttacggcaattgttaattaaaagatatacaaatacggcaattgttaattaaaagatatacaaatattaaaatcaactcggattgagtttaatagaagagattaatcttttacaatntcacgagccaatatttgaaattttgtaagaaaagatgtntatatttaatataagatgatgccttgaataagaatatattt

SEQ ID NO: 70098 - DNA, 469 bp, Glycine max
  unsure (1)..(469): unsure at all n locations
agcttctcccccaattttctataaatagggggagttgtgaagtgaaaaagggttcagccccttaggcacttctctctctttcgaatttgcttggaaaaattgtttccgtgaagaaaatccaagccgaggcacttccgaaacatttccgtgaggaatttcgcgaaggtttcgaccgttcttcgacgttcttccttcgttcttcatcgttcttcgatcttcaacgggtaagtacctcgaaccaagcttttcgattcattctatgtacccgtggtggtccacattgtgtttcgtgtatttttattctcgtttcatttgctttttatacccccttttgacgtgcttaagccactttatttaagtcatttctcgcttaacctanaaataaaataaatttccaccgatcgttngaattgtattatccgttaacttcggttaaaatgaattccgaccgttcggtcgtgccgtaact

SEQ ID NO: 70099 - DNA, 430 bp, Glycine max
tactcagctttatggggctgatattgagcttaatgaggtccttcaatggtgattctccaccatggagatgcagcagacgataaagaagaagaggtgagaggaggcgccatccactatggaataagccatggaagaaggagcttcgccaccaaaattgtgccttggataagaagcttggagaggatgcttcaatggaggaaaagaaagagagaggggggagcacaaaattaaaggaggaaaagggggagaaaagttgaactttgagttgtgtctcacaagactctcattcatcacagttacaacaagtgttacacatgcttctatttatagactaggtagcttcattgagaagctttcttgagaaaacttccttgagaagcttttttagaagacttccttgagaagctagagcttagctacacacacccct

SEQ ID NO: 70100 - DNA, 415 bp, Glycine max
  unsure (1)..(415): unsure at all n locations
atcgaagaaccgcttccaacgaagctgaacctaagagggagacaagtggaaataactgacccaatgtgcttgctatgcaacaattccgaggaggatgcagcacaccttttcttcaactgcagcaaggtcctccccctgtggtgggagtgactctcatgggttaagtcagtgggtgctttcctcaagaacccacagatcattgtatgcagcnnacgtgagaggacgcctcaccatcaaaagatatgaaatggagctgttggtcgatagccctcacaaggaccatatggcaacacagaaacaagctggtatttgataatcgaacttttaacgcaaccaagctgatggatgaagcacttcttcttctatggtcctcgcttatagcaatggaagaagattatgatacacatttcaatca

SEQ ID NO: 70101 - DNA, 422 bp, Glycine max
  unsure (1)..(422): unsure at all n locations
cttgataatggaacttatggcagttcatcttaaattgttgcatgttctcttccttcttcanatactcttccttcatcttagatcgagacattgaccttgctgtcctcattgcttttgcaatcaggttactcaacacaaatcttatcgacatattgttctttgattttccatagattaaatgtgtaaacatagattacattcttatccaaacgttgcgttttacttattggtcggagcaaggtaattgaaattgcttaaaatagactcaaagatgcagcaccttcaataatttaacacagattaaatgcatctctaaataagctacaggatgcgaagaaggaaaatgcagatatgagaaatcaacatgcatctctaatctactaagttcttgctaaccaggtagtcttcttatggtttttatt

SEQ ID NO: 70102 - DNA, 418 bp, Glycine max
  unsure (1)..(418): unsure at all n locations
tgacttttcaaaaagcatgactattcatctatttgaggtgtcttataaggggatacattattccaatggagggcttccttttccatttcctccattttcttttgtccatcttcttantttaagtctctcatgactatgagaggctaacttatccattgttgagggtttggatatcaaanaagttgtgatctaatgatctttattatccatctaatgtttcttcaacattattgcttcatttctatgtttattgcttctgttatgggttgatcacccattcacatatgttataaggttttaatcattggaaaatggttttactctaagaacttgtaggaacttctaagtaacccatatctagggatgaaatgatgttagttaaccctatttatgcatctttcctcttgatgccaagtac

SEQ ID NO: 70103 - DNA, 468 bp, Glycine max
  unsure (1)..(468): unsure at all n locations
tgtagggtattgngaagtatgttgtatgactcttcccaattactatattccttctcaagggcccacttgtttgctagccatgctttacgatatgtgatggtgtatccgaacacttgtctaacgaatgcgacgaatgtaggaacgattagttgctcgttttcttcaaccatcgcaaggatattttntcctacgagtttcaaatccatcttattgtgattctgtaaaatggttggcatgatgcatgtgtgaggcgattctatcattctagtttcccaaacttttagattttttcatctagacgctctaagtttccgttggcactcctcagctaggcaacataagacccatgtatccttcacacacctccttgtgttgaaagtgacattggttttaatgtgccacatattgactgcgtgttngaggtcctncagttgaagaaattgtgaccaacaatagctcaccatcctg

SEQ ID NO: 70104 - DNA, 464 bp, Glycine max
  unsure (1)..(464): unsure at all n locations
agcttgtcttcttatggaccacttggactggacttacttcttggctgtcaganatggngtaaatgattccagcttgtaagagcttggtcacttcctttttcaccacatctagaataacggggttgagtcgtcgctgtggctgcctcattggcttagctccatcctctaaaagtatcctatgcatgcangtagatgggctaataccaggaatgtctgctaaagtccatccaatggctttcttgtgcttcttgagaactagcaacaacttctcctcttgcttagcagcaagggaggcagagatgatcactgganattttccttgtcctncaagaagcatacttgagggttgctggtaagggcttcaactctagtgagggtggtggctgaatagtgggaggaaccaaggtatgagaagaaaaatgttcctcaccctgtacctcataaagcaagtcagaagtatatgt

SEQ ID NO: 70105 - DNA, 465 bp, Glycine max
  unsure (1)..(465): unsure at all n locations
gcacctctggtattngcgggcgataggatagaagagggcttaagaattggcatgtntgattacgccacttcaacgagtactagcaataggaggactagaacatgtggagctaagaaaaagtatggagatgcacatgtcataaccgcaactcccacaaggcctcctccaccaaatccattttcctgcacagcctcgaccaactggaaattttaatcccagcacaaacacaaacccaaggaggaacttcccagaaagaaaactcgtggagttcaccccgaaaccaatgccttatgctgacttgctaccatctttgctcagcaaccatttggttgtggtgagcccggngaaagtctatcaacctctttntccctaatggtacaatcccagtacaacctgcacctaacatggtggtgctccggcgcactctatctagcagtgtgtagccttcaagcacaacggaaaaag

SEQ ID NO: 70106 - DNA, 456 bp, Glycine max
  unsure (1)..(456): unsure at all n locations
aatgtgcaagatcaacanattctttcttctcaaccctttgagtagcatcctgagtgtgcaaacagagaaagtttagaaggagaaatgatagtctatatatttgcaatgcaacagtataagagaaatatgtttttgaagtaagattaataatctcagctgtaacccaacaataacatgtaaaatcaaattttccttatatggtatagaatataaattatagttcataatagtctacaatgcagcatggactctaatattagtattgatacaaaggattatgtgatataagaagaataaaatatagaaaaattaataatattgatgaggtgttcgatatggagggatattaacacatcgagtggtacgatgatagtagatacttggtggtgatgatgttaccgtccctcctnccttatcattcgcgtgcatctttctcgcatattaagcgctgaaacc

SEQ ID NO: 70107 - DNA, 460 bp, Glycine max
  unsure (1)..(460): unsure at all n locations
ttacaacanatgccactctactccagatgtttataggttatgttatcatagaaacacaagtatattcaccaggaaaacatagttgtggaaggaaatcgtaatgctgtgattctaaagatccttccaccctagcatatagaccccgtgagtgaaaccataccttgttcaattggagaagttcctgtgggaaacgctcctcttgatttgggagcccgcattaatttaatgccactcttcctgttcagaatagtgtgagaagtggagatcatgcccacttagatgactttacaacctttgtaccgctcaattaccacaccatatggagatattgaatatgtgcctgttaaagtaaaacatcttatcttcccgatagactatgtggaatggatatatggaagatatgacttcctatatattgtgaagccatcatgtaactggagcttatattgatatggagaaa

SEQ ID NO: 70108 - DNA, 441 bp, Glycine max
  unsure (1)..(441): unsure at all n locations
agcntcttcaataaataacttaaacattcttaatttctctaattgacagtcctccaataatgttcctgaagactcttgtcagaagcaatgattacgcagatcttgctttgaaattagtcaaattaggatgcataaggacggtgttcctgaataaagtagtttttcttccactagctatcaacaacaaaagacgtaatcatataaaatattaatattatctgcgttgtgaaaactgattcagattcttgatttgtgcttgattaatagggtttccttcagataagttcttctgtaagaatctattttgaattttttaatttaaaaaagttatttatagaaataaataatgaaatggttgagaataagataaataaacggtcgagaattcttctttcttagggattctactctaatttaatataaaataaaagaatattataa

SEQ ID NO: 70109 - DNA, 486 bp, Glycine max
  unsure (1)..(486): unsure at all n locations
tgtagttcctatggaattgggccttagacagacctctcaagcttacattaatatgggagntactattgccactacaataatatctgtatgcactaccaagccttatcaaactaccatattacccttctgaggtgttcttacacccctaacccttctcctttcttctctcacttatccgtcatctctctcttactatttaacaacacccccaaccattcccctttctaattcatcttctactatctctcgttagactcacatgagataaggtaatnttttctatccaacggaatcacaattttattgtgttaagacacaacgaaatgatgattttagttttttttgtttccaaacacacagcgaaatcatgcctttgttgtgcatacatgggtgcctacaaaatctaaaatgaatatanttttctattgtgcattcttgatgtggaaacatgtcttcattttaaattttgtatgacctctatataac

SEQ ID NO: 70110 - DNA, 458 bp, Glycine max
gcttatcacccttactgataaatgaaaatgcttttattggaagtcaagagcatgatagtgcaacgactatcgacaatgttcctttggaaaatgatcaagtgaaggtcggtattaaggaagtttgagatgttgatgctcgcactcctgtacccactcaagaggttcaattagtggagtaggcatttaacaccttccttgcttgggcgacacatcttgtgaaacctgtttcagaacaggtatttcatttagtttttttaataattattaataaaggatttgttacacatcaagtcttgagtgtcattcgcttaatggttattaaatgtgttggataaacaggtagttgcgggattggcgaaacctgtacatatgttggatcctgacattgatcccctttacctgatgacattgacaatcttgtagcttttcttaagctgttgcaagtgtcgagggatgct

SEQ ID NO: 70111 - DNA, 486 bp, Glycine max
  unsure (1)..(486): unsure at all n locations
ctagaaccttgatagcatgttggcatccnctgcattcttgttctagtcagcttcaaacttattacaagaaaaatgacctatacctacagacaaaaactgtcactataaataaaaaatccgtaggtaaatgtatgatagactttgttctacggacgttttttccgtcaactttgagcgacatataatgacggctaattgtctgtcactataggttttacctactatgtatagtgtgtaggtaaaagtcattaacttctacttacatctcctaactgtaggtaaaagtctttaatatgtacatatcatcttcaactgtaggtaaatgtttagatcttagagaaagcttagaacatacataattgaatgtgggcagtgcagcaaaccaatacctctctgcttcttcggactacaaaagaattatattaactcatgatagatgacatgacattactagaaagtagtagttgaattacaaagtttggatgc

SEQ ID NO: 70112 - DNA, 459 bp, Glycine max
  unsure (1)..(459): unsure at all n locations
cttagcaaccacattgaacaaganaggagctagagggtctccttgtctaagacccctctggggtatgaattccgatgtggggctaccgtntatcaagactgacattgaagcagatttcaagcatccctccatccaacttatccatttagaattaaatcctgatctgttcagcatataaaacagaaaatcccatgacaccgaatcataagccttctcaaagtcgactttgaagatgcagcagctcttggtgctccttttagcttcatcaatcacttcgtttgctataagtacactttgtagtaagtgtcttccttcaatgaacgcggattgcgtttcattgatgatagtangcagcactttcttcaatctcttagccaatagctntgtcacgatcttatacatacaacctataagagatatangtctgtagtcattcanaaattgcgggtcaaccacctt

SEQ ID NO: 70113 - DNA, 487 bp, Glycine max
  unsure (1)..(487): unsure at all n locations
atccttagagtcacctgcggcatcaagcttgcaaatggaagcaaaaatgtctctctattgttgaaagaataaccctcattaattcagttntaacaacattacccatttacttgctgtcttnttttagaatccctaanaaagtggtgcaaaagatagttgctattcaaagaaattttctatggggaggtgatattgaggccaacaagatcccttgggtgaaatgggacacagtttgtcttcctaagaacaaaggggggttagggattaaagacttgatcaaatttaatgaggttttgcttggcaaatgggggtgggagttgactaataatcagaaccagctataggcaagaattttattgtctaaatatggtggttggaatgcatcgctctctggtagaaatagtagtgatctctcccattggtggaaagacctaaaaattgtatttcagcagcaggacaacaatagcatcacccataatttgagatg

SEQ ID NO: 70114 - DNA, 482 bp, Glycine max
  unsure (1)..(482): unsure at all n locations
tgtatatgagatattatgggcataaactntaggaaatcttttacttgttatgcatcaacaatatacatgtataggactgttctcatacctgtgtacgactagcgacctgagcttgggtcaacacacgacacgaggagcagtgatgccacgacaggagctttggtcaagacacgacacgaggtacagtcatggtatcgtgagttatgatgagcttgacaatatcaagattcgtgggttatgagcgccacaatgagggattatcatcaaaacgacaatgatgagtgccacaggtcctattntaattacaaactatattttctagcaattaaagacggtctttatagtatgaccgtcgttgactccttggcttcanagatggtgtatgtcctcaccgtcttacatacttttaagtttatttcaatatgccatcgggttatgatgcatagcttctaaacnggctgcatacccgcattgaaaagcat

SEQ ID NO: 70115 - DNA, 298 bp, Glycine max
  unsure (1)..(298): unsure at all n locations
ttaagtcgaccgcggctgcagcttgacaatgaatgacattcttatctcgatgccgggtgancccgtaagatattagacgctgaaattagatccgagctctgtaaaattgaattgaaataacttttacacggatgtccggtgagtcctggatatatcgagacgctgcatattgaacgaatgctgtgtgaaaatacagacaataactctttacttgatgttccattgacctggtatatattagacgatcaaattgtaccagaacttgggcatattgaagacttaacttataccggatgtc

SEQ ID NO: 70116 - DNA, 224 bp, Glycine max
acactacagaggactcaagcttctgctctaatatcaagcatcgcgacatattatgggactcattcggacattcgagtcacaaggatggccgattgaagctaatactagctccagacgctcgatagtaagcacttgatacattatgcgaactctatctggccatcgcgtttcacactgttatcctcagaaggcgctcagatatgtcgagctcatctactatcgac

SEQ ID NO: 70117 - DNA, 154 bp, Glycine max
  unsure (1)..(154): unsure at all n locations
catcttactgatagatctacattcctatttatcgacatcttagtctatatctantaaagataanaaatttaatcttttactagttaccaatcctcataatccaaaaacttcttttcaaatgattatgaagttttcctaactctattcaccattc

SEQ ID NO: 70118 - DNA, 228 bp, Glycine max
ctcttatgggcggaacacaacatctgttgtgggaacattctcagggccaaagcatccttggcctcagcagcaactgtgaaggaagggaaggtgtatttgaaccatatggatggaactggataccccaaaagaagcatgcaattgttgaagcacgtattttaactcatactttttctagaaatgtaaacagtaaggaattgagcacgcggagatcatacatttacagga

SEQ ID NO: 70119 - DNA, 450 bp, Glycine max
  unsure (1)..(450): unsure at all n locations
cagcttatgcgcatgtntccttacgaacgttcacttgcggaagaatatcctattaaccgaaaaatgcacccatatacaatcaaggcagctttngtacctagattatttacacgtacttccaaggtgtatttgttacttacatcacacacatctccttggctaaattcacatacatgcatactccaagcatttggggtaccaaanaatgcacatgtgcacatcttggtatttctaatacctatacatacacgaacttcatgatgaatcttgactatctacacaataaggtgctacatttcatgccctttttcaaagttttgctacctaaagccgcatgcaaattcaagcatattttcctttgctgactaanattgtattcaaattatatatatattntttggaatatgttttctttcatacaacattcaacatatttatatantttttttt

SEQ ID NO: 70120 - DNA, 385 bp, Glycine max
ctcagctagtatatatcgatacgctcgaaattaaacatcggaaactctcggaatattcatatagtcataactattcacacggatgtccgattcaggcttataatatatcgatacgctcgaaattaaacatcggaaactctcgcgaaattcaaatggtcataacttttcacacggatatccgattcgggcacataatatgtcgagaagctcgatattgaacaacgaaagttctttagatattcaaatggtcttaacttttcacacggatgtccgattcaggacgatcacatatcgagacgctcaaattgagccacagaagctcttgagaaatttcaatgggcgtaactcttcacaccgatgttccatttaggagcatcacatattg

SEQ ID NO: 70121 - DNA, 464 bp, Glycine max
  unsure (1)..(464): unsure at all n locations
agcttatccttatggcttgcctccgcacttcacctcttgtgccaccccggatgatttaagccaagcccctacttttgaggggcaactcccaccttatgaagactatcccgggcaagacgatggggaaggagatacccatcttggccccctgctccacctcaaagatccgtccncacatgaactaccccaaccgaacatagtccgccatatcccggcctcacccacacccgtaaaagaatctgttcccttcgcggaagataagggaaagattgaggcgctcgaagagaggttaagagcagtcgagggccttggcaattacccattctcggatttagtggatttatgtctcgtgcccaatatcgtcattcctcccaagttcagagtaccggactntgataagtacaaagggacgacatgttcgaagaggcatcttcggatgtttgccgaaagatggggcgtatcta

SEQ ID NO: 70122 - DNA, 370 bp, Glycine max
  unsure (1)..(370): unsure at all n locations
aggaagngtagaagggngaaacttcctgcttnattcgcaatcacagagcggnacctggagatatgtcgcgcgggtcatgagaccttgcggacgtcacgtggggtgctattgcccaaaaccaagcttgaccaatcccgacccaacccgggcatagtctgtcagtgagaacctgtgatgtacctaaacaggtgagctcctgtcagtctacagataaaaggaacacagaccacaaagcaaataggcttgtggtggctggccagctgtgaattttgtgtgatatatgggttgtggcctctggtaatcgattaccaacggtgggtaatcgattacaaggcttaaaaatgaagacatgaggctatgatggtctctg

SEQ ID NO: 70123 - DNA, 435 bp, Glycine max
  unsure (1)..(435): unsure at all n locations
ccggatcttaagcacctgggctgcagctttattgcacaacaatgttggatattacatgcttaggggagttagggagactaacctcgaagcctcgttcgcggagaagaagaagaagctcggcgcttggctcgcggagaagaagaagaagcttgacagagaagaggaagcaagaacccggaagaaccaaaatggcaacagcaagtgcttcttccagaggaggaggcgctttttataattntttgttaaagggtaaaatggcccattcattaaaattgctaggtgcaccagcaatattgctgggtgcacctagcattttcctaaacatagctatgattcccaagggtgagaggcccaaatccatacatgacttgcgaccaatagccctttgcagtgtttatacaatatttcttatcaaagctctggcaataggctgag

SEQ ID NO: 70124 - DNA, 499 bp, Glycine max
  unsure (1)..(499): unsure at all n locations
tcttgaacaaggtatgccaatgttgtgccagagtcaactatgattcctcaattgttagttgctacaaatacatttgaaccgtgaaaaatagcaagttagtgaacatagtaaagatgataaaatcacacaaatgttatttgttctcatatccccatacacaatcaagtaatcagtaatttaaagagagatagatttccttggatattctcgttgattctccacaatggaagacaattgatcacttgtatcctgaatttggagaggaaccaagaaacctacaacttggtattgcttcaggtggcatgaatccatttgagcactagtcatagttcatgacctattttgctaatgatttacaaccttcctccttggttgtgcatgaagtgaaaatacattatgttgtgtatgatgatagcaggtccaagacagtcaggaaaacaatattggtgtgtgtntactccctttgatgaagacttgagaaaattgtgagtagacaggg

SEQ ID NO: 70125 - DNA, 424 bp, Glycine max
tgtcatactattgatcaaaacttatcatgtataaatatgcaatactagactcaatatatgcaacaaacactagacctaaatcagtgtcacagaaattggaagaaaatattttatccaagcacaaacttcaagccttattccatgtattggggggaagttatggctggccatatgggtagaggtgtcatacaggagcatgtatggaggaagggaccttggactgctgaagaggacaggttgcttgttgagtatgtcatgttgcatggtgaaggtagatggaactctgttgctatgcttgcaagtaagaaacaccaaactttgttcactggtttgtttcttaatatatatgattggattttcacatttataagtgacaatatagcacacaaacaactgagattggtttcaacttctactgttcatg

SEQ ID NO: 70126 - DNA, 498 bp, Glycine max
  unsure (1)..(498): unsure at all n locations
agctctgcggatntggtcttcgccagtgaaaggatcgatgtgggtcttattttatgcaaatttgatcatcctactaggacgactgagaaaactggggcaaatgaagagggtgagaaagagggagaaacccatgctgtgactgccattcctatacggccaagtttcccaccaaacccaacagtgtcattactcagtcaataacaaacctcctccttacccaccacccagttatccacanaggccatccctaaatcaaccacaaagcctgtctaccgcactttcaatgacgaagaccacctttagcacaaaccaaaaaaacaccaacaaaaaggaattttgcagcaaaaagcctgtagggttcaccccanattccgttgtcatatgctaaacttgatcccatatccactcaataattcaatgctagccataaccccaaccaaggttcatcaacctnncattttctgaggatacgactcgaaccgcacgtgtgcttatcgt

SEQ ID NO: 70127 - DNA, 485 bp, Glycine max
  unsure (1)..(485): unsure at all n locations
tcttaagcaccgcngctgcaactagttctctgcggtcttggcccacaaaatctctataactctctggattcagacccttctctctctagaatctctcacatgcagaagctcttcgagaaattggccaaaatcttctccaaaatctaatttcaggcttaaataggtggctttgtttgtgctagcacacttagcgagactatggacgctcaacgcgcattagtggattttggcttagtgcatgcttttctcgctcagtggatggactaaagcggtgcgcttagcgggataaacccttgctcaacgaacatgcacatctcattcttcttccagattcttcctcgtgcttagccaatggaatggtgtgctcagcgaatggctcgcttatccagtagattggcttatcgagcagatgaaaatccgcacttcacaaacttgtctaattaacctgatattgagaggaaataaacacacaaaatggaagtact

SEQ ID NO: 70128 - DNA, 220 bp, Glycine max
  unsure (1)..(220): unsure at all n locations
tctancctntatacaagaatgaagctctgantaccacttgtatacagttggctcagatatctcaagaagggggttgaattaagatattcccaactggttcccctcaataaaaaatctattcacctcttacttcagttatgaattcccttaatgacaatcttcttaaatattaattccaatgaaacactttgaatttgtatatatagccctaattaattaa

SEQ ID NO: 70129 - DNA, 433 bp, Glycine max
actaggctaactatccaacatggcagttaacatgcttcatcaatttcttcacaataattatcatgaagcagaagcctagctaaactacccatcatacttcccaaaaccccatacccacaaaaatcaagagagagagaagtctgtccaaacctgaaatttcgaggtcccacacgtagagatgcgcttcacgactccgaaaatgccttcctttcgcgatttggagcagaaatggtgaccaaaggtaggagctttgttgggcaacaatggtggaggaagaagaagagaatggcatcgtgagagagagaagagctttctgaaattttctatggctgagtgaggagagagagaacagctctttggttaacaagaaaagcttttctctcttcttttaatatattgtaagctatgccacatgtctccatttgagtggagc

SEQ ID NO: 70130 - DNA, 461 bp, Glycine max
  unsure (1)..(461): unsure at all n locations
ctgcagcttgatgatgtcaaaaaaatacatgttgtatttttataaagnggagaatgtgaatatatgaatacgtgaactttgatgatgccaaaagaagaatcaaacaaagttgtttcaaaggataaacatggcttctagattaatacaagattgtttcaacaaacaaagccttgcttcaagattaactcaaagatcaagccttgccttataacatagtgctttcaagacatgcaaggctctggtaatcgattacaacgcagtgtaatcgattaccagaagacagggttgacatgcaaagtgctttcattgatgagacaaaanttactagaggttgcattagtattgtagtgcattgctaagagatcaaccaaaacaaattacaatcgagtcactggtggtactctagagatgattgattatgagacttcagtggtaaaatatcacttaagcagataatcctt

SEQ ID NO: 70131 - DNA, 452 bp, Glycine max
  unsure (1)..(452): unsure at all n locations
actaagctcgagaagatgttcaatagaggaaaagaaagagggagagaaatatagtgttggggatcatganattaaaggaagaaaaaagggagagaagttgaactttgagtattggattgggcttctaccaattcaattaaatttatttccaaccacacacatcaaatatagtgcatgtgaaattacaaaattaaccctaatacaaaaactagtctaggtgccctaaaatacaaaggctgaaaaattatatatttctagggtaccctacctacattatggagctctaaatataaggaccaaaattaatgaaaccttaatctaatatgcacaaagataagtgggttcatacttagctcatggacccgaaatctaccataaggctcatgaaaatcctanggccttctcttgcatcttcggcccaatctttntggaatcttctatccaatgccctt

SEQ ID NO: 70132 - DNA, 439 bp, Glycine max
agcttgtctcacgttatgcgagacggataccattatgctatctatcatcgccaagtaccaagaagagttatgtctagccacggcccacgagcataggatcgcggacgagtatgctcatgtatacgcggaaaaagaggctagaggaaggatgatcgactctttacaccaagaggcaaccatgtggatggatcgtgttgctcttaccttgaacgggagtcaagaacttccccgcttgttagccacagccaaggcgatggcagacacctactccgcccccgaagagattatgggcttctcggtattgcagcatatgatagactaatggccacatattagaaatcgtaggatacttggtggctctagaccttgctagatcgacttctttttgaataaatgagtggcccatgttctactcaaaaacactgtgcaataaatactc

SEQ ID NO: 70133 - DNA, 446 bp, Glycine max
  unsure (1)..(446): unsure at all n locations
aagcctggagaggatgctncaatggaggataagaaagaggaatatatttatatatgtgggagcacganactgagggaagagtaatggagagaagttgaactttgagttgtgtctcacaagactctcattcatcaaagttacaacaagtgttacacatgcttctatctatagactaggtagcttccttgagaagctttcttgagaaaacttccttgagaagcttacttgagaaaacttgcttgagaagctagagcttagctacacactccccaatcataactaagctcacctccttgagaagcttcgctaagaagcatcctatagaagctagagcttagctacacatacctctgtaatagctaagctcacctcctcgagatgagaagctagagcttagctacacacccnctataatagctaagctcacgcccatgacgaaaaatatg

SEQ ID NO: 70134 - DNA, 481 bp, Glycine max
  unsure (1)..(481): unsure at all n locations
gctgncaggcaagctgtttgcttatgcacaaagtcattttattgtccatttcttccaaatgctagcctgngtgagctagggtctagaaaaatccagaaaagaccctattgcccccttccttggtatctttttgttttcttgatcaaaacatcgagtgattccttgcttcgcactgtaactggcgccaaatactataattcgactagcaagaatcataatatcatattgaatgatattnttcggacgaattagggtctgacagttgcccctctttacttatcttttattgaaaatgacaaggtaagtaaagataaggacactaatttcatttgagcgatcttgttattcgaaatcgggcactagaggacacaaaggaagtgaaaccaacaaagcaaaaggacatttacaatgagatatcacaagcatcaagcanaagacatcattagtcttgtaaacataagactagangtattgaagtctt

SEQ ID NO: 70135 - DNA, 444 bp, Glycine max
catttcctaatcattagtcctttatagccaactatgctcttctattattctgtgataaataatagctgaactgactcatttctacaaattacggcattcataatatgaaagttattcatgtagtcaccttcatatggtcatgaacaccactaaaatatatttggaagcatccatgacaaacacgaatttacaataggcggcttgataatgatcagcatagcatatatatatgtagaaaactagcaacagatacaacaaaaccatgttggccacacataatacgatcaactataataacataaattcacaacattatgttccagaattttgtaaagtcacctggtcggcatctggaatataacttgccgatccactatcttgaagatgacgattaagttctgtatcaagtaatatgttggctgacttaatattcttatgaacaac

SEQ ID NO: 70136 - DNA, 415 bp, Glycine max
  unsure (1)..(415): unsure at all n locations
acattgaatacaacaccttatgtcaatcnttatgggagaggagtatcggaactaggagatttatatggactgtaatcctaatcacacagccgaccttttcacgagatctctacttaaccgtttgggtagatgatcggccaagatatgctgaggtctcacaagctccactgatatcacaccatgcatgattaacttccgaaccatgtggtgtctaacacccaagggtctgggcgttgcattctacactcgactatatgccttaaccaaaggtgcctgactatcacaccggatagacatgggagagataggttcgggccgcagcggaatcttatagatgagatttcttaaccactcagcttctttaccagctgctgctaaagcgtcgaattctgattacattggtgaatgtgaatgc

SEQ ID NO: 70137 - DNA, 276 bp, Glycine max
actatcgacacaccgcccactgttctagatacactgccattatcgtgcttttggccgggttctctcctacacatacataacttgacggactgcacggcgatgggtggtatacttttagaagaggtcaaaccaatgtctcttgcgcccaatctatgataccgagatgaaaccagggtatgacatgtgaagagtgatcatgtccttggtgatgccgcctctactatttcggtattcgatatagtacatggaacggtttataatactgtctaccatatg

SEQ ID NO: 70138 - DNA, 458 bp, Glycine max
catcagaccacttgcagggtgctggttcttcttcacatggatgtgatggggcctatgcatgttgaaagcctcggaggatagatgtatgcctatgctgttgtggatgatttctccagatttacctgggtaaactttatcagagagaaatctgatacctttgaagtattcaaagagttgagtctatgacttcatagagagaaagactgtgtcatctagagaatcatgagtgaccatggcagagaatttgaaaacagcaggttcactgaattctgcacatctgaaggcatcactcatgagttctctggagccattacaccacaacagaatgggatagttgagaggaaaaacatgaccttgcaagaggctgctcgggtcatgcttcatgtccaagaactttcctataatctctgggctgaagccatgaacacagcatgttacatccacaacagagtctcact

SEQ ID NO: 70139 - DNA, 457 bp, Glycine max
  unsure (1)..(457): unsure at all n locations
aactaagctggaagcggccaagatcttgaatgctaaaaagagaaactttttctgtttagggcaccaatcacatgtaataaatatcagttgaccaatattgggaatccagtatgccaaaattgttgaaatcattgccctaggaatcccatacttgaattgcatggtgaatagccaggagagggacacgtgaatgattattgataaagctgccaaaaatgaaataatgacattattgctttgagattgaaggaatgtctggcagttgtttgagacaatataagaaaataagataggaattgagcaaatacaaatggttcttgccacttnctgtatgctctcatcttggcctaagagagtcaaaattgtgctcgtgaagatgaacaacggaagaagacatattgcagttaagaataaaactatccatgatctttgaagatacactcatcatgtcatattc

SEQ ID NO: 70140 - DNA, 255 bp, Glycine max
  unsure (1)..(255): unsure at all n locations
tgcaagcttgttctcccactactctccatccagacatctggtactttctttctctctcttattcaagnggtttgttttttcatatattttttgcgtgcaattggttatgttatgctcttgatttttttgatttggggttgtttgtgaggattgcaaggaaaaaaggctttctgggtctttgccacttttttctgactccacttttcaccaagttttgattttttgaccctttgaatntgtttgggtggggggggg

SEQ ID NO: 70141 - DNA, 494 bp, Glycine max
  unsure (1)..(494): unsure at all n locations
acactcaagctgatacgctaagaatgcatagaagaagacgacaaaatcacgcatcaagttgttgtttaaatatacgcggaaagtctaaatgaaatggggacatgctttgaaaagtcaaaattttatgtttttttctacatagatatcaaataagtggctgttaaaaaaaaagttggatcataatattaaacatttaaactattaatatctgccgatatttatgaaaacgaaataaaccggattctttactgtgaagtgtgaactgtggagtttgcagcagcagcagcaggaacagaatccactagaaaacaataaacggcaaacaaaatcctcatttttatcaggacttttagaaccccttagtggtctcttttgtcactatggattctgaattacttagcatattacccnctatcatgtcctttttnctcttcatgatngnggcactaaaaatagggagcaatctcaagaaaactgagtcatctccaaacata

SEQ ID NO: 70142 - DNA, 471 bp, Glycine max
gcaagcttaagaaaatcttaatagggggtactatattttcatccttggtccttcaccccgaataaattatatgtggctgaatgtgtgcatgtgtatgtctcataataataaaatatatctgtgtaaattaatttagattctactttgtaaaatttagttgtgtgaattcaattaaaatgtccttaatccttattcctaatagaatattttaaattttacacgagtatattttataatagaacagattattatattgtaacatatatttataattggatattctttacatttttactttgataaaaaaagcatatcataaattaaatattagattatatgggtcttatatattatgactagtttaagattctataattaatttaatgaatttaagattctattgaaaataaaaataaaaataataatataaatatgcattaattgaataatcttaagcgaataaatatgata

SEQ ID NO: 70143 - DNA, 488 bp, Glycine max
  unsure (1)..(488): unsure at all n locations
actaagcttgcacataagccactntgatgccttatattgctatcattttgtatcatatgattaacagtatattataggcatggntagattntgcaaattgcaacaactatcatcttggaaaataaagaatcaggtaaccatagctgcttaagagttcaaagaaataatacattaacaaacatcatacattaagaataggccaataattctacaagataccatgcaatttcattggattcaaatggtggtagattcacttcattttgagacatcatatcaagcaccatccttttgttctaactagctttgaggatctaagacgtggctaatcatggccaactgaactaaatgttactggtgttgaaacatgttacatcacaaaacaataaatcggattataagagggtgaaagatctatattaaagatgaaagtgatgacacatacacgacgtaagatgttattagataccagatctaacacacacatg

SEQ ID NO: 70144 - DNA, 439 bp, Glycine max
  unsure (1)..(439): unsure at all n locations
acaatacttttacctgatgtttgantgagncctgtcatatatcgatactctcgaaattgaatgctgaatctctgagccaatccaaacgacaataactttttactcggatgtctgattgtgtcccgtaatataacgagactctcataattgaatgttgaagctccgagctaattcaaacgacaataactntttactcggatgtctgagtgagtcctgtcatacatcgagacgctcgaaatcgaatggcgaagctctgagccaattcgaacgacaataacttgttactcggatgtctgactgactctcgtcacatatcgagacgctcgaaattgaatgttgaagctctgagccaattcaaacgacaataactatttactccgatgtatgattgagtcccgtcatatatcaagacactcgaatatgattgtcgacctctgac

SEQ ID NO: 70145 - DNA, 415 bp, Glycine max
  unsure (1)..(415): unsure at all n locations
ctaagcttaacattcaatttgagcgtctcgtaatattacgggactcaatcagactttcgagtnaanagtnattgtcgcttggattggctcagagattcaacattcaatttcgagcgtctcaatatattacgggactcattcagacatccgagtaaaaagttattgtcgtttgaattagcttagagcttcaacaatcaatttcgagcgtctcgttatatcacgagactcaatcagacatccgagtaaaaagttattgtcgcttgaattggctcagagcttcaacattcaatttcgagcgtctcgatatatgacaggactcaatcaaacatccgagaaaaaagttaatgtcgcttgaatttgctcagagcgttaacattcaatttcgagcgtctcgatatattacaggactcaatca

SEQ ID NO: 70146 - DNA, 424 bp, Glycine max
  unsure (1)..(424): unsure at all n locations
agctttgatgcatcatttggagagggtaatgtattatctatatgatgcgctccatgagaggtngcatcaaatggagaatagagatcataatgaagaggaaaggaggagaacatggaatgatggtgttcctagacaaaaccgaattgatggtattaaactcaacattcctccatttaaaggatagaatgatccggacgcctacttggagtgggagatgaaaatagagcatgntttctcatgcaacaactatgaggaggaccaaaaggtgaagctcgccgccacggagttttccgactatgctcttgtgtggtggaacaagctacaaaaggagagagcaagaaacgaagagccaatggttgatacatggacagagatgaaaaagatcatgaggaagcggtatgtgcccgctagttactcaatggac

SEQ ID NO: 70147 - DNA, 490 bp, Glycine max
  unsure (1)..(490): unsure at all n locations
ccacattcaatatcgagcgtttcgatatattacggtatctgattcagacatccgagttaaaagttactctagtttgaagatgctcagagcttcaccattcaatatctgagcgtgttcgatatattacgggactgaatcagacatcagagtaaaaagttaatgtcgctggaattatctcagagcttcggtattcaatatcgagcgtttcgatatattacgggactgagtcagacatcatagtaaaaagttattgttgtttgaagttgcacaaagcttcgacattcaatatctagcgtttcgatatatgacaggactgaatcagacattcgagtaatacgttactgccgtttgaatttgctcagagccttggtattccatattcagcgtctcgttatattacgggactcactcagacactcgagtgaaaagtgactgtcgattgaatgtgctcatagcttcgataatanattctcagtgtctcaatatatta

SEQ ID NO: 70148 - DNA, 419 bp, Glycine max
  unsure (1)..(419): unsure at all n locations
tgagctcggaaagctgaaaagtttgctttactgcccactacctgagtgcatttgtattggttgttactnggctgctgcatcttantagatttgatnattgtattgcatcatgtatcatcatggntagtgtgaagaaagtttctaagttagaaaagtttcttcaagggcaaaactctattttaatcgattacagnagttgtgtaatcgattacaacaagctgcctgaagcttanagagttaagtctcgtatgggtttaatcgattacaattgtattttaatcaattatactattgtttgagacaatgactgnattatnncagagtctctgctttaatcgattacctacttctctcttagttagttgttcagaggtgaacaagaacactntattcgattgcctagagcatctactcgatta

SEQ ID NO: 70149 - DNA, 445 bp, Glycine max
  unsure (1)..(445): unsure at all n locations
actcagctggatttctttagtagggaatctatgattcctaagatggatctcaacccaatccccctcattaagaactagctcctttcttcctctattgcctttagtttaatacacctttgtttggttcttaaccctctcatgcaacttctttacaaactctgacctagattccccttctttatgtataaaagaagtgtcaagtgggaggggaatgagatctaagggtgttaggggattgaacccatagacaacctcaaaaagggattgcttggtggttctatgaacccctctgtgtaggcaaattctacatgagaaagatactcatcccaagtgatcgaggccgtacccgaatcanataaacatgaaaatgcagtaactaggaagtgatcctatgtcgtttcccaacgagcagtgacaagccaaatgttcataatatacttgcagt

SEQ ID NO: 70150 - DNA, 448 bp, Glycine max
  unsure (1)..(448): unsure at all n locations
tggaaagatacaggcatgctcgtttttgatcagaacgctcgcgccaaaacatgacatgatactggcaaacatcatattcaactgtggttcaactctaaacacattttattgcatgcacttatagctccacaaacggcacgaanaatacgttataaataatataatgaggttattgtgagttaattatttttagttttttttaataatatacatgttattttaaattatagatatttttaaagttttcattaaaaataatgataattaaatgtctttgtttctatttattttttaaaataatcaattatctttatatgatcttattgcaaagaaaacgacgttatttttaatacatatattttattttctttctataaattttattgagaagatattacatctctctctttttctaataataatattcgagtatcattcnttattctta

SEQ ID NO: 70151 - DNA, 463 bp, Glycine max
  unsure (1)..(463): unsure at all n locations
cgccttntctagatgcacatgtatttctttccattattattcttgttttaaattataatctatataaacaaaataaataataataataattctataacattaatcttattatcaataacttttattttattctttatcttatatattcttaatgttataaaatatatataagtaaaaaataactaatattacattataaattaaaataacacttattttataaatattttttcttcttacaccgcgggactgaggaaatattatacaaaatctacggtaatttcatagtatgctttaataaataattagagtgtatttggatgaaggaattctaaattttgagagatttaaatcttaagaatctcaattcttccattgaaatattttattttcaaaatttgtgttagataaatacaattaaattgtatggtgaatacatgatgccagagagaaattatgatag

SEQ ID NO: 70152 - DNA, 434 bp, Glycine max
  unsure (1)..(434): unsure at all n locations
agcttgggctttgcattatccatactattgttattgagcctanagctttcaaatggtattacagaagacgattgcggactttctgcggattgttttcatggcggcacctaaggttcaactaatttccatgtcattttaaataaatggagagatctcttttacccaattccaaactctagggtgagttatgtaaagaagtaaggtaatcaataatcatgttactcacatacttataaggactggaagattatatgctagctcttatgtccttgattatatcccttcatgtattatttcacaaattattatatgaaatgatataactgttattcctctaacaaaattaagaatttcaatttttacaataacgaatgattcatttataaataacttgatagagactgatgcagaatatgagataaattgaactctat

SEQ ID NO: 70153 - DNA, 484 bp, Glycine max
  unsure (1)..(484): unsure at all n locations
ccataattatntatacatggataaatttcacggagatctttgttatggaatattatatatctcatccatgtttaggcatttaaaaataatcataaactaatatgattttcacctttgtaggaaatcaatgatattttcaagaatgctctttaagggcacaccattcacaaatgagtctgcaagtaaaaagtagaacaattgttattataagcatatcactttgcatgtgcaactacaaaatctattgtgtgttgtggtgatagttataagaataccgtttgttcctgtggcacttgcattctgaatgtatattcctaattcctgtattgactctcaagtggcagaataagtgaataaacaaatgaagtacagagcatatggttgtattaattattcattggtaataacgaatgagagactacaatttgtgatgagaaagggtgcactcgtgcaagtgtaacatcaatgtttcactaactcaatc

SEQ ID NO: 70154 - DNA, 413 bp, Glycine max
  unsure (1)..(413): unsure at all n locations
ttatatatatgcaaaaggtagagcgcataacgttaacagaagcacttccacacactatactgaatagtccaacacaccttaatttggacttgtggcctacatgtcactaatgatggagccgtgatcgcacgtttaaatttcgaagaatctttgtttcttgatatatatatcttttgatattagtgtgaggagacaatgcttatgacttaaatgcgctcaattgaccttgagagttaaatgaaaatgacgaaaccatatacgttatcttaattacgtcaaataaatttttaatcttttgttaaatcttagattttgagtcttagtctcctatgaataattattcattcttagacctctttatatatctttttccaaataattagtcgctcagagagtgaanatgacataaaaaa

SEQ ID NO: 70155 - DNA, 463 bp, Glycine max
  unsure (1)..(463): unsure at all n locations
ctgtctataagagttagaagtgataataaaataaatatttgtttcttgttgaagttagtaaaatttagtgctttgtcaagaattagacatagtttcaatggttaaaacgaactagtataaacctctgtcttttaatgacctagaattcgaatttgattntatttcaaaaatttattatttatctttaaacttaattttagatgataacaagaaaaagatttaaaaaatttctaaaattataattcaacctttgtgatatttgtctttacataattattacacataaaatattcctattatatttaaaatattattgtttaagatattatattctatctattacaaataatataatgatagtaaacaaaatataactacaacacagaataagcataatatagaaagaataattgttataaagatgaagaaagatagcgttacagaaacgatgaagattgaaata

SEQ ID NO: 70156 - DNA, 453 bp, Glycine max
  unsure (1)..(453): unsure at all n locations
agctntttcgattcattctatgtacccatggtggttcacantngngntttgtatatttctattctcgtttcatttactttntagaccccctcttgacgtgcttaagccattttacttaagtcatttctcgcttaacctaaaaataaaataaatttccaccgatcgtttgaattgtattatccgtatacttcggttaaaatgaattccgaccgttcggtcgtgccgcaaccacgttggaaatcaaaaaagaggtaaaaaataatataataatcaaaaaaatatcttttagtaaaataaagcggaaaatcaatcggacgtgtttctctgtgggatttctcattcttaatcgaattgactaataaccaagatgaaactaaggctaaaatcaactcgcctagtcaagctcgttcacaaaaataaggttttgaatagttatcatttcagtttcttacc

SEQ ID NO: 70157 - DNA, 361 bp, Glycine max
  unsure (1)..(361): unsure at all n locations
cctcagagagatctacgaaggatgaagcggttgtttgaactctttagccaccgntataggagcgctgagcaccagcagcgcttcgaggccatcaagggatggtcatatctccatgagcgacgcgtccagctcatggatgatgagtataccgacttacatgacgagatattacgccggcagtgggcatcacaagctaaccccatggcatagttcgacccatacatattcctcgaattgtatgctgatgcttgtactacataggagggcgtgcaagatatgcgatcctgggtgaggagtcagtggatcaccgtcgatgctgatgctctcagccagtttctgtgataccctatagtgctggtag

SEQ ID NO: 70158 - DNA, 466 bp, Glycine max
  unsure (1)..(466): unsure at all n locations
agctttaaggggtccatatacttacagcatgtttttatgagcataaagggttttcttggaatgccaagagaacaagtangtcgttcaaaacctacgagttacatctaaagataaatgtgaaactaattattgtattacagattataactgaagtaacttaaagatggcctacatttaacaagcttgcaagttcaatatattgatttctttgggttggttntgtaaatagttgatggcttatacgtgctacaaaaataatagatttaaataagttgaatatanttttttgcaactatattagtcttttctatccggaacttaaacattgatccgtccctcacaccttgaggaacaagaatcaaaatccatattgagagatatgtcagttcttcaaacaaggatgtctacaagggggaaaaatactatttaacccaagagcggttaagaaagcataaacaagtctaat

SEQ ID NO: 70159 - DNA, 455 bp, Glycine max
  unsure (1)..(455): unsure at all n locations
tgtgcaaatcanatcactcctacatctcatctctagcatgcattntctttctntacccattcctcacgtttggttttttagggaaaaacaccataactaaacgcgccgcaagggatccctatcgcaccagatccaaatctagaacgatgggtgatcaagaggagacgcaggaacagatgaaagccgacatgtcggctctgaaagaacaaatggcctccatgatggaggccatgttaggtatgaaacagctcatggagaagaacgcggccactgccgccgctgtcagttcggctgtcgaagcagacccgactctcttggcaactacgcaccatcctccctcaaacatagtaggacggggaagggacacactgtggcacgatggcagccctcacctgtgatacaaccgagcggcttacccttatggatntgccgccaactattcaccacccatcttg

SEQ ID NO: 70160 - DNA, 427 bp, Glycine max
  unsure (1)..(427): unsure at all n locations
cataattagtctattacaaaacacaacatctgatcctacaatggtggagttggatcaatcttgttactgaaattcaaaagaattatactttacatatgtgaggagatggaaaatgaaaaagaataaaataaatgaaactttaataacaccaagaaaaggtataatttctaaactctctcagatntaaaatttgcttgtgtattattntaagtgttaagcttttgatctagataatttaattntcgtggaacctaatgatgatgcacaatctaaggaagaccttgatgatgatgatggagatggagatggtgatgaaagtgatgatattcatggagatgatccaattagaggattggacatgcttctttgaaaacatctgtgctgtttttaattaattaaatgctttaattntgaacacttatgcatt

SEQ ID NO: 70161 - DNA, 481 bp, Glycine max
  unsure (1)..(481): unsure at all n locations
tactcaagcttgctttacttgacattgttggtatgacaccaattaggatgacattttcagctgcattntcctanttggagggagaacgtataaacaatgttgtttgggctctaaaatggttttgaggtatttttctgagacgtgatgcaatccctcaagttattgttactgatagagattcaacattgatgaatgcaatgaaaactattttccccaagtcaaccaacttgttgtggtggtttcacattgataagaatgtgaaggcaaaatataaaacctttgtgggtaaaaaaaatgcatgggattatgtcatggaagcatggaggagtctcgtggattgccttctgagcaagggttcgatgagttaagaagttcgaaattgcttgctcaccatggtcaatatttgttgactatgtcaaacaaacaatgttgattccctataaacaaagatttgtaaagcttggacgaataaggtgatgca

SEQ ID NO: 70162 - DNA, 408 bp, Glycine max
  unsure (1)..(408): unsure at all n locations
ttattgttgaccacagagtggtacctgtagatatgtcgcggnggtcaggagaccttggggacgtcaggtggggtgctattgcccaaaaccaagcttgaccaatcccgacccaacccgggcatagtcggtcagagagaacctgtgatgtacctaaacaggcgagctcctggcagtcaacagataaaaggaacaaagaccacatagcaaggaggcttgtggtggctggccaactgtgaaacttgattgatatgtgagatatggtctctggtaatcgattaccaagggtgggtaatcgattacaacgcttataaatgaagacaggaggctaagatggtctctggtaatcgattaccacggggtgtaatcgattaccaggcttgaaacgacgtcaggatactaggggagctt

SEQ ID NO: 70163 - DNA, 499 bp, Glycine max
ggtaatttattatatgagatataacagaatggataagaagaatcatatttaacaatagctagatgaagcaaggggagagagccaattcgaccaagacccttagcaagtgaacgggatccattggctaatgtaaccacaggttggttggatggataagactaatgaccaatgttagtagagatatgattagaaactcccaaatccaaggacagagcgacagaggcattggtagttgacaatacaggttgataggcaagataaaatgcttatatgcagtggcagagatagaaataacaagcaattttggagtttgaaacaaaggagcagagaatctgtttaaataatattggcaatgcattgtggttttccattcaatttcgagcaacattcatatgcaagtgtagccaatcttgtgacaacatctatgtgtgagggtaagcgtcacgatcttattcccaatgctagcagcattagcaatggtctgagaggaaagtactat

SEQ ID NO: 70164 - DNA, 471 bp, Glycine max
gagcttgtcttaacgttgatgcgagacagagaccatcatgttatctatcatcgccaagtaccacgaagagttaggtctagtcgtggcccacgagcatagaatcgcggatgattatgcccaagtatacgcggaaaatgaggctagaggaagggtgagcgactctgtacaccaagacgcaaccatgtggatggatcggttagctcttacctagaacgggagtcaagaacttccccgagtgttagccaaggccaaggcgatggcagacacctactccgcccccgaagagattcatgggcttctcggctattgtcagcatatgatagacttaatggcccacatgaatagaaatcgtgaggaaacttgtatggtctctcagaccttgactagatatgacttcctttctgaagaataaagaggtggtgccatgtttctactccaaaagccggtgcaaataaaagcactcctacatct

SEQ ID NO: 70165 - DNA, 436 bp, Glycine max
  unsure (1)..(436): unsure at all n locations
gatgccgatcgaacatttcctaatcgatatcatctctttgttattcatggattgaatataataaacaatggtcggtgtcggtcgttatatggccccgactgatatatctntaagccgacattgcgcaatttcatttacaaacgctggccgataatgtttttattttaccgtacaggaagttttatgtctctgtgctgcctaaaaaatttacaacatatgtcggctaggtttttccgtgcgagctcaaccgagggttcgtttcgaccgatactggcatgttgttcttctcatctatgaggccaagataacgtttgttcacacccgctaaatcaaaaaaaaaacattatttacggaaattgaatataaaaaatgatatctgacgtaagcatggagagatgaccgatcgatgtctaataaataagcatatccggatgac

SEQ ID NO: 70166 - DNA, 467 bp, Glycine max
  unsure (1)..(467): unsure at all n locations
gcttatgaataagctcttacttnttttntatcattttttatataatagtattatatataatatgaagatcagtacaagtggtactgttatatatacaacccagctcagtactttgcaaagctatggtgacctaatactagcaatacatcaagaattaggtgaccatnaggttgaccgcaagctaggcacccaaacacagaaaggctatattctaatcccccctaaacacaagacccttccctaatattgctagaccagaagtggaatggattatgaaatcctttttccaaaattcttaaaccatgttcagcagaggaataaagcgccctccatcaatttttatgcattanagctgtcatttgagaaaatgactctgattctatggtgccaaatacaccatgtcaaggatatacaccaaagttgtcagtgctgcatcttaatgtcctccaagctacagtatgagtggt

SEQ ID NO: 70167 - DNA, 498 bp, Glycine max
actaagcttacactggttgatatagatagaagaagggaagggatggataattgatgagaaagagataatggacatagaaagaggatttcccctatctgagatacacgggcgcttagtatgtattcattagagatatctaagtatcggggtatgtttctcctttgctttctattccttttatagacctaacgtagcttaaagttcacgtgacatcgcgttaagcgggccttttgggcttaacgattatggcagtgattcgtgctaagcacgtctttgggcttcttcgtgaactttcttcgcactaagcgtgagctgaccgctaagcaaggagacgtgttaggcctatcttgtgcgctaagcaagctggcctcgtctccaacttttcttcaagagatttgttctttcaacgttttgcatcaattcttctccaaagcaatagaaattatattcttttgaatcctgtggtccaaaatacaatgatatttaattattgattat

SEQ ID NO: 70168 - DNA, 455 bp, Glycine max
  unsure (1)..(455): unsure at all n locations
gctntctccactaagttgcctgatgcctgttttgtctnttctgatggcagtggtcctagatgcagggaagaatttctccaagaacaccctcttaaggtcatcccagctgaaaatggacctgggagcaaggtaggatagccaatcttttgccactccctccagagaatgaggaaaagcctttataaagatatgatcttcttggacattagggggcttcatggtggaacaaacaatatggaaatccttaagattcttatgaggatcttcacctgtaagaccatgaaacttgggcagcaaatgtattagtccagtcttgagatcatatggaacaccctcatcangatattgaatgtacaagctttcataagtgaaatcaggtgcagccatctccctaagagtcctctcgcgaggtggagggtgagtcatgctctcactatgaaaattagtaatggaat

SEQ ID NO: 70169 - DNA, 325 bp, Glycine max
ctagctccaccaaaatgaatacactccatctttctgggagcaattccaccataataaccgtactgcataaacaaaatcaccaacgaattgacagtagacaaaggctcttcataccaactcataagggaatccttatcttaattactacataaatataactttcttttaaactctgaatctaggtatatggggctgatctcccggtcaatcggtactacaccaaaacgaggggggtattggaattggaatcataaacaatttttcactcgcaaaacctgtcaactaaagtaattagccccatatatagcaagcaaagaagttcccg

SEQ ID NO: 70170 - DNA, 451 bp, Glycine max
actcgagcttttatccaggcactctcttgatggcgaagctccttcttccatggcttgttccttagtggatggcgcctcctctcacctcttatcctttgtcttctactgcatctccatggtggaaaatcaccattgaaggacctcattaaagctcatagatccagcctccatagaagctccacaagcaagcttccatcatgtggtaatcagagcacaagagcatcaagtatgtgctccttaaactaccattagtattcacgattaccttcttctccattgttgatacttcattattttccatgtatctcctcacatgacttgtgctaaatgttgttaacatgattctttataatttccaccgattaatctttctataaaagctagacttgattatctatggttcaaatctcttgttcatgttcttgaaccatgagttgcgatgagttaagtt

SEQ ID NO: 70171 - DNA, 426 bp, Glycine max
cgatggccccaatgacatctattccccacatgggaaaaggccaaggggcggacataacattcagaggatgtggcggaacattgacattgtccgcgtatgcctgacatttatgacacttccttacatgggcgcagcaatcgctctccatagtgagccagtaataaccggccctaaggatcttcctggccatagtatgcccattggcatgtgtcccagatgaacccccgtggatttcctcaatcatgaaatttgcctctttggcatctacgcatcgtaggagggtcatgtcgtggtttcgtttgtacaggatggtaccactcacaaagaaaccagtagccaatctccttaacgttctcttgtcattgtcggaaatccctagtggatattctttgttctcaacatatttgttgatgtcgaagtaccacg

SEQ ID NO: 70172 - DNA, 464 bp, Glycine max
  unsure (1)..(464): unsure at all n locations
ggagatgaggaagtgttgaagggtgaaacttcctgcttntattgttgaccacagagtggtacctggagatatgtcgcggtggtcacgagaccttgaggacgtcaggtggggtgctattgcccaaaaccaagcttgaccaatcccgacccaacccgggcatagtcggtcagtgagaacctgtgatgtacctaaacaggcgagctcctggcagtcaacagataaaaggaacaaagaccacaaagcaaggaggcttgtggtggctggccagctgtgaaacttgattgatatgtgagatatggtctctggtaatcgattaccaagggtgggtaatcgattacaaggcttaaaaatgaagacaggaggctaagatggtctctggtaatcgattaccatggngtgtaatcgatcaccaggcttgaaaacgaggtcatgaagccatgaaggcttctggtaatcgattacca

SEQ ID NO: 70173 - DNA, 424 bp, Glycine max
tggcacaatagatcgagcttagccaaagataagttgtcgcttattgatcacgctaaagcttatccgaattcatatcgaattgaagttagcttagcttatccttggccagcttagtggaccaaatcagcctcaaatgcaagggttgggggctaagcgcttgagactctatgcttagcgcatgaccaaagatgcgcttatcacgaagttggcgcttcgcaaaaggactgtttttcaatatatgttttataagttatttttcagtcccttcctcaacaaattgaaacccatatatctaacattcaaagataggttgatatactcctatgtatagattatgtagcaagttcccaatgatctaatgcatgaagacaagaattacagaaattaaaactgggttacctcccaggatgcacttctttaatgt

SEQ ID NO: 70174 - DNA, 431 bp, Glycine max
  unsure (1)..(431): unsure at all n locations
cggtagtttcagatgatgcagctgagtgngttgctctctcattcactcctctaatgactatagcatcagttctggcgctaagctgctggttgttggaagccatcttctcaattaaatttctggcttcagcaggagtcatgtctccaagggctccaccactggcagcatctatcatacttctctccatattactgagtccttcataataatattggagaagaagctgctccgaaatctgatggtgagggcaactggcacatagttntttaaatctctcccagtattcatacatgctctctccacggagttgtctaatacctgagatatccttcctaatggctgtggtcctggaagcaccgaaaattctttctaagaatactctcttcangtcatcccagctcgtgatggaccttggagaaaggtaatacagc

SEQ ID NO: 70175 - DNA, 444 bp, Glycine max
aactatcatgtatcaactgtcttatattcatatcatagaccagtattaggaggaggattatattctaacagttatccccacatgaacattattcttccttaaaatggagaagtcaatttgaattcctcaatatgatatgacgaatgaaaacttctgattatatttcatagcagaacaatctccacaaactcattcttatacatccaaattactgcacctgtttgagaagcaagtgatcccaaagcaacagaccaagttctcactgtgataagcaagaccaacctctttttcctctctatgcatgtgatgcggcaaaaaattcatatctggaacataaccaacttccttagtcttcgtacgatttcatcgatgttggaataaatctgagcttgccttggatgtcctctatcttcataaatgaatgtatgcactataccggtcatt

SEQ ID NO: 70176 - DNA, 456 bp, Glycine max
  unsure (1)..(456): unsure at all n locations
ggaccttcgtatgttatgcaatccaccttcttgtttctaactatttgtgaagagntggataagtgttgtagaagcttcttgtggggtgacattgataagtaaaggaaggtccacacagctgcctagaatatgctttgtaaacctaaaaagaatgaggggctatgacctgtattcatctagagattttaacaaagcctttatgatgaagtgcggttggggtctttgtaatagaaaggaggatttgtgggttaagattgttaagatctaaatatcactgtagggattctattttgccagagattgatattactatgcaagggtccaacttatggaggggaatctgtacaantgggatcatgtgctgaagttgctatcctggatgttggggatgtcaattctattagtgcctagctagcttatggatcctangtcatggcgcctttcttgaggaaacta

SEQ ID NO: 70177 - DNA, 462 bp, Glycine max
cgtgctagctttaatgtgcgggttcaggagacttttgttatcgttcgcgatacgcgaagatgatattgcgagtactttggatttggtacgaccatgccctcctgatttccatctgggaaattggcgagtggaggaacaccccggcatttacgcaacaagcataatgtaaacctttacggctttaaaagctctatagatgcgcctacgctttagagtttttccttttgtggaggctttgtgtcttttgtttttgaatttataatacaaggatcttgcttcatctgttcgaggtctctacccattctcattcatttgcatgtgtactgtcttttctgaaacggcagatccgatgacgagtcccccgaatgtactaatacctgtgacccgtctatcgacttcgagcaagagatgaatcatacggtatatgaaggagatgatgatgttggacttcctttggaacta

SEQ ID NO: 70178 - DNA, 426 bp, Glycine max
  unsure (1)..(426): unsure at all n locations
tgagagcttccgtgttcaatntcgagtgcctgtgtgttgatgcgcctgaatcggacatccgagtgaacagttatgaccatttgaatttctcgagagcttcctatgtgtaatttcgagcgtctcgatatattatacgcctgaatcgaacctcagtgtgaaaagttatgaccatttgaatttctgtagagcatccgttgttcattttcgagcgtctctatatgtgatgcaccttaatcggacctccgtgtgaaaagttatgaccatttgaatttctcgagagcttccgttgntcaatttcgagcgtctcgacatattatgcgcccgaatcggacatccgtgggagaagctatgactatttgaatntctcgagagcttccgttgttcaatttcgagcgtctggatatatgatgcgcccgaatcggacat

SEQ ID NO: 70179 - DNA, 427 bp, Glycine max
  unsure (1)..(427): unsure at all n locations
agcttagagaggaagcttcaatggaggattagaatgatagagagagaaggggggcacgaaatcgaatgataaaaagaaggagagaagttgaactttgaagtgtgtctcacaagtttcacattcatcaaaggtgtgacaagtgttacaaatgtttctatctatagcctangtcactaactaaatgaaattcactgtgtgaatgtatttttcatttcatgtgaatctaagaggaatattccaaagatatgccaatggcatcttagcatattccctttagatgccacaagaatggaaggtgcgactctagcacatgggaaaggaatatgccacaagaatttgcctttggaatattccaagagtattccacaggcatctaagcatattccttgagaagctagaggtggcgggggggggtttatcctttatt

SEQ ID NO: 70180 - DNA, 482 bp, Glycine max
  unsure (1)..(482): unsure at all n locations
cgtcgctggagtngacccatcaactatcctaactctntcagactggtgactcctangctcttgaccttgactggatagaacctctctttaagcgaaggcgcctgacttgatcccatgttttactaaagtgaaacaaaacccagtgcgaatcaagactccaacatttatcatgggtggaatggatgaatgcatgaagaaatgcatatgacacagatgcattntacgaatacgggagcccgagagattgtccccttcttagatacaacattcggatagcatggcgcccgatgtatgcatttaagaaggcaacacggaccctccgtcggttcgtgacaaagtgaggggatcaagacgcaacccatgcatgatgcagatgcgaaataaggcacaacacggngatgtacatagtatgacaatatccataaataatcatacaacaaaggcatacattgacatttagactacatgcatggcagtgttta

SEQ ID NO: 70181 - DNA, 268 bp, Glycine max
agcttctgaagggcctcgtcctcctccgggctcctctttttcttgatccggtccatgtcctttcgggccacggctatcatgataatactattattatgcgatggttgatgaaattgatggttgtgttgatgaaattgaagaagggaatgagggagggaggaatgaacggaatggtcttttttcttgtttgcatcagctagttattcttttgttgccgaatcattgttcttctatgtgatcatttcatcctattattgaccatttttga

SEQ ID NO: 70182 - DNA, 300 bp, Glycine max
gcttgagatatccatgcattgggccacatattgtgcctcttattggaggaggttatgtttcaccactacttccttaagacttctcccaatgaagaatcgatccttttgtgttctacaaagagactattaaattggaagtggtttaattcgcccttgaggctgctatatgtagtcaatcaagtgaagacattcctctatagatctcttcgtcttacccaacaatatgtggccagaaattctacgccataaactagtttgatgagaagaactttaactttaggcattacgtcatgtacttat

SEQ ID NO: 70183 - DNA, 502 bp, Glycine max
  unsure (1)..(502): unsure at all n locations
agcttatgcgcatatttccttacaatcgttctcttgcacaagacanaaaanaatgcacccatatacaatcaaggcagcttcgttacctagattatttacacgtacttccaaggtgtattngttacttacatcacacacatctccttggctaaattcacatacatgcatactccaagcattttggggtaccaaaaattgcacctgtgcacatcttggtatttctaatacctatacatacacaaacttcatgatgaatcttgactatctacacaataaggtgctacatctcatgccttttttcaagtttttgctacctaaagccgcatgcaaattcaagcatattttcctttgttgactaanattgtattcaaattatatatatattntttggaatatgtcttttttcacataacattcaacatatntatatatanttttntgtgagacantttgactaccaaaaaatatatatacatacattcaagtacttcgctattcatac

SEQ ID NO: 70184 - DNA, 508 bp, Glycine max
  unsure (1)..(508): unsure at all n locations
atcttaagtcacctgcggctgcagctntaagatttgacacaaagtagtggagtatatcttgcaccaatattgaaagtttggagaggacgaccattatggaactatgagtaagtgaccataacattnttaaagaaaccaaattcctagatatacctcacaatccaaactagtacaagtatgtcacaataaccttcaactaaacacatgttcttttttccaaaaccaagtgcaaaggtgttattataatttttaatttgtcggcctcatagggtgttacgttaatatttcgtccacatggttattaacaaaatatggagtgataagattagatattaaaatttaattatatttttggtggattgattatgcattaattatattatttattaaacataataaatatttaagtctaagatatttattaaattctacattcattattacacatcatgaatatgagatatgtacgcattanatgtacgagagatacatattanaaaatctaaca

SEQ ID NO: 70185 - DNA, 87 bp, Glycine max
  unsure (1)..(87): unsure at all n locations
tcccccccctcanaaaattaagaatttctcccaaccttttgtaaataatcgggacaactttcaactctttcaaaacatctttcccct

SEQ ID NO: 70186 - DNA, 447 bp, Glycine max
  unsure (1)..(447): unsure at all n locations
agatgtcttggtaaactatgaccttggattcgntagccgctgaatcattgtgaaatnttgacaccatgtttgcaattcatttccacatatcttcaccattgggatttgcaaaatgatgtctggagagggataaacactcattgcatgcagacagtggaataaaggctttagtctcttctccttctctctaacgtttggaatccttatcagagaagctagagaanaaacttgaggaatcttagaaaactgttagagatgccgctatcgctgtcagaatacacacatgagtntgcttagaggtaagggatgagttattcacaattggagagtagtgagaacatgtgtaggaatccttagagtatcaattgaaatgggtttttgggttgttttgcaaatttgatctatctttccaatataactatgaattatatatgtttgatgaaccta

SEQ ID NO: 70187 - DNA, 138 bp, Glycine max
aatgtatttttaactttaaaaaatcctacgtattatactccttgactaaacatctagtaagaaaaattccatttagataatgatctttgcaaagtgttaagcttaatagtcaagcttctatgcactatactgtaactc

SEQ ID NO: 70188 - DNA, 470 bp, Glycine max
  unsure (1)..(470): unsure at all n locations
atccttgagtcacctgcggcatgcaagcttataagcgcgggtctgggagacaaaggtcatgtggtcgcgatatgcgaagatgatgttccgagtacattggatttggtacgaccatgccctcctgatttccagctgnggaaatggcgagtggaggaacgccccggcatttacgcaatgagcataatgtaaacctttacgggttttaaaagctctatagttgggcctaggctttagagnttttccttttggtaaggctttgtgtctttggtttntgaatttctaatacgaggacctttcttcatctgttcctgcgtctctacccattctcattcatttgcatgttcacttctttttntgaaacggcagatccgatgacgagtcccccgaaggtactaatacctgggacccgcttatcgacttcgagcaagaaatgaatcaaacggaagatgaaggaaatgaggatgtgggac

SEQ ID NO: 70189 - DNA, 156 bp, Glycine max
gcttgatcatcaggggatatcagctaataacgagtaatgttgatatacagggatatcactaacatcgactgacttgatatcactgatatcagaggcgatatcactgaatcagttgatagctgtgatatactgaatcagtgaatcaagactaacttt

SEQ ID NO: 70190 - DNA, 460 bp, Glycine max
  unsure (1)..(460): unsure at all n locations
gacatgactcttaaanatataactgtgttatcaattaccacaatcctgtaatcgattaccagtgagaaaatttcacaaaaaactttntaaaaagacacatctcttcaaactattctgaaaaggcacaataagcctatatatatgtatgtctgacttcaaaaagtacaagagagaattttctaagagaacttacttgtcaaatgctctctaaataactattggccaaacacttgcagatctattgagaattcttctaggaacttcaattggtatcatctactctaaaggagggaagatcttttgtacatctcataaacttagttgtaatcaagagactattcgtctcttggcttgtgagaatcttgaacacaagggtgagggatctcaagctgtgttcanagactgtaaaggatttacagagatagtggaaaatctcaagtggcgtacttgaggactggac

SEQ ID NO: 70191 - DNA, 474 bp, Glycine max
  unsure (1)..(474): unsure at all n locations
tcttgcgcagagcaaataattaatggtgttctaaccatgctctggctctagaaggtgatgttgtatatttataagttacaagatactgaacatcgctgacaaaggaaaaagtttaccatgataaaatgcacactactgccaactccaaaagaataaagagtgctctaatcgaattctcattattcacttcacaacctagaggggtgcaaggaattgttcccatcaaggcctttctcaagataatgtgctgcgacatctttaacagtagtgttcctatagattggnggatagtcttctgataacaactattttattggaccaacaaccttcaatgaactctgttgatatgacattgttagacacttgcaactgatattctggggcctgtatgacttgataagacccgatgatagacactaaggaacatatcatnttgtntatgctgcgacaaccaggagaatgatanaacatgat

SEQ ID NO: 70192 - DNA, 336 bp, Glycine max
  unsure (1)..(336): unsure at all n locations
gcttctgaattgtcctggccattgaccctatctgttatatgattatgggaccagcattntagctctacttcagtaccctcctaccacatgatggccaaacctctagatacgcaatttctcacaatcaacaccatggaaattttccatccttgtcataccctataaaaaatgaattctgccgtgttttttcttgcttccatcaagaaagctatggtgggaacttcaatggataagagcttactaagagctctcactgcacatatgttcccaagccaatggcagttccagcttaaagacctcaagatatttggcggcgctggtcaacagcgcccacca

SEQ ID NO: 70193 - DNA, 289 bp, Glycine max
attttgaatcatagatttccctctcctagggattaatgctcaagtatacattcactattggcttaacaattctcatgtttctcacctctctattgcagactctgaaaagtaattaataaattatatatagctcttattattaatattatagcattatctgaagtcacagcttatattttaaatcatggactatgcatgaactcactatgcacctgaaatcataaattaaatagatgtgtatattcatataaacatgatagtacagacttttctttacactacctttcga

SEQ ID NO: 70194 - DNA, 187 bp, Glycine max
  unsure (1)..(187): unsure at all n locations
cgtctgactgaaaccctgggtcccaactatcgcttgagacatccccttcgcagtgcgtatacgaaaagccgcacgatcgcctttccacagttgcgcacctgatggcaatggccctgatgcgatttctcttancatctggcggtattacaccgatatggtgactctcatacaattgtctgatgccgat

SEQ ID NO: 70195 - DNA, 508 bp, Glycine max
  unsure (1)..(508): unsure at all n locations
attcttaagtcacctgcggcatgcaagcttggtgtcataccctaatttcgtccagtgatctttttcttgatgacatgcgacctttctttggtccttgtgaggtgcttggcatccatcattagccaatttgtgaaattccaggacatgccgaaaaaccaaaaaaatattgatgcacaatccgtaagtttccgtgacacaccggaaatcaaatggaagcatcgttgcataattaagtgaggttccgtaacattccgtaagtcaaaagggggatgattatgtaatccgcaaggtttcgtaacattacggaaagaaaacaagtatcgttacgaaattcgtaagtttccgtaactctacgaacnaagaatcaccaataaacagcagaggcggtgtacttagtaaaaatggtggtgcaaatagcacccaggcccacttgcgcccttcagaatattactccagaaggctgntgcttctggaggaagcaacctggctctgctgggcgagctgagct

SEQ ID NO: 70196 - DNA, 172 bp, Glycine max
tataaatgtcacttaagggagttatgcatgtaagtcaaacatttagttttcctgacttaacttgcattatgtttacctgtgtatgtgctcctatttaacaactccctttagttgagagcaactaaatgactgagcttagttgagctaatgaatatctacatcgaattaccta

SEQ ID NO: 70197 - DNA, 414 bp, Glycine max
  unsure (1)..(414): unsure at all n locations
agcttcggaagaaagtgatgaggtacaagtcctaatggcagagctngaaagagcctgtgtagtcgaagagaagttcaagtccatagccatcaaagtctgaaaagagtatgatgaactaagggatgtcaatatggccaccgatgaagccttggaatgagaaaccaagaaggcccgaaaggaagaacacgaccaaatcaaatttttgaggggctttatagggcagcaatagtgagctcaaactccgaagaggtgaaaggaatcatcacgggtcaaaggcatgatctggaaggacgagctaaaggcttgccttatgtcgaaaagaaatttgtcccaacagttaaggtgagactgaaaggaatatgtgggccatcatcgataagtgcaaagagaagctaaatctagcggcgactcatg

SEQ ID NO: 70198 - DNA, 327 bp, Glycine max
  unsure (1)..(327): unsure at all n locations
aatgtatttttcgaaatcaggcactggtaatcaattaccattaagggtgtaagcgattacacatcaacagatgtgactcctcattttgaattttgaaaatactaactgtntaaaacactggtaatcgattacagccttgtaaatcaagttgaaaaacaatgctggctactggtaatccattactacctttggnatcattaccgagagtaactcttggaaaagattggaaactcatggcacttatgttgaaactttatactatctgatgagatctctgatatgatttgagctgactgacctgattttaatctgctctaacttgatctt

SEQ ID NO: 70199 - DNA, 136 bp, Glycine max
gttctcttatgagaattaacagtcaatgctctatatccggatattcatattcaccaccaacggatggctctataagatccggatgctccttgtgcacagaatgactatgaggcacactaggcctaactaatctatg

SEQ ID NO: 70200 - DNA, 261 bp, Glycine max
tttaaaacaaaacaaatttttacaaaatttaatttagacaatatactttgtacatacatacgatgtacagaattgttaaaattctatggtgctgtcaagattaattgatcatcctttagacgtcatgactgattgatcatcatggaagcacacttctaaaatggacatcctggatctcaatattaaataattactactgttaactacttagtttcctaatgactatgcctaattattcaacttcatttactgctgttttca

SEQ ID NO: 70201 - DNA, 134 bp, Glycine max
tgtaactacatatttcagcgtatttacgactcatcgctcggtaaaagtatgcgtgatgctaacctcacatcattcacgctatttacgatatgctcagaagtatcgttatgtaactacatattacgcttatttac

SEQ ID NO: 70202 - DNA, 500 bp, Glycine max
  unsure (1)..(500): unsure at all n locations
agctggcttatggngcttctatggaggctggatctttgatcttcgatgaggtcctttaatggtgattctccaccatgaagatgcagcggaagacaaaggagaagaggtgagaggaggcgccatccactaaggaataagccacggaagaaggagcttcaccaccaagatgagccttggataagaagcttgcagaggatgcttcaattgaggaaaagaaagagggagggaaagagggagggaaagagagaggggagagcatgacattgaaggaagaaaaagggagagaagttgaactntgagttgtgtctcacaagactctcattcatcaaagntacaacaagtgttacacatgcttctatntatagactaggtagcttccttgaaaagctttcttaagaaaacttaattgagaagcttctttgagatagcttccttgagaagctagagcttagctacacacacccatctaanaacaaagctcaccttctttgacaaatacg

SEQ ID NO: 70203 - DNA, 484 bp, Glycine max
  unsure (1)..(484): unsure at all n locations
agctngcttgtggagcttctatggaggctggatctttgatcttcaatgaggtcctttaatggtgattttccaccatggagatgcagcggaagacaaaggagaagcggtgagaggaggcgccatccaccagggaatatgccatggaagaaggagcttcaccaccaagatgagccttggataagaagcttggagaggatgcttcaatggaggaaaataaagagggagagaaagggagaggggggagcatgcatatgaaggaagaagaagggagagaagttgaactttaagttgtgtctcacaagactctcattcatcanagttacaacaagtgttacacatgcttctatttatagactaggtagcttccttgagaagctttctaaagataacttccttgagaagcttcttagagaagacttacttgagaagctagagcttagctacacacacccatctaagaactaagctcaccttcttgagaagc

SEQ ID NO: 70204 - DNA, 479 bp, Glycine max
  unsure (1)..(479): unsure at all n locations
tcttaagtcacctgcggcatgcagcttctaattagttcttttctacgaccgttcttgttcttttgatgttgccaaagggggagagaacttaagggtataatttaggaataaattccaatcttaagggggagtaaggattgagagcacacattatcaattgtatatcgcttatttagatttcagattattgtcatcatcaaaaagggggagattgtagaagcatatatgatatgaagttntgatgataccaaagatgagcgtgattcaagtcaagaattcataaattcaagaagaacgatgtacttagttgatatgatcttanaaagaattccttattcgatgccgcacacggttggctaaagaacatatcttacaaaatctttttaagacatattatgttttcaaaaatatgatattttctctctagtgatcaattatcaaaggatgtaatcgattaacagtaactaaaatgacttctg

SEQ ID NO: 70205 - DNA, 191 bp, Glycine max
ttcacaacgtgaatatattcgtactcgtaaatcaatcacgtcgtcggtgaccactgaatcaagagtaaatattatatcaagaccttataataacgaatatcgactttctggattatctatcatgataacaggaactagtaaaatcctacactcgctaaagttagtgattttctatagaagaattagcacct

SEQ ID NO: 70206 - DNA, 485 bp, Glycine max
  unsure (1)..(485): unsure at all n locations
gcttccttgagaatattcctaaagaagctagagcttatctacacacacctctctaatagctaagatcacctccttgagatgagaagctagagcttagctacacaccccctataatagctaagctcacccccatgacaaaatacatgaaaatacaaaaaaaagtccctactacaaagattactcaaaatgccctgaaatacaaggctaaaaccctatactactagaatggccaaaatacaaggcccaaaagaaggacaaaacctattataatatttacaaagaagagtggatccaacattgacccatgggctcaaaaatctaccctaaggttcatgagaaccctanggccttctttagtagctctagccgaagcctcttggagtcttctatccaatacccttggggggtaggattgcatcatccnctccaccttggagaggatttgacctcanataccgaggttcttcatactctgtgctccttcc

SEQ ID NO: 70207 - DNA, 492 bp, Glycine max
  unsure (1)..(492): unsure at all n locations
agctntttctaacttttttgagtttttggtgcggtgttgtattgaatggtgtgctagattcttcatggnttggtaggtgagtaatcttttgctcaatatgttgggttatatgcttaacgaagatgaaaattgatgttggagttggtttgtttatggaattctcttcgctttttcttttttcaatggtaaagggctggtgaggtctccagtaacagcaacattgccacagataagttcaaggctgtttctggtttggggcatcttatggagttttcctgaggtgaagaacaaattgaactttcttcttttatgttgatgcatcttaatttgtttattcagcattcagtcatattctnttattgaaaggttgcaacatatntataatgccagactcggtcccatgtgcttgttacctccctactaatcagctggtccatcacagaggcaagtctttcatgattgctctctcatcgtgacattanattatctatc

SEQ ID NO: 70208 - DNA, 364 bp, Glycine max
aaaaccttgcttatgagtcgtcctttgcgagatctacagaaaagaaaggtttcaatatatgtggatttcaaactgaaaaatatgttgatgaaatgaccatcacttctcacctcagatcactgaagggatgacatgatgagagttatctgcaacaacaatggactgtcctacaaagggaccatgtgactgatattaatcacgatcaagatggaagtagtcctggcaggttccaagaggtgcttaaaacttttcgtcataagatttagacattgttgtgcattataagtttagtgaacgtttatgcactgtacatttggctcaactgcgacaaaatgtgactgcactcactacgttgatgccattt

SEQ ID NO: 70209 - DNA, 171 bp, Glycine max
  unsure (1)..(171): unsure at all n locations
gacttaggattataacttttctaagtcacagtgtccagctttattatacagacttctgaaacttttagaactctggacttttagaactctgaagttctgaaactctggactaagtactcccccttnaatactactctggagtctggactagctctcccccttaaataccct

SEQ ID NO: 70210 - DNA, 417 bp, Glycine max
  unsure (1)..(417): unsure at all n locations
gatcatcctcatctatttctgagcaactctccatgtgtatttcatcttttgtatctctgcccatgtaactcttctgttccttccctttgctttataatttccatttgttctgcaataaaaagaattcagcaaaataaccaaaggactaattctcttttattttgtacattggaatgacaaaccatagcatactctaaactcttaagtatatgtgttaattaccttctaaaactttattgtggacctctntatctctggataacttccatatcatcaagctcataagagtggcagatgtgccatgactagcaacaaataaaaaaaatcaagtctgcagttattaaatcatcatctaatggttgatgattctcatcccttagtgcaagcaggcaagaaagcatgtcatttgtggagctt

SEQ ID NO: 70211 - DNA, 93 bp, Glycine max
gccacctacccttcgcggaggcacctatgcggatgctgtcacaagatcccgagcgcacacgtattagaactcgaaacgaaaacggatctacac

SEQ ID NO: 70212 - DNA, 486 bp, Glycine max
  unsure (1)..(486): unsure at all n locations
agcttgtaggattatggggtacccatcacatgtggtactangtggcggncgggcgatggtgcacaacaagttttccacatgcacaatgcgcgcataaacccaccatcccctgttgcccacctccaactgagctcacatactcccacgtagcccatatcctcgtttctctcaacaccgggtccccatcaatcctcccaagcttccacaacatccaagcaaaacaacattcaaacagcacaagctatcacagccaagcaaaacagggcaaaggcagaaaactctgctcaaacaccaaccaaaatcacagcttttctcacttaaagaccccaataacaattccttcgatctaattcgttaaccgttggatcgactccaaaaatatactggaagtctatagtgcataagcctacattttgaccgttgggatctgctagcaaacattcagaactcattctacattactctttccacaaccagcaaatacat

SEQ ID NO: 70213 - DNA, 487 bp, Glycine max
  unsure (1)..(487): unsure at all n locations
agcttaataatctatggcttgaaacaagcctcccgtctatggtatctaaagtttcatgatgtcatcacttcatttgactntgaagagaacatcatggatcaatgtatataccaaaaggtcagtgagagtaagatttgctttctgtgttaaacgtggatgacattntgcttgcaactaatgataagggtttgctatatgaggtgaaacaatttctctcgaagaactttgatatgaaggatatgggagaggcatctcatgtaattggcattaagatccatagggcaagatctcgaggcattntgggtttgtctcaagagacttatattaacaaagttttagagagatttaacatngagaattggtcaccaagtatagctcccattgtgaagggtgaaaaactcgctttgagtcagtgcccgaanaatgattntgagtgagaacacatgaagaatactccatatgcttcaagctgtggaaagtcttatta

SEQ ID NO: 70214 - DNA, 209 bp, Glycine max
ttaccaataaatcactttttgggatgtaagctaaagcttatcatcatatactgaccacatgtcttaatcacgtggacaaggcacgtgttaaggccactctgtgcaaaggaaacaccgctacttcaagcacgagctttcattcaatacagctccttctcggaagcccgcctcccttgcttggaacgtttattcggttttgtttagttcta

SEQ ID NO: 70215 - DNA, 500 bp, Glycine max
  unsure (1)..(500): unsure at all n locations
gcagcttacaccagtattttctaagcccttatgatctatctacccaagtattctttcgaaaagtctatccaagcttcaaaacctcagtagtaattgctacttgacccacacactagcacattgtggtcaagagagcttcatcaagatagtgcatcagtatgttgatacatggcacagatctttacaagtcttgatgtgtgcttctcgactatgtgtgtagacacgtatgtcttcactgttgtcttcaacaatgcatcttctgatgatctttatgttatgtgtaacttcatatgtctaccccttgatataaactaccttgagaatcatgcttccattcatattcaacttcttatatctacactttgacatacaactcatgattgtcctttgctttgggtgttgctcttgaagttggacaagctttagaattgngaaaccaacgtcatangctaatggttcacaccttttcttcatgcttcttgataagtactatgtaaagc

SEQ ID NO: 70216 - DNA, 495 bp, Glycine max
  unsure (1)..(495): unsure at all n locations
agctttgtcactccacccatattaactagacttatcaccaccgacaacagcgtcaaggaattcttgcaccccgtatacaaaggtttctttgaatcagtttgcaatgtatcatacataggggcatgtgcttgctaaaagactcttgtccaaggtcacgaatcatatcctccaagcgatctcccatttctacatcaaacggttcagattgngacccactctacatgtctgtcaattcaccatgccatatccacattgtatagttcttcttaatcccattacacaacanatgctcccgtatgccgtcgagtatttgccatctcctgttcaaaccaattatgcatggacaaaaaaattttcngtttcatccggtcgacttctttctgaagcanattgtaggaactattccacatcttcctcatacgcagggctcatgcgactntcattcatccaacttcgatccatctaaataatatcttcgtgatactccgaaagtat

SEQ ID NO: 70217 - DNA, 368 bp, Glycine max
  unsure (1)..(368): unsure at all n locations
gagattaanagacctgaatgtaaataaacagaaccttcatgatgaactgaaacaaattggttatcaggtaatttaacggatatagatactcttgtgtattattgaaaaagataaagatcaaattccatctgattgttacacctgaatgtaatatccacatgatggaatgagttttaaaagagaaaacaagcgaaaagacctgcaaaatctgctacatgttgttcattaccaatgctcataagagaaagaagtagttgaatctgagatggagtcaaattattctgaggtgtagagtccgaagatgtgggaataacagcagcaatggactgagcttgcctggagtgagatctcgagtcacgaccattatg

SEQ ID NO: 70218 - DNA, 334 bp, Glycine max
  unsure (1)..(334): unsure at all n locations
tgtcctcncatacgagtggcggcgatatggaaaaaccataccctcgaccaaatgtgttttacctgggttatacactaattactaatatttatctgatgtcatacttcgattcattgctacataaaaaaaaaaaaaaaactactatgtgtatgttacgaatttaatcctctcaagcttnntgtaagntaaancatccaagattaaaaaacatccgttgtataaccttagtgtgggattgtgaatttatcaccaaaattttaatatttctacatgttaccattatattcatgataacactacaatgtttcataaaaaaacttaatttatttttatg

SEQ ID NO: 70219 - DNA, 518 bp, Glycine max
  unsure (1)..(518): unsure at all n locations
gtcacctgcggcatgaagcttatattaagctacatcaatatatgtctgctatctttgcggatntagtgtttgcgggcgagagaattgaagtatgtttgaggaaagggaaatttaattatgttgcttctatgaatcctggtaatgggggactcgagaggagtagtgaaaggaagaaggagggagaacctcatgttatggctgtagtacctacgtggctaaactttccactagccccttataatcccatgtaccaatatcctccgcagcaatatcactactcacccaatatcagtcctgcccattgcccaccaccctaccaaccaaaaacaccatgtcagccacaaaggccacccctaaatcggtcacaacatccaccggcggcacatttaagaccaaacaccacccctaataccaaccaanataccaatcatggaaggaatntcccagaagaaaagcatatagaattcaccccaatcctaacgtcatatgctaacttacttccttatctgctccataat

SEQ ID NO: 70220 - DNA, 455 bp, Glycine max
tgcatgcgtgaattattacgaataaagaacactcttatgtcttaaatattcgtgactgaactactaatcattaaatattcgtgatcatcatctgctaacaaaatagaaaggggaaattattatagctgctgcgttgatataattctttgaggcactttgtgacacacgctgcatcattgcatatgccgtcgtcttgcggtaacaagtgacaaacaaacgaacaaagagataatgagtcatgaatgacgggatcttatatagcattaaccatgcatgtgtttatattaatgtgtacatttcgaattggaatgacctttgaatttttgctttcaattctgataattattattatctaaattcttattgcacacgcacagtatagaagaagagatgagagaatatatcacattttgataacaatgcagggaaatagtatacatataacatacagctct

SEQ ID NO: 70221 - DNA, 307 bp, Glycine max
gcatgatgacacgggtcatgttcctttctccctccttggaagggagccttcttgactgtcggacgaggttcatggcgattatatagagtatgccccaggagacgtttatttctaccccccggttcccatcgaggggtctgcacccaacatactggcttagtccaacctcccagcatatcccatattcttgtacatagaatgaccacccccggtagcggaagaaagagagaaactcgatctcatcaaagagagattgagagctattgaaggctttggcgactatccgatcgcagacatggcggatctt

SEQ ID NO: 70222 - DNA, 219 bp, Glycine max
tcagatcagaagagatcagatgacagagaatcaaactccaggagttgaaatttcaaacaactccattgtttaaaagttttaattctatcaagttactctctgatcatacgtctatacatactgcattgtcaagttactattgacgtcatgtcaagcgacatcaattgttcatcatgtctgactatcacattaacttgctaagtggacatctgttgatca

SEQ ID NO: 70223 - DNA, 438 bp, Glycine max
  unsure (1)..(438): unsure at all n locations
cataacccttctcaaatatatgaatctggaaagggaaattataagactacatgcttccaataactgattatgatatgaagtacacacatatatgtacatgcattaatttttaagtagaaaaatcaatataaacctgaagtctacgtgcatgggtccgcagctgctcaacagctcccgatcgaaatgtatcacaagcagccatcatgacactaatgttgtgttgcagaagccagttagcaacctacacagntacaaataaaatagaatatctccggctggttaatatgcaagcccaacatgcagaatttaaataaataggagaaaataatatgattcttctttaccttagctagattagtagattttccaactccaacaaacacaacaacatacgggttcctttgttcttggcagatacacaatcctcaatttgtaata

SEQ ID NO: 70224 - DNA, 403 bp, Glycine max
ctggttacttaaagattgtttttatcattaccctaaaccccaggtgaaacatggattaaataagacatagtcctgtaatttaaagttttcacttaggtcttggaagtttctttttttcaatttagctcgcgtcttaatcaccgttattacaccttaatgtgatgtttgttacctcctgggaccttaaatgaaaaaatattcaaggactaaaatgaaagcgttaacttaagggatgagataaaaataatttatggactaaagaaaagaattcctcttattacacacaaaaattacgccttaaattcatgctaaattatttacattatataatttgaatataagggttattaaagatcatgtcaagatctattttgaccaagtgccctttggtaaatccttattc

SEQ ID NO: 70225 - DNA, 452 bp, Glycine max
  unsure (1)..(452): unsure at all n locations
agcttctggaaggagatcaacttgaagctctttgtcttttgaaagtggcagtccatgaggaatctacttgtgaaaaacatctttaaattcctgcaataagggttgaacactatgagaaacataaatagntaacttattagaattatcactctctctcttgagnatcactcttcctgtttctattcctctgcggcgcctcattattgactctctcttggtctctcctttctctccttctgatttggtcatcacacacttctctgagggatagaggttcatgaataattttctggtcatggcgctggaaagaaatcttgttggtgaagccatcatgcactgctttggtgtcttcttcaatgttggccctcactagcgccatctncatctctttgtcctcaacaatcaaacttccttgggaaacctctggagttctatcgatggactactgtact

SEQ ID NO: 70226 - DNA, 476 bp, Glycine max
  unsure (1)..(476): unsure at all n locations
agcttctacttatgtggcagggcgggcttccttcactttcttgtctccaacgcgagctntggccactgttcttccttcccgcgatgcttcttttcatgtccgcctgagtgggcttatagcctaaaccatacttcccacggtttccttgagtatttatcaggctagttatgctgccgttgtctttgcctaaacccatcccgggttcataaccgttccccaacataactcgggccatcattaccgctgcatcggacaggcaaggctgcccanagagggagtccacggaggaaatgctgaccacctcaaaagactggaaagcagtttctaacgattcttctgcggcttccacataaggcatggaggatgggcagcttaccaagatgtctttctcgcctgacacgatgaccaagtgcccctccactacgaatntcagcttttggtggagtgtagaaggcacaactcccactgagtggatc

SEQ ID NO: 70227 - DNA, 485 bp, Glycine max
  unsure (1)..(485): unsure at all n locations
agcttgtaagattatggggtacccatcacatgtggtactacgtggcggtcgggcgatggtgcacaacaagatttccacatccacaaagcgtgcttaaacccaccatcccctggtgcccacctncaactgagctcacgtactcccacgtagcccataccctcgtttctctcaacactgggtccccatcaatcctcccaagcttccccaacatcaaagtaatacaacattcaaacagcacaagctatcacagccaagcaaaacagggcagaggcagaatactctacccaaaacaccaaccaaaacacagctttcctcacttagagaccncagtaacaattccttcgttccggttcattaaccggtggatcgactcgaatattntactggaagtctctaatacataagcctacatttggaccgttgggatctactatcaaacatccagaactcattctgcactactctttccacagacaatcacacac

SEQ ID NO: 70228 - DNA, 118 bp, Glycine max
ctactgtatcgaacatgacgaacatttttttactttacaagtgtttttttccattaaataactattatttactcaattataatttatgcactatattatagaaatatttggataatat

SEQ ID NO: 70229 - DNA, 465 bp, Glycine max
  unsure (1)..(465): unsure at all n locations
cttaagttggagttcctatctgctccaactctctacacagcaatcatggcaacaaaacttgaatataaatctcaatcacaaaattgtgggtgggggcaccacattgcatgatgccataatatcgataaaactgacaagaattagttatacattgaacattataaaaaagcaggggataaagttcatggcacaaagttgaatttcattcataattgattaggttaaaaacaaccaatattaataaaaaaaaattaaggcataacaataacaatagaagtaagatgattgtaattttgtaatattaccaggcactctacataaaatcctctacctagtcgaaccctgaataccttntccagcaatttgtttgcagcattctggcgagctgatacacatgaattcctntagcaatcaaaccttcagcacttaattccagcaactgccatgaagaattttcatagaaca

SEQ ID NO: 70230 - DNA, 249 bp, Glycine max
  unsure (1)..(249): unsure at all n locations
atgtctacttcctataaggttctttcgactatcataactccgtacggtgcttagattaagagactggatttgaggggaggaaactgaagctctgtattggacatagactaaaattacggtacgtgtggctgagctcttggtgctggatagagtggagatgtacgcacttagagtgaaaacttttgttgaagctcatcagtgctattttggagggggtttnttttttttttttctctcttttttcccctc

SEQ ID NO: 70231 - DNA, 389 bp, Glycine max
  unsure (1)..(389): unsure at all n locations
agcttcatgcctaatgagacccatgtaagtagatatttatgttagatagacaaatgttgttctcaccttntataaccatnttgtgtttgctgtgcaagaaagtcacgtcaagtagggaatggaagcggctgctacaatagaagcagaggtttcaaacttataataattgttcagtaataacaaacctcttgtgtattttttatacatgtacaactcaagtcaagtggggaatggaagcgggtgctacaatagacaaaatttactaaccttatataacttatttgcagctataagtttaaatcccaatcatgacagcctaactgaagtggtgaaggtgcacatattaattccagatggtagatacatggctcatcctatgtatatcattt

SEQ ID NO: 70232 - DNA, 502 bp, Glycine max
  unsure (1)..(502): unsure at all n locations
gcttacggatggaacacttacttgttggtgatgatcataagcgcanaacggaatcaaaaaatgcggaaaaggatgaccctanggctgcaaactcatcaatcccgtgggtatggcttttgaaaggggggaaaggaagtttttgaatgcaaaaacgccccccctttcgtcattcttaaaacgccccccctttcgtcattcttataatttggtgcccaggcgagctaacctgcactttttttttttttttttgaggggaacattaaccatgtcccctcccttctcatggattagcatcttgcctaacttgaacttacttaggttagaattaggtgttgattacttattcttacaaatagtacaagaaagctgccaaatacaaaggatacggggctgcctcgcaatgacattctctgcttgtctcgcgcagagaaggggcaatgatcggtcggtcgtgaccccatccctacttgcatccgtccttaagtacctgcaagtaataaac

SEQ ID NO: 70233 - DNA, 439 bp, Glycine max
gcaagcttgcttgataagcttctatagacgctggatctttgttcctcaatgagatccttcaatcgcgactttcaaccatggatatgtagccgaagataaaggagaaatagtgagaggaggctccatccactacggaataagccatagaaggaggagcttcaccactaagagagtgtcatggataataaccttagagagataacttcaatggaggaaaagaatgagagagaggggggggggggggctccaaattcgaggagacaatagagggagacaagtggtatttcatgtgtgctaacaagactttatttatcaaagtatgacaagtgtacacatgttttatttttgcttaccacatggaaacttccttgaatgtaagaacgaccttcttgtgagtaaggagaatcttctcatagctaaaggaaaactttcttaaaac

SEQ ID NO: 70234 - DNA, 358 bp, Glycine max
ccaatgtattgatagggaccgcatttacactaccctgtgcctcccacactatggcaaaccttaatcgcaatgctcgcatcatcacctaggaatttccatccctggctaccctttaaaaaatgtatactgagtatttttccttgtaccatcaagacagctatggtgagaacttcaatggatatgagctaacgaagagctctcactgcacataggttctcaatgcaatggcagtccagcttaacgtctcagatcttggcgggctgtgcagagcgcccaccattttctttttatagattgaatagacccttggtcccttctctgcctcctcttcacaaactatcatgatgtgttcttctct

SEQ ID NO: 70235 - DNA, 258 bp, Glycine max
  unsure (1)..(258): unsure at all n locations
ttttcaggaagtctagttccattgagctcataacccaatgttatcttttgtggaacgatcccagtttaattacgtttngagaccataagatgttcactctctcccatgggtaagaaatggctcatgtcaacttttcctattagcttcaacaattcataatgtctttcagcttttatgtggaggctctgtacagtacccccaaactactatatggcgtcttattgaaatatatttgctttctttgacctcgcaggttta

SEQ ID NO: 70236 - DNA, 302 bp, Glycine max
aaccttgggactcagggggcgctattgcaaaaccaacttgaccatcccgaccaacccggctaggcggcaagagacatggacgacctaacatgcgagctcctgcgtcacagataaatgaaacacgacccagagcatgatgcttgggcgctggcctctgtaattttggtatatgtggatgtgcctctggaatcataccaagggggattgatacaagctaaattgaaacaggggtaaatgtctctgtatcattccaaggtgatccatccaacttaaaccagcagagcagggagctcggtatcata

SEQ ID NO: 70237 - DNA, 154 bp, Glycine max
tttgactgacgatatctttaactcttgctccatggctttctcaatgataatgtcctatcgaatgcgctttctgacttgttgtagttggatgtttcgacgccttcacggagcatactctgatctcatttgatgattctcgtaatttgatatgaca

SEQ ID NO: 70238 - DNA, 484 bp, Glycine max
  unsure (1)..(484): unsure at all n locations
agcttaagataatcatgcttcggtgtcctatattgttgtccttttaatcacagatttgtaagtggtaattctttgatttcggagttttcgcctttaattaattaattgtttttttagtactttgtaagatagtagcatgatgtgctgctagctgctgcctattagatagtgacatacattctttgccgcgtatgctgtatattctatatctatattcggtactaaaagtcaaaataaaggaananatatatctacatatatgtgcagnaagatgcttcagctttcctttcattcatttattgaagccttaaatggtttgaagtttacttaaagattgtgaatatttattgtgatttctgaatttctttttcaaagccttctttggacactcatanttatttatttgtcatttattatattaaaatatagacttaaatatgaattattattatgaaataattgttcttgtgagtcgtttagttat

SEQ ID NO: 70239 - DNA, 185 bp, Glycine max
ctggcttatgcttggacatacctataatctaagctgccttacgttatgagataaacttttttatgacgtttcagacaactatagcctactctatgaagagatattttctaattccctcatgaaaataatccttgagtagcgcctatctctcccttagtgtagaacagcgactagtatttctgaca

SEQ ID NO: 70240 - DNA, 228 bp, Glycine max
tgggcaaactcttctttaacaaacccggcgccataacccagtgtttaccccactatgtgctgccattcgactgccaaagagaattcctttactctcttgcaccaagaaataacaaagattgccatgattaccacccaacctccgtacaacatgaacgcaccaaacttaattgggcatatcatcgacaaaaatgtctggtgatacataaacacaattatgaactgcaca

SEQ ID NO: 70241 - DNA, 180 bp, Glycine max
gaactttattactgttttgacatgacaccttgtgttagataaactcctatgattggaggcacacactctcacctaagttgtcatctttatttatgagaagctgcctacaaaggtatctggttggtggaagttgacgccctgaaaattcttccaagattgtgaccatgttcactggtcatg

SEQ ID NO: 70242 - DNA, 395 bp, Glycine max
gctgttccgggagagaagaagaatctgcttcgggagagaagaagatactgttctacaacaagtctgtcagatattacattcgcgctttttataattctatcttaaagggcaaaatggtagttcaataaattgctgggtgcaccatcaatattgctgggtgcacctagcaactcccttaaatctactgctttaaatggattggatcacttagcatagagtccaatgtcttgaggagttatattactcttgttcagagtagaacactggcaatttacactcttctttttatgcttacattatcaatttactctgagcaaggcgaattctttctgacttgagtgcagaagaacaatctgtgtttgggttgactcgggtgacatgggctatactcaata

SEQ ID NO: 70243 - DNA, 411 bp, Glycine max
  unsure (1)..(411): unsure at all n locations
gcttctccctcttttttctatagataggggtaggttggcataacaaanatgttcaaccctcctggtgtctgaggatcacttaanattagtgagaaaaattattttcgtaaaaaaaatccaagccaaggcgcttctgttacgcttccgagacgtttccgtgggtgatttcgcgaagattatctgtcgttcttcggtcttcaaccggtgagttcccgaaatcgaactntttaattcattctatgtacccttagtggtccccactttgtttgtgtgcttnntattttatttcatttactttccgtacccccttttgacgtgctttagtcatttatttaagtcattntctcgcctaataaaaaactaaaataaatttccaccgatcatttgaattgtaatggcttttaatttctg

SEQ ID NO: 70244 - DNA, 460 bp, Glycine max
  unsure (1)..(460): unsure at all n locations
gcttctgcatgtctatagagttctaaagagagattggtccaagttccatagagttngagagattgtgttgtgtgaagatctgcagagaccagagcttgaagaggaagtcgtcctgagagcttgagatgagtttgtgagtgattgtgaggtcctacaggtggaggagacatccccactacttgtatttctacaatctttcatctttcttttctctttgttgaaaggaagcttcccagttatggaaagctatatcctctattggatcttccttgtaagtacttgatgaaatatctttttatctatctaatgatgttntggggtgtctctatgctatcaatatttcattctagtatgcttttaccttgatcacgtagatgcatgctttgtanggtcattcaacagtggaaactggtctgattcttataacttgataggacagtgctagtttgtcgtactatca

SEQ ID NO: 70245 - DNA, 97 bp, Glycine max
tgaactgccgttcaaggaagctgtaaatcagttatcatgatgaacagtgaacagacactcagcgtctgaatctctctaggctcagccacacaaatat

SEQ ID NO: 70246 - DNA, 432 bp, Glycine max
  unsure (1)..(432): unsure at all n locations
gatggcctttgtggatgaatgggtggtgggtaatgagattggatgatattggctgagtaatgacattgttgagttagtgggaaatttggccatgtaggaatgacagtcacaacatgggttccttcctccttctcattctctccattntccccaggcttcccattcatcaaacaggatgatcaaatntgtctcttttcaaacccactttgatcctttcgctagtgaaaactaaatcggcaaagcttgaaggtgtgtaactcaccattttctcatagtagaacaccggtaacgtgtctactatcattggtatcatctccctttccatcattgggggcaccacttgngctgccagattcctccaccttagggagtattctttgaaagaatcgtgcccctctttacccatngaaaaatacagtaacattaaaatga

SEQ ID NO: 70247 - DNA, 516 bp, Glycine max
  unsure (1)..(516): unsure at all n locations
ctcttagtacacctgcacgcatgcaagctttgagacgcatgtgaaccttcggcatcatctatctttcagcttgatcctttgactacaatctccccctttttgatgatgacgatccctgaaatcaacacaagctatatacaagatgatagcacgttcacacaacccttactccccctatctttaggcatggttgcctaactctacttaatgataagattctaattgatatctaacccaagttctctcaagttctctcctcctttggaagcatcagagagaactaagcaacacagtcaaaatatagacagagccaaacattaaaccataataaatccatacattgtntaaccaacctagcaaagtctagatattaatagtagtgcggagtactatactagtgcaacaagaaaccacaaacacggcgatatagacaaaatactaattatacttaattactagtaagaactagtcataataataataacaatgaatctaagacgatgatggacgcggtgg

SEQ ID NO: 70248 - DNA, 63 bp, Glycine max
tacgccccattatcaacctcaacctatttcctatattcttgattttgttccggggtacttctc

SEQ ID NO: 70249 - DNA, 245 bp, Glycine max
attcaagccccacatatataatgcgcctcaatcggaccttcgagttataagttatgagcatttgacatgcttcagagcttccattggtccatttccaagcgtccgatatattatgcacctggatcggacctgcgaagtgacaactatgaccatgtgaattgctcaagagcttccatggtcaagtttgagcgtcacgatatattatgcacctgaatcggactgcgagtgacaactatgacatttga

SEQ ID NO: 70250 - DNA, 212 bp, Glycine max
ttaaaatgacttttcctcccttaactactatcctacaaaactgaatcaaaatctcttaaatctaaagctaatcagtaaccttctataaggcaatcagctaaaagaaacttttatttcaaataaggtctactacctgctaatgcctagtataacctagcttctgactctgcacactgagctatcatgccttgagacatgctattccttcactg

SEQ ID NO: 70251 - DNA, 428 bp, Glycine max
aaatatttaaatttaaaaatttttatacttatataacaatacttttattaaagcactaaggacctatattattattaaataactaaaaacaaaaatatgtctaatgctatttttttacaaaaaacttattataacaaaatatataatattttacattaaaaaacaatactattaaaacacaatcaaataattattatgataaaaataaaaaacttattataaatcaatattattataataaaatatactattaaaaccaataaacattattattgtaaaatatattaaaaaaaaatattttatattatgataacaacaacattttatataaataaaatatttaaaatcatatttttataaactactttaacaagcaactattatataaaaacttaacaacatactttataaaatcatgcacgtattca

SEQ ID NO: 70252 - DNA, 388 bp, Glycine max
tgaagctctgatctcacttgttagacaagcggcctcatatatcttaagaaaggggggggggtggcggtctccttcacataaccacttatttaaaccacagcctacatcatggtactgtttcctccttcctaatctcataaattaacccaccctttccaccaattaaccttaaaaaaacaatatattcatagtacaaaacaatctgtttcttccgtttaaaaattaatacagtaaccttaaagttatcttccctgctttatccatcacaacgctgaacttgtatccacaactgtatatcttctgtccgtttagggccactccaaaacctaagtctcacctttttaattactttgatataaccacatttaccatattattcttctcatat

SEQ ID NO: 70253 - DNA, 452 bp, Glycine max
  unsure (1)..(452): unsure at all n locations
agtcacctgccgcatgcaagctntgcttccacatgatcaacaaccccaactagtttatcaaatgataccaataggtcacttgtctttgattgattacttttgatgcttgttttctacttgagtttatactgttcttgatgattgtgattgaatttgattgactgtgtttgatgattgattgattgtatttttgattgtgtgtttgattgtattgcctttgatatttgttcctgattgagtttttgattggttttaaagaatctattaaacttttcaaattagtttcatgttttaagagcactatttctaatttagaaaaggaaattctgaaattgaaatttgaaatttgaaattgaaaattgaaatttgaaaagttaaatntgaaaattgaacattaaaatctgaaatttgaaattaaaatttggaagctggaagttggaagtagaagttat

SEQ ID NO: 70254 - DNA, 422 bp, Glycine max
  unsure (1)..(422): unsure at all n locations
agcttganatcagatantttgatggagtntggcattttttcttaagaagcctctgcatgcacaagagtctggccttagcttgaagcttctgcatgtttatgaagttttagagagagaaaggtccaagttccaaagagttctaacagattttgctgtgtgaagatctgtggagatgatagttcaaagcacaagccgttctgagagctagggatgagtttatgagtgattgtgagatcctacacgtgaaggagacatcctcaccacttgtgtttntgaaatcattcatcttggtcttctctatgttggagaggagggtttcggaacatggaaagctaaatcctctgttggatcttccctgtaggtacctgatgtgaatatatttctatctatgtaacgatgttctgtgtgttctctgtgctatc

SEQ ID NO: 70255 - DNA, 473 bp, Glycine max
  unsure (1)..(473): unsure at all n locations
agatcttgattaactcagtatatgttacacacataacagcccactttcacaacttttggtgtcagaagtcatattaatcagaacatgttatctcaccaagtgcatgctacatggatagtatagtttgccaaaatcttatagaaaaaccagccatgtataccaatatcccttaaatagaaattattttgattgaaaaatgatgatctgcaaccgccaagttaacaagtcaatggagtaaattgaagcaataatgctgcactgttaagatccaatcacaaggtatgagacttgaatcccacaataatagtcaacagtggatagcgtcacagggtcactcccacaaacattagtgggatgacggctatntgaatatatatgtgtatataaaataacatataagagacttcatattcttgctcgatatatatttcttattatgatattatcatatattgattgattatttattctct

SEQ ID NO: 70256 - DNA, 239 bp, Glycine max
attgttgatatgctattcttagaactgatatgcataggtactgagagtttatgactatcagcatgtggcttacttcagagatgtgctaatgagataaacatgtgactgacttggattatcatctgaggaacttagtgtataaatatgcaaggatatgtaatgatttaatgctggcaagtcagaaactgccaaaattttattaaaacttagctagccgacttgatgtgtttggaatatta

SEQ ID NO: 70257 - DNA, 458 bp, Glycine max
  unsure (1)..(458): unsure at all n locations
gcttattcacaggagcagcaaacctcaactcaacttggcaaagatcatcttatatctcttgtccaacagactcagtcttctcattggacttcttctctggaacatgagaaatgaatgtatcataaattgtattgctataaacagacttttcccgtacaaggtctgtggcagatgagttgaatgcaattggatggtataacaaaaaagaatttggttttgaagaaccaacccaggtttcctctccatcttcagcaagggagactgcatgatcatcaaggtgtgcagggccataagctgaaacagcgatctcaccagccacctgcataacttctttgtatgtgaggccaagctctgcttctactgaaaatgcgtctccttccaaatttgagtacccgttgtgaaattcattangcacaagtagaacatgaagaggaataactgcgcccacaatgtcttca

SEQ ID NO: 70258 - DNA, 339 bp, Glycine max
  unsure (1)..(339): unsure at all n locations
tagtgagagaaataaaaaggttgtggcgatgtgaacttctaagagagtattggaaagaaatgtacaagacacacgaatttgggctctttgtgctctatatctgacggcccacattgccctaacaccttattaccattctatcaaatttaaattagaactagaattacatatataagatgattcgtcctttctaaaaacgaacgcagccctaaactataattggtatgattaattaattaaatcaacaatacaatatattcttcattctcatatatataaatantgctcgaatgaacaactatttttaagcttaaataaatatatgtagtgactttcatt

SEQ ID NO: 70259 - DNA, 452 bp, Glycine max
  unsure (1)..(452): unsure at all n locations
gatattgtctatttaggacttttgtgtcaatctanacacacaaaccaaggccataatggaaaatatgtaaggtagaaatgatcatagtcattggcggaaatattgacttctgtaactgctactaagctngtaatggaagacattgtatatatgttgatgaatttttcattcactaacacagaatttgttatattgtacgctcaaatctattagctcgtgtgttcaactagaaatatgaaatttctaatttacatctnttatttggcattatgtaaccttgtccagcacatcacaagattttctttgatttctcttggccatagattagacctattatatatagttctactctgttgtagttaagatcaagaatatagttgcgtaagccatcaacgaagttaaatatagcaactgaaatatcaaagacatgattttagcagagcaatgatagc

SEQ ID NO: 70260 - DNA, 243 bp, Glycine max
cggctcccggatcatacacaggtacttagctaagaagtagctcgatggttaatcgttcagactctctatcgatacctgtggtagacatgctattattagagctctacttatgatacaagggatatcgatacttctctctcattagtgttaaggacaaaccttatcatactaagcttatcgatcatgtctgatattcgagtggagaccttatcatactaatactatcatactgtgacacatact

SEQ ID NO: 70261 - DNA, 381 bp, Glycine max
  unsure (1)..(381): unsure at all n locations
gcttgagagatcttcatcagcaatggaagaccatatcttatctcctagtgatcaccactactccacaggctatgtgaccaaaaagtcccctcctcctcctccacatgtggagtntcctacctctccacaactcatatgtggtgaggagattcttcacttcagccaccctcagcaccctctctcaatggtggatcttcctgacttgttcaattgtgtggggtgcatagagtatggctctggaaagaggtttgttgccagcaatgtgactttcagcttcatgacttctgtgcctnggctcctcctgctctcaaggcacaccccttccactcacaacactctgtcttggtccattccaaaccaggtaaacatacatatatatac

SEQ ID NO: 70262 - DNA, 317 bp, Glycine max
  unsure (1)..(317): unsure at all n locations
tcaaaatgtgattntcttnttttacaaaggatagatagaaattaatattgagtgtataataaattctttacatgattaatatgatttccatcccataggaatccatatcccttttcataagaattaactcaatacaaaattaatataagcatgaacatctcactttcctcaagataaaagatantccaataatattttcaattaccttcaaacaaatatgagaatatacattntcatctcacattcttggngaatctacangatngcatganacannatgttcttaagagttatacattcatctattatgtactaac

SEQ ID NO: 70263 - DNA, 485 bp, Glycine max
  unsure (1)..(485): unsure at all n locations
ttaagtcacctgccgcatgcaagctngcttctataattacgaacagtttttgtaattatattttctccaaactaatcagaacaatatttgtcataatgcaacaataagaaaggaaaacacaaagatggaattcacagaaccaaaaatgagattaagataattttgcatttttttctaaagaacttaagaggaaacactgatttcattcaaatagaggagaacctcgtcaaaggtgtataattctcacacaagcaagtggttcatctcaattccaattactgatatgtcataaatcaattgttgcagtcattcccataaatcaagatattgtgcataatatcatggtcaaangtcttttaaggtgggcctggcttaaggaaatttgattttctggatttcacacacttgagaaaggaagcagaatagaatcttctggaacttaataacggcaattctattttttcattgaccagtatactttttta

SEQ ID NO: 70264 - DNA, 444 bp, Glycine max
  unsure (1)..(444): unsure at all n locations
caccgcagctgcagctttacatttatataaatgagtagtttttttgtggacaaaataaaatctttcattgatattanaatcaaactctcatactccctcccattctattataattgctctattaaagaaaaaaaaactctaattaaaataaattcaacaaagattataaataaattaatgataatataagattaattttataaaactattattgttttaagatatttattacattttcttaatccgtgtaaaacaatatataataattactattctgcgatagagggagcggaagaataatatccactctaattgaatctagattgattttaaataagtttaatagttaagttgtntatacaagattagcttcttcattctttatgtatgagaataataaataatatttgagactntaacacctctacaccctacctgactaac

SEQ ID NO: 70265 - DNA, 469 bp, Glycine max
  unsure (1)..(469): unsure at all n locations
cccatggaagctcataaatctccacactnntgtgggtgggccattcttggatcgccttgatattctcagagtccacttggaccccatttctaccaactacaaaccctaagaaaactatattatctacacaaaaggtacacttactgtacactaaaatatcatcaaaataaaaaactacaaatctaccaataaaatcccttaagacatgatgcataagcctcataaaggtgcttggtgcattagtgagccccaaaggcatcactagccattcatacaaaccaaacttggtcttgaaagcggatntccactcatcaccctttttcatcctgaattggtgataaccaactttaagaatcaattttgaaaagatattggcaccatgcaactcatcaagcaaatcatcaagtttaagaatggngtgcctatactttacnagtgatgtgntgatggccctgcaatctatacacat

SEQ ID NO: 70266 - DNA, 368 bp, Glycine max
  unsure (1)..(368): unsure at all n locations
agctngaaatgaggaagtgtagaagggtgagactttctgcttttatttcgtgaccacagagtggtacctggagatatgtcgcgggggtcaagagaccttggggacgtcatgtggggtgctattgcccaaaaccaagcttgaccaatcccgacccaacccgggcatagtcaatcagtgagaacctgtgatgtacctaagcaggcgagcttctggcagtcaacagataaaaggaacaaagaccacaaagcaaggaggcttgtgtggtggctggccagctgtgaactttgattgatatatgggatatggcctctggtaatcgattaccaagggtgggtaatcgattacaaggcttaataatgaagacagga

SEQ ID NO: 70267 - DNA, 126 bp, Glycine max
caagcttatctttcaatattgaggacaagttctgacatggatacaagacatttatctacccctctatgtatgtatatatatatatgtatatatatatatatatatatacatacatacacctagtag

SEQ ID NO: 70268 - DNA, 181 bp, Glycine max
caaagtagatccaacattattctgaggcaaagaatgataatgtgttctcatgataggtaacactcttaacttcgataatatctttatcttggttacaataatcgataaacatcccacacatcacatacaattgttattaagtacgtgattgtctatggagacagcatcatgtgtttttttt

SEQ ID NO: 70269 - DNA, 450 bp, Glycine max
  unsure (1)..(450): unsure at all n locations
agcttgcctatccgatgcagcagtaatgatggcccgagttatgttggtgaacggttaccaacccggaatgggtttaggcaaagacaacggcggcataactagcctgataaatgccaaaggaaatcgtgggaagtgtggtttaagctataaacccactcaggcagatataaagagaagcatcgcgggaaggaagaacggtggtcaaagctcgcgattgagacaagaaagtgaaggaagcccgccctgccacataagtagaagctntataaacgcgggtctgggagacgaaggtcaagtggtcgcgatatacaaagatgatgttccgagtacattggatttggtacgaccatgccctcctgatttccagctgggaaattggcgagtggaggaacgccccggcatttacgcaacgagcataatgtaaacctttacgaatttaaaagctctata

SEQ ID NO: 70270 - DNA, 330 bp, Glycine max
  unsure (1)..(330): unsure at all n locations
agcttcaacatcagaccacttctattgtgctggaactacttcacatggacttgatggngcctatgcaagttgaaagccttggaggaaagaggtatgcctatgttgttgtggatgatttctccagatttacctgngtcaactttatcagagagaaatcagacacctttgaagtattcaaagagttgagtctaagacttcaaagagaaaaagactgtgtcatcaagagaattatgagtgaccatggcagagagtttgaaaacggcaagtttactgaattctgcacatctgaaggcatcactcatgagttctctgcagccatcacaccacaac

SEQ ID NO: 70271 - DNA, 462 bp, Glycine max
  unsure (1)..(462): unsure at all n locations
agcttgctcagcatctctgtgatgggttctagatgctagggtaggagtatgtgccangctattagtgtgtcttgtgatgtgagctcgagaagactcttcgttgtaggtgtgtaggcttgatcacgaaagatggcatggtcactggctgccatantttcaatcaactccatagcttcatcaggtgtctttagtttgatcttcccaccagcagaggcatcaagtaactgctttgattgtggttacaagccatcaatgaagatattgagttgaaccagctcgttgaacccgtgggtgggagtcttctagagtaaaccatggaagcggcaagagcttcactcagtgattcatcatgaaagtggcggaataaagagatnttcaccttttctctagcagtcttggactttgaaaatatttcttcaaaattctccaccacctctccctgtcacaactattcctttgatg

SEQ ID NO: 70272 - DNA, 130 bp, Glycine max
tgtatgttattgttatattatccttagctacatatacatttttactaaaaaaatcagagtgatggctcgtacttgtgagatcacacgcgcacctgataaaagattttttaaccttaaaaaaatacatttt

SEQ ID NO: 70273 - DNA, 463 bp, Glycine max
  unsure (1)..(463): unsure at all n locations
aaatcaattgaggaagcttcgccgagtgtgcccattgaaaaacctttattcatacctttcaaagttagtgataaggctaaacgaaaaattatggaacttataagaactaaatccttaattgaaggcgtaggtgacaatcatagcgaattactaaacaagattagtagttggcttaaggtcattccagatactccccaagcttcggaaaatacttccaaaatggtgacaagaagtacctccaaattaattaatgttattaatgaagatagtgaccanaacttagataacacaactgagataagatcagtgtcagaaaagaatataaatccattaaactccaaacactggaaaaccccctncanattatattatcaacgtccaactgcccctgaccttctattagaagagagangtgaatacaactttaataattctagtgcanataacatctatgaatggaaca

SEQ ID NO: 70274 - DNA, 207 bp, Glycine max
caaaagccacctacaatcttaacatacgtagtctgatatatatagactcttcttacaaagacaacatctacgtaacataacagctggatattcatcataaatttttcttcttcatatatgccacttatttgcaacatgcgcccaacattccattcatgccttaaatacatgtgtggagtactgagccatcatatacattttcactga

SEQ ID NO: 70275 - DNA, 266 bp, Glycine max
ctttactcggctgtccgattgtctcccgttggatatcaagacgttcgatattcagaatagaagctctgagcacaatctaacgacaataactttttactcggatgtccgactgtgtcccgaagtatatcgagacgctcgaaattcagacggaagctcctagcataattaatcgaccattactctttacatcgatgtacaattggtccctgagtgtatcggatgcttcaaattcaaatagaaactcttagaagatccatacgacaata

SEQ ID NO: 70276 - DNA, 343 bp, Glycine max
  unsure (1)..(343): unsure at all n locations
acacattgtttttatgaacctttctttcattatcctagttagattaaattgccacaacataccattttaggagtaaaacagaagtaccaaaagtacatgttagccatgagaataatcaatagatagtcatctctcacatttactaaaattttaagttactacatcacatttttttaattgtatcaattcttcttttaacaaaacaaagtacttcatgtcactaaatttatangattatgcaaatagagagacaattccaagaggttctacacttatcataatacttgcagcctnacgtgtacttggacgatgtagagaacaaggattgtaaggctgaagaaaa

SEQ ID NO: 70277 - DNA, 381 bp, Glycine max
  unsure (1)..(381): unsure at all n locations
gctctaaatagngggaatgtgctcatatatgtggangcaatttggtttgctttcttgcttgattgggttgaatagagggtttgtatgagatggccctangcctataatgcattttgaagcaatggggcatgtcacattgtccccgttctctcgctatttatgcctaagcgcgcgcccaccaagtgttcggggaaatgcctcaatggcattngcgcatgattntatagggaaacaacctatgggacaatttggttngcgcatgttntctantttttgaacatgtgttcagtttcgtgagggctagaataattacccctcatatancctaggcctagtaaccaaagcttggtttgatgcangaaaacacaagagtgggtgcat

SEQ ID NO: 70278 - DNA, 500 bp, Glycine max
  unsure (1)..(500): unsure at all n locations
gcttgagctcactgttgctgcctcatanagctccacgatttttgtcacggacatgctcttccttgcgagccctcttggtttcttgttcaagggatcttgcggtagctacattattttctcgtaactcggcacactcttttcggacgtctgtagcgaccaacttgaatttttctttggcaagtcttacttttgctagatctgtttttagagctcggactgatacatcatcttgcggatcttcgaagctctcttcgatgataatctttaacttggagagccaatctaagcttcgtgtacgagctgtcagccattcatgataaccactaatgatgccattatgaatgccgctaagttctttatctttccttaacaggctttgccacaccttatggattctttgtataatcttgagactttgcgcaccgcaatctctcacaaagaaaagagagaggctttcttccgtcagtgctcccctcatggagtaccctaactgtcttata

SEQ ID NO: 70279 - DNA, 302 bp, Glycine max
tgcattgaatgccagaccatttgaagatcgcaggcatgcccgcacccttggaggctttcttttgcgctgaacccaagattatattaacactccctaacctctccgcataggctaccaacttccgatttccttctggtactgccttccggattcataattcccccttccttatttctgttaatcgggctattataaatggtatgggaattgcgatctggcctgttttggtcaaatactaacccaatattttttctcagtggtttttaaggaacaagaagactctgacattcctattaaaaatt

SEQ ID NO: 70280 - DNA, 487 bp, Glycine max
  unsure (1)..(487): unsure at all n locations
gcttcannataattttactttattcttaaagctcttattttaatattngactctaaagtaattcttaactaaaaaaaattcaattgccccagacatgacctaaaaatcttgagttttaagcataaattgaataggctatagagctattaggttacaaaactagattgatttagattttcacttcattattttattttgtgaacattaacaaacatcaaacctttatgtgaaatttgaaataactagacttcctgcaattagtgaacaagggattatttgtcatttctgatacagtatatattntntntgggaggaaagtcttcaaagcaaaataaatgtattaaaagaaccaaataatgtcttttttattgagtatcaatgtatcatgataaaatttaattagagagagaagaatatttttattaaaatttttttacaatgcataagttatagttaataaagttgtttttttatcttcaacaacatg

SEQ ID NO: 70281 - DNA, 213 bp, Glycine max
  unsure (1)..(213): unsure at all n locations
tgatatatatcttagtagctaagataagagttactcaaaaaaaagaagagacttactantatatggtaacttttaattacaatcatgaagaatacttatgtaagagattataatcattatcttataaataataaaaaaaaaaaaaaatatcttactatcaaagaaaaagcgatgtatctctataactaaacaatatgttcctctttttatgtt

SEQ ID NO: 70282 - DNA, 465 bp, Glycine max
  unsure (1)..(465): unsure at all n locations
gctagtacgaatgtaagagacatcttcttcttccttggtgattcttgactccatctcattgaatcgcatgttcacttgtaactccaaagtatcaaacctttcaccaacaaaggtttgaagaccatcgaacctatccaaaatcttttgaagaagagaggaatcttctccaccatgtaaatgtccttcttcatcaacgggtcgagcaccctntntcacccaagagccatcatgctctttgtgttaaccaaaggatgcaattacaacagcgcctattagaaaggatctcttgattggaacataaggttcacaatcaagagggatgttgaagtgttgaagaaagagggtcattatgtgtggatatggcaatggagcatttaatcgcaaagccttatgcatgtgatatagaactaagtgtgcctaatcaatgtgtaagcctctatgaaaagcccacataacaataagatc

SEQ ID NO: 70283 - DNA, 234 bp, Glycine max
  unsure (1)..(234): unsure at all n locations
agttccccacccacatggatatagcatacaaccttctctaccacgccatatcacaagcatcctaatcacccaacctactacgactncatgacaacataccttagcgaacaaacaccacaaaatgatttgcacagaagctaaatcacccatcaggctatgtgctgtcctatctactgtatcatgagctacctaccagtatactcatttcgaaacactcaccacgggtgatgaacc

SEQ ID NO: 70284 - DNA, 429 bp, Glycine max
  unsure (1)..(429): unsure at all n locations
atcacatgtggtactacggggcagtcaggcgacggcgcacaacaagtttttcacatccacaaagcgcgcataaacccaccatcccctgttgcccacctacaactgagctcacgtgctctcacgtagcccataaactcgtttctctcaacaccgggtgcgcatcaatcctcccaagcttccacaacatcaaagtaaatgaacattcagacggcacaaattaccacagccaagagaacagggcaaaggcagaatactctgcccaaaacaccaaccaaaatcacagcgtttctcacttacagaccccaggaacaattccttcgatccaattcgntaacgcgtggatcgactccaaaatattactggaagtctatatacataagcctacatgttgaccggtgggatctacctagaaacatncagaactcattc

SEQ ID NO: 70285 - DNA, 376 bp, Glycine max
  unsure (1)..(376): unsure at all n locations
gtcacctgcggcatgaagcttacaagacccgtntcagtatataaaaanaatttgtnttcgcccaaaaccgcgtttgatacccaaaaggagagcacgctggacttcacagcgtacctaggagggccgtagttgaagagccccaccacaccgcgatagatcttgaacgacgggatgtggaagagccgtcattccagggtgtttcaccactgatgccttgtggctgtcgaacacgccctggagggagatccatggaggttttcgagagctccaaggagttgggtgttgattgtgttctacatcatacgcatttggctcatgaggaatcgttgatcgtgcaagatatacggtgccgcttgacgatgcctgatgctcgaat

SEQ ID NO: 70286 - DNA, 463 bp, Glycine max
  unsure (1)..(463): unsure at all n locations
tgcaagcttggttatcttcttcttcactacatcaagaatcttcgtgttgagtcttctctgtggttgtcttactggtttagctccatcctctaaatttattcgatgcatacatgtggatgggctaataccaggaatgttcgccacggtccagcctatatccttcttatgcttcttgagaactgacaacaacttctcctcttgctcatcagcaggggaggcagatataatcactggagaactcttgttatcatccaagtaagcgtattttaaatttgatggcagaggcttcaattctggtgtggtcggctggacagtggtggaaggagatggtntctccacctttacctcataaagaaagcagaggtatgtgtcttcctgaacatggtagtctatctgactctatacataatctcagaagaaaacccccccagcatgaatcatatcactctagattactctcact

SEQ ID NO: 70287 - DNA, 426 bp, Glycine max
  unsure (1)..(426): unsure at all n locations
catgatacatgtcatgtgttgttttggctcaaagataaaagggatgccccacattattttcatgacacacatgcaaaaatgatgatttggaaattttatgcaaaactggtcatgcatgcacctatgtggacactcaagtgtcaaatatttatggtcatgtgatgctaaggctcaggatttattttctctattttaaatcaacccaatgtttccaaaatatgttcttttatcaatttgtgcattcatccgagtccattntgggcgtcgcggaaaactttcacagcattcacccttcaggtgatacacattttttcaaaaaatggtatgatcaatgaatttntcaaagaaaagtggagtcattttttcaaaacatgtggtgttcactaacaaatattttcttttctcttttcattgtaattctttctt

SEQ ID NO: 70288 - DNA, 135 bp, Glycine max
ccccccccccccttaatgaagtgaagcactacgttagcctttcgatcagacggcgggtcgctctcctcacccccatactaattgagtcgcgtgtattattaccaactagggcgatcgtcccgtgccctccaataa

SEQ ID NO: 70289 - DNA, 163 bp, Glycine max
ctcccatcatctcctagaatgttttcttttctactcttattttctctctccaagcctccgtatctaacccttcttttcctatcctattctcttctacattttcactctcacctattcttttagaccttttctctctctggagacgctgccttcttggtttttg

SEQ ID NO: 70290 - DNA, 175 bp, Glycine max
  unsure (1)..(175): unsure at all n locations
aatgatgttggtagctatgatggagtgatcatgtagtcagaagatgtcggggcagcaatactgctgaactttacttattatttctatcgactccgtactctgaagaatcacagatgctttttctttgcttatatctataatcttcctttgtattngcggttgtacctcatagtag

SEQ ID NO: 70291 - DNA, 124 bp, Glycine max
aaagctacatgtttagccaagaagaataattcaaatagaatagtacatctctgcacattatactaaaatttttaagctcactgacatcgcattttttttttaattgtatcaatctctttttttt

SEQ ID NO: 70292 - DNA, 157 bp, Glycine max
tccattgagacatcttcataccactccatgaatctcctcacatgtctgcatactgaatgtacgaaacatgatgccttacagttccaaacggctaactcgctatctaaactctatatgattctctatgcttcaaatatcatgttcatcacatactacc

SEQ ID NO: 70293 - DNA, 172 bp, Glycine max
  unsure (1)..(172): unsure at all n locations
gcgagattcctcacgggaaacgttacggaaacgtntcngaattttctctgcttataatttcttcacggaaacaatatttccaagcatattccaaagagagagaagtgcctaaagggctcggatcttttcttcttcattttctcccctatttatagcaaaataggggagatgc

SEQ ID NO: 70294 - DNA, 109 bp, Glycine max
tcgcgcttagcgcgaaggttatgtgaaatccaagttgatatgctcctattataagaggaagaagagaaggagaaaagacaccaaatattccagagaatacaattcctta

SEQ ID NO: 70295 - DNA, 131 bp, Glycine max
  unsure (1)..(131): unsure at all n locations
cagaccctaatttcattcgggactatcattactgatgttntgattcttgctagccaaattgcgttgtgcgacaccagttaccgcacaagatgaaagatcgttcaatgttttgatcaagaatgcacaagata

SEQ ID NO: 70296 - DNA, 268 bp, Glycine max
  unsure (1)..(268): unsure at all n locations
cttagcactagctcactgcccactgccagcacaggtgttctcaacttaactttgagaccaagggccgatgcttttcaccccttttactagacaccctgcctttggaattttttcgtaagtaccgaacctccaattcgtacgatacttgtntctttcgtanggtaccgaccctgcggatacataatcatcccttttgacttacggatgtcgaactctattggcacagctccattgttacgtgcacaactcgatggccatttttttgttc

SEQ ID NO: 70297 - DNA, 131 bp, Glycine max
  unsure (1)..(131): unsure at all n locations
tacgtttgncgatgcatttagtcacaatccaaatataaataactttactaaacatggtattggttgactccaaaattaattatttatttatttatattatataccaataatgcataatgttttgggctgga

SEQ ID NO: 70298 - DNA, 343 bp, Glycine max
  unsure (1)..(343): unsure at all n locations
atcagctgaagaatgcttcaactatttctcgtccttggaanataccttctgcaagaataactgcttctttcattcttcctcactacgaggtcgtgaatacaagacaacacttggtacctctaaaccgtacactgtggcgatgaggggcaccgtgcatgagcctcaagtgaacctacgggcagattagaagatctcacccaataggttcccttctacaatgtcatgccgaaggacaacgattggtacctcagagccttacactgnggcaatgaggggcatcgtgcatgagcctcaagtgaacatatgggcagatcanaagttctcacctgtcgatgttttaaac

SEQ ID NO: 70299 - DNA, 202 bp, Glycine max
ctttaagatataccaaaaggccctttgcaaaattacctggggtttttttatacaagggaccccaagggctcccggaacacgaacatgggccgagacagaaccacgcacaggccctggtacccctgaacggccttgtaccccgggttgcccttgtacccctgtgagccatgtaccaggcatcacctgctaataatgatctctt

SEQ ID NO: 70300 - DNA, 382 bp, Glycine max
  unsure (1)..(382): unsure at all n locations
agcttctcaaggaagctacctagtctataaatataagcatgtgtaacacttggtgtaactntgatgaatgagagtctngtgagacacaactcanagnntcaacttctcccctttntcttccttcaatttcgtgctccccttcctctctttctctccctctttcttttcctncattgaagcatcatttccaagcttcttatccaaggatcatcttggtggtgaagctccttctttcacggcttattccctagtggatggcgcctcctctcacctcttctcctttgtcttccgctggcatctcatggtggaaaatcaccattaaaggacctcattgaagctcanagatccagcctncatagaatccccacaggcaagctttcat

SEQ ID NO: 70301 - DNA, 114 bp, Glycine max
  unsure (1)..(114): unsure at all n locations
ctaacgtcgtcttctgcgcccttcgncaattctctgtcgactaagcccgtgacacgcggagatatacgttatcttccgcgctcacaagatctgtcatacttgactttgagtcac

SEQ ID NO: 70302 - DNA, 303 bp, Glycine max
  unsure (1)..(303): unsure at all n locations
tcccctcgaatgggccatccgacaaggtcagtgcactccgccttacacgaacatacacaacatgcacttgtcaatgcatttncaacatcatcaacattccatttcaatgacatcaccaataacccaacaacctcattccatattgacataaccatcaataataacatcaattcatgttgacatgatcaccattaacaacgtcatctcanatcaatatcatcgtaaatatcaacatcaccacatatcaattaaagtcaccaatagtaacatcaacaataagtcgcattccgcatataaatatat

SEQ ID NO: 70303 - DNA, 433 bp, Glycine max
  unsure (1)..(433): unsure at all n locations
ctgcagctaaagtatgcccgagtcattcatccctattgagatgtgtgaagtattggcnatcataatngccattccttggattatggggttgaaccaagctcatgctttacaaaaggttcataagtaagtgaaatatggaagtaaccgtcttgcanaattggggcanaagatgaatcgagtcacatcaatgcttcgtctacttccaaacatatttaggattattgatgtccttgntacttccagtttcaccttgacanagatgtcatggaccatgttgaanatctaaattgattcaacctcatatcttgcgaaaaatgacaatactcaactgtcatcatcncatactccatgctttcattggtgcattgtcatgcatctttcttgaaaaganatanaataataatcataaataataaaatgtcttatcttgttc

SEQ ID NO: 70304 - DNA, 272 bp, Glycine max
  unsure (1)..(272): unsure at all n locations
tttacatgcctatactccttgagtggcatttgtattgggtgctatcttggctggttcatcttagtacattatgatatttgtatcgcatcatgccatcatcgtggttatgtgaagaaaagcttctaagttagaacagttgatcagaggaaataactctctatggtaatcggtacatgctcatcgcatccattacaacacgttgtctatagcttgaagagttgagtctcatattagtnttaatcgatatagtagtctcttaatcgattacactg

SEQ ID NO: 70305 - DNA, 404 bp, Glycine max
  unsure (1)..(404): unsure at all n locations
ttgagtcacctgcggcatgcagcttctccctatttgctataatagggggagaagtanagaagaaaatggttcagcctcttaggcacttctctctctctcgaaatttctgaggaaaattagttccgtgaggaanatctaagccgacgccttncgtaatgtttctgtaacgtttccgtgagtaattacgcgaagattctcgaccgttcttcaagattcatcgntcgntcttcgttttcttcagtcttcaacgggtaagtacctcanaccaagcttttcaattcattctatgtacccgtggtggtccacattttggttcatgtatttntattctcngtttcatttgctttatactaccccttttgacgtgcttaagccatttatttaagtcatttctcgcttaatct

SEQ ID NO: 70306 - DNA, 209 bp, Glycine max
aaaactctctctatcaccagtgtacttctataacgatctgatgtatatggtttaaatatcaagacaaacaaacaaaaatatattatcattaaaaatatgttttatcttttgactctgaaggttactagctaatatttattaatcaactcacggaggatatcaactcgagagcacttacttgctccatggtggacaactatcttttatga

SEQ ID NO: 70307 - DNA, 351 bp, Glycine max
  unsure (1)..(351): unsure at all n locations
tacagacttcgccttgggaaaagatattcatgcttcccaatatctggttggtttttttcctcatacttgtctatacattntcttctatttctactatagcaatagaagcagcgcttcctagttttcatactgatacattattattatcagtaaatgtcactttgttccctcagaatttgtctacagtacaactgatattggattatgtgtctttcanaattgtatttcatccttgtctggtagttttcattggcatcaccatcattgctgagaactgngatntatcacttacattttccgacagtgtcaagttgatcaaactagcatctatttcaatactaatcacatgtg

SEQ ID NO: 70308 - DNA, 319 bp, Glycine max
  unsure (1)..(319): unsure at all n locations
cccgagtagtcgaagagaagttcaagtccatatccatcaaagtctgaaaagagtatgatgaactaagggacgtcaatatggccaccgcttaagccttggaacgagaaaccaagaaggcccgacaggaagaacacgtgccagcacagttttgaggggctttatagggcagcaatagtaagctcaagctccgaagaggtgaaaggaatcatcacgggtcanaggcatgatcttgaaggacgagctanaggcttaccttatgtcgaaaagaaatttgtcccaacaagtaagcgagactgaagggaatatgtgggccgtcatc

SEQ ID NO: 70309 - DNA, 128 bp, Glycine max
  unsure (1)..(128): unsure at all n locations
tgtctagcttcacgatatactactggacacggtcgtacatcctacttaaaagttattgacattctaattatctcggagctttcgntttcggttgcgagaggctcgatatattaccggactgtatcaga

SEQ ID NO: 70310 - DNA, 137 bp, Glycine max
  unsure (1)..(137): unsure at all n locations
gaaagagagagagaaagagagatgggggaacacaaaattgaaggatgaanagaaggagagaagttgaactttgaagtgtgtctcacaagactctcattcatcaaagnttgaacaagtggtacacatgcttctattta

SEQ ID NO: 70311 - DNA, 108 bp, Glycine max
tacttgctagggcttggacacatgacttaagttagactctgaactaatggccagtttcactgacttgacacttcgatgagcactttatgacacacttctaacttcagg

SEQ ID NO: 70312 - DNA, 412 bp, Glycine max
  unsure (1)..(412): unsure at all n locations
agctaaacattcaatttgagcgttctatatattactggactcaattctacattcgagtaaaaagttattgtcgnttgaattggcttagagcctcaacattcaatttcgagggtctcgatatatgacgggactcaatcagacatccgagtaaaaagttattgtcgttttgaattgctcagagcttcaacattcaatttcgagcgtctcgatatattgcgggactcaatcagacatccgagtaaaaagttattgtcgtttaaattggctcagagcctcaacattcaatntcgagcgtctctgtatatgacgggactcaatcagacatccccgagtaaacgtattgtcgtttgaattggctcagagcttcaacatttcaatttcgagcgtctcgatatattacgggactcaatca

SEQ ID NO: 70313 - DNA, 95 bp, Glycine max
  unsure (1)..(95): unsure at all n locations
agctngtgtagacatcttcattagtaatgcaatttaactaatatagttcttattgtgataataaagccatttatagaattaagctctctcatgtg

SEQ ID NO: 70314 - DNA, 54 bp, Glycine max
aatggatgaaggaaagtgtgatttccaaaatctgcacttatgcagaatttgctg

SEQ ID NO: 70315 - DNA, 115 bp, Glycine max
ttttctctcaacacccgggtgcccattaatccttccaagctttcccaacatcaaaagtaaacgacattcaaacagcacaagctatcacagccaagcataacagagcaaaggcaga

SEQ ID NO: 70316 - DNA, 302 bp, Glycine max
  unsure (1)..(302): unsure at all n locations
gcgtctcgatgtattaccggactcaatcttacattcgagttaaaagttattgtccgttgaatttggttagagcttcaacattgaatntcaagcatcttgatatattacggaactcaatcaaacatccaagtaaatagttatttgtcgtttgaattaaagtctcagcgtcataattcaattncgagcgtctcaatagattacgggactgaatcagacatccgagcaaaacattattgtcgtttgattagctcagagcttcagaattcaatttcgatcgtctcgatatattacgggactcaatc

SEQ ID NO: 70317 - DNA, 330 bp, Glycine max
  unsure (1)..(330): unsure at all n locations
attcatgaaagaagtgcacagatcttgtgcttaagttttatttggttatgaccttctattggcctactttgaatactatagattcgattggtattacgagttgactaanggtgagtataagatttacacattgctgaaaatatgtatatgatcaattcaactctagattaatgttcccctcctacgnttgatttatctcttacacctattttangatatttttaaatgaatggcaatanactttatgtggaaaactatgtatgctctaaattgctctcttgtgatgtctgaagaaggatactttcatatgctatatcttgccttatagat

SEQ ID NO: 70318 - DNA, 113 bp, Glycine max
aaaagaacatttttcttaatcctattaatagatgaaaaaaaaaattagcctgacataatcaagttacgaatataagatgtttttatacaaaatttgaaaaaataatttaggct

SEQ ID NO: 70319 - DNA, 440 bp, Glycine max
  unsure (1)..(440): unsure at all n locations
agctngttcttgattttttcgaagttctttaacaaccttataacaatattcttgtncttcattaatnngacttgggtttaccgaccacaatcaacaaagtactttcgacacctattatatgtngatgtcaccaacgtctgtatgggtatgttgcgacaaatcttcaataccttatgtacacattctgagagggtggttgtcatgtgaccatatctacatccttctttatcataagtcatggtcccatttatcctttgaaatgcgatcaatccatgttcctatggctggactcaatngacgaaaatttttataatttatcaaagatatgctgcaggagtgtacctgcataaattagtatgcaaaacaatctactatatatatgtacttaaataactcatatgcccataaatctatccatttctcacattctttggttacat

SEQ ID NO: 70320 - DNA, 363 bp, Glycine max
agcacgcgctcacttatggtgaaaaaacagtgctatcaaattggaaaggaagatgatacatgatttgatgatgcaaaaaagaatatacacgctcatttgcttcaagaataatacaacattgtttcaacaaacaaattcttgcttcaagatttcttcaaaatcaagccttgcctcacaatgaaaggtttcaagtcattcaaggcacatgtgatcgattaccaatacatgtgatcgattaccacatggttcaaagtgtgtaatctattacacatcatatgttatcgattaccagagactctgaacgttgtgaattcaaatttaaatgaagggcacaactgtcaagaaaacaactgtgtatcgata

SEQ ID NO: 70321 - DNA, 66 bp, Glycine max
gttttggtatagaaaactttctcttgtccaaagttgggtttggattttcataacaaaacttaattt

SEQ ID NO: 70322 - DNA, 173 bp, Glycine max
gagcttcttctatttatagcattcatctttcagtattcattgtcttaccactattgaattctatactttattcttcggctgaaatcttgagtccattgacaaatttaatacttgcattaaatgcacgtctcttctttatgccagaatcatattgataggcttgcgtgtcttga

SEQ ID NO: 70323 - DNA, 93 bp, Glycine max
tcaatgtatcaatgtactcagtgtgtgtagctgaactacaactgcgctcttgaagatcatttactaaagggaagaactaaaatttaggaaact

SEQ ID NO: 70324 - DNA, 323 bp, Glycine max
  unsure (1)..(323): unsure at all n locations
agcgtctcgatatatgacgagactacatcatacatccttgataatattatagtcgntngaatatgctcagagcttcaacattcaatntcgagcatctcgctatattacggggactcaatcangaacatccgagtataaaaagttgttggttgaaatggctgagagcctcaacattcaaattcgagcagctcgatatattaaaggactcaatcagacatccgagtaanaagttattgtcgtttgaatatgctcagagcatcgacattgaattgcgagcgtctcgatatattacgggactcaatcatacatccgagcaatagtta

SEQ ID NO: 70325 - DNA, 439 bp, Glycine max
  unsure (1)..(439): unsure at all n locations
ttgagtcacctgcngcatgcagcttatactngagtaaagaatgtctntgagctcttgaccactatggattatataatggcttttntagcatttattatttgatgttaccaacgtcttcattcttactagttcatttactaatttgnagactgcagggagcttttactatcatttaagaaggcaactggacaaaaaccattgagaataatcttttacaggtaagactgatctattctgatattgttcttgtgaggaacaagaatgtggagttatattaattataatgttctcccaatatgtttcagggatggngtaagtgagggacagntctaccaggntttgctatatgagctngatgccatacgcaaggtacctgganaannaaacaatntagcanagttataatttttattactgtggcattcctcaatattcttat

SEQ ID NO: 70326 - DNA, 124 bp, Glycine max
  unsure (1)..(124): unsure at all n locations
ctgcagcttangttgttcaattgcttcagattgttgacagaagggcaaatgtctgtgtggtgttctacagatgaacattaaccacagagtatggcgacaggtgtagatttttattctggtcagt

SEQ ID NO: 70327 - DNA, 95 bp, Glycine max
  unsure (1)..(95): unsure at all n locations
ccccctgtttactaaatgcaccccctttctatttttntggaattctttttccgtaacggtacgaaactttacgaatttcgtaacgatacttattt

SEQ ID NO: 70328 - DNA, 394 bp, Glycine max
  unsure (1)..(394): unsure at all n locations
agctnntgaatcattggagatgatatttcaggggtgtttcctcnaaccattggaagctctagcagctnttagaggtttagcttacaagcgtttcaagtaataatctattntcttctggcataagtttcacctagtagtgttcagtaataatgtaatattttaatttaacttctatcaatggataatctaccctttaggctgtcctccatgaatgaatatattggttccttctctcttgattttcataanaaaagaagaaaaataaactattgctattgtgctagctataagttntaagcangtctacaaccgtactgctctgtcttctgtgttattttgaaaatggaaagcattgagtgagaatggttttgcagaactctttctctcttcacac

SEQ ID NO: 70329 - DNA, 259 bp, Glycine max
gcttgtgtatagctgcattctactaatatatggaaatgcccattgctttgtctgagaataacaatagcttgaccacaacagcgctgggggcggcaacggacaatggtctttcatataacctgttgtacatgaacaaacattatattatgcgctgaccgtgccaaacgaaccaacgaagtcattgcataattgttacactaactatattcaatgtacctgaacaaaatgatctccgaacacgtgaccgacacatatgatg

SEQ ID NO: 70330 - DNA, 269 bp, Glycine max
  unsure (1)..(269): unsure at all n locations
gaagttataacctctacacttgaatgattggactacgagattgggctctattntgtgtaattagtttaattaggtagattagatgggcctaatcaacgctcatcactctcttatgagtaggcactctatatattagtgaaagttagctggttagctacttcactcttgtgagaaatgaaattagntacttgttgtgcaaactntctcttttctctctctttctttcaacaggtcttcattcttcttcctttttcatatttgtctttcat

SEQ ID NO: 70331 - DNA, 243 bp, Glycine max
  unsure (1)..(243): unsure at all n locations
tatacgcccgaatcgaacctcactggagaaagctatgaccatttgaatttctctagagcatgcgttggtcattttcgagcgtctctatatgtgatgcaccctaatcggacctccgtgtgaaaaggtatgaccatatgaatttctcgagagcttncgttggtcaatttcgagcgtctcgacatattatgcgcccgaatcggacatccatgggaaaagctatgaccatntgaatttctcgagagc

SEQ ID NO: 70332 - DNA, 363 bp, Glycine max
  unsure (1)..(363): unsure at all n locations
ggatgatgccgatcgaacatttnctaatcgacatcatccaattggtattcagggattgaatagaataaacaatggccggtgtcngtcagtatatggccccgactgatatctttcaaccgacattgcgccatttcttttacaaacgctgggcgataatggttttttatttaccgtagaggaaaagttttgttttggtgttgcctaanaaatntacaacgtaggacggctatggttttccgtgcgagctcaaccganggttcgttcccaccgacattgggcatgtgttcttctcatttaagaagataagaaaacgttcgcccaccccggcaaaaccaaaaaaaaaacattattcacggaaattga

SEQ ID NO: 70333 - DNA, 218 bp, Glycine max
aatttgtaagtaagttctgttctctgtaatatcctagctactttcacttaaagcggctggcaggctaatactttgtagacaagtgtggttaaagtatggtacactggaccctcatctgactctatatttctccagtttcactatttaacatatgcagcaactcccttattggtgtacaataagctctctatttattcagattatacgtgtctcgtttg

SEQ ID NO: 70334 - DNA, 122 bp, Glycine max
  unsure (1)..(122): unsure at all n locations
agcttatccttatggcttgcctctggacttcactccccgtgccattccggtaagattaatccaagcccctacttttgangggcaactcccgccttatgacgactatcctgagcaagacgatg

SEQ ID NO: 70335 - DNA, 340 bp, Glycine max
  unsure (1)..(340): unsure at all n locations
catagtagagtatcgattatgtgtctactatcacgnattatcgctccctttccatcattgggggtaccacttgngccgccagatcctcaccttttggcgtgttctttgaaagatccgtccccctttttgcaaatgttctgtagttgcatcctatccagaaccatatcanaattgtactaatactgcctaacaaaggcaaccattatgtccttccaagaatggactcgggaaggtttcaagttagtgtaccangtaacagctaccccagtaagacttttcatggaggaatgtattagcaatttctcatctttngcgtattcccccatcttctaacaataca

SEQ ID NO: 70336 - DNA, 209 bp, Glycine max
cttaagtcacgagctcactgacgaatctgatggggagtaatctgtgttctggcgaatatgacacggaacaaacgagtttttggagacctgaacaacgtgatatctaattaaaattgaatgtgaaaccatgccacattattatagatgaagggcttacacgtcattcttgtgactcttatgtaggattcttggccctcaatgagactgtt

SEQ ID NO: 70337 - DNA, 459 bp, Glycine max
  unsure (1)..(459): unsure at all n locations
catcaatggtaagaagtggctgcaagaaattaagataatatcacatcagaattaccatgggatgaactcattagacccaactatcattcatatttcaagataagtaaggaacaataatattattactacttacataatagcctccccaaacaagggggttcacagcattgggactcttgagcaccactagcttgntgtcctcatctggtgaaggaggatttgctgcattttccccatacaaattgcttctctatctatatttcatcaacanaaaagtgaatgaacaagaaggatatgtaactctctgtctggatacattcttgataacactataagtgataacatanaaaangttaaataaataacttatatgtanaatgactatgctaaattatttgagaagttatcgtttagtcntcaaaattgatgtactatgctaagtaggtgacgcgtatactg

SEQ ID NO: 70338 - DNA, 378 bp, Glycine max
  unsure (1)..(378): unsure at all n locations
attatcctgcgttaatgaataggaagcctgggcaaatggagagaataagaatgatggagaaaaccatgttgtggttgctattcctacatggccaaatttcccattagcgcaacaatatcaatactcgaccaatatcagtccttctcattacccaccaccttaccagccaagaacgcccaatcgttcacaaaggccatcctcatatcgaccagaanatccacccgatgcacatncaagaccaaacaccacccctaataccaatcaaaacaccaaccagggaaggaattttctataaagatgcttgtagaatcacaccaattccaatgtcgtatgctgactttactccctatctgctcgataatgcaatgggcaatataa

SEQ ID NO: 70339 - DNA, 235 bp, Glycine max
aagcatgcttatctatgccaaaccgtagtccaaatacgaatgatctctcacaggaagtactgcattgactagctggccaaaggtggagggaaaacacttgcatatgttctgaaagagattagtcactcctttttgttaaaatagtggttaggtgtaaagtaaacgcgccttattcttccataacttgtagtgatgttcattatcccctgcaaactgttttagcatatctggtacc

SEQ ID NO: 70340 - DNA, 185 bp, Glycine max
aagacttcctcgcaaacgccttaaaaatctgtaagtatactgtccgcgtttcgacttgcacttagcgtatgcgccttagttactcatgtgggagaaagatactactcttctacgagaagttattgctattcagagaagtaactaaagcaactctatgaggcggccacatctttgttcgcaaaatt

SEQ ID NO: 70341 - DNA, 401 bp, Glycine max
  unsure (1)..(401): unsure at all n locations
agtcgtattagcgacatcttctccctatatatacacgtttgcttgtcctcaagcaaagaaagaacaattcacttgtccttaagtgataaagacagcggccaatcaaaacaaaatggtgtttgattcatcaaggacatcaaccatatgaactgaatatcatggaatgcttaaatcaatcacttctcacaagcatgcaagttttcaaagataggagcacaagtattagagtcacagctgatataagctagtaagcatgacaganatcaaggaatgatcatcaaccaaaacctcacagtcattatttcactcaaactcaagtgtgtaggcttaattcatcatanacaaccaacacaagttccagccttntgagtgcatctcctatcatacaacaatgaacacat

SEQ ID NO: 70342 - DNA, 83 bp, Glycine max
  unsure (1)..(83): unsure at all n locations
cacatcaaccaaaatcacaggttntctcacttaaagacacagtaaaaatttcttcgatccacattcgtaaccggtggatcgac

SEQ ID NO: 70343 - DNA, 297 bp, Glycine max
agcttctccaacttctcttgctcagctttctacaatacagaaaattattttacaacatttgtattgtcaagcacaaacctaaaggttgacaaacactataaacaagaggtagcacctttctctacctctacagaattgagtggatgggaaaaagatatggatttatacctttacatttggaccaacatgaacacaaagattttgaacagtgatctaatttccaggcaagtgatagacttaaatcgaagattaacagagcacacacgtgagtaaataattgtttcttctgctggaact

SEQ ID NO: 70344 - DNA, 110 bp, Glycine max
acgtctattttttcatgtgtgtgtgactatcattgtgcttcaagggatgaacatgttagttagaacatagaggtcatgagcaagctttagataatcaacatctcagatca

SEQ ID NO: 70345 - DNA, 117 bp, Glycine max
  unsure (1)..(117): unsure at all n locations
acagtcaccgttntaagagcgcggtacaccaacagcgcttcgaggccatcaagggatggtcgttctccgggagtgtcataccctaatttcgtccggngacctttgcttgatgacatg

SEQ ID NO: 70346 - DNA, 216 bp, Glycine max
  unsure (1)..(216): unsure at all n locations
tgtgctgacattgtgtctgtgtgtcttgngattggttgaatgcacgagtntcttaatcgtgggggactngtagtagtagttttttaaggcggaatagattggtggtattaagcttttcttgcgtgccaatagaagaagcggctggtgaaacatttataatagtgcgtgatgagccatgctagcacttcggttattgcaagaaccaagacatagtat

SEQ ID NO: 70347 - DNA, 403 bp, Glycine max
  unsure (1)..(403): unsure at all n locations
aagtgatagacaaggattcatctatctatatnggtctatcaatacctatcagcacccacttacagacacatacatgatttcctaaataagcatttaaaatattgtcatgcttagaagctactgatgatatgacatctctacacttttatgagaaacaatcatggtttcaacaaccaatntagtggggtctccattacctattcttcaacgtttacatggtgttgggcatctattgtgaatatgatcaaacatacatggattgtcacatgctccggagcgatgacagagggtgagctatatggtgcttctttatttatcttgactntatntatgacacaaaaacctccttatactgccattgctgtctttgagtatgtgactactcaacgtctgtgcatgacta

SEQ ID NO: 70348 - DNA, 175 bp, Glycine max
  unsure (1)..(175): unsure at all n locations
gagagcttctgaatnttctggtttgctgagtgaggagagagaacaacttttggttctcttttttattaaaaagagctgttctcttttcctatctatttattataaactatgccacatgtctccattngagtggagcaagaagggcccactttctcttttgagtgtgactcatact

SEQ ID NO: 70349 - DNA, 277 bp, Glycine max
  unsure (1)..(277): unsure at all n locations
cattttgtttaagagtaggtccactggtaaactaacttccagatgntgtcttccacgaatggcccgaggaagctgcctcaagaagccaggaagacaatgcaccgaggaacttttcgctccgagatgatagcaccgcttagaggctgtcaccacacgctcagcctcagggaggtcgtttcggacaccgtcactcagacacagttctgttcagagaataggcccgcggggctatggtctccatgcagttatcaaatatcttgatttgcatgtggcacaa

SEQ ID NO: 70350 - DNA, 85 bp, Glycine max
actagtaaaagcatgaacaatgtgtgttttattacttctttgtatcctactatgattgcattgcattcccaatgggagtttccat

SEQ ID NO: 70351 - DNA, 128 bp, Glycine max
tcactcattattcacttcttttcgcttcgctcagaagatgctcatctcgctgtaatcacgtattcgctacactcggaattggcatttaactgtaatacgctttcgcccgctcagatttgccatccact

SEQ ID NO: 70352 - DNA, 223 bp, Glycine max
  unsure (1)..(223): unsure at all n locations
gagctgacccattaactgccctaactcctttagactggtggtccctatgctctngaccttaacttgatagaaccttcttttaagtgaaggcatttgacttgatcccatngtttactaaagtgaacaaaaatcggcgcgaatcaaaactccaacatctatcatgggtggaatggatgaatgcatgaagaaatgcctatgacacagatgccatttacgaataccg

SEQ ID NO: 70353 - DNA, 69 bp, Glycine max
agagatgacaatttagagagtgatcccagactttcaaatggatttccactgaattattaatagagagat

SEQ ID NO: 70354 - DNA, 296 bp, Glycine max
  unsure (1)..(296): unsure at all n locations
cacttttacatttggattaattctttgcagggagcgatatgagagatactacaattgagcaatctctcagggagggacatagnagctcttgagctgagctagatctctctcatgatcttctttggaatatgcacgatgaaagaaaaagaatccctagaaatatttagactccctagagctgataactgagagagaataatangagaggaaagacacaattttcttaaagcttaatgagtaattagacaataaaacccctactttttgcatgcccaatgagaattattatcattctg

SEQ ID NO: 70355 - DNA, 251 bp, Glycine max
gcttgcatgcacaaagtgccagtgagttcgacagaacgtgggtcacaatgttcagagatgtggtcagcaagactaaccaacataccttattgtgtgacaaattctcaagttggagtttatggaaaacctgcccctgaagaatttactgctgattatggacactggaaacgtatagtgtccaagtcttatcttaatgggataggaattaattggtccaatatgcggaatgtcatggatatgagatcagtcta

SEQ ID NO: 70356 - DNA, 157 bp, Glycine max
  unsure (1)..(157): unsure at all n locations
ctgcaagcttggcttaatagcaagttgaaagtgagagactaaagnnaccgtattatatctgtatttttatttctggtaaaaaagaanaaaattatatgggatttaatgaattaaaaattataaatatttgttaatccatcaatctttatttttggta

SEQ ID NO: 70357 - DNA, 192 bp, Glycine max
catgagacactctcatattctctgtggataggattgaaaaactgcaccaatcaatctgtagaccccatggtatctatctccttgttctccaactgtgttttctcctcacttacgtcatacatccattctgaaaatcactctcttctgcttgtttataaaatgaaaaacggtcattcctcaaaacacggctat

SEQ ID NO: 70358 - DNA, 171 bp, Glycine max
  unsure (1)..(171): unsure at all n locations
gacatggagatgctttataacgagttaacgaaggaggtggtgacatcctatgaagcaccaacaccgacacggacaccggacacgacacggacacggacacgtgaatacctgtaatgtccaaaatatataacgtagtacgggtgtcgtgtcngtgtcagacactgacactga

SEQ ID NO: 70359 - DNA, 331 bp, Glycine max
  unsure (1)..(331): unsure at all n locations
cattctttccatctcgctgaatataggtattattgttctctttttttcccaggacggggttggacctttcgcaagggaaaatcaaaaacaactcggatgccggagtattgagcctgcaatgagcaaagtaaaaaatattcacgtgtgtatgtagttaaatatcaacagatgttgacttcaagatatagcttccttcttatacagctgtctgagctgatagttttattnttttcccacgttgcaactgaagctgctattaccattcttctaatagatgacatgatcaagcttgtcaggatgaaagtcaaatgacgataaagtatactgaatc

SEQ ID NO: 70360 - DNA, 177 bp, Glycine max
tatctgctgcctccggaaggactaattaggacactcttgtttagctgtcactgattaatgagtgatggctgagagcatatgtttttgccataccaaagctactgatatatgatcttgaccttggactaatacttttaaatgacctgactgatgatactctgaactgctaatctagaa

SEQ ID NO: 70361 - DNA, 258 bp, Glycine max
  unsure (1)..(258): unsure at all n locations
agctttatacctggtntcttggtgggagctgtctgactcatttctcttgagggcgctccatattttcctgctttcattcctgctttatttaaaaaaagactccttgatgaagaagatccaaggccttcagcttcacgtggagctacatcatgtggtatcaaaagcatcttcatctaggtgatatcttttacttcccctatctttttngtcacgcatttcactttaattcctttgttttcatcttcttctcaaattatc

SEQ ID NO: 70362 - DNA, 339 bp, Glycine max
ctgcagcttcttctaaaaccaccaagcaagaagtaacatgtataatgtatttagaaatatgataaaggtctagagggcataaagtagaataaaactaagaataattttctttttgaaaaattgcctcattttatctctttatttccatattttaccccaccattaataatttcattttagctacccattcatctcgattttaatcttttccaaaatattctcacactttcaagtaacatgaattaaatagggaccattctcttatagttaaagtgtaggaaagaccaatattagttatatcttaacatgcacataagagatattttggttgaacatggc

SEQ ID NO: 70363 - DNA, 385 bp, Glycine max
  unsure (1)..(385): unsure at all n locations
taacgtgaggtatttcagtaattataattttatatacttactatgnngtgattgatattatatatgttaccacaatggggttatacatgtattttcaatttcataatccaaataaatatatttatcctaaaactaaataatttctatatttatcatcagttagttcaaatggaaagtctgataccaaagcatggaaaatgtacccacctatanaagcaatngttgatttctatttccaaaagtattttatttttcaaacatgcaataaacanagtgctcnacagtggtgaaagagtgtaatgggatgtgttaatgaataaaacaaagatacaatgagtgacatcgttttcatgcatttgctgagaatgtttgtgacatcatgata

SEQ ID NO: 70364 - DNA, 464 bp, Glycine max
gcttctgtggttcaatttcgagcatctcgacatattatgagcccgaatctgccttcgtgtgaaaagatatgaccattagaatttctcgagagcttccgatcgttaatttcgagcgtctaatatattgtaagcctgaatcggagctcagtgtgaaaagttatgaccatttaatttctggagagcttccgttcattttttagcgtctctatatgtgatgcgcatgaatcggacatccgagttaaagttatgacctttgaattctcaagagctgcgttgtcaatttcagcgcccgattgtatagcctgatcggcctcctgtgaaagtataccattgaattctcgaaacttcgttgtattttcagcgctctattgtatgccctgatcgacatcggtgaaagtatgacatctaattctcagagcttcgtgttatttcagcgctcatatttgtacctgatcgactcatgg

SEQ ID NO: 70365 - DNA, 514 bp, Glycine max
  unsure (1)..(514): unsure at all n locations
tcgtcttcttctttattccagtcttcttctggcttcaattcatcagngggctntccttctgtgtccagcatcttgggatgttcccagcccttgatgacaagctttcccaggttctgctatccaagtgantagaggaaggccaccatccttgctttccagtattcataggtgggtccatcccagaatggtggtctgttcactggtcctncttctttctncatgttcnatcagaattatctccctaggtctcactcagtgatttcgagtgcccgctctgataccaatngaaattctgataccgatgacagatgtcgtaccggatgtcacgacatcacgcttcagaacatgcagaattatattgggagtatgaacagattaaccaagtaaataacacaagagaatttgtacccagttcggtgcaacctcacctacatctgggggctaccaagccaggaggaaatcactaaatagtgtagtcaaggctacagccctgttacaccttctactaacacta

SEQ ID NO: 70366 - DNA, 229 bp, Glycine max
atcgtatatccatctcaaaagtatggtcgctgattggacaagagctttcgtgtgaatttcgagcgtctcgatatattgtggacctgaatcggacatccgagtaaaatttatgaccattgaattccctaaacttcagtattaaattgagcgttcgattatatggactaatcgacatcatgtaaagtatggcgctgaatgactaacttcggtcaatcgacgctcattatat

SEQ ID NO: 70367 - DNA, 343 bp, Glycine max
  unsure (1)..(343): unsure at all n locations
tactcagctgatgtactgaagttgttcaaatgaatcttggaggttcctaactctctttaatgaggaaagaactttcactcatcgttgatgatctgctccatacttatttagcccgtagttatcgaagatagggaaaaagagaatgatttgatagatagtgcatattttaaaagagaaaaaaaattaaaattaaacgagttcnaaatgagttcgtaaaccaattattaataataatatatcactcatantaatactctctaaatatttntctttatgtttntatatatcacatgaataataatattatnttatactttattcntttctttctttacaaaaatgt

SEQ ID NO: 70368 - DNA, 400 bp, Glycine max
ctaagctaaggggatgctcgctcgaaatgggattttttgtctgcttcaatattgcatataaagaggagaatgtgatgaattgtatgagatttgatgagcaagacgaacatcaagtacttagtcaatcagatctgtaacaaatataagagaaaaacccgctagctattttgtaaagatctttatgatggaggttggctcaacatattttaataatataaaagttaaaatttacttttgaaaagaatttcttggaatcatactaaagtgaatcatacaaacaaatgttaaagtttagagtgaattgtttgaacgagcatatattgtgacacacatacgactctgattaatgaagctgactctgtacttgatatacatgagatgaaatgttaagactctttga

SEQ ID NO: 70369 - DNA, 287 bp, Glycine max
accctcttgctcaactatggtatgaataaagaaagagcggttatttctatgtctttctcatctaaatttcatgaagaaccggaaccacgacgcagtttaataaaggtattagtcactaggacgataacagtaataaatggctgtgaaaaatgtatgtgtaaactataacactagctaaatgaatcagtataatgccctagaaagtggtttacacatggcatagatcttaaacgctggcattgacaagctaactactatcactatagtatctacttgtaagtatacac

SEQ ID NO: 70370 - DNA, 477 bp, Glycine max
  unsure (1)..(477): unsure at all n locations
tctctcccaattntctatatatagggggagaagtgaagtatatattgtttcagccccttaggcacttctctctctttcgaatttgcttaggaaaattgtttctgtgaagaaaatccaagccgaggcgcttccgtaacgtttgcgtgagtgatttcgcgaaggttttcgaccgttcttcgacgttcttcatttgttcttcatcgttcttcagtctttaacgggtaagtacctcaaaccaagcttttcaatccattctatgtacccgcggtggtccacattatggttcatgtatttttattctcattttcatttactttttatacccncttctgacgtgcttaagccatttagttaagtcatttctcgcttaacctagaaataanaataaattttcaccgatcgtctgaattgtaccatccgttaactttggtgaaatgaattcgacgatcgattcgtgccgaaccacgttgaataaaa

SEQ ID NO: 70371 - DNA, 331 bp, Glycine max
agggtggggatggggggttgttggtcaagtaataaaatgacttacttatttataatgttgcccttgtgaggtctctctatgaaggtatacagggaggaccgctgttacatcacgcttgacatttttacagatattttgcctgtgccatggaataactgcaaagcaatgagtctattattagcagttggggtgatgtgttttggcatgtgcacgtatcactctaaaataagatgaatgagtactacatacttgtggtaatctgctaaataaaaataacgacttgtaaaaacagcttaagtagatatttatgtcacatgtagaatacttgtat

SEQ ID NO: 70372 - DNA, 340 bp, Glycine max
ctcaccctctattattaattcacgcaatctgcttgtctggaatcaacttttaaaatcacgtacagttggccgtttacagactatgactctcaaactcataagctttcaaactctctgttttgaaactttagagatttaaactatctatttccccctttactaatactctgatattcgtaaatccacatatcactcaccttctaatttttatttttcttttttttgtttttttattttgttaaataatttatcgggtcccttttcgctaggaataagaaggtgctttatctcttgttttacacgctgcatataaattctcctggattgcattttggggtct

SEQ ID NO: 70373 - DNA, 504 bp, Glycine max
  unsure (1)..(504): unsure at all n locations
gacacttgaaactaagcttatatacatggagacgctcttagtcganaagtgaagtccatcttatattccaacgaccataacatttcacctgaatctctgaataagttcggtaacctatcgagacaatcaaaatttaacaagtaaaactcgggcgaattctgacgggcaaaggttttgactcggatgtccaattgaggcccataaaatatcatggcgctcacaagttgaaatggaatgcccatgcaaattcgatgtcaaataggtgtttatgatatattgagacgctctttgttgaaaaatgaagcccatcgcatatacaaacgaccataaccgttccttcggatctccgcatatggccgaaaacctatttagacactaagtaattatcaaggacgactcggacaaattccgacgggcaaaagtattgactcggatgttcgattgagtcccataatatatcatggcgctcgatagttgatatggattcccacgcaaaattggacg

SEQ ID NO: 70374 - DNA, 490 bp, Glycine max
  unsure (1)..(490): unsure at all n locations
cttgatggtgtngagaagatatcacatgtgtgtcatcatcatttaggggttataatgtgaatgtatgtatacatgactttgatgatgtcaaaagaagaatcaaacaaggctcattttgcttcaagattaatacaagattgtttcaacaaacaaagccttgattcaagatttcttcaagatcaagccttgcctcacaatgaaaggtttcaagtcattcaaggcacatgtaatcgattaccaatacatgtaatcgattaccaatggtttgaaagtgtgtaatcgattacacatcatatgtaatcgattaccagagactctgaacgttgggaattcacattttaaatgagagggtagcactggtcaagataaacaactgtgtaatcgaatacactaattcttgtatcgattaccagagaggattatcaatgaatatcgccaacagtcacatcttatcacttggattttgatgggcatcaaggcctatatatat

SEQ ID NO: 70375 - DNA, 335 bp, Glycine max
  unsure (1)..(335): unsure at all n locations
tctctttgggttcttctcttctatcagtttgcaccgttgatcacttatctcacttcatcattgtcctcngcgagtttcttgccattatcgnngatgtgtggatatgctatacatggngttgttcatggatgacaatactggcacttccttgtggatggatgccttgctttgtttgagtgaaagactgcgcggtgactaacttttgaattgattgtacgatcttctaccttggcgtttgcataacaggcgacctgaatatgcatgccatgaagtgaatgctatgtaagtaatgtttctggattaatgtgctgccctcaatgaacatggattatctc

SEQ ID NO: 70376 - DNA, 421 bp, Glycine max
  unsure (1)..(421): unsure at all n locations
tcacgctcctcttcttncacagcagcttgaactttctcaaatatctgtcatcctcctctgggagaaaatgacctgcataatttgaaaagaagcatggtaacatcaaacatgtaaagaaattaaatgctaaatacgtgaatattactaactttcgcatacacaaaatgtaaacatatggaaaactttccaatcagaatagctatcaaaatcattcctattatattatcaaattaagaatgcatggtttcaaatagataattaacaaaattgtttaatatatttctcatgatacatttttaaggtgataggtagctatttgactataaaaaaaaatgctaagcattgtagcttgacctcagtaacataatttataaatataattaatcaatcaatcatataccagcattcaggactgtgaatt

SEQ ID NO: 70377 - DNA, 283 bp, Glycine max
  unsure (1)..(283): unsure at all n locations
aattaatgaattgaagattgaagtagccataaagtagttatatgcttaatataaaatcgcnactngatatagccacgttcatttatccaataaagcaacatcacatattcacattcaacgaaatttattatggaaaagtcacantatgatatatatatatatatatatatatatatataagaaaccannagtgcatgccatgtaagggtacgtatgcatggagatcaaattaannaaataaggatagagattaanaataactatttagacatagtcttatata

SEQ ID NO: 70378 - DNA, 484 bp, Glycine max
  unsure (1)..(484): unsure at all n locations
tntcttctcctcaagcaaaagtaaactaaactacactaagttttgtcaatgacaatgtttagaatgtaatcagccccaataattgagacaactacatatctttcaaacaacttcaatttctaactctcaagttcacatttgtcatacatagttttcatgatagaagcatgcgaagaatgcacttggagataaaataggttagcaagtatgacaaacatcaaagaagatcaaccatgcttcacttctcatgaggatagtgtttctttcaagcacacaagtgttatggttatgtgtatttaaatcaaaacaactgaaattagcattcccaactttgcacattatctcattcaatgcaatcacacacatacaatatggatcactaaggactttattaagcttgtaacgtggacggattaacgaagaaatcatggtttttctcggattcaaacacttaggttctatgaaagccttcacacattcccta

SEQ ID NO: 70379 - DNA, 343 bp, Glycine max
  unsure (1)..(343): unsure at all n locations
ctcagtatgaaaattagtagttgaatgctcaaaatcagaatggtcagaatcaccagcaacataatactcagaatgctcaatatgcaaaagatgaccaggatgtacactatgcctaactaatctatgaaaggttctatctatttcaggatcaaagggtngatatcacctggatggcccctagtcatgcactatatgtaacaattcatgtggttctcacacaagcaccaggggaggggtaanactacaactatagtcatacgatatccaaatgagctgannatntgtgagcacaccctaaatcatgaaagatacacaaacttntcagacaaattcaagtctacta

SEQ ID NO: 70380 - DNA, 151 bp, Glycine max
gcctgttatcttgacgagtctcttccaatgtaatggttgtgacctacacatcacgcttctgctatatacccagaacccgtgtgcttctgcatcattacactcatcaattaagacaacagatgtgcgctcgctttgtgtgtcacttccaaga

SEQ ID NO: 70381 - DNA, 486 bp, Glycine max
cggggctgctgttcttgtagttcccgtgagcatgttggtttctgaagtgagggggaagagctttgggtgaagaaaacgttccccctccacccttttatattctcgtacaggggttgctcgcccaggcgagctaacctgtactttgttttttgagaaacattaaccatgcctcccccccttacaggttaacgtttgcctacttgaacctacttataatagaatcaggcgtcgattactttatgtaatacaaataatatgaatataatactatgaattcaaaggatattgggctgccatgcaccgatgttctctgctttgctagcgcccggaagggacaacggtcggtcgtgaccctatcctccatttgcctccatccctaagtacctacaaaaggtctttcataattctgtgcccactagcctcgattatccttaacagcgtgggacatcgtcttcagaacgaggtccctctcgttgaacttgtgcc

SEQ ID NO: 70382 - DNA, 491 bp, Glycine max
  unsure (1)..(491): unsure at all n locations
ccggatcttaagtcactgngctgcagctataatcaatgcctatgacactntccaacatttccatcactataangtatataatttgaagacataatcgatttactatgaaaaaatattattatttctatatatatatgtataaaaacttataaataccaacactaaatgcacatgtcaanaatttactttaaagcgccacaaatctaccacacgtgtgatctatcatatgcagttctaatataaactaaacctagaaacctatgcatcaatnttataatatatccacatgttcaataaataataagtagatatattggaagtattgactagttttaatctttatagtgacaattattcactattaaaataattttaatatttatattttgaagtaaatattttaaagaattcagttttaattatcattatctaaaatatagttctgatccttaaaatatatgattactttcatactacatattgtaccttat

SEQ ID NO: 70383 - DNA, 450 bp, Glycine max
tcatgatgaatgaagatgtattcacggagttgtgattatatctgtatagctcataagtcaagatcacttggtgatgtcaaaagagatgacgattacgaatgatgtccggattgaggctcgatcactgtataggatcacgaggaaattagtgcttcgacatctggagtcacgattcatgaataatcatgatcaagattctggactctaagattcaagaaacaagataagacttattcaagatatggattaaatagtatttcacaacattaagtagcacaagaagtctacacagtatccataccacagagtgttactctctggagagcgattatcacaataatagaatcgactaccagtgggttaaaaacgttaagattttctaaattcagaatgaagagtcacatttgtggttgtgaatcgatactcatctgtggtgtctataccagaact

SEQ ID NO: 70384 - DNA, 423 bp, Glycine max
  unsure (1)..(423): unsure at all n locations
tatagtgatcacaccagataatagattatgctctcttcattatagaagcatatgtgcatcaataacaaatggatcatcagtcatcataacataaatcatatgtccaagtcacttgcatctagaagtactaactctcttctaatggtgtagacagaaacattggttagtggatttgtgaagatgtctgcaagtagggttttagtatctaatttattttttagaaaacacaatcacctttttcctaatactaagtgcttattgaccatcaacacttaccaagatgagcttntattaacatagaaggcgttatcatatcaaaataattttattgaaaaaaatataataatgttgaaaacataaaaatattgtaacaatcaatctagtgattcaacatatcagacaagaatatacaaggattgagga

SEQ ID NO: 70385 - DNA, 467 bp, Glycine max
  unsure (1)..(467): unsure at all n locations
atatcatcctcgaaatatggacatctattctatatgaacactagaaatacaacaaaagtaatcgcattcagtgtcttattttgaagtagtaaccaaacaaaaataaatgtaactaagaaaactatgtcttcaagtcttctcaaacttaacaatttcttcatcatattaataacacttataaggagatgacaatcttattgaataaaacaactaacaaaagttcacaaatagtgttgttctcaaccagtgtgataatccaaaaaattgaccataatatcctaaatgaatttaatataggattatatatatatatatatatatatatatatatatatatatatatatatatatttacacagcaatataaatcctattaaacaatcacaattcatacaantttgaataaataaaaattgtaaataaatggcaacagcctcgtgcatccaaatatatataacaaacacaac

SEQ ID NO: 70386 - DNA, 419 bp, Glycine max
  unsure (1)..(419): unsure at all n locations
ttattctattctatcatattacagaggaattgtaattttatattttagatttactcgtcactcaatatcaattgtaaaaaacagattggacatattttaattgagtgtgtagactctagtagcgatggatgcagaacaaatatgcgtccattgttgagatgcataatagacaggtatccatctagaatgagagagagatactgattataaaagttatgaatgtgagatatgactgatgaggagagagaagagaaaacgtgtggaagatgagagaaaaataatgaaattttatgttgattgttgatactaaagtgataaagtgtaatagtattcgtaacttaacttctgagagaagcgacagacttntatgaatttgtttccagaatttgtgatggcgattattaatatattcatactac

SEQ ID NO: 70387 - DNA, 491 bp, Glycine max
  unsure (1)..(491): unsure at all n locations
agctttcgtacgtgaaatcaggtgtagccatttcccttagagtcctctcatgttgtggagggtgtgccatgttctcataatgttcataattagaatgctcaaaattgtaatgctcaaaatcaggatgttcaaaatcaccaataacagaatgcacagattcaccagtattggaatgctcacgatgatcaaaaggtataaaatgatgcctaactaatctatgaaatgtcctatctatctcacgatcaaagggttataagtcagatggattgcctctagtcatacactacattcagcatgcacaactagttgccttgtaatgtaaatgaaggtgtaagtttgaaatacagctaccctcatatcatatctaaatgacttgaaatatngtgggcaaccttataaaatgatgagaagatagcacataaaatttcatacaaaacttcatagtctaactatggaagcttaaaatggtaggttgagacaataagttatat

SEQ ID NO: 70388 - DNA, 115 bp, Glycine max
tgtacagtctagcaaagaagtccttttatatttatagcagctctctaggagctaaaatgaaagaattgtttcagtggaaatgaagtgataataaattaaatgcagcaagtcgata

SEQ ID NO: 70389 - DNA, 495 bp, Glycine max
  unsure (1)..(495): unsure at all n locations
actaagctngcatanngttgggctaaaagtcttgttgaagaaagctattgtatgcctcttctaagataacatgacacccatggcaatgttggaagcatccatttctaggacaaacagaattaagaagtcaagtcgtagtaacacaggggtagacaaaattggcatcatcaattggttgaaggcaagtatggccgaggaaggccattcaaaattgtcgcggattaacaaggtagttaaaagtgttgctagatgaagcgccgataaaaccctgtgagacccaaaaacctatgcagggccttgaaggatttatgaaatggccattgtcgtgtagcttgtatttttgaagagaccagttctactccttgtgatgagaccatatgacccaaatattccacttgcgtttgaccgaaggaacactnggataactntatgaagaactttccttctagaagtacctaanatgcttgttccaggtgtagaacatgatatttcaaa

SEQ ID NO: 70390 - DNA, 401 bp, Glycine max
  unsure (1)..(401): unsure at all n locations
cctcatcaatattttgttttatgatctaatncaacatacctggtgtactgtagaaatcttaaaatataatgacatatataaaaagtggggagaagggatggcgtcgaatctctctaaattttttataactaacatttgctacaaaagaacattatttcatatgaatttaacactcgtcttattatggaacattagaatatattgtacatgacggtcatctctatacgaaccagtgggggattaatatctacacgggaattgtactgatcttgcctggttagataggattatagcgttactttcatatcatgcgacctcaccaaaataatatcattataacaaatatattttatgtggaggattttttatattaaatctattataatgaataagtgcatgca

SEQ ID NO: 70391 - DNA, 483 bp, Glycine max
aactaagcttctaaggaggagagcttagttttagaatggagagtgtatctcatctctatcttctcaaagaagcttctcaaggaaacttctctaggaatcttttcaaggaagcttctcaatgaagctttttaaggaagctacctaggctataaatagaagcatgtgtaacacttgttgtaactttgatgaatgagagtcttgtgagacacaactcaaagttcaacttctctccctcttttactccttcaatttcatgctccctcctctctctttctctctctctttctttttcttcattgaagcatgctctccaagcttcttatccaaggcacattcttagtggcgaagctccttctttcatggcttattccctattggatgagaccttctctcacctctgcttcttgtttgcgttgatctcatggtggaaataccatgaagaccaattgaactaaagatcttcctctagaacttacatgcact

SEQ ID NO: 70392 - DNA, 364 bp, Glycine max
ctcagctgccataaatctatgtggctgattatttctgttttgcaactcttgtctgaggataaattttagcatattgagtgacaaactgcattaatattctacagtatgataatctaagcttgatctaaccttctgacttacgttctagatggctatctaattgattgggatgactgtgctgaattgactaagattcactctaactatggaacacctagggtaacatctagaagtgaagagccaggatcactcatctaaataagctaacgtggtgcgctgacattactgaattatagatgcctacattaacaacttacgatttaactcggaaatataagacaggatgtaagaaataaaattcagt

SEQ ID NO: 70393 - DNA, 308 bp, Glycine max
actaagcttacctaataaacatatcctcagatatggacggagttcttttgttctctagaaacatcaaaggcaacgcatgggtgtctattttgattacacaccaaacatcatggagtgcatcttctaacactatgtcttcaactctgctcacaccccgcaatgaactcatcatatagataacaccttttatgagatgacaaacttattgtataatactacctatcgaggttcacaactcctgttgttctcgaccacagagagtatcgcaaaaaaagaccgttgtgtcctaaaagaggtgaatataggag

SEQ ID NO: 70394 - DNA, 272 bp, Glycine max
  unsure (1)..(272): unsure at all n locations
aaattatggaacttagaaaaactaaatccttaattgaaggcgtaggtgacaaccatagtgaattactaaacaagaattggtagttacttaaagtcattccagaatacccccaagcctcgganatacttccaaatggtacaagaagacctcaaataataatgtataatgaataggacaaactaataccactgaatagatcaggcagaaagatataatccattaattccaacactggaaacaccctcaattatatatcaacgtccactgccctg

SEQ ID NO: 70395 - DNA, 403 bp, Glycine max
  unsure (1)..(403): unsure at all n locations
tcctctgccctctgaagggttcagtatgctcttgtttatgtataccatataactttcaatcttagaattttagatntaaatgagaaactgttagtacatatgaatcaacaatctatattaccattaaccataaatgagaatatggtagtgcaaaaaacaatgtttcagaagcttatctagcattttaagttggggctaaagtatttaaaataaaataaaaatatcagcaggcagggaacactatccttttctatattatattatataccacatagatgacaactggcagttgctgtgcaagatatttgttgacacgctttgaatatcacaagataagggagagaaatgctagagaaaataaactctccaatgcgtattgacgtacaagtgtatcactttaatt

SEQ ID NO: 70396 - DNA, 256 bp, Glycine max
  unsure (1)..(256): unsure at all n locations
agctcactatngctgtcctataaagccccctcaaactntgctttggcgtgttcttctttcnggccttcttggtttctcgttccaaggcttcagcgtgggccatattgacgtcccttagatcatcatactctttcagaacttgatggctatggacttgaacttctcttcgactacancggctctttcaagctctgcctttatggcttgtacctcatcactttcttccgaagctttaacctcatcatctctcatagtc

SEQ ID NO: 70397 - DNA, 391 bp, Glycine max
actgcaactgagctcacgtactcccacgtagaccatatctctcggttctctcaacatacgggtcccatcaatccttccaaggctgcccaacattcaagttattcaacaatcatacagcacaaactattacagccaagaaaacaggagaggcaaatactctgcccaaaaccaacaaaatacagcttttctacttaagacccaggacatttcctttgtccaattcgtaaccgttgatcactcgaacttactgaagcttagacataattactttgacgtggactactacaacacagactatctgttactttcacaacacaaactagcattttcctatcaaattgcgcattacaaaattgtaggaatcaaacccttcttcactgcaataactagc

SEQ ID NO: 70398 - DNA, 258 bp, Glycine max
  unsure (1)..(258): unsure at all n locations
cccgaacantaaagcaaaacacacaagaacccaagttcattctctagctatggngctgataccntctttgtgaatggaatgcttatatctcttgccataaattttcttcataatgggactttaattttgtgctaaataatggatctatataagttctggctggtgcaatgtttattacttggttgttaagaaaattaacgagagtgaattagcgcagtaacgtgaaaaaaagaatgtgctttatgttgcacccccttg

SEQ ID NO: 70399 - DNA, 145 bp, Glycine max
gacatttcagggatctaggcaagagtccttgtctatcaatctgcccttgactaaggatgatagtctacctagtcacttgttgtacaaactgactcactctcatgcataccttcttatgatcatttctttcgctacagaaacttct

SEQ ID NO: 70400 - DNA, 428 bp, Glycine max
  unsure (1)..(428): unsure at all n locations
ngaatgaatgtaagacacatcttcttaaccttgggattctgactccatctcattgaagtgcatatctacttgtaattccaaggtgtcaaacctttcatcaacaaaggtttgaaggccatcaaacctgtccaaagtctttgaaagaagagatgaatcttctccatcatgtccttcttcaccaacatgtcgagcacccttcttcacccaagagccatcatgctccttttgataaccaaaggatgctatgactgaagtgcctataaggaaggatctcttgattggaacatagggttcagaatcaagagggatgatggaagcttgcttgtggggcttctatggaggctggatctntgagcttcaatgaggtcctttaatggtgattttccaccatggagatgcaatggaagacanaggagaagaggtgagag

SEQ ID NO: 70401 - DNA, 501 bp, Glycine max
ctataaaactaagcttcttataagctgaacgcatttatcaataaagacaagctgagtacttctcgaaaattagagagcatctcttttatcttagtgagagtgattctcctaaattcttgagtgattcaagaacaccctggctatatcaaaggactttcacaacctttgtgtgttgccctcgctggaaagagtgattcttttcttcctatcatctacacccttgttctttcaaaccacaattacagaaaatacacctctgcccaaaattagctcgtgaccataactcccattatatacactcaaattaagtgattcttgagcctacattgaatttcaaaacgagacctttcacctcgtttgtgaatcacctcatatggagccctgtagcttccggtattgtcatttctatatttctgtccagccaccacttaatcctacttttaccatcccattcatccattttatgccagagaccaccttattaagacccacgaaattaac

SEQ ID NO: 70402 - DNA, 490 bp, Glycine max
  unsure (1)..(490): unsure at all n locations
actaagctgtcccccctccacactcattttgcttcattcttttccttgtgttggtatgagattnttctaattatttcaaatttatttattttttataaattgatatattttatttgctgtatgtttgttttttgcaggtggtcatcttgtgtacaaattgctgttagtttaatttggttattattatagttatcttttattaattatataacaaattgtttatttgtgttacgggtgcttaagttttagaatataaatttaattaagattcataataaatattactataataatgctattatgcgtattaaaaaagaaaggcatatcattattatatataaaatatatatatatacgtgctcttatattatcttctgaaatttgtgaaattgaggagaataatatatatactttctgaaagttgagagaaaaaatcctcatagtgaagaaattattttttattatatatatatgcttattgaaattatcg

SEQ ID NO: 70403 - DNA, 487 bp, Glycine max
  unsure (1)..(487): unsure at all n locations
taagctccttcaactgcacaatgctcttaatattngaagagtattcttgtggaaccttcacccgacgaagacactgacaaaaacttatcttctcattcttggacaaagtatggcaagctgggggcaagtaaattatcttcccatcaaaccttggatgcaactgtgattgtatacccatatcatctagatcttgacgggtattcaagccatccgtcgtcttgccttgaatgttaaagagcgtgccaatcacactcacaaacatttttctccacatgcataacatcaatacaatgtctaacgtctagatcacaccagtacggaagatcaaagaaaatggacctcttcttccatatgcaactctgacttttatcctttttttgggtcttcccaaatacagtattcatgtgttgaacccgctgatatacctactcaccaatcaacgggatcggtgcaatatcatgctcttgacttccattaaaagcttttt

SEQ ID NO: 70404 - DNA, 222 bp, Glycine max
  unsure (1)..(222): unsure at all n locations
taccgaagctctgagcaaatntanacgaacatataccttttactcgatgtctgagngagacccgtaatatatcgagatgctagagatagaatgtgaagttctgacaaattagacgacaatatacttttacttcgatgtgcgatcgagtctcgtaatatattgagacgctcgaaatggaatatcgagctctgagcaaatgcacacaacaataacttattactc

SEQ ID NO: 70405 - DNA, 440 bp, Glycine max
  unsure (1)..(440): unsure at all n locations
tctacattcaatntcgagctnttcgatatattacgggactctctctgtctttcgagtaaanagatattggaggttgaattagctcagggcttcggtattccatttcgagcgtctcgatatattacgggactcaatcggacatcacgagtaaaaggtattggtgtttgaatttgctcaaagcttcgagattccatttcgagcatctcgatatattacgggactcaatcagacatccgagtaataagttatgtcggtgaattagtcgggctacggattccatttcgagcgtgtcgatgtattacgggactcaatcagacatccgagtaaaaaggtattgtcgttggaataagctcagaacttctacattcaattgttagctttttatatattacgggactcaatcatacatccgagtaaaagttattgtcgttgaattgctc

SEQ ID NO: 70406 - DNA, 148 bp, Glycine max
ctgcattcatcgctattatacttatcagcgtacaccagcgttaggcaccatactgcttaaaaataccccgcctgcatcatgaactgtgaattataacatctgcgactgaacctacaacggatgtacctgatcgcacggatacacctgc

SEQ ID NO: 70407 - DNA, 103 bp, Glycine max
gccggcgtcgacattctatgttgaaattatatcaattctgcttcatcgttatatacttatacgcgtacaccagcgttaaggacaatactgctaaaaaataccc

SEQ ID NO: 70408 - DNA, 389 bp, Glycine max
  unsure (1)..(389): unsure at all n locations
atcatatgcattaatcatgaacccgcctaaccataatttatcaactactcgttggntaagcaagggannattgtggctcaacaaanatcatttacgcgtacaacatacatcattgtcataattgacaacacataatgacatgcatgcgtattatcagtngagcgtgacaacacattggttgacttcagtacacattttgaaactagcagtcgctcgacaacacattggttgacttgactacacattaacgacaacacattggctgacttgacctacacattacgcgtgtctatttgntttgtagacaaaagtaacacagggtccgcacaacatctattatatgcagatangtactaatacacattatttgcttaatatctccactatca

SEQ ID NO: 70409 - DNA, 488 bp, Glycine max
  unsure (1)..(488): unsure at all n locations
ctggatacactaggaacataaaccctatcctggaatctcntttttcatcangctccactctaaaactaccttttctccctgcgactatggactctaactgggctgacaagaatgggtcagacttctgaccctcacggatctcgctcaagagttcactagtgactctcaacatacccaacttaatgttactagaggtgatctcacatgccaaactcatgtctctatactactctaagaggtctaactctctaaccatcaaagcatacatctgaagggatttcctactcaaggcattagctactacattggcgttacctgcgtgatagttaagctcaaaatcgtaatccttaagggactctaaccatctcccctgcctcatgttaaactctttttgatcaaacacatatcttaggctcttatgatcacacaacaccttataatatagatccatatatgtaatgcctccaaagctaagaacaaaaactata

SEQ ID NO: 70410 - DNA, 219 bp, Glycine max
catttgtgggacaagttatgaccattccgatttctcgagagctcccgctgatcaattgcgagcgtctcaataaattatgaccccgaatcggacatctgtgtgaaaacgtatgaccatgcgattttctcgagagctgtcgttgggaatttcgagcgtccttatgatttatgatccccaattgaacattcgagggaaaacttatgaccattcgaacgtctc

SEQ ID NO: 70411 - DNA, 397 bp, Glycine max
  unsure (1)..(397): unsure at all n locations
ttctctcttccctttatntctatctcttctgtattgctctatactaacactgtaatcttaatgcaattcgtntatgctaagttcgacgaggaatcctagaatgaagtctaaatataaatttatcccattctagcgacgaatcggtgtttggggtatctgctctcaacatagaacacagaaccaccttaatagagaaaacactaattcatcaagtgttagtagacgacccacgtttaatatttgttatctctactatanatagcaatttgtagtatttagaattaaaaattatctttgtatattntttgttcatacaatgctgctaatgacgacactttctgatgaacaactcctggatcatctcgatctatattttatacttgccatcatcactgtg

SEQ ID NO: 70412 - DNA, 411 bp, Glycine max
  unsure (1)..(411): unsure at all n locations
tgaaggcgtgtaaccaaccatcttttcatagtaaaacattgtttatgtgtctacgatcattgttatcatctccttctccatcattgngggcgctacttaagctaccaggtcccaccacctttgggcgtattctttgaaggattcatgctcattcttgcacatgttctgtagctacattctatccggagccatattagaattatacagatactgcctaatgaaggcaaccattatgtccttccaggaatggactctggaaggttccagattaatgtaccaagtgacggctgccccagtaagactttcttagaagaaatgcatcaataattattcatctttcgcatatcctcacgtcttcctgcagtacatcttcaggtgattcttgtggcaagtagtccccttgtatttatc

SEQ ID NO: 70413 - DNA, 377 bp, Glycine max
ctcactatgtgtaaaaccattttctccaaattgttaggatggtgtcagattgtagcaaaagattacatgtctttgttaaaataaacaaatgttcacaacaacctgatcagattttaagatcacctgctacatgaaggttagcttaagcctgtatcatacatctgtatcattcatgttgaggtgatcattccatgatgtacatacaaacttgcgtggatcaattaagaaggccactgtaaaacactggacatcctatctgatcatcaaagattcagattccacacctctacttgattgatgctcagctttttgggatggacatgaaaagttatgcaatgttcttaaaatgaaatcaaactatgcagtttaaaactgca

SEQ ID NO: 70414 - DNA, 474 bp, Glycine max
  unsure (1)..(474): unsure at all n locations
ntatagcanagaccactgctgctagttccaagtcatggatcttgattttaattncatgaggacgtaattgacgtgaagcatatgccactgctcttccctcttgcatcaacacacaccccaacccttgcccgcttgcatcgcaatacacttcaaacggtctcttagggtcgggtaaaattaacactggagctgtcgtcaacagcctcttcaactcttggaaactttgctcacacttctcattccagacaaacttctcattcttacgagtcaacttggttaggggcaatgccaatttggaaaatccctcaatgaatntcctatagtagccagccaaccccaagaagcttcgaacctccgttggagttgtcggttgtttccactccataaccgactccaccttgttcggatccaccgcaaccccgtccttataaatcacgtgccccaagaactgtactttctccaaccaaaagtcac

SEQ ID NO: 70415 - DNA, 364 bp, Glycine max
  unsure (1)..(364): unsure at all n locations
aaattattatttttttttgttttgaattttatcctctatgcgagccacttataaccatattgccacaacttttttttttatncaacatatgctaaaacaactcccacacttacactgacacaacatctataccaacaaggggctaatccatatacttctaaccaaagaatctacgaacagtcaaatatgcaatgaataatccaatctatctaatcatacggatgctaatctgatggcacttaccctcaacaatttcacaaaactattttacaaccacacctataactatcacacttaagctccctttcaatttgatcaacctcttattcagtcattccaaagctggaacccaacttatcaccaa

SEQ ID NO: 70416 - DNA, 442 bp, Glycine max
  unsure (1)..(442): unsure at all n locations
ctaagcttaggagnaccatnaaactaaggtagttcctaaacagatatcatgtttgtagcgtcaccaagtattccctatgaantaccatctttcataccgtgtcctagtagggataaagcttaacggaaaattagggaactcagataaactaaatccttaattgaaggagtaagtgacaaccatagtgaattactaaacaagattggtaggttactaaaggacattccataaactccccaaacttcggaaaacacttccacgatggtaacaagaagtacctcaaaaataattaatgttattaatgaagattgtgaccaaaactcaaaccatgcaactgatataggatcagtatcagaaaagaatatatatccaattaattccaaccactgaaaacaccctccaaaaaatattaatcatcgtcccactgctgctgatcttttat

SEQ ID NO: 70417 - DNA, 460 bp, Glycine max
  unsure (1)..(460): unsure at all n locations
gcttccgattagtgtaccaaatgatcgcagctctagccaagctatctttgttaaagtgcattaacaacttttcatccctagaatgtgcccccatcttgcgacaatacatcttgcgatggttcttaggacaagttgtccctttgtacttgtcgaaatcaggtaccttgaattatggggtgatgacgacatccggtaccaagcaaagatctgccatgtccacgaacggatagtcgccaaagccttcaacagctctcaatctctcctcgatgagatcgagtttccttctttcttccgccgtcggnggtggtccctttgtggacaagaatattggttgtgctgtggggttgtgctgaggcaatacaatgggtgtcggcccctcgacggggaccgagggttagaaatcgacatcccctanggcatactctcgatgatcctagtgaacctcgtcggcctgtcgatg

SEQ ID NO: 70418 - DNA, 482 bp, Glycine max
  unsure (1)..(482): unsure at all n locations
ctaagctccagagagaggaaagggaccaatcacgagtagactgtttgatcntgttgatgagtngaagggtngcctaaggtccaagagaagcttgtctcagcgtttatgcgagacagagaccaacatgttagccatcgtcagcaagtaccaagaagaattaaatctagccacggctcatgagcacaaagtggcggacgagtaagcccgagtgtacactgaaaaggaggctagaggaagggtgatcgactcgttacatcaagaggcaacaatctggatggaccgatttgctcttactttgaacgggagtcaagaactatcctaattgctagccaaggccaaagcaatggtggacacctactccgcccccgaggagatccatggacttctcagctattgtcagcatatgatagaactaatggcccatataattagaaaccactaggaagtttgtattgcactcagatcttgctagttataacttt

SEQ ID NO: 70419 - DNA, 447 bp, Glycine max
  unsure (1)..(447): unsure at all n locations
tctaagcttagccattacagctttgggatttgtgcattggaaaatgtgtttacttcatgattcatgctntgnncttaggctattacctcaatggtctagtatttcgattggtctagaatggacataattctgagccgttagattaatctcattccataagtcatatttacatcctctacaccagaatatgactcccacaaacctctccctagcaacacatttcgccaaccactgtagagcgcttcatttcataaacttcaatcctgggcacaccaaatacttgccctcactcaccctccctttctctccaccatgtccgatggacaatccatcgctttctgcaaccccaccaccactgttgccgttctgtcaccacctaccacctctgatgactctgttaatgtctcttaatcttttctcactatttgaggtttaaatgtacatttt

SEQ ID NO: 70420 - DNA, 468 bp, Glycine max
  unsure (1)..(468): unsure at all n locations
ncatgcttaagtatgtatggcaaaacttcattactggagatttatacattctatagagcttgtaacaaatcttctagatttggagtgatcacatgcagtcctcatgaacccttaccacccactttgtcttcatgcccagactcatgaaggcctacaggttttgccttctcatcgtattatgaacaaaatttaatggcttcttctgctatgtacctctcaacaaaagatgcttctggatgatatagattcttgtataccctcgtaagatcttcattaatcggtcaaccgggtacattcaccgcaaataaacatagaccacaacattttgatttctcttaccatatgcacaatcaagtgattcatgatgtccaataaagcagggggaaatacattctcaactgtcacaatatatttgcagcctcatttatagctcatcaaacgtgatatgaacaacgattttgcttcata

SEQ ID NO: 70421 - DNA, 349 bp, Glycine max
  unsure (1)..(349): unsure at all n locations
ataaaacagncccacaatcccaattntgtcaaatcacattcctatgtcattggtgcatntcaccgagcacttggtgggcgcattgttagacatataatgcaagagaactggngcaatatggcatgccccattgcttcanaatcaacataggcctatggccatctcacacaaacccttatctcaacaaaacaagcatggattcagatgtgaattgcttcacgaattttgcaaatatgagcaactaacgcaccataacacatcaatggagagccanataaccaaggggaaattgcatttacttgtggtgagtgaataaagcgtaaaagggaacanaaactcaacatggaac

SEQ ID NO: 70422 - DNA, 409 bp, Glycine max
aatggtatatttttccaaaaaaccgatgttaatgttaacatcggtttctataaaaaaccgatgttaacgtaccttaacatcagtttttccaaaaaaccgatgttaatatccaaaacgttaacatcggttttttccaaaaaatcgatgttagcatacgttaacatcggtgttttaaaaactgatgttgtgttcacgaattatttttatatattgactctgttgttacaaaaaaccaaaatgtaacctgtgaagttataatcagaccacacagcacacaacatatatcatctgcattttgctttcaagtagggtttagcagaaaactagctcgtagactatttattgagaaaaatcacttgataactatggataactatcaacaaagggtaatccatgttaaaatgaaaca

SEQ ID NO: 70423 - DNA, 241 bp, Glycine max
  unsure (1)..(241): unsure at all n locations
atagtcgatgaatcttaaggctggcacaacatatggaaacttataatccactaactgatgactcttgaacatgatgtctttaatcaaaagtgttcaattcatttagatatcagaatttagaccatacacannattgtagaatcatcgtagttacttgttgcatggtactagaccttggtgtgagaatataggttatcaagtacacgggcattntctcttagcttgtaaaccacctacacct

SEQ ID NO: 70424 - DNA, 481 bp, Glycine max
  unsure (1)..(481): unsure at all n locations
nggagaagagctngaagaagttntgtcttttacatgcctatctctcttgactggcattngtattgcttgttatattgaatgttgcatcttagtctttaacatatcattagtgcgtcatgcatcatcatgagtgagaagaaaatttctaaagttagaaaatttcttctgaaggcaaaactctctattttaattgattacaaccttattgtaattgattacacaagttgtttaagcttgcaaagatatgtctcgtattagtttgattgattacaagcttatcataatcgattacatagttatttttgagacaatgactgatttattcaggagtctctgccttaatcaattaccatgtgatataatcgattacttctctttctataagtgtttcagaagtaaacaagaacactttaatcgattactttgagtatctaatcaattatatggttcttgagctgtttctagtttcttggaagaacac

SEQ ID NO: 70425 - DNA, 271 bp, Glycine max
attgacatcactagacactgaaaactggcaatgaaaggtaataaaggaaaccctgctgtactgcatcctttcagctatattccccaaaccaaaatgtttactcatcaacacaaacttctcttcccccaccagttatcacaatgccttcataatcaccacaagctgttatcgacttcaatgataagacacctttactcaaccaataaaacccacctaaatgatttgcacgaaagctgtagatcaccaaattcgggtatagctactgctcata

SEQ ID NO: 70426 - DNA, 358 bp, Glycine max
  unsure (1)..(358): unsure at all n locations
atgaacttatgagtgtagagaaagagaaagttgtagtggagaccctaccactgtaagaggcaacttactttgctatggtatgtttgctcctatgtagagtgaactttctcaaggataaatgttactggtaaacaataacttaattctatanatatgataagatcgtnagcattaaaaacatttgctttttatggtagcagtcctcattagtatgcacttatgaactattgctacanagggtttcttaaagatattttggtgtggatgaaactnntgatatnntttatatattnttattaacgttttttgttgaaatgatattatgtgtggatgctnntttacaataataataacttct

SEQ ID NO: 70427 - DNA, 451 bp, Glycine max
  unsure (1)..(451): unsure at all n locations
cctttaaactcagcttcctttattgcgtacgttataaccgagctcgatgtgtggttctatcctttgatggtactcggcgggaagtgatgggggaaatcgacattcccattcagatatgcccccacacttgcgatgtgggatttcaagtaatggatatatatcccgcctataactgcctcttgagaataccttggattcatgccctgngagtggtcccttctacgattcaccacaaattgaagtttgcagtgggcggactcttagtgatagtgttagtgaagaggatatgttagtgagctgcccctcctccgcaccgtacgtagatgcggcgggagaatcattggaaacagctttcccatcctttgaggtggtgagctgcgcctctgtggaaccatgtctgtcgctaccttctctctccatagcggncataatggtggcgctagttatgctc

SEQ ID NO: 70428 - DNA, 397 bp, Glycine max
cctcacgaggggcgtctacttctttccatcttcgagggtttatctacaaccaattatgactcttttcctataatcaacatatacaggatccacaagagaactctctggcaccactgcaacgttatcgttgccaaagatggtccacaagtaaagcacaataaatgctgttaaagctccacatcccgtaccaaatatcattgcggcatgaacactcaaacagcaatcactccttcgtttagccactggactttcagtgtttttacaaagacacttggatccagatgctctgaatgcttgaatgtggaaagattctcagaacaaagctccataaatagagaacgcatgcttgagaatcatattcccctttacagaactaaaccccacacacatttcattc

SEQ ID NO: 70429 - DNA, 84 bp, Glycine max
tcatggttagcttcatttcgttttgctttggtatagctgctctttgttcccttgttacgagttgccatatagggaattggaaaa

SEQ ID NO: 70430 - DNA, 418 bp, Glycine max
tataaatctcagcttgcaattggtcttgcaggaaagatattttgggctcgttaagaagcaaatttgatcatcctactatgacgactgagaaaactggggcaaataaagagggtgaagatgagggagaaacccatgctgtgactgccattcctgtacggtcaaatttcccaccaacccaacaatatctttactcagccaataacaaactttctccttacccaccacccatttatccacaaaagccatccctaaatctaccacaaagtctgtctaccgcactttcaatgacgaacaccacctttagcacaaaccaataacaccaaccaagaagtgaattttgcagcgagaaagcctgttaaatcacctcaattccaattgtctatgctgacttgctcccatatctacttgattattcatt

SEQ ID NO: 70431 - DNA, 453 bp, Glycine max
  unsure (1)..(453): unsure at all n locations
ctaagctggttgtgcttgtcgcttatgcttttatgctgagcagagctttgcagtatatccaggctgaaaaatggaagaatcaaaaattaattattaagccgntattagtttactaacttagtgttttcagaaaggaagagtgaaaaattcattaccacacacgcatggacatcattacaaccacacaagagncttccattgagagtgtccacagcttgaaacgaacctcctccttcactcctctgcagaatattccccaaattatgatatcagcattaaagagtccaatgtttaagcttcacaacaaaagttggaaggaaaaaaagaaaaaaatatggccaattaagttgtaccttgtaataatcaacagcaacaaaattagcccacctgttgccgcagcaccgtgacagggttgtagcatttcaatgagacctncagagttatcttcacatg

SEQ ID NO: 70432 - DNA, 127 bp, Glycine max
atatcatactaaaactatctctgctgttaacaacaacttatactgcattatggcatgattgctcattcatagtagtctttaatttctgaaacctgcttctcagtaccttgtgatacaatagataact

SEQ ID NO: 70433 - DNA, 489 bp, Glycine max
  unsure (1)..(489): unsure at all n locations
gaccttatctaagctatgagagataagttgaatcagtagtttgatgttactattatcccaaaagaatgaattcatgattgagtcaacaaagttcaagatcaagattaatttcaagattcaagaaaagacatcaagaagaatcaagattcaagagaagaaataaaaaagcaacaagtcaagacttcacaagggaagtattgaaaaggatttttcaaaaaccaaacatagcacagttttgttttacaaaaagagttttctcatatttttctaagttaccagagtatttactctctggtaatcgattaccggtttcctataattgattaccagtgatagaattngatttcaaaaagtttttaactgaatntgcaacgttctaaatgagttttaatgggataatcaattacaatatattggtaatcgattaccagtgtatctaaacgttgaaatttataattaattgtgatgagtcacatcttttcataaaat

SEQ ID NO: 70434 - DNA, 472 bp, Glycine max
  unsure (1)..(472): unsure at all n locations
tctctcctattttcctataaatagggggagaagtgagggatcattgttcatccctcctggtaattcgagatcacttgaaattagtgaaaaaaatcgtttccgtgaagaaaatccaagccgaggcgcttccgtaacgttttcgtaatgtttccgtgggtgatttcgcgaagattttcgaccgttcttcgatgttcttcggtcttcaactggtaagttcccaaaatcaaacttttcaattcattctatgtacccttagtggtcctcatttgttttcacgtgcctttattttcatttcatttactttccgtaccccctcttgacgtgctttagtcatttgcttaagttattttctcacctaatcaaaaaataaaataaatntccaccgatcatttgaattgaacatcccgtaatttctgttataatgaaatacgaccgttcggtcatgccgtaaccacgttggaaaccaaaaaga

SEQ ID NO: 70435 - DNA, 304 bp, Glycine max
tgtgactgccattcctatacggacaagtttcccaccaacccaacaatgtcattactcagccaataacataccttctcttacccaccgccagttatcacaaggccatcctaatcaaccacaacctgtcaccgcacttcatgacgaagccacctttagcacaaccaaaaacaccacaaaaggaatttgcagcaaagctgaagtgtacccacattcgtggctatgtaactgaccatatcatcataatcatggagcatacccaccagggtctacctcatttttgagatacactcaccactgtgtatat

SEQ ID NO: 70436 - DNA, 482 bp, Glycine max
tcacatggagctacatcaatcttctcatagaagaacacatgtattgtgtctactatcattattatcatctctctctccatcattgagggcactacttgagctattatatccctccacctttgggtgtattctgtgaaagatctatgctccctcttacacatgatttgtagttgcattctatccggagccatatcaaaattgtactgatactgtctaatgaaggcaaccattatgtccttccaagaatagactctggaagggtccagattagtataccaagtgacgggtgccccaataagactctcctggaagaaatgcatcaacaagttttcatctgtcacatatgcccccaatttcctgcagtacatctttaggtgattcttgcggcaagtagtcccgctgtactttgtcaaatctgacaccctgaactgtggaggaataaccacattgagcactatccattactatctctgcttcaatgg

SEQ ID NO: 70437 - DNA, 346 bp, Glycine max
  unsure (1)..(346): unsure at all n locations
gatcttaagcagctgcgctcactgaaaggcaactgtctgcaggttggttgttctgtaaaggagccccattttcataacaatcaaatatattgaattatcaactgctctgcccttgggcctcaggtcatttttggctgtgagctagtcagatcattcttatttaatcacccaatgttccagatatgtcttgtatcattgggcatcatncagtcatttgngcgtacgaaaattcacagcgttacccttggggtatcacattctattccaaaactagtatgacagcgaattttctataagaaaagtggaagcactctttcaaagtgtagtgctagcttactgagtttaa

SEQ ID NO: 70438 - DNA, 467 bp, Glycine max
  unsure (1)..(467): unsure at all n locations
gataacctcaattaagcattcgattcagttacgtttttnagagactcacgaaagtgcatgtcaatatctggaattatctatgaggtgcacaagctcacaaaacattaatgttaaagacaaataattaactcaaacgttatattaatgtgagaaaattacatctaatatgagtcaatcctttcttctcctagcttagaaagaaactagacacttatgaaatacaagaagagagaagataatatgatttttcactaaagggtggtgtgtagaggtgttctcctacgtattttgctgctgactatgcctttctatttataaaatcatagatgtggtttatagaggcatatgatcttcttatttacaaaataatataatctatactaggatattatctctttagctaatataatatggtttaattgtggaattatctgccaagttatttcgttattaatttcaagctacat

SEQ ID NO: 70439 - DNA, 189 bp, Glycine max
cgagctcactaaataatttgcacacacttttacttaaatatgggtgcatcacctacttataacgatcatacctattttttaatgcaggttaacctcaattcaaaatctagttacaaattgaatcctagcaaacatgtaacttaatatagcttacagtcggcctaaaaatctatactggacatggctgac

SEQ ID NO: 70440 - DNA, 310 bp, Glycine max
  unsure (1)..(310): unsure at all n locations
agaacatgctacacttattaatacacaatacttagagagccagataaaagcacagtgatccttttgtgcanaatactacaggagacanagcacggtcagcctcttaatggcagtatacatactttcaagagaggagtcaccatccatgatatgtgagaggccattggatttaaaggagtatgagttggtgctgagctcgtttctgaattccaatnggctttcttcaatccactcctcttaggtgccctctcanagaatgtcaatgtattgaaaattgactcacatacaggctcatctgagcacaacttga

SEQ ID NO: 70441 - DNA, 405 bp, Glycine max
tattcaaaatatgaacatttttgtcttgtacaagaaattctcggatctgccactatgttgtccactaaattgtccaatagactccaatatatataaatctcatcaaaatttttgttccatcaaatgtgtgaaaaatatataaatcccatcagaatttttgttccatcaaatttgtgaaaaatacaagtgtttctttacacaaaattacaaaaatattcgtatttgttatatatattcacctttcatatatccaaacaagagagacgaaaattttatctttctttcctttcactcttttttctaaaccaaacacgatagacaacactatgatgtgaccaaacacatcatataagtcacactagtatgagatagggatgtagtataagttttatataaaaataaatt

SEQ ID NO: 70442 - DNA, 302 bp, Glycine max
gctcgtctaacgttactagctggaggcgtgtgacctcatgtgacaggagtaaacctggctctggccattataaccatcacattcttaagtgcctcaacccctaaacagacatttcttgtcaagtaacgtgcatttttgcataaaacagatcaaacgctgaattttgattatatatgcacatgttcagaataacctgacgtacatgcaccacacgcccgagagtatacatgaaggaacgaccctaaaaaaaggatattttccatcctcttattattcataccacaaatctgtgggaagaaaaa

SEQ ID NO: 70443 - DNA, 315 bp, Glycine max
cattcttctcgcatgaggaccacttggctgcaaccctcacttgggctttcttgaagatcggcgcctttgccatgcttgagtgatctatcaacctataaatgactgatatgctaagaagaccttagtctcaaaaggctcagaagtcagtataccaggaactgccctagattctgggaaagttagagtttatcttggatgccccatttgcatcttttatgtctgggcaggtccttgctgcaagccccctgctggagactgtgtctagacattctttctaagtacttctttatgctgactctaagacacttcatctct

SEQ ID NO: 70444 - DNA, 469 bp, Glycine max
tcttggacgctgcattgtaaaagaagaatattatttatttatgaatgcatgcccatcaaaagctggtgctactttgttttcgggtggagcctatacaatatattctaaacttctttgggaatgcttttatttcgtacctttagtttatgaaagtacgaagtctatattttactagatgaaaccaaagggaagctgctagctgctagattagtgatagcgtttctacattattcgtggtattgctagaggacttttgtatcttcatcaagattctagattaagaattattcatagagatctataaactagcaatattttactggatgaaatatttagaccccacaatatctgatttggcttggctcaatcatgtattggggatcaatttgaagcaagacagatagggtggttgaacattataagtatgtttctttgatattgcgtctccaattatttaacaattgaaatt

SEQ ID NO: 70445 - DNA, 457 bp, Glycine max
  unsure (1)..(457): unsure at all n locations
ntagaatctttttcatatacaagcagagcatagatcttgtttgntctaatgactaggtcaagaaaaccaagataaagatggaaatgaacagtgccaacatacccaatatcatcatgatctggcccattgctctagccttcttcatgaccattgccacttttttctgatatcataaattatgagacgcacttcaactttcactactntctttgctatgctcacctaataatgtattacaatcattcacaagcatcatacaaataaaaaaaacagagagagaagggaatctaatatgtgttggcaataaaaaaatgttgataaacaactatacattaggttgagagtaaatttgattgtattctcctaactcttactcaagttctgtcgtgtatagatacctgggtatgcacaaaataatctaaggtttcatcattgtcatatgatccatagatcttac

SEQ ID NO: 70446 - DNA, 475 bp, Glycine max
  unsure (1)..(475): unsure at all n locations
tcaagagtcttttatttcttagccttcattgagagtacattctttctttcaactatngnttctagtctttcacattctactattaatactaattatgatgtgtcaaaacattatggctctagctctttgtggcatgctagattaagtcatcctaatgctcatgtattaagacttgtattgaatcattttaagataactccatctaataagattctagatttttgttcatgctcatagacttccctcctttgtctaaaattttttactctacacctttggagttagtcattagtaacctttggggtcctttacatgttcctttatgaatggatatttgtattatgtttcatttgttgatgttttttcttgaattacttggatctatcctttaaacttaaatctaaaacttttattgtgttcaaaattttaatttcttgtcgttgacttcaatttatactaagattagagttttaaa

SEQ ID NO: 70447 - DNA, 225 bp, Glycine max
gttaaaagtgctataagataaatttctacattatcttacttttcccttgcactcatacaactgatgaagaaaagtccctgtgatgtaaataggtccaagctaacacttttgctcaaaccatatcacccataacatacaccataacattagcattaaacataccatctacccataacattacttaacattcaattcagatacaatagcgtgtataatctgggtgaa

SEQ ID NO: 70448 - DNA, 471 bp, Glycine max
  unsure (1)..(471): unsure at all n locations
gctcgcccaggcgagcaaggttgcttcctccatagctacagccttctggaggaatcttctggagggcccaagtgggcctggttgctatttgcacccctatttttactaaatacacccccgtgcctttttntttggtgattctttttccgtaacgttacgaaactttacgactttcgtaacgatacttattttccttccgcaaggttacgaatccttacggattatgtatttactctgttttagctntcgaagaagttacggaaacccacggatcgagcacattacggattatgtcacaaaaacacctcttttcgactttcgccacattacggaatttcacggatcgagcaagcctgcttccttttgatntctgagacgtctcgggacttcatttactgtgcaacaaaggacgccaagtatctcaaagcggctaaccaaaggttgcatgtcatcaagtaataatccccggac

SEQ ID NO: 70449 - DNA, 488 bp, Glycine max
  unsure (1)..(488): unsure at all n locations
tactaagcctttatccaagctcatcttggtggtgaagctccttcttctttgtcttattccctagtggatggcgcctcctctcacctcttctcctttgtcttccgctgcatctccatagtggaaaatcaccattaaaggacctcattgaagctcatagatccagcctccatagaagctccacaagcaatcttccatcaggactcaacttgcggggcccatggctaagtatgatctagaaatagtcatggagttctatgctaatgcatggcccatagaggaaggagtgagggataagcgctcctgtgtccggngccaatgggtcccctttgatgaagatgccattaatcaatttttggggcatctgttggtcatggaagaggggcaacattgcgagttcagtcagaggaggagccaagcctcgggatttgatgaatagtccatatgccaactgttgtgcattccatgacaggacttctcacgaagtgtga

SEQ ID NO: 70450 - DNA, 249 bp, Glycine max
ggctcttgtgacacatacaacttgccttcatcagcacctggacaattgaacaaactgaagctatgctgcaatattacataacctcctacctcacagcaataacccggagagcatttgaccttccacatgaacatcctgatggagatcacctaactttatgggcagccttaaacacacagcagctggtcttcttcaaagctggagccaacagacataatgctcaccatcacacagacaacccaaacagca

SEQ ID NO: 70451 - DNA, 291 bp, Glycine max
gtccaagcacgcctcactctcaaggtgttcattctgtgtttgtttgtttggccagagtgagtgaataaatggagttgagtgaataattgaattcgagtgaagtaaatgagtgagtgaatgagtaagtgaataagtgagtgaatgagtctgagtgaagtaatgagtgaatgagtagtatggagggaatgaatgataaattaattgattgtttgatgattaaattgatgatctttgaagatatggctgtgtgtgattaatatatgaagtgtatgtggtgagattattatttta

SEQ ID NO: 70452 - DNA, 474 bp, Glycine max
  unsure (1)..(474): unsure at all n locations
tccttgagaagcaaggaaggtagcttccttgggaatctttatattatagcttccttgagaagctagaggggggctactcacacccctccaatagctaagctcacccacatgccaaaaatacaatgggaagctttcttgagaagcaaggaaggtagcttcgttgggaagcaaggaagaaagctctcttgagaagctagataagggctactcacacccctctaatagctaatctcaccccatgccaaaatacatgacaatatatataaaaaaagtccctactacaaagactactcataatgccctaaaatacaaggctaataccctatactactatggcacccttaacttgtaaggtaggatgtccttaatttgtaaggtaccctgcatacctaatatttacaaaggagagtggactcaaccttggcccatgggctcaganatctaccttgaggttcatgagaacactaagacctt

SEQ ID NO: 70453 - DNA, 472 bp, Glycine max
  unsure (1)..(472): unsure at all n locations
cagctaagctccttaactgccaaggctctaatatnnctgattatccttgtggaaccttcacccgacgaagacactgacaaaaacttatctattccttcttggacaaagtatggcaggctgtgggcaagtataatttcttcccatcagaccttggatgcaactgtgatcggatacccatatcagctagatcttgacgggtattcaagccatccttcgtcttgccttgaatgttaaggagcgtcccaatcacactgtcacaaacatttttctccacatggataacatcaatacaatgtctaacgtcaagatcacactatgttggaagatcaacgaaaatggacctcttcttccatatgcaactctgacttttatccttcttttgggtctctccaaatatagtattcaggtgtggaacccgctgatatacctgctcaccagtcaacggtatcggcgcaatatcatgctcttgact

SEQ ID NO: 70454 - DNA, 420 bp, Glycine max
  unsure (1)..(420): unsure at all n locations
acatatagggacgtnccataatgactgtatcctcttgttcttcctccagatccatgaccacaaaatcagctggaaagaccttcactcttatcagaacatcctcaattaccccgtaaggtcttgtgatggatcggtcaacaagctgtaaagtcattctcgtgggcatgatttccaactctcacaaccctctacacatggagagcggcattatgttgctactgggtcccaaatcaatgagagtctttctgatgtgccatcattttcttctatttcttaaaccctttttgcaccattttaattactgattagtcttaattggcaaattaattaggcacgtttattatttgggcacattgagctaatttgatagttttaatctaatttcatgaattaatgaaacatcgtgcttaatctggattt

SEQ ID NO: 70455 - DNA, 156 bp, Glycine max
  unsure (1)..(156): unsure at all n locations
gatggggagatctcgcagcccaagtcgtaccgcccatgacggagagggagatgatcacanttatggtagatacgttacccacgttctactattgaaagctgataggctacatgccagctaacattgctgatctcgtcttcaccggagaaaagattg

SEQ ID NO: 70456 - DNA, 454 bp, Glycine max
tgagatgaggaagtgttgaagggtgaaacttcctgtcttatcgttgaccacagagtggtacctggagatatgtcgcgggggtcatgagaccttggggacgtcaggtggggtgctattgcccaaaaccaagcttgaccaatcccgacccaacccgggcatagtcggtcagtgagaacctgtgatgtacctaatcaggcgagctcctggcagtcaacagataaaatgaaaacaagaccacaaagtaaggaggcttgtggtggctggccagctgtgaatattgtgtaatatgtggatggtggactctggtaatcgaatactaagggtgggtaatcgactacaaggcttaaaaatgaagacaggaggctaagatggtctctggtaatcgattaccacggggtgtaatcgagtaccaggcttgtaaacgaagtcatgaaacttatggagcctctggtat

SEQ ID NO: 70457 - DNA, 361 bp, Glycine max
  unsure (1)..(361): unsure at all n locations
ttattcacgtttcattacttttatannnccttttgcggcttaaccatttattaagcatttctcgcttaccctaaaataaaataaatttccaccgatcatttgaattggattatcctttaacttcngttaaatgaattccgactggtcggtcgtgccgtaaccacgttgggatatcaaaaagaggtannatataatattataataaaaaaatgtcttttagtaaatatagcggaaaataatcgaacgtttctcttgggattctcatcttatcgaatgactatactaagtgaactaggctaaatcactacctagcaactcgtcataaaatagtttttgaagttgcattcatttttactagaaa

SEQ ID NO: 70458 - DNA, 449 bp, Glycine max
ttctcactgagttttgtaatagaactaccttagttattcgtgcttcttcaaaactagaaatattcatggaggtaatttgcctgttccataagctctaatatctctagaggttacttccttattgacatcctttgtctagaatggaattgccatgataagtttattgttactgtctttgacatttggtagttgatattgtgttgcgggaggtaattccgattggatttactcaccatcttttattggccagtttgttatgacatttgttgatggattacctatgatgtcttgcttcatgggtaatctatatcctttctgatggtataagcatggaaccaatcaaagacaaggacattaattgtgactctttcacaaattcaagaacttggctggatctatttctgttagacccttgtatgctggataaccatatcttgaactcattctcg

SEQ ID NO: 70459 - DNA, 209 bp, Glycine max
gcacgcgctgcactttcagtattgtggactctctctgtttttatgtgctccaccttctgcttctcttctgggaatcctaagctataactcaatccctctaaccccacactctactattaaggcaacatctggtaatgaagtgaatgaaaattggatgagaatattgttcttgctctacacattttaattattgcacatcaacttaatat

SEQ ID NO: 70460 - DNA, 76 bp, Glycine max
gacccggggcaaaaaggacaaccagacgggcggggggggaagaagaccgaaggggggcccggaacaaaaaggggga

SEQ ID NO: 70461 - DNA, 92 bp, Glycine max
acttgaattgagttatttcaaagacaagtaaaaaccacactacttattatgctagtgccacaaatgaaggaaattgatttttcaatttactg

SEQ ID NO: 70462 - DNA, 416 bp, Glycine max
tactaagctgggggatttgtgaagtgatttgccgggatgtgatataatttgtctaccaaattgatttttatgggtgattgtgtttttacatggagttctaagaagcaaggcattgtgacactttctacttgggaagccgagtatgtagctgcaatttcttgcacatgtcatgccatttggctaagaagattgttggaggaacttcagttgttgcaaaaggaaagcacaaagatctatgttgataatagatctgcacaagagcttgtcaagaatccggtgttccatgaacgaagtaagcatatagatacaaggtatcatttcattagagagtgcattaccaagaaagaagtagaattgactcatgtgaaaactcaagatcaagttgcagaatattttaccaagcctctcaaatttaa

SEQ ID NO: 70463 - DNA, 149 bp, Glycine max
cagtctggcgtttcaatattacatatgtctcaactatccacaactgtgattctgggctaagtatttctcctcgggacactgcaatctatttcatgtggaacaagtgggtaatgtgtactacttgtgtcaattgatttttcgagtttggt

SEQ ID NO: 70464 - DNA, 463 bp, Glycine max
  unsure (1)..(463): unsure at all n locations
ctaagctgaaacgtcacnctaaatatacactcgcgaggcagatctccttcttctttcattgccaatggctcaactccactccaccgacaaaaaatacctccacttgggtattatatattataacacccctaagttataggaaccttggctctcagcctttaacattaatatatttgcctcaatggcaaccttaaatcagtgtgttgaagttgtatttatcttgcatctggatagcatgagtattgcttttctcatatgatcgatgtatgatgattctgatatcaagataacgagtatggctattgctgatatatgtttaagtcctactactgcacatggtctgtgtgtatataatttaaaactagcgatattgttcattatattatcttgctcagcttcgttgctatggaagactcggagtgagttgctacactgatagagtctactacttctaataaacaac

SEQ ID NO: 70465 - DNA, 209 bp, Glycine max
cggctcactgaagaggaagggactcgctactacttatgccgaaagccgggagaactggaccgggggtgcaacactgactccacccgctacgcggaatgagcctacgcattgatccatacacaaccacagagtggggtgcctgatatttgaatgctgacatcaggggatatcagtaaagaacgagtaatgcttgatcataccagggatca

SEQ ID NO: 70466 - DNA, 480 bp, Glycine max
  unsure (1)..(480): unsure at all n locations
tctaagcttcttagagatggatcttgagcttactaaagtccttattggctcnttcagccatggagttgcagcggaagataaaggagaagaagagagaggaggcgccatctactatggaataagccatggaaggagaaacttctccaccaagagagtgccttggataaaaagcttatagaggaagcttcaatggaggaagagaatgagggagagagagagagagaaagtggcatggaaaattgaaggaagaaaaagagagaagttgaactttgaagtgtgtctcacaaaactcttattcaacatagttctgacaagtgttacacatgtttctatttatagcctaggtcactacttgtgaatttcacttccatttcatgtgaatctaagagaaatattctaaggatatgccaaaggcatcttatcatattccaagagtatgctaaaggcatattatcatattcccttatatgccactagaat

SEQ ID NO: 70467 - DNA, 323 bp, Glycine max
  unsure (1)..(323): unsure at all n locations
cgtcatcgtctgccccttcttattcttgtcgacagcctgttgaacccggagattacgtcatctccgcgctacaagatctgcatactgacattgagtcacgttgactggcggaaatacccgagtggttatccgtataaaccattctttttgcttgttgtaagacgaatagcctgatagcacgcacagactatcatcgtcttctacgcccttcgtcaatcgcggtcgagaagcccgtngacacgcggagatntaacgcatcttccgcgctcataagatctgtcatanctgacattgagtcacgctgacgggcggaaatacccgag

SEQ ID NO: 70468 - DNA, 324 bp, Glycine max
  unsure (1)..(324): unsure at all n locations
atacggataaccactctggtatttccgcccgncattttgatacatttgtgagtatgacagancatgtgagcgcggaagatgacgtaaatctccgcgtgtcaacgggcttgtcggccacggttgacgataggcgcacaagactacgttagtctctgcgtgctgtcaagcttttcgtcttacagacagcataaaagaatgtttatacggataaccacttgggtatttccgctcgtcagcgtgactcatatgtgagtatgacagatcttgtgagcgcggaatatgacgtaaatctccgcgtgtcatcaggcttgtcgactcgattga

SEQ ID NO: 70469 - DNA, 478 bp, Glycine max
  unsure (1)..(478): unsure at all n locations
tataaaactcagctaggtatttgaattnttatgatatgtactngttataattatttatttntaaatattatgaactatattttgttcttgttacacgaaattcttggatctgccactatgttgtccactaaattgtccaatagactccaatatatataaatctcatcagaatttttgttccatcaaatttgtgaaaaatatataaatctcatcagaatttttgttccatcacatctgtgaaaaatacaagtttttctttacacaaaattacaaaaatattcttatttgttatatatattcacctttcatatatccaaacaagagagacgaaaattttatctttctctcctttcactgttttatctaaaccaaacacgatagacaacactaggatgtaaccaaacacatcatataagtcacactagtatgaaataggtatgtagtataggtgttatataaaaataaattgaagttaact

SEQ ID NO: 70470 - DNA, 184 bp, Glycine max
  unsure (1)..(184): unsure at all n locations
gcctcgttctctccccctttggaaacatcanattattatagtacatgtgaagcaacataaggcagaaatagatatctatataactgaagttcacatatcattcataagtcaaatcatatataatttagtcataaaatactaagtgccaaatactgaaatataacttaagttcagagaataatga

SEQ ID NO: 70471 - DNA, 474 bp, Glycine max
  unsure (1)..(474): unsure at all n locations
ggtcgggttcagtttcaattcattgctaggggcatcctatctttctgttcgataaggctcaagtcattaaatactatgcatcttttaaagcacatagtgaggatcgatacctcaaccctacgttcttntaaaagactacgatgagaaaatttacagaggacaagaatccctgtgggaaaccacagaaaataaaacatgcagcgacttccttaattgccccagatcttaagtgtagtatcgctagacagcgtcagagttcacaggcgagggtagttcctcgtcatccatgttggcaagcacaagggcccttccggagaaagccctctttacgacgaaaggcccttcgtagttcggtgcccactttcccctattgtctctcaaggcttgggagactntcttcagcaccaagtccccttcgctgaacctgagcgagcataccttcttgtaaagatgttcttcactcgtctctgatat

SEQ ID NO: 70472 - DNA, 375 bp, Glycine max
agaatcatacatggctgcttctaatgattagcatttgcttcaagaataattcaagagtgcttcaacaaacaaagccttgtttcaagattcactaaagaccaagccttgcctttaaacaaagtgctatctagacatgcaaagctctggtaatcgattaccaggaagtgtaatcgattaccacaagacagggttgagaaatagttgttgaaaaaggtgttgaatatgaattttcaacatgtaatcgattaccatatgtatgtaatcgattaccagcaacgagactcctgatattctaattcataagtcatgaccctccatattataatcgtgtatcgattacacaatcttgtgatctattaccagtgaagagttttc

SEQ ID NO: 70473 - DNA, 452 bp, Glycine max
  unsure (1)..(452): unsure at all n locations
actagctgccacagtacaattatttttaaattgatttttcttctaactaacttccactaatatatagagtgactactcagaaagaatggatgggcattgattatgcccatcaaatctacctaatcaaactaattacacaaaacaaagcccaaaatcgcatcccaattatttaagtgtagaggttntgaattccaatcccaatttgacccttgaaattgcagaattggcccaagcttatttttgacaaaatttaagatttttttcttagctttctagggactactcacatgctccatttggagttctttagtgacctacaggccctacacaagacagataggtcaagtaagcataaaaatacgataataagccacaattattaattaagctcaatcatttgcctaagaccaaaactatattaaagtgagaaaataagggtcatagagatgtca

SEQ ID NO: 70474 - DNA, 328 bp, Glycine max
  unsure (1)..(328): unsure at all n locations
tatagaacntgncttttcttaatacacttaagaagactcataaataggcattaattgaaacgcttatgattttgtcataagttgaatataaacatcaaggcttggactcaacaattccctaaataagatgtaaaacattatccagagacatggagaacttcacctaaaggataagagacatatgaactaatcaactgaatggtcacatattgaaatattacggactaacaataatatcaaacttatataacggtaaatacctgctcacagtaatttggtatcatcggcctgccattcaaacattctaaattatatgggtgacggtaca

SEQ ID NO: 70475 - DNA, 336 bp, Glycine max
  unsure (1)..(336): unsure at all n locations
atgactcaaattgtgtgatagcagatgttcaaaacaataggatactgactatgcgnttgtacattcacggctttggtatttagatcacgataataacccaccctcttccctttgactataatccctcattattggaaatttaaaaattggattattcacatctaagaacataacctatgataaatttttatagtcgtaaataacctggtcacacttgagaactaataaaaacttatcactattggaagtattatttactttattctccttctatctgagaaattatcaatggttcgtgtagactttgtagggaaccattagttacctttatattct

SEQ ID NO: 70476 - DNA, 66 bp, Glycine max
  unsure (1)..(66): unsure at all n locations
tcacgataaacaaataatgtaaacanggatcttgtaaatatttcactcaacgtatttatacatgtc

SEQ ID NO: 70477 - DNA, 475 bp, Glycine max
  unsure (1)..(475): unsure at all n locations
tctaagctatcgatatttaaaaagaaaacatagcagtcatatattaatactttaatatgctgactggtatgaaaagtttctacaccataagttgcatgcttaccgctgacagcaaaataagtgagaagaaaccagctcatttttttcttccacaatctcctactacagctcagtgtggaactaaagacaaattttgctactataaaaaagttactggcatttaatgggacaagttctgactcagtgggctcatgcactaaaaaaatacaaagaaagagacggccgaatctttctcacttcaccgcaaacccaaataggaatccaaaaaaaacatcaatctgcaaactaggccccatgtacgtgacacctcgttgctaacacgagtcataagagttatggctgctcctattactaaaatccattnttttttcaacttgaccatgtacggagtgctaagcttcatggtcatgcatgt

SEQ ID NO: 70478 - DNA, 245 bp, Glycine max
atgtatcgtccattccacacatacaccgagctaaggtaacctgggcaagaggactactacataatgctgcctacgccgttcagcggaaccgtggcctctgataatgaatcgcacgcaaccctgcgcgccggcgtgacatatatgtgcactatatgaatttgcatcatcgtatatactatcagcgtcacccgcgttaaggaccatactgctaaaaatacgccgcctgcatattcatctgtgattat

SEQ ID NO: 70479 - DNA, 377 bp, Glycine max
  unsure (1)..(377): unsure at all n locations
gtctccctctccctcacggtgctatnacttgcttcttcatcctccattgaaactccattaaagctccaaccgttgctcaccatttctgccccaaatcgctataggaaggcattttcagagtcgagaagcgcatctctacgtgtgggaccgcgaaatttcaagtttgggatgacttctttctcacttgatattcgtgggtatggggcttctggagatatgatggagaggtatgcttggttaatgcttcgtgatagttatttgggaagagatttgacgaaagcatgctgaacttgttatgttgagtgagttaagcttacacattcatctttatggtttttatgaagacactcttgtgttggggtgccgaaattgcttat

SEQ ID NO: 70480 - DNA, 454 bp, Glycine max
  unsure (1)..(454): unsure at all n locations
tacgcatggttttgctagtatcgcgaggataagaccgcttagcgaggtttgtaaatccagaaagctgcaactctcgctaagccaggctatggctggcttagctaaaataatgcatcttatgtacagaggagcatgcacttagttgataaggcctcgcttatcgctcacattgctgcaaggaatttagcttagctgccatgactggcgcttagctttatgaacctcatttatggccgtatggaattgcgctaggcgacactgagtcgcgcttagccaaggataaggtgtcgctcancggccaggctgaagcttagccaaattcagatcgaattgaagttggcttagcttatccttggctagctcagctgaccacatcagcctcagatgcaagggttgggcgctaagcacttgagactcgtggttagcgcatgatcaaagatgcgcttatcgcgaa

SEQ ID NO: 70481 - DNA, 384 bp, Glycine max
tctttcatgttaataaaacattcaccaaacatgaatggaatgttgtttctccattgatagtctatggatttcttaaataacttattaccctttatgaatacatgagattaaggcttagccaaaatatttgaaagagttattataggttacaattcttcaagactatttccttcacactcatttgagagggtcttgtgctaaagtatgtcatgcctctttacaaataataatctttttcaactacccatatcctctataattaattgaatttctattgataatttgcagtttaatgctgaagctatctatatgataaatgcgagtattgatatctacatgcaggctatactcacaactctatctgagcaacatcttgacatgatg

SEQ ID NO: 70482 - DNA, 479 bp, Glycine max
  unsure (1)..(479): unsure at all n locations
tggaggaagaaggagatgaatgaagggagagggagagaagatcacgataatttgtgctctanataagctctgaaacttgaagtttaatattcaaatgatcaaagttccaaaaaatgcacacacgtgacctctatttatagcccaagtgtcacataattggagggaaatttgaatttcaattcaaatttcacttgaatttgaaattgaatttgtggagccaaactttggagccaaaatttcactaattatgattagtgaattttagttatggttcatcccactaatccaagatcaattccaagattctctactaagtgtgcttaagtgtcatgaggcatgtaaagcatgaagggcatgcacaaagtgtgactatacgatgtgacaatggggtgtagtaagcaaatgctcacctnccnctctaaaatttcattggattgggcttctagcacttcaattaatattatttccaaccacacaca

SEQ ID NO: 70483 - DNA, 310 bp, Glycine max
  unsure (1)..(310): unsure at all n locations
actcggatgtctgattgagtcctgtaatatatcgacacgctcganattgaatggtgaagctctgagcaaattcatacgacaatatattttactcggatgtctgatatagtgcccgtaatataaacgagacagctcgaangttgaatagcgtgatagctctgagcaaatatcagacgacaataacattttactctgatgtctgattgagtcccgtaatatatcgacatgctcgaaattgaatgttgaagctctgagcanattcaaacgacaataaacttttactcggatgtctgattgagtcccgtacata

SEQ ID NO: 70484 - DNA, 405 bp, Glycine max
tcttagtctcggctgatgaagatgaatacggagcacttattctttcctctaatgacaatagcatcacttctggccgtggtcctggatgcaaagaaatttttttctgagaatactctcttgaggtcatcccagctcgtgatataccgtggagcaaggtaataaatccagtcctttgccactccctctatagaatgaggaaatgcctttagaaatatgtgatcctcctggacatctaggggtttcatggtggagcagacaatatggaattctttcagatgtttgtatgggtcttcacctgcgaggccatgaaactttgaagcaaatggatcaatccatgtttaagaacatatgtgacatcctcatctgggtttggatgcacaagctttctatgtgaaatcaagtgca

SEQ ID NO: 70485 - DNA, 363 bp, Glycine max
  unsure (1)..(363): unsure at all n locations
gaatattatcatcatcaatcatcttctgatcgatctattttcaatctttntcaacatcatctctcaaacatcattcaatatctgtcaactctttctacagaagtttctgattctttgtctctgcatctntctaaaagtcttttatcaacactgtgtctttcacgaaaagatgcttgttaaaaacatgtgtattcatctgtttattctcttctcccttgccaaagaacggaggataatcgcctggatcttttgagctctcttcttccttaccanaagaacaaggactaaccgctgattcatagtgctctctctccttacaagattcaaggctaccgctggaatctttgatctccttccctaaca

SEQ ID NO: 70486 - DNA, 407 bp, Glycine max
  unsure (1)..(407): unsure at all n locations
actataaannactcagcgncttgtggaccttgtacatgcaatcaactcctctttcattctatgctatgtgctcctactggttcctgactttccttcgcaacttgagtacatgtttgcttccccatatagctccgctaaatttgtttcggccatactcttacatgcgagccctctagtgcacatttcaagggcttttgcggtaattgcattctcttcccgtaacccggcgcactccttacgaacgtgtgtagcatccaacttgaacttctccttggcgagttttgcctttcctaacttgctattgagagcttggacttcctcgatctcttacggagctttataatatcttgtctgacgactttaaactnggcgaggcaatataaaccttatatgcgaactttagccat

SEQ ID NO: 70487 - DNA, 283 bp, Glycine max
  unsure (1)..(283): unsure at all n locations
ctaattatctcagattatatatncttgattntcttggctatttaaaatttctgcattgtggtaactctggatttgggtcctttatatttctgtttgaacttggctgctctgtgagtactnntggtattcctattatngtttaacacttgatgtantttgcatttggtgattcctctgtgacttcttgaatatttctgtccatgtatgggatcatatngcttcttctattttttntttattcctcctgagtatgtgaatgcttggatctattctggtcgtatca

SEQ ID NO: 70488 - DNA, 423 bp, Glycine max
  unsure (1)..(423): unsure at all n locations
gtggacaatctgatatagtacgtgctatcagattattctcttctttcttccactctggaagcatgtcaagattgtcgcatntcatcataaacatagaatgtaatgagttggcagtttcttcaagccattgatgtaatgccaccagctgtgtgtaatccccaaatccaacaagttttaatttcaactatgggtcttggtcttcatggtggtccttccacagatctaagtctaatataacacagtcttgaacaaatagagtttctaattcaggataatttgtaacatccagtatcatagacttctcactatgactgacaacaacgtacaatgttttaatatcaaggaatcttcaccctcctaatatagactccatattatggcatgattgatatacagaagcgcaattagatcaaattggaaatc

SEQ ID NO: 70489 - DNA, 377 bp, Glycine max
  unsure (1)..(377): unsure at all n locations
gccgctcttgtgctcaaanatcccaaaacaaatccctcttattactagctantttgaattntttagttcctgaatgtacaaccttcanatcggtgctcgttcccctctntcttttctgcanaaaaagaaaatcanatggctgtcaaaacatnggatgaagtcctaagaaaatcaatatcaaagaaaacatggatgaaatcacaattaanaagcacaactacctatctttcagagtccttnggttaatttggcttggctcctcatgtggtggngtttagttaataatcttatactttttccttccanaaaaaacttatcactaatcctcttttcattaatccaattttggatggtatnggataaaagatcatgggttc

SEQ ID NO: 70490 - DNA, 289 bp, Glycine max
  unsure (1)..(289): unsure at all n locations
tatcatactctaacgcgttggatacccccatcaaccctcgaatcctcaaaaacaaccacattcttcatgagtcattattggctcaataatcattataccatgtaacaagctatgctaatttttgcgntcttaatgaatcgctgtattctgaacgtagaacctctactcctaggatggggtcaccgaataaagtacattacctcacaggctatggtacaaataattacacacgcctagtgaccagactacgcgaaccagactctatctttcttaagatagactccagaaa

SEQ ID NO: 70491 - DNA, 437 bp, Glycine max
  unsure (1)..(437): unsure at all n locations
gtcacctgangctgcagcttgtgaactagccatgtatggatgagttacacatacccattctgttntatggttnttgtgatgatgttcgcgatgtatatatgctgaaattgcttatggaatactgatataggtgaagggtagagtaacctatggttataaagtgagaatgtgatgttatgagtggaaatagagtgaggctttgagagttggaaggttaaatctggattctgtggtaaatggaggttatagtgagttaatcttatcttgaaatgccatttatgatttatgagacaggttaggctgtgctagagagaaatacaaatgaccaaagtgaaccaagggccatttctagggcaaattggcgtgtgaggagtcatatcttgattcggtgacactttatgcgtaaatccagttttgaacaagttataattgatggt

SEQ ID NO: 70492 - DNA, 504 bp, Glycine max
  unsure (1)..(504): unsure at all n locations
cagcttcatacatatctgatatccatagacacaatattaaccttcgcattatatgcattaatcaaaatttaaggctcctgattcatcttaagacataaacgtcttntgacttaacatgcatgctctattttagcttccaagccattattctcatttatgaaactctatcagctacaactatagattctcaacttgccaggtgataatactatcttgcatagactttgagaattttaactacgtactaaattatttgcatacttaatatgcccctaaccatttcttaattgtatctgaattgctgtgatataaacacgtcatagttggtcttaaactcgatctgttttaatagaccaccatgacctaattaaagcaatcatgttttgacccattgaataaaaataatttaaacctataacaatgcactattcaaactaaactattacataaagacataaattattgatagcacaatcaacctacattagtctgctcatgcacatg

SEQ ID NO: 70493 - DNA, 474 bp, Glycine max
  unsure (1)..(474): unsure at all n locations
agcttctgcatgtntagagatttctagagagagaaaggtccaagttccaaagagttntgagagcnttttgtgtgcgaagactggcagagaactgaggttgaagaggaagccgtcctaagagcatgagatgagtttgtgagtgattgtgaggttctagaggtggaggagacatccncactacttgtatttcttcaatccttcatttttatcttctctttggtgtanaggaagcttcccagatatggagagctaaattctctgttggttcttccttgtaggtacttgatgtaaatacatgtatatctatntaatgatgttntatatgttctctatgctaccagtacgtcatttcattgtgcttttgccttgatcacgtagatgcatgcctttgtaggatcattncacagtgganactggtctgattctcagaacttgataggaaagggctaagttatcgtattatcacgagggatc

SEQ ID NO: 70494 - DNA, 338 bp, Glycine max
  unsure (1)..(338): unsure at all n locations
cgatgaagatgaatctgtggccacctcatggactcctctaacaacaataacatcatttcttgcactgaattgtagggagttggaagccatcttctcaatcaaattcctagcctcgcacgggtatatcaccaagagctccaccattgctagcatcaatcatactcctctccatgttgctaagtccctcataaaaatatcgaagaacgagttgctcataaatctggtggtgaggacagcttgcacacaatntcttgaatctttcccagtactcatacaagttatctccactaagtcgtctgatgcctgaaatgtactttctgatggcagtggtcctagat

SEQ ID NO: 70495 - DNA, 473 bp, Glycine max
  unsure (1)..(473): unsure at all n locations
gctatagaatatatattanaagaacaatggcaattgaagagtctatacttgtttcctttgatgagtctaatgccattcttccaaggaaggatcttttagatgatatttcagattccttagaagatatacatattcatgtgaaatgacctcccaagaaaaagatgaagggaagccattgacgattctcaagaatatggaggtagaggaaataatgaactctccagagaatgganagcctcaagagatcatcccctcgacaacattattggtgatatatcaaaaggggaacaactagacattcttttatagattatgcataatatgactttggatctgtgattgaactataaatataanagaaccatagtagatgaaactggatcatgcatcaagaagactgatcatttgaagaacaatgtgtgaactatagaaaactgaaatatctgtctagacaaatggtttagataaataat

SEQ ID NO: 70496 - DNA, 360 bp, Glycine max
  unsure (1)..(360): unsure at all n locations
tcgattaccaaagagtaaaaactctagtaacttagaaaattntgagaaaaactcatttgaacaacacacatgtgctatgcttgtttgtgaaaatcttttcaatacttcccttgtgaagtcttcttgatttcttttcttgaatcttgaattcatcttctcttgaatcctgaaatcatacttctcttgattcttgaatcttgntgactcaatcctganatcattctcttgattcttgaatcttggtgactcaatcttgaaatcattctcttggaaattntgtcatcatctttgttatcatcaanactacttgaatcaactcgattcatcatcatgaagctngcttctacatagagtagagta

SEQ ID NO: 70497 - DNA, 300 bp, Glycine max
  unsure (1)..(300): unsure at all n locations
cttcttattcctntaacaagtttcattatgattcacgaattacgtatgttcaagttggttattctgtacttggtgatatatgatatctatcaatactctgttgcatgtcattattactattatatttagatacgattctcagtacacatgcaaagtagttttgggacattaatatgcagactcctgatgtctaggattctattgccactgatatcatggttcacgaatgatgttctctttagtatcagtaatatgtcgatttgatagacttagatgatgctacctacatatgatgctctc

SEQ ID NO: 70498 - DNA, 455 bp, Glycine max
  unsure (1)..(455): unsure at all n locations
aaagaccggatgttgatggatgatcatgtnttttgatggattgattacatattgatcacatacaattcatatatttcgttgngatatgagtcatacaaaagtctgtttgtaactgcttatataagtacattatagtttgaaaccaattcacccccattttggtttattgagctccatcatctattttcaatatatgtttgttttgttgctcaatatggcgatgtttgtctctaactctctttgttgagtattgctgtataggacttagactagttaaatgtcatacatttatgagttgatggttaggttacatctctagtgaattatagggaatgagaagatcaattaatgtttacaagatcgacataaaagcttctagggaactatccctactattatatgattgactcctattccaatatgtataaatgatacagacttaaacggacacattg

SEQ ID NO: 70499 - DNA, 339 bp, Glycine max
  unsure (1)..(339): unsure at all n locations
tcccagatatgcggagctanattcattgttggttcttccttgtaggtacttgatgtatatacctgtatatctatctaatgatgtattatgtgttctttgtgctatcagtacgccatatcagtgtgtatttgtcttgatcacgtagatgcatgctntgttaggatcattcaatagtgccaactggtctgattcttataacttggtatgacaaggctactgtatcgtattatcacgagggatcgatgtacggtaaactagttgctgtatgttcgtcttaatgcggttctggtcgagtttagaccaacaagaggaatctgacgatgatgtttgatcacgaat

SEQ ID NO: 70500 - DNA, 456 bp, Glycine max
  unsure (1)..(456): unsure at all n locations
atcctcagagtcacctgcggctgcagcttgagccattcaacgacttaactattactcggatgctgatttattcgtcatatatcgagacgctcgacatngaactgtgaagctctgaaccaattcagacgacaataactgtntactcggatgtgcgatagaagcccgtaatatatcgagacgctcgaaattgaatgtggaatctctgagccaatacaaacgagcataacatcttactcggatgtctgatcgaggccagtaacattacgagacgctcaaaattgaatgtagaagctctgagccaattcaaacgacaataactctctactcggatgtctgattgagtcctgtcatatatcgagacgctcgaaattgaatgttgaagctctgaaccaattcaaacgacaataactttntactcggatgtctgatagacgcccgcatatatatcgacactct

SEQ ID NO: 70501 - DNA, 372 bp, Glycine max
ctcagagagtctacattcaatttcgagcgtatccatatattatgcactcattagacatcgagtacaagctattgtcgttgaatagcttagagcttccgctctcaatctccagcgtttcgatatatcacgggactcaatcagacattcgagtcaagagctatggtcgttcgaattggctcagagcttccacattcaatttcgagcgtgtacatatattaccgcgctcaatcatacatccgagtaaaagttatcgtcgtccgacttgctcagacttcaacattcaatttcgagtgtctcgatatgtgacgagagtcattcagacatccgagtaaaatgtattgtcgcttgaatggctagagcttcacattaatt

SEQ ID NO: 70502 - DNA, 457 bp, Glycine max
  unsure (1)..(457): unsure at all n locations
agcttaagtatatataggtctccttcaattcaagtattcgtgtctctattctatcatattcctctcttaagcttgcgtctaaagaatgtagtcagtggagcattaaatgggtgcattatataggtggaattcttcatgttgagaaaccactctttgtcgctggtgtgttgaacactacagcaagaaaccacttccttttgcgttaaagcatgtctatgcaacatagctcttcttctgatggtgattgaggaatttccgagcgtgacttcattcattcttcacaagaattgacaaatcctacaaaaatgtctctgcaaggtagatctcatacacctagtattaaatgaagtcttagatgtcattagtaatgtcatatcagatcatgaatccatcttgtcatcgtctataacatcggatgccaacattgcaaaacatgtntcgtagtgcataagatgta

SEQ ID NO: 70503 - DNA, 270 bp, Glycine max
  unsure (1)..(270): unsure at all n locations
tcttagtggctagtgaaatcacatactttacgcataattattactcattagtagtaatttcgtaatcataatatttatggtgcacgtgtcgttctaacattctagcttggttgaaattatttacctttatttattgcttactttctttagtttggcattcggatcaaaagataatgaaagcttatactaagccataatttaccctcttatgttccattcgtaagttcttcaagtctcattnactnctttactattatatctgatatccat

SEQ ID NO: 70504 - DNA, 422 bp, Glycine max
  unsure (1)..(422): unsure at all n locations
agcttaaccaatcaatctcacanataagactcaataataccagaagccatactatttataaccaaatccacacagtatcaaaacacataatctgaaatccaaatactacaagataaataaagtactgattataatgatctaagttcgcataacccaaaataaacggcataacaagagacactattattagatactaaaatctaagaacgtggaggtggcggtggaagatcgacactctggcgaatgtaaccgacatcctcttcaagttgtgtgaagcgaatatccatgccggcaaagcgtgtattcaatgagtcgaaacgttcaccaacataagaacgaagacctcgttattcggtaaagacttcattcatgagtgctgaatcttctcgctgangaagaggtgaacgagtacgctcatcttg

SEQ ID NO: 70505 - DNA, 496 bp, Glycine max
  unsure (1)..(496): unsure at all n locations
tcttcataatactcaattcccaatgcaattcctcattagtaagaactctttccagnggctcctccattcccacacttggaaatgatgcctataccanagtgtcagtatgatctctaacctgaatgacattacaagtagcaaaagaggcagtatttntcacagtatcatacaagttaaaaataacttctcacccatcctaatgatgagctntccttgcctaacctctatactatgtcacaagtattcaaaaatggccaccccagtgtgatcgggacgttntcatcctcttccatatctaacaccacaaaatcagcttgaaagatgaacttgtccaccttaactaacacatcatcaactatgtcattgtcgatagaaatagacctgtctacaagctgcacngtgaatgttatgggttgtgtttctcttatgcctattntcttaaaattgagtantgcataagttaatggttgccnncaatcacacaaacatttatcaa

SEQ ID NO: 70506 - DNA, 376 bp, Glycine max
  unsure (1)..(376): unsure at all n locations
gtcacctgaggcatgcaagctataacagtacttntaaatataaagcttcttaaaatatattctcttgtggaaacttaataaggatacacattataccaccaataggtattgtgaaaaagtatatgttacttaaaaaacactttgatggtgaaaaacatataacttttaaattatcgatgactatttactataaaaggcttactgatatacatatctgctaagaagaatctaaattataattcttaaatctcactgtgacaattgaggacacagatggaaatataaagaaaaagaactgacttcggacaaatagactcttagttatataatattaatgctatataataaagtgtaagttttgtatgttaacaaaaca

SEQ ID NO: 70507 - DNA, 332 bp, Glycine max
cttcaactagctgtagagctgactaaccactttctctgactgaattaaatttgggcaatggatattatattaaaaggagcgtttggctggtaatgtgataggaatgctgatacggaagggccggtgactgcgtgccttagtagccaaatactatcagaaagagagttctaagtgccacaaggtcaaaagaatatttactattaatgcacacatatcgaatatcatggatgagaggaaatatggacctcacatcagattaacaactatttctttagtattccatcacggcatatacatcaaaaggtgacactattacaaattaattatcaaat

SEQ ID NO: 70508 - DNA, 300 bp, Glycine max
  unsure (1)..(300): unsure at all n locations
tctcaatatacggtgccaagtgtgagtattgttctttcattggtaaaccatgaaacagatatctaaaggcgttgggtccttctactgagtaagtagatgccattaaagatgtcttctaattaaagatggtcttgtgttctatgctgaagacaaaaataccaaacacttgattctcgagggttggactaatttaaatcaaactttggtcacagatccctcttgtgaacttagcctaatttaaacaacattatactcacaacataatanacaatacttagaccctgcacattattcttagtg

SEQ ID NO: 70509 - DNA, 388 bp, Glycine max
  unsure (1)..(388): unsure at all n locations
gctggctactctatggagacatcctataaggggctatggatatgtgtccagcaccgggtaccaagtctatgggaaactctatctttctctctcaagtggtaaactagatatatccacagggaacacttcaggaaactcttctgacaacagggagggtcacccatcgaaaccctntgtcttcagttccagaatagacaagatcatgtacacttgagcatcttcttttanatatgtcacaacttggttggtagagataaacatcctatccttacttactccagaatcatcatacaccacagttttatcaaaaaagtttaacaagacatggttggaagataaccagtccatacccaanataacatcaattnggctcaatggcaaacaaatc

SEQ ID NO: 70510 - DNA, 425 bp, Glycine max
gatcttaagcaccgcagctgcagcttatggattggagggtcggatatatgaacatcatcggtggttttgtgtttcaacaatcaatgatcggctaatacaatcaaagatatggctgtcgagatcggtatgacagttatgctaatgagacgttgcacatatttatctgtcaaaagttatacacactagaaccttagttgagaaaggcgtgctaaactgcaaatctattttaaatgaacatctattctctattttgaaagttggactcttgaccattctctctcctgcatggactcttcggatagcaatgattcgcgataatctttaacatggcgtgttatcatttgcgttatcttcgtgtgccccgtattgtcgctatattcgatcaatcattactgtaatctaccatgatctatagatttcattat

SEQ ID NO: 70511 - DNA, 391 bp, Glycine max
  unsure (1)..(391): unsure at all n locations
ctctcgtacgtgacantggtttcttgtgggatgtggtcaatctggaatccattgaactgtcttcacaanatggagtgcctatagaaaatgcttctgaggtgacgaatatatatgtccttggtagttgattgacttgtttcgcttaacgaaataagtgatgcttggataacgtgtatgtggactatatattccacatgaaagtgtgtgtattgagaaatcacgttgtttatggaattgtgtagcatcaatgtgaaggctaaatcactgaatggtgagtgaactggctatacgactgctactgctgtcttagacaggcttctacattcctgcttataaggtaatgccttggtagcagtccctgtatctacccataatcaagtactcccttgta

SEQ ID NO: 70512 - DNA, 445 bp, Glycine max
atgaggaagtgttgaagggtgaaacttcctgctttattgtttaccacagagtggtacctggagatatgtcgcgagggtcaagagaccttgaggacgtcaggtggtgtgctattgcccaaaccaagcttgaccaatcccgacccaacccgggcatagtcggtcaatgagaacctatgatgtacctaagcaggcgagctcctggcagtcaacagataataggataacaagaccacaaagcatggaggctcgtggtggctggccagctgtgaactttgcgaatatgtggatagtggcctctggcatcgataccaatgtgactaatcgatacaagcttaaaatgaggacggggctagatggcttggaatcataccacggtgaatcgatacagcttgaacaagtatgaactaggagccttgaatcataccagcgtgaacgatacacaaga

SEQ ID NO: 70513 - DNA, 296 bp, Glycine max
tcgaagaacaatgaagaacgaatgaagaacgtctaataacgtgtgaaacctcttgcgaaattcttcacggaaacgtttcggaagcgcctcggcttagattctcttcacggaaacacatcttttcaacgcaaattcgaaagagagggaagtgcctaacgggctgaaccctcttcttcttcacttcctcctctatttatagcacaataggggagatgcttggcgtccagctcgctcaggcgagctcagctcgcccaagcgagccaggtttgttcctccagaagcaacaaccttctgga

SEQ ID NO: 70514 - DNA, 391 bp, Glycine max
  unsure (1)..(391): unsure at all n locations
tcttaagcacctgcngctgcagctttaccaccgtgccaactcggatcgtgaaagaggaccccgcatcttatgggttcagcatttgccctattctgaattgatggatcggaagagtaacggcttatgttttcgttgcggagagaaattcatccttcgcatcagtgtaaggagaggcaacttcgattgcttatcctangagatgatgaaaaggtttatgataaacgcgaagtgattgtcgtacaagtgttagaagatgaagaggacgaagttattgaatgtaatgctttggggttattcgaaactaaagagatgatgaacaccaggggtcaaccggctactatgaaacttanagggaaggtgggtgacggccaaattcaagtattggttgaca

SEQ ID NO: 70515 - DNA, 352 bp, Glycine max
  unsure (1)..(352): unsure at all n locations
attacaagcatagaatgttcttcagattcaattntgtgtgttcattggtgtatgatatgagatgaaatgcacaggttggaacttgtgttggtgtttatgatggaataagcctaaacacttgagcttgagtgaaacaatgactgtgaggttatggttgatgatccttccttgatttctgtcatgcttactagcttatttcagctgtgactctaatgcgtatgctcctatctttgaanatctgcatgcttgtgagaagtaatcgatttaagcattccatgatattcagttcatatggntaaattcctttntgaatcagacaccattntctttngattaaccactatctttgtca

SEQ ID NO: 70516 - DNA, 430 bp, Glycine max
  unsure (1)..(430): unsure at all n locations
gatcttaagcacctgagctgcagctatcttatggtgcctcgacttacccccggcctttttatgattaagccaagcccctactttcgaggggcaactctcaccttatgacgactatcccaggcaagacgatgaggaaggagatccccttcttggccccttgctccacctaanagatccgacctctcatgaactcacccaaccgaacatagtccgccatatcccatcttcacccacacccgtaaaagaatctgttcccttcgcgggagataaggganagattgacacgctngaagagaggttgagggcagtcgagggccttaccaattacccattctcggaatgggcggatttatgtctcgtgcccaacatcgtcatccctcccaatatcaaagtaccagactttgataagtacaaagggacgacttgtcca

SEQ ID NO: 70517 - DNA, 346 bp, Glycine max
  unsure (1)..(346): unsure at all n locations
tcacatacactatatggaatagtccagagtccctatttgttgactgngccaagattggttgaaattcattattacacccctctgtattatttattgggcccggaatggcgttggcccgataagttatttattctgcaacgaaggatttgcttcttgaagacctttatccattgcacaagccgagaataccccaacagtgttatctgccttttctggatactgaacaggattcaaaanaataccaaattggtctgcgtcagactgtcgaggcgcaggcctatcatagtccgaggttatcacctctaaggaagcaataccctgagccttctcttcacaccgataccca

SEQ ID NO: 70518 - DNA, 395 bp, Glycine max
  unsure (1)..(395): unsure at all n locations
gtctcacgaatgtcacgtgttgatgcaacaattgttatccgtggctatactagacatcttgccacacaaagtcaggttagccataactcacccgtgtttatcttccatgccatatctagcaaagtcattgatcttatcaagtttgatgagctgaaaaatgacgccgcaattatactgtgccagttggagatgtatttccccnctgctttctttgacatcatgaatcacttgattgtgcatctggtcagagaaatcaaatgttgtggtcctggttatatgcagtggatgtacccggttgtgcgatacatgangatcttataagagtatacaaagaatctatatcattcagaagcatctattgttgagcatacattgcagaaaagccattgaatttt

SEQ ID NO: 70519 - DNA, 393 bp, Glycine max
  unsure (1)..(393): unsure at all n locations
tctatacaagaattgttcttaatttctctacaatctcttcacctcttaatgagctggtgaataagaatgtggcatatacctgcggtgagaaacaagagcaagccttcgctttgctcaaagaaaagcttactaaggcacctgttctagctcttcctgactnttctaagactattgagctataatgtgatgcctctagagtgggagttggagttgttttgttacaatgtgggcaccctattgcgttatttagtgaaaaacttcatggtgccaccctcaactaccccatctatgataaagagctntattctttaatatgagccctccgaacttgngaacattaccttgtttccaagggaattgtcatcatagtgatcatcaatcacttatgtacat

SEQ ID NO: 70520 - DNA, 415 bp, Glycine max
  unsure (1)..(415): unsure at all n locations
ctgcagcttgatgtaaactagatgcctnggttaacttggtaacccaactggccatgaataananatctgcacttgtcgccagactctgtggnttatgctcctctgccgaccaccacacagacctttgccttgtggcaacaatctgaagcaattgaacagcctgaagcttatgctgcaaacatctacaacagacctcctcaacctcaacaacaaaatcagccacaacagaataactatgacctctccagcaacaggtacaatcccggatggaggaatcatcccaaccttagatggtcgaatccgtcacaacaacaaccttatgttcaaaatggtggtggcccaagcagaccatatgttcctccaccattccagcaacaacaacaacaacaacatcctcagaaacagcatacagttg

SEQ ID NO: 70521 - DNA, 324 bp, Glycine max
  unsure (1)..(324): unsure at all n locations
cgagacctcaactttttctcaccnagtaataatggatcattataaggtccaacgccttacaatgaacaccttccaagtacaaataaatagcttgattcacccttaaaagaactacgtangtctgatatcctcttcgatggagggtacgtagaagcaagagccctgctcttgtcgacctcagaaataaaatagaaatactaagtttaggtacacaatttcatacaattcaataattaacgcttgtgtactttgagacaaacgtgagaggtgctaataccttcctcanacgtagatacaanctccgaatctggaatattcttcatg

SEQ ID NO: 70522 - DNA, 418 bp, Glycine max
  unsure (1)..(418): unsure at all n locations
gcgtacccaccatttttntcatagtaaaacactgataatgtgtctactatcactggtatcatctncctttccgtcattgggggcgccacttgggctgcatatccttcacctttggcatattctttgaaggattcatgcncctttttacccatgttatgtagttgcatcctatctggagccatatcagaatngtactgatactgcctaacgaaggcaaccattangtccttccaagaatggattcgggaaggttccaagttagtgtacctggtaacaactaccccagtaagactntcttggaagatatgatcagcaattcctcatcttttgtgtatgcccncatcttctgacaatacatncttagatggttctggggcaagtagtccccttgtacttgcanagtctggaccttgacttg

SEQ ID NO: 70523 - DNA, 422 bp, Glycine max
  unsure (1)..(422): unsure at all n locations
tggtatttctttactcctagagacaggaagtatcccaatggagtgatgtctaatatagcagctgcttctggttattggaaggctattgngactgacaaacccattatcacttcctgtgggaaaagagcattgttgtcaagaaggcactcgtgttctacaagggtcgtccaccanagggatcgaaaaccgattggatcatgcatgagtatagatggcatgattccacaatctccaattccaagcatggacggtccatgagagtacgccaatttcatgagttcaatatttcaatntggtggttataaatgacaatagtgtaaattattgacgaaattctcaatngcatttcattgatactggatagnacacttatagagtctatgtacaactgattgacaaangatccatcttcttaatctaac

SEQ ID NO: 70524 - DNA, 497 bp, Glycine max
  unsure (1)..(497): unsure at all n locations
gtcacctgcggcatgaagcttcagcaactgagaagatgcattcgtttggatcgntagatcatttcccatctacggntgaagaggcatgaccatnggcttatccgagagaattttagaaaccaaaggacataatagttatgcctttatcgaaaagggtgtgaaaacaatataatgtgtttaacaaaagacactgatcgctatagagatngccttttgagtgccaactaacanaaccacacgaattagaactaggaaccctgggaagaactcgaattcatccttaagtcaaccaacagagccactcagacttggcagaaactacattataaatnntttactactaaaagctcttatagtcaacttcagagcttaacggacatatgttctatctccacttagtaaccaccgtactcgatggtcggtcgagtaggttactcagattccgaatatccaagagaattatataacggtagacgganattatatctcttagtcat

SEQ ID NO: 70525 - DNA, 259 bp, Glycine max
cttcttcgatagtcacatttatgtgctcaaatatagcatctgaccgaacgtatgtatcttcttcatagctcttacatcttctaactttcaccgttgctcgtacatgatatgatatagccagaatgatcgaggaataatcacatgtggactgacactctctctacgtaacgattagaactcagcctctatagtttgtagacacaccttctgtacgtgtgcttctccattgtgagaggctagagacttatcccatgcctac

SEQ ID NO: 70526 - DNA, 336 bp, Glycine max
  unsure (1)..(336): unsure at all n locations
cttgagcanattcaaacgataataactcttgaatcggatgtctgattgtttttatatgatatcgagacgctcgtaattganaacagaagttcttagaataatcaaatgaacataacgtttaactcggatgtcctattgagcccttgtatatatcgagacgcacgaaattgaaaacggaagctctaagataagtcacacgacaataacctttaactcggatgtccgattgagtgccgtaatatatcgagacactcgtaattgaaaactgatgctctgagcanattcaaatgacaataactnttaactcggatgtccgattgagtcccgtaatatatt

SEQ ID NO: 70527 - DNA, 320 bp, Glycine max
  unsure (1)..(320): unsure at all n locations
gcgtctcgatatcctacgggacacaatctgacatccgagtcataagttattgtctgtttgaattgctcanagcttcagttttcaattaccagagtcttgatatattacgggactcaatcagacatctgaattgannagttatctgtcatcttgactnnttcatcagagctacctgctttcaatattcgagcgtctcgatatattaaagggctcaatcggacatccgagttacaagctattgtcgtatgaattttctaagagcatcagtttcaattacgagcgtctcgatataatacgcgacacaatcggacatccgagtc

SEQ ID NO: 70528 - DNA, 362 bp, Glycine max
gggacttcgaagattcacgactgcgtggacttcattctctctgagatatccagggtatggggctttgggagatatgatgggtggctatgttgacgttctgctgagagatgattatctgtcaacgaacttgctgaagctcgtcaaaatgcatgttggctgagtccacataccacttgtctacgcgtcggtatacactgtatgtcatatcagaatgctgtggaaccgtataatgaggtcaacacttcggtcaatggcaaggattatgatgaaaaaatgtgtttaggtgagacaatcgatttgtgcacgagtaagtggtatctacttgatgcttagctatggaactggctgctaaagaaataatg

SEQ ID NO: 70529 - DNA, 181 bp, Glycine max
gatcttaagtcacctgctgctgcagctatgctggaaagtatttgattgcatgcccatttttcttttctaataacctgcttatgaccatgtcatgatatgttttaagtgcaacggttagcatctcgcattggtggctcgaagtgcctgtcataacctacccttcggcgggagggcgacgcga

SEQ ID NO: 70530 - DNA, 445 bp, Glycine max
  unsure (1)..(445): unsure at all n locations
agcttgcctgcattgtgttgttagcaaggtccancatccaaaacccaatattaatacataacaacccttgttcatgtccctttaaatgctcgtacaatttagacatnatgaattcattaatgtatgactaaggtcatcatatctgtgaaatctataagtcaaagaaataaattgagttagaacagaactagaggatgagaacagaaacctgtcatgctcatgtgtatcacctaatacatatccagtgtctgtagaaaatccaattaatatcacctaaattataagacttgacatagcacatatgtaatgtagtataaaacaacanaattcaagtaagcaattaatgtcacacatgcttacagctagacatatcataagagaatccgcataatgaacaagtgcttctgcaccttgaagtcatttatcactccaataccacacatgg

SEQ ID NO: 70531 - DNA, 210 bp, Glycine max
aagacacatctcttcataccatattgaaaaggcatgagcggcctgtatatatgtgtgtgtctgacttcacaaagcaagagagagatatttcacgagaacttcattgcaaatgctctctcacaactctgggcaaacactctgcaatctattaagagttcatccaagaacttcaatatgcatatccttctcttaaagagagaattcttcttc

SEQ ID NO: 70532 - DNA, 422 bp, Glycine max
  unsure (1)..(422): unsure at all n locations
agctnngcattggaatngcgaaagccncactccatcattaggattagtatttgacatctcaaacaaacaaatcaaacgtaacaagacaattatagttgctgtttgaatacctcacccactcaagtgtatcacacnaattatggcttttctctaatgaaacactcttgccttttaccactctaattccccttgagttcttaggcaattcaagagattatggccacaacaaagaacaattcaccaatatgtgtaaggtaaggctagagagacaaggaataggttaaccaagataaaggctaacaatggttttaggcacaaatgaaggaaataaaattcagaatttaggaattcaagtaacaatccttcatgccaccaatatattaccttaaagagatnntttttnttaaaagtcttcagcatga

SEQ ID NO: 70533 - DNA, 439 bp, Glycine max
  unsure (1)..(439): unsure at all n locations
cgcatttggagaggttccatcaaccgccctaattccttgatgctggtggtatctaagcttttaaccttgacttggtagaacctcttgccggtttgatttgttcccatgcttgctaaagtgagacaaaagctgggcaaatcaaaactccgatatctcatgggtggaatggatgaatgcatgaaggaatgcatataacacagatgtaatctatgaatgcggnggtccggngaattcgtcctcttcttagacacaatgtctaggggtagcanagtgccccaacgtaccgttttaagaaggcgacacggacccttcgttgtgttgatacagaatggatcaagacagaacccatatgcgatgcctatgcaaaagacacaatgcgggaatgtacacagtatgataatattcactgaacatnaagcaaagggtatatgatacttat

SEQ ID NO: 70534 - DNA, 417 bp, Glycine max
  unsure (1)..(417): unsure at all n locations
agctntntcttgattcttgaatagccctttcttgattcttgaatcttgtgtcttgaaccttgatctcttgaatcttgattcttgaattcaactttcctctcgaatcttgaagtgttcttgattctatcttgaacatcttgaactcattctttgattgacctttgagtttttagcatcacctttgtcatcatcttttgttatcatcaaaacatctttgaatcactcttgattcatcatgaagctttgcttctacactttntaatttttgcttacttttggctaagatattatttctggtctttactttctcataacttagtagtanagcctaattgaatctagtaacaataagaacgatataattntaattagtcaagacaccgtcataattaaattcaaccccccttcttaattatt

SEQ ID NO: 70535 - DNA, 520 bp, Glycine max
  unsure (1)..(520): unsure at all n locations
gttgtcttgtgcagtaagaagtggtcgtgacanaatactcataactntaatatagttattgaaacttggttgctagataattaagaactgaatgtaatctcagtggtagaaacaagccaactataatttgtgtcttatgtactcctacttataacttcgagttngattttttttaaatctctattaattagaaaaaattgttttcatcgtctgatcgtgccttatttttttgaaaatctgttatctggcttatgccaattttcttcatataacaattttgttcttttagaagaaagggctttaaaattntataaaattacaattcaagccccttattggtgtattgtcttatatattaaaaaattaaataaaatcccacgctaattgtaaaataaaaatacaaaaccanaaattatgataccaaaacaaatcttatgtctattttttactattgtaatacaaaaaaatctatacaaaatattgtngcccatcataataataccgttatattaccacatat

SEQ ID NO: 70536 - DNA, 218 bp, Glycine max
  unsure (1)..(218): unsure at all n locations
atcctctgagtcacctgccgcatgcaagcttgcanaatggaagcanagatgtctctctatgggtgctacaataatctctcattaactctagtttaacagctntacccatntacttggtgtctttnttcacaatccctaaaacagtggtgataagatagtctctattcaaagacactttctttacaaaaaccttgactaatatcaagcatcctataact

SEQ ID NO: 70537 - DNA, 308 bp, Glycine max
  unsure (1)..(308): unsure at all n locations
aattctggttattgattagtaggttctatttcctagtaattgatgacatgtgtgatgttggtaaatattaaaccgtgtttctcactcacaaagtagcagaatacgcatctaaagcatcattaggcaaacaaaatcaatacgtgatatttattggcaaaattctaggatagatagattcattatgcttgtcagcacacaagaaactcaaaacactcctctattatgttatttctttgccattaacanacaatgcatgtatgattatgaagcccaatggtggtggtaagcatgtatcatactaatttagt

SEQ ID NO: 70538 - DNA, 415 bp, Glycine max
  unsure (1)..(415): unsure at all n locations
agcttancaacagtcgccaaacccaattattcccgaaaccaagtgtcatgatttctatattaccaactttactagttggtaatgtggcatcatagtcttgctatgtcatctacctttggctcatctctttaccttacaattcagacaattctatcattaccctgtttcaatatacagaattagcaacatgcgaacatatctaatccaggaagttccaccactaataggcagcctataatccatatccaatgagatacctcatctncgagttattccatcttctaatattattggagtttctgcagaataacataagtgtttggttcttcgtttcacatatatctattggttagttataattactcaattctgctttagcattttcacatgccactatcacatgcaagagatctga

SEQ ID NO: 70539 - DNA, 360 bp, Glycine max
  unsure (1)..(360): unsure at all n locations
gcttctccctatgttgctattacaggagaagangtgaagaaganaagggttcaatctcttatgcacttctctctctctcgaatatgctgagaacaattatttacgtgaagaagattcaagccgaagcgctctcgtaacgtttccgtaacgtattcgtgagtaattatgcgaagattctcgaccattctgcangaatcatcgatcgttcttcgntttcttcaatcttcaacggataagtacctcaaaccaagcgtttcaattcattttatgtacccgtggtggccacatttcatttcatgtatnttattctcgtttcattacttttatacccctttgacggcttangccatattaagtcat

SEQ ID NO: 70540 - DNA, 241 bp, Glycine max
  unsure (1)..(241): unsure at all n locations
gcttgtcaactcgaagcacctcacttaagtcctgccatcaaatanaatctctcacaacaatcctatcactaaccaaccctctccacccttcatgtctagaggttaagaccttttccgtaaggcattttctcatagaagagactccatcttcctttacctaacaacgcttcattgaagcattgaagacaatgattattctgatacctcatccccccccccaagaagtgtctatcttttttgc

SEQ ID NO: 70541 - DNA, 334 bp, Glycine max
  unsure (1)..(334): unsure at all n locations
tgctccagcttgagggggagtgttgaatattntaatatttctctatgttcggtagctcactcggttagctctattcacaaggtagcagtgtactgttactgtcaattgtccttctctctcttgtatcttgcatatatctgttattntgaaatcaatatagctcatagagaaagtgagaaatttctcaactcacctcagtcttcaagtattgtattacaaggaaagtatgagtagcacatgtctacgaaagatggttggattgcacctaagatcgtatggccatgttataagaacgcagatagaagcccaaataagatgagttgatcagatggag

SEQ ID NO: 70542 - DNA, 375 bp, Glycine max
  unsure (1)..(375): unsure at all n locations
agctntgagccaattcanacgacaataactntntactcggatgtctgattgagtcccgccatatatcgagaacgctcgaaatgaatggtgaagctctgagccaattcaggcgacaatatctttntactcagatgtctagattgagttctcttaatatatacgagacgcctcgannatgattggttgaacctctgagcaaattcaaacgacaataacttttttctcggatgtctgattgagtcctgtcatatatcgagacgctcgaaattgaatgttgaagctctgagccaattcanacgacaataactttntactcggatgtctgattgagtcctgtcatatatcgagacgctcganattgaatgttgaagctct

SEQ ID NO: 70543 - DNA, 275 bp, Glycine max
  unsure (1)..(275): unsure at all n locations
ctatgcttcttgaaggtggcagtccatgaggaatcttcttggaaaagacatctttaaattcctgcaataagggttgaacactatgagaaacataaatagtaactgatagaatatactctctctcttttgtgatcactctnttcctcgggtgtatcactcttctttttcatattcctttgtggagcctcactattttctggctctcgttctctctnttctctcattctcgattggtcatcacacacttctctaggggatagaggtttaagagtaaa

SEQ ID NO: 70544 - DNA, 412 bp, Glycine max
  unsure (1)..(412): unsure at all n locations
gtcacctgcggctgcagctgtatcatgctacntatttcaggaggagttgcagaaaaaatatattctttatcttacataagtcactcttccccctttgcaacatcaaaaagtcgatgattccataataagtaacatacttaatgattcaacccaagtccaacacaccaccatgcttaattgcaaagagaaatattccaagccatctacaaaaaacccaggtcaaatattcaactatagctattattatttgaagaaagtatcttcctaccttagctataattaatttctaatgagtaacccaactggntatttntagtaaactttnttcttctaatcatatgtnnttcatcaacaaaactcaaatctaagaactttgttaaaaaattgagtccactctcacttaaactaacat

SEQ ID NO: 70545 - DNA, 415 bp, Glycine max
  unsure (1)..(415): unsure at all n locations
gaggatgtttttatgttaaatgttngaagtgtatgtatgtggttacgatgcctgtangggtggattgaatctaagctggtatattggactatgtggtagatagaagtaatgagatgctcgtaggaactatatcattattggagggtaccagttttgccttgatgatgttattctgttgttggcacagaacaactacgacttgtttacagntgatataagggcggctaacaatgtggggaatgctttcattctagctggtataatttacaaatgggttttgacagtggaaggatgtacatatacaacatagtgggggtaaagggagtacactgattgatgttttgttctctttcataggtgctatatcgtaaatgttgtgatttggacgtgtggtttgggagttctgatacatgta

SEQ ID NO: 70546 - DNA, 224 bp, Glycine max
cagaatcgcgatgagagattgagagcttggctggctaaagagtcactcttccccaatgtttggctgagcataagagtcactctcgtcaagcgagctccttcccggaagatacaagagagcagctaagaacctgccagcacaacttcgggctatgctgagataattgcagacctgcacatgccgcgtgaacatcagcgaagaacttcaagctgcataattgcaaa

SEQ ID NO: 70547 - DNA, 447 bp, Glycine max
  unsure (1)..(447): unsure at all n locations
tctggttgttcctggtgcggagatgatggtacagctggtgaaccatgagcggcagtttcttttggtgaggaagccatggaanaacagaagcgttggaatgattcgtacatctcagaatactattgtgaaatgctggagaaaacacgaatgccaagcagatataaattngaatgaagaatgtagaggggcgtgtgaagcaacggtcgaatttgctttgtggtgaacgtgctattaatgttaagtgattcgtttgggcacgttcagaatgcagtagctgctataattcctctagcagacaaatgcccagcttgccnctcagttnttcaaacttgattgcattccaagccttngtgaanatatctgctatatgttcctcagtgtcaacatgcttcagtgtgatcactatatcatcaacacgatctctgatatagtgatgtctaatgcaat

SEQ ID NO: 70548 - DNA, 493 bp, Glycine max
  unsure (1)..(493): unsure at all n locations
tagctcagtcaagttagttacatttaataatttcacatttntagtaattaaatgtataatacttttataacttaaattgcatataaccttaaagttcttgagtatntatntcaatttttgtagaatattcagcattccagaatgatttaatacaggaattggtaaaaagaacaataaacataaatagaatgacaacaggaaatcacgacatttcttataatacaactganaaacttcaaagttgacaatttcaaatttcaaaanacaaattggtcctccaatgctatntgggagaaaccacctttcctaatagctccagaaatttaaaaattacaaaacactgtcaatgaatacatagtattcatagaataantaatctctctaaagtaaacaatgtatgccatagccaataggtatcaccagtcaccannacaaacttaagtaaaatactttgcttgggtttatactattcttatcaaaattgaattcatct

SEQ ID NO: 70549 - DNA, 309 bp, Glycine max
  unsure (1)..(309): unsure at all n locations
atatcaatgatactacagttggtttaatcctataatgtgaacagccatccaatatgaaagaatttaaatcaatctcactttgcaacatcatntacaagaatattatctaaaacgttagtcaaatatattggaagaagtattttgcctatagctgatttcagaaagagcaatatgcttttatagttgggagattcattggtgataatggtttgatggcctcaaagattaaccaccacatgaggaatatgaggagaggtaaactagtgatatggctttaagatgggaatagtagggatatgataaagttga

SEQ ID NO: 70550 - DNA, 288 bp, Glycine max
  unsure (1)..(288): unsure at all n locations
agcataaaccaaagagtcttgcgacaggtacagatttcttgattaaggccagttgggttaccaggtaaccaaggcatctaagttaccctcaagcttcttagtttcagctgatgaagatngaattgtggctacttcatgcactcctctaatgacaatagcatcatttctggcactaaactatttgggagtggaagccatcttctcaattaaattcctggcttcagcaggggccatgtctccaagggctncaccactggcagcatctatcatacttctctnncatgtact

SEQ ID NO: 70551 - DNA, 269 bp, Glycine max
  unsure (1)..(269): unsure at all n locations
cttttaccaattagtttttaccttatctttcatacctcttttagtggttattttggctagtttcaaccattggttagtttacccttttgtttgaaacccccaacaggaaagaaccataacttangaaccaacatgaatcttcattcttcatctagtggtaatggtgagtgttgtactcctaaggatcccttgtataagatattagatgagtngagatcccttatatngtgggaagaaaacacgagagaaaagaaaagggaaanaagagt

SEQ ID NO: 70552 - DNA, 118 bp, Glycine max
  unsure (1)..(118): unsure at all n locations
agcttaangctcataacacactcatcaagagtctgaaagatgctttctttttacagttatacattacattgatccaccctgtatatcctaccttattcgtgtatggtcatgcattata

SEQ ID NO: 70553 - DNA, 333 bp, Glycine max
  unsure (1)..(333): unsure at all n locations
tacatctctgtaattgtgatagacttatttgctcttagtataattaagagaangccataatgtgatgtgctatacatctggcatatcttcattgtaagctattgataattgttcttagagtcattggcactttttagccccgtcagttttcaccaaggctaagctanagtatatatgctaatatatgcactttacaaggataccttcagcttggatgagttatcactctgtctctgagaacttccaagcataacaaagggtttttnttnttatacatgataacagccaatattgtcgtagctaatcaattgatcacctcattgtctcttacat

SEQ ID NO: 70554 - DNA, 461 bp, Glycine max
  unsure (1)..(461): unsure at all n locations
tagctntgagacgcatgttatctttgggcatgatcaanacatctacttgttctcttgtctacaccgaggacatggcccgacagaggtttatcatcgccacctactactgatgtgaccatgaacgttgcaattacatcaccgtacatattaacgaataccacctgctgctggtagacctgaacactgagaacatctctctgcacaaacacgaacagatgtcattgcctgaccttatcactcacagtatcattgatgatacatctatgaaagaaagtgtctgaacaaacaccaaagctgatttttgccaaggcattcatggttcatgacataccatttcataagacgtatgccaacataaatgatctctataacaagaatgcgtccattataataccaacgcgtgctgctctaatccatccacatgctcttgatttatactccttaagaaaaagaccctatta

SEQ ID NO: 70555 - DNA, 304 bp, Glycine max
ctcagcttaagcactgtatctcctaccgagccacctttaaaacctttttttttattaaaaatttgctttcaggattatacacccagtttctgagttacttaacgaaattattaagtaaaagttcatacaaactcactgaattattccttttgaggtgacaatgttgctactaacatacatatctgataacagtcctggatcaaatcgtttacattaatactgtcactcggcctgctttattactggcactacgcgtgcgcgaatctttattaatctatagtcagtgaacatattttatcttgat

SEQ ID NO: 70556 - DNA, 539 bp, Glycine max
  unsure (1)..(539): unsure at all n locations
atcctctgagtcacctgctgcatgcaagctntaacaagttttaccattggagcatatcattngagaatatgtttacttaagtgagttgcttatataaacaacggntacttaattcattcttattaattaaaagagacattnttaattatgaaattttatgtggttcaaaataagcactcactctatcaactttagcattaaagtaaactttttagtaaaaattttaaatttatgtggcagtgtggggctctaaaatataagataaacaactcatttaagcaatcatacattatagagattcttaatgtaatataagtactactaaaagatactatctccatcccacaatatctgttacatttgggaaaaaaattgtcccaaataaagtgttacatttganannaaatatctatcccaaaataagtgtacatctgaaaaaaattgtccatgcatatttgattttcaatgaacataattactatttccatcatactcctaataatggtaattaagttctgacttaatatcaattattctca

SEQ ID NO: 70557 - DNA, 453 bp, Glycine max
  unsure (1)..(453): unsure at all n locations
tgacttcaaagtgaatctgaagatcctcgttgccaagctgaagattctgccaccattcttctactgtangagcatgctcttggtgggtcactgtttaatggagacaaatgttgtgttttctttcctttctatctgtaacatttgttgcagcttccatttgcgagaagcaattgttccatttgcatgcgttgtgtgccaaccatttttgtcatataaacattnttttgtctgaataaagcttcttgggaatntaattaagtaataaattntttgtcggaataactntanatctaaacaaacacaacaatcaagttataatntgtttacctcaactgagacaccaaaaagaaaatattgaaagcactangttaggggaaaatctaatttcatatccctgataataattcttttcattattttccttcactttccttnnattcttctcctctatat

SEQ ID NO: 70558 - DNA, 444 bp, Glycine max
  unsure (1)..(444): unsure at all n locations
agctngcctccttcttcatactatgtgccaatatttccgaccgaagttcagtatcctttgtctccatgtgtgtgtatatatatgagaagagatcaaatctacaccggtatatacttgaaactatataccattctantaattttcaactgattaatgtgttcttaaaacttaccattggatcgaaagttcactttacatagattacataagcaaatttcatattaattcaaaattatttgttaccttattcatatagattaaaatcgacgtaataaaacttctcaaatatattaaaatatggatcattngaatactntcttgnttgtgtcaatcttgacaaaatttgacagaatggttctattgaagtgaaatttacagcagctgaactttcaaggcctgttgcttgtctgtgtgtaccatttatatattgcacttacattttca

SEQ ID NO: 70559 - DNA, 291 bp, Glycine max
  unsure (1)..(291): unsure at all n locations
tataaaaagattatgttacacgggactgatgtgtcccatattgcaaactgataaaagacaagatattntgtttgcaggtacttactccttcgtactcactccaatgaggcttccccatgaacatttctataattgtacaacccatactccaaatatcaacaacaaaagcaaggtcaaagctgttatctttttgcacaaccgcttgaaaagctacatgtatgtggaataagtgtttatagagaatgcatgagacatcatgaagtaaaatagagttataaacttacggtgctc

SEQ ID NO: 70560 - DNA, 477 bp, Glycine max
  unsure (1)..(477): unsure at all n locations
agctatacacttataagtatgatgcttcaacgaatatatttgaacttcttttctntttctaggcacaagttgaagtgcagaaaccaatagcaaatcctagataccattacagataatacaaccacaacacacccacacatgattcatctaaccctgccattttaatcatatatggggcacagtagagcaaacattttgatcacttactatcacatactattatcagacgcagaactcttaattactctttttccttcctttagctactatgatcaaggggattaacccaaagagaaaaagtgtatcttatctcggtgcttttagattaatcttcacttaaaggtgaatcactgattcatatcatttgaccttcgcgctgagagaggctgcatctgatatggaccccacacaatatattgaccacgaaacatcaattggtagtgctgattaagacattctgcccgaatagttgacttt

SEQ ID NO: 70561 - DNA, 290 bp, Glycine max
tctacgtgacaatcttctctatggatatatccctcaccttctcgtgaagcttacacatttacgatatcttgatctcacgggtgatgatctccaaggacaaatcccttatcacactggagagaatatacattacaagtatctggatctgagtactaatgatctgcatggcgaactctcttaacaacttggaaatctgtgcaagatcgaaggtgaagtatattgatcttactggaaagtcatcatctggagcactctgatatgtccaacactcagaataatgctcgaaatga

SEQ ID NO: 70562 - DNA, 204 bp, Glycine max
aaagcgcacaaaaaaccgcgaaaaaaaggaagaaaccaccatctaggcaccaaagattaacatcacaaacaaaaaaaggacaggagtgccgtcaaaattaataccaaactacgaaaaataataacaaaaatttagaaatcaaaaaagattaaaagtagcagggtggctcgacaacaatgatgacgaacatcaaaaaaccagcca

SEQ ID NO: 70563 - DNA, 450 bp, Glycine max
  unsure (1)..(450): unsure at all n locations
gcacttcgattntactattcaaagctagatgcttctacttgttatgttnagattaataacatanaagagaagatgtacaagctctntgatgaatatgtgattgtaaagtcaagttcatcttttgatcaagttctcaacaacctactgttgaagaagatttcagtatagaagaaaatcaagagatggatgatccatataatgttagtcttttgtttaactatnntaatggtttatgattcannattatttatnntaattttctcttatattggcataggaatatatcaattatgtgagccanaatgttaatgtcaatggcaagtctgaattagatctctatttggctgagacaccgcttgagccannagttttttttcctaagtggacattttgagtatggaggatcgccagaacgtaacattctatacactgtgctatgatcgctttaca

SEQ ID NO: 70564 - DNA, 346 bp, Glycine max
  unsure (1)..(346): unsure at all n locations
acgcatcaactataatcaagccaaggctattgtgcaagcaatcaatggngcataacacaccaaatgattataatgatggatggctcanattctacaaaggtaaaatcatcactttcaaattgagctntcaaaactatcatgacatgtagagaagaatcaaggatttcaagtcacaaaatgtcaagaactnttattttcaaaacaattacccatttcttgaacatatcctataattcaaagaaaaacatgcanagtcgtacgtgcacacaannattgacccaaatattanactgaanatccgacgaaactaacaacattaacaaattaacacaactaacatattaac

SEQ ID NO: 70565 - DNA, 512 bp, Glycine max
  unsure (1)..(512): unsure at all n locations
acctgacgtcccaaggtctcctgatccccgcgacatatctccaggtaccactctgtggtcaacanacataagtaggaagactggactcttccacgcctgtctcacatcaagcttattggatatggcgcacccgtcatatgtggtactaggtggcgatcgggcgatggcacaaatcaactctcccacttccacaagtcaaacataaacacaccatccacaattgcccacctttanattgagctcacgcactcctacgtagcccttatccttgttcctctcagcaccgggtctgcatcaaccnctccaagcttccacaatatccaaacaattctatntcatttatcatgaaactaccatagaccaagaaaacagagtagaggcatgaaactctgcccaatactcattcaagatccacagttntccctactcacatacccgagtaacatgttcttcgctccgatcgttaaccatggatcgcttgaaatntatggaggttctagacataatctaca

SEQ ID NO: 70566 - DNA, 314 bp, Glycine max
  unsure (1)..(314): unsure at all n locations
ctgaaacactaagtaagttgtcaactcaatngcatgctanttaattctttaccttcatctattttgcaggatacacgctgctcactataaggtggagctcatgggtcaagctttngtattccactgaagaaacatctcatgaaattaattacatgggaaaccagcctagacaaaatttaatgaagtggatttctgaattgaacatggcaaccttaccagtncataataatggagaactactctggtatcagtcaataaagacaggtggccacctacatgcctacaacagggctactatatgaagacacaagctg

SEQ ID NO: 70567 - DNA, 359 bp, Glycine max
gcgtaactctaatgagctggtgaacaagaatgaggcatatacctgtgactgacagacaagagcaagctctatgctatgttcatagagaagcatactacggcacctgtctaactctgcctgactcttgtataacttatgagctcgagggagatgcctctggaatgagagatggagctgtgttgttacaaggtgggcaccctattgcttattctagagatacacttgatactgccaccctctactaccccacttatgatatatagcagtatgccttaataagagccctacaaactggcgaacattaccttattgccagagatattgtatgcatagtgatctcaatcactaagtacatttga

SEQ ID NO: 70568 - DNA, 466 bp, Glycine max
  unsure (1)..(466): unsure at all n locations
gtcacctgcggctgcagcttctntatcttanaaaaaactaaagcnttcttttttcttcgatttcttattatttatgatcattataagaacatcatgtgaatatctttataattaaaaaagaanaaataataagcatgcatttcctaatctttgggtgcacgagagtctgcttagttaaaaaaagtacatacaaatgtgaaagtcatcatatttaaccgatgcnngtacagtgcgaataattatgtacttaaagcatgtaattaagaatngaattatgaggtctgtatttatgaaagaacatanactataagagatnttaataataaaaaataaaaagacttatgattntgaaactcgtcaattttttgcattatcttatggtaaaaaatctttaatttattgataataatttataannaaaatactaagattcacttaggaatttcatctatatatttctattaca

SEQ ID NO: 70569 - DNA, 397 bp, Glycine max
atctggacaagatatgataagatcggatgaaataaaatctggacaaataaaatctagatgaaataaaatctggataagataagaattgaaaaataaattgtctgctctcttcaagtccaagcccaattctggattcaagctcaattgcttataattctcctaacattagattaaaaatacaaaattagtcaagtatgcccaaatgataaaactgcataattaattcgacaattaaggctaatcagtaattaaaatggtgacaaacagggttaagaaatatgagaaaataatgacacatcaacaatgtaatgttcctaatgttggagggcacttattaaggcataaagctctttatcataggtagggtagttgacggtggactatgaagtctttaata

SEQ ID NO: 70570 - DNA, 391 bp, Glycine max
gcttccataactttacactatattattggagtattatggaaacctttgtctacgctgtacctgtgtaactctggtggtcgggtttggacacgttattcacaaacagtatctgataatattaaagtacatccgatatcctcggagaaaagaggattcataatcatcatatttcacattctactaatcatatatactatgtatgaatatatatttctttcttcttacgttgttcttattatcttcccttacatgtatcttttttcatcttacctcttctttttaaggtttttcttcacattacttcctcttttagttctcctttatctttatgattttgttctttatgctctttctttttgagcataactggctatatattttattaataata

SEQ ID NO: 70571 - DNA, 426 bp, Glycine max
  unsure (1)..(426): unsure at all n locations
tctatcttctctccttctgtcagcagttcactctttcaagcctctctaagcaatggtttttgaactatatctcacttcanactaaggaattctagaaatttgcggttagaaaattcaagatcttgaaataatacataatctgaatgcatctaattgtcgtcaattctgatttagttagacatagaatntagaattgactggtcttgaagtacanacgttgggttatgacttgaaatatgcttggtagtaagctagtcttttggaattatgcttgatatcatcgagaatctacacgttgcataaatgcatatataatatcatntgttaattgcattctagatactctctcgatgacgtttgtgtataaatagggtacttggtatttgaatttgaagtccgattaaattctctcaacttagatgaact

SEQ ID NO: 70572 - DNA, 375 bp, Glycine max
  unsure (1)..(375): unsure at all n locations
agcttattccgagcacaatntattatcatgcacagcctgtgagaattggttcaccacaggccaatcatacctatggagcgatttcttgagcaagtagcttggcctgggagctcaacctcattggtgaacccaacgaggctgcttcttctgagcccacactctgcacggttgaaccagtgccagctgatccacaatctccagtggtgaatccaccttcttcttctatagcttgagtagttcccccatcttcatctttgaatatcatctctgatttcccatctggagaaagctgtgctccccctgaattcccagcttgagaagatgttgatctttctgattccttatttggagaaagtgtgctctctctgatcccct

SEQ ID NO: 70573 - DNA, 349 bp, Glycine max
  unsure (1)..(349): unsure at all n locations
actagagcttatctacacacaccacctctcataactattctcacctccttgagaagcttccttatgaagaatcctatagaagctagcgcttagagacacatacctctctatagctaagctcacctccttgagatgagaagctagagcttatctacacaccctctataatagctaagatcaccctcattgacaaatacatgacaataaataaaatctctcttacaaagactactcataatgcctngaaatacacggagtataccctatactactataatggccaatatacaaggcccaaacgaatgaaaacctattctaatagttacacagataagcgtgctcatactta

SEQ ID NO: 70574 - DNA, 265 bp, Glycine max
  unsure (1)..(265): unsure at all n locations
accgcgatcttagagcacctgggctgcagctgaaataaaatggagctctcggaatcaatggctactttcnaccatagttgataaggtgcataatatatcgagaagcttgaatngaacaacggaagctctcgagaactcatatggtcataactagtcacacgggaagtccgattctgacgcataatataccgagacgctcgaaatgaacaacggaagctgtcgagaaattcaaatggccataactaatcacacggaagtccaattc

SEQ ID NO: 70575 - DNA, 358 bp, Glycine max
  unsure (1)..(358): unsure at all n locations
gcttctcgatatttatgcacctgaatcagacttccgtntganaagttatgaccatatgaatatcttgttatcttccgttattcaattccaagcttctcgatatactatgcacctgaatcggacttccatttgaaacgtatgaccttctcaatttctcgagagcattcggtgttcaatatcgagcgtctcggtatattacgcgcctgaatcggtgttccgtgtgacaagtatgaccatataatttctcgaaagcttcgttgtaaactttagagtctcgatatagtatggcctgaatcggctgcgtggaaagtatgccatttgaatttcagagcttcgtgttaatatcaacgtctggata

SEQ ID NO: 70576 - DNA, 126 bp, Glycine max
cactgtggccattacctccctcgcccaatattatgaacagccgtcgaagtgcttcacctttggagacttccactatcacctatggtagaagaatttgaagagatcctaggatgcccttcaagggga

SEQ ID NO: 70577 - DNA, 293 bp, Glycine max
  unsure (1)..(293): unsure at all n locations
agctagtctgtccgatgcagcagtaatgatggccctatttatgttgattatcggttacnaacccggaatgtgtntaggcaaagacattggcggcataactagcctgataaatgccaaaggatactcgcgggaagtatgggttaggctatacgcccactcacgcagatataaagaggagcgttgccggaaggaagagcggaagtcaaggctcgcggctgagacaagaacgtgaaggaaactccctctgccacataagtaagatgcttataagcgcgggttagggggacgaatgt

SEQ ID NO: 70578 - DNA, 320 bp, Glycine max
  unsure (1)..(320): unsure at all n locations
acatgcccaactcctttgagtgacatttgtattggttgtatcttggntgttgcatcttagtacaattgattctcgtcttgcatcgtgcgtatcatagcgtgcgtgaagaaaagtttctaagttataaaaatttctctagaggcaaaaactctctgttataatcgattacagagttgtcataatgcgaaagactntctctcacatctgaagcttaaagagttatgtctcatatcggtgtaatcgactacatctatctcataatcnaatacaatgttgtntgatcactgattgatctattcacgagtctctactctaatcga

SEQ ID NO: 70579 - DNA, 508 bp, Glycine max
  unsure (1)..(508): unsure at all n locations
agcttcanaccacagcagcacanaatctaggtgtttttatccnctcaattcaatggctnttctaggttngaaagggtggaattataatgaggtaaatttggagcaaattctcacctcacacaagtctataacatcaatctaaacttgctcaaactggatttacacctaaatttccaccgaatcagaatgtgactcctcaacacccaactttgccctagaaatggcnntctggtcactttggtcattttgttttctctctagctcagcctaacctttctcacatgtnctatatgacatttcaagctagtattaactcactttaaccttcatttaccacagaattcagacttagtcttncaactctcagggtctcactctttttccactcataacatcacattctcactttctaaccctaaggttagtctacccttcatctctaacangttntccatcagcaaatttcagcatataaacagtcacaacatcattaccaaaacccttaaac

SEQ ID NO: 70580 - DNA, 296 bp, Glycine max
  unsure (1)..(296): unsure at all n locations
aacttcacaagacactctaccatgatttaaccgctgcgatctttgagaaaatatctggagtgtgctataagcttccgttcccgagagcatctacttattaagcatttcagcctttgctttcttgtagcttatgaacaatgccatatcttcttctttctttcttccacatccatatctaaagttacaagtactntctccatcacccacatccaccattagccaccacaaaccatcattggtctccattgtaaacccacaccgagaggaacccttcaaccgangcagaatttccaact

SEQ ID NO: 70581 - DNA, 454 bp, Glycine max
  unsure (1)..(454): unsure at all n locations
tcttaagtcaccgctgctgcaagcttgatggaactgaataagatttctcatgctntttcttccttttctagagatactttcccaccttcacaagggatatatatatatatatatatatcgcttgcacacgcgcacatatatgagaggaaggaagaattctgaatgcagtgtatttcatacagttaanaactttggagattcccttttctagccagcggtacttggtggtcaagtgtgccagacattctaccgttgatgtttgattcctatgtttgatgagaagctaatatataatatggattgtgaatactatgattaacacctctctattgaattaccatgggaattcanagttagatttgtttactttggtatgtgttagcattctggaattctgtacatggcccaaatgtttgaccatcgttatttggatacctacatctggtggtgggag

SEQ ID NO: 70582 - DNA, 414 bp, Glycine max
  unsure (1)..(414): unsure at all n locations
gcctcacnaaanaggtaatgagagtcatcatattccactattcatgaacttcatctcattacaaaaagaatctaagcaaacagaaggcagaatgttttagatgaagtttaccaaattgttaacttaactttacaaggaaatatgttattgtacaatttaattttatgttattttaaaattttgatgcnaaaagatgtgccgggctgtgtcgtaccgtgcctagcctaaaaaataaaaataaaaagttgacactgcaaaatgtttcgttgtggctggtgtgaactgtgcggacaccctgacacctcttaactgcatgttgagcttataaactgtaaacaccgacaatccaaatcaagcttggctttactaatatagacaataagtaaagttttctttataacagcctgactcata

SEQ ID NO: 70583 - DNA, 446 bp, Glycine max
  unsure (1)..(446): unsure at all n locations
agcttatctggtggcaagataatctctatagctcttcatcatttaatgattcttcttttgtttgataacatctaaatttatagaataacataaaaaaatatcttttctactttctataccagtgttacaattatttaccaaaatcacaattatcaaccaatattcttaagaaaggctagatattggttccaaataggtgtgaaaacattagcactttgaaaaaaaagtaccttatattttataggacaaaattttacatggaaaaattcaactttgtatattttgaatgaaaacatatttaacatcttttatctgctgattctgaatctattatgcaaaaataatctaatatatgacactctgatattgaatatgcgantcaattagactaaaaaatntgaattcaaactaatcatanatatttgagactaactaatattatttga

SEQ ID NO: 70584 - DNA, 511 bp, Glycine max
  unsure (1)..(511): unsure at all n locations
agagatataccaatgaggaaggtgatngaagaatggagagagagtggccacaagagtcgagggagagttngcaggaagctngagagacgaaggcattgtgtatggaagtgtggctgctgaatacccanagcagcatggtctcttcagcggcggattcctccccaccaaccaccaaccgaacctcagcaccgtaagaacccaacttcaccattggcgtcactgcttcctcttcctcttcgttgatgatggccatggtgtcctcgctctctctgtttcggattgaatngngttataatatgtggcctttataggtatgggcgttgaaaggaggaagggctttgcttcctgcaccccatanaaagtgaaaacatcatgtaccccatcgaaagtaggccaaccgagcctcaagtcacctcatgcatccnctctgtcagatactgactcagtcttagataaatgataacttctgtgtaaccacctacgacacacatccagagatctcagaataact

SEQ ID NO: 70585 - DNA, 421 bp, Glycine max
  unsure (1)..(421): unsure at all n locations
agctttgatgatatggtcttcaccgacgaaaggatcaaagtaggtctaattattgcaaatctgatcatcatgctttgatacatgccaagaaaaaactatggcaaatgaagagggtgagaatganggagaacccatgctgtgactgccattcctatacagccaagtttcccacttaacccaacatatcattactcagcccataacaaaccttcttcttacccatcacccagttatccacaaaggcaatccctaaatcaaccacaaagtctgtctaccgcatttccaatgacgaacaccacctttagcacataccanaaacaccaaccaagaaatgatatttgcagcgagaaagcctatagaattcaccccaattccagtgtcctatgctgacttgctcccatatctancttgatattcaatg

SEQ ID NO: 70586 - DNA, 496 bp, Glycine max
  unsure (1)..(496): unsure at all n locations
atctgtgcattattgctatatggattgtgaattatataatttctagttagtatatgtaaatgtacaaatatctctttatatctaattcttaacttctctgtatctatctatttatctatttattctattctcacactgttattattcacatttacttaatatatatctagaggaataacattgatgacaaaatatgaaacaaataaacatttaaacaattggtagtaacttgtctttatactttgtatctctcacactcttactattcatatctattaaacttataaaaaatacatattttgtntacataatatgaaagacaccaacagttaaataatattagtacatataaataactaacttcataccttngttcataatgtactatgtagaagtgtcttttaatccanaccaaattaatngtctcagcatcatctttcaacatacttacgcaaacagagattaatacagtatantcaatataacaatatcaata

SEQ ID NO: 70587 - DNA, 410 bp, Glycine max
  unsure (1)..(410): unsure at all n locations
gctagtctcttatactagagggcggcaaaattcttattntgcatattctttctattatgaaggtggacttcaaggactctcaagattcctaacaactcatcccatgaaagaattttagagctcttgcttttggataggtgtgatcttanggtcccacaccttgggaaagttgtccagcacctttaagtttatcttagccttggagtacatctgtccaaaagcctttaaattatttagaagaacttgaagtcttcaaaacatgttgttcacagactctccatccttcatgatgaaacgttggaatgtctggcaaagttgcactttcctcatctgacatttcngtgccttcatgttatactcatgagtccagatcttttacagtctcagttgagacttgtgactcattttta

SEQ ID NO: 70588 - DNA, 366 bp, Glycine max
  unsure (1)..(366): unsure at all n locations
ttgtatggtctgaaacaggctcccagagctngtaacaagagaatagacacctttctcttgcanattggattcatgagatgcactactgaatatggtgtgtatgttaaaggagagagtcttagatatctcatagtgtgttatatgtggatgatntactgataacaggaaaggattgcagtgctatctcaacattcaagcaagagatgaagtctgagttcgaaatgtcagatcttggagaattatcatattntcagggcatagagttcaagaggacaaaggctggatattttatgcaccacagcaaatacacaatngatgtcctaaagaggtttcagatgcttgactcgcactcagtttcaacaggag

SEQ ID NO: 70589 - DNA, 263 bp, Glycine max
  unsure (1)..(263): unsure at all n locations
gtcacctgcngctgcagctacttggatngtgaaagtagtgtgaaaggaagcgatgccgctcttttgaatgtgagccaaatacaaatgaatgcaaagagtgagaaaaatgattngtaagagtgaaatggtaacttcctaaagcaattatgccttattatttttagcacgttcgtgtggctcacttaacatacaggcgtgcttagcgaagtcatatgaacgttgagttttaaaggcctatacgcctaacgcgtctgatcacttag

SEQ ID NO: 70590 - DNA, 253 bp, Glycine max
cattcaactactatatttctcccatagggtgtatatagaccaacagctttttcccgaaggattagaaaggattgatatgacacagcactgtacacccacaggattaagatcacagcctgcttatgtacttggctgttcactgagtactatctgagatggatgaatgatgatgattgatgatgatgatggtttgatgagtgttgcttgctgatgatataatgttgtagttgatggatgatatatttatattgat

SEQ ID NO: 70591 - DNA, 163 bp, Glycine max
  unsure (1)..(163): unsure at all n locations
gaccggatccttaagcaccgcaggctgcagctggccttcacacttaggcaattcccaaataagcttggtgtcagangaatcagagtcttggtctgccaccgcttctcttcattctcctcacttttcttttcactaacccacacatcatcattccacacaacca

SEQ ID NO: 70592 - DNA, 383 bp, Glycine max
  unsure (1)..(383): unsure at all n locations
tcaatcgagttaatagatcaattatgttattaataattaatgtcattatatataacactataatttttaatgtatatttaatgtacatataagtctacataatatatattcgcgacaanttaattttgatctaataattcttttacatatataaattcttattacacttgtaatttttatttacaaaatatattgctaaatcgaaattaattataataaggtcacacacagagacttatctactataataattataaacaactataattaaagttattaatttctttaatctgttataaaaattatgagtgatacagactgacaatccgtatacggattataaatctatatgtttattagcatggttaattttgaacaattac

SEQ ID NO: 70593 - DNA, 384 bp, Glycine max
  unsure (1)..(384): unsure at all n locations
agctaggtgcatatgatctatatgctccagctngagggggagagntgaatattctttggtgtttctgaatagatntgtatgcatcattactaaatatcttttccttggtttagaagtcagcagacatagactaggctaggctatcctttccccctttctctctcttatggcttgtactctattaatcgtaagctgaaacatgaataccatatgtcctgtgagtganatttcctcacacatttnaaatntaagntacaaaagcctactgttaggttgctggaccactgattaaagtgccctacaaaatctttcttcattgatctaagccatgtccagactaggaataatgcatcatncatcaacttgctttcannttgatgttca

SEQ ID NO: 70594 - DNA, 316 bp, Glycine max
  unsure (1)..(316): unsure at all n locations
atctttgagcttcaatgaggtccttcaatggtgattttctcccatggagatgcagtggaaggcaaaggagaagatgagaagggaggcaccatccactatgaaataatccatggaagaaggagcttcaccaccaagaatgtgtcttggataagaagcttgaagaggatgctttaatggtggaaaagaaagagagaaagagggagcacgacattaaaggaataaaagagggagagaagtggaactttgaagtgtgtctcataagactttcattcatcanagttgcaacaagtgctacacatgcttctatntatagact

SEQ ID NO: 70595 - DNA, 330 bp, Glycine max
  unsure (1)..(330): unsure at all n locations
tgcagctttggtggaacccatggagcatagttccacccttattgtagataacgaccgctccagtgcctagtttgcctaacccgagagaaccctctgaggtgtattgtgatgcatcanaatgggtttaggccgagttgtgattgcaaatgaccaagtggtggcctatgcttctagaccacttaagactcatgagaggaattatcccacccatgatctagaattgggtgctgtagnttctgcccttaagatttgaagacattatctcgttggctctaagttcgaggtgtttagtgatcataagagccttaaatactcgtttagtccgaaaga

SEQ ID NO: 70596 - DNA, 381 bp, Glycine max
  unsure (1)..(381): unsure at all n locations
tggtatcatcctttggatcgacaggatgtttgataatcaaagagaactattaatggtttgacttntcaaatggtttaagttttctaaagttatactctttaaatggttgtctcgaccatacatgaagagtctataaaagcaaggctctgttttgcatttcaataatcttgaatacttttccaatcaatctcttacaattctntacaagccttgaatctctttgaacttcttcttcttctttgtaccaaaagctntctaaagttntctggttntctaaaccttgaanacttgtgctattcatcttttcattctcttctccctccaccaaaaagaattcgccaaggactaaccgcctgaattctttttgtgtactcttctccc

SEQ ID NO: 70597 - DNA, 403 bp, Glycine max
  unsure (1)..(403): unsure at all n locations
agcttgtataccannatacatttgtagtagcttggtttggtcaaagtactattgtagaatgtatgatttggaaccttatagaatcttgtaagcaatatcttgaatntagtcgctaattatgtgttgtaaaactagctgaaagcttataagttataagctacaatacaaaaaactagaaacttataagtacctgatttaagtgttaagtaagattaactaataagttagttgataaataaaaaaaaaacataaaatgatatatttaaaacttctatttgaatttattttggataacttatcatctgaanaagtacgacttgtattataaaaaaatagtaaagatttggttatttactcatattatntaaaatcaactntaataaaactaatatgggttaaatat

SEQ ID NO: 70598 - DNA, 348 bp, Glycine max
  unsure (1)..(348): unsure at all n locations
gcacaaagtactaacacactntttttaaaagataggtttataataattattagaagaattctctacacaagaataattaacccttaaaataattatacctagctctagcatcattccaaaaataaaattatttggcactaattgattactctacctttagggtgcaattaattcatcacaattagaatttagaattattaactaactgtactactataacatgccataaaatgttatgatgaagaagaataacatgatttttttatcttatgacttatagncaatcacaattttttggaaaatattactatcatgttgtgaagacatattgnaataagcataaatacc

SEQ ID NO: 70599 - DNA, 438 bp, Glycine max
  unsure (1)..(438): unsure at all n locations
atcctctgagtcacctgctgcatgcaagcttggctaactctatangagacatcctataaggggctatggatatgttttcagcacctggtaccaagtctatgggaaactctatctttctctctcaagtggtaaactagatatatccacagggaacacttcangaaactctctgacaacagggaggtcacccatcgaaacctttgtcttcagttccagattagacaagatcatgtacacttgagcatcttcttttaaatatgtcacaacttggttggtagagataaacatcctatccttacttactccagaatcatcaaacaccacacgtttatcaaaataagttaacaagacatggttggaagataaccagtccatacccaanataacatcaatttggctaatggcaacanataaataatcagaatgttctccaaattt

SEQ ID NO: 70600 - DNA, 286 bp, Glycine max
  unsure (1)..(286): unsure at all n locations
tctcaatatacgttgccaagtgtganngtatggatcttcattnggtaatactcatgtaaacacgatatctaaagggcgtgtgtgtcccttcctactcgagtatagttcgatgccaattaacagatgtatatctaattaaagatgttcttgtgttctatgctgaggacaaaaataccaaacactgattcctcgagagtttggactaatttaaatcaaactttgttcacagatccctcttgttgaacttatcctaatttaaacaacattatactcacaacataatata

SEQ ID NO: 70601 - DNA, 418 bp, Glycine max
  unsure (1)..(418): unsure at all n locations
agcttcttatccaaagctcatcttggtggtgaagcttcttcttccatggtttattccctagaggatggcgcctcctctcacttcttctnctttgtcttctgctgcatctccatggtggaaaatcaccattaaaggacctcattgaagctcatagatccagcctccatagaagtcccacaagcaagcttccatcaagtggtaatcagagcaccaaagcttcaagtaggtgctccttanacctncattaattntttgctntaccttctcttccattgggtgttcttcaatntatctncttgtatctcctcacatgtcttgtgctaaatgttgttaacacgattctttagagtttccactgattaaacttgctatagaagctagaattgattttctatgggtcannattctggttcttggt

SEQ ID NO: 70602 - DNA, 148 bp, Glycine max
  unsure (1)..(148): unsure at all n locations
acgctanatcagttcatgcatatatccatgtccaactatctgagcatggagtcttccatcaagaacctggagatacaagtgggacaattagcccaacaaatggctgaaagacccactagccgctctatagcccacatatagaataaca

SEQ ID NO: 70603 - DNA, 339 bp, Glycine max
  unsure (1)..(339): unsure at all n locations
actgtctaaccactggacacctttctgattatcgctccaaccgaaaatgtctgcccagtcttcaccaactgatcctgaacgaatatgaagaaactcaggtcaccaggatggctaatatccgggtcaagctgacacaagtgtaaccttaacaagtatgtgaagcctgaatcaacgggaagttgccatgtgaggttgaaccccatgttgatggtgctattacttcccatattccttanggatcggtacactgtgtctggtgccgtgtagntaggaatctctgtgaatctcagcttaattctaatgccaatatctagagatagtacacttttgagtcgtaca

SEQ ID NO: 70604 - DNA, 427 bp, Glycine max
  unsure (1)..(427): unsure at all n locations
acgccacgctacgacgcgtcgtntcattattattcatagtctttctttgcatgcgccaccatcatcaattcaattccaatgggtaatatctgcgctcgtttgaagtcgaagccgccgccgcaatcctcagccaagaagcgttcctcttcccgccgagagaggaggctcgacgacgccgcgattcgcgagcaggccatcgccgccgcgattctcttcaagcagcaccagcaacagcagcaattcgatcgctccacttcgcttcggtatccgaatggagtctccaagaagaataacagcaacaccttgccaaggagttcgagttccagggcaaggtccctcaccgaccctctccttcaacctcaccagcttctcaatcaggtanagggaaaaaaacactggttgattnntttattgaactcgatcgcac

SEQ ID NO: 70605 - DNA, 460 bp, Glycine max
  unsure (1)..(460): unsure at all n locations
tgactagcatacagctatgtaataatattctactttaaggaaatgtctcgactctcacgtatcaattattctcactaccagtcaagtttacaatanatggtgatatccctttctatacnttttcgaccccatannaaatggaatttgtatattgtaccccattaccttttccttagtcaaaagttaaccgtttggattgggcagcagatgaatgaagtcgtcccaatcttaaaaatttntctggattgcattgtcattcttactaaagacttaaacatatgcatcctaatttaaagtgattgngcggagggaggagactggagagagaaaataaagaaaanaactataagcatgatatgtggtggaanaaaatagaaagagaataagagaanaataagataanaatgagtggtaagagagtgaaatctataaatatntcattacttctttacaaaccata

SEQ ID NO: 70606 - DNA, 408 bp, Glycine max
  unsure (1)..(408): unsure at all n locations
caatcattcanacctagggttcttgcatcaacgaacctaacatanagagtcaattctccgcaagaaaattagaggacanaaaatataattactcgtaaaaactggagaggaatataggagaaaagttntttttttctgtgcataaggaaaatcttaaaggaaataggttgcttattcatgagactgctaaacatttgtccacggttgaaaaactaatattgatcggatgtaaataagcccaaccatgatngaacactacataatntatctggcacattaaataaataacattggaaatatagcaatactgatatcatgagccanactatcanatatagcaatacctgatattgaccaaaatcatatcaacataataatggtttaccaaagctatcanagtcatgtaat

SEQ ID NO: 70607 - DNA, 535 bp, Glycine max
  unsure (1)..(535): unsure at all n locations
ttagagtcacctgatgctgcaagctgatgatttacattctcccctntctcaagcaaattcttaattcttcttgtcatcgtcaaaatcttcatgatttacattctctctctttttgatgatgacaaccacctgtaggttaggagcaacaacaaagaanaaatatctatttgcatatagtttactcccncttggttttgcaatgattgcttatatgaaaacagtgaagatttcatatttttcatatgtaaaccttattgtctcatanacaatagataatgtttcttactatcttatcntttaatctttctctcccctttgtcaacatcaaanacaaatcatgaatagagaagagagagatgttaccactttgtgcaatgtatgagaatcaagtgacaccaaaaggcattanaacaatcattcaatattaatcaagcaaaaacaagtacaatatcacatcaatcaaacacaatcaaatacagtcaataatcanatatttcatatcagaataattaaattaacaatcaacttactatac

SEQ ID NO: 70608 - DNA, 424 bp, Glycine max
  unsure (1)..(424): unsure at all n locations
ctaagctatgctgtaacatctacacagacctcctcaacctcagtagcaaaatcagccacaacatatcaattatgacctctccagcaacaggtaaaatcccggtggaggaatcatcaaccttatatggcaatcttacaatacagcaacaacaaccttattttcaaaatgctgctggcccaagtagaccatacattcctccaccaatccagcagcaacaaccccagaaacaacaaacagttgaggctcctccgcaaccttcccttgaagaacttgtgaggcatatgactatgcaaaactgcagtttcaacaagagaccagagcctccattcagagcttaactaatcagatgggacaatnggctacacagttaaatcaataacagttccagaattctgacagaataccttcttaatcggtccataat

SEQ ID NO: 70609 - DNA, 384 bp, Glycine max
  unsure (1)..(384): unsure at all n locations
gatccaattcaaaggacaaatactctntactcgcgatgtctaatgagtccgtattatatctagacgctcgaaattgaatgttcaacctataaccaattctacgactgttcttttactcggatgctgattgagttcgtattatcagacctcgacttgattgtgactctgtcacatcaaagacagtacttttactcgatgctgatgagccatatatatcagacctcaaatgatgtgacctagagcattccacacatactttactcgatgctgttgagccataatatcagacctcgaattgatgtgaacttgacaattcacgacatacgtttctggatttgatgatcctatattcaacctgagtgatgtaccttgaccataacacaa

SEQ ID NO: 70610 - DNA, 274 bp, Glycine max
  unsure (1)..(274): unsure at all n locations
gctatgcattcatatcctgatgagggtagtccatatgttctcagactgttttatcattngctgcccaagtttcatggtcttgcaggtgaagatcctcataagtatcttaaggagtccatattgcttgtccaccatgaagccccctgatgtccaagaagatcatatgtttcttaagactttttctcattctctgganggagtggccaaagaatggctatactaccttgcttccangtccattttcagctgagatgaccttaagagggtgttcttg

SEQ ID NO: 70611 - DNA, 431 bp, Glycine max
  unsure (1)..(431): unsure at all n locations
ctcgcccaggcgagctagggtgcttcctccataagcaaccgccttctggaggaatattctggaaggcccaagtgggcctggtttgctattgcacccncatttttactaaatatacccnctttgctcttttggtgatttntttccgtaacgttacgaaattttacgaatntcgtaacgatgcttgttttcttttcgtaatggtacanaaccttacggattacgtaatcatcccttttttccttctggaacgttacggaactttacggatngcgcactaacacttccttttaatttccggcatgtcacggaacttcacggattgtgctacaatgccttcttttgactccngcatgtcacggaacttcacgaattgcctaacgatgggtgccaagtacctcgaactggtcaaacaagagtcgcatcccaacaac

SEQ ID NO: 70612 - DNA, 153 bp, Glycine max
  unsure (1)..(153): unsure at all n locations
agctnnttgactntgtatatnnttgttgttggtctctgtcataccctaatttctttcggngattattacttgatgacatgcaataaatgaagtccagagacatctcagaaatctaaaggaagcacgcttgcgcaatccatgaaattccgtaat

SEQ ID NO: 70613 - DNA, 358 bp, Glycine max
  unsure (1)..(358): unsure at all n locations
tcgtctgtanggatgatngcgtgttacaangtggcgatgcctactgtagactatatttcttccatgttttagttgtatgtaacttgtgttttcttcacagatggtgcatgcatgatgacccttaacattgaaccgttgagattcctatatgctggaaagtcattaatggtacaaaatagcattgcacacatttcaaacgtctccttgcgaaacgcatcaaacaactacaacccctcgttccacaatgttcttagatcttcaaccaatggactcagataaacatcaatatcatttcctagctgtctngagcccgatatcatcatagacaacatcatgtatnttcgcttcatgcacaacc

SEQ ID NO: 70614 - DNA, 516 bp, Glycine max
  unsure (1)..(516): unsure at all n locations
agcttcangctgctcaattgctccaggttgctgcatggaaaggcattttctgtatggtgatcanncagaggaaagcacaaaccacaatactccttgcgacagtgtacagaatttcttgaattcaaggctcagctcgngttactcanagntagactcaaccgcatnacaggtttgccttcaagcttcttagtttcagatgatgcagatagggttagagctacctcatgcactcctctaatgactatggcatcatttttggcactaaactgctgggagttgaggccatcttctcaataaatttctggcttagcangagtcatgtctccaaaggctcaccactggcagcatctatcatacttctctccatattactgagtcctttataaaaatattggagagaagctgttctgaatctgatggggggcaactggacatatttctaaatctctccagactcatcaggtctctcactgattgctatacctgaatatctctgatgctgngcctgaacaggaa

SEQ ID NO: 70615 - DNA, 331 bp, Glycine max
  unsure (1)..(331): unsure at all n locations
gattaccactgtgcttgaacgttgagaattaaattcacatgtgaagagtccattcttcacacaaagcttgtgtatcgaaacactgatttgtaatcgattaccagtgatagtttcttgaaaaatcaaaagatgtcactcttccnataagttcttgactctgtcaaatttggtttaaagttttctataagtcataactcttcgtatgtgtctcttgaccatacatgaagagtctataacacgcagactttgatttgcatttcaatgatcttaaagcacctttacaatacaatccttttcaatcattgaatctctttgaacttcatcttcttcc

SEQ ID NO: 70616 - DNA, 441 bp, Glycine max
  unsure (1)..(441): unsure at all n locations
agctntcactcacatcacaatcctattaccatagaggtcaccctggcaatgtcatcactcttcaataatgggatttccttgtcattgatgtttctcattaaaacgagttaacaacacaagactcgagcaacatgctacttttcttcggtaaatgtgtgacatgggcatagcataagattaatttaaagataatacccaaaccaataatctcacgcctaaaagtgcgaatacaatgggtgaaagaacaacanatgggtggaaatcaacatcaattagaanatatccataaattntctatgacttacgggacaggannnaattatatatgccactntgctatttcaattatcgtgtnttcgtaagatcancgtattagttctaattatgaatagccgcgtattggtgacatttaatgaatgcttcttntttttttttctggta

SEQ ID NO: 70617 - DNA, 417 bp, Glycine max
gctctgactctatgttggcttagttttgtgaacccaatattttgatagaaggttgtcttatgtttctcttaaagatcttcatttcatttccttttttgccttggtaaaccacttcgatgaaactggtgtgtttggtgagtctattgagagtataaacacactcaggactgagaccttaaacaattaaaagaactttattagcataaaagttataaatatatattattaataatttcgctttgataaaatatcataatgctataatcattactattttatacatacgcatcgtcatttgtgaactgtgactagtaatttatatttacttaaaacttttactgaactgatgtatatatttactttcgcttgaagattatattattatagatgcaatatatttatccatgtgtatatata

SEQ ID NO: 70618 - DNA, 389 bp, Glycine max
  unsure (1)..(389): unsure at all n locations
agctagaatcggaccatccgtgtgaaantatgaccattngaatttctctatatctttcgttgntcaatttcgagcttctcgatatgtgatttgcctgaatcggacattccgtgtgaaagttataccagttgaatttctcaagagcttccgttgttcagttttgagcgtctcgatatgtgatttgcctgaatcggacattcgtgtgaannagtatgaccattttgaattctcaagacctttcgttgttcaatttcgagcctctcgacatattatgcgaccgaatcggacatccgtgtgaaaagttatggcccatttgaattctcgagaagttccgatggttaatttcgagcgtatcgatatattataagcatgaatcggacattcgtgtg

SEQ ID NO: 70619 - DNA, 365 bp, Glycine max
  unsure (1)..(365): unsure at all n locations
gcttgatgcacatatggagaggttaatganacaacgagatgatgcgctccatgagaggttggatcaaatggagaatagagatcataatgaagaagaaaggaggagaagagggaatgatggtgttcctagacaaaaccgaattgatggtattaaactcaacattcctccatttaaaggaaagaatgatccggaggcctacttggagtgggagatgaaaatagagcatgttttctcatgccacaactatgacgaggaccagaaggtgaagcttgccgccacggcagtttccgactatgctcttgtgtggtggaacatgctacaanaggagagagcatgaaatgaagagccaatggtngatacatgga

SEQ ID NO: 70620 - DNA, 327 bp, Glycine max
  unsure (1)..(327): unsure at all n locations
agctacaaccaagaggggatggtccatttcaagtacttanaaggataaattacaatgcatacaagaatgaattgcccagtgagtataatgtgagtactacatttaatgtcttacttaactctntntgatgcagatggagaagctgatttgaggacaaatacttttgaagagggagagagtgatgtggacatgngcaggactaanggcaaggaacctttagaaggacttggaggacctatgancagggctagaataaagaaggctaacgaagctcttcaacaagtgttaaccatgccatttgaatntaggcccaagttacaagtggag

SEQ ID NO: 70621 - DNA, 414 bp, Glycine max
  unsure (1)..(414): unsure at all n locations
tggtatcagagcttcattcttgtacaaagtttagaagcttcaagaaaaagatggcctcagcaaattccttatttccagaacggaattctatcatagacctccaatctttaatggagagggttaccactactggaaaacccgaatgcaatattttatcgaggcaatagatctaaatatctgggaagccatagaaatagggccttatatacccaccacagtagaaagagtttaatagatggtgttcatcagtgaagcataacctaganaacctagagatgatggctaagaggatgaaacgatacatacacctanagccaaacataataacatctgcctagaatgataatatttagagttcaaattgcaaatgctaggaatgtggacactttcataacacatatgactacaatgtaa

SEQ ID NO: 70622 - DNA, 480 bp, Glycine max
  unsure (1)..(480): unsure at all n locations
tttaagaataatactaacatatggataatattctcacgatttgaaattctaatttttttactatntatttatatntatatttatatataggcagacatgtgtttattatgtatgaatttatanccatatcaaaacctattttcttccgtacaacttcacatacaactcacttcttctacatatntgtctcttcttacccattttaatggtngatattntatcatttgtttatatacttaagaagaactacattatattaagtctttattattatntgaacaagatacgattctctatttgaccattggttgaatagaattcttggtatactatcttaaatctgtcttacataaatcatanaagagaaaaaatacatctaaagaaagattgcatctnctatagatctgaaatggaaatataactagaccttcattctcttgaaagacataangtcaactttaacaaatattaaaaaatcat

SEQ ID NO: 70623 - DNA, 353 bp, Glycine max
  unsure (1)..(353): unsure at all n locations
tggttttaaccgagccanatggtgttatgtgatccatgttgtcgatctcatctagtgttataatgctntgatgctctttaataaaactataaatcaacactgtgcacactgcttactatcctcgtcctcagactagggactatatattctactggtacgtatggtagaaagtccatctataatctgagacccttccccctctaacccaagccatgctaaaacaaaagtagggtgtggaacaatgaccaccatatacatatttctatgaaggttaacattgcttgtntcagtaatagctatctttcaaattgaagcttactttttgatacctatgggacctctcacatttcaca

SEQ ID NO: 70624 - DNA, 421 bp, Glycine max
  unsure (1)..(421): unsure at all n locations
ctgctcaatgctccggttgctgcatggaaggcanaggtctgtatggtggtcatcagaggagcacanaccacanacccttgcgacatgtacagatttctgattcaaggccagctgggttaccaagttaaccaatgcatccagtttgccttcaagcttcttagtttcagatgatgcacgatgggttgtagctacctcatgcactcctctaatgactatggcatcatttctggcgctaaactgctgngagtnggaggccatcttctcaattaaatttctggcttcagcaggagtcatgtctccaagggctccaccactgncagcatctatcatacttctcttcatattactcgagtccttcataaaatattggagaagaagctgttctaaaatctgatggtgacggcaactgggcacatagttc

SEQ ID NO: 70625 - DNA, 399 bp, Glycine max
  unsure (1)..(399): unsure at all n locations
agcttcgaatgggtaaggcatgttcatcatggctggtccgaacctactccattttttctctaatatcantaaatttagagcgatatctattacaaatttgcctgccccaagagttcatttctgtagataaattgacagcatagcaaggagatcatgaccatnntggattgttcatgcatactgaganataaattccgattntggttctagaagccaagaattnttannattggaattttttgtttttaaatgaacatgaccaccatcattaagcttgaggagaataggagactgatatgantntgatgttaccaagttaagaagttggaaggaaggaaacatatcaaaccactatggagttgcaagagcacagtccaatttttcttctatagcatctag

SEQ ID NO: 70626 - DNA, 287 bp, Glycine max
tacttcagtacacattgtgttttcagtgccattaattataccatttgtcttctcctattttaacagtattgatcttgcacacgaataaatttgagagggatcagttcccataactatgtgttaaaagacaatgacacttaaactgcatgaccacttaatatataaaggccttgactgtctctcgctcatgtaactatatctacctatccactcacaaaagagactgagtcttaatccacatttacaatacttaaatacctcacgtataccaatgtttgttatcactc

SEQ ID NO: 70627 - DNA, 428 bp, Glycine max
  unsure (1)..(428): unsure at all n locations
atgctctctnccctcggcaaggatctcttctatggcanaagcgattattntcgntggcggtaatattattaacaagccctccgaagccttccaccgagatatcttgggctacgtgggccttgtcataacctttacaagcaaagcccgatgaggttccgagctcatgagtaattccaacagcgagaccctggccaggagtttggtgagctgctcaataaccttgaactcgctctgctgaattatgcggagaaactcgctgtgcttctctagtgacaccttcttcttgccataaccatcccttntctccggaggacctcttgccagaatatcctcgttcggagtgtgcggggtttatcatcttgttctccacaacctttgccttcccttgacgttcgtgggctgaattggtagggcgggagcacaaatac

SEQ ID NO: 70628 - DNA, 353 bp, Glycine max
  unsure (1)..(353): unsure at all n locations
actagcttaattactcttgcatncttagtggccattcttgcttcgtatgcattcatcttcatctcgtttacttatggtatccttatcttccagttttaacgagcttcgaccgatcgatcaagccatcatctctcctaataaatgatagacatgaatctcatgccgatcatattgtgttgcaatctcatttaatcactgatagaataatattcaaccgatcgttcacacggtaacctcgattaatcaacaaggggtaaataagctccaatcggacattctactttgagagttcttatgaatgagttgatacataaccaagtgaaactaatgctaaaccaactcacacaccaatc

SEQ ID NO: 70629 - DNA, 448 bp, Glycine max
  unsure (1)..(448): unsure at all n locations
ttcttattggtcatacattctatcaatanttattatttctttataaacattatatcatcgggtttcttctcttcctttctagatattaactagagattggcatctacctaattctttttcttatacattacggccactcaaaaggaacagagcctaatgttgtttcctatttatttattacattgcaacactgttggcgtgcataattattctctctcacaaattatatacaacgttgtgggtctttttctctctaacacaatatagagttgcttattttattgataatactccaactctgtgttacatcattgtctctgaatagagtacccaataaggtaatgattacttaatataagacaccaagataagcatatataatctaatatcattgcttcctcttattattatcagtattcattatcattatagtacattacttggctat

SEQ ID NO: 70630 - DNA, 437 bp, Glycine max
  unsure (1)..(437): unsure at all n locations
ataataataataataataacaacttcattttatcacatcatatcttatccagatttattccactagatttatttatccagatttattccatctacaatttatttcgttcagattttatttcatccaatcctatcttatcttggccagactttattttaattttgtttatgggcttggacttaaaatagattntgtagctttggcgctgaggacctaatccatacattttttaatatcatgctctntantatttctttngatatactntgtgctntaacgacttgaattcaatatgatcttgtttatcaattatttttggatttgacattacttatacgaaatttataagtttctttagttagatttcactagactgtaaataattactaatcaagacgtcttaagcagctttaaatagctcatggcccaatagactt

SEQ ID NO: 70631 - DNA, 398 bp, Glycine max
  unsure (1)..(398): unsure at all n locations
atatatcaccactctccaagtaggtctagcactttgtcactttttaaataaacatattctcacctgagcttcctcgtcttcaaagtgcttcaatatagtatctgtgattngttcggtatgggagctcaacttaaaataaaattcagcagatgatgagtcagctccagcactttggatactatctatcagacacctaagcttgtcaaatggagttcttcatctgtgtggtcttggagaanatgcagctctgcttntatagcagggaatattactctgtcctcagcaatgcttcagtcaaaaaaccgaanagctcatttagcatgtacgcagaaagagaggttaaattaagacacgaaactagtattatgacagaaaacataagataaattgctcccatg

SEQ ID NO: 70632 - DNA, 408 bp, Glycine max
  unsure (1)..(408): unsure at all n locations
atttaaagtatgaaccatattaaataattgtcgcgttgtggtacataaaagtaaaaacagaatgaaattaganacgtttctcaatcaacagtcttcctattcctgcattaaaattgttatggatacatatatntgtcagtgatttctttgttttatacctaaatatcttcttggcacttgcgagtcttgacagaatgtttggtcactgagaaagctattcagtttctgacttgttctcgccggaggctgtgactcatgtggttattgttctattgctggttctatataccactctttcttgtgattggagtacctatcatgtaacatataatatggatactcctatcaattaaaataatcgaaaaagtatatggatgagatttacttcaaagataatccaatttaatt

SEQ ID NO: 70633 - DNA, 327 bp, Glycine max
  unsure (1)..(327): unsure at all n locations
agcttcttttaattagtataggagcacttcanagtcatatcccacttgtatttcatgcttntagtaattcaatcatagagcacttaattttaagttgttaggtgaagaaagaaagacattgcttcctcctattttgtgttttttcattttttccccatgtcttttttccccctcttctattccattcaatttactattcaatganttttttcacttgcactatgaaggcttttaatttgtaagccttttctgcttcctaagattcaatcagcaactccaacaatatagcaacatgtatgttctcttcttgcttcactcctcgaaaca

SEQ ID NO: 70634 - DNA, 354 bp, Glycine max
  unsure (1)..(354): unsure at all n locations
ctcatacaacaacctctctggtcctattccttccacanatatatttccgaagtatgggctgtaagcagctantattggtggtaacaatggcctctgtggtgcacctctcggtgactgcagtgatccagcttctcgctctgatactcgtgggaaaaagtttgattctcctcatgctaaagtagtcatgatcatcgcagcttctgttggaggtgtctcactcattntcattctagttattttacattttatgagacgtcctcgggaagtcaatgattcctatgaaggcactgagcctccctccccagaatcagatatctatntccctccaaaggaanggttcgctttccatgatct

SEQ ID NO: 70635 - DNA, 393 bp, Glycine max
  unsure (1)..(393): unsure at all n locations
agcttataagaacaaaatngccttaatcatttccaaatatgcatgtgaattatgacgcatcaacaagaatcaagccaaggctattgtgcaagcaatcaatggngcanaacacaccanatgattataatgatggatggctcanattctcacaaaggtaaaatcatcactttcaaattgagctctcaaaactatcatgacatgtagagaagaatcaaggatttcaagtcacaaaatgtcaagaacttttattntcanaacaattacccatttcttgaacatatcctataactcanagaanaacatgcaaagtcgtacgtgcacacaaaattgactccaaatattaaactgaatatccgaagaaactaacaacattaacaaattaacacaactaac

SEQ ID NO: 70636 - DNA, 323 bp, Glycine max
  unsure (1)..(323): unsure at all n locations
ctattaacaaaatatcttactatatctcgaaatatgtccaacttctctttttgaaatataatagccctcacttaatcagcnttcttaatagtgtaaaatatatttactacaaactcaacacatatattcgagagtgtttttattagtgaaacctattgctactatgcacatacccatgtgttgttcttgcaccatgcaataataagtaccacgcccaatgggccttaataaagatcccgtgcatatcatacaataggatcataaggcttttaaattaatatgagtgacatgctgataacgcacaagatctagattcgagtcct

SEQ ID NO: 70637 - DNA, 352 bp, Glycine max
  unsure (1)..(352): unsure at all n locations
agctntatatagactntagagctttgatccattgagagacctaagctagctattgtctaataatagctggggcactntacatgtggcacattactatgcacagagagagtgtgaggaccataaacatcttctgcagcgtgtcttcanagaagtacatcttgccagtgtcgccttgtgctccgagatgaattntagtgtacaattcaaatacaatgttaatagcacatgacaaaaggaataaagaatgtcaatacaagacaattcaaagcttccctgatcgaggccgtacccgaatcaaataaacatgaaaatgcagtaactaggaagtgatcctaggtcgtttcccaacgag

SEQ ID NO: 70638 - DNA, 457 bp, Glycine max
  unsure (1)..(457): unsure at all n locations
agctcgcattnggacttgcganagcctcactccatcattaggataattatctgccatctcatacaaacaaatcanacgtaacaagacaattataatcgttggttgaatacctcacccactcaagtgatcacacaattatggcttttctctaatgaaaacactcttgccttttaccactctaattcccttgagttttaggcaattcaagagattatggccacaacaaagaataattcaccaatatgtgtaagggaaggctagagagacaaggaaaagggtaaccgagaaataggctaacaatggtnttagacacaattgaaggaaatgaaattcagaaattacgaaatcaagtaacaatccttcatacaaccaatatattaccttanagaaagtttttttttaaagtcttcaacatgaaccttcagccaattttttttttntgctatacaattctctt

SEQ ID NO: 70639 - DNA, 461 bp, Glycine max
  unsure (1)..(461): unsure at all n locations
cccctcaccttacataccgtanggatcagttagacctaaaagctaagatggtattagagtctattctagattcattattggaccacctaccatactatccatgcaccaagcctaatagtgttggggagaggcggtgtattggaaanaaactcaagtcctacattacataagatagtgcctattcagatcttataaagtcttttattttgctttcacaaggaatattcaccactggcgtagggcctaatctcctacagggtacaaaggcaaaagagtagaccactcccaaccagtgtcgctccattcaaaagagctgggaatcaaactcccaacctctcgcttaaggagcatgatcccttatcactcataccaaccagagctggaaacattatagtatatcactccatgtgtcaactccttgcataaaataaatcgtatttagtaatgatatcttgattaat

SEQ ID NO: 70640 - DNA, 429 bp, Glycine max
  unsure (1)..(429): unsure at all n locations
tatcggtatcacagaacttttctcccaggaagattcaccatacagatatatttcatcacacaaattctacaagtgacacaacacattacattacttganataaaatccatacgaatttacgtatgatgggttgagaaaaaggaccacangcatcagataagctccnnctttttaaacccttcataactttgacnttccccacaatgaaatgaataaatacattgtaaataccaaaataacanatgtcagattntacccttatcaatccagtcctttcttttattatgaggacaaaggcaagtaataagagaacttgaagtcaaatgcattggtctcagattcatatattcaacatgcaatatannaaantgcttacttattcagaaacatttctgtgtttcttaaagaagaaacctatgtagaatctga

SEQ ID NO: 70641 - DNA, 411 bp, Glycine max
  unsure (1)..(411): unsure at all n locations
tatatatactcaagctattcctctgaattgatctaatangatatactatcgtctcaatgactgtaacatataaatccttcattatgtattgccttcatgcgattcatgttactctcantctatatattatttcgcaactcccaactgcgaggatgtgtgtcactgaattgtaaaccatgttcccaagtttcacgacaatccaacggtttacgagtccaggatcatagttctactatgacacgttatgtgtctctgctggaatatagaacgctatactgcgaatgacattcctctcacgttcgacattattttgatatctacaacggtgagaatggtagaaattgagttgccgacatggcgctgaaccatcatgatgatccaacagttaacgtgtctgagatcatcgcttac

SEQ ID NO: 70642 - DNA, 113 bp, Glycine max
catatcattattagaaggagtcaaaataattctaataaataactgaaattttttaatttactacatgtaaattttctggtggttgtatctaaggatgagatgccgacaaagta

SEQ ID NO: 70643 - DNA, 390 bp, Glycine max
  unsure (1)..(390): unsure at all n locations
gagtgtcatgatgtttagttctatctaattttacctctctggttggaaggaaagaaataagaaggatggagggtcatcaacaagcaatcacaatgttacagctcanaaaactcaaaataagtcagatgaggcacttaagaaagcaaggagtagtgagattaagtgctataagtgttngggaaaaggacacatagcttcttaatatccaactaagaagactatgttacttaaggaggatggagaaataattagtgaatcttcttcataatcttccccatcttgcgatgaagaggagcatgaagaggaaagagagtcggaaggagatttgttcatgattagaagatgatgggtagtcaagaaagtgagttggatgactgtcaaagagaaaat

SEQ ID NO: 70644 - DNA, 468 bp, Glycine max
  unsure (1)..(468): unsure at all n locations
atctataatagggagagaagtgaagtggtatggtttcatcccctgacgcactaatctctctttcgagatttgttacgagaattgattccgtgaagaaaatccaagccgaggtgcttccgtaacgtttctgtaacgtgtccgtgagtgatttcgcgaaggttgtcgaccgttctttcgcgctcttcattcgtacttcgtcgatcattaggcttcaacgggtaagtacctcaaaccaagcttttcgattgattctatgtacccgcggtggagcacatctcggttcatgtatttttattctcgtttcatttactttttataccctcttttgacgtgcttatgccatgttattntagtcatttcttgcttaacctaaaaataaatataaattccaccgatcgtttgaatgttttatcgtaacttggttaaaagaaatctaccgtcgtctgcctaacccgtggaataaaaaaa

SEQ ID NO: 70645 - DNA, 537 bp, Glycine max
  unsure (1)..(537): unsure at all n locations
ctttagtcacctgcacgcatgcaagctttagcttgcaagtccaattganatgttcccgactctttctctatagtttatnntaaaaatgtttttggatgtaacacctatanaagaacattntcgaanaaaaaatttatgatgagaagaagttcgtattgaagttgggattagaggctaagaggatngattgttgtgtggatggttgcatgttgtaatgatggagcgctaactaaatgcaagtttcgtaacaagcccaagtatcgtgcgaagactatnngaacaatcattaaaaaaccagttccagtaaaggcaatgttctattttcttgtaataccaaggttgcagaanatatttgcattgatgcanatngcangccanaagacatgacactatgagaatagaagatattcagccatgttacgttatccctcttttggtgaagcctagaaacactttgatcaggtacatgccagatnttctattgatctgtggaatgtgcgactttagttatacatagatgaaattaaacatatattc

SEQ ID NO: 70646 - DNA, 417 bp, Glycine max
  unsure (1)..(417): unsure at all n locations
agtctataccgctgatttaatgtaattagagcctatatgatttcctttctctntngntttctgaaatctacctcattaaataaacaaagagatcttgtttcatctgttcttgcagttccaccttttctcatatcattttgcatgtttttgtttctttggtcttgtttggtatagatatgagggtcgattctttgaggatcctaacaacgagggtttgacaatcgattttgatagagatataagccaaacgataaacgaggaagaggaagaggacgtcctgtcaccagagttggagaggttggtcgctcaggaagaacgtgaaatgaagccttaccaagaagaaaccgaattggtaaacatggtgaccacggaggaaaagaaagaagtataggtaggaaccgatatgatcgcgcctat

SEQ ID NO: 70647 - DNA, 359 bp, Glycine max
attagctagttacttttttttattcatcatagatgaaatccaaagaaagtcgatgttttggctatttataagaatatttttatataatatattacctttttttattcacgtggtatgcacaacaaacggggaatcttttacaaaataacgatactacattaatgacggggaattatttttagatagcgcaaatgactaaaaatgatgagcactcaaaggggacgaaagaaatgaacagaatatagtcacaaaaaatgggaccacacgtacgaaatgatgaaagctgatcgaactaccgtgaaataaaacgtgaagcgtgatacgagatacttacgattgtacgacattcgaggtacgac

SEQ ID NO: 70648 - DNA, 317 bp, Glycine max
  unsure (1)..(317): unsure at all n locations
tcgtcttacagacagcanaanataatggttatacggatcttcatctctagtatttccgccagtcagcgtgactcagatgtcagtatgacagatcttgtgagcgcggaagatgacgtaaatctacgcgtgtcaacgggcttgtcggccgcgattgacgaagggagcagaagactacggtagtctttgcgtgccatcaagcttttcgtcttacagacagcaaaaaataatggttatacggatcaccactcgagtattatcgcccgtcagcgtgactcaaatgtgagtatgacagatcatgtgagcgcggaagatgacgt

SEQ ID NO: 70649 - DNA, 416 bp, Glycine max
  unsure (1)..(416): unsure at all n locations
tgcacctatatgaagaggaagaagagaacgagaacacacacacaatattccggagaataccattccttatagaaggtaaaactagaagcaggaaaatcaatcattaggagtcattccttccctccattccctttcttacttacccacttcactactcattaccctcttgcaatggtaaagcatttcatgacaatgagatgctaaaacctctcttgttggagctagcaaccaattggctttgatgaattactcttctatctagtaatgtatttaattcattgcttttttcggctaatttatgattgggttgacacccaattatggaagtttaagggtgcatgagaatgttatcttaaaaaacaannagggctataacattcattatggaaatatgatttattagtcatatacatgct

SEQ ID NO: 70650 - DNA, 483 bp, Glycine max
  unsure (1)..(483): unsure at all n locations
tgtctagtgtttatgcgagacagagaccaacatgttatccattgtagcaggtaccaagaagaattaaatctagtcgcggcccacgagcacaaagtggcggacgagtatgcctaagtgtacgcggaaaaggaggctagaggaagggtgatcgacgtgttacatcaagaggcaacaatgtgaatggaccgatttgctcttaccttgaacaagagtcaagaacttccccgattgctagccaaggccaaagcaatggtggacaccgactccgcccccgaggagatccacggacttctcagctattgtcagcatatgatagaattaatggcccatataatcagaaaccgctagcangtttgtattgtcactcagatcttgactagttataactttctgaataagaatgagttatcccatgttttttacttcaaagatcaatgcgaatcaaatcacttcccgcatttatctctagcatgcattcatttt

SEQ ID NO: 70651 - DNA, 358 bp, Glycine max
  unsure (1)..(358): unsure at all n locations
gaagatcaatgacagnggaatgcataatgacgaaaggtgattggagatgccacttcagggagaagagagtcaagaacaagttcaccaccataggaagccatggataacagcttgaacgttggagaagatgagtggagggagagggagagaatgggcacgatatttatgcctcgaatgacgtctacaatttgaagtgtaatttctcacatgatcaaagtagatataatgcacacaaaacgcctctatctatagcctaagtgtcacatgaaatcggagggaaatttgaatcttattcacatttcactctgatttaaatttgtggagctaaaattggagcctaacagtcactaattatgat

SEQ ID NO: 70652 - DNA, 467 bp, Glycine max
  unsure (1)..(467): unsure at all n locations
cctagaggggatgaaccttttcaggtgttggatttgatttctttcaatgcctataggttggacctcccagaagagtatggagtcaggaccacttttaacatttctgatttaactccttttgcaggtggagctgatattgaggaagaggaactaacagatttgaggtcaaatcctcttcaaggggaaggggatgatggaatcctccctatgaagggaccaatcactataacaatgagcaagaggctccaagaagattgngctagagctgttgaagaaggccctagggttctcatgaaccttatgatagaattctgagcccatgggccaagggtgtgtccaattatctttgtacatattagactaggatgtcattatatttggccttgtatatatggctccatattgtangtagggaccctataaaatatgattttcacccttgttttttggcacctaactagttttga

SEQ ID NO: 70653 - DNA, 419 bp, Glycine max
  unsure (1)..(419): unsure at all n locations
tgcggcatgcaagcttccatcatggcgtcatccanatctccgtattcctcatcattgcgatccgctcctagtcaggatcacatcatctggtatcagagcttccgctcttgatacaggttctatcctatccaattctttttttctttctttgtaatttgtccaggttcgtgttttgtccttattctgttatttgttatcttgattgcatcttgatgcgttcttgtttgagtctttgtttcgatcttgatcttgatcttatcacggttttgatcttgttcttgttcttgtatcttgattctttcaggcttcgggtaaaaaaaaatctgtttgagttttgtttcaagttaaacaaaaaagttgcagacatgttgataaaaaaagagaagaaaagatacaaagtagtgggtgtttgatctttg

SEQ ID NO: 70654 - DNA, 405 bp, Glycine max
  unsure (1)..(405): unsure at all n locations
gcttggatcaacttatctctaactggcttattcttcttttcttttcacttctattcttcctttgtcttgcanaaattttgttgatcttccactggtgatgatcatagaaggctaaacactcaatcaattcaaggatccactccgagcaaagttgaatttcagtcatggtttagtatttatattatgtgtgaatgttcatccttttttaaatcatattttcgattttcatgattataaatatgcttaggattgaaaatgaattaggttatggattcatttcgtaattttgaaatttaatcatagattggttggatgatattcccacctaatttgcgatctcaatgaatttagggattaattcgattaaactaactctaatgacattgattgaacttcacaacatga

SEQ ID NO: 70655 - DNA, 379 bp, Glycine max
  unsure (1)..(379): unsure at all n locations
gctaccgtgtctactacttgcatactaagaaactcgtcatcagtcgagatgttgaagtttatgagtatgcttcttggaattgggatgaggaataaggggagaacaatgttcttatacctgctcaactacctcatgaagaagctgtggaagaagacccaggtgaaccaccttcaccttcaccacaacagcaagatcaagagctatcatcaccagagtctactccgagacgagtaagatctttggtggacatatatgaaacctgttactnggccatacttgaacttggaagctntgaagaagcgtcaaagcacgaagtatgggtcaaggcaatggaagaagagatacatatgatcgagaaaaacaacacatgggagttagt

SEQ ID NO: 70656 - DNA, 460 bp, Glycine max
  unsure (1)..(460): unsure at all n locations
gcttatctactattccctnttttacataaatatcttttttatttttggaatatgaatttatcaaagacctcaacacagatcatgatgattggtttctaaaagtgtgtattgttcgattgtggaatatttataacaagaaagatgagcaacacccaatgttattgtaaatgatgttgctagatgaaaatgtaactaataacgaatgtcgaattgctcaaaaacaaataaaattaggaaattttgtagcacatgattaacctcagtcgaactcaaaaatatgattcaatatggttcctacgttcattcacttataaacacaaagggggaattttatcgaatagttcgtgagcgattaaataggaatgcgaaatcacaataacaaaattcatgaaactcaacgaagtactattcaagattaaagcgttaattcattcctcaacccatacaatagaattatcac

SEQ ID NO: 70657 - DNA, 406 bp, Glycine max
gtgacctgccgcatgcaagcatggatacgcaagccttggatccttgtcttgtgatgctcgcggttattaatttaaggctgggaatttcataatttagcaaactatgatgatgcaagacccagtagagttggattatatccgttagttatattaggtagcacacgataatagataatatattagtacaattttctagataaagcagtttaggaatcagtaaaattatatgtcgtttaaccaagataactggattagatacaggttattccatgtctttggcgtctctattctttctgtatgggtcggttaagtttaaatacctattagtatcttagaataacgatatatactgctatgtgttcttatttgatactgtaatgaaaaatgtaaatgatcccttaactaa

SEQ ID NO: 70658 - DNA, 327 bp, Glycine max
  unsure (1)..(327): unsure at all n locations
attctccatgctgcgctntcaacgtttcttttgttcatggattaaaaaaaatgtgacattgtccttctttaacaaagtcatctatgtttaccacaatttgtgatgtataataatgtgtaaaacaagttataacagtatgtcttttaaggattgcgaaaatattttctatttggattgtgtctttttatttggtaataagaaagaaaaaaaacttgttgtgaatccatttgttttgtaaagattcattccctattatatttaaagtgttcttgctagagtctcctctaccagctctttctcttgtggacattgttngtaaacaaccta

SEQ ID NO: 70659 - DNA, 366 bp, Glycine max
  unsure (1)..(366): unsure at all n locations
tttctttccattggtttctcatttgnggggtatgtggtggcggacacggaaaaaaactgtagtatcctaacgacttgtactggaaaaaaacttaatagtcatgttcattttggtggcaggaattaagaatacattcgttggagctttgcactggctgttcttcattttaatatcttggatggaggttactgcctctgttatgactaacctcttattacaaaagatggattccctttatgattgaactactatataagtatgcacatatggtgttctatggtgcgacagggttgaagatgacacgccaccaaaagaggaagattgatgagacacatgtagaggtagagttattacttgtcaattaca

SEQ ID NO: 70660 - DNA, 95 bp, Glycine max
atatattaataaaggatcgatgtctctgctactaaaaatcaaagccgggagacacggggtgtttttttatagcaaagaaaggccgatattaaaat

SEQ ID NO: 70661 - DNA, 360 bp, Glycine max
  unsure (1)..(360): unsure at all n locations
aaacttcctgctatattgttgattacatagcggtacccggagatatgtcgcgggggtcatgagaccttggtgacgtcaggtggggtgctattgtcctaaaccaagcttgaccaatcccgacccaacccgggcatagtcgatcagtgagaacctgtgatgtacctaaacaggcgagctcctggcagtccacagattataggataacaacaccacaaagcaaggaggcttgtggtggctggccagctgtgaaactngactgatatgtgagatatggtctctggtaatcgattaccaagggtgggtaatcgattacaaggctttaaaatgaagacagggggctaagatggtctctggtaatcg

SEQ ID NO: 70662 - DNA, 381 bp, Glycine max
  unsure (1)..(381): unsure at all n locations
tatggatcaggatgtagtgtgttagacggtgggacgcccagactaaagcacaacacgttctttggagcagggagtagttcatttcataggccgtggactttttactcgagtagtagacagcgcgttctctcttaccggactcgtgatgttgccgcagcatacatccaatggactcatgcaagatcattatatacaagatgagaggccgttctggtaccaacgacataagcacgagagggttcatgagacactgtgtgatccttccaaacgcctcttgacaatactcaatccaacggacggagtgggtnttgcgtaagagttggaataacggctcacaattagcggtgaggtgtgatatgaatctggcatataaataaacgt

SEQ ID NO: 70663 - DNA, 352 bp, Glycine max
gcacaacaagatactcacatccacaaatctcgcataagcccaccatgcgctgttgcccacctccgactgagctcacgtactgccacgtagcccataacctcgtatctctcagcaccgggtgcccatcaatcctgccaagcttccccaacatcagagattatcaacattcaaacagcacacattaccacggccaagaaaacagggcaaacgcagaatactctggccaaaacaccagccaaaatcacagctcttctcacttaaagaccccagaaacgactccttcgatccaattcgctaaccgttggatcgactccaaattttactggaagtctatagcacataagcctacatt

SEQ ID NO: 70664 - DNA, 521 bp, Glycine max
  unsure (1)..(521): unsure at all n locations
agtcacctgccgcatgcaagcttntgcannaatgaaaaatcctctctatgctgcgatctcattccctcctctcaggataactcgaagtccattcttcaactcttctagatattcctcaggtagacgatgcattttttcacatatcgtagcgatactttctctagcaacgtcctgaagagtaactttgtctgcactagaaacacgatgaatcactttctgctcaaggcaattaatctccgctgttccattctccatcttctttgctgcggcagcatcagctataggccaagtttcttgtgaacttgcactttcagccggagattcacggagattgtcagagtttgacctatgttcatcaggagacaggaggtggtctgaggaaacaagagacagacgatgtnttggtgctccaacctgtgattgtggacgcagaggtagcatntttcgagaggacgaccccggtcgatgttatagaagaagattatgtgcctattaaaagaatctacatggtggtcactagt

SEQ ID NO: 70665 - DNA, 394 bp, Glycine max
  unsure (1)..(394): unsure at all n locations
gtgtcacgtgtntgtgacgcatatatgttataattactataaaacaattgttttgagagacaatgtcaacttatcaagtaaaaagttaatatttatcccgaaacactaattatgaaggcatagtgaactcccatgtttgcatcccaagatcaaatgtaatggagaattgtgtttgatgttaatggttagaaattggttgaaacccgcctctcaagtatgccacctttccattcttcctttgcaaaaatattagacttgttaaagagaaaaatacaaaaagatattgctacctgtataaaaaaaatatatggctgtaatatcatggaagtccaacatgcactatttcatagatccaggattagtgttgtgagcaggcaaaccgagagcaacacct

SEQ ID NO: 70666 - DNA, 433 bp, Glycine max
ctacaatagacctcctcaacctcagcagtatattcttcctcatcagaacaattatgacctctccagcaataggtacaatcccgggaggaggaatcatcccaaccttagatggtcgaatccttcacaacaacaacaacagccttattttcagaatgctgctggcccaagcagaccatacattcctccaccaatccagcaacaactacagcaacagccccaaaaatagcaaacagttaaggctcctccgcaaccttcccttgaagaacatgtgaggcaaatgactatgcaaaacatgcaatttcaacaagagaccagagcctccattcatagcttaactaatcagatgggacaattgtctacactattaaatcaacaacagtcccaaaatacagacagattacccttctcaatctgtttataatcccaaaaatgt

SEQ ID NO: 70667 - DNA, 389 bp, Glycine max
  unsure (1)..(389): unsure at all n locations
ccgcggctgcagcttggaagcgatgttttcaccttctcgctatctctctctggtggctgtgcgagcgtgcgctgagcgcaacactcctgggctgcgcgaggaagactctggaagaagatgagctgtacaggttcactaagcacaccgctgtatctcactaagcgtaccacttcagttcatccgctaagcgagaaaggcacgcgctaagccgaaattcactaatgtgcgctaagcggtctataagtgcgctaagcgcacgagcacgaacaacgccacctatttaagcctaaaattagattntgtgaagagaggttggactgggacttatagctatgcatgtctagggattctagagagagaaaggtccaagttctatagagtattgagag

SEQ ID NO: 70668 - DNA, 455 bp, Glycine max
tataagaaccaaaatgccttaatcatttccaaatattcatgttatatatgacgcatcaacaagaatcaagccaaggctattgtgcaagcaatcaatggggcaaaacataccaaatgattataatgatggatggctcacattctcacaaaggtaaaatcatcactttcaaattgagctttcaaaactatcatgacatgtagagaagaatcaaggatttcaagtcacaaaatgtcaagaacttttattttcaaaacaattacccattttttgaacatatcctataatgcagagaaaaacatgcaaagtcgtacgtgcacacgagattgacccaaaatattaaactgaaaatccgacgagactaacaacattaacaaattaacacaactaacagattaacaaaaccaacaaaactagcagaaccaaagaacacatccccccatacttataacaacaca

SEQ ID NO: 70669 - DNA, 471 bp, Glycine max
  unsure (1)..(471): unsure at all n locations
agtcgacctgcccgcatcgcaagcttgcttctacaattcccatacatcatctctttcttctcttatttctttcttcattntgagtatcttccaaagtatctgcaatatcatcaacaaactcctttcttggggaggtaatattagtttcatcaaaagtaacatgtattgattcctcaattgtcataattcttttgttgtatattctaaatgctttactatgtaaggaatacccaaggaagataccctcatcagcccttgcatcanactttcctagactttctttaccattngttagaaacaaaacattacatccaaaaacatgtaaatgtgcaatggttggttttctattgttgaanagttcatatggnngtntcttaagaataggtctaattaacgctctgttcataatataacatgcggtgtatactgttctgccaaagtattttgaagactgtgttatcataccatctt

SEQ ID NO: 70670 - DNA, 482 bp, Glycine max
  unsure (1)..(482): unsure at all n locations
cttctcagtagatcatggagcgacccgagatattcgtgttatatcctatgtaatcaagtagtttgaaccctattgttgggcctaggctatagggtctgtgttggatttcccatgtgattactttttgtaccactttttcttcgtacaaatatatttaagggaaatctggtttgtcggaaagcgcactagatcgtcatgtatttaaaaattaaaatgaatggatccgagtatcgaacacagggaactaatgttagcttgagttaaattcagaaatgaagcattgttgagagaacatgtatgatggataatttcaaacagaatntaaactaaacctttatgctataaactatataatacaacgtaagtaaaagtgacagcagtaggtagaaatgttgggtctttctaacagacaagctgatgtatataaatatatttctctaatcatcatgctcttgtgtctatgttgagcctacatactaaac

SEQ ID NO: 70671 - DNA, 416 bp, Glycine max
  unsure (1)..(416): unsure at all n locations
gtgacctgccgcatgcaagcttggtcatgcgatgtatgacatganattttcatgattttattattattcgaccggtgaggtatggatttcattgaaaacatggcccacacagtcaccttcatgattaagttaaagaatctaactaattcctataactaatatattgtaagagtaaattaaatcatagagctgcaaactaaaataagagactgagaagaagaaaacaactattagaaagatacaataaataaatataggatcaagaagataattcatatacagatatatggcacattgagagactgggttgtgacatatcgtgtagcatataaaattaaagccggacagtgagaaatcggattatgcgcaccggattttcattggcaataatgatttgtatcactgtcgatagataa

SEQ ID NO: 70672 - DNA, 464 bp, Glycine max
  unsure (1)..(464): unsure at all n locations
tatgcagaggaggctntacgagatggagagaagaatgtcttatgattagtgtggcattgcattggattcaaagcgcatgagggtacaactagcgaacagtttatggagcgaaaatgatatgaaccacgtaatgcaaagtgctacaatagttgccaagttagtgaggttttgggaacgaggcaaggccctcaaggagatgttcggccttagcttcacaccccaactcacagggcgaagatcctcttatccatggaaaatacctcagatctctttatagcggattattatttggaccgcacgtgtacagtgttaaagacattttatcatagtttctgattgatgtatgcttctttatcgagataatagatgtatgagttattgattaagccactctgggcggcggtattgactttatcatgggtttggtgtatcagttagcgaaccgacatttattctcttcttta

SEQ ID NO: 70673 - DNA, 460 bp, Glycine max
  unsure (1)..(460): unsure at all n locations
atcctttagtcacctgcggcatgcaagctngaagacaagactatacgaggtatcttccttgttatatcaatatctccaagggctaccgtgtctacaacttgcaaactaagaaactcgtcatcagtcgagatgttgaagtttatgagtatgcttcttggaattgggatgaagaanaagtggagaagaatgttcttatacctgctcaactacctcaagaagaagctgaggaagaagacccaggtgaaccaccttcacctccaccacaacaacaagatcaagaactatcatcaccagagtctactccaagacgagtaagatctttggtggacatatatgaaacctgtaacttggccatacttgaacttggaagctttgaagaagcgtcaaagcaggaagtatgggtcatggcaatggaagaagagatacagatgatcgagaaaaacaacacatgggagttagt

SEQ ID NO: 70674 - DNA, 411 bp, Glycine max
  unsure (1)..(411): unsure at all n locations
gcttatctacttatccctttnttacataaatatctatcacaatatatgtaatatgaatttatcaaagacctcaacacagatcatgatgattggtttctaaaagtgtgtattgttcgattgtggaatatttataacaagaaagatgagcaacacccaatgttattggaaatgatgttgctagatgaaaatgtaactaataacgaatgtcgaattgctcaaaaacaaataaaattaggaaattttgtagcacatgattaacctcagtcgaactcaaaaatatgattcaatatggttcctacgttcattcacttataaacacaaagggggaattttatcgaatagtttgtgagcgattacaaaggaatgcgataacactaaatcaaaattcatgaaacaaaacaaaatacaatt

SEQ ID NO: 70675 - DNA, 445 bp, Glycine max
  unsure (1)..(445): unsure at all n locations
gttgcaaacaaagagtcgtttaaggcgttgaaccttgaaatgatgttttacattttgaacaacagagagaatcgttaaagcgttgaaccttggaacgatctcaagtgatatatgatgaaatgaagttagttatgagattggtttatcttggatttgtttattaactttcaatctttataaagacaatcttactgcactagtgatctattaagattgaactctataaagaanaagagaatggcgatgatagatggaaaagatgaatgtgcacaaaacaacataggggaacccctaagggtgcatagatcaaattcaatatttaatagcaaaactaaccgatggtcgcacgaagaatactgaacaagatacgatgtagggattggtcatagtcgtgagtcggtaacgcctcagcttcgtatctgttcttctctctttctaattctct

SEQ ID NO: 70676 - DNA, 300 bp, Glycine max
aattgatgcattagcaaatcacaaccctacgcattcgcgtggtattatggaatattatataataatctttacgatcataatcaataatcaacacatggaggttggctactattattgaacagttctatattataatcaaatagatatattatgacacactatattctgaaagcgcactcaattcatgatcattaagcaatcaaacctacgatgtataggtagaaaaacaatagaaagacaccttatgatcatatataatttttcttagcacgaggcacgataatatatcacatctatttc

SEQ ID NO: 70677 - DNA, 509 bp, Glycine max
  unsure (1)..(509): unsure at all n locations
atccttttagtcacctgccgcatgcaagcttgtanggttaaagtctcacgaatgtcactttcttattcaacaattgnnagacgnggctatacgagacatcttgccatacaaagtcaggttcaccataactcgcctgtgctatttcttccatgctatatgtagcagagtgattgatccaataatgtttgatgagttagaaaatgaggccgcaattatactgtgccaggtggagatgtatattacccctgctttcttcgacatcatgattcacttgattgtgcatctggtcagagaaatcaaatgtcgtggtcctgtttatctacggaggatgtacccggttgagcggtacatgaagatcttaaaagggtatacaaagaatctatatcgtccggaagcatctatatgtgagaggtacattgcagaagaagccattgaattttgttcataatacttagagaaggctaaagctgtngtgcttactgagtgtcggcatgatgacagagtgggtg

SEQ ID NO: 70678 - DNA, 366 bp, Glycine max
gaggccaatttagtcatcctgcttggacaaatgagaaaactggggcaaatgaatagggtgaggatgaatgagaagtccgtgctgtgactgtcattccaatacagccaagtttcccaccaacccaacaatgtcattactcagccaataacaaaccttctccttacccaccgcccagttatccacaaaggccatccctaaaatcaaccacaaagcctatctaccgcactttcaatgatgaacatcacctttagcacaatccataaacaccaaccaagaaatgaattttgcagcgagaaagcctgtagaattcaccccaattccagtgtcttatgctgacttgtctccatgtctacttgataattcaat

SEQ ID NO: 70679 - DNA, 434 bp, Glycine max
tatggtgatgcagtagatgatgtgatcccattccttcttcttgtgagaactgccacgacactccaccacctactggttatccttcttatggagcaccgccaccaccttctggctactatatatatggtgctccaccaccaccacacaaggcaggccatggctaatgagccctcctgctgcaggtgttcagtgttgtacaccccctgcaccttacacttatggttatggacctccaaatacttattatgcgcatactaatccgtacacctatgtgccttatgggaaaggacaaggccctgcatttatggttctgccaatgctagaacctctcatcatgactttctctgacttcattttatagcatgaaatggctgctgtttgtatttatcgacctaaacgctcgaaaaataaggatcattttagatgacacacat

SEQ ID NO: 70680 - DNA, 400 bp, Glycine max
  unsure (1)..(400): unsure at all n locations
atagagtggatctcttttatcttagtgagagcgattctcctaaattcttgagtgattcaagaacaccttggctgtatcaaaggactntcacaacctctgtgtgttgacctcgctggaaagagngattctttccttcctttcatcatcacccttggtctttcaacccacaatatcacaaaaatccaccttctgcccanaaataatctcgtggccataactcccattttacgcactcaaattaagtgattcttgagcctaaatagaatttcaaaacgagacctttcacctcgttttggaatcacctcatttggagccctgtagcttcagttactgccatatctatatttcttgccagccaccacattacctacgttttaccaatcccatcatccattttatg

SEQ ID NO: 70681 - DNA, 231 bp, Glycine max
  unsure (1)..(231): unsure at all n locations
ctagcttggttntaactacgagtgtctcatatcgacgggacacttattatttttttcaaagtatacagtgactttctagaccccgtttcagttccagcgttacgatagagtgaagggctcaatccgacattcgacttacaagccaattgtcatctgacttttcttagagcttccaggttaaatttcgagcgtcttgatatatacacggctcacctgacatcctagataaaa

SEQ ID NO: 70682 - DNA, 481 bp, Glycine max
  unsure (1)..(481): unsure at all n locations
agtcacctgcggcatgcaagctntcatctagccaagaatatacaaaaggtgttacattagaacctaacgattcctaattatatgggccatcaaatctatcattgtgtgacagtaattgattaacccatgaatcttcttgggggccgtacacacttcggccatggcttttgctttggctaatagacgcgggaggtcttgactttcattcaaggtcaaggcgaacctatccatccacatagtcgcttcttgatgcaatgcatcaatcaccctccctctngcttctttttcggcgtacacttgtgcaaaatcctncactagctttngntcatgggccacagactggttcaactcttccttgtattgccctatgatagctagcatgctntgctccgtggcttccaagtgttgagccaaactcctttggacctcgccaagcaactaactcctctttaagatcatgccatgcacccgtgaccgatct

SEQ ID NO: 70683 - DNA, 375 bp, Glycine max
  unsure (1)..(375): unsure at all n locations
tctcggctcatgctgngaacgcctctagttcaacacccgtgctgtctattgcacccacccagagggaagctccccaagttccaactccgaacgcgactcgaccggccggtaattccaacacaacaaggaactttcctccgaggccgttgccggaattcaccccgctcccaatgacgtacgaagatcttctaccatccctcatcgccaatcatttggccgtggtaactcccggaagggtcctcgaaccccctttcccgaagtggtatgaccctaatgcaacttgcaagtaccatggtggtgccccggtgcattccatctgaaaatgtttggcccttaaatacaaggtccaacatctaatggatgccggatggctga

SEQ ID NO: 70684 - DNA, 505 bp, Glycine max
  unsure (1)..(505): unsure at all n locations
tcttggttctaagaatgtcagaacttgctttgtantttctgaggctgatggatattccaactctccctttctagcaatattccctgacttcacanagatccctgagttgtcttcaaaatattgccatntagtggatttcaagtatttatgttataaaaacttcgtaccccattgcccagaggctcttcgctatgcgaaggtatggnggagggatattgtacgcaaccttacccttgcatatgcaanggaggctgttccggattcgaacccatgaccaacaaatcaccaagtatttatgttatgttgggaagaaattattntcttgtaacaatctgaagcttagtaagctntagcttgagggggagtgttagaatagttattntattatgtgttggacagctgtataaagctgtcttagctgtagactnttcctcttgtgccttctctataagctactttcacattataaaagagacagctgagtgttgngggtaacacaactcac

SEQ ID NO: 70685 - DNA, 475 bp, Glycine max
  unsure (1)..(475): unsure at all n locations
gcttttatccaggctcatcttggtggtgaagctccttcttctattgcttattccctagtggatggcgcctcctctcacctcttctcctttgtcttccgctgcatctccatggtggaaaatcaccattaaaggacctcattgaagtcccactagcaagcttccatcaagtggtaatcagagcacaagagcttcaagtaggtgctccttanacctccattaattatttttctttaccttctcttccattgatgtttcttcatttttctccatgtatctcctcacatgtcttgttctagacgttggtaacatgattctttagagtttccaccgattaaacttgctatagaagctagatttgattttctatggatcacatttcttgttcttgttctcgaaccatgaattgtgttagtttacgatccttcgagatttgtctggtatattttgggctgaacctatacctaaaattttacaa

SEQ ID NO: 70686 - DNA, 451 bp, Glycine max
  unsure (1)..(451): unsure at all n locations
tgccgccgcaagcttcgttntaattacgagcgtctcagaatcctactgttctctattggacatccgagtcaaagtgagtgtcgttngaattgtttagagcttatgtttcaattacgagagttttgatatcccacgggacacaatcggaaatccgagttaaaagttattgtcgtttgatttttctcagagcttccgttttcaattacgagcgtctcgatatccaacgggacacaatcggacattcgagagataatatatttcctttaaattgctagagcttagttttaattggagcgctcgatgatatgggtttatcggcatccgagtaaaatattggcgttgctttatagagctttgtttaatagagggctcatatattacagactattagaatcggtcatgtattgcgttactttacaacttcgtttatctgacgctgaatattaagtca

SEQ ID NO: 70687 - DNA, 363 bp, Glycine max
  unsure (1)..(363): unsure at all n locations
cgacaataactattgactcggatgtcttattgttttccgtaanatctcgagacgctccatattcaaaacagaagctattagaaaaatctatggacgataactttntacacggatgtcccattgagtcccataatatatcgagacgctcataattgaaaacagaagcgctgaccaaattcaaacgacaataacttttgactcagatatccgagtgtgtcccgtaatatatcgagacgctcgaaattcagaacaaagctattagaaaaatcaaacgacgataactctttacacggatgtccgattgagttccataatatgtcgagacgttcgagattgaaaactgaagctctgaaaaaatcaaac

SEQ ID NO: 70688 - DNA, 418 bp, Glycine max
  unsure (1)..(418): unsure at all n locations
tctctgaagagcgactgtttgttctcttgaaactgnagagtagaagaagctgaacatgaactacatgtcacattcatgtaaagattacctttagaatagcgtgatagtctagaagtgcctgttagtttgaatatcaataataaacttccttgtcctacatctaatttaagtgagacacgataaagtcgaggaagcaacccaggtgatctaataactcgaaactgattctagccaattggggcacacaaatatatatcaagcatgtacacattgtcaggcttataccctacgccactatgttatcttaacaataggatacaatcaaaatcctgattagagcgattgaaaacatcaacccttgaggcatgtcattgatcgttaccacatacaatatgctacatgagatccataaaagaag

SEQ ID NO: 70689 - DNA, 473 bp, Glycine max
  unsure (1)..(473): unsure at all n locations
ntgatatcaaggctaanattatggtcacattggtgtttatattctctaatatacccatncaacaacttctctcaatattaaataaatntaaaatgaaatttaacatattttgactgctatgaaggtatgtggatgggattctacatgaaaatagaggacaaaatctttgtttgttgatccaacttgtgtgaggtttatacaggtgtaccatttcttatgcaaataatacgttgttattggttgggagtgctgcaatttatatcatgtgatgattgggaaattgaaagatatataataacatggggacaagattgcaccaactgagaaaaacaaaaggagatttagtatttggactagaattggattgcctgaattaataataacaactatctccattgtcgtgcgaaatattgcaaagtatgattctaatcgccaagaatataatataatctatatgtagcctccattgataa

SEQ ID NO: 70690 - DNA, 379 bp, Glycine max
  unsure (1)..(379): unsure at all n locations
tgagtgaanatgtcatagagggatccctgttcttaaataattatcttcctgataccttgcttatattctaggagagcatatggctcaagacaaaatttaccccaaatttgggggagtaaagtcagttataatgcgaagaaaaatgttaagcatacgcacacacaacaaataagttgaatgtatatagaagaattgtgctgatgtaagaatgacataagcagatgaaagtgcaaagctagagagcgagccaattgtattaaatagaccattgggattagtcaatgaattgtgctctcttatattctaacgctataatcctagaaaaccaatgaatctttgttgccaagcgctactacaagccttgaatagtacttctgat

SEQ ID NO: 70691 - DNA, 331 bp, Glycine max
ttacaccatcaactctaatataccgctgtcaagagaaataaatatccttcatccacaactatgatgatataaaagatgtgcttaaatcttatttggttatgtctatataatatctcacaaatatttactattacaggaacattacaagttttggaacaaataaccttagaaacacttctactcaagttgtgagaaatatatatggaaatgcttacatttattggaacctgtataataattatgagaattggagatgtagaaagttgtcactcctaaattaatcttcattattttattggtgacttatgtgcatctatcttaatatattatg

SEQ ID NO: 70692 - DNA, 368 bp, Glycine max
acacatatgatatatatgctccagcttgagggagattgttgttatttatatatgacactctacattcattgtaataaatatagtttataggcacataatcattgatatagttagaagagatcatatatcctccatttatttgtaataagtgcaataagcctatataaactgagtaccatgctgtattcagacacacagtttcagtctcaatatgcctgtgttctttctctttaacactaagcaaaatcatttttatattaattctggattaggctgttatagatatgatgtaatagctatagtgatacataagtcgtgtacagacttggaaaagggaattaaggtgctcgtttgttattccgtgtttt

SEQ ID NO: 70693 - DNA, 484 bp, Glycine max
  unsure (1)..(484): unsure at all n locations
tgcggcatgcaagctnnttggagtataaacatgggaccaactctattctatttcattatggaagtcatatctagtcgaggtctgagagaccatacaagtttcctaacgatttctaattatgtgggccattaagactatcatatgctgacaatagccgagaagcccatgaatctcttcgggggcggagtaagtgtctgccatcgccttggccttggctaacaatcggggaagttcttgactcccgttcaaggtaagggcagaccgatccatccacatggttgcctcttggtgtaaagagtcgatcacccttcctctagncctcttttccggtatacttgggcatactcattcgcgattctatgctcgtgggctgtggctagacctaactcttcttggtacttggcgatgatagctagcatgatggtctccgtctcgcataaacgctgagacaagcttcttttgaccttgacaggcactaactcct

SEQ ID NO: 70694 - DNA, 316 bp, Glycine max
  unsure (1)..(316): unsure at all n locations
gttgaatgctctattcaatggagttgacaagagaatcctcagtctgttcatcacatgtacagnggcgcaagatgcatgggagatcctgaaaatcactcatgatggaacctccaaagtgaagatgtccaggctgcaactattggctacaaaattcgaaaatctgaagatgaaggaggaagagtgtattcatgacttccacatgaacattctttgaaatgccaatgcttgcactgccttgggagaaagaatgacagatgaatagctggcgagaaagatcctcacatccttgcctaatagatttgacatgaaagtcact

SEQ ID NO: 70695 - DNA, 479 bp, Glycine max
  unsure (1)..(479): unsure at all n locations
agcttctcttccttcctctcgagtccttttcttcttctatgttctctctctgaacacacgttgtctctctctctgcgagttccttcgagcttccaaaggtcacgcgtatcgcggaggttccctagccctcgaaagctaggtatcggtgcacttacttgtatggagtgaacaaggataccaaaatggaagcaaagcacaaaaatggtggcttgggggctgcaaaatcatgcactgccgtgagctcaccacgttatgaaatgttgggggaagttatggtgtgaagaaagctccacacccgtgcccctttattatgttttcatgtagagggtgctcaccccggcaagctaactctgttatatatttgggaaatttttttgaaaaattgactaaccccctcggttgtgctcgntattctaatcctattattacgaatgaagaggcacattcaactatggcttaagaaaaatagatgaataaaa

SEQ ID NO: 70696 - DNA, 359 bp, Glycine max
  unsure (1)..(359): unsure at all n locations
tcttgtggaccttgaacaagtcatcaacttctctttctaactctgccatgngctcgcgaatggaccctttcttcccttctcaacttgagttcactattgctaccccatatagctccgctaaatttgttccggccatactcttccttgcgagccctcttggtctctcgtacaagggctcttgcggtaattgcattctcttcccgtaacccggcacactccttccgaacgtgtgtagcagccaactcgaacttctccttggcgagtattgccttatctaactcgcttatgagagcttggacttcctcgttctcttccggtgcttacaaattctcttcgctgacgacttttaacttggcgag

SEQ ID NO: 70697 - DNA, 275 bp, Glycine max
  unsure (1)..(275): unsure at all n locations
acatcatngaagccctgatggaagaacactcgtagcaagaagaagatgatatattcacccatctaaattaaattcattaaatgagctcgaatctaactagttggataattatgtgtttgtactctaaatctcaatctcaaatatggttcaagtgtgggaatcatcctttaaatctgaactaactagatgacctagtgaactctctctcaattaatatattgtacacgttggtacccaaactgttcctccactgttatctactcatccatgtcgat

SEQ ID NO: 70698 - DNA, 471 bp, Glycine max
  unsure (1)..(471): unsure at all n locations
tgccgcatgcaagcttatgctgcannatattacaatagacctcctcatctctttcttcttaatcaaccacagcagaacaattatgacctctccagcaacagatacaaccctggatggaggaatcaccctaacctcagatggtccagccctcagcaacaacagcagcctgctccttccttacaaaatgttgctggcccaagcagaccatacattcctccaccaatccaacaacaacaacaaccccagaaacagccaatagtggaggcccctcccaaccttacctcgagaacttggaggcaatgactatgcgaacatgcagttcacaagagaccagagcctcattcgagctaaccaatcgatgggcaattggtacccaatgaataacaacagcccaaattctgcaagctgcttctcagctgtcaaatcccaaaatgtagtgccattcttgaggtcggaagcatgttaggactc

SEQ ID NO: 70699 - DNA, 487 bp, Glycine max
  unsure (1)..(487): unsure at all n locations
atttcgttggactcatttcgttcaattntggtcttagaaacgtgacctaagcgcttatgccataatgctcatgaatatgtactatgaattctacgcttagtaccacacaattccgcattaaaggattcaccataggaagctacagtatcaagtaaatatagattatcataagtcaatagtgaaccagttccaacaatatctaaattgagagacaacctanacacattgtttccaaataaaccacaaataacccaattgtccaaataagagattgaaaccaaatttcgtctaagtgatggtacaacaagagtgcctttcaaatcgaaataaagaccaatacataatgataatctaaagttacctatagcttccaccttcgctaatttaccatctncaatgtatatccatctttcagaaatcaatggcttccagtagcttagacaacccccttattgaacactgatgttagtagtgacactagaatcta

SEQ ID NO: 70700 - DNA, 438 bp, Glycine max
  unsure (1)..(438): unsure at all n locations
taagctntacattcttgagcaaactcgtccaatgtaccatctactttttttcttgttctttctcaagctttaagtggtctttggatagacttttgaaatatcttcataggttttataagtctttgagagaatgggtgagttagataaaagttcatgataggcttttaaaagacatggggtcatcaaaatttacctggtcgtcctagtctgatttggatccttcagaagctaagtctgccattaggcatatgtttccttctttatcatcttcatcagatgaggtgtcgtctagatctccccacattctcatatgccccttcttttctttagtattaaagaattttatttatcttgacttttctccagatctggacattctgacttgaagtgtccaagaattttgcactcatatcaaactatggaaactttgtctttgtc

SEQ ID NO: 70701 - DNA, 455 bp, Glycine max
  unsure (1)..(455): unsure at all n locations
tcactcctacagtttatctctatcatgcattgtatgtnggtctcgtcctttgtcacgggaagccggaaggtccatatcaacctcttaatggtacacatggggcactgcgccccanatgcgtaagtaagaagagataattttccgggctctcgtgtccgtataatgcattcatatcatgcatcgcataagcatctcttcataacatcataatggacatatacttgcattgtccgtatcatattccagcctcacantttgcatgagtcatggcatcatcatgcatatgcgttcaacanactnnttgatctgcaaaattgcataccatnntgttntcatgttngctcatccttgcgttntcctctacaaaacaaaaacaaaaaaagggggaagcgtgaaacttcacactacattcttagtttcatgtgttatgcaccacgagccaaccatgttgggat

SEQ ID NO: 70702 - DNA, 440 bp, Glycine max
  unsure (1)..(440): unsure at all n locations
taaaactagtatctggaatgtatgagtttacattctaatatttagnnngaggaaatcttttccaacaaaacttgagataccaatttttagtaattattttacattctaagaattaatttttgaaaatatttttccataacacttcagaaactaatttttagtaatgatatttttgtaaacaattgttaaaaaaataaggacagtgctaggagaaaaaacggattacaaaaagaagttccgttgtatcttcatttgtgccctgngccccatttggttctcttaacgtgttttcctcttatggaccaaaaaagtacgaagacagcaaaaaataaaaattattacagccagcaacataatgttaaggtgtatcccgaagttgaggtagtttttcattcggttaatcactacactttagtgcaagttaatatttaaatatacgt

SEQ ID NO: 70703 - DNA, 429 bp, Glycine max
  unsure (1)..(429): unsure at all n locations
cactcatgaactaatacttgaaatgaagaatggtgtataaattttttccccaagaaaacagtggtatatttttcaattanggttattctttcacaatttattggccagtgttacctggttgctttaatatcattgcaaatatctagacaatacagaggaagataggaggtgttccacaccaatgtcatggtgaactaaacaataaaaanaatgcanaatggaacacaatcattagttatgtagttaccaaatacaatggtaatatcctacacctttctataattntatttcaatctactttacttgcatgataaacacaaccaaagagaatttttatatcaccacagcangtgatannaaattgctaaaatngatcattgctagttaccacatatatcagttattngatacgatggactatgaccacat

SEQ ID NO: 70704 - DNA, 126 bp, Glycine max
  unsure (1)..(126): unsure at all n locations
actagcttcggccanaacataccccattcacccgagttaaaaatactgcattacatttcctaggtacaaaggactactcctcaacctactacaaaaacacttaaaataaggatgattttcaacata

SEQ ID NO: 70705 - DNA, 338 bp, Glycine max
acacagaaacgagagctacgcgcttatgccatgatgctcacgaattcgtactaagaattctacgctcagtaccacgcagatacgcattaaaggactcaccatatggagcctcacactcgcggtgatatcaatcatcacatatgaataccgatccagattcaacactatctctaatgtaagacaacctcatcgcactcgtcttcgagaaaacacaacaatgccaacttagtcatatcataccatgacaccaactttcgtctgagtgatggtgcagagtgagtgcctatgaaccgaaagaaagaccactacatgaggatgagatacgactacctatagct

SEQ ID NO: 70706 - DNA, 396 bp, Glycine max
  unsure (1)..(396): unsure at all n locations
acactatataatactaagcttcggacagatactggtgaatgatagctacagcctttcgttttattttctctcatnngangacctgcttactctccggcttattctcatgggagattggctcgtgcaaatccttgcagtatagatggtcttccatcattgacttctaataggaataattttttaaattacctcgaacatatcttcatcatgagtgacaactcccttcatcttgaatcacacgggataataactcctcctgagccaagngagctttgataccactgttgggaaacactgacactatttctttctctgtagactccaaatatgcacttagcataaatggaaaaaacatgactagagagtataagaatgacacccataatttttatcatg

SEQ ID NO: 70707 - DNA, 279 bp, Glycine max
acgaattctacgcttattagcacacaattccgtattaaaggattcaccataggaagctaccgtttcaagtaaatatagattatcatacagtcaatgtgaaccagttgcaacgttatctaaattgaaagacaacactaacacatttgttcacaataaactcatattctccaattcgccaattagaatgtgaacaaatttgtctaaggatggacacatgaggcctttaaattaaataagaccgtacataatgtatataaagtacctatatcttcaccatac

SEQ ID NO: 70708 - DNA, 434 bp, Glycine max
  unsure (1)..(434): unsure at all n locations
gtcacctgcacgctgcagcttggcttaatagctgtttgaagngagttatcttttttaccgaataatactgtattgtgtatgtctgttaaaatagaacacaattatatgggatttaatgaattaaaaatttataaatatttgtttaatccatcaatctttatttttgttaaacattctttagttattattaaaattaaatgtttaacaaatagtcttatgttgaatcacttattccttagccaaacacatctttaaattaaaagttatacaaatattcttataccatcccattcttgtttctctgtgaatcaaacataccatacccttagttctttgttttttttctccctttcccgaattaaccccacttcctttcaatttccaacgacggcgacatcttcatccgtaagggctttccgctctctacacctgtc

SEQ ID NO: 70709 - DNA, 365 bp, Glycine max
  unsure (1)..(365): unsure at all n locations
cttntgacaggcacaagaacctacttctcttgtttctttgtttccttctttactccatcatggtgcagggcaagcagtaacagctagagtaacagtagatcgttgtgctttctataattgcaggttccttggatggcaggtacttcactcacttcatatattaaacaagcgtttaatttttacgcatttccagagtcatgttgtttttttacattatcaactaattagaaattgcattagatttgacttttaaaataatgattacaaaaatcaataatcttcccatatataaaaatctatgattaaatgactttgatctgtcagaattctaattatgagactcatttacaactaacatacgacta

SEQ ID NO: 70710 - DNA, 358 bp, Glycine max
  unsure (1)..(358): unsure at all n locations
taatggaagcanggcatcatgatggacattctttaatgatcgacgctatgagattattcagtggagggccgatccattctttcacgagtgaagacgatttgatttggaacactagtatgaatgatgcttattctgtaaacatagatgcgatcattctttctgaggctcgagagtatagtctgggcgctcgtatccatatactcccgcggcgtactacatttgtagctcgaacttctttaagcgatggtgtcatcccacctgctgaagcagacgctatcagccttcttgccactgtatttgggatcacaaagggtctatgctgttgtgttgatatgatgtaagcagtgtttgatagtcc

SEQ ID NO: 70711 - DNA, 240 bp, Glycine max
aatgaacatggatcgagtggtatctactttcttctttatgaacaaagggagtgcaaaatctttataatatttgttctcccgcgctctccactagtgcaactttctatctattatgctatgctaattcgagaaatgaacacatatcctaccgcacacaatggcgtctatttgaatgacggtagtccgaactctctagagtatccggtcttttgagctttcaagatactcgacaatattgcg

SEQ ID NO: 70712 - DNA, 457 bp, Glycine max
  unsure (1)..(457): unsure at all n locations
agctggtagaatggctagacatgatacatgtcatggtcttggtttggttcaaggataaaagggatgccccacattatttccatgacacaaatgcaaacatgatgatttggaaactttatgcaaaactggtcatgcatgcacctatgcggacactcaagtgtcaaatttttatggtcatgtgatgctagggctcangattcatttcctctatttttagtcaacccaacgtttccaaaatatgttcttttatccatttgtgcattcattcgagtccatttcaagcgttcgggaaaattttcacagcattcacccttcaggtgtatacacatttttcataaactagttatgatcagtcaatcttttcaaagaaaagttggaagtcatctcttatcaaaagcatgttnggttttcagctagacaacttattttcttttttttcttcctttatttatcatat

SEQ ID NO: 70713 - DNA, 487 bp, Glycine max
  unsure (1)..(487): unsure at all n locations
nggaagaagagaagcacaactgaactcaactccgctttatgtatattcttgtaaatgaaggcatgaaggctccaatatattatttttctcacaaagaccagtaagctatggtgtaggcttaaattgacaatgctttgtgacacttgaatgaccccattggctgccattttgaacttgccactctatgccacaaagcaaaactaccaaaaatgaaagggataggatttgccaaaaatgggtattttcattttttaccaaaactagtaaatcttatcttaatcacctaggttggtgcgctaatctccctatgaatatgtgtacccagagtgatccccacgtaaagaacactttcacatagagttaaatcacattgtcacttggtgcgcggttcaatttcactacagatgacaattttattcggacacgntncaaaattttgacaattaactatataaattatgtacactcaaaataatatactatcact

SEQ ID NO: 70714 - DNA, 482 bp, Glycine max
  unsure (1)..(482): unsure at all n locations
acactttaaactcagctatccagaagtctctgagacataagaacagagtatactctataatcatatgtagcgagtgtaagaagtctagacacgtcaagtttgaatgtctctagacctgtataagacaaaggaccagaagaactactttaagtcaaaagacaagagagtacttatgagcacatcggaagacctagatgacatgttgttcgatgaagagacataagaaaaagcaaaattttgcttgatggctgatacaacatcagaagaatcttattcaaatttagatgtggtggtagaattcgatgacctgaaatctctacaattagcttaccatgatcttttcttcaactcttccatgctatctaaagcttacaaaaactccgatgaaaggctcatcaagatatcaatctcttaattgaacctgatcaagacagtanaaactatgatacctttgaagaaaaggaatcaccacttctactgga

SEQ ID NO: 70715 - DNA, 377 bp, Glycine max
ctttagtacgcgctgagctcgattgatattcgctttattcattttgcagtgaaacagctactcttctgagacgatcacgcacctctaacaagcctctagaaagacccattgatcctctcctactaacgaccacgttatgtaactttatctacgatctctctcagccatcttacttctgacacatctgtcactatattggctcatccagcaagagccgatatctctacatcgttctgcgacaacacatcaatgctttcgggctccgggcatatctcacatgaattggtggaattggacaactactgacatcacaagcttggatcatcgaatcactactacttctacactacacaactctaatgaagctactgtctgta

SEQ ID NO: 70716 - DNA, 319 bp, Glycine max
  unsure (1)..(319): unsure at all n locations
tagaagagcacagtgtgtgatgtggatggacatatagtctcaatcacatggcttcttcttctccttctgctccatcttatctgacacaccttcctcttcatgcctctcaccaaggtcactcttcgcaattcctttattatcatcttcaccgatataaggcttccttntctccatttctctctcacacacacaaaaatccattaactcgagagagtctaatgttaattccaatttccaactatttaacgcatggatcgtttatttatgccataacaataactctatattgttttgtttttttgaattcaacatggttctt

SEQ ID NO: 70717 - DNA, 354 bp, Glycine max
gagcgtctcgatatattatgaccccgaatcggacatctgtgtgaaaacgtatgaccattcgaatttttcgagagcttgccgtgttcatttcgagcgtctagatgagttatgtcccccgaatcgacattcgagtggaaacttatgaccattcgaatttctcgagagcttccgttggtcaatttcgagcgtctcgatatattatgttcccgaatcgggcatccgagtgaaatgttgtgaccattcgaatttctcgagagcttccgctggtcaatatcgagcgtcttgatatattatgtgcccgaatcggacatccgtgtgaaacttatgaccattcaattactcagagctttcttg

SEQ ID NO: 70718 - DNA, 445 bp, Glycine max
  unsure (1)..(445): unsure at all n locations
agtcacctgcggcatgcaagctngccgcccagctcgcccaggcgagcaaggttgctttctctcataacaacatccttctggaggaatcttctggagggcccaagtgggcctggttgctatttgcacccncatttttactaaatacacccccttcaatttntttggtgattctttttccgtaatgttacgaatccttacggattatgtatttaatcttttttagctttcgaagaagttacagaaacttacggattgtgcaaaaacaccttttttcgacttccgccacattacggaatttcacggatcgcgcaagcctgcttcctttagatttctgagacgtcttgggacttcatttattgtgcaacanaggatgccaagtatctcanagtggctaaccaaaggttgcatgtcatcaagtaataatccccggacaaaatatggtatg

SEQ ID NO: 70719 - DNA, 405 bp, Glycine max
  unsure (1)..(405): unsure at all n locations
tcaattcgggtaagaatgagatatcccatagagaaaatgtccggttgattttccgctctattntactaanaggtatattnttgttattatattattattttatctctttttgatttccaacgtggttacggatcaaacggttggaatttattttaaccaaagtttacggatcatacaattcanacgttcggtggaaaattaatttatttttaagttaagcgagaaatgacttatgtaaaatggcttaagcacgtcaacagggggtataaaaagtaaatgaaatgagaataaaaatacacgaaacacaatgtggaccaccacgggtacatagaatgaatcgaatagcttggttcatggtacttatcccgtgaagatcgaagaacgatgaataacgaatgaagaacg

SEQ ID NO: 70720 - DNA, 426 bp, Glycine max
  unsure (1)..(426): unsure at all n locations
gtggtaatcagagcacaagaggttcaagtaggtgtttcttatacctccattaattatttgctgtaccttctcttccattgttttttcttcattttttctccatgtatcccctcaaatttcttgttctaaatgttgttaacatgattctttagagttttcaccgattaaacttgctatagaagctagattntattttctatggttcaaatttcttgctcttattcttgaaccatgaattgtgttgagtttacgttcctttgagttttgtcttgttatcttttgtggctgaaacctaaaccatataattcttaanataatattagagtagaagacgacctcacaaatctagagtgacttgttcacctattgtagttttgtcatagaagtcatgtctagtcatgaaacttgtcacgtgagatntcttat

SEQ ID NO: 70721 - DNA, 411 bp, Glycine max
  unsure (1)..(411): unsure at all n locations
gtcacctgcggcatgcaagcttcagctccttcatctgcacagggctcttattattttaatagtatccttgtggaaccttcacacccgacgaagacactgaganaaacttatcttctcctttntggacaaagcatggcaagctgggggcaagtaaatattgttaccatcagaccttggatgcaattgtgatcgtatccccatatcaactagatcttgacgggtattcaagccatccttcgtcttgccttgaatgttaagaagcgtccctatcacactgtcacatacatttttctccacatgcataacatcaatacaatgtctaacatctagatcagaccagtacggaagatcaaagaagatggacctcttcttccatatgcaactcttacttttatccttctttngggtctt

SEQ ID NO: 70722 - DNA, 493 bp, Glycine max
  unsure (1)..(493): unsure at all n locations
ngctngtatgtgcatattgtgtcatcaaaaacttacttattgcaaatatgantaatacctcccacacatcaatggtaagaagtggctgcaagaaattaagataaaatcacatcataatttaccagggaaatgaactcattagacccaactatcattcatatttcaagataagtaaggaacaataatattattactacttacataatagcctccccaaacaagggggttcacagcattgtgactcttgagcaccactagctcgttgtcctcatctggtgaaggaggatttgctgcattttccccatcaaatttgcttgctctatctatatntcatcaagcaaaaagtgaatgaacaagaaggatatgtaactctctgtctggataaatttcttgataagcacttataagtgaataacatataaaaaggtaatataaaataaacttataagttaacatcgacttatgcatanactaagttgtagaagttctatcg

SEQ ID NO: 70723 - DNA, 424 bp, Glycine max
  unsure (1)..(424): unsure at all n locations
agctgcacatcggagaacatgaaaaattgtctttgtttagacagagagggaaagatgtgaaaatacagttacctacgggaattttgcggtcttctccgagtcaactacactagtttggcactaggtttgatgacatgtcaacgagttacttacagaaatgatccaacaattgaatcagctcggctaagggtctggtttccgattcaaccagtcgggccgagccgaagttaataacactggatgggagggttccttacttagtatngaaaatcttgctttcaatttgatagtaggtagtaaagttcttcttcatggagtatgtctcattaagattctcccgcatttcacaaatggaggtagaaaacatacaattatagctttatttntgaataagagtgccataaccaggtttatgataaaagca

SEQ ID NO: 70724 - DNA, 253 bp, Glycine max
gtctgcttcttgtacactgtacacctatagatgtccgaaaatacagccttctcttatagattagaaattgataggagtactccatcatatcctcctctcaggactcacagcgggtcatctgtgataaatgatcctatcatattatttaatgaaatgtcatgagtcttagataagcatgagacttacacaagacaaacattatgaatccatatagctacttatctaattcaggaaagcaggcacctttttaagc

SEQ ID NO: 70725 - DNA, 457 bp, Glycine max
  unsure (1)..(457): unsure at all n locations
agctngtagatgaatgggcatacgaagtcatcttcttcttatgtctttagtatccaaagacatctcctattgattgtgagtataggcccaccacttagatcttaataatatattttataacataatattcatgtttcatctcttctaaggtagaagtgatatttaaaactaatagatggagcagctatgtatgcgtgtgcttgtttcatgagagtagtgtgttatttatcccacattttaatcgatgcgacgtatctaaatgataattaattgtctcaactgcctggatgtacttaaataacatatgtgcttatgattatagatatcaaaccatcgttacacaatatataaattgaggtattgatacaactttatgagaggcctgttaattaacatactcggcttaattaagaaattctgctcacatttatataagtgcaactttattagtatcatg

SEQ ID NO: 70726 - DNA, 222 bp, Glycine max
acactttaaactaagctctagcccgtatcccccttggagggcattagttctattttgaaacaaacacgcgggataaatgatccttaattgacttgtgatgacatatgcattctcaagttatgatttgatataatttattctatatatactatttaccaaacactgaaatatcactaaagggtatagaataatgacttataatacatagcctattacacggtg

SEQ ID NO: 70727 - DNA, 439 bp, Glycine max
  unsure (1)..(439): unsure at all n locations
acctgcggcatgcaagctngcttgtggagcttctatggaggctgtatctttagcttcaatgaggtccttcaatggtgatattacaccatggagatgcagcggcaagaaaaggagaagaggagaggggaggcaccatccactatggaataagccaaggaagaaggagcttcaccaccaagaattgccttggataagaagcttgaagaggatgctntaatggaggaaaagaaagagagaaggggggagcacgaaactgaaggaataaaagaaggagagaagttgaactttgagttgtgtctcacaagactctcattcatcatagttacaacaagtgttacacatgcttctatatatagactaggtagcttccttgagaagctttcttgagaaaacttccttgagaagctagagcttagctacacacacgcctctcataact

SEQ ID NO: 70728 - DNA, 379 bp, Glycine max
tctacttgaagaggcgtgtacattcatctttatactactccactccgctgcaatcagacctcaataagctaaggaatccattaaagatgaatatccataggactcctagctccaatggagctacaataggaacaacctgggatatgagggtagagatcaagtattcttgatagacaatccgtggactgtgtaggtagtgctttgaaatttcgaaaactcacaccatgctatatcggaccttttcaaatcatatagaattggtcctatggcaaaccaaaatgcattacctccgtcgctttctaattttcacaacaattatcatgtatctcagcttccgatggatattcatgatacatcccatgtgactgatatgaatgac

SEQ ID NO: 70729 - DNA, 404 bp, Glycine max
  unsure (1)..(404): unsure at all n locations
aacagggctttctgtaccattggagggtagcataaataggataatagcacatgtacatttcagatgtagccataatctggttcctatccagattgtgtttgactgactgaggaaccatatgtatggcttccccacctatgttattcagtacctctggcactcacagcatatantaatatatatatatatttggtttcttcgctgaaaaaaaataatgctgtggagggatggctatactaggccacacctatggaaacttattcttgcatatcaacttgtattgtgattccatatggtgtaaaacacttgtgaaacattgtattatatgaagaccacctcgacatatcttttattgaacataattatcttgctgatgaacaaacctataccctcacatcttgttg

SEQ ID NO: 70730 - DNA, 416 bp, Glycine max
  unsure (1)..(416): unsure at all n locations
agcttatatggagctacatcatgacttgtctgggccgtcatcatttgttngaggagtggtttgattgtgaagatgatggatcatgtgaggtgaaagtccatcatttaggaaatcataagtggaggaagttagagtatccaactnntgatatgggaatngattntcatcanataatatgtaatgactaatgatgattnttattgagggatatatcatagcattgtagcctcgatgatttgatgggtaacctanaaagacgctangtgtggaacgaggttggagcttatttatcgtagtggaaggaanaagaggataacataagcaatcgaaaactcataagtgagagtatgatgggtctttttggtatagaattttcanaggagaatgataggcaagaagtttacttggtaagatat

SEQ ID NO: 70731 - DNA, 471 bp, Glycine max
  unsure (1)..(471): unsure at all n locations
ctcttcttttagacagaagaccaatattatatagtttcatangatatctaaagatatgtttaactgcagttagatgaacttaccctagttctttttgaagtcttgcctatagacaaacattaaacataatatcatgcctggacactaagatagaatagtgagaaaatcattgcactatattgagtcatgtccacttttgttgattcctcgtccagtccaaggtatgttgtaggatgcattggagtcttcatttcttttgcataatccatgttgaatttcttcaacaattttttcacatacttggtttggtgaacatagatagatgcctgtgggtgtttgctttatttgtagtccaagaaagaattccagctctcccatcataatcatttcaaactttatttgtattagcttagaaaaatcttttacaagcatttcatttgtagcacaaaanatgatgttcgtcacatatac

SEQ ID NO: 70732 - DNA, 441 bp, Glycine max
  unsure (1)..(441): unsure at all n locations
tttgagatcatgaatgttctttcgtggtattttatgatcaaacttgataccgaagtaaatagagaaaaactcataatagaagactcttggatgttttttaaccattatattgcataaagacaataacaataaaattattgatttcattcgatgaaactcaatctcataaaatattcttgccgttgatctcccctcatactcgatcttctttctttttatagtatgcttttacactttttttnttcttatctagtgcaaaaatgggcactccaagttaattgtatatgttattgaatatgacttgtcttaaaaaatttaactacacttaaaagttaaaatgaaagaatttgctaatgcactcacacccttttctaatatgagtactcaacataaaaaattatgactaaattattcagtcatctattcttttntaagtaaatc

SEQ ID NO: 70733 - DNA, 349 bp, Glycine max
  unsure (1)..(349): unsure at all n locations
taagcttaatgttaacagtgcaatggagaagagagtgcgagagggttttcgttattataanagcgtgagagggtaaacggagaagaatagagcgcgagcaaaatatgtcgcatcaaatataatttaaaatgcaagttcaacatcggttctcaataaaaaaaaactgatgttaacaaattgatgtgaacgttaacatcggttttattcaacaaaccgatgttaactgatcatatgttaacatcggttttgaagaaaaccgatgttaacgttcacatcgatatgttcgcatcagtttttatttatcgagaaccggtgcagaacttgcatgttacattatgtttgatgcgac

SEQ ID NO: 70734 - DNA, 408 bp, Glycine max
  unsure (1)..(408): unsure at all n locations
atgaggaagtgtagaagggtgaaacttgctgctatacttttgtatcacagagnggnacctggagatatgtcgcggtggtcaggagacacttgtgacgttaggtggggtgctattgcccaaaaccaatcttgaccaatcccgacccaacccgggcatagtcggtcagtgagaacctgtgatgtacctaaacaggcgagctcctggctgtcaactgattataggaacaaagaccacaaagcatggaggcttgtggtggctggccagctgtgaatatacgtgtgatatatgggatgtggcctctggtaatcgattaccaagggtgggtaatcgattacaaggcttaataatgaagacaggaggctaagatggtctctggtaatcaattaccacggngtgtaatccattacc

SEQ ID NO: 70735 - DNA, 495 bp, Glycine max
  unsure (1)..(495): unsure at all n locations
actatatatgtgtgtgtcttcgtttatctctacctgtttaaaaaggtgataattcactcctcatgtgttgttatattcggatcatgtgatgatcttaaacctttgtgttgtgagagcaaatgactaggtgaattactttaagaaaccttgtgatggaggactccgagacacaatattttgatagaatgtaacattggaacaagaagttttattttaattgcatgacgtatcatacatgtcattttactttttattgataaactgaacagtcttgttttaagtcataaatatttctaagaaatnttatttggaatagtgaaccgaatgtgagcattacccacgtcgatggatttacgaatntattgaataaaattgatttaattagattccgcactttatatantgtttttttttcatttatatgtatgttggagtagaaggatgattctaagtggtacattaacgatggcagtgagtagattgacgatgtactta

SEQ ID NO: 70736 - DNA, 388 bp, Glycine max
  unsure (1)..(388): unsure at all n locations
actaagcttattcaataagctaaagaaaacttacaataactaaggtcactccagtcatttccataaatccatatacgcttgtataaatgctccctagaagataaatttgaggaacttgtctatttctccttttgtgtgattatagtcttttatctttgaacttttgctgaactataggttatctgcaactcatatgatatggaaccatatttcagaaaaggatgagagactctgcacctaccggcaatgtacttgagcctttaaatgctgccagagaagttgttggggatgtngattcaataagtatgtgattccttatcacaacttctttttcttcttcttctaattagggggtgatctctatttcattccttttgcatatatttat

SEQ ID NO: 70737 - DNA, 524 bp, Glycine max
  unsure (1)..(524): unsure at all n locations
agtcgaccgcggcatgcatgctngaagaagttntcacttttacatgcctatttcctttgtgtggcattngtattggttgttatcttggttgttgcatcttagtacatttgatatttgtattgcatcatgcatcatcatgattagtgtgaagaaaagtttctaagttagaaaagtttcttcaagaggcanaactctctgttttaatcgattacagggttgtcgtaatcgattacaacaagctatctaaagcttgtagagttgagtctcgtatcagtttaatcaattatagtagtctcataatcaattacactattgtttgagacaatgactgatttattcaggagtctctgctttaatcgattaccaagtggattaatcgattacttctctctcatttagttgttcagaggtgaacaagaacactctaatcaattacttagagaatntaattggataccatgggtcttgagtatntctagatgtggggaagaacaccttantcgataacctagataatctaatcg

SEQ ID NO: 70738 - DNA, 416 bp, Glycine max
  unsure (1)..(416): unsure at all n locations
gttgatgtgtaatcaattacatcttaatggtaatcgattaccagtgactgatttcaaaaaataaatttccagaagtcacaattcttcaagtgacttgtttctgaagattttttcaaaagtcataactttttaagtgactatttttaaagaaattgccaagagtcacaaacttcgacttgagtcatcaagagattataaatatgtgaccatggcataaatttcataataatcatctatctttcaatcttttttcaacatcatctctcaacatctttcaatcaatctttcaatatctttctacagagatttctgattcatttctcttcatctttcanaaagtttttggtcaatactttctctctcaagaaaaattctttgatcaaaaacttgtggtattcaatcttttcattctcttc

SEQ ID NO: 70739 - DNA, 110 bp, Glycine max
cacaagtctgatcttttcatcacaccggtagaccagacagaggaccatcaataatcttacagagactcccttggctcttcgaagagacacaatattagttgcgcttattc

SEQ ID NO: 70740 - DNA, 294 bp, Glycine max
gtataataacgactaccatcccttacacaaatgattattgaatctagagcctaaagatcataattagaacgagcattgttcatacgatatgatctaacatgcctttcacagaaagattaaacgcacgtttcacagtccattctcaaagggccttgactaacctagcttgctctaaattcggaaacacttcttgcatagcatatattgtcatcatcttcacctgtttctaagaagcaatctacgggataggtactaaaatcatcgttcgaaactgttgactgacattttatacaa

SEQ ID NO: 70741 - DNA, 392 bp, Glycine max
  unsure (1)..(392): unsure at all n locations
agctngngaggaatgatggngacccggtgttgttagatactatgatatgggctacgtgggagtacgtgagctcagttggaggtgggcaacaggggatggtgggtttatgcgcgcattgtggatgtgggaaaacttgttgtgcaccatcgcccgaccgccacctagtaccacatgtgatgggtaccccataatcctacaagcttgagatgaggaagtgttgaagggtgaaacttcctgcttttattgttgaccacagagtggtacctggagatatgtcgcgggggtcaggagaccttgtggacgtcaggtggggtgctattgcccaaaaccaagcttgaccaatcccgacccaacccgggcatagtcggtcagtgagaacctgtgatgtacct

SEQ ID NO: 70742 - DNA, 392 bp, Glycine max
cttgagccaaaatcctgactcaccataaaccttgacttattgttataatgtcaattcttaccctcggaagcaaaaaaaaaggggagagggaaaatttccaatcaaagaggaagcaaaaaaggagagaaggaaaatttccaatcaaaggaaaaaaagagaggaaagggaattcccaatcaaagagtgggagaaagcaaaaagaaaagaaagaaaattcccaatcaaagaatgggagaaagaaaaaagagaagaagaaagggaagaaagttcccgatcaaaaaaaaataatatgcagaaaggtctttggaccggacaatatctgaacaatacagaattgtcaccaaatgaataaaaagaaggaaagggaaccatgacctaaaatggtcttcccc

SEQ ID NO: 70743 - DNA, 409 bp, Glycine max
  unsure (1)..(409): unsure at all n locations
agcttgttcttgattntttcgaagttctttaactatcttatatcaatatacttgtccttcatttaattgtctttgggtttaccgaccacaatcaacatagtactttcgacacctattatatgttgatgtcaccaacgttgttatgggtatgttgcgacaatccttcaataccttatttacacattctgagaggttggttgtcatgtgaccatatctacatacttctttatcataagtcatggtgcattnttcctttgaaatgcgatcaatccatgttcctatggctggactcaattgacgaaatatttttaaattttgatcaaagatatgcatgcaaggagtgtagcctgcataaaattagttagcacaaacaattttaactatatatatgatacttaaattaacttca

SEQ ID NO: 70744 - DNA, 355 bp, Glycine max
cttgacccattccatgattgcaaatctgatagagcgttatctttactcattctttcaccttatattgaaacatatcaatcgatgtgaaaatattaacatgctcatcaatattacaaaacgtatgaacgacaccaatgatgtggtgtctcatttattctaaccgtctggcgttattataaatacgcttgaattgtcttttttcatcagcgctaataaattatactcaattgaggggccaaagggcacgtgtctaaacgcatcgaatctcacgatctgatatttgaacctgatatacactgccgcccacatcagacacgggatagaacactagattcctgctcaagacaaccacttt

SEQ ID NO: 70745 - DNA, 501 bp, Glycine max
  unsure (1)..(501): unsure at all n locations
agtgacctgcggcatgcaatcttatgagaccaatacatgacatagaacgtttccattaatctatttntcatggtaatctagtaaatcttgttcaaaagacaaacanattatacataaatgcttctcataacatggngagtaaaacccctcaaataanttcacaaaatcatatcaaaatcacaggttcaaaaacacgaaaatatcaaaagaacctcaatttatcaaccaattcacattagggcatcaattggcccatcaaacatanaaacctgtgtataatcataaatgcataattataatacagtanatatgccaaaataaatctcaatttgatccactaaagatccctacacatgttcattctaatcctcattgtgatanactcattccttgcctctaaagtgtagctcatgtgtgtagttcggnggcgtctctagcaattccctaagaatcctcanacttttactctgattgctctgttannggtttcaagtgtaaaaa

SEQ ID NO: 70746 - DNA, 371 bp, Glycine max
  unsure (1)..(371): unsure at all n locations
tttatctcactggaaatactaccatgtctcacatctagctattttatatatcagcgnnagtcaatcttaaagaagcaagaatattttataggagtatttctcaatgtatatcagaaggcataaaatggaaacagcttataaagatggggtcttgttatcaaatcaatgatggattatataatttggtttggcagtataatattgaaggaagggcagatttggttaaatttgtgaaggcagtagcagcagcaggtctatatgtgcatctccggattggtccatacgcatgtgctgaatggaactacgngcaaaatttgatcctttttatgtatctttacaccaaacgttatatctgatcatggcttaacttt

SEQ ID NO: 70747 - DNA, 377 bp, Glycine max
  unsure (1)..(377): unsure at all n locations
agctngtgtggagctgtgatgtcaccgatatttctccttcattattaatctgagcttccctgagttctttaagtaaatctcccaattccttattatgttgctcaagatgaacaattctacgttccagttctctcaccaccatctctttctctcttattgagtttctcatctgtgctatttcttcatttctcagaattgtcaatagttgtatctttgacttctttcctactctactgagaactttagaacgtggagtggttaaaaagttcaatggtttgtctatcttacaataacttcgtttacctttctgcagacagtaaagttgtttgcatataaataacctctacataagaacatgcacactcacaagcacaaaa

SEQ ID NO: 70748 - DNA, 447 bp, Glycine max
  unsure (1)..(447): unsure at all n locations
acactataaaactangcttcttgagaaactttcttggaagcagagctagtancttcccccttcataactaagctcacctccttgagaagcttccttaagaagattcctaaagaagctagagcttagctatacatacctctctaataactaagctcaccttcttgagaagcttccttaagaagattgatgtgccatcattttcttctattttctaaaccctttttgcaccattttaattactgattggtcttaattgtcaattaatcaggcagttttattatttgggctcatttagctaatttgatgtttttaatctaatttcacgaattaatgaaacattgggcttaatccggattatggttatggacttgaagagggaaattaagcagcgcttaccttagttaatttctaattaggaaatctcgcaattttattatatgatgttca

SEQ ID NO: 70749 - DNA, 515 bp, Glycine max
  unsure (1)..(515): unsure at all n locations
ccggatcttaatcaccgcggctgcagcttgaaatggactatgccatttatctttntgtattcagcagatctcatcaattgttttctgaagagagagagctcanganagcaagtaagtgacagctacactntntccattgcttaaaattatatcttaacctgttgcaaaaattntgtcatatctgtatcttgcaagtttcccaatatgcctttaatgtatattctaatgggtgtggatcatttatatgatattactggtnttgttcatagtatatctcttgtgtagagggcgtgctacttttattattttttatatatggtgttgatggcgggtgggaatagtttacttgtaattactaattgatagtttcttagtttctttgatcattttctgtaagtttttcctttatgtattgcttctactttgtctcatttctttgattgaattggtgatatgggtatagttttgcaatcttatagcgtgatacaattatctctgctcattgtacccttcaa

SEQ ID NO: 70750 - DNA, 331 bp, Glycine max
acctccttgagatgagaagctagagcttacctacacaccccctataatagctaagttcaccctcatgacaaataacatgaatatcacaacaaaatgtccttattaaaaagacaactcataatgccccgaaatacaaggctaaaaccctatactactaagaatggccaataatatcaaggcgctaagacgaagggaataaccctattctaatatttacaaagataagcgggctcatacttagcccatgggctcgaaatctaccctaatgcacatgagaaccctatggcctctccttggatctctagcacaatctacttggagtcttttagcc

SEQ ID NO: 70751 - DNA, 376 bp, Glycine max
  unsure (1)..(376): unsure at all n locations
atgaataanaaatatgcacctgttgccagactctgtggtttatgctcctctgccaaccaccacacagaccttngcccttctgtgcaacaatctgaagcaattgaatagcctgaagcttatgctgcaaacatctacaacaaacctcctcaacctcaacagcaaatatcagccacaacagaataattatgacctctctagcaacaggtacaatcccggatggaggaatcatcccaaccttagatggtcaaatccttcacaacagcagcagcaacaacaacaacaaacttattttcaaaatgttgctggcccaagcaaaccatacgttcctccaacaatccagcagcaacaacagcaacagccccagatatagcagaca

SEQ ID NO: 70752 - DNA, 474 bp, Glycine max
  unsure (1)..(474): unsure at all n locations
tagcaccccacctgacgtccgcaaggtcttctgattctctttacatatctctaggtaccactctatggtcaacaaacaaaagtaggaagactgactcttccacgctttctcacatcaagcttagtggattatggggcactcgtcatatgtggtactaggtggtgatcgggcaatggtgtaaatcaactctcccactttcacaagtcanacataaacataccatccccagttgcccaccttcaactgagctcacgcactcctacgtagcccttatcctcgttcctctcagcaccaggtccccatcaatccctccaagcttgcacgctatccaagcaattcaatntcatttatcatgaaactaccctaaaccaagaaaacagcgtagaggcagaanactctgtccaaaacacattcatataccacagcttttcttacttatataccgcagtaacattctcttcattccgattcgta

SEQ ID NO: 70753 - DNA, 392 bp, Glycine max
  unsure (1)..(392): unsure at all n locations
gctatgcgcatatttccttacaaacgttctcttgcattatatattctattaaccgaanaaaatgcacccatataccatcaagggagcttccttacctaaaatatttacacctaccttccagggggatttggtaactaccatacacaccatttcttgggttaaatcacatacatcatactcaaacaatttggggggaccaaaaatgcacattgacatcttgtattctatactatctaccaactatagatctgacataccaanggcacttatgcttttcagttgtacaagcgagcatcagaatttctcctgctaatgatcaataaggatcattttggatgattttacacatcacaattatgtatttttggaacttacacaaatattgctctcag

SEQ ID NO: 70754 - DNA, 417 bp, Glycine max
  unsure (1)..(417): unsure at all n locations
gccgccacggagttntccgactatgctcttgtgtggggatctgtttctttaggagagagcaagaaatgaagagccaatggttgatacatggacggagatgataaagatcatgatgaagcggtatgtgccggctagttactcaagggacttgaaattcaagctccaaaaactaacccaaggcaacaagggggttgaggagtatttcaaggaaatggatgtgctcatgattcaagcaaatattgaagaagatgaggaggtaactatggctcgatttcttaatggtttgactaatgatatctgcgatagctgcacgagattgttgaaatggatgatttgcttcacaaagcaatccatgtggagcaacaattaaaaacgaagggagtggctaaaggagttttccaactatggtcttctatt

SEQ ID NO: 70755 - DNA, 396 bp, Glycine max
  unsure (1)..(396): unsure at all n locations
agttactgccgctgcagcttcacattaatatcgagcgttcgaatatacttgtctgtatatacatccgagtaaaaaattattgttgtctgaagttgctcacagctccaacattcaatttcgagcggtccgatattttacaatactcaatccgatagccgagcaaatagatattgtcgtatgaatatgctcagagctaacgcattcaagtccgagcgtctcgatatattacggggctcaatcccacatccaattaaaaagtcattgtcgtatgaatttgcccagagcgtcggcattcaaattcgagcgtcttgatatattacgggactcaatccgacatccgagtaanaattatttgtcgttgaatttgtcagggctcggcaatacatttgagcgttc

SEQ ID NO: 70756 - DNA, 330 bp, Glycine max
taatagccaagctcacctgcttgagatgagaagctagagcttaactacgcaccccctattatagctaagctcacccccatgacagaaaacatgaaagaaactaaaaatagtccttattaaaaagacaactcataatgccccgaaatacaaggctcaaaccctatactactagaatggccaaaatacaaggcctagacgaaggaataacctattctatatattacaaagataagcgggctcatacttagcccatgggctcgaaatctaccctaaggctcatgagaaccctatggcctttccttggatctgtagaccaatcaacttggagac

SEQ ID NO: 70757 - DNA, 434 bp, Glycine max
  unsure (1)..(434): unsure at all n locations
gacatcttcttcgaccttttgttattgactccatctcattgaagcgcatgtccacttgtaactctaaagtatcaaacctttcaccaacaaaggtttgaagaccatcgaacctgtccaaaatctttgaaagaagagatgaatcttctccatcacgtccttcttcaccaacatgtcgagcaccctttttcacccaagagccatcatgctctttttgataaccanaggatgcaatgactgaagcgcctaatagaaaagatctctttgatggaacatanggttcagaatcaagagggatgttaaagtgttgaaggaagagggtgactatatgtggatatggcaatggagaattcaatcgcaatgccttatgcatgcgatatctaacaagatgtgcccaatcaatttgtaggcctttatgaaaagcccacataacaata

SEQ ID NO: 70758 - DNA, 489 bp, Glycine max
  unsure (1)..(489): unsure at all n locations
ctaagcttaaagtacccaaacaaacatcctaactcttaaggtcattattattatttgtgtcagggttagatagggtagggttatgacacgaatgagctaaggttatggctactataagctataagataggtcaaggttcttgtctatgactagggttagggttagcatcagggtaaagaacgcgtagtgatttcaaaatttaaaataaaaacaaatacttagcataaataataatagtaataataataaacatcattatatgttcttaaccgtatacatgagtttaattatgatttgaggtttgagcaacatataaggtttaactaggttgagtgataaggtcagacaagtaccgatgtcatggtcgaacgccatagttttgaagctacctaaaacaaacatccattgatggattagatcgatntttttataaatggatcagatccataaatattttttaatggacaaaatggataatgaaatatttga

SEQ ID NO: 70759 - DNA, 389 bp, Glycine max
  unsure (1)..(389): unsure at all n locations
taagcactacaacatgtataatttcaaagcatagcctatttaatagcaattggacataggtttgatcacacataacacactatagaatattattcgtcataattaacaaacaattctaaaagctatagcgtcatggtactttaagatgacatatagagttttaggtttatcaaagaatttcccataacaaattcaggactatatcccaacattgcaaatagtacaagagcaagcaatcaatatactttagaatctcacacccatattccatttcaagcatntatatttttcatatttagacataacttggcttagttctaggccaatattggactttatttaaaccagcttattggactttaagaatacatcccgcaacatcaaatgac

SEQ ID NO: 70760 - DNA, 371 bp, Glycine max
  unsure (1)..(371): unsure at all n locations
gtgacctgccgcatgcaagctngctctanattacattgatgttngtatttatgttatgttgttatatgccattttggctgtaagagtaatgtcccactanaactaactctccaaatgtttgccttcgcaggaatggccccgaggaagcttgcctcacagaggtccatgaaggacaaggcggtcgaacgaactagttccgccccggagtacgacagtcaccgctatatgagcgttgtacaccatcagcgcttcgaagccatcaagggatggtcgtttctccgggagcgacgcgtacagctcagggacgacgagtatactgattttcaggaggaaatatggcgccggctgtgggcaccactgtgtactcctat

SEQ ID NO: 70761 - DNA, 413 bp, Glycine max
  unsure (1)..(413): unsure at all n locations
cgccacccagctcgcccaggcgagcagggttgctttctccatttcaacaaccttctgaaggaatcttctggagggcccaagtgggcctggttgctatttgcacccccatttttactaagtacaccccctgccttttttttggtgattcttttttcgtaaagttatggaaacttacgaatttcgtaacgatacttgctttctttccgtaatgttacggaaccctgcggattacataatcatcccctttttgacttatggaatgttacagaacctcactaattgtgcaacgatgcctccatttgatttccggtgtgtcacggaaccttacggattgtgcatcaatattntcttttgtttccagcatgtcccggaatttacaaattggctaatgatgggtgccaagcacctcacaa

SEQ ID NO: 70762 - DNA, 311 bp, Glycine max
  unsure (1)..(311): unsure at all n locations
tcgaccgggcagagatcatcaacattggaaacatggcccacaangtcacctacacgaacagtctaaggaatttagctacttcctataaccactatatcttgagagtaaatcaaatcatgcatccgcatattaaaatagggggactcaaaaatagaacacgaccacttaaaggattctctaattccttatcgaactcaaacactatgttcatactacaactaaatggcacattgagagatcggtttgtgcatattgagttcaaagaaactaaagccggaccggagacatcggatatgggcaccggatttatt

SEQ ID NO: 70763 - DNA, 419 bp, Glycine max
  unsure (1)..(419): unsure at all n locations
tatgcagaggaggctntccgagatggagagaagaatgctattttatgtttgtggcattgcattggattcacagcgcaggagggtacaactagcgaacagtttatggagcgaaaatgatatgaaccacgtaatgcaaagtgctacaatagatgccaagatattgatgttttgggaacgaggcaaggccctcaaggagatgtttggccttagcttcacaccccaactcacagggcgaagatgctcttatccatggaaaaatagctcagcatctcttttatagtcgatattattatatggcccgcacgtgtacagtgttaaagaaattttatcagagtctctgattgatgtatgcttcttcatcgagataagagatgtatgagttattgattaagccactctgggcggtggtattgtctttt

SEQ ID NO: 70764 - DNA, 439 bp, Glycine max
  unsure (1)..(439): unsure at all n locations
agcttatccttatggctggcctccggacttcactcctctgctactccggaagaattaagccaagcccctacttttgaggggcaactcccgccttatgacgactatcccgggcaagatgatgaggaaggagatacccatctcggccccctgctccacctcaaagatccatccccacatgaactaccccaaccaaacatagtccgccatatnccggcctcacccacacccgtaaaagaatctgttccctttcgcgaagataagggaaagatagaggcgctngaaaagaggttaagagcagttgagggccttggcaattacccattctcggatttagcnggattatgtctcgtgcccaatatcgtcattcctcccaagttcaaagtgtcggaccttgataagtacaaagggacgacatgtacgaatgggcatcttcggatgt

SEQ ID NO: 70765 - DNA, 440 bp, Glycine max
  unsure (1)..(440): unsure at all n locations
tggatnttcacggtttgaaaagcgaaatctagaatgaggtaaatctgaagcaaactctcacctcacaccagtccataacatccatttagacttgttcaaactggattcacacctaaaatctcaccgaatcaaaatttgactcttcaacacccaaatttgccctagaaaaggctctttgttcactttggtcatttattatttctctctagcacagtccaagctttctcataagtcctaaatgacattgcaagctagtattaactcactttaacctccatttaccacagaattcagacttagccttcccactcttaaagcctcactcttgttccactcataacaccacattctcactgtctaaccctaagttagttctacccttcgtctctgacagatgtccatcagcaatttcagcatataacatcacaaacatcatcacg

SEQ ID NO: 70766 - DNA, 386 bp, Glycine max
agtgacctgcggctgcagcttagcctgatgctagcgatgctctttattgttatcgtgacctattgtcgctaagcgcaattccttacggtcataattgaggtccatgaggctaagcatcagtcatggcagctaagcgagattcattgcggcaatgtgagcgctacgcgagtccatcgcagctaagcacatgctcctctgtacttaagatgcatcatttcagctaaactgcccatagctaggcttagcgagagttgcagctttttaaatctgcatacctcgctaagtggactcaccctcgcgctaagccaagtctctgtgtgaaataaaaaagatattgaaattgaaacatcggctaagcgcaggggtccgctaagcgagccttattg

SEQ ID NO: 70767 - DNA, 456 bp, Glycine max
  unsure (1)..(456): unsure at all n locations
tcatatgcaaaagagttggcagcagctgcagcagttgatctctgattctcttgctgaagaagtgactaaacttacttatgaaaatgcagaactgagtggtgatctggaagctgcaaaggaagcctcttgcaattcaaacttttctccaacatcttcatatgattgcaagcaaaatattaataatagttttcaacgagatgggaaatcgaaaaagttggggaacgaagttcttattgaggacttgcagaaggaccttaatgctagactccaaagagaagctgcattagaagcagctctatctgtgaaagttgaaatagaagatgacctaagaagtacacttgatgaaataaaacaccaaaaacaagatttggaatatgagcttacaaacatgcggatgctggtgtcatagatgaaaaagtctgggattaatgtngaggacaagtcaactaatgatgt

SEQ ID NO: 70768 - DNA, 461 bp, Glycine max
  unsure (1)..(461): unsure at all n locations
atccttttagtcacctgccgctgcagcttantatttagcagatgaagatgtattcttggttctcttatggactcctctaaggacaatagcatcgtttcttgaactgaatagttgggagttggaagttatcttcttaatcaaattcctggcctcaacaggggtcatatcaccaaaggctccaccagtggcaacatcagtcatactcctctccatgttgctaagtccctcatagaaatactgcagtagagttgctcaaacatctggtggtgaggacatcttgcacacaatttcttgaatctttcccagtactcatacaagctctctccactatagagcctgatgcctganatgtcttttctgatggcagtggtcctagatgcanggaagaatatctccaagaacactttcttattgtcatcccaactggagatggatctgggagcaaggtagtacaaccaatc

SEQ ID NO: 70769 - DNA, 307 bp, Glycine max
ttgatgatagaggatgcatgaacagagcttgtaattatttctcttggctccggactcaaaggtggaggatggatgatctaccatccattcacggggctccgaataagatggcggaggatgcacatacaacattacgctatcaattcccgggtgtctggactcaatggcggaggacgcatacacggcaatcaattcatgcggctacgaataagatatgatgatggatgatgcacgaacagtgcttgtgcacaaaactatggggctccatactcaatggtggaggatgcgtgaacaacaatcaattaat

SEQ ID NO: 70770 - DNA, 503 bp, Glycine max
  unsure (1)..(503): unsure at all n locations
acctgccgcatgcaagcttaatacttatgttgattcaccaatctagttatcttctatcaccacaactctatttgttcataggcatcatgtangaaacttagaaaacaaaacatagttcaacaacatgattacttgtaggaattgatttagaacatgttatgaactatataacatgcatgaattagactcaaaattcaaaagatgggctaagaatgacaagaatacatgaacaaatatatctagaactcaatcaacaaaatcataattcaacacaaacttagaacataatgtgacaattattatgactaaacatgactctaagacaacatggaataattgatttacacatagattgttgtgttgttcttctaatcaatattttggaagaaaattagatctaagggtcagcacaagaagatatgaatgtacatgatgaaccaaaatcacccaaacatgattaagagtgattataaattgaacctaaatgaaaacaggtaatttaa

SEQ ID NO: 70771 - DNA, 471 bp, Glycine max
  unsure (1)..(471): unsure at all n locations
ntntggagtagaaacatgggaccaactcattttatttcaaaattgaagtcgnatccagtcaaggtctgagagaccatacaagtttcctaacgatttctaattatgtgggccattaagtctatcatatgctgacaatagccgagaagcccatgaatctcttcgggggtggagtaggtgtctgccatcgccttggccttggctaacaagcggngaagttcttgactcccgttcaaggtaagagcaaaccggtccatccacatggttgcctcttggtgtaaagagtcgatcacccttcctctagcctctttttccacatatacttgagcatactcatccacgattctatgctcgtgggccgtggctagacctaactcttcttggtacttggcgatgatagctagcatgttggtctccgtctcgcataaacgctgagacaagcttcttttggaccttgaaacaagcaattaactc

SEQ ID NO: 70772 - DNA, 340 bp, Glycine max
  unsure (1)..(340): unsure at all n locations
gtggcggacgggcgatggngcacaacaagtttattacatacacaatgcgcgcataaacccaccatcccctggtgcccacctacaactgtgctcacgtacttacacgtagcccatattctcgtttctctcaacaccgggtcctcatctatcctaccaatctttcacattcatccagcaaaacatcattcaaacatcacaatgctattgttgtcaagcacaacagatcaaaggcagaaaactctgccagaacacccaccatatacaacttttttcacttatgaccccataacaatttcttcgaccaattcgctaccgttggatcgactcccaaatatactgg

SEQ ID NO: 70773 - DNA, 445 bp, Glycine max
  unsure (1)..(445): unsure at all n locations
acaagagttatggcctcatcaaactacttgtttctctatggttattctataaatagaactcccatctctaatggagtgggttaccactactcgaaaactcgcatgcaaatctttatagaggcgatagatataaatatctgggaagccatagaacaaggaccttatgttccctctataatagccggaagtgcaacgatagaaaaacctatagcagattggactgatgaagaaagaagattagtacaatataattcataggccaaaaatattattacatctgccttangaatagatgaatactttanggttacaaattgtaaaagtgctaacgatatgtgggatacactacaagtaacacatgtaggcacaacagatgttaacagatctatgatagacaccttaactcgtgaatatgaagcttttatgatgaatgtaaatgatagta

SEQ ID NO: 70774 - DNA, 373 bp, Glycine max
  unsure (1)..(373): unsure at all n locations
gtctcacgattgtcacgtgcttaccttcaatttgtagtcgnggctatacgagacatctttgccaacaaagtcaggttcaccataactcgcctgtgctttttctttcatgctatatgtagcaaagtgatggatccaataatgtttgatgagttagaaaatgaggccgcaattatactgtgccagttggagatgtattattcccctgctttctttgacatcatgattcactttgatgtgcatctggtcagagaaatcaaatgttgtggtcctgtttatctacggtggatgtacccggttgagcggtacatgaagatcttaanagggtatacaaagaatctatatcgtccggaagcatctattgttgagaggtaca

SEQ ID NO: 70775 - DNA, 372 bp, Glycine max
agtcatcctgcttggacaagtgagaaaaccggggcaaatgacgagggcgaggatgaaggagaagtccgtgcagagactgccatcacaatacaggcaagcttcccaccaacccagcggtgtcattactgagtcaataacaaacgttctccttacccaccggccagatatccacaatggccatccctagaataaaccacagagcctatctaccggacttccaatgatgaacatcagctttagcacattcctataacacctaccaacaaatgaactttgcagcgagaatacctgatgatatcaccccgagtccagtgtactatgctgacttgctcgcatgtgtacatgataagtcaacgtgaggcataaccccta

SEQ ID NO: 70776 - DNA, 456 bp, Glycine max
  unsure (1)..(456): unsure at all n locations
gctaaggactcaagatacacgggtatcttctactttgtattatccattgngattatatatgggtgaattatttatagatttagtagttggttgatgaaggaggtaatattatgatttgagttattcttccaccattgtaattatatgggtaaattataaacttaatgatgatttattttagtaattagaaacacaattaattagcaaaacgtgtgagaaagtcacgtgtgaactnntcttnnnttaattattctcctatttatatactatagatatagatataaatgttataagtatacaataagattatttgactgtacagtaaaaaacagattatttgattctttttgttcggttttagtttagttgaatntagaaatttttggattcataatagtgtttattgttttgaaatggttataaacaccctatanataactattgcctttaaaatat

SEQ ID NO: 70777 - DNA, 472 bp, Glycine max
  unsure (1)..(472): unsure at all n locations
gtcactcgacccgcaaaagattcttttttntgtcttctaagctgaaagtctnttatgaatctttcccaggacataaagaaaagtatccctagatgccctcttatgagcaaaacccaacaactggctcagatgttgcttccacccaacattctttgagaagaaaattcgagttttatcaaagctgaccttatgacctgaactgttacagagcaacttcagaatacaagaaaatgacttctacctgatcctctcaactctcaagcttcggcaaaaatgagaagggtcatccgcaagggaagatgtgagagcttaggtgcacctttgacaatctagataggcgttcgatacttattatccgctgcaatttgtatcacatgacacaagtcttccatacaaaggacatataatataaagagagatatgatcttcttgcctaatcccctactaggaccaattcattcaaacttaccat

SEQ ID NO: 70778 - DNA, 488 bp, Glycine max
  unsure (1)..(488): unsure at all n locations
tgaggcatgcaagctntagcctgatcgctaagtgatagcttatccttggttattcttgacctatngtcaccaagctaaattccgtacgaccaaaactgaggtccatgaagctaagcgccagtcatggaagctaagctgaattccttgcggcaatgtgagcgctaagtgagttcttatcagcttagcgcatgctcctctgtacttaatatgcatcattttagctaagccagccagagcctggctgagtgagaagtatagctttccggattgcaaacctcactaagcggtcttatcctcgcgctaagccaagcttgtgtgtaaaagaaaaaaaaactgattatgtaattgaaacgtcggctaagcgcgcagatatgctaagcgagccttgtngagaaaccaaatgtctctctggctcgcttagcacaanctttcgataagagaaagtgtcaaaaactgcttaagtgagtgttacaacagttacactcaca

SEQ ID NO: 70779 - DNA, 424 bp, Glycine max
  unsure (1)..(424): unsure at all n locations
gcttattngacttcttggattatntcatcttttagatgtgtgggtatattttatatctagaattntgctttgagtcttgtttttaatttgtcaatttaatctagtgtcattctaggacttcctttgtgttccaccttggcctgtggtgttgtccttttactttatttttccttgaatctcattgaattaatgtcattttaaatttccttttggtttagctttcatttcatctttttggattcttgcttgtcttcttttctttgtgttcaagtgcagcctacaatgaggattataagagaaaattggtatattgcttgaaggaagattttagagtcttggaggttaaccatcctatcagcaccattggatttgaagtaaacaaagcctcaccatattatgagtgagacacttgagaaaacaaaca

SEQ ID NO: 70780 - DNA, 386 bp, Glycine max
  unsure (1)..(386): unsure at all n locations
ctgcagctatccatgcttcttgccgcgtgcgtggatattctcaatgatcttcatcacgatgataatgaaaagaaactttctgtctttcttttgactcctcacgtctctttacactggcttacaggcttatttgctctaaagtcattctcccgatatccacactttgagctctatagcgcttcatctgatactcaatatatagtgttcttggacatcgcattggaaggaaactcatcccattttgagactgaacttgaccattgtgaaaaagctttatttagaaaggtagaaatggaattaataaactgtgaagaaatctatgagaaaattgatttgtgatcaaggagatactttatttacacttngaacttaaccactattaaagt

SEQ ID NO: 70781 - DNA, 502 bp, Glycine max
  unsure (1)..(502): unsure at all n locations
taagcttgattcggggagttgatttagccttaatttcactgtaggtattagtctattcattcaaggaaactttcanaggaaaaacgtccgcttgattttattgattatttcattattatttttttccaagatattttgattattttattattatttttctttttttgatttaaccgaggttacagtgtaaacgatcggttagattttgctttaatggtgattaaacgatattacaacacaaataattagttgaaattcattttatcatttattaagcgagataacggcttaaacgatcggttaaagctcgttgaaaacggaagataagaaaatcaaaagtgaacacaatgaagatgaaagtcaacaaaacaaataatgaattggaagtctcggatttgaaaacttatcggttgaagaacgaagaacgcatgaagaacgatgaagagcggtggaatatcatcatgaaatcgctcacggaaacgtctcggaagcacctcgactt

SEQ ID NO: 70782 - DNA, 492 bp, Glycine max
  unsure (1)..(492): unsure at all n locations
agctngctaacccatggaagctcctaatatctttcactctttttggggngggccattcatggatggccttgattntctcaaggtccacttggaccccatttctaccaactaccaaacctaagaaaactatattatctacacaaaaggtacacctctatatttgcatagagggtgtttttcctaaggattgaaagaacttgcctgagatgtcgtaagtgatcatctangctcctactgtacactnaaatatcatcaaaataaacaactacaaatctacctatgaaatcccttaagacatgatgcataagtgagcccaaaaggcatcactcaccattcgtacaaacccaaactggtcttgaaaagcggtttccactcatcaccccttttcaatcctgattggtgataaccactttaaatcaatcttgaaaagaatttcaccatgcactcatcagcaatcatcagtcangaatgagtgcatacttatcggatgtg

SEQ ID NO: 70783 - DNA, 409 bp, Glycine max
  unsure (1)..(409): unsure at all n locations
ttgaaacaccacttgaaataacgggtctttaaatatcaatttttaacctctaactttattaangttcttttattttatncataatatattgattaaattttctgattatcatttgtaaatataccattattttattatttttgaactacttcaataattaattttatcaaacacttataatttaataaactagattatcaccttttaactatctgctcacttttcacgtttcaactttattttttttgcttttgctaagttaaactaacaaccaaataaccaatgatgttagtgtcggacttgtaataactttatatgcgagactagtccatgcataaatagatgacatgatccacaaagcgttcacggaatttgaacacttaacatgctggacacctcgaatttaata

SEQ ID NO: 70784 - DNA, 317 bp, Glycine max
acttactaagatacggagggatcttttatgtagaagatagaatggagtgaggagcgcatataagaacgcgggccacgacaacaactgcccattgcgatacatacactggaaccaggctaacgccgttccttccatgtagaacgatgcgattgtgagacgctcatgatcaggcgtcgcgtgatacttaaagaattgagagatctcgaatatccacccacttgggacatagacatcaaaccgatggacctccagctataggcggtgaaccggactcatgatgcgtgatggtgcatgaactaacgaaggtgatagaccct

SEQ ID NO: 70785 - DNA, 479 bp, Glycine max
  unsure (1)..(479): unsure at all n locations
ctcagctcgctgattacattctncccctttctcatgcaaattttaatttcttttgacatcatcaaaatcttcatgatgtacacattttccttccactatgatgttttcctgatgaatatatttatgcttccttgttaacatatctttcaaaaatttagagtagagtgacatctgcagcaaagcttctccgaagggcatggttattttcagtttcctaaaaatgtctaaaaatctcgccagatgacgatctttttccttcttggaaggtaccacaggatatggtacttccatagctttttcacttctactcttctttgcaatcttattatattnttcttctttttcttctttttcatattgttcattttctatttctttttctacattcttttcttcttcatggtccttcaattctttattcttgaccattatttgtcgctcttttatttattactttcacctctcacctcattttcttg

SEQ ID NO: 70786 - DNA, 360 bp, Glycine max
  unsure (1)..(360): unsure at all n locations
ngctngaccaggaattacttgtatgggttggacttgatcactgtgtgttcctggtgcggagatgatggtacagcgggtgaaccataagcggaagtttcttttggtgaggtagccatggaaaagcagagcgtttggaatgatttcgtatatctcagaaaactattgtgaaatgctggtaaaaacacgaatgccaagcagatataaatttgaatgaagaatgtagaggggcgtgtgaagcaacggtcgaatctgctttgtagtgaacgtgctattaatgttaagtgattcgtttgggcacgttcacaatgcaatanctgctatgatttctctatcatacaaatgcccagctcgcccctcagt

SEQ ID NO: 70787 - DNA, 270 bp, Glycine max
ttccctccagcggtgcaactgctatcaatgtttctatcaatacgatcctcatctagaattatagaccaacagctagtcaaagaacttgaggcttacttatgcgatgtttggtgagggtttactttatctttggtagtaactgagctcgattatgtaaagcaaggagccgagttcaaatgggttgccaagaccaagaatgaggctgccgcaagaacctccgtgcataatcaacgacttctgggaactattactaccagttataatctgcta

SEQ ID NO: 70788 - DNA, 448 bp, Glycine max
  unsure (1)..(448): unsure at all n locations
agctngannagctaaagcatgtgagagactctgttactttgtctcttgtcaaagacctgtactcatcaatatcatattcaaagaacgtgaatggctcaacaactcacgtgcctataagcaatttattggagcacatgtccttcaatataattgtgaggatgatagctgggaagagaattggaggggacacagttaatcaagaagacaatgaggcatggaggctaagatacgctatcagagatgccacatatctatgtggtgtttntgtggcagcagacgctattccatcccttagttggattgatttccaagggtatgtgagtttcatgaagaggactaataaggaaatagaccttattcttgagaagtggctggaagaacatctaagaaagagaggtgaggagaaggacngtnaatgtgaaagcgacttcatggatgtgatgatatc

SEQ ID NO: 70789 - DNA, 385 bp, Glycine max
  unsure (1)..(385): unsure at all n locations
cttgaatgagtaagtgtggaagggtgagactttctcttttatttcttgaccatagagtggtacctggagatatgtcgcggnggtcaggagaccttgtggacgtcatgtggggtgctattgcccataaccaagcttgaccaatcccgacccaacccgggcatagtcagtcagtgagaacctgtgatgtacctaaacaggcgagctcctgacagtcaacaaataatagaacaaagaccacatagcatggaggcttgtgtggtggctggccaactgtgaactttgagtgttatatgggatatggcctctggtaatcgttaccaagggtggtaataattacaagcctaaaagtgaagcaggaagctaagaggcctctgataatcaatac

SEQ ID NO: 70790 - DNA, 421 bp, Glycine max
  unsure (1)..(421): unsure at all n locations
atatctgtcaatgtctgagagaccatacaagtttcctaacgatttctaattatgtgggccattaagtctatcatatgctgacaatagccgagaagcctatgaatctcttctggggcggagtaggtgactgccatcgacttggacttggctaacaatcggggaagttcttgacttccgttcaaggtaagagcagaccgatccatccacatggttgcctcttggtgtaaagagatgatcacccttcctctaacctctttttacgcgtatacttgngcatactcatccgcgaatatatgctcgtgggacgaggatagacctaactcttcttggtactcggcgatgatagctaacatgtcggtctctgtctcgcataaacgctgagacaagcttctattggaccttgaccaacaatcaacttctc

SEQ ID NO: 70791 - DNA, 174 bp, Glycine max
aaaaagaaaaaaaagatgtctcgagctgaacaaaacgaaacaaaggaaaggggaggggttattttttccgaacgaaggagcaaaaaacaagaaccgcaccgaacgagacccatcgaaaatacgagagtgagagggagtggaaaaaaagggcggacggagaccacacaggaggaa

SEQ ID NO: 70792 - DNA, 429 bp, Glycine max
  unsure (1)..(429): unsure at all n locations
aagcatcaacaagaggtaagccaaggctattgtgcaagcaatcaatggggcaaaacacaccaaatgattatgatgatggatggntcatattctcacaaaggtaaactcatcacttccaaattgagctttcaaaactatcatgacatgtataggagaatcaaggatttcaagtcacaacatgtcaaaaacttttattatcataacaattacccatttcttgaacatatcctataattcaaagaanaacatgcatagtcgtacatgcacacaaaatngacccaaaatattaaactaaaaatccgacgaaactaacaacattaacaaattaacacaactaacaacttaacaaaaccaacataactttgcaaaccaaagaacactctccccctatacttaaacaacacattgtcctcaatgtagcacaattaa

SEQ ID NO: 70793 - DNA, 463 bp, Glycine max
  unsure (1)..(463): unsure at all n locations
ntattcaagacaagaatccaagaaggtcaatatatatgatcattgttgatctcttanaanccttaggaagaagtttccaaattgaaacacacaaaaggtttgaccaaggaattctatcctttcaaactgagatttgctctctggtaatcgattaccagcagtttgaaaatgttntaattcacaattttaaaacctgtaatcgattacataagtcttgtaattgattaccagaggggattttcagaaaataatttccaagagacatatctattcaaatgttttatgaacggccattcatatgttttatagagagttttcattgcccaaacagctttatcctctctaaagatcaagagattttctgaactgatatgtcttatcctctcaaaaagattcctttgtcaaccactcgcttattcaataaggaatgtttgacgatcttcattttcaatctacctcttta

SEQ ID NO: 70794 - DNA, 228 bp, Glycine max
  unsure (1)..(228): unsure at all n locations
tgaagttctctcactaactaactaactaacactaatatatatagtgttagtaactaactaactaactacacanaacataagcccaaacttgcaacccaattcttcaagtgcggatgtctaacttccaagttcaatttgactttctaaatggcagaattggccaaagcctatttataacagaatcgaagatctttgtctcaacttttccaggactactcacacgttcca

SEQ ID NO: 70795 - DNA, 464 bp, Glycine max
  unsure (1)..(464): unsure at all n locations
agcttctgtttcaatacgagcgtctcgatatactacgggacacaatcagacatcctagtaaatagttatggggcattngaattgctacgagcatctggtttcaattacgagcgtctcgatatactacaagacacnaatcggacatttccgagtaaaaagtttattggtcgntggtatttgctatcgagtntcttgtnttcaaaatacgaagcgtctctatatactacgggacacaatcagacatccgagtaaaaaggtattgcggggttgaattgctacaagcttccattntcaataacaagcgtctcggtatatcacgggactcaatcggacatccgagtaanaagtattgtcgttgaatagttagaagctttgtttcgattcgagtgttcgattatacgagactatcgacatcgagtaaaattattgcgatgaatttgtacgagcatcgtttaatacaacat

SEQ ID NO: 70796 - DNA, 477 bp, Glycine max
  unsure (1)..(477): unsure at all n locations
catttactcggatgtctgatngngtcccgtaatatatcgagacttctccatatgagaacggaagctctgagcanaatcaaaagacaacaactntntaacttggatgtccgatgtgtcccgtngtatgtcgcgaccctcgaaatttagaacagaagctctgagcanaatcgaatggaataaattttactcggatgccgaatgaatccgtaatatataaacgctcgtaatgaaacggagctctgacaatttaacacataacgttactagatgtcgattagctcgaatatatcatgacgctcgaaacanaacaaagctctaataattcaacgacatactnttactcgatgcctattggtgctgtaaatatcagacttcgaattaaacaaagcttaacaatcaacacatactttactcgagtcgatgatccgatatacaacctctatgaacagagttgaccatcacacagacttttcgtgc

SEQ ID NO: 70797 - DNA, 456 bp, Glycine max
  unsure (1)..(456): unsure at all n locations
aagagagttgtattattttgtaagatagggtagcttcttctttggtgatagggtgggtagctagctaggagctcatgcagccatgctcacgagaggagaatatctataattattaatttgaacaacatcagtggaaaatttcaaattgaccaacaatagagtaactgtgtagtaccagtgactaaacattattaatattggctatgaacacattatcaccacttcattcgattacaataattaatgagccttctgtncatgttcctatnggagggtagccatttatttatcactgagccgcaacttctacttgtanggctggaagaggggtcatctgatgtagtatgaaagaagtggcccttagagcatggtatttcactcacataataanatanaactaattcaagtcctcacagactgacgactggtatactacgatgctagngtatctattac

SEQ ID NO: 70798 - DNA, 279 bp, Glycine max
tatcttgttgtatattctaatgaccaaccggtttttcatgtatgggttgcattttgaaggacaaatgagaaagaaaattggataatgttgacattgctgtactacaagagataagatgatcggtgacaaagtctgagtttactgttacaatctctgataagaatgcttatttagaatgcatagagcctgtatatatggccttgcatatctgtgtaaaaaaaagtccatctatccacaaatgactggagaaactcatagatgatgaactggtggggatca

SEQ ID NO: 70799 - DNA, 392 bp, Glycine max
  unsure (1)..(392): unsure at all n locations
tctgagtcacctgcggccgcagcttagtcaacagaataatccannaatgtcannagaatgngtgttgaataagcataacacgactttctgtgagtgggttaaagataccaatcttgcagatgaaaatgcttcagaaacattaagaaactagcagatgggcctaaaagaaatgttataacttggccaggatacgacataaacaaagtttcattttacacaaaagcaccagacgacanaagtacaatgcagaacagcggggtcaccctaagggctgaatcttaacacttcgcangttgcatgacgccatcctgtgagcttcattcttactttggtcatgatgaattgggagctaactatgtgaattactgatggtttcaaagtaatgggtgata

SEQ ID NO: 70800 - DNA, 537 bp, Glycine max
  unsure (1)..(537): unsure at all n locations
cactaagcttctctcgagctcgcatgttcatgggtgggactcgtggcttccaacagaactaggcaattaccgcactgcactgncgtgtcacgtgtcgtctggtctcacactctcgcgttgcatcgctgctgaatagctctaactcgccgtgaatgaagaacatggacaaacaccatatgaaagaagcnnaaatcctaaatcagagtgaagcagtgggcacaaaatgacgccgtatcgtggaaaaaaattntccaactgaactcgtgtgactggggctagactngcgagnttacacgagtctaccgcgagtccaccgaatctatacanaaacaagttggcttctgaagtgactcgcagggaccaagtanactcttaaactcgtaagagtctacgagtngactctagagntngacaaaccatgatcacaaccatcttaagcacactngaataagtagtacactattcaacccatccanantctatatatttttctatttatagcaatatctattaacacccaaatatctgatatcattt

SEQ ID NO: 70801 - DNA, 503 bp, Glycine max
  unsure (1)..(503): unsure at all n locations
agtttgtcttgtataanagaaaaaatcattaaatcatattagctcatctatattctgtacagcanagccatgtagatatatacactgaaaatataacccttatttaaactattggattctgaaatgaaactcanataattttaatttctataatgggaaaattctatttcaaggcacaaatggacaacactcatgcattgtagaaataaaatggcttcanaagtagtgaaagcacatagagatgccacattaggatctaatatcatgaaattcacataatttaagaaatggctcttgtaaggatggatgaattacacccaagcatgccatctaactcaagaaaattccattgaactgtatgtgatanaggaaagttaattaattgtacttctttccttttanggactcacgtcanattctttcagatagccctttcagaagtgcacaatcttactttgttaagtgcctcatctttctactccatgagtcagcaccttttccat

SEQ ID NO: 70802 - DNA, 431 bp, Glycine max
  unsure (1)..(431): unsure at all n locations
ctatctttttgttcgatgaattctctttaattacttgctcttatcttattctccatgatatcctccactgtcttgtggtttgtctctgtttagaatagactcaaaaaaataaaccgattaaatcttagatctacacttgttcctgcatttctatggttcaaaatttgaggatctactcttgaatcatngttttgtgttgattttaggntctatcatctttcattcataatattctngcgctgaaccttagatataaantttgcttcaaaatattgattagaagaaaaacacananatctaagtgtaaatcacttaatccatgttgcctagagtcatgttagtcgaataattgcacatatgtttaagtcgtgtgaatttatttgtgatgatctaatcattgtatgatctgcatctaactattttgatttagc

SEQ ID NO: 70803 - DNA, 392 bp, Glycine max
  unsure (1)..(392): unsure at all n locations
tgcatactattaagaattttttttatttcttaaactgaataaatatgcctaaatatcattcaataacgtcgcaggtaatatagtaattnggccttctagaatgatagctcattttctaactgtatatcatactgtacaaccngtacatatctaatgtaaatccttccttaatattgataatatatacttattgtgcccttaaaaataattaaccacttgtacgatgtatttntatgcgtaacacattctaaatgtgataactcattaaggttgtgttacgagtaactcattaacgtcggttagtagtgagagatgaaataaatgcataatgtataagttaaatttagtccactatatacacaaaaaaaatctaattcgtcacatatttatta

SEQ ID NO: 70804 - DNA, 371 bp, Glycine max
  unsure (1)..(371): unsure at all n locations
gcacttaagctnggtgtctaagtagtatatagaagatctgtgcaggataattcttttgtgcccatagaagtaatgccagtatattataccaatgttaactgataaattaagcttagtatcanaatggtttcttttgcttggcattactagctgctattcaatggcttggtttgcgataattatcagcttccacgtctctttggagccaaactgacatgattctttctttctgcagaatatgcatacacgcttagagtgaatgagaagagtgacatatatagttttggtgttgcatacttgagttggtactggaggaggccatagaccctgaattgggaaaagattggtatgtggcgtgctcactcgatcaa

SEQ ID NO: 70805 - DNA, 166 bp, Glycine max
ctcagctgtaataaagaagtgctagtgatgataacgtgtgcaagttataactaaatgtatgtcagaaagagaccttaatgttgtgccctcataacatgtatttgagtttgtgtaactccatataatagaaaacatcccgggattcttctacatttatctgctacgt

SEQ ID NO: 70806 - DNA, 178 bp, Glycine max
  unsure (1)..(178): unsure at all n locations
atgcataagtcctaaagtcatccgaacaccancaatgtacaatgtacaagccttttccatacaaatagaaaggaaggaagatccttcctaaaacaggagaatgtattacatggtctgagactatcatggtccangacaatctccacgtgacacataactgagaatacagaatctcacg

SEQ ID NO: 70807 - DNA, 486 bp, Glycine max
  unsure (1)..(486): unsure at all n locations
ctgctaagctcnttcactgcacaaggctcttaatatntgaagagtatccttgtggaaccttttctcgatgattacactgactataacttatcttctcctctatggacaaagtatgacaagttgggggcaagtacatttcttccatcagaccttggatgcaactgtgatcgtttccacatctctgctagatattgacgagtattcaagccatccttcgtcttgccctatatgttaatgagcgtcccaattacactgtcacatacattgttctcgacatgcataacatcaatacaatgtctaacatctagatcagaccactacggaagatcaaagatgttacctcttcttcatatgcagtctgactttatcctctttgggtctttcagttcagtttcaggtgttgaacccctggttaccggtaactagtcacgggtcacataatttgtcctagacttcattaaacttttcagtctctgaagatattgg

SEQ ID NO: 70808 - DNA, 378 bp, Glycine max
  unsure (1)..(378): unsure at all n locations
ttatctcttgtatcttagtgagagtgatctctaaattctgagtaatcaaaacacctgctgataaaggaattacactttggtgtgcctcctggaagaggatcttcttctttatctcaccttgtcttcaaccacattcagagatcaccttgccagaatatctatgccatactccatntaccactcaataagtgatctgacctaaatgatttaaatcaaacagactttacccgtttggatcactcattggagcctgagcttagtattgcattctatattctgtcaccacactaactacgttacatcattctcattatgcagacacttatagacacgaataccactattcatcttctatcattcgtttcatcagtatctaca

SEQ ID NO: 70809 - DNA, 363 bp, Glycine max
  unsure (1)..(363): unsure at all n locations
atgacccactaacctagaataaaataacttaatgccatttacctagggtatttataaanacttaatggctgagtgtaactgagattctggcaaccaagagtcacccncaacagccaacatgtcagccaccatttggtctcccataaagctgatgcctaggttgccaattgggcccttattacaacttgaactagacctaactaaagcccttttaatttgataacccaaaacatatttttggtcagccaactttacaaggattgggccattatttagacaaactaaacactctaaaaattgagacaaagtggtgtcatntagtccttctccatttgggccatgatacaactcacaaccttggac

SEQ ID NO: 70810 - DNA, 346 bp, Glycine max
  unsure (1)..(346): unsure at all n locations
agctngtactngttcttctntnttctaattgatgttatttngggtgtgattatgttatggtgtgtttatggggctccaaccgagttaagaattgccttccttaacccttccactaccttaattatttaaaaaacctaatgtgatttcacgaccatgccatcaacgtangtgatgcaatcctaccccccaactccccaagggtattagatagaagactccaagaagtttgggctagagatgcaggagaaggccctatggttcttatgagccttanggtagaatttgggcccatgggctaagtatgagcccacttatctttgtacatattagattangatttcattat

SEQ ID NO: 70811 - DNA, 422 bp, Glycine max
  unsure (1)..(422): unsure at all n locations
tgctgaacacagagctgccactctcctcaagaaaaggatgtagaatctgaaattctgataccaatgacagatgtcgaccggatgtcacgacatcacgcttagacatgcaatgatttgacagttgaacagattaaacaagtaaataacacaagagaattgtaacccagttcggtgcaacgtcacctacatctggnggctaccaagccagggaggaaatccactaaaatagtgttagttcgaagatctaacaaccactgtttacaaccttctcacctaaccactacccatgcaacctctacctaagagccactcttagatatgagaaaccctctcactccctctcaatcactctcccgtgttacaaataaatcanagacacaccagagatggctctctgaacaaaagagatcaactctacacac

SEQ ID NO: 70812 - DNA, 386 bp, Glycine max
  unsure (1)..(386): unsure at all n locations
tctctaagcgacgcggctgcagctataagaaatcgccatcgtagttgataatntaaattgtttttattttttatatacgcncgattaattgaggataaaaaatacataaaataatttttattctacccattatgatgaaaagaaactcttattatttatgacgcatattgatgcatatagatttattactagctttttgatacatgttgctgttttaacaatttggatagcgagcagcaagcaacagagccccatacattctgtgacacacataatattactcacgcgtgttgtcacaaacggcatcataatcacaacaaaccctgcctacgtgcggaaatacgccacgccgctgacacacgaaatttaccctgggactgttacgg

SEQ ID NO: 70813 - DNA, 383 bp, Glycine max
  unsure (1)..(383): unsure at all n locations
gcttgggatacttaaggggagatacctngcacatcaatgtaattatgggtatatttgtcttgtaacttttatagntntatntagctcttcatattccatgtccaatctatggaccatgttatgattcatggatcgacaatattattntgtgatttaatttagagaanaaagggtgtacactgacagtgttaaaaattttacaccatcatctaatcatagcccaccctgtatgatcatactngtgactnttatgataattactttaaaagtcatattaaccctcagtgcatgaaccattaaactagttggtgaatttgttgtggtaaaatttgtataanaaccattattccattttttttttatannaaaatcaaatgattatg

SEQ ID NO: 70814 - DNA, 267 bp, Glycine max
  unsure (1)..(267): unsure at all n locations
tcttaatcactgagaggctngtcttcttaggaactacttgtactanactcacccatnggctgacagaaatggggtagatgattccagcttgtaagagcttggtcactttcttttaccacatctagaatgacggngttgagtcaccgctgtggcttgctcacttgcttagctcccatcctctaaagtatcctatgcatgcangtagaatgactgtcatgccccctttcttcggtaccacctaaactaggcttactccaagcactatcg

SEQ ID NO: 70815 - DNA, 250 bp, Glycine max
  unsure (1)..(250): unsure at all n locations
aaatgataatggnngtaaattggagcaaactatcacctcanacaagtctatatcatcaatctatacttgctcaaacgtggtcttaatgcctaanaattccacccgaatcacaagtttggctcctcaacaccccaattttaccctagaaatggntcttgccttcactttggacatttagtttactctcttgcacagcccaaggtttctcataagtcctaaatgacatttcacactaagaataactcacttt

SEQ ID NO: 70816 - DNA, 358 bp, Glycine max
  unsure (1)..(358): unsure at all n locations
tgatcattctacccttcatctttggcttggtttctggatcttacaaaccaccatccaaacataaggaatgcatggatgaatcttccatatttacaccaaaacatttataaatgtgcaatatatataacaattagagtaagggaagtttatagaaactatacaatcaaacatagtgctacatttaatctaaaaaactacaatggactatcatctataattgggctttatgggcttngaatgcttaattatactacatgttgccaatccaatggtttgtgtaggaataaacactctacatttgtatgaattgatgaataaatacttgctaagaacgcttttcttgttatggacaatctat

SEQ ID NO: 70817 - DNA, 468 bp, Glycine max
  unsure (1)..(468): unsure at all n locations
tactcaagcttcttcggagccatctcctacanagacacnatccataaaataattattttgcatgagatgcataactattactttagttatcctaagtatagcaaccaagaagtcagccaatttttgtgtggtgtttattaatngtaggtgttaccatacaactaataaaaatcaccactcagtgtgcattatttngaaagaaagaatntgatattctacaataatttatgtgcaatttgaccaccctagtgtagcaagtttaaccaaacaacttggccaattcaaacccaaaaaatttaagcattcatgtgactcatgtatntgcatctaaagcaatgtctganattccaagcttagttcatgctcttgacatttaatctattaaccctaagtgatcatgcatctaanatgatggctggacatgcgtaaagctcattacttattcaaacttcanaacaacacatggaa

SEQ ID NO: 70818 - DNA, 444 bp, Glycine max
  unsure (1)..(444): unsure at all n locations
cgatctctgagtcacctgcggctgcagcttaaggctagtcttatgttgctccctactctaacagttgttctttttggttctcattggctctggttcctttntttaaatgatgtctcatttggaagttatatttgggtctcaaaantggttntttttacttttttcggtactgatggtgtgataaacagggttgtgaaataaaaaaaatgattttatgttacctgacgattgtgtgaatcactttatttgcacatatggaaatgatcaaatgcaatgggcctaagatgtaggggaattgattgggaaaatgaacaattggtatggtggcaccccaatgtcaagctgccgacatggaagtgcttagtgtattgggctgaggttataagtgaatggtgtgacaaaaaaaagctgaactaactgcagctagtgctgtaaaatgccaaa

SEQ ID NO: 70819 - DNA, 198 bp, Glycine max
  unsure (1)..(198): unsure at all n locations
tgatgcgactataagatgtctaacanacttctcataatgtttcccccacaacacaagaaaggaggtcattcctatgggatataatgaagggtntctccagggttcataactctactcactctaatcatcaccaagttcctcacattatatgattctgccccanaacatgattgccacttttctgatcgcattctctac

SEQ ID NO: 70820 - DNA, 358 bp, Glycine max
  unsure (1)..(358): unsure at all n locations
taacaggggagaaacccagaaccgagacacataagtaatcgctaaattcataagcaacttgatcgaatacatcanaatgagtaaaatagacgactctgcgaaaatatacaattaaagtaaacaccatctttcataaacaaaatcttcagagcttaagagaatgcaaactatggttgcatgcaacgaagattgtcactacatggatcacctctaagctcttccttttatacttaatgaatcanaaagcatggaaattccattaactgaatcacataaataggctcggcctggatgccttcgatgtttgcttcagcttcctagatggaggcctaatcttcttgaacaccatgggaacttg

SEQ ID NO: 70821 - DNA, 56 bp, Glycine max
tccccaaaaaaaattttttttttttccgaaacccggtgaaaactaaaaatggagac

SEQ ID NO: 70822 - DNA, 220 bp, Glycine max
  unsure (1)..(220): unsure at all n locations
ctgcagctgaggaaagcttacatgcaaggccacgttttttttatcctgcttagaacacncgcaacaaagcagatacgataactccctggcttttcttcatgctatatgtagcaaagacattgatcctatcaacgttgatgagctggaaaatgagggcgccattatactgtgcccattggagatgtattttccccctgctttcttttgcatcatgattcac

SEQ ID NO: 70823 - DNA, 413 bp, Glycine max
  unsure (1)..(413): unsure at all n locations
tgcctttaatatgattatggacgtcctctctttgtaattatttatctcaaattaacttgtttcaacaagttaaaggtcaattcctccaaatttgtgctctaaagagcctcanaacattgaacctttccaataacttgctggttggagagataccaaaggaacttcaaggccttgagaagtttacatgatttcanatattcaacaatcactcgatggaagggtatgggaccaatctaagagtttttgctgttatgagaataatttcgatggaagggttccaagtaaacttggattcatttatgagcttanaacacttaacctgcattcataccaccttgaaggccctataccgggaagaattttacttcatggaactagaagtctgatctactcaaacaattaagtgtgcctcg

SEQ ID NO: 70824 - DNA, 316 bp, Glycine max
ttttattttatccctagacaaatgcgaggacagggtccatacacgtcttggcagttggttaacataaatttccctctcatcgactcagatcaggcgacaatattgattaggctgatactttgtaataagaagatctagaaaaagatttttgagtatgttgtcggaaacttatacatttataataccgaaaaggattaaaatatttattactcatggaaaattttgtgaatcaatatttacagattaaattaggagaatctctttgaaattgttgtgggaatgaaagaagaaaatgaacgacactcctctcattatg

SEQ ID NO: 70825 - DNA, 217 bp, Glycine max
  unsure (1)..(217): unsure at all n locations
acacctactgtacgttgatttgaccaatgctgttatgggaatgtngtgacaatcctttaaaaccttattgatacattctgagagggtggttgtcatgtggccatatcgatgtccttctctatcataagccatcatccattttttctttgaaatgcgatcaatccatgtngctatggctggactcagttgacgaaatttttctatatttgatcaaaaa

SEQ ID NO: 70826 - DNA, 435 bp, Glycine max
  unsure (1)..(435): unsure at all n locations
ccttgatctcagctttgctctcgatcctaattgcatgaggaatagacctactagtctgcattacggaaagcacaagtgacttatgttttgacggccatgtaaccgataaagtaagaggattgttaaggattggaccttgtaacagtttaatgatttngcggacaagcttgatttgtgagtgatttaagcttagttcacttcggtattagtcaatcattcaaggaaacttccaaagaanaacgtccgattgaatttttttgattatttattcaaaaatattttgattagttttnttactttttaagaatatttgactatnttgttattaaatttgccttttgtggttaaccgtgatacaacgtaacgatcggtagatttgctntacagtgataaatgagatacaatgcaatgatcggggggaatcatttgctttat

SEQ ID NO: 70827 - DNA, 435 bp, Glycine max
  unsure (1)..(435): unsure at all n locations
tatggacacgtggcanatgcaatttcacaagctgntgtacatagcaatgttcaacaactatatactgaaagtcaaggtcataatgttgagggtgctatagaaaaggtaggtactcttgaagggacatgcattagtgtaatttcttcatctattcagcaaacagactgccttagaaaagtggttcctgttggtgttattgttgggtccatcttagcttccttgaggaaatattntaatgtcactacacttcaagatgatcacagaagatctctgatccatgatgatgaggaanaacctagtacaaagaattatggcaatgaatgtgtaacggatatagatcaagtacctgacgagaaaactagttggaccatctatcagacagagacagagaaagtgcatacagatactggcaaaatatgtcatggtggactgtac

SEQ ID NO: 70828 - DNA, 410 bp, Glycine max
  unsure (1)..(410): unsure at all n locations
ttatgcaaatgtctatttattgaatgaactctttttcgaatgaaacaaattccctgtgatcgatactcaattcttaacccttntatattancttgtgactcaatacacttgctgataagaattcacagtagtgtgtattgagcagtgtgaacagtgctaagccaccagatgtgcgctaagcctgacttgcaagtggcttctccactaagttgatgtgacgcctgagcgaccgctcagtcttaaccatcttttgcctctatgtgaatttaccaaatcactcaaacatgtaatagataactacattatgacaaaactaaaaactaatctatgtctccaagagcataagagagaataatatgttgtgataatataatatgactatatataagatgtacctacactatcactca

SEQ ID NO: 70829 - DNA, 456 bp, Glycine max
  unsure (1)..(456): unsure at all n locations
agttctctaccagtcttcgcatcgcanaagctctcanatctctctggaactnggacctttctttctctaganatctctctggaactntntctntnntctccatttatttttctttntcttggtcatttatttctttctctcgaccattattggggttttaattctcctaattgtcagatctgttacctcctctttctttntctcagtgccatcctttacnaacaattgtttctccaaagccaccctatcctcatcctcaaccaccaaacgcttcttgtttcttgcatcacaacactacattcctctntgggattctntttgtgttcgctccanagctatnggatgactnnttcaactaattgtcgggctagtggcccacctggacctcanggtcttcaatgttactcagtgctttgtgatttgcatggtacctgatgaatgagtagagctctctac

SEQ ID NO: 70830 - DNA, 375 bp, Glycine max
  unsure (1)..(375): unsure at all n locations
agcaccgcagctgcagctgacaagaaaatgctactgagggagataaatattattgaattttgaaaaccgcaagttataggatatatcatgtaagaaatatattctattatngaaaccaatctcactataaataaaggatcatttgtatacacacaattacaaaaatcccattntaataatactatagcanaatatgcatnngtttgcaagtacttttgttttggaatagactatgtggattatgaaactttggcctgcccaaggattgtgataattttatgtttggatggcaagagtaannattggacctgtatgttttgtgaacagcatgttacggtggagaggatgtaaaaattaaggaactatcaatctagt

SEQ ID NO: 70831 - DNA, 414 bp, Glycine max
  unsure (1)..(414): unsure at all n locations
gcttacaacacaatttcatanagcacatgaatggagtacatgaattgacctcatcatctgctcacanttctatcatgtannnatttggaattgtatgtcatcacgtgcctccttctcctgtcatacaataaatacttgatatcagacatcaaatatattatagtgcanaatatgaaataaattataaaacttcctattgttgaaaggaagagaaaataactgaatatgtgtttgtgtgtcagttacacagcagagaatgttatcagcaaagtatgaaaataccagggtatctacaaatgtcaactaatactaccacactgcattgtaggtaaatattgtcaaccaacagtntaacaaaacaaacaatgtgatgaaaagcatcaccttcaccaaaatgtatgcagacaagaaaga

SEQ ID NO: 70832 - DNA, 369 bp, Glycine max
  unsure (1)..(369): unsure at all n locations
ctaccatataaagaactctccaattcaatacaactattgaaacccagagtgtggcgccccgaaaaatgagtgtttaatagttataaattaaatagcataaaccatgggaaaattnttttcttttcttttcgacctatatcatttacagtattaaatcaaaagaactatactatgagtctgaaggcagttacacttattcgattcatttttctatactcatactcaaccaattttctcttaaaatattagcatacttagtcgccgtaaaatataaataatgcgtcgaacttttaaaacgtgtacatttttaataaaatatctatactatattaactgcaaatgagtgaaactatgcatcaacaagtcatg

SEQ ID NO: 70833 - DNA, 406 bp, Glycine max
  unsure (1)..(406): unsure at all n locations
gcttgaagaatctgantgcccttgtgatatgtccactanacatatcagttntagtaattgtttgtatntatgttgagaacgttgnntgcattcactaactcttaaattgtcattttgtggtgtaggacacattcgatattccagaagtgtccaacacgaagaagaaagtcatttcatcaatggcgatactatggaggcaatttaagtcatccttggccactaaatatgtatatgcangctaggaagggcaagattatcagaatccttgaataagtatggcctagatccanagacttgggaggaatctattgcaagccatanaaccctntcttggaggttagatgtgtgtgtgtttcttatatacaaattganagataacttaatattctctgaattggtctattac

SEQ ID NO: 70834 - DNA, 266 bp, Glycine max
  unsure (1)..(266): unsure at all n locations
cttcgatatctatgtacccgagtggccacatgggnnncgtgctttttattctcgtnnttgnnactttgtataccccctcttgacgtgcttaagccaatttacttaagtcatttctcgctaacttaaaaataaaataaatttccaccgaacggttgagatggattatccattaacttcggataaaataaaatccgaccgttcggtcgtggccgtaccacggtgggaatcaaaaagagggtaaaaataatataataatcaaaaagaca

SEQ ID NO: 70835 - DNA, 103 bp, Glycine max
gatctagtcaatgtctgatagaccatacaagtttcctagcgaattctaattatgtgggccattaagtctatcatatgttacaataccgagaagcccatgaatc

SEQ ID NO: 70836 - DNA, 189 bp, Glycine max
  unsure (1)..(189): unsure at all n locations
aacctagcacaaagcttggaaatcgactaanagtagcaccagtagtagttgtcttttgtgccacactaatgtgaaattcctagtacttcatgaaaatgaaattaattcctgtcaaattgagacaggtgtgattgcaattttcaataataaactcttatcggccgatgcaaacttattgtagctggttaa

SEQ ID NO: 70837 - DNA, 250 bp, Glycine max
aagaataattccatgctcatgggtgatgacacgaatgcattcttattctctcatacactcgaatgacacggattgatcaaatgtcacaaagagtaccattgtcggctcgattattttttcaaccatacctctatacgtgtactatatgctatctaataagcaagagcatgtacctcttctcatttgtacagcatgtcctaataatattatggttggctctgtaagtggagatggggatgtttatagtcca

SEQ ID NO: 70838 - DNA, 330 bp, Glycine max
  unsure (1)..(330): unsure at all n locations
tgcagcttatatgacttagagcttaatctgtaagagacttatctttcttgtctaataactttagcgcttgacacaaggctgccactgtgtagagagagagtgggaaacacannatgtttagcaacatttcttcaaagaagtacagntttccagtgtcacctaatgctcagagctgactttcatctatgaatngaaggaaacattaacaacataaaacagaaggaattaagaatattaagacnatacaacttaaatcttcctttgtgtgcgctatggtgcgagttcctactgagcctatgggcgttactttcttgtgaatggtgttagtac

SEQ ID NO: 70839 - DNA, 253 bp, Glycine max
  unsure (1)..(253): unsure at all n locations
cattcagaaatggctggtaatcgattaccatatatgtgtaatcgantacacatgngcacatttgaattcnaatttaatagctgttgtaatcagttttggcactggtatcgatacatcctctggtaatcgaataccaaagagtaaatttcttgtaacgacttttaacttaattttcgggccaaaccttttgctacttcaattgagaattcccttccatattaatataccctgtgagagactctatagactatct

SEQ ID NO: 70840 - DNA, 339 bp, Glycine max
  unsure (1)..(339): unsure at all n locations
ataaatgaaataaacttaatcgtctattccatataaattaaaatgaataaattctgttattttatcaaaataagaaactttaaaaataaaaataatattcaatcaagaaattanacaaaactgaaggaatttcaatcgaaattcttaaagtctaactttctttgtaattctaaagattttcatccaaataccacgtaaaaggaattcggttcaatataaaaaaatcctaagcgtagctggcattgataacccagtcatcattatcatttgntgtgcacacagtagagaaaaatcatttctttataaaaatataagtagagacaatcaaacccaattaat

SEQ ID NO: 70841 - DNA, 461 bp, Glycine max
  unsure (1)..(461): unsure at all n locations
gagagagagtcaagtctctgtcctctttttatagttcaatngangtttctctggtgagctttggaattctctttacgagacgaagcttgtagagttaggaacggcgaanaaggaaagagagagagcgagaggcgaaagcgtacacgtggcacctcttcacgctgacacctcttcccctatgtggctctattccaagcctcaacctcctcactggccggtaataataacttactttattctaaaagccgcgtgacttgagccttcgcccttagcctagaacacaggaccaaacttggaatgggcaccaggcccaaccaagtaagcccaattctcttcnacattctcgtccccgcaacctttattaagcaatataaatanactggttgaatcataaaaaaataaagctatntaaatagctataatatttattatttatatactatcaatatattaaataatat

SEQ ID NO: 70842 - DNA, 274 bp, Glycine max
  unsure (1)..(274): unsure at all n locations
cgcatgatatatcgagacgctcgaaactgaacaactgaagctgtcgagacattcatatggtcataacttatcacacctgcgggctgagtccggctgatagtatatcgcgaagctcggaattgaacaacgaaagctctcgagagaatcaaatggtcataacttttcaaacggacataagattaacgtggataatatatcccaaagcttgacattgaacaacggaagctgntgagctattcatatggtcataacttatcacacggaagatcgattc

SEQ ID NO: 70843 - DNA, 121 bp, Glycine max
cccactaactcctcttgatcttttgcctatgcctaacgattctcgttttaagcataaaaaaggtcaagcacaggcagactatgtgaagacacttcatgatagagtcacagatcaaattgtg

SEQ ID NO: 70844 - DNA, 470 bp, Glycine max
  unsure (1)..(470): unsure at all n locations
catatgtcatacatatgaatcgttcagntaacaatcaatatatatcggtgcttctctttgggtgatcaccaacacacaacatacaaacattacaatggtaataaaactcttaacattatttgacaattaaatatgcaccaattaatagtacttattacctttgggtatataaataaaactaatgatacacacaaatcatctacgattatattcattaattataagaacaactaatcaaccttngagcgatccataaatgccttataacaatgaacgtcaatgtacccataaaccaataatcatataaattagtactcattattctatgagtaatcgaagaatcattaatttagaaaataatatcttatagattaaccactctggtgactacanatctatatacacttaatctaacaanatatggatgccatactattgctatacaaatatacccatttataattatacta

SEQ ID NO: 70845 - DNA, 398 bp, Glycine max
  unsure (1)..(398): unsure at all n locations
ttgcttctctaccatcaccttgaatntctggaaaactgagaacacctcatttttttccttgatcaagtataaccacatcattctgctatgctcatctacaaatgatgtgaagtacttgtcccacccagtgatggacctcanaaggaccacacacatcataatgcacaacaccaagtacattggaagctctcattggcaaatgggaattaaaggaaattcttgtgtgcttgccaatgagacacacatcaaacaccttctctggtacatnntaatttggctgacctataaccatattattagttactaacatattcaaaactttgaaaattaagtgaccaaacctgagatgccaaatccagctcaatttggtgatctttgtagcctntaaacattgtacc

SEQ ID NO: 70846 - DNA, 443 bp, Glycine max
  unsure (1)..(443): unsure at all n locations
tcagagtcacctgaggctgcagcttacatataagtttaatctgagcatgggcttctnctagncatgtgtagtttgttgctcgagtngccatncacatcaactctttcatgtgtngctctggatacttcttctttcaagtaccataccaatgtctgacacataggcgagtgtctacggtttcaccaagcttcttgattaccttaaccanacccttgaaaaaatagcgcacanattaaattaaagccacatttgatcttagttcaaataaatatttaccttctggtggtagaaatgaaagcccacatcctcttgataccattaggtagtataacaataacnaacacttcagataatnatttcaagtcagtcagattgcaatgaacattgatgttcatttactactacaaataatgccacaatcttcttaaaagagcatcatccat

SEQ ID NO: 70847 - DNA, 492 bp, Glycine max
  unsure (1)..(492): unsure at all n locations
gcttagttcctaatgtacacnatattcacaanatagcagccattgaaatgtcagaatgattatttgtggtgtatcagaattcggtcaatttgtcgtaatcggttaactggaaattggcagaggtcttttgatacacagtatttcttctcatttcatgttttcttggtgccgggtgaattatgattcatagttcatccagttaattgaatttgttntattttttattactcanaaaggggttttagtagattgtatgaatctgttctgttttggctactaaatcattaattagagagagntgtataagtggatcttagattgatgattcagtctcttggacgcttggatcactatgtaactntgacacttataattctttnacatttttgattctttggatgtaatgaataatatactaataatctcttagaaccgcatactactcagtgatatgttagaggtatagctatccgataaagggatcaatttata

SEQ ID NO: 70848 - DNA, 375 bp, Glycine max
  unsure (1)..(375): unsure at all n locations
tcagctgcttaagcctaacggacttattcacctgtaacaagaggtgcagatgatcgattttgaggttttttgttgtagccttgagggatctgcatgtagaatttcttcatccaagctgccattaaggaatgcattgntacatctagctgagctaggtaccaatgctgagaagcaacaagagacaaaaggaatctgagagtagtaatcttagccatatgggaagaagtctcttggaaatctangccatatttgtgtgtgaaaccacgcgctacaagtcttgccttgtgttntgccacagttccatcagagttcaatttcaatttgaataaccatatgcaggtgatagggttcttgttgggcggtagatgagtgata

SEQ ID NO: 70849 - DNA, 465 bp, Glycine max
  unsure (1)..(465): unsure at all n locations
ttcgacgactcaccacctgcttcttatgatgctatctaccggaagaagcactagtgctatagttatcattgtattaattgcgcttgtgctcttttcttatgtctctttgtaacttttaagctgtggcttgagaagaaaagggaggagcaatatgctcgctttaatgctaatggttttgctttgtgttttcagctacagnggataaatattngtctggcaaaattcttggtattgaatccaggagagccaggactcttcaatcagtcagtataggtttctnagacaatagaaagtgcttataaaacaatctatttaattgcacttatggggatattcatattntctgttctcttgcgattattgacctataattaggatatattacttgattctatgtgtgagattcatcatgattgcactcaaaagtatcatgccagaagcactangattatattattgtaatct

SEQ ID NO: 70850 - DNA, 141 bp, Glycine max
cctgctccgttcctgaaacttttaacttcagtggaaagttcaaaatggacttaactacctatgagggggccctggatctacaatggagtctagcttcgatctccgctgaatctcaatgacaagcctatatagttagaatgg

SEQ ID NO: 70851 - DNA, 367 bp, Glycine max
  unsure (1)..(367): unsure at all n locations
cttgagcaagatcaaacgacaataactgtttactcggatgcccgaatgtatcctgtgatatatcgagacgctcgcaanngagaacaacagctctgagcaatatctgatgacaatcatcttgtactccgatgtgcgatcgagttccgtggtatatcgagacgcgttgaattcagaacagaagctctgtagccgatcagacgacgataactttntactcggctttccgagtctcttccgttgtgtatcgagacgctcgtaattcagaacggaagctctgagcgaaatatatcgataataactttgtactcggatgtccgaatgataccgtaatatatcgagacgctcgtatatgataacgatagctctg

SEQ ID NO: 70852 - DNA, 405 bp, Glycine max
  unsure (1)..(405): unsure at all n locations
gctgaagtganatcgaatactcgacttaagtacgcaacacatattatatttactctataataaaaaggtatgggcaaaagagtattctatataaaatatatctcgatacgagtcctcgactatagagtatcaacatggctgagaacaagaaatcacgaacaaccatactatctatgcaattaaggcaaaacaccatactactaacatacccagaagtataatgttcttataataagtatacaacgtacatataagaagtgagaacttaatagttaataaggatgtattaaagaatcacaaacttcaactactacattcacgactacacacaaaataaagtgagttaagtagtcatgcgtttacacatcaagaaagacatactcatncaagacatatatatgggtc

SEQ ID NO: 70853 - DNA, 399 bp, Glycine max
  unsure (1)..(399): unsure at all n locations
cttaaactagctttcggctttgtaactctngtttgngaacaaatgcacatgctattttaatctttattattaagagcagtttattccgcaccatctnttgagttttcaatttctctctgctattagatataaannagtaaactattattgttaaaagcactgttattccagcatcctctctttgagttgtttaattttctctctttcaatctggatatagaaaagttaaatcattgatttgacacttataattatctctatggtaagtttagtcctatgaaagattttatcttcacacgtgcataattattagagaanaaattntcgcacataagaatggtacttcataaaattttctagaagtcatataacaatcgtttattaataacagagagaatc

SEQ ID NO: 70854 - DNA, 283 bp, Glycine max
  unsure (1)..(283): unsure at all n locations
catttatatcccaatcttctacagatgaaaacaaaacataacgaatataggagataatattaanaataataaatgctgaatcaccgtgcaaggaagattgtgataggtcactgacttacggtcatgtgctacactctntttctatttggataacggagagtctacactcatctcttttactttatgctcagcataataattaattaattaattattatatcatggcatctcccaagcataacaatcacgtctgtgtttatgcttatgatgacgtcatccccat

SEQ ID NO: 70855 - DNA, 104 bp, Glycine max
  unsure (1)..(104): unsure at all n locations
cctgcactaagcacacttncaatgacttcgaaacttattgatgatgtcgcttagcacatactttctcgctaagcccagcttgaaagctcaacttacagaatgaa

SEQ ID NO: 70856 - DNA, 241 bp, Glycine max
tagtagccttctgattcatttcaattgggatgttataacactctgaaccattatgataatttttctcaccttgacttaaggccatcaattgagtagcccataccccaaaagtggtcaatcaggcctcgaagggaatgcttacttggagaagctagaacttcgtaagatgatattatgtgttctaactcatatacatgtattactattaccttcaagtttcaatgacttaagtgtgaaatga

SEQ ID NO: 70857 - DNA, 322 bp, Glycine max
tatcatgtgaagaattattgtcgaccattctgtccacttgtcatcaagagagtgttgtgccgcgaggctcagaatcagtaaaatgacaaaaggagtcgatcctacgacacagctggtggcatacactgacctgaataatctgagggataccaatgcttgatccgagagaagaatgacagacggataatttgacagaataagtgaagccttttctactcagtacagaaacatcccactgcaccatactcatatgttaaatgatcgcagaggtggaagataatattacccatgtactagaatcaaatggagacttagtctcatg

SEQ ID NO: 70858 - DNA, 420 bp, Glycine max
  unsure (1)..(420): unsure at all n locations
tctctctccagcttattttaatggacagtggccgcaatgaattcaccataatcaattgtcccactcttatcaatatccgcctgccattgccaaataagatcttatgtttataaagtaaaggccaagcatcatatatcaagaagatgaacactaattaccagaaagaanatgcttataacagacacttttcaaaatactctctttgtagatgaaattcatgtgatcctttattgggtcaacccacatagatatcacctaatgatagtattgtgaggagtattacactgttattagcattcctaagaaaatcttacagcatccataagaaccttgatttcagactccataagttcagatcctactcgcttcaaacatctttaactcatcanacgtatggtccactgttgctgngtcatcatc

SEQ ID NO: 70859 - DNA, 274 bp, Glycine max
  unsure (1)..(274): unsure at all n locations
ataaaccacagagtctggcaacaggtgcatatctttattcatggccagtgggtaccaagttaaccaaggcatctagtttaccttcaagcttcttagtctcttctgatgaagatgaattagtggctacttcatgcactcctctaatgacaataacatcacttctggcacttaaatngtgggagttggaagccatcttctcaattaaatttttggcttaacaggggtcatgtctncagggctctaccactggcagcatctatcatacttctctatg

SEQ ID NO: 70860 - DNA, 358 bp, Glycine max
  unsure (1)..(358): unsure at all n locations
gttatgtctattaaagaanatcaaagaagagaactaagatacctgaatatccctccaaatatgttcttaatttcttatggcgaatcgtcggccttgccggtatcaggatcaacgttgaccactagtctccctgcaccaggttgtctaatggccaacgatcgtagccatgtcgctttgcgtgtccacttcatggtagacggagacgttgataggtccgcatggggaggaggaggatgaggaggctagcgaagtggagttccatggtcctgtaatagaacagcttgagttagttaacattatcacataccacaatataatgtatgctaataaacttaccanaatcgaatacataattaga

SEQ ID NO: 70861 - DNA, 53 bp, Glycine max
atgtgacatctcttagctagtacactctttcctaaccctaatgactgtcatct

SEQ ID NO: 70862 - DNA, 508 bp, Glycine max
  unsure (1)..(508): unsure at all n locations
gcttctcaaggaagctacctagtctataaatagaagcatgtgtaacacttgttgtaacttttatgaatgatagtcttatgagacatacttcanagttccacttatctccctcttttattccttcaagtcgtgctccccctctctctttctctccctctntcttttcctccattgaagcattcttccaagcttcttatccaagactcatcttggtggtgaagctccttcttccatggcttattccctagtggatggcgcctcctctcacctcttctcctttgtcttccgctgcatctccatggtggaaaatcaccattaaaggaactcattgaagctcanagatccagcctccatagaagccccacaagcaagtttccatcaagtggtaatcagagcacaagagcttcaagtaggtgctccttaaacctnnncataatnnttttctttaccttctcttccattgggtgttcttcattnntctcccatgatctacacacatgtcttggtc

SEQ ID NO: 70863 - DNA, 549 bp, Glycine max
  unsure (1)..(549): unsure at all n locations
tcaagcttgtacaactgcttcttctgtcaacaatcttcagaagaataagtcttcatggtctctagcaccatattgatgcaatagccccttgcagaatgagatattcctgcaataaaaagatatcactcaaacttatcattccaatgcaataaaaaagatagtgttaatnagagaaattgcaaataaccataaatgagtattgcgaaaatngaccattactacaatatccccataactgccaacattnttttttatcagcanagaataatatattatattgaaataaagtaccagaggtactaattacaaagatatggaatattatatgtagtacataagtagtcaaatagatctactagatccccattactgccaacatgatnagtattattacacantanataaataatacaagactggctcatgatagtattatctagtccaaccaccttttgcatgacattcaaatgagaaatccttncanantgaacatggatcagtatgggtgacctacttataanatgcttatttacacccaacttgactgac

SEQ ID NO: 70864 - DNA, 443 bp, Glycine max
  unsure (1)..(443): unsure at all n locations
agctnttnctctagttactctattggcgtttccaagcgttagagcgaaagttaattgattaaagcctccattntattatctccgtgcaaggaacatttctctctcattagacatttgtggtatattgaaatcgagataatactggataaatctgaagtcgtgtattacactttcagatngaatcacaattttgggttcaaccaaaaatngttcaatcggataaaatcagaagaatataattcaagaattttgtntggtcttgtatgctttgtcacccgttatgctttctgaccagaatgatatttatgatcaaaaacangtggttttggcggtaatggaagtattctttttaaaactgttgtgaggagtttagtacttcatgaacttcaccgtgatggagttagtacttcatgtactcaaattgctaacaacattgtatacat

SEQ ID NO: 70865 - DNA, 435 bp, Glycine max
  unsure (1)..(435): unsure at all n locations
ctcagcttgcacccaatccttcctctaagtagctacgttctnttcagtatcctcttgatctctatagttgattcattcagctnngtccattngtntaagggctgatangggtgaatgcctactntgtgtcanacatcatagtgtnaaagacctttgagagttgagcaatacaaaatgtgtaccttcatcactaatcaagagtctaagcactccaaacctaccaaaatgcttctctttaagaacttaatcatcatctttgcatcattggttggactagaaatngcttccacccacttngagacatagtccaccactaccaagaatatatttgtgtcatgtgagggatggtaggggaccgacaaatcaattccctaacaatcaaagacttctacctncaacatgttctataatggcatttcatgatgtctagatatg

SEQ ID NO: 70866 - DNA, 349 bp, Glycine max
  unsure (1)..(349): unsure at all n locations
acggatcaaattcctctaagaagtgtatatatatatatatatatactgtacacggatctagccgaaaacccagttataccccaaaaatctttatagcatggatttttcttgaanagcactatcagaattagagaactaagtgaacagaacanataagaganaacattgagaacagaaaatgaanaaactgatattattgattctgaaaaagtagtttaatgcattacaatgggtattataaccttagacctgagctatccaactactacactactacatatttataactactgcacgactacagtgtaggaagaaagagtactatctattcctactattgcatatgtga

SEQ ID NO: 70867 - DNA, 419 bp, Glycine max
  unsure (1)..(419): unsure at all n locations
ctaagctcaccctcttaagcatntagctgtcaaggagacattanaaaataatatacatgtatttatactaatggaacaagaattgaaatacanagtagaaaccatatacaagtgaaataaagaataaanacaatagggagaagtacagagtaatttcaaagaggaacactaaaaattntcttattcttttcacagtcaaatcaaactcaacaagactacaaaagaaagtttaagaagacaaaatgttaaaatgttaagatcttctaaatttcaaccttatgtccattattaagaatgcatcctttccagaacaactntccagtttccacatcaccttatctcatattctcatcctcccttgaacttatattattatcaagcacaccagtttctgtataatacaggatgccagaaatatc

SEQ ID NO: 70868 - DNA, 242 bp, Glycine max
cacgagaccttgaggacgtcacgtggagtgctatcgcccaacaccaagcttgaccaatcccgacccaacccgggcatagtcgctcagagagaacctgtgatgtacctaaacaggcgagctcctggcagtctactgagtaaaggaacatagaccacacagcatggaagcttgcggcggctggccagctgtgaatattgtgtgatatatgggttgtggcctctggtaatcgattaccaagggtg

SEQ ID NO: 70869 - DNA, 323 bp, Glycine max
  unsure (1)..(323): unsure at all n locations
agtcttttatcaatgagagtaanatgttaagatttttattccttaagtaacattgtgatactttctatatttaagaacttaaatgacaacaacatacattctgaagatcaagattataattntaaaaaaaacatgcatagcataagaaaaacactctaagagtgtgtttgatttacatgagagaagtgaaagaaattaanaaaataaaattttaaattaaaataatatgtaagaaacatgaatttgacataataaaatacaaaatttctcttttatttatttatnttcgaaacaaacacacccgaagtgtcttttagagagac

SEQ ID NO: 70870 - DNA, 456 bp, Glycine max
  unsure (1)..(456): unsure at all n locations
tctgcaggtggtgaagagagaaaatgttctctcgagaagataganatgttcgtagtatgtatctntanngtaataataaggtgacacgatctggaccatccatntgattaatgaggatgaatatggactattgaacaacttatgtaattaatgaggaaagattttgaacgttgatggaaatgttaccggtgttatgtaccgttcatctgaaaataataccggtgaacatgcagaaatgaccggtgtgtagtattttttcacttgactacactanttcattataaattgtgcacgggacaacatgtntngcatagntcntgtactgctanaattttttggtggtggtgtatcaagtgtcaattttttattcttctgaatggatccaatcagataatatcaatgtactatagtattgcaaataacactcctacttgaaatctaaatcaccgatatgta

SEQ ID NO: 70871 - DNA, 120 bp, Glycine max
gcttattcagaggacagcttattatcatgcacaggctgcgagagttggctcacaacaggccaatcatacctatggagcattttcttgagcaagtatcctggcttgaagctcaactttcat

SEQ ID NO: 70872 - DNA, 455 bp, Glycine max
  unsure (1)..(455): unsure at all n locations
atattatttcttttctttttctttcattntntatnttattgggctaggattggactctctgtgttaattgtaacgacccgctttatcactacgatatcatcactcaaaaccgcgtaaatttcacattttaaatgaaaattccgttaattttcttatgaaaaattagaataaattttttgcgatatacattcaccanacaacgcacaattacttaaatgaatatatatatatagacatattaacttagtacacatcattcacataacagagaggtaattagttcatacatantaataaatctgttattntcatcatcaattctaaaagaattatagaaccaattatagaggagtttgataacaaacataactctgtccanaataatcccgacgtcatcacttcggcatgacgactccatannagaatctcacttcangtagtctactgctggtcat

SEQ ID NO: 70873 - DNA, 244 bp, Glycine max
gagatatgggagggtgtggaacatgttacgtggaagagagccatgaaattgatatctgtagctgagatttcgatgagagatgagacattattaagacatgaaggaaatgtttcaagttgtgtgttgacaggcattcgtatccttattcaagtgtttagctggcacatttcatgtggaacatactcctctatgttattactcttcactgagagataaagtagagcagaaagattccctatgaatg

SEQ ID NO: 70874 - DNA, 402 bp, Glycine max
  unsure (1)..(402): unsure at all n locations
cagcttcaaccagataactcttcattcatctgtgcttgagcctccttatcgagctcctcatatctggtcagatcccttctaactgtcctcaggaagatcacaagaacaataccagcaacgaaaagtgatcaccatgagcgaattaaggatagagaaccaatgcactntagctccctccatctntaagtaagcatcccatctagacggccacttgatgtcactcttctcaaaggtgatctcataagtgataacaacaggctggccctccttgataggcattgccacagtggccggatcacatcggatagatgacgggtacttgtcatacatcttcaagtgttntgcagaatcagcattatgcataatactacaaggaatcacctcatacccaacaaccatgta

SEQ ID NO: 70875 - DNA, 229 bp, Glycine max
  unsure (1)..(229): unsure at all n locations
caacacagtgtaatcgtttaacacgagagagtaatcgattaatatagtgaaaaacacacaatgatnaagtaaaatatgtatgttttaaaaaaaaaattcaaccacatatcagcatatcaacatactaagatattactgaagaanataacaaacatagagagcatatataacaagctacatgtactataacataacatcatccaacactagatccatctaagatacctag

SEQ ID NO: 70876 - DNA, 445 bp, Glycine max
  unsure (1)..(445): unsure at all n locations
ttttagatgggtgtgtgtagctaagctctagcttctattgaagctttttatggaggtgggcttagnntttagatgggtgtgtgtagctaaactctagcttctcaaggaagttttctaaagaaacttctcaaggaagttttcttaagaaagcttctcaaggaagttttcttaagaaagcttctcaaggaagctacctagtctataaatagaagcatgtgtaacacttgttgtaactttgatgaatgaaagtcttatgagatacacttcatagttccacttctttccttcttttattccttcaatttcgtgctccccccttctctctntcttttcctccattagagcatcctcttcaagcttcttatccaaggcaattcttggtggtgaagctccttcttccttggcttagttcctagtggatggtgcctccctatcctcttctcct

SEQ ID NO: 70877 - DNA, 109 bp, Glycine max
  unsure (1)..(109): unsure at all n locations
ttagtaaagaccacgtcttattcttctgaanggatgtcatctcatctttcatcgctagctcccactcaatagtgtcattcccctgtgtacctcactgaacattctgctc

SEQ ID NO: 70878 - DNA, 62 bp, Glycine max
  unsure (1)..(62): unsure at all n locations
agatgtacgtgaatattcctagactcaacagacccatggngaataaaggaaaatcgattggt

SEQ ID NO: 70879 - DNA, 312 bp, Glycine max
  unsure (1)..(312): unsure at all n locations
atatgccatngaggcatntcaccgagcacttgttgggctctatgtttggcatgaatagcaagaatggcggcaatgtggcatgccccattactccagaatgcaacatangcctaaggccatcccttacaaccccctaactcagaccaatcaagcatgaaaacaaaccaaaagtgccccacaaaattgagcacanttcccacaattagagcaccaaaagaagaccaaaatagatcaatggaaagcttgaaagctcaaggatgagatacttactngttggagtgagtatgagtataaaaaatgaaagcanaatgc

SEQ ID NO: 70880 - DNA, 339 bp, Glycine max
  unsure (1)..(339): unsure at all n locations
tgtgctgatccctaactgttagcaagtttgagcangatattatattaatactatagntggaaagacccaaaagaagctgacaagtaaaactggcatatggaagaagaggtgatattctttgagcttccatattggtctaatctagatgttagacattgtattaatggtatgcatgtggagaanaatgtgtgtgatagtgtaagcaacccacttcttaatattaaagggcagacanatgatgatntgaatactcgtcanaatctagctgagataggtatacttgaccagctacatctaatgtctgatggtacataaatatatttgcctcaacatgtcata

SEQ ID NO: 70881 - DNA, 218 bp, Glycine max
aaactcagatcgcgcgaccactcaacacccctatgcataatacagtgcacctccgcactactcttttagttcctccacctcactctgataaagctacgcgagactgagacgcggacaagcttgttcatggacatagggacgagcatatgcgccacatccttgtatgagagagtacatgctagctctactgtcatcatgcctgattcacagccacactt

SEQ ID NO: 70882 - DNA, 341 bp, Glycine max
  unsure (1)..(341): unsure at all n locations
attcaagacaactttaatctcaacttatgactatgttatggataatacaacgacggnggaaatgagatatgtcacactntcaaagtgcctcgtgctcttatattctatgctgaatataattagtattgctatcgtcaactgtttagatttgaacctataatttctatgtgactccgaaagcaagttctctgttatttgcttctcatactcactctttaatttggaatatatgcttgtctctgtgtagttattctgcactgtccatcattactcataatatacatgttctttgaatggtaggccctgtgatttaagtatcacgtacttctaattctccatgt

SEQ ID NO: 70883 - DNA, 315 bp, Glycine max
  unsure (1)..(315): unsure at all n locations
agctngctaacccatggaagctcctaatatctnccacactntttggtgtgtgccattctnggatggccttgattntctcanggtccacttggaccccatttctaccaactacaaaacctaagaaactatattatctacacaaaaggtacacttctctatatttgcatagagggtgtttttcctaaggactgaaagaactngtctgagatgtcctaagtgatcatctangctcctactatacactaaaatatcatcanaataaacaactacaaatcttcctatganatcccttaagacatgatgcataagcctcat

SEQ ID NO: 70884 - DNA, 377 bp, Glycine max
  unsure (1)..(377): unsure at all n locations
gcgcgaagtagagggaattctagaatctgctatctggcttgctttcccctggttcttatacgaagtcactgaggtacttgngcctatgtgtgatgcgttctggtctgttatagcctctgctatatgaagcctgatttcctcttgggtggaaatatagcctgaagctgaaatctgtgtgatatctggtactgctgatagagcgttgctatcatctgcatggtgtnttatatcaacaagaatatataaatatttaattatgttaatagtgatgaagtaccacaggtactttgtcatatataggatcccatagatatggntccttatacaataactaatacagcntaatgacgaaccatattatggctaatacatctgct

SEQ ID NO: 70885 - DNA, 417 bp, Glycine max
  unsure (1)..(417): unsure at all n locations
tcagctcacagtgctactgacagcttttctcatctgcaaatatattcagaccttatttaatattctganattggcaacatgaaaccacacataaactcacttatgaatgaaganacatacaacacgttacacacctgatgcttttcaagcagactgagaacatgacttctggccttcatctgcttctctggtgctaacattagcgattccatttgcttgacattataagttaaatagctctgattaatattgatgttatcattaacacaatttatgtcattcaaattcaagataagttaattaaaaagagttacgctcttcttttcttcctcaaatcttctcctttggttgatagtgacttttcttgtcaagtcagtgttgacaccacgatcgagtcatcattcattgatctatctc

SEQ ID NO: 70886 - DNA, 217 bp, Glycine max
ttggacgttctctgggagatcccaacggtcacaatgtatattgatgtgcttgggaccttcattaacatatttgagtcgatccacgggtaacgaattgtaataagaaaatgtactgggtattcgttatgaaagcgggggttggttgagtttggcaaagttctgctttgtctgttcttggttgaactcatgagtgatgtgatgctaatgtaggaactga

SEQ ID NO: 70887 - DNA, 419 bp, Glycine max
  unsure (1)..(419): unsure at all n locations
gcttgactcgagtcatcaagagaatataaatatgtgaccatgacatgagtttcaataattatcaatcatcttttgttcgnctatctttcaatcatttattcaacatcatctctcatacatctgtcagtcaagcttgcaatatctttctacagaaatttgtaattcatttctcttatctttcaaaagtttttatcacaccttctcttcaagaaaagtctttgtcaaaacttgtgtattatctttcattctctttccttgccaaagaagaagactaacgctgaatctttggtcttctttcctacaaaatcaaagactactgctgaaatttttgatcttccttccctaacaaagattataggacaccgctgaaatcttgcctaccatggaggcatcttgggacaagaaggcattactgggat

SEQ ID NO: 70888 - DNA, 303 bp, Glycine max
  unsure (1)..(303): unsure at all n locations
ggacacaagtcagaatggaatggctcattccagggctggatgtcatctactanatgaagttaatcaggtacctcgtatagtcttggtttctagctcgtgtctcttcacgtctgggatatgaatgtagcatattgatccagagacccttatgtgctttgctgatggcttcttcccgatccaagctatacatggagtcttgtctattacagacttagttagacatcttgntgagtatgtaaataacacgagatactacttcagcccataatgtgtagagagtcccttcttcttgagcattgatct

SEQ ID NO: 70889 - DNA, 452 bp, Glycine max
  unsure (1)..(452): unsure at all n locations
gtctctcattatatatatatatatatatacatacatacacacacactgttgctgttttttcctgngagaagttaacaataactgggagtatatatgcaacacaatcttgcggctcaacagcttgcaagagcagcacaaccctccatagccaacaatctgatgtaatcttgatctgttccaagaatacaattgcatattataagagtaaagtacattcacgagactctacaacatgctcacacatgttaatatttaacagacaaatgacaaacactttccatctacaaagaacaagagatatgtattcaattaccatcttgagtaagatcataaaannatgacatgacatgagtcttaaaatgagaatattccagtaagagtatctaggcttgcaataaccaaacattaagtcattggtctatgatgtgcatttatcataaaaaacctacact

SEQ ID NO: 70890 - DNA, 261 bp, Glycine max
ccttatctcctgctcattcgagggcctttctaatgctattttgccatctgctgaggaatcttgcttagagtcttttgtccctgacctgctcaaaactttttaagcttctatcttgaggaggaaatggttcactctcagcattcgtgagactaagggctggaatttctgcttgacctctaaaaacttagctagcctatgaaactgtatctgaaataaatggcactctcccaattacacttttatttttagctacctggggta

SEQ ID NO: 70891 - DNA, 207 bp, Glycine max
atgactctagaatgaaagttgtctggatgggagtgtgacaagtttcatgattgaaaggcggtgacacagctcggtgtaatttacccgacctaaagacattgaatgttttggagcaagcggcacggctaggtggtgtgatgcagaggaaaagatggttatcttacgtcatacgtctatgaagtaactcccactcatgactgaactaca

SEQ ID NO: 70892 - DNA, 325 bp, Glycine max
  unsure (1)..(325): unsure at all n locations
gcttacccactaagtgtattgtaagtngcagatgatgaactatgtattggatcacgccatgatttgntagcctaatcttaatgtgtggtaaatgtggtgatngacatttatgtgtaaaaagtgttacttcaattatgggatcattgtgtttggaagcttatatgtgtaacatcctgatatatatatctatatattattagtaattatgttggatgtttgattatttgttgcgttattttcatccgtaattatttttaagaagggtaatttagttaaaagaggggtgtggatagataaggatctagcttctcaaagaagtctcttg

SEQ ID NO: 70893 - DNA, 346 bp, Glycine max
  unsure (1)..(346): unsure at all n locations
tattcgcgtgtgtatccatctcaaaaagcannctcttattataatatattccangtttgcaaccctctctgccctgcgactatatatagagtaatcttagtagtacgtacatgctggtgtgaaaatgactntcacagcaggcatataggtactaggtagtataagaattctaacagaacctagaaaagcatctaattaattcaagtntccatattgggaaattaagtatggaatcagcaattccagctttatctactcaagatgtgcaacaataataatactcaatgcaatataacaaatgacattcaattgagaaactaatgatactatgagcatccnctacatg

SEQ ID NO: 70894 - DNA, 407 bp, Glycine max
  unsure (1)..(407): unsure at all n locations
gctactcgggccattcctgcaaagcaacatttggaagttagtttaccagtgggattctattcttatgacanagatgacatacaacctcctcccatagatacaaacatcaatgtaagattagagcaagcttatgacatatttccttacaaacgttctcttgcacaggacattctattaaccaacaaaaatgcacccatatacaatcaaggcagcttcgttacctagaatatntacacgtacttncaaggtgtatttgttacttacatcacacacctgcttggctaaattcacatacatgcatactcaaagcatgttggggtaccaaaagttgcacatgtgcacatctnggtatntctaatacctatacatacacaaacttcatgatgaatctngactatctacacaat

SEQ ID NO: 70895 - DNA, 403 bp, Glycine max
  unsure (1)..(403): unsure at all n locations
actggctataaataaatagttattactaatantatttatgttaataattctacaactaccagncatatntctaacactcttttaagaccaaataaatttaatgaactatctatagtatctgtaagagnagaanataaaattnatttaaaagtaaattggatcagactttttatacaagttaaaattaattcatgggttgataactgggctaaacccagtaatgtatctacaaacacctataagctttacactactcgatattcttatccagagatatcggatagttggaaatattgtgaatcacctagttatctnataatggtggtctagtgtgttatttaataatataaacaggctgactgacttaaacccatataatntaataccctattagtttgaaaat

SEQ ID NO: 70896 - DNA, 241 bp, Glycine max
  unsure (1)..(241): unsure at all n locations
tgtctggcatcagaaggatcgacgttatacaagacttgtataaccatcttccctntcttctgagcgcagtgaaggatggtggcaagttcatctaagcaagaggaggaagaagcatagttnnttagagaggacaatgatggcaattctggactctcgaattgccttgggaagtgcangttgtatatcgtcttctctctgaagctcctcatcatcaatgaaagagtggattcctctgtcatca

SEQ ID NO: 70897 - DNA, 308 bp, Glycine max
  unsure (1)..(308): unsure at all n locations
tcatatgatcgtgatgatatgatgccttatgaagagcacttctcaagttaattcaagaaaaatatccaagaatacaagatacaacatcaagaagatctctagtggttttatggaagggaattcanatcgaaactacaaaaggtttggccaagaaattaagcaaaaatgtcttttaagagattactctctagaatcgataccagagatgtatctttttaaagagttttctgaattgaatgctcatctctcaaaagatcctggtcaacactgctatcaataggaatttgatgacttcatgtcaattatct

SEQ ID NO: 70898 - DNA, 442 bp, Glycine max
  unsure (1)..(442): unsure at all n locations
cccactgattctgctcgaaccttctttatggactaaccacactgtggaatactcttttgccccttgtgctgttagcatactctattccttttaataggcctaacttatcatggagctttttcacatagtccggctttgcttgtccttccttatgcttgaaaactgacatattaagcattggcaacaaatcaagaggagttagtggatggaaaaccataacaaacctcaaaggagaacaactagtggtgctatgcacagtcctattataacaaattcaatgtgacgtagcaaacttccaatttnaagattctcttttaaaacggccttagcaggtacccaaagtctatcacacctctgntgtcatcgttgaggtgacagctagaaatagtactagacccacttcccctatgtctcaaaatgctacgaactgggcctatactat

SEQ ID NO: 70899 - DNA, 302 bp, Glycine max
tctaagcacgagctcactaagactgatatccttcctgaaagattgactaattgtattctctctcaaataactcacctgcaaaggagtaaatcaaaatgtaaaggggctactctacttttggagtcactaagatgtattgacttcaaactgaaagtcatcccttaggctaactggattcttttataggattatcttctagatgagcaaccagcacctataaacactcttctcttatgcttagaaaacacctgttgtcttattgtctaccttatgctttttacatctacctgatcctttatgat

SEQ ID NO: 70900 - DNA, 336 bp, Glycine max
  unsure (1)..(336): unsure at all n locations
tctccttgatgcttgaagctnggtggcctcttcttttattctacttattcctcgaacttcctcctttgtctctagtcccacccttattttctcttcattgtgtcgtatagtaagtggaaagaaagttttgctggttngttgtctggnggtgaacaagtgatagggcccagattatatttggggagttcttccatccatatacacttgtacatgtcgagtatggtgcacaacgctctaaagatgaccctgttagctgcctttgcctgactattggtctangggtgtctgacagaagttacgaagtgctngacacctagcctcatcangaattcttca

SEQ ID NO: 70901 - DNA, 317 bp, Glycine max
  unsure (1)..(317): unsure at all n locations
ggtttatacctatgtgtgataattaaacctgtgataatgggaatggtatgatatgttgtangagatggagctatgactggcaatcaccaattgtagaccatttaaggcaaagtatgtgatggaccctgtggacccacagtatatatttgaaacattgatagtgtggtttgatgctatagtaaggatgtatcagaacgtgtaccttgaagacaaatgttgtgcttgataacaaacccccatgtgtcgatgtaaaaaatgagttcattagacctgttatgtccatggtaatgttgaaacatgtggcggaatgtttctga

SEQ ID NO: 70902 - DNA, 428 bp, Glycine max
  unsure (1)..(428): unsure at all n locations
tattnngagactngaacctttgtatacagtcaacaaacaactttatagtttttccatatctatcacgactgactctctgctctactangaattatacatatctcttctttatgttatattatctttggtagaagaagaacacttttgattcccgtcaaaatgttagtgcactcgtaggttcttctattacaatgcacaaaataagatagatatgggcaatgatcaagatgtccaagcatcatcccatcagcactaanatcttaataatattacacgtacaggaattaaacatattttgggataatattttcagaataaatcacatagaactccataacaacggtcaaataaataatttgtttgtccttgtgtgttcnaccaatagcttccagcatttatgcaatgttnngtgttaacttgagtctatg

SEQ ID NO: 70903 - DNA, 241 bp, Glycine max
catcatttctggcgctcaactgctgagagtcggaagccatcttctcaattagatctctagcatcacatgagtcatgtctacaatggctccaccactgacagcatctatcatacttacctgcatattactgactccttcataagaatattggacaagcaactgctctgaactctgaaggtgagggcaactgacacataactctctaaatctgttccaatattcatacatgctctctacactg

SEQ ID NO: 70904 - DNA, 218 bp, Glycine max
  unsure (1)..(218): unsure at all n locations
atactaaaacttttgctcttgtngctcatctaanggcgatacttcatttactatcctttgctactcatcatgggatgatgttgtatcaaatggatgtaaactgtgtgttcctcaatggacttatcaaggaagaagtctatgtgaaacaaccccctgngttngagagttctatctatcctcatcatgttttcaaacttaataaagctttgtgtggttaa

SEQ ID NO: 70905 - DNA, 344 bp, Glycine max
  unsure (1)..(344): unsure at all n locations
tcctgactcaccatanaccttgacccanggtgagaatgccaatccttactctctgatagcaaaaanaggagagagagagagagagaagagaaggannatttccgatcaaaggaaaaaggagaaggaaaatttccaatcaaaggaaaaaggaaaggaaattcccaatcaaagagtgggggaaagcaaaaagaaaagaaagaaaattcccaatcaaagaatgggagaaagaanaaaagagagaagttataaagaagaaatctcctggtcagagaaaccagaagaaatgtgccgagaggtccttggaccagacaatatctgaacaatacagaatttgtcaccaaatg

SEQ ID NO: 70906 - DNA, 311 bp, Glycine max
tctaagcacctgagctgcaagctttatataaaaatatatactttaagttatacatctactcttgtttcttacggtaaattgacatgtcacaatcatgaaagatgttataaactcgcgctcttatattgattatttattcatgtaccttcaaaacttaccgggtctctcatgcaagcaacttatctgccgaatcatatcaaaggcttcctcttgcagaatcagaagaagaagaagaagaaaaatataaggacaagctcatgtgaggcagctttatgcagtggaccactataaatgtaggaacaactcagata

SEQ ID NO: 70907 - DNA, 442 bp, Glycine max
  unsure (1)..(442): unsure at all n locations
ctcagctcaacctttgagactaatctcttgatgaaaatccttanataatgtattaaatttgtattctatgatggaacaatattaatagagaaatnttactaanaattattagttaaatctatgtattaaaaacaactattgtcaaaattaataaatatgttatacttataacatttagttatttcgcaaataaacaacaataaaggttgtatggctaaagattgtcgagtgtgaatgcatgttgttgattaatcacagaagtaatgtcgntatactaatctgtgctaattggctaaatctaactgaacaaataccaacaaccttaatcaatacaaagaaccgaataanattaacttgtgtatatgccacgaacttatcaatattccctactgttatttatgaaataactatcaacaaatataaaaggtcgtgttaaatatga

SEQ ID NO: 70908 - DNA, 296 bp, Glycine max
ccttgatctcactttcagccattggggacctctctgtatccatgtggctcctttttctgcttcacttctgggaaaactaagaccatgactaaatcacctttaaactccaacacttctaaagggaattatgaaattccccaaaaagcaccttatgtagagggtagagaggttctcaaagtctaacgaaacttgaaaaaattaagattccttaacactccatctcttgaaaacctgtacttgccaccttggctataattctagtaagagtgtgataggttgtccagactaatctgtct

SEQ ID NO: 70909 - DNA, 370 bp, Glycine max
  unsure (1)..(370): unsure at all n locations
ctcagctggagaggtgcttaatggatggaaaaaagagagtttgtgggagttctatatngatatgaataaaganggaaagaagtggaaccttgaagtgtatctcataagactctcattcatcaaagttacaacaagtgttacacatgcttctatttatagactaggtcgcttcctcgagaagctntcttaagaaaacttcctcgagaagctttcttaagagaacttccttgagaagctgtcttaagaaaacttccttgagaagtttctttgagaagctagagctcagctacacacccctataatggctaagctcaccctcatgacacagaaacatgagaatactgaaacaatcctactacatagactactc

SEQ ID NO: 70910 - DNA, 242 bp, Glycine max
  unsure (1)..(242): unsure at all n locations
gtacctatcgtgaccgtcaacattaacatggaagactcnggntgaatccgacgggctacagttttgactctgatgtccgattgatgcccataatatatcatgcccctcgaaagtagaaatggactgaccacgcatattcggacaaccattacagattgactctgattcccgattgaagctcataatatattgagatgctcttatgataaaaatgaagcccatcgcanatacaaacgaccata

SEQ ID NO: 70911 - DNA, 407 bp, Glycine max
agcacgagctcagcttacagcagtgatttacctagttccttaatatagtttttttttaaatgaaaacccaagaaaacgtcgatgattttcgcttatttactaaaagattttgatatatatatattactcttgatttcacgggtacgacaccaaggtcgattatttaccgaataacgagatcattaatgacgcggaattatttattttaatatgcgaaatgacttataatgactgagccgtcaaggggataaagcaagaaataaataaatcatgaacaaagtgaccaccggactaaagattaaagctcgtgagactaccgtgaaacgagaacaaaacacatatgtgaaacatcaatttgctatactcaacgtcgtctatgagcctcgtgattctacgaatattctaca

SEQ ID NO: 70912 - DNA, 366 bp, Glycine max
  unsure (1)..(366): unsure at all n locations
cctatttgaatctcctatgctgtccctacatatataaaactttcccaccttctctaatttacaaaatcatattcatatatcattgnggcatttcaccgagcacttggtgggcgcacgttagacataaattacaagagaatgtgggcaatgtggcatgccccattgcttcataatacaacataggcctaatgccttctcacacaaatcctcaactcaacanatcaagcataaaagcaacccagaactgccccacaaatatgagcacgttctcacaaattagagcaccaaaagatgaagaatatacaccaatgggaagctaataactcaaggattgaatacttacttngtggagtgagtagaaacacc

SEQ ID NO: 70913 - DNA, 221 bp, Glycine max
gctgcatacatgacagcttactgtacagtcttagtgtcgggacataacgtctctggccaggggaacccccttgaggctcaaaacttgaggtatgtttaagtgactgcagtacacaaaaaccctcctctatgcacggtgctttggggctaaagatctcgttaaattgactgtaagcgcctgtgggagtacatgaaggtgaattcaaatcacttgtgaagaag

SEQ ID NO: 70914 - DNA, 372 bp, Glycine max
  unsure (1)..(372): unsure at all n locations
gagagganatggaccaatcacgagtagacagtttgatcttganagatgaatngaatgtttgctcaaggtccaaaagaaagttgtctctgcggttatgctagacagagaccaacatgttggctgttataccaagtaccaagaagaactaaatctagccgcggcgcacgagcatagagtggcggactagtatgcacaagtgtgcgcggaaaaagaggctagaggaatggtgatcgactcgctacatcaagaggcaatgatgtggatggaccgatttgtccttaccttgaacgggagtcaagagctatcncgactactagccaaggccaatgcaatggcggacacctactccgcccttgaggagacccacggact

SEQ ID NO: 70915 - DNA, 363 bp, Glycine max
  unsure (1)..(363): unsure at all n locations
tgaggcatgcaagctttgactcggtgtatgcgtgaagcccattatatatcgagacactctttatgttttatttaagctatcgagaaattcaaatggtgaatacatttcactcgcttgtccagttctggcgcataatatattgagaacggtagaagttgaacacggaagcccttggctatattcaatggccataacttttgactcgggtttatgtgtgaggcccaagatatatcgagacgctcgaaaatgaatagcagaagctctcgagatattcaaatggtcattacttttcagtcagatgttcgatgccggcgcataatatatcgagacactagaaattgaatacngaagctctcgggaaat

SEQ ID NO: 70916 - DNA, 313 bp, Glycine max
  unsure (1)..(313): unsure at all n locations
ttacaatgcagttcggctaggtttcttcgtgctatctgaactcttgntgngtttcggccgactggcatgttctcattttgtcggccaggataacattagcccacctcggcatanangacatgattcaccgatattagacaggaaaagataaatgctagccgacgtctgtcaggatagatgaccgaccgatgtctgaatagaagcatgaccggatgactgcggtcgaacatntcctaacagatatcatccaggtattattcatggatagaatagaaaaaacaatagccgacatcggtagtaaatagccgtgact

SEQ ID NO: 70917 - DNA, 361 bp, Glycine max
  unsure (1)..(361): unsure at all n locations
tacttggacttgagcggcaatggatttcttggagaacgtatgtcaattccctctttcttgggacaatgacttncttgactcacctcgacctctctcatactggattctatgggatgattcctnctcagattgggaatctctcaaatttggtgtatcttgacctgagttcagatgttgccaacggaacagtaccttctcagatcgggaatctctctaagcttcgatatcttgacttgagcgacaattattntgaaggtatggcaattcttctttcctttggcaatgacctcctgactacctcgactctctgaactcattcatgggaagattcatctagaatgggatctctcaattggctatc

SEQ ID NO: 70918 - DNA, 378 bp, Glycine max
  unsure (1)..(378): unsure at all n locations
tcacatactngatacccattctacattntcagcanacagaggttcggtaaaataatttctgaggtcaaggtagagcanaatggagagattcccaatctgagatggaatcttccccatgaatggagtatcagagaggtcgaggtgagtcaaggaggtcattgcacaaaggaaagaaagaatngccataccttcaaaataattgtcgctcaagtcaagatatcgaagcttagagagattcccgatctgagagggtactcttccgttggcaaaaacataactcatgtcaagataccaccaaattgagagattcccaatctgaggaggaatcttccncatgaatccagtatcagagagggtgaggtgagtcaaggaagtcat

SEQ ID NO: 70919 - DNA, 122 bp, Glycine max
tctctacctttctctttgcttcgctgctctcatggggaaacacataaggacctatgagctaaatcagctctaaaccacagcagctcataggataaccaactcaggggtctaactcatatttt

SEQ ID NO: 70920 - DNA, 553 bp, Glycine max
  unsure (1)..(553): unsure at all n locations
gctanccctatggcttgcctccggacttcactccncgtgccaccccggaagaattaagctcttcccctactttcgaggagcaactcccaccttatgacgactatcccgggcatgacgatgaggaaggagaacccatctcggtcccctgctccacctcaaagatccattcccncatgaactaccccagccanacatagtccgccatatcccggcttcacccacacccgtaaaagaatctgttcccttcgcggaaggaagggaaagatngacgcgctcgaagagaggttaagagcagtcgatggcctcagcaattacccattctcggatctagcggacttatgtctcgtacccaatatcgtcattcctcacaagttcaaagtaccggactntgataagtacaaagggacaacatgtctgaaagggcatttcggatgtattgccgaaaaatggggcgtatttgcggacaaagttgtggtctattcttcaagacagttgctgagcactgacatggatccaatctgagctccaatcgacatgaggactgcactgctta

SEQ ID NO: 70921 - DNA, 228 bp, Glycine max
  unsure (1)..(228): unsure at all n locations
agtcacctgcggcatgcaagcttgtgtcacgantcattgtgacgatcaaagtgccagtcacttattctatcatcttatgtaccatgagaggacaaagtacatagatgtgaaactacacttcatcagagatgtgatgaatctggaaggaaaggtggagaanggttcaacagaagaanacccgactgatatgttcacaaagtccctctctagtgtcaagatcaagcactt

SEQ ID NO: 70922 - DNA, 514 bp, Glycine max
  unsure (1)..(514): unsure at all n locations
tgaggagataatataaacgcaaccgtacttataaanatccaaaaattgaagctttattgtgttcttcgagcttctctacgaaaccaaaagcatgcaagaaaactntaagcatgannaaccgcaacagatcggaataatagaaaacgcagaagacggggagggtaaacgaagcacatcaacatcgaagcaacaaagaanatgcccatgtactcatcanaatcgtagctttagtgtgttcatccaccttctntgccaaacaaagaacaggggaaacataatggaaaataacatatagaaaaaacgcagaagacgggtgggcaaatgagaacttacgaagggtccgtcatcanaatacagcttaatgtgtcgtcaccttcttaccaacaagaacgaggaagcaaatggaaataacaaaagatatcncagaaacggggggcaatgaaactacgaaggccgtcataaatgcagttatgattgtccctcttgtaacaagacactgaggaatgaaaaaaca

SEQ ID NO: 70923 - DNA, 238 bp, Glycine max
  unsure (1)..(238): unsure at all n locations
gcgatgcttcttttcatgttcgcctgagtgggcttatgccttaccatactgtccacgatttccctgggtgtttatcangctagttatgccgccattgtctttgcctaaacccatgcccgaggtcataacacgtccccaacataactcgggccatcattaccgccgcatcggacaggcaagggtgcccaaagagggagtccacggaggaaatgctgaccacctcataagactggaaagc

SEQ ID NO: 70924 - DNA, 428 bp, Glycine max
  unsure (1)..(428): unsure at all n locations
tctgacgtttgatagcaataatacaatcattatgcatatgcctagantgggtacagtgttatcaaggntgcaataactatttcttagaattcagttcaacatgaatggaccaatcgacacagcatgtagaaattgacagaaaattactatatatctattattntatctactttctatttatctacttttctactttctatatatccactttctatatataaattctatagatggnntgaaatacatttaanaccatctttcagttgtaatagttggttatttttaggatattntagtctttcatcatacttctctttgtcctgctttttttaaaaagtaaaaaaanaattgaatttcaaatttcaaattcaattgatacacaaatctctcatgcattccttttttttctcttanggttttcttctatc

SEQ ID NO: 70925 - DNA, 389 bp, Glycine max
  unsure (1)..(389): unsure at all n locations
nggctctggccatcagaaccatctcattcttaagttcctctaccttttaacagacattttgtgtcaagaagntcttntctgcatcaaacttgatcaaattgatcttctgatcatctatgtgcatttccagcttacccttccccatatccaccacacaattggcgggttacatgaagggacgacccaaaatcaaagggaattcanaatcctcttcaatgtctataacaacaaagtctgtaaggaaggcanactgctgcaccttgactagaacatcttcaatcacaccatacggccttgttatagatctgtctgccagcagtttgcctagaagtcattctagtgccataatctccaactctccaattctcctacacatggagagaggcatc

SEQ ID NO: 70926 - DNA, 414 bp, Glycine max
agctgcctatccacggttcttccttaagatcatatgtattgcatatatttcataaatattaaaggaaccagtagatggggaaattaatataaaagaaattagtgctattacctatgatgagtttccccttcttgttccatttattgcttgcaacagcagacagtgaaagaaaagaggagtccattaaagagtatgggtcacaattttgttggaatgtcattcatatagaaaaaaaccttttattctttacaatcacttaactctggaaggggaattagaaatatggcatgatcaatatatatttcagtcacagtatatgtttccacagtacttcaacagtgcagacgtgcactcgtaaaatatatgacaagagttcctcgttttctactaagtgaataaaagccatacacaact

SEQ ID NO: 70927 - DNA, 211 bp, Glycine max
  unsure (1)..(211): unsure at all n locations
actaactgatctgatgagttgggaacatgctgttgttgccttaaggctttaattgctagaaacaagctgtgttntctatgttttctggaaaatgcaatgaactctctaacgagcatgttgcgctagcgagttcatcaatactcaatggatggtagcgttatctgaagaactcgctaagcgcgcttaccgcgctaagcaaagttcatctttg

SEQ ID NO: 70928 - DNA, 347 bp, Glycine max
  unsure (1)..(347): unsure at all n locations
gagtctcgaagtgcgtggctacgattgggacttctaaatttcatgtttgggnggacttctttctcctttgattctccggggtatggggttttgggagatatgatgggtagntctgttagttttctgctccatgatagttatttgtgaagactcttgttgaaagctcgctgaacttgctatgtttggatgagttgaacatacccattctatttacgcgttttatgatgatgcttgtgatgttcatgtgctgaaattgcttatggacaactgttagaaatgaatggtagaactaacctacggtttagagtgagaatgtggtgttctgagtggaacaagagttgaatttt

SEQ ID NO: 70929 - DNA, 415 bp, Glycine max
acctgttgcatgcaagctcgccgcccagctcgcccaggcgagcaatgttgcttcctccttattcacagccttctggaggaatcttctggagggcccaagtgggcctgagtgctatttgcacccccatttttactaaatacaccccctcttctatttttttggtgaatctttttccgtaatgttacgaaactatacgaatttcgtgacgatacttattttttctttcgcacggttacgaacccttacgaagtatgaatttactcttttttaactttcgaagaaggtacggaaacatacggattgcgcaaaaacacctcttttctacttccgctccattacggaatttcacggatcgtgcaagcctgcttcctttagatttctgagacgacttgggacttatttattgcatgtcatc

SEQ ID NO: 70930 - DNA, 397 bp, Glycine max
  unsure (1)..(397): unsure at all n locations
agcttgtgcatgtttagagatttctagagagattatggtccaagttccaaagaattttgagagttntgctgtgcgaagactggcagagaactgagcatgaagaggaaggcatcttgagagcatgatatgagtatgtgagtgattgtgaggttctagaggtggaggagacatccccactacttgtatttcttcaatccttcatttttctcttttctttgtagtgaaggaagcttcccatatatggagagctaaatcctctattggctcttccttgtaggtacttgatgtaaatacctgtatatctatttaatgatgtnttatgtgttctctgtgctatcagtacctcatttcagtgtgctctttccttgatcacatagatgcatgctttttaggatca

SEQ ID NO: 70931 - DNA, 134 bp, Glycine max
agcttgaggacgttggcttttttatattgctctatttgtttggtgggacctatgcatacgctgctggagtgcgccgtacatatattacacaattgtcacgtgtcttccataagcgagtctggtactatttatat

SEQ ID NO: 70932 - DNA, 392 bp, Glycine max
tacaacttatttcccaataaacatgtagtatcttttattcaagtataacaacccttaataatgaatttcttaaatattgattctcactgaacaatctgaatctacatataaacaataatatataaggagttaacggaagagaaaatgcaactcagattatactgggtcggcacacacttggcctacttcagtcccaacaacgcgttgagagtcacttcttgaaattctttacagtttagaaccaagacaccttcttgtgttaaatcttccacacagacctcgttcttatcctttagatgagaaagaaaaaaaattcttgaaagtgatgacaattgacctcaatatctatgatacagattggcagattgaaggtaacattgtttagagaaact

SEQ ID NO: 70933 - DNA, 437 bp, Glycine max
  unsure (1)..(437): unsure at all n locations
agcttaatacacctaacattataaaacgagtttactaagngcgaatatctctcctaccaccccaaggcatcttcaatnttattatgaataaataacacatagttatcatctttctctatcaacattatctggaggcttacaaaaattatttaatagtaagaaatggctacgataatcgcttattattgacttaaatttcttgcttgatgagcctcaaaatccttataaaaggtaacaacttttgttgagaaactaatgggatcaaaacttcaaagagatctgtattaaccaatctcanacaaatcacacacaaataagactgatctgatatttaacttaaaacattcaaacttaaattttgagtcttttctcattcttatttactcaattngttatttttattcatctttatactctgatttccaagacctttaaaa

SEQ ID NO: 70934 - DNA, 355 bp, Glycine max
aggaggactcattcataattagtagtactcataaagatagtatgtcatcatatctcttccaataacgggtagctatacacataaaattatagatgggatgtaagaatacggaagtaaagaaatcgagaacttaatacctaattcgtgaagcacagcaataaataaataagataaatggattttggacatatccccaccaattctcattatgtatgaatgcaatgtgtctataattaatctaggaagagagattttgacttgcaataacatgaatcaagaaatgatagaataaatgtactaagaatcacttactactggactctgtctgatgctctgtgatactattgacaagact

SEQ ID NO: 70935 - DNA, 127 bp, Glycine max
  unsure (1)..(127): unsure at all n locations
atctcttggaccaccttatgaaaagatggaccctggaaccaaaaactgagcattctaaatgattntggacctcttgtattgatccttgccaaacatctagccaccccctagtgcaaatgaatctatc

SEQ ID NO: 70936 - DNA, 423 bp, Glycine max
agcttgcacaacaagtttctataatccattttgtacaaattgaagtaactaactaacatccatgaatatatacacggcctaaagaagggatgggtcttgattatgcccatttaatttacttaattaaactaattacacaaaaccaagtccaaattcagagtctaattattcatgttcaaaggttctgactttcaagctcaatttgaccatcgaaatgatagaattggtccaagcttatttgtgacaaaattgaagtgcttgctgacaaaattaaagttccttttcttagctctccggggatatttaacatgctccatttgaagttttgtagtgtcatatatgccttacacaaggtagattggtcaagtaagcataaaatctaaaaataagcaacaattataaactaagctcattcattttgct

SEQ ID NO: 70937 - DNA, 352 bp, Glycine max
  unsure (1)..(352): unsure at all n locations
tctacatgtctagagagttctagagagaganaggtccaagttccagagagttttgttatatttgttgttcgaagatctgcanagaccagagcgtgaagaggaagccgtcctgagagcttgagatgagttgtgagtgattgagaggtcctagaggtggaggagacatccctatcacttgtatttctgcaatctttcatctttctcttctctttgtgtaaaggaagcttcccagttggaaagctaaatctctgtggatctncttgtngtacttgatgtaatatcttntatctatctaatgatgtttatgtgtctctgtgctccagatttcatttagtatgctttaccttgatca

SEQ ID NO: 70938 - DNA, 431 bp, Glycine max
  unsure (1)..(431): unsure at all n locations
agcttgcaattaatattcttgtaatggattttagcttattttaacagacaattcatttcttgtaaagggtaaaagttaaaattagtcatacaatacttatctcagttaatttaacttgcaaactaacttgagacactgccttaattagtaggtcatatatcagtattataattatatttgtactgtgtacctgtggtaggaaagctttcctgatgccataattggcatcgatgtctaagcgccctccaagaccaacaggaatggcccgcctgtatctgcaaccacctactgttgtcattccctgattcagaaatcaattcacacattaatatcattaaatatcttttctaatatgttttatttattaatttacnattattaaactatacttattatatttcttttgggtaaattcttaattgatcttatag

SEQ ID NO: 70939 - DNA, 101 bp, Glycine max
agcttcattgcctaacttgccaacttacattatttagtcccaagagactcagcataaggatgcacagactaaagttgtgtctgttaaactattgcatgacc

SEQ ID NO: 70940 - DNA, 289 bp, Glycine max
  unsure (1)..(289): unsure at all n locations
gcttaacttaatcaattcaaaagccttctgtgcttgttcattccctcattcgctttcttcttctacattcggtcataagacttgctataatgctanaattccggataaagcgcccatcatatgatgcaagaccaacgaaagatctcaccttcgcaactgttgtatggactcggcaaggcttgatagcatccactctctgtttgatcaacggaatactcatgttaagacaccacatatccaagaaacaccacactttcaaccaagacatcacacttttccctttcccata

SEQ ID NO: 70941 - DNA, 324 bp, Glycine max
  unsure (1)..(324): unsure at all n locations
gcatgaagcctgggccaattggatgggaggcgatttccctatacattttgcgggngccgncaaaagcctgcactatcatagagcttggcctcacgtgagaggcattgaatggtagttttctcaacatgctcttgggaattacgttaagtgatgagccagtttccacgagcaccttggccacattgtgatccatacacttgacagacatgtgtagggccctattgtgccctcgcccctcgatagggatctcctcctccgtgaaggtgaggtagttattagttgtgatatttgtgacaatgccctcgaagccttccatggagatat

SEQ ID NO: 70942 - DNA, 234 bp, Glycine max
gggaaaaaaaaatgcaaccacaaacacccaaaaaaaaaccaagaaaaaagagaaaggaggaaaacaaaaaaaaaaagaaaaaaaaaccaaaaaacataaaagaaagaagaaaaaaaacaaaaacatacaaaaaaaaaaaaaaaacaaaaaaagaaacagaaaaaaaaaaaaagaggcaaaacacaggaaaaaagagaaacacagaggaaaaaaaaaaaacagacgaaagagaaa

SEQ ID NO: 70943 - DNA, 282 bp, Glycine max
gacacaagtccacaatcatggctactgccacgagtcatttgcgctactacaacctgaatgacccgagcttcaaatcatatgctactatacacaagtgatagcctaatataacctcaatgacacaagttcaaatcatgctactgcccgaagcattgctatttcaaactaatgaacaagttcaaataatgctactgcccgagtcatagcctaatataacctatgacacaagtcaaatcagctactgcacggcatagctattcacctaatactgacttaaatctg

SEQ ID NO: 70944 - DNA, 433 bp, Glycine max
  unsure (1)..(433): unsure at all n locations
agctntcaagaaaatcaaatggtcctaactntttatctcggaggttcgattgaggcggataatatatcgacacgctccaaattgaacaatggaagctcttgagcaattcaaatggtcataaatagtcactcggaggtccgattcaagcgcataatttatcgagacgctcgaaattgaacaacggaagctctcaagaaatacaaaaggtcataacttttaagtcggaggtccgattcatgcacataatatattgagacgctcgaaaatgaacaacggaagctctcgataaattcaaatggtcataacttttaactcggagggtccgatcacgcgcataatatatcgagacgctcgacattgaacatctgaagctctcaagaaattaaatggtcataacttttaacttggatgtccgattcagcacataatatat

SEQ ID NO: 70945 - DNA, 410 bp, Glycine max
  unsure (1)..(410): unsure at all n locations
ctaagcttctcatctattatgcgcctgaatcggacctncgagtaaaagtatgaccataaatttctttgattttcgntgttaaattccgtgcgtctcgatatattatgtgcctgaatcggacctctgagctaanagtatgaccatntgaatttctcgagagccttccgtggtcaatttcatgcgtctcgatatattatttgcctgaatcggacctccgaggtaaaagttatgaccatttgaatttcttgagagcttncgttgttcaatctcgagcgtctcgataattattgtcctgaatcgaacctccgagtgacatntatgaccattgaattgttacgagttccattgtcaattggagcgtccgatatattatcgctgatcggcctcgagtaaaagtatgacatttaatt

SEQ ID NO: 70946 - DNA, 210 bp, Glycine max
tttcatgtgtcaatctttttttctttgcactctctacactcttgcatgttctttctagtggtcgtaaagaaaaacgtaagtctacacatgaagaaaaactaattatatcgcaattaggaaatacaaatatcgaaagggatcatggtgaattttccaactgataatcaaagggagtaatttgtatgtacaacattgtgttggaccccaacc

SEQ ID NO: 70947 - DNA, 241 bp, Glycine max
agctctaagtgaagatatgtggaacggtgttttctttctactcctatcgcgaagaacacagaacggctcctatagatatgttctgggggccacgacaccttgtggatgttatgtggggtgctattgctcacaaccaagcttgaccaatccctaccagtcgtgcatagccgtcagtgataaccttgacgtacctattctgccacctcctgctctctaccgatgataaactaacaccacaaac

SEQ ID NO: 70948 - DNA, 240 bp, Glycine max
  unsure (1)..(240): unsure at all n locations
agaagaggaagaagaagaggggaccaaatgaagataaagaggaagagtggacttgagttgttacaaacttatctcaagtacccagtgtacacatgttctattatgactngtagcttcttgaaacttctgaanacttctgaaactctttaaaacttctgaagctaactactcccaccttatatactactcttgactctgaaatctaactactactcccctttatctactactctgataact

SEQ ID NO: 70949 - DNA, 377 bp, Glycine max
  unsure (1)..(377): unsure at all n locations
ctcatccctgtgaaagttttgtntctcaaatgcttctagagtgacattactgatattccaaaaaacatgtttcaccaacttcagtattcttccttcgtttcaccaacanataatgcataggatcgaaaattatattataataataatttatattgctaataaaataaatgaaaagaatagtgatctatctacagatnatttttttattaaataaatcatatatctgtattatttgtttttcaaatacaaataaactttatttactatttaataacaaataggtctaaaaacaacaattgcgtctgtcatgttttatgtcatatacatcaacaaatctgtgaactgaatcattcttgaaaaaaaaataaatgatgaac

SEQ ID NO: 70950 - DNA, 378 bp, Glycine max
acctgcggcatgcaagcttctattgttcaattacgagcgcctcgatatgttatccaccttaatcggacatccgattgacaagttacttacatttgaattcctcgagagcttccgctgttcaatgttgagcgtccggatatattatgctcctgaatcggactttcgtgtgaaaagttatgaccgattgaatttctcgagagcgttcgttgtcaatatccagcgtctctatatgtgatgtgcctgaatcagatcttcgagtgaaaaggtatgacaacttgaaattcttgagagctttcattgttcaatctaaaccgtcttcatatgtgatgctcctgaatcggacatccgcttaaaatgtctgacaagcgaattttcgag

SEQ ID NO: 70951 - DNA, 300 bp, Glycine max
tgcttctacagtgacattcactgattatttcatacaaacatgttatcaccaacttgaatattttacctcgtgtccaccaacaaaacatgcataggatcgacattatacttataatagtaagtgatattgctaataaaataaaatgaaaagaaagagtgattatatcgcacagatattcttttctataatagaaaaactatatatctgctattcattgtgttatccagaaacaacataaactttatttacctatttaaatacagaatacgctctagtaagatcacagatctgcattcctgt

SEQ ID NO: 70952 - DNA, 263 bp, Glycine max
tcatctagcattccggctctccttatattgtcgcatcctccaaagaactttgccgaatgtgcatatgggtcatcattccgcagtccttggaatacattcccactgttttacaccacttaaagaatgccgttagttgatgatgtcagcccgctccttacgacgagtactgcttgttgagaacagtggcaccgagcaccatgatcttccctcgagggtgatcccctggtgttgctcacccgccatgataatggttttgagcaatt

SEQ ID NO: 70953 - DNA, 234 bp, Glycine max
  unsure (1)..(234): unsure at all n locations
ctaagctgactcacaccaacatacaagttagcttgctttacaaattttattttattattatttgcaaaacctagaaaactcccatattctccaaaccaatcccacgaaattatgtgagagagtctaccaacctgaatttgaagtccacaacgtagatgtgcgctttacgactccgtaaatggcttcctttcgcgatntggagcanaaatggggagcaaagaatggagctttgat

SEQ ID NO: 70954 - DNA, 265 bp, Glycine max
catgcaagcttgagacttaatatgttttgctctacccattttcacgtacacaagcaatgcacctctcacccatgatccatatacaagaccttatctttcttctctgtgacacacataggtcatctaattctactgattgaaccactttatctgttatgctgtgtctgtagcgaaaatcttcaaatgagcccactattcactgctggaactggtcgtacaataatgagaatgcaactatgtaatgacatcatacactatcaatcct

SEQ ID NO: 70955 - DNA, 431 bp, Glycine max
agcttattttctaaggcggtccacttagaaccatcataggataggtgtcgtagaaacttatatttctagtagtgcttccactcccttctttgaaatcaagcttctcaaacgcttctagaatcaaattcatcaattattacaaattaaaatgtttccatccacttcagtgttctcccttgttacttagagaaattaatgatttggtcttgatctaatgtaatggtgtaaggtagccaacatataatgcgtatgagccaaatagtaataatagtaaaattgtgtaataagatactttatctatgttttagttgggtttcttatgtttaaaaagtttcactttagtctcttgttctcttttcactctcaacctttcactccccattaaccctctaaccatcaaaagaaacctttaaaggttggacacacattga

SEQ ID NO: 70956 - DNA, 360 bp, Glycine max
cggatgaacttcccgtaaagagtagccgatgtgtaatgccttttgtggaaaggcgagacacttgtcgcagattatatatactcatataattatcgaccatctcttagcgaatagataatttcttctataacattacgaccttatttgtcaaaatctttatggagatctcaaaataacttagttaggttcttatactttagttgcaaccaaagagtcttactcttgagattgataaatatctagctgatcaaatgaaacgactgcacagttttcagagttaaccaatatccttaactaattattcctatatattaataagtagaaagagattacgtgtataaacacgagagaagaaatgca

SEQ ID NO: 70957 - DNA, 271 bp, Glycine max
  unsure (1)..(271): unsure at all n locations
tcgatatattatacgcctgaatcgaacctcagtgtaaangttatgacatttgaatttctgtagagcatccggtggtcattttcgagccgctctatatgtgatgcaccttaatcggacctccgtgtgaaaaggtatgaccatttgaatntctcgagagcttccggtggtcaatttcgagcgtctcgacatattatgcgcccgaatcggacatccatgggaaaagctatgaccatttgaatttctcgagagcttccnngtgtcaatttcgagc

SEQ ID NO: 70958 - DNA, 321 bp, Glycine max
cattctactgagactactgagaaaactggggcggataaagatggtgaaaaacagggagaaacccatgctgtgactgtcattcctatacgggcaagttttccaccaacccaacaatgtcattactcagccaataacaaacctccttacccaccacccagttatccacaaaggccatccctatatcaaccacaaagcctgtctaccgcacttccaatgacgaagaccacctttagcacaaaccataaaacaccaacaaaaaggaattttgcacaaaaagcctgtatggttaccccaaattccgttgcatatgcttaactcgat

SEQ ID NO: 70959 - DNA, 310 bp, Glycine max
  unsure (1)..(310): unsure at all n locations
ctatccaaagatcatttaaaacttgagtttaccttttcttatttagtagatgggtcgactggacgagatccgctcatagcatttcacagcttgtgacactcttaaagaaatgagctcatgtttagcattgagatatagacaaatgccaatgaaaaatatacccttcttaaacaattgcagttgatggagcatgtntggctttattagtagcatcatttgaagttgtagactgcttggaccatgttctaaagcattatggtcaacttcatcaactatggctgcattagatgccttagaagtttattcctga

SEQ ID NO: 70960 - DNA, 446 bp, Glycine max
  unsure (1)..(446): unsure at all n locations
actagaggaactatgagaactcttatatgactcactatccacctctctattctccaacacagacatgggaccttttgntaggacattanagatgcaatatgaccctgtcccaaacacttaaagcattcaatggaactagtattattgggagggggttgagtatgagaagtangattacctcttacaggcttccattcgagatgttggnagaagaaccctccttcttggaagtgtctttgtccttccaagatgaataagtgtatgaagtcttcttgaggtctgttcctcttcaatgatgtctacttcacagccctatgataagtcatcatgttgtgtactataagcttacatatttgatgtgctatcanccattagaatcaccatgcactcataactctcatgttgtctataaaaatctcattctttatatcatcacacttactcta

SEQ ID NO: 70961 - DNA, 163 bp, Glycine max
  unsure (1)..(163): unsure at all n locations
agatatgnncgcggggtcaagagaaccttgggacgtcaggtggggtgctattgcccacaaccaagcttgatcaatcctgaaccaacccacgcatagtcagtcagtgagaacctgtgatctacctaaacaggcgagctcctagcagtccacagataaaaggaac

SEQ ID NO: 70962 - DNA, 375 bp, Glycine max
agcttggaatagatattctatcaacattctcttctggaatatccttcaggagagaaatgttaagatttatcataccgagttcgatgagttcaaagtggagttggagaggcgtaatctacccaaatgcctcactaacctccaggatggaatcatatacgtggctgtggttaaggaattctatgctaatttataaaccacagaggaccaagctccaaagcaagccacagtaagagaacacctgatcataatatatgcagacagcctgaatgagtttcttcctactccagtggtattagaggagggtgaatctttacccactactttatattcgttggttgagtccaatcctcagagatgaactagactttgtttccc

SEQ ID NO: 70963 - DNA, 352 bp, Glycine max
  unsure (1)..(352): unsure at all n locations
gcctcttcacgtccggaatatgaatgtagcatatagatccaaagacccttangttctnngctgatggcttcttcccgttccaagcttcacatggagtcatgtcttttacagaactagttggacatcttgtgaagtatgtaacaacattgtagatggcttcagcccagaatggtgtaggtagtcccttcttcttgagcatcgatctagccattttcataactgtgcaattctttctctcggacactccatnttgtaaggagaatatgcgaactgtaagtgtcgctcaatgccttcatcctcacaaaatctttcaaactcgcgagaggtgtactctttgccgcgatcacttctt

SEQ ID NO: 70964 - DNA, 424 bp, Glycine max
  unsure (1)..(424): unsure at all n locations
catgcaagcttataagaacaaaatagccttaatcatttctctaaatgcangtgaattacgacgcancaacaagaatcaagccaaggctattgtgcatacaatcaacgcgggcaaaacacaccaaatgattataatgatggatggctcaaattctcacacaggtaaaatcatcactttcaaattgagctctcaaaactatcatgacatgtaaagaacaaacaaggatttcaagccacaatatgtcaagaactttattttaaaaacaaaaccattttttgaacataatccattattctaaaaaaacatgtcaatctacgtgcacataaattgaccaaaaattaactgaaattcgctaaactatcactttacaattacccacttacatattccaaccacgatcttgtaatccagaacctcccccccc

SEQ ID NO: 70965 - DNA, 390 bp, Glycine max
agcttgcctgtccgatgcagtagtaatgatggtctctagttatgttggggaacggttactaacccggaatgggtttatggaaagacaacggcggcatgactaacctgataaatgccaaaggaaatcgtgggaagtatggtttaagctataaacccactcaggcggatataaagagaagcatcgtgggaagaaagagcggtggtcaaagctcgcggttgaggcaagaaagtgaaggaagcccgccctgccacataagtagaagctttataagcgcgggtctgggagacgaatgtcaagtggtcgcgatatacgaagatgatgttccgagtacattggagttggtacgaccatgccctcctgatttccagctgggaaattggcgagtggagg

SEQ ID NO: 70966 - DNA, 106 bp, Glycine max
  unsure (1)..(106): unsure at all n locations
atcaccccaatcgtgtatatctaactgcttatatactgatntcatggaccataacctatngttctcactcatttcgagatcactgaccacattctatatgggacct

SEQ ID NO: 70967 - DNA, 429 bp, Glycine max
  unsure (1)..(429): unsure at all n locations
tgcaagctngctggccacggagaanccgactatgcatcttgngnggnggttcattctacaaaaggagagangcaganaggaagatccaatggttgatacatggacggagatgaaaaagatcatgaggaagcggtatgtgccggctagttactcaagggacttgaaattcaagctccaaaaactaacccaaagcaacaagggggttgaggagtatttcaaggaaatggatgtgctcctgattcaagccaatattgaagaagatgaagaggcaactatggctccatttcctaatgggttgactaatgatatccctgatattgttgacctgcagaatttgttaaaaggatgatttgtttacaaacaatccagtggacaacaataaaaggaaggagtagtggtaaaagacttacaacttggtttttatttgaa

SEQ ID NO: 70968 - DNA, 102 bp, Glycine max
gaagaggagggggagacagaaagaaaaaagggagagggggaaggagaaaaggggggaaagagaaaaggaaggagggaaaggaagcaggagcaaagaggggga

SEQ ID NO: 70969 - DNA, 310 bp, Glycine max
  unsure (1)..(310): unsure at all n locations
gagcgtctcgatatattatacgcctgaatcgaacctcagtgtaaaaagtatgaccatttgaatttctgtagagcatcccgtgatcattttcgagcgtctctatatgtgatgaaccttaatcggacctccgtgtgaagaagtatgaccattngaatttctcgagagcttccgttggtcaatttcgagcgtctcgacatattatgcgcccgaatcggacatccatgggaaaagctatgactannttgaattctcgagagcttccgttgttcaatttcgagcgtctcgacatagtatgcgcccgaatcggaca

SEQ ID NO: 70970 - DNA, 231 bp, Glycine max
ttcggttttttttgcttatttttagaaaggttttttttctttaaaggacatttagctcttaagcatgctatactatgttaaatgtctacttactgttatatcattaatggcttattgactcactcaacctgaatatctaaaaatcctgcacactataatctattacatagaggtgacctccacgctaaactctttttttacacactgtatatatacctcccgctgataatg

SEQ ID NO: 70971 - DNA, 374 bp, Glycine max
  unsure (1)..(374): unsure at all n locations
agcttctcccncaattggctataaatagggggttaagtgaagtgttatagggttcagccccttagacacttctctctctttcgaatttgcttggaaaaattgtttccgtgaagaaaatctaagccgaggcgcttccgaaacgtttccgtgaggaatttcgcgaaggtttcgaccgttcttcgacgttcttcattcgttcttcattgttcttcgatcttcaacgggtaagtacctcgaaccaagcttttcgattcattctatgtactcgtggtgggccacattgggtttcgggtatttttattctcgtttcatttacttttttatacancgcttttgatgtgcttaagccattntatttaagtcatttctcgctt

SEQ ID NO: 70972 - DNA, 362 bp, Glycine max
agctttcaagaaattcaaatggtcctaactcttatctcggaggtcctattgaggcggataatatatcgacacgctccaaattgaacaatggaagctcttgagcaattcaaatggtcataaatagtcactcggaggtccgattcaggcgcataatttatcgagacgctcgaaattgaacaacggaagctctcaagaaattcaaatggtcataacttttaagtcggaggtccgattcacgcacataatatatcgagacgcacgaaattgaacaacggaagctctcgagaaattcagatggtcataacttttaacttggaggtccgattcacgcgcataatatatcgagacgctcgaaattgaac

SEQ ID NO: 70973 - DNA, 368 bp, Glycine max
agcttgaaacctgatatctacatgtgtagttgttaacttcatcgcaacaacatacctatatattatttgtagaaaagccaaaattgaaattaaggctcctacacttgagaatgaataatgcaatctaattacattgtcagcaccatatgaacaaaagtaacccactatcacaacaatccaggcattcaaatgaatcacttattaaaaatgattataaaaatggagtatgtgaatgtgtatattatcacaatgttgactcgattgtttatatatacaaaaaaatatgtttcttgcgtatcatcaaatgttgaattatgtcatgagaggttccagaaaattgaaaggtaaaacatataaaaagatatttt

SEQ ID NO: 70974 - DNA, 431 bp, Glycine max
tagctatgtgagcgaaacatgtgactcttgcattttatttggaatttcaacattcgacgacactggtaatcgactaccaaaactctggagccgattacagcgcgttatgaaatatattacggaacaggtgcagattcaggcgctgtaaacattttcgaacccattatgctactgataatcgattacaacaatatggtaagcggttatcagatagtaaaaactctctggaaaggtcttgcataaactcactgcgctatttagagcatcgaaaaactttgtaatactcatctggatagagttctttctttatacgtgaaacttgagccctgaatcttgaactcgattcttgtgatctagaagcttcgatctagatacttgatggaggctttttttttgaggcatgaatacttctggactcttgaactcttgac

SEQ ID NO: 70975 - DNA, 409 bp, Glycine max
  unsure (1)..(409): unsure at all n locations
agcttatgctgctaatatatacaatagaccttctctatcttagcagcanaatcaaccacagcagaacgatatgacctctcagcaacagatcaaccctggatggaggaatcaccctaatctcagatggtctagccctcagcaacaacaacagcagcctgctccttccttccaaaatgctgctgggccaagcagaccatacattcctccaccaatccaacaacagcaacagcctcagatacagccaacagttgagacccctccacaaccttccctcgaagaacttgtgaggaaaatgactatgcataacatgcatgttcaacaagagaaccagagcctcattcagtgcttaaccaatcagatgtgacaattggctacacaattgaatcaacaacagtcccagaattctgac

SEQ ID NO: 70976 - DNA, 457 bp, Glycine max
attgtttctaaaaatgtttaatataagggacgatgaggttctacaatagagagagcaagagaaagaaagtgagaataagagagagaaagggccagtgcgctgcccaattagataagagagacaaaaagcatgaatctgaaaaggtgaaaccattcaaaatcgtctttgcattgggttcaattatgatggtttttttgaataaccgtccttaaatttacaattccaagacaactgtttgaaaatcgtctttgtaattaatgaacttaattacaaaattgccatgacattatcttcaaagacgatatctgtcaaccatctttgttggtgtgttgtaattaatattttatgtagtagtgtctattgataactcatgattcaagttttcatctattcttaaattctaacaataacttataagggtgacaaaggaagttattctcactcgacataccatgca

SEQ ID NO: 70977 - DNA, 399 bp, Glycine max
  unsure (1)..(399): unsure at all n locations
tgcaagcttgcagatatggaggccagagacagaaatgatactatggagtntgatgcaatcctactccgcaagggcattggatagataaactccaagtagattgggccagagatgcaagagaaggccctagggttcttatgagccttatggtagatttcgggcccatgggcttagtacgagcccgcttatctttgtaaatattagattaaggtttcattatttttgggccttgtatttagggctccataatgtacgtagggtaccctaganatataggatttttcagcccttgtattttagggcacctagactagtttttgtattaggggtagttntgtaatctcacatgcactaagtggatatttgatgtgtgtgggtggaaataaatttaattgaatt

SEQ ID NO: 70978 - DNA, 417 bp, Glycine max
cggctcgaggtacttacccgttgaagactgatgaacgatgattaactaatgaagaacgtcgaagaacggtcgaaaaccttcgcgaaattcctcacggacacgtttggggagagcctctgcttggatattgttcacggaaacaatttttctaagcaaattcgaaagagaaagaagtgcctaaggggctgaaccctttttcacttcacttctccccctatatatagaaaattgggggagaagcttgccatccagctcgcccaggcgagcagggttgcttcctccagaagcaacggccttctggaggaatcttctggagggcccaagtgggcctgagtgctatttgcacactcatctatgctaagtacacccccctgcccttctttggagattctttttttgcaagactatggaaaactc

SEQ ID NO: 70979 - DNA, 423 bp, Glycine max
  unsure (1)..(423): unsure at all n locations
agcttcaacacatttaagggttggctggcatttgagtatgccctcaagtttactgaccacccactgtctatttgcttgtttgttgttcacttctctgcagcaattatggatatgcttaaatgtctttatctgaaaagaggttctaacctcattctttgcacagtagatttcccaatcacaaaatgccttcctgcattntgctctagccctctgtttatcatatttcttccacttgaactccctgcccatcaatatgctatactccctcaacgcagaattaaattcatctagagtaccaaactccatccctaatttcaacttctgttcaccaactccacctacttgactatattgaggattaacatcaacatcctcatcttcatcatcactactaatgggggatattaagctcctctgaatgat

SEQ ID NO: 70980 - DNA, 331 bp, Glycine max
cttaaaactaagctccccctatttgctataataggggaagaagtgaagaaattatgtgttatcctcttacgcacttctctctctttcgaatttgcttatgaaaattgtctccatgaagaaaatacaagccgaggcgcttccgtaacgctttcgtgagtaattacgccaagagtctccaccgaccttcaagattcatcgttcggtcttcgttttcttcagccttcaacgggtaagtacctcaaaccaagcttttcaactcattatatgtacccgtggtgagccacattttgcttcatgtatattcattctcgccttcattgactatttatac

SEQ ID NO: 70981 - DNA, 442 bp, Glycine max
  unsure (1)..(442): unsure at all n locations
ctctccatgcaatttcctgtagacaaagcgtggatctcatatgtgtaaatacatatgtctgcatacactatgagcatgtgtgcataatcggcatacaattaatatagaaaaggaggtcttttttaaaataacttcataggatgaacttcatcgctgaaaatgattatttaaagtgattttgacaaaactagtcttgtttggataaggatgagatttgtacaagtcacaacaataagatttcaacctcaggtcccaatgctcacatgggtaaaaggattcacatgtccattcttgcccatacctcataatcacgggaggcccaagtactgggatgcctcttttctnttgtatgcttggatcgcgttagatgacaattacttttgacaaataaagttgcaaccaatctaaattatcatctaatgcttgaatgcacatctttgta

SEQ ID NO: 70982 - DNA, 428 bp, Glycine max
tatacatggagcaaggggaaatttcattatatcataatgcttatcactagaaacatcatatcgcgaggtaaatggtaaagcagataaacaatcaaaactcctgtatttgcagggtaaagcaatctttgctagtggaagcccatttgatcctgttgaatatgaaggaaaagtttttgttcctggacaggttaaatttaatacttgctaagtattttcttattcagcagactcacattcccaaagtataggctgactttttttatattggtttcctactatgcaattcaggccaacaatgcttacatatttcctggatttggcttgggtttgatcatttctggtgcaatccgcgtgcgtgatgagatgctcttggcagcctgtgagtacatgcatactagagagattagatcattcgagcatgataatag

SEQ ID NO: 70983 - DNA, 433 bp, Glycine max
  unsure (1)..(433): unsure at all n locations
agcttgcttctacacattgtggttgggagcatctgtctttctgatgggaaactctttaaaactagttctcttgtctcataacatcctaaaacatcaacctcttcattaagatgtacttgcctagtgtagttgtagggataattgaaggaatttatcccaagaaagccttgtttccatacatccaaaagactaagcttatcaagctttacctcttgcatttttgaatgaagaatgtgagagccaactctattntgctccttctagacttttgtgctagtctgccattccatatgattgtatcctttgaaaccatgatatatgctggtgtgaagaatgcgatgcacaataatgtctggttgcttcttaacaggtgatctcgatggtaagtccactatatcactcggtgttcttctggcctcactacgtatttatc

SEQ ID NO: 70984 - DNA, 457 bp, Glycine max
cctcatgaagaatgccttgcgcttagatagcatgaataagcccttcgataatatgtatgtatgtaaatatgtagcataaaataccttgcaaaatgttgagtaaaatgccttgcaaaatatgaatatatatagcatgaaaatgccttgaataatatgaatatatatagaatgaagtgtcttacaaagtgtttgaatggttagcgtacaagtgtttttcaaatatgtgtatttatgagtaggtaggaaaagaagccttccgaaaaaatgtgtgtatatatatatatatatataatgtagcatgaaaaggttcgtaaaaaaaaatatatgtgtacatgggtgtctatcgtaaagtgcctttcaccaaatttttatgtgtgcaaatgcatatgtgtcataaaaatagcacggccccaatatgatttatttataaagtgcatgttgacactcgcgccatatg

SEQ ID NO: 70985 - DNA, 446 bp, Glycine max
  unsure (1)..(446): unsure at all n locations
agcttcccagatatggaaagactaattctctgttggatctctcttgtaagcacttgatgcacatatctttttatttatttaatgatgacttttgtgttcactgtggtatcagaacttcattctaccatgcttttgccttgatcatgtagatgcatgtgtttttatgataaatgaacagtggaaactgatctgattcttataacttgataggacggggctagtttgtctgatatacactaggaattggggtacgcgaacccaactgatgtatgtttagcttaatgcggtcctggctgagtttagtccaaccagaggaatctgcggacgatgcttgatcaggaatatgctagactattatgaggaatcggngtatagcattttaagagacaccatagaacgcatgagcactattaagtagagaagatccttttacattacgacctaat

SEQ ID NO: 70986 - DNA, 447 bp, Glycine max
  unsure (1)..(447): unsure at all n locations
ctctacgacgccataaactcgtatgctgaactcacataacctctcaccttaatcgtttaatcaccacagcagaacaattacgacctctccagcaacagatacaaccctggatggaggaatcaccctaatcttatatggtctagccctcaacagcgacaacagcagcctgctccttccttacaaaatgctgctggcccaagcagaccatacattcctccaccaatccaacaacagcaacagccccagaaacagccaacagttgaggcccctccccaaccttccctcgaagaacttgtgaggcaaatgactatgcaaaacatgcagtttcaacaagagaccagagcctccattcagagcttaactaatcagatgggacaattggctacacaattaaatcaacaacagntccagaattctgacaagctgccttctcaatctgtccaaaat

SEQ ID NO: 70987 - DNA, 465 bp, Glycine max
agcttctacacattctaaagaatataaaatgaatataattgtatcaatctattttatattgtaattattaaattctttatgtattttatgggaacaatatctactcttttatgaaacaaaaataataataattaaatatattcaagtaaaaaaaatattttgtgggaacaattacccataacgggcaatgtgcatttatcactaaccacaatgttcctacattcttaactaagaaacttaacttagataaatcaacaaaagagatcctaactttatcaaccgcagtcttaccatctaactcaaaaataacattttacaaatccaaacaccctcttggagatccaaacaagggctccctccaaattgtcctatccataataactctaccgcaatcatcttgaatgcacattccagctcaagtacgaatgtgcggctaaaataaatctattatcaacattacacttg

SEQ ID NO: 70988 - DNA, 371 bp, Glycine max
  unsure (1)..(371): unsure at all n locations
ccggctgtctgtgcatctggttaaagatagggggggaaagctttattacacacgaagccccgtcttcttgttgtcacggagaaactccgacaagctcctatcttatgccgcaactatttctattcctattctaaaatactcaatacgcattgggtctctttgccagcgaaagctcacaattcatttnttttttattgtaacatgaacaaaatgcatttgggataataatatattcatgacgaattttcattcaacataattgattacaattttgtacagaaagacggcttctatcaataaaattatcatccacaaaaaggaaaagagtcaaccctcatctcattncaatcctcaagacctcaaactctttt

SEQ ID NO: 70989 - DNA, 301 bp, Glycine max
  unsure (1)..(301): unsure at all n locations
accttcttgtcttaagcaagagagagcaattgacttactagaaatgttgtatatatatatatatagagagagagagagagagagagatatattgctgtaacttgtataatctatatggtacactctctcaatagaatattgtgaatactaatagcttccctacatgttatgtatggcaggacgtggtatggattataatctcgatgtcctaaaccgcatcacagtngtgctggaaactctattgcatgaacgtaatgtggagccggataatatctggactcattggttttcgaagaaccac

SEQ ID NO: 70990 - DNA, 443 bp, Glycine max
tagagttaagtctcatatcggcttaatcgattatggttgtgttttaattgactactctgctggttgaaataatgactaatttttttaagagtctctactttaatcgattaccgggtggattaatcaattacttctctctcgtttaagttgttcagaggtgaacaagaacactttaatcgattacttaggtcatctaatcaactacattgttcttgaattgttttccaaatgttggatgaacactctaatcaattacttggataatctaatcgattacttcgttgaaataatttattaccttaaagatttaatcgattacaggaagttataaccattttctctataaataactagctagttttcacatctaaacaatgagagaatcaagagatcattagagaatactcattacatctcgaggattacttcttagccctcaaatg

SEQ ID NO: 70991 - DNA, 406 bp, Glycine max
agtcagcaatgcactctcacccatctccattacaagcctttcttcttcctgaacacacatggtcattaattcattgatagaccatttatctttatgtgtgttgtaggaaatcttaaatggcccatattcatgcggaagggtgttcaaaatgaaatgcactatgaaggactcatacatatcaacctctagtttcttaagttgagctgaaatatctcgcattttcatgatgtactcacgcacacctttcacactggtgagccgaaaagaaaaaacttcatgatcaagcgcttgcttaagtttatctaagtgtgaactgatatcaatgtctttacaagttttgacttttatgctggcacagaacactatccaccgaatttggctaatgacatacctaaccggtgatcct

SEQ ID NO: 70992 - DNA, 418 bp, Glycine max
  unsure (1)..(418): unsure at all n locations
taactganacagagaacaacacttttcttaaggcaatgcattcaactattcatattcctaaggaacatatcagtgaaacataaataacaacaatgaaaggctccaaatgataaaagcccaaattttccctaatttgtaaccctaaaaacctatctgaaacataaatagaatcaaaccaactaataaagttccaatatcaatgcaatacgaaactaacaacaatgaagtgctaaaagattaacttgcatctatatttgaaatgggtatttctgtaaaccctataactatgaaactgtagaagaaaaatcagaatggaagaaaaaacaatcaacaatgaagctcaacgatgaaaatggagaagactaaccgatgaagattatggaaattttcagaaacagagaaggcgcaacatacctta

SEQ ID NO: 70993 - DNA, 463 bp, Glycine max
  unsure (1)..(463): unsure at all n locations
agctntataatgaactntctcttcattgctacttgcatcaataatagtaacaaacttttcttccaacatagcaagctcaagatccaaaacactgaggtgaaattgaactttctcattccagtcaaagaagttaagcccattaaaattggcacagatgatacatgagaattcagtgaattggaaacatgtattacataataaaatgtacataagtgtcttgagacataaaatacatgtcatacatatgattcattcaaataacaatcaatgtatattgatgttctcctttgggtgatacaccaacacacaacatgcaaacatgatgatgctgatanaaattcttaacattatttggtaattaaatatgctcccattagtagtatctatttcctttgggtatataaataaaactaatgatacacacaaatcacctaccaatatattcctcattaatagaacaact

SEQ ID NO: 70994 - DNA, 473 bp, Glycine max
  unsure (1)..(473): unsure at all n locations
tcttctggaacatcttactgtattgatcctaataatatccatctctaacttcccacttcccaacttctgcatggatggtgatgtccaatcacacccaagaaataatcttccatttgcctctaatctcgatggattaacacctgatactttgctctcaagaggctatgattctcagaaagattttcaaaacttgctgtccaattatggtggtgctccaagagacattgaaactgagctgtccactgctgcccttagtccacagccatttggggtgccagacatgccttttaagcctggatgctcaagtgatattgccatcaatgatcctggggttttgaataatggcttgtgggctaatcagactcaacgaatgcgaacatatactaaggtttttcatttactcattncgttaaaatttatagatctatttaaacttaatatgtttactggacacatntngtagtctaatgtta

SEQ ID NO: 70995 - DNA, 449 bp, Glycine max
  unsure (1)..(449): unsure at all n locations
agctntagtataattttttaagaagtgaaatggtgatgtttcttaggtagggaaaagatgagaaatggtgtgggcatcgatgaagacgacaagaagtgagcgagagagtatgcaagtggtaaatatatagagtaggataaggtagtcaattaaatatgagtattctattaaccattaaataattgtttaatatttgaataatttattttactatattcactatgctcgaataanacattaaataaattatttcattaaacaatctttttacacaatatttaattaaatattactctattcattatgcattgaataggatattcgactatattcattatgcattgaatagttttttactatattaactattcattgaatatgtttttagagtggttattatgcatttactaagttatataaaacactattatctctatcccttttaattg

SEQ ID NO: 70996 - DNA, 140 bp, Glycine max
ggtgggaaagttagcccgacctgaatggcaaacacagcatgggtgtatccctcatcctcaccctctttatttgccccaaatctctcagtcgccctattaagatgaacagatttgcctctgtttagacccacattgatcct

SEQ ID NO: 70997 - DNA, 356 bp, Glycine max
  unsure (1)..(356): unsure at all n locations
agctatgcggattnggtcttcgccagtgaaatgatcgatgtgnggccgaaaagaggcaatattgatcattctactatgacgactgagaaaactggggcaaatgaatagggtgagaaagagggagaaacccatgctgtgactgtcattcctatacggccaagtttcccaccaaacccaacaatgtcattactcagtcaacaacaaacctgctgcttacccaccacccagttatccacaaaggccatccctatatcaaccactaagcctgtctaccgcacttccaatgacgaagaccacctntatcacaaaccataaataaacaccaaccaagatatgaattttgctgcgaanagcct

SEQ ID NO: 70998 - DNA, 358 bp, Glycine max
aaaccttgctaactcatccttacagcgtaattttacctttcacctgggcgacctcgcacttataaccccggatgcactatgatccctagcattgcctttctgaccccgataccctgcctgcaactactgaataccccacattgtgggcactgaaatctcttgcggtgcaaagcgacaagctttcaactgataacaatcctctcatgggacattcttagcatgaaatagagtctgactctactttcttttgcgaggaacatttacagaccccttctgctacatgagtttgcacaaaacggtataggcaccttttcacatcgcgtctaacagcgacatgccaaatgcgaaaccggctttc

SEQ ID NO: 70999 - DNA, 218 bp, Glycine max
tactattcatgcacattggtcacgttaaacaaaattcggcttttgcgcatttgttctgcttaatctacaattacggtttcctctgattaatggaaggctaaatcttcaacattggtttctctagaggatcaagcatagctctctttgaagttttgtattactattgaaatccgaatatgttctcctcttcaacaattactctattatggtgccattaa

SEQ ID NO: 71000 - DNA, 435 bp, Glycine max
  unsure (1)..(435): unsure at all n locations
actaagcctttagccaattaccagtggctnttccaactcatttcttcacttctctgagtatgaccttgntggctgcttcaatttgcccattgctttgtggttgttccactgaagttgctttatttttaactcccaagtttgcaaggaacttctcaacccctttatcaatgaactactttcaattatcgaagatcaaagtgctggaaatcccaagctggcaaacaaagtttttccaaatgaaatttttctaggcatttgttaccaactaggagaaactttagttctccttttgaaggggaaaaggttcaagtatgtctactgcccaagtggcaaagggctatggagtaactatgctatgtaattcttcaaccaacaggtgagatatgtngtcaaaattttgccattcttcacatattctatgtaagtttttctcat

SEQ ID NO: 71001 - DNA, 423 bp, Glycine max
  unsure (1)..(423): unsure at all n locations
ntgactttccttgttccggaaacctttcttttctcatgtgcatccattcccaatctccgggttcgaagacaaccttctttctccctttgttggcttgattagcatagctcttatttttcctctcaatttgatctttgactctctcatgaagcttcttcacatagtccgcctttgcttgaccttctttatgcttaaaaacagaaacattaggcataggcaaaagatcaagaggagttagtgggttaaaaccataaacaacttcaaaaggagaacaattagtggtgctatgaacagctctattgaagcaaattaacatggggaaacaagcttccaagttttaagttcttctcaaactgcctaacaaagttccaagcctataacaactccgttgccatcggtgtggggacaagggtgaaataacat

SEQ ID NO: 71002 - DNA, 494 bp, Glycine max
ttaagcacgcggctgcagcttatctaaggtagtctataattggctaaagaataaaactaatggagaaaattgaggaactcattgaagaatcaaagaccctaattacaatgatcataaacgattaaaactaatgatccaccgtaaaatcacatctttaaatggtcatcaaagaatccatcaatttattattaaaacaaattaatcacgcctcctattaaaggctagaatttattattcaaataaattaacatgtctttaacgcatcgcttgattgcctgaactacaatgcattgcttagttgaacacgtattttggaagttgcaatgaatcttaagcgaagttaagctctatactaacggttagtctcatacatggtctaaagaactaaaactaatggaaaaatcttatgaacccattgaagaataatagacctaatttcaatgtgcataaacgattatacaaatgatcaccgtaaatccatctgatcacaaaaa

SEQ ID NO: 71003 - DNA, 472 bp, Glycine max
  unsure (1)..(472): unsure at all n locations
tcaggctgttcaatggcttcatattgttgcacagaagggcatttgtctgtgtggtggtcgactgaggagcataaaccacagagtctggcgacaggtgcagattttttattcaatgccagctgggttaccaggttaaccaaggcatctagtttaccttcaagcttcttagtctcggctgatgaagatgaatccgtggccacttcatgcactcctctaatgacaatagcatcacttctgacactaaattgctgggattttgaagccatcttctcaattaaatttctggcttcagcaggggtcatgtctccaagggctccaccactggcagcatctatcatacttctctccatgttactgagtccttcataaaaatattggagaagaagcttctcagaaatctggtggtgagggcaactagcacatagnttcttaaatactcttccagattcatataagctctcttcactgagtt

SEQ ID NO: 71004 - DNA, 478 bp, Glycine max
ttaagtcacctgcggcatgcaagcttcttttggaccttgaacaggcaactaacttctctttcataaccatgctatgtgctcgcgactggtccctttcctcccttcgcaacttgagttcattattgctaccccatagggctccgcgaaatatgttccggccatactcttccttgcgagccctcttggtctctcgttcaagggctcttgcggtaatagcattctcttcccgtaacccggcacactccttccgaacgtgtgtagcagccaacttgaacttctccttggcgagatttgcctttcctaactcgcttttgagagcttggacttcctcgtcctctttcggtgcttcaacattctcttcgctgacgacttttaacttggcgagccaatctaaacctcgtatgcgaacatttagccattcgtggtacccaccaatgatgccattacgaatgcctctaagctcttgatctttcctaac

SEQ ID NO: 71005 - DNA, 406 bp, Glycine max
tatccttatggcttgcctccggacttcaccctccatgccacctcggtatgattaagccaagccccgactttcgaggggcaactcccaccttatgatgactatcccaggcaagacgatgaggaaggagatacccatcttggccccctgctccacctcaaagatccgtccccctatgaactaccccaaccgaacatagtccgccatatcccggcttcacccacacctacaaaagaatctgttcccttcgcggaagataacgagaagatgaaagcgcttgaagagaggttaagagcagtggagggccttgcaattacccattctcggatttggcggatttatgtctcgtgcccaacatcggcatccctcccaagttcatagtaccagactgtgataagtacaaagggat

SEQ ID NO: 71006 - DNA, 429 bp, Glycine max
ctttcgattcattctatgtgcccgtggggtccatttgttttcggcattttattctcgttgtgttactttatataccccctcttgacgtgcttaagccattttacttaagtcatttctcgcttaacttacaaataaaataaatttccaccgaacgtgtgaattgtattatccgctaacttcggttaaaataaatatcgaccgttcggtcgtgccgtaaccacgttggaaatctaaaagaggtgaataataatataattatccaaagaacatcttttgtataataaagcggaaaacaatcggacgtttctttttgggatttctattcttaatcgaattgattataactatagtgaaactaagggctaaatcaacttgcctagtcagctctgccacaaaataagcttttgaagtcgtcatttaatttctcac

SEQ ID NO: 71007 - DNA, 479 bp, Glycine max
  unsure (1)..(479): unsure at all n locations
gctanaggtgtgtaccccaccatnntttttcatagtaaaacactgttaatgtgtctactatcactgttatcatctccctttccgtcattgggggcaccgcttgggctaccatatccttccatctttgggcatattctttgaaggattcatgcccctttttatccatgttctgtagttgcatcctatccggagccacatcaaaattgtattaataatgcctaacaaaggcaaccattaggtccttccaataatggactcgggaaggttccaagttagtataccgggtggcagctgccccagtaagactttcttggaggaaatgtatcaacagtttctcatcttttgatgcccncatcttccgaaaatatatctctagatggttctnggggaaagtagtttccttgtacttgtccagaccgacatcttgaactgcgaagtgtgacgacttgggactangaacaactctaaaggctaatctc

SEQ ID NO: 71008 - DNA, 418 bp, Glycine max
  unsure (1)..(418): unsure at all n locations
ttaagtcacctgcggcatgcaagctngctgacttacagttttggagcatctcatttctagctgctggattctgtctctctgtggttgacagattcttacaagtaaatgagtgtgtggctaaaaaaaattcttttacaatacaagagaggaaagtatcatgatgcaattgatttggcctaaaatattcagagacataacttcattgaagatggctccctagtaaaaagagaaacgaaaacagtggtatcacaattgcctggtgtcccagatacgaattgttgcttgtttgaagaattatggatagattagcataccttggcaagttgacctagtatgaacataatctgggtttatagagttaatcttgtgagtggtttagtgtcaatataaatccacggaattctggatccgcttcctt

SEQ ID NO: 71009 - DNA, 457 bp, Glycine max
  unsure (1)..(457): unsure at all n locations
tctctgagaaaacttccttgagaagctagagcttagttacattcacccctctcataactaagctcacctccttgagaagcttccttaagaagattcctaaagaagctagagcttagctacacacacatctctaatagctaagcttacttccttgagatgagaagctagagcttagctacacaccccctataatagctaagctcacccccattacaaaatacatgagaatacaaaaaattccctactacaaagactactcaaaatacctcgaagtacaaggcaaaaatcctataatactagaatggccaaaatacaaggcccaaacaaagganaaacctattctaatatttacaaagataagcgggctcatacttagcccatgggctcgaaatctaccctaaggatcatgagaaccctagggcctttcttggatctctggcccatctgcttggagtct

SEQ ID NO: 71010 - DNA, 466 bp, Glycine max
  unsure (1)..(466): unsure at all n locations
aggagccataccaatgctggctgggtagctattgnttatttgtnaattcaatcaatggcaaacattccatccaactgccttgttgctctataatacacgcccggagtagatcttctagagtctgaacggttcgctcagtttgaccatttgtttggggatgataagttgaactgagcttgagctttgtccccaatgcttcatgcagacttatccaaaatcgcgaggtaaacctcgggtccctgtctgacacgatacaggaaggaattccatgtaaccttactacttctttgatgtacaactctactaacttctccattttatatttcatatttaccgaaataaaatgagcagatttggtgagtcgatctactataacccacacaacatcgtgtccacgactcgtcttgggtgaactagatacataaatcatagatatgctctcccattttcgattcagatttctagt

SEQ ID NO: 71011 - DNA, 485 bp, Glycine max
  unsure (1)..(485): unsure at all n locations
agcttgagaaacctacacggcaatccaatgtgtctagcacaaagaaatgtaaatcgtttgatttgatgttatcaacgactcacaataatttatttggtaatccgtgtcttttcaaactagccaatggaatgtgattatacgtatgttacccactttttattcgatgtatgttctttcaatatgaaattgtgttgagatctagagaacaacaacaactcaactcacccatgtaatgcactccatttatttaatatgtgtttaaattagcagttcttaatttgagataaagtattctatttaatgagtttctaaaagtatacttgtattgtcaattaaataaaaaggtataaatctattttcgatagctaataaatatatatctgattttttggttgctccttaataaacttttcaatttccgtgaagcccaaattaaacaaaaattntaacctttgtcgtagaaagctttttactcacttaattat

SEQ ID NO: 71012 - DNA, 369 bp, Glycine max
  unsure (1)..(369): unsure at all n locations
ctttagagaaacctcacgcatgcaagctngaanatggcaccgatggngtcctcgtattgttatggggtgaaccgngtctacaacgcttggaggaaaccctgcctggaggtgaagtaaccattactgttcatccactgaaataaggccagggcgcgcccctccatgtagaaggaggcgatggtaagcctatcgtgctcaggcgtggcgtggtattcgaagaattggttgatcttaaagatccaaccaaggggttcggtgccatcaaaccgggggacatcgagttcaagcggtgaggggttgagatggacatatgtggagtggcattggacgaagaaggtgatggatatgaattctccggtgggatagttt

SEQ ID NO: 71013 - DNA, 474 bp, Glycine max
  unsure (1)..(474): unsure at all n locations
gtanagacacaagcagaggaagagagaagttgattgttccttttaattaaatcttctctagattcgaatattacttcttcaccattagggttgacagtgtaatcaggcggaggatcctcatcatcggaacttgcatccagagttggttctactttactgatggacgcatcagccatcaaacataggttggcttcttcctcattgtccttatcaaatgatgaatcatctaggttctcccacgtgctcatgaggtttttttttggacttgaagaatttcttcttcttatccttcgacttttcaaggtcaggacattttgacttgaagtgtcttggcttcttgcacttaaagcatatgactggactttcctccttcttgtggaaggatctcttggagaaacacgtgaacctagaggagttcatgatcttccacatccttctgatctntatggtgatcatacttagctcgtcatctct

SEQ ID NO: 71014 - DNA, 406 bp, Glycine max
atactatgttgtcacccaccattggcctccttaacgagtggagccggtcgagggatgatgatctgctgatcacaggcctattgcctgctcgtacccgtccctgagaattggttaagtgggaaatgacattatgctgtgaaacatggctacgctaccacttacctcggttcatccctgtcatggatatggcgcccgattgaccatcgcttgaaatgatcttgtccttgtctttcgattcataaaataacaatgcatgtgcatgtgtatgtatgagcacgatcaaaagcaataattctttaaccaaagcctggtgggttcagttttaattaagcgctcggagcattcccatggatcgagcataaatgctcggatcattaaagactacgcatcttttattgcacaagcg

SEQ ID NO: 71015 - DNA, 328 bp, Glycine max
cttatgttatcaaaccataaaagggaaaaggttatattgtagccgatgctctttctcggcgtcatgcattactttctatgcttgaaacaaaattgattggtcttgaatgtttgaaaagcatgtatgaaaatgatgaaacttttggagaaatatttaaaaattgtgaaaaattatcagaaaatggtttctttagacatgaaggctttcttttcaaagaaaacaaattgtgtgtgcctaaatgttctactagaaattttctttgttgtgaagcacatgaaagagggttaatggggcattttggggtccaaaagactctataaacattaca

SEQ ID NO: 71016 - DNA, 400 bp, Glycine max
ttactcggatgtcttattgagtcatgtaatatttcgagacgctcgaaattgaatactgaagctctgagcaaattcaaacgacaataactttttactcgaatgtctgattgaatcccataatatatcgacaagctcgaaatagaatcttgatgctctgagcaaattcaaacgacaataactttttactcggatgtctgattgagtcctgcaatatattgagacgctcaaaattgaataccgaagctctgaggatatttaaacgacaataactttttactcggatgtctgatagaatcccataatatatccacacgctcgaaatagaatcttgatgctctgagcaaattcaaacgacaataactttgtactcggatgtctgattgagtcctggaatatatcg

SEQ ID NO: 71017 - DNA, 386 bp, Glycine max
agagtcacctgcggcatggcaagctcgatcagatatacactgacatgtactgtttcacaataaggctgcatccctcatcacatgtttcgcatcatcacatgcatcgatatctctctgctcagtttgtataagcaccccgtcgctgatgagagtgatatatataaaagagcagccgcgaagagaagaaaaattaaccctttcaagccattaactcacgtgtcatgctaggttaatcatttatatcatcaagaaagtcacaaaagctgtgataatgacggcaatgacactgatggaagatgattcgtgccctgaacttgtggcacgtctaattggaggaagtgaacactccattccatctgagataaccttagtggggaacccatcat

SEQ ID NO: 71018 - DNA, 410 bp, Glycine max
  unsure (1)..(410): unsure at all n locations
atgaacaaagaatatttatgcattcggaatttccaatgatgcattccatagnggtacacacaagtagagcgggttacttctgacttgctattgttcaagataaataggaggactatgcagattatgatgatgcagtagttgcaaaatcgctcagatcttgtacaaaattcgtgatattatatgttggcccaagctcttaaatcttaatcacagactagggaacaatacaatcttaagatttctcatgcgaaattgcagtcatgcttcagtgctctaaaacatttgatgcacatgattaatttggttccaagcaccatctaattttcacgagcttcttgccggcatatgcaaattgagaatgatgacggaagaacgtgctgataatataaactcatactgggacaatcttt

SEQ ID NO: 71019 - DNA, 352 bp, Glycine max
  unsure (1)..(352): unsure at all n locations
gctatgcttngaaattgttactgtgaaaggtttttatttatcattgagagcttcttanaaaattttgttacatataaaataaaagatagaatgaacataactaaatattcgcaactacgtgtagaatcatgccctcttctgcgaccgatcgaccgtgttctgggcaacaatgtcaagatatttcaagtattngtatctatgacaacaattattaatactatcaatcacatttatttgtaattgtttgtgatatcaaaatatgatatgatatcgatggatcaacaaattttgtcacaagctccttgccatagatagtctttttggttggcgccaaacatgcactcatttctga

SEQ ID NO: 71020 - DNA, 463 bp, Glycine max
  unsure (1)..(463): unsure at all n locations
cgacttgaagctgaacctgtccccaccgaaggctgatcggattattgtattcccgacacgatcggcgacagcgtcttcgacgttaccgccgagctcgtgcgtgtcttctgagctgaaccaagaggacaagagttactctaacaaccctgaagccacttccatggttcttgtgggttgccctcgctgcctcatgtatgtgatgctctctgaggatgatccaaagtgccccaaatgcaaaagcaccgttttgcttgatttcctccatgacaccaaanaccccaccataaggaggagttagagtaatagagttagggtcctctgtttgtaactcccgtttcatctggtcctaatagtangacatattatattagcttgcaatgcttaagaaataatctccttttactggttntaactattccccccctttatgagtagtgctatgtgcgctccacttttacgctct

SEQ ID NO: 71021 - DNA, 430 bp, Glycine max
  unsure (1)..(430): unsure at all n locations
gaccctcaagncacctgcggcacgcaagctaacanattatacatgagtcttgcatcttgctattactttaanggttctcatctctagcatttgctgttactatgacattctaccttttattgaaattttcttgcttctctaatattgattaatcttggctatggtttatatagggatacaccggtgataaagagaatttggggaagtgtgaaaaggtttgtgaattatttttttaaccataattttatatagtacttcagaaaagaaaaatgcgagcacagagaacttgtatgggaagaaatattggcatatccatagctgattcattgtggggtgtcttcaaagttacatgaaggatgattgtgctgtcttgaaacacactttactactgtgtgtaacgatagataaactactgattcttgatttgatt

SEQ ID NO: 71022 - DNA, 455 bp, Glycine max
  unsure (1)..(455): unsure at all n locations
ttcggaccttaagcacgcagctgcagcttctatatntataaanaaataagataggtcaaaacatatgtactagatcacctaagaaaaacaatctatatattcctttcttttctagttatatgctccaatgcatatcttagatgggtgttgacctttttttacatccccaagtaaaaaaaataaaaacattgtattaatttccaagctttgtcatacgtagttaaaagttaatcacttgtccaaaaagaaatgagaacataaacaacccaaactaaaaaagatgatagacgaacacttttttgtatatcatacaatataaagactctcatattgtctttgtcatatatatgaaactaactcatcgatattgacaccaccacgaaagcaaatcgccttttaatatcaaaaattttaaatagacaagaaaaaaaaactcacggagtgaatttgtgttc

SEQ ID NO: 71023 - DNA, 405 bp, Glycine max
  unsure (1)..(405): unsure at all n locations
tgccacccagctcgccaggcgagcagggttgcttactccataagcatcagccttctggaggaatcttctggagggcccaagtgggcctggttgctatttgtaccaccatttttactaagtacaccccctgccttttttggagattcttttttcgtaaagttacggaaacttacgaatttcgtaacgatacttgttttctttccgtaatgttacggaaccttgtggattacataatcatccctttttgacttacggaatgttacggaacctcactaattgtgcaacgatgcttccatttgattttcggagtgtcacggaaccttacggattgtgcatcaatatntntctttgctttccggcatgtcccggaattcacaaattgcctaatgatgggtgccaagcacc

SEQ ID NO: 71024 - DNA, 435 bp, Glycine max
  unsure (1)..(435): unsure at all n locations
agcttttaacacaaaagttagtcgtttatgactactaacaactcctccaaatntacagttttgcttgtcctcaagtaaagaaagaacagttcacttgtcctcaagtgacaagctcacagtggttattcaaaattgtgtttgtntccaagcattcaatcacatgacacaagtggcatacaatgcttcaaccaacaacttttcacaagatatgcaaattttcaaagataggaacatgattattaagcaacacaagtgaaataagctagcaagcaagacagatatcaaggaaggatcatcaagccaaatcctcacggtcattgtttcactcaagcatgaagttttaggctatntatcaatcaacaaccaacataagtcccaacttttgaatttcatctcatgccatacaatcacaaacacataatttaaaatccgaag

SEQ ID NO: 71025 - DNA, 451 bp, Glycine max
  unsure (1)..(451): unsure at all n locations
gaagctgctctgctaatgccttggtcaatagacgacttatatctacatccatcctcatagtaagaaaaagccagtgaaagctctcttctatgcgcttattcccacagcagactcaatagctgcaattacggattcaattgcgacaagatcgtattcttcctttttttattaacgtgcaaaacctttttgtccaattctaggaactgtcaggtaagaaccgattcacttcctcacaacctagcattntatgtccctgggtacctttactctagtttcaaaggtttctagcacttgcttactgagctagggggagctcctgtcccttgctattgcagtcacataaaggttaagagcgaggggatcattcactttgaaaagcgaaaggatgaagactaatccctcgttctttttttctatatatatctataggataaagccataagctacatgc

SEQ ID NO: 71026 - DNA, 472 bp, Glycine max
  unsure (1)..(472): unsure at all n locations
agcttctagccaaatggactgaccatgaattaattcctttgtatagccctttgagccttgtttccctttccctggtttgaagctcactacaagccttaagtgaaaaaccatgatatcaccatatccttaaggaattttggagctttggaattgttttgggaataagtatggggggttgttgttttattggacaacttgttttgttggctatgcttcatgatgtantttgggccatacttgatgtacattgtatattggttaaatgttggacatgctgaatgaaatgttgtttctcaaaggctatagagttaaaaaaaaaacatattccaaaaaaaaaaattcgaaaaagaanaagacagtaataaagtgagtgaatagatcttacatggacaagaatgatgaaactctggtttactcttcatgttaatattatcttcttctatttcttatttttacctatatgccttattcc

SEQ ID NO: 71027 - DNA, 429 bp, Glycine max
  unsure (1)..(429): unsure at all n locations
tgcttctacagatgtgtcacactntagatgcattaacacatgcttaattcttaaagaagtttaagaacaatagtgattaatttcacagggaatacccacttgaagttaacagtgttgttgacaagtgattaatttctttaccttattcatgaaatgtacttgtttgttgttggccaattcatgctactgttgattttgaggttcaaattggccgaaaattgtgaaccgaacttgttgagattcgggtatagacaacattggatcacaacaccaacacttgtctcgacaattcatttcaagtttgcataccctgtgtgttttctctccattatacaaataaattagctggagattgttngaagttgtcctcaggatcctcttgagtgatgattccaaaagggtgacattgttaagaatntggattgattc

SEQ ID NO: 71028 - DNA, 419 bp, Glycine max
  unsure (1)..(419): unsure at all n locations
gatcttaagtcaccgcggctgcagctgacttgcgggtgatttagccttagtttcactntagntatnagncaattcaattaagaaagagaaatcccaaagaaaaacttccgattgatttttttttgctttattttactaaaaggtattttttgattattatattattattttacctctntttttatttccaacgtggttacggcacgaccgaacggtcagatttcattntaacagaaattaacggatattacaaacanatgatcgatgaaaatttattttattttttgattaggcaagaaatgacttaaataaatgactgaagcacgtcaaaagagggtacggaaagtaaatgaaacgagaaataaaagtacacgaaacatatggggaccaccacgagtacatagaatgaatttgaaagc

SEQ ID NO: 71029 - DNA, 359 bp, Glycine max
  unsure (1)..(359): unsure at all n locations
tccatcatctagtgtcaacggaaatagtctcgtgtttatggatattgttcggtgtccatggtggtaacctcgactagtgtaaaagttgtatgtttgtgaggcatgtcaagctcccctagctaggacgactgttgtttaggcttcttctggcaagttgtctatggtggacatgcttttgatcttgcaagccaagttagacgtgtcaagtggatgatgaccntatatatgacaatgcagcccttttttgtcattgcatgatgcattgaagacaaatgtttcgtattgtctttagcttcaggcgagtgcaacacacacatattactcttgcatatgtatcactcatgaagtgggtgtgtact

SEQ ID NO: 71030 - DNA, 308 bp, Glycine max
agcttcagctagatcgctaagcaccaccttatctttggcttagcgcgactcagtgtcgccaagcgcaattctttacagccataattgaagtccatgaagctaagcaccaatcatgccagctgtcataccctaatttcgtccggtgacctttgcttgatgacatgcgacctttctttggatcttgtgaggtgcttggcacccatcattaggcaatatgtgaaatatcaggacatgccgaataaccaaagaaaaaatattgatgcacaatccttaagtttccgtgacacaccggaaatcaaatggaagca

SEQ ID NO: 71031 - DNA, 389 bp, Glycine max
  unsure (1)..(389): unsure at all n locations
ntaaacttgtgaaaattncgtgactcatgggactggagcttgttccaatctgcatctacgacagaagcaaggccaagtaggggattgggtgctctatctcattcgagatgaacaagttgacatactgtatattggacacaaaaagcaagacaacattgaataccaatgataataccgaaaaggtagccaaactgaaaaatttaaatgaacctatattatgaatcatgaacattcaccaactacatggaacccagaccaatgaagcctagagtcatcatgattggacacatcatggtcagcagactagtctacattaaatgtaacacgaacctattaacttaacaacgaaagagaacttcacagtgtcgtaattagattcacaattgatt

SEQ ID NO: 71032 - DNA, 320 bp, Glycine max
  unsure (1)..(320): unsure at all n locations
agctnngtagtatatgttggtataatttgcctgttccattanngctttaatgtctctagaggttacttcctcgttgacatctntttgtcttgaatggaattgccatgacaggtttggtgttactatgtttgatatttggtcgttgatcttgtgttgtgggaggtaattccgactggatttactcaccatccttcacttgccaatttgttatgacatatgttgttggatcacctatgatgtcttgtgttccagggtaatctatatcctttctgatggctttagcatgaaacctatccaagaataggacatttattctgact

SEQ ID NO: 71033 - DNA, 493 bp, Glycine max
  unsure (1)..(493): unsure at all n locations
acacataaaactcagctccaaacccagcaacacagaatctaggtgtccaaaatctctcttntaatggatnntcaaagtttgagaagtgaaattgagaatggggtaaatttggagtaaaacctcacctcacacaagtttataacatcaatttaaacttgctcaactggatttacacctaaaatttcaccgaatcaaaatttgactcctcaacacccaatnttaccctaggaatggctctttgttcactttggccatttgtttttctctcttgcacagcccaaactatctcataagtcctaaacgacatttcaaactatgattgactcccgttaacctccaaataccactaaatccagatntggtctttcaactctcaaaaactcactctttttcaactcataacaccatattctcactttctaaccccaggttaactctacccttcatctctatcaatattgcactagcaatatcatcgcgccaacatcaaaag

SEQ ID NO: 71034 - DNA, 385 bp, Glycine max
cagctgtacctcatcgcgctcacagtcttagattttggggcctattcaatccttgtgttcggactctcagccacttatgatagccgccgatgatcccattactgcttcccctaagctctctggcctttcttcacgccgcatgccatgccttgcgaactccttggagtaccctcgcgttgtggtcactaaaaccccgtgcgatgaaaggcgagatgctttcggctaatggcgctcctctcatggggtagccaagttgtcttatggcgacaacggtgatatacttaatacaatcccttgttcccatcaagggaacatcttgacattcttctcatgaagatagaatcctgattctgtcttccctcttgcgagggaaccaatttacaga

SEQ ID NO: 71035 - DNA, 376 bp, Glycine max
  unsure (1)..(376): unsure at all n locations
agcttgaagttcanattgctggatcttatagcttccactctcctcaagaaaaggatgtagaatctataaccaaagactaaaaaanagagggtcattctgaaacatctccagtagttcttcaagaaggtgagaaatcagaagattccaatgcaattgtctcatttggctgctgaacctgatcctccacagctcaattctggaatcaatcaaagaccacaaagggtcacaaaacctcctgaaagatatgcttagccaaggatcatgttcatcatgatagaatcaagcatatagatgttagatatcactttattcggtcagaaagaagaatcatagttcataagatcagcactctgcacaatcctgctgatatgttcac

SEQ ID NO: 71036 - DNA, 397 bp, Glycine max
  unsure (1)..(397): unsure at all n locations
tgagtctattntagctgatcaacacagaataatcttgagtnttaagaaaatgttgtgattcgccaaaataaattatttattgaggattaacctagctagtaccaaattctagaataacatctgaatatttcctttcaaaatattctactgtatattgggcattccaaatgtttttatgttcgaaaagttaacgagacattttgttttatgattcaacttaaaagctagaacaattaaagtagaatatttggaattaactaaaatgctattggctgaaattaattatacgatcgatttttttagataaattatacgactgattctttaccaatattacttattacaacataattaaattcttataacatgatcgctcgaaacatataaatatgcaata

SEQ ID NO: 71037 - DNA, 459 bp, Glycine max
  unsure (1)..(459): unsure at all n locations
cgtgtgacagcgaataaattggaaactaatgatgaaactgtattgcattgatccctctaatgcacagaaaaggctagcaggccactttttggaattggaaccactacgttccaatatcactgcagagtgcagacagagcaaaatgcgcccagaagaggactgtgttatttctccagcacttcaccatttctaaaacaacaacaagtttgtaactttgctcacacatacacacaacttagccgggtgtgtgaaatgtgtagaaaacagtctgtagggattaaaagttgttaaattaattttactcttatttttttctttgtacgcctgcatacatacaatacgagtgatgactctagacccatccatcttcttgacagtatgagggcacttncttctaagattgtattttcagttagaagaatanagggaaccaactgatctattaatgatcatgactat

SEQ ID NO: 71038 - DNA, 479 bp, Glycine max
  unsure (1)..(479): unsure at all n locations
tatgctgcagatgagtctgacgtttggtggctggctgtggtcaatgattgttggctttataaggcgtgttcatggactttatttatctgaggatatcgntcaagtctgaacaaagtggactaatttcttttttggtgaaaacaaaaagaaagtggactttatttaagtaaagtagaagcttcctttcggtttcctgaaacaggctgatttcagataaattcaagtttttcccgccagcatctgaagttaggcaaaaatttgtacttaaagttaatgcccaacttgcatatattccttattattaaaactttattcatatgttatccatatttatgtttttctcttctaaattaaagttatttaagtctaccctcttgaatcaataattattttttgtacacaatcacatacatttttaaagataatgttantcaagctggataaaactattattaacattaaaacttttcttctaaata

SEQ ID NO: 71039 - DNA, 433 bp, Glycine max
  unsure (1)..(433): unsure at all n locations
atccttaagcaccgcggctgcagctttagaattataaaaaagaaaatgactattgtatagtctatacatgtttccttggatgagtctaatgccattcttccaaggaaggattttttagatgatatttcagattccttagaagatacacatattcatggaaatgactctaaagaaaaagatgaaggaagcaatgaagattctcgagataatggagttagagcaaataatgaacttccaagagaatggaaagcctcaagagatcatcccctcgacaacattattggtgatatatcaaaaggggtaacaactagacattctcttaaagatttatgcaataatatggctttngtatctatgattgaacctaaaaatataaaagaagccatagtagataattactggatcattgccatgcaagaagaactgaatcaat

SEQ ID NO: 71040 - DNA, 464 bp, Glycine max
  unsure (1)..(464): unsure at all n locations
attaatgtgttgtaccgattgaaaaggccttatatttgagctattcaaaattagttcgtcatggatgagaactggaaagtaactaccaaggaataaggatataggagggggccataaagagagaagtgagagtgagacgccataaagtgtgtaaaatttttatatagtcagtatatgtttgataataagttctttgaaagctctactaacaagaatccagaaataaattatttttggtaattaacaaagtaaaaacaacaattattcatgtcaagacaattaaaatatctgccagagcagcatatacctcaactctaagtatcagacacgatcacatacttatcctattacatggaccgtgtaattctggaatcttctttttagattttaccgctattattttgctttcattaactgngcattggtcttgcacatgttctttggtttaacctattatcctatac

SEQ ID NO: 71041 - DNA, 405 bp, Glycine max
  unsure (1)..(405): unsure at all n locations
agcttgtaatgcatagaaccatccttatgctgtcataagtgntttattcaattnttgggttttccacccaataattntttataatatatgcactgggccttgtcttctccattgattgagnttttgaaaatgcttccatatctcacttttcagtttacttcctccttcatttgttggattctttgtcttcatgttaatgttatcatcgtattcatcatgtggagtttgtggtaaatcattgggagtactgggaggatcactacatggggggaaggtcacgagttactcttggaattggttggtgacactttcctatcanattcccatctctgccattactttcttgttaaataaaatatatgtaaattaacattcaccagaatttattaattaatattctcgttg

SEQ ID NO: 71042 - DNA, 449 bp, Glycine max
  unsure (1)..(449): unsure at all n locations
tgtagaacaccaaagatgtaagacanaatttgaaagaagtgtttatttttgaacaataagagctaatatacaatcagatacctgaaagtgataatttatgttgctatgatccctaacaatgtataattagtccctgttagattacatttatctttacatgatcttgtatatattattacacaaaaacttatgattctgattgatatgtaattacctaataatcagtaattgattgatatgtaatcaatattgattctgatttctccattataaataaagatgagatgtggtcatctaagacacaaaattacagtaaaactaatacactgctatatggtatcaaagcttaggttattcttgacagaggaataacaacaatcgtcctccacaacctactggtccagatggacctctctgctagtcatcctatccagcaacctatttncaca

SEQ ID NO: 71043 - DNA, 449 bp, Glycine max
  unsure (1)..(449): unsure at all n locations
gatccttaagtcacctgcggcatgcaagctntanagataatggcactgttattaaanaataatgttctgagatgcgaatggatcggatggtgaagaagaaaaattaaccctaaaaaatntatgcctatctcccaaatgacgatcttgtcctctgtaacttttcaattcatccgcgctagtgaaagggtgattctgcctttgtacagtgaaatttgctgcatctctagatataattaaatgtaaaatcaataactaaatttggatgcaaaaaatcataatcataataatcatctttttatatagaattcttgatagggaatggaatggcctctaccgcatccttttgtacaacttgtggaaatgccatgtgcaacgctcaccacataatattctctatcttttcctaaatagcaatctttctctgccaatctcaaaaaaaaaaaaaaact

SEQ ID NO: 71044 - DNA, 400 bp, Glycine max
  unsure (1)..(400): unsure at all n locations
gctacatagacttggagaatatactgttgatttgattatttcgatattagattcgaccaagagcctgttatcacttatcagtacgattgatctagaatctattattgtatgaccataattggacattgatgggatacaacctttataaatcacgcttgcttcgtatgtagcatgtctggtcgcgtaataattatttatgttttggaaggaatgctgtccatgatttcaccatgttatttaattaaagttttaaaaagtagattatattggaccaanaaaattatatattttgagacatggtctcatccacgtttaacataaaatattgatcccgatcacaccaaatatacacaacgatgtgattccatcttagtttaattttggctctaccgatatttcc

SEQ ID NO: 71045 - DNA, 283 bp, Glycine max
agcttgagaatgttggtattgtcagaatgtgacatgaaacatagtcctcttgaagtgattggaagactcccacaattagaagagctgtactttgctgatcatagatcaaaatgggatttctacaatgaacatgctgctgaattcttccaagagtttagagttccccaagcatttgcaaggtatcacatacaattacgaaacatgtttgctggttttcaagaggagtttcttaatcgtcacagaaccttatttcttagttatttggatctatctaatgcagcat

SEQ ID NO: 71046 - DNA, 432 bp, Glycine max
  unsure (1)..(432): unsure at all n locations
ctcagcttatgatgatgaattaagattgattcaaggagtnttgatgatatcaaagatgatgactaaaagctcaaaagtcaagatcacttcatgataacaaagatgatgacaaaaagcacaagagaatgagttcaagattgagttaagaacacatcaaaaatcaagagaaatttgaattcaagaatcaagaatcaagaataatcaagttgaagattcaagagaagacttaatcaagataagtactaaaaagtgtttcaaaacattgaatagcacatgaatttttcacaaaaccttgtaccaaagagtttctactctctggtaatcgattaccagtttattgtaatcgattaccagtagcanaattgttttcaaaggctttcaattgaatttacaatggtccaattgatttcaaatggtgaatcgatacaatga

SEQ ID NO: 71047 - DNA, 312 bp, Glycine max
tgcattgaatccttcaatggccaaaatatgctatcacgccacttcttggaaatggaaccaccacctttcaaaatcacttgcagagtgcacacagagcaaaaagcgcccagaagaagactgtgttatttcctccgcacttcaccatttactaaacatacaacaagttgttacttatctcacacatacacacaaattatccgggtgtgtgaaatgtgtataaaacagcctggaggggataaaagctggtaattaaatactactcttatattttttttttggcccatgcatacacacaatacgagtgatgactct

SEQ ID NO: 71048 - DNA, 389 bp, Glycine max
  unsure (1)..(389): unsure at all n locations
tataaaactcagcttgttaattattagcttgagctggattatatagatgattcattcttaaatatatcanttntatgttcaaagattcttttattctcttttgttcttatttttatcttatcctctaacatgaaaatatatattaaatacttaattaatgtgcttaaaattattaaaagaaaaacacttccctgctcaagttatgaatgagataaataagccaatcttaagctttatatttntctaacaagtcaaactcaagaattaaatttggttgatttaaatgagtcaaacttgagtaccatattattntggtcagcacaacttgaacttaaagttgttgactcagtttgactcattcacacccctagtcacaatgtacaaaaata

SEQ ID NO: 71049 - DNA, 448 bp, Glycine max
agcttctattttgtcattctgttcaacattcttatcattactactcattaaatggggccatgttcatcacctgtatacatttacaaggcagattgtgtagaggaagaaaattcagtgagaagaaacaggtagaaaaaagtacagaatataagaaatagagtgaaactaaaaggttgtatgattgaagagaaacacataagtaaattcaaattcccaaacacatgttgacattgtgataaataatccaaacacgctgaaaggcatctgcgaggcaaagaataaaaaaaaaagaattactcgctcagaagttcagcataaaaattaatagaatattaaatctgctataataattcagattgacacatatctagtataacattctacaacatttaaaaatgatcttttcttagtgttgaacttaaaaatagaaaaaaaaaaaactaatatc

SEQ ID NO: 71050 - DNA, 451 bp, Glycine max
tgaaggtgcataccccacccattttttcatattaaaacactgtttatgtgtctacgattattgggatcatctctttgtccgtcattggaggtgtcactggagatgcgaggtctcttcacctttaggtgtattctttgaaagattcgcgccccttttttgcacatgttctgtaggtgcatcctattcggagccatatcagaattgtactgatactgcctaacgaaggcaaccattaggtccttccaagaatggactcgagaaggttccaagttagtgtactaagtaacaactatcccaggaagactctcttggaagaaatgtatcagtagtttctcatcttttgcgtatgctccctatcttccgacaatacatctttacgtggttcttggggcaagtaagtcccttgtacttgttcaagtccaacaccttgaacttgggaggggtgatgata

SEQ ID NO: 71051 - DNA, 371 bp, Glycine max
  unsure (1)..(371): unsure at all n locations
agcttagcacacagggcacgcttagcttgactactaaaacttaaaagacagtgagggagttgagcttagcgcagcggtgcgcttagctcaacacacaacacaagggcttagcgcacagacgtgcttagccttattacaaaggaaaacatatagaagcaaagtggtgcttagccgtacaagtctggcttagcgctgaacaaaaattntcaaaaccctaaatgtcagaacactggtctcgcttagcgcattgatatgcttggcaggcttatcacttaagntcattagcagggatgaacgcacttagcgcgacatggtccactaagcacgttcatttggaaatccaaaattttgacagctgcgatgaacaagct

SEQ ID NO: 71052 - DNA, 441 bp, Glycine max
  unsure (1)..(441): unsure at all n locations
ttacggacctataaaactcagcttgatacccttcttgaagaatatcaagacgtctntgtgtggtcgtaccaagacatgccaggtctggacctcgacattgtgcagcataagttgccattgaatcttgggtcttccccggttaagcaaaagctacgaaggatgagacccgagatgtctttaaaaatcaaagaagaagtgagaaagcagttcgatgcgggtttcttagctgtagctcgatacccggagtgggtggccaacattgtcccggtcccaaaaaaggacggcaaggtgcgaatgtgcgtaggctatcgggaattaaatcgagccagtcctaaggacaattttcccctgccacacattgatatactggtggataatacagccaagttcgcccttttctcgtttatggatggtttctcggggtataatcagataaagatg

SEQ ID NO: 71053 - DNA, 458 bp, Glycine max
  unsure (1)..(458): unsure at all n locations
agcttaacatcttagatattggaccattctntgtcctgatctatatattgagttaatgagtcatagatgagtgattgatcaaaccaatatgtcaataattgaaccatccaaactgatataagcaacataaaatatacatatatgcattaatcgtgtcggaagtgcaataattaaataatttttttttcgatcaattttttaaaataacatattgttttgtaattttattaaactttatattaaaaatagttaaatttgggtccaccaattcaataagattgattcacttgattaactagaccgattatcaacataactattgacccagtcgagacaaactgagtcacacttggacaattacatgactgatgcaataatcaatttgacctgatacacatttaacttgctattgccggataattgtggttgggtataaaaatggcacttagttgctatac

SEQ ID NO: 71054 - DNA, 426 bp, Glycine max
  unsure (1)..(426): unsure at all n locations
ntgtcccagatgttgctgggaagtactgtggtgctatttttatgagcgttggactagtatgcccttgctgaattctccagctgccagtcccaaaaaggatgacaatacattcaacaagttctcatattctggtactccgggtgcgtcatgatagaaatgcatgatttctacagtaaaggtccaatttgagcagccaattcatgtaatttatgatggcttagaaaattatatccctgtgatattgtctcgtgtataaacctatgctctctagtaatcatacaagcaatactaatgttctgtgtgaagaaatatttcaaggtttcaactttcttttatccaacctgtccacccttgggtgggtattctttngttagttggtacgagatgaccatgatatcagtgacacgctngtgtatcacattcaat

SEQ ID NO: 71055 - DNA, 314 bp, Glycine max
ttaagtcacctgcggcatgcagcttggtaaacgaattgatactctattcttttgtcgattcaatggccagagctagcttctgtgataacctagaatcggcattctgttccactcatgataggagcccgtggcatctgatgtagcgtctgtggtgcctcaagagtgaacgagctcacattaagtgcggtggggtcactgcccacttttgcagtctatagactgttgctcgacatctgtgtacatgattcggaatactcgagcctgctgtcgtggcatgagtttgcgcctagtttgaggtaacagataataaattg

SEQ ID NO: 71056 - DNA, 463 bp, Glycine max
  unsure (1)..(463): unsure at all n locations
agcttggaggatgcttctatgatggataagattgagggagagaaagagagaggtgggagcactatattgaatgaataatagagggaaagaagtggaactttgaagtgtatcgcataagactttaattcatcaaagttacaacaagtgttacacatgcttctatttatagactaggtagcttccttgagaagaattcttgagaaaacttccttgagaagcttttttgagaaaacttccttgagaagctagagcttatctacacacacccctctcataactaagctcacctccttgagaagcttccttaagaagaatccttaacaagctagagcttatctacacacacctctctaaagcttanctcacctccttgagatgagatgctagagcttagctacatacctctattatagctagctcacctcatgaaatatacatgaaatacaaaaaaaagtcctactac

SEQ ID NO: 71057 - DNA, 360 bp, Glycine max
  unsure (1)..(360): unsure at all n locations
cgaagcctttaagtcttagttntggnttgataattntataatgccaaacatgtttaacatatgtagcatttatattgattgttttagactacgcaagttgtatgatataggttaagtttttcttaacatgcttaataaggatcaaagatgttaaaaaaatgaattgatctctaagtttcttaagagcaatgagttcaacacaacataattaattagaaggtgttgtaatcaattacaaagtggtataaaaagcaacanatctctcttctacttgaagattggcaagtattgatgaattaatcgattaccaatttcagtaatcgattacaaaagcttattttagaaaaaaagaagctttga

SEQ ID NO: 71058 - DNA, 458 bp, Glycine max
  unsure (1)..(458): unsure at all n locations
agtcacctgcggcatgcaagcttgtaggattatggggtacccatcacatgtggtactatgtggcggtcgggcgatggcgcaagacaattctccacatccacaaatcacgtataaacccaccatcccctgttgcccacctccaactgagctcacgtactcccacgtagcccttatcctcgttcctctcaacgccgggtccccatcaatcctctcaagctcccacaacatccaagaaattcaacatcccatcatcacaaactaacaaaaccaagtaaaacagggcaaaggcagaaaactctgcccataacacaaaccaaaaatcacagctnttcacatacaaatactctagtaacattttcttcgttccaatttgttaaccgcggatcgactcgaaaattntactggaagtctctagtacataagtctacattttgaccgtcgggatctactagaaaaca

SEQ ID NO: 71059 - DNA, 485 bp, Glycine max
  unsure (1)..(485): unsure at all n locations
ntcttaagaaaacttccttgagaagcttctttgagaaaactttcttaagaagctagagcttaactacacacacccatctaaaaactaagctcacctccttgacaaaatacatgaaaatatataaaaaaaagtctctactacaaagactactcaaaatgccttgaaatacaaggctaaaaccctatactactagaatggtcaaaatacaaggcctaaaagaaggaaaaacctattctaatatttacaaagaagagtggatccaaccttgacccatgggattaaaaatctaccctaaggttcatgagaatcctaaggccttctttagtagctctagccctagcctcttggagtcttctatccaatacccttggggggtaggattgcatcatcccctccaccttggaaaggaattgacctcaaatcctgaggttcttcatactctgggctccttncctttgacacctataaaagaataaaaacatatg

SEQ ID NO: 71060 - DNA, 459 bp, Glycine max
ctgcagcttatactatggaaatgttattctaaatttgtgtttgttgctagccttttactttgagaataaatctaatcttgacatactgttgttgctatgatctttgatatggaaaccccgcgactactgctattgtttctcccctgcatagtatattggatacattcatgtttgccttattcattcatttattgattttttatatggttgttttataggtttacaagtcaaggtccttatgaagatcctttaaacttactaaattcaccagctaccctgagctacgcaataatctaggtcatatgttcggcatgatagtatttacagggccttgtatatcaagctggcatctgattcttttaccatagatgacgttttctctttgtaaatggtggaagattgtctcttgatgttattgtctactattaccttttttcttgtttgcatctagacattata

SEQ ID NO: 71061 - DNA, 481 bp, Glycine max
  unsure (1)..(481): unsure at all n locations
ggttcagatagtccanattatgaanagcaaacaatgtctgcttacggtatgtagttcaattacaacataacactctagcaaggtccacataataatttgtcaaataaagagatctaaacataagctaatgtagtgccaccttcaatcagagtcactctcatcccaagccacctgttttttgattaccagctcccatacttttttattaggcctgaagtagaaacatatctcatctccagcatagaattcactgtctctcaaatattggtaccacgggtcagcaacacattgtagccctttttaagcatcatgcatggtcaacttccataacagaggatgatcatcatttatcagaacaaacatattttttcttgtgacgtcaacataccttagagcattcattggtagtacctacattagagatggaagtcagtagagatcttaaggtcgataaagaggacactggctaatatatgaatgg

SEQ ID NO: 71062 - DNA, 422 bp, Glycine max
  unsure (1)..(422): unsure at all n locations
agcttgctaacccatggaagctcctaatatctcctacactnnttggggtgggcaattcttggatggcctcgattttctcaaggtccacttggaccccatttcaaccaactacaaaacctaagaaaactatattatctacacaaaaggtacacttctctatattttcataaagggtatctttcctaaggactgaaagaacttgtatgagatgtcctaagtgatcatctangctcctactgtacactaaaatatcatcaaaataaacaactacaaatctacctatgacatcccttaatacatgatgcataagcctcataaaggtgcttggtgtattagtgacaccacaaagcatcactagccattcatacaaaccaaacttggtcttgataagcggatntcactcatcaccctttttcattctg

SEQ ID NO: 71063 - DNA, 289 bp, Glycine max
  unsure (1)..(289): unsure at all n locations
tgcatgcaacaatgaaactactttngtttccttctcttcttctctccaaactcatgacctcatccttttctcaacctctccctttacttttcatgctatcccttgtctcttggggtggtgtgtgatgagtaagtgagtacaaaaaaagtgagtggcgaaatattgtggtgttggtcgtgagtgttgttatgtggagaggggtgagttgctgctctgtgatggagtgagggtgttgtgtctgtgtttacttgggtgagaagtgaaaaaatgacacatatgcgtggaagat

SEQ ID NO: 71064 - DNA, 436 bp, Glycine max
  unsure (1)..(436): unsure at all n locations
tacctntatggcacacaggatcacttctgtgaatgccatttcagcactctgtgagactattgatgctgatgtgccaaggcctattttattcttattcttttatttgagattgctagctgttaccttctgttagaacatctccaatgcatgatgcttaaatgaattgcttaaagttaaacgatgcttcttaacaatcttttttattacaacgcatgatatgtcgatgctcttgcctattgagttgtttaatcgattattataaaacaagaccaaccttttaatctaaaatttatatgtgactcaagttaagtgcttactttaaaaactttcgaggtgaaatacaattttgtataaagttcttacatctatgtggcattaattgtagcgattcaccaaattaagacaaaccattcatttaagctatcatcctgataga

SEQ ID NO: 71065 - DNA, 284 bp, Glycine max
  unsure (1)..(284): unsure at all n locations
tcttgaatctttcctagttctcattctagctttctccaccaagntgcctgatgccctgaatgtcttttctgatggtagtggtcctagatgcacggaagaatttctccaagaacaccctcttaaggtcatcccagctgaaaatagacctgagagcaaggtagtataaccaatcttttggcactccctccagagaatgaggaaaagccttttgaaagatatgatcttcttggacatcacggggcttgatggtgaaacaaacaatatggaaccccctaagatgctta

SEQ ID NO: 71066 - DNA, 482 bp, Glycine max
  unsure (1)..(482): unsure at all n locations
ntgtatgatgagcatnggttgttggctatgcatgaagaattgtattattttcaaaggaatgaagtgtgggatttagtttctaaacctgcctctcataattcaattggaaccaaatgggtgtttcgatcaaacttgatgaatttggcatcatagtaaggaacatggccagattgcatgcaaaaggatacaaccaagagcaagacattgactatggtgaaacctattcccctattgcaaggttggaaacaattaggtttttgtgtgtttttgcatgtattatggattttaggttataccaaatggatgtgaagagtgctttctctcaatggatacattgaagaagagatatatgtagaccaacctccaggttttgtagactataaacatcctaatcatgtntacatgctgaaaaaaagctctgtatggnttgaaacaagcacctagatcttggtatgaaagattgagcaatntcttaattgaac

SEQ ID NO: 71067 - DNA, 417 bp, Glycine max
cgctctcttcttctacatctaagctttcacgcttttttttattatgcatctaaggcctctgctctccgtctaccttgaagctctatcttctgcatatacctgaaactatctgttctccaactaccttgaagctcatattgtataagctcgagcatagtctacgtctcactcgatcattgacataactctctacttcttctgcttagccaccttacctacgtatgtttcagctaaccctgaataaatattcgattgctgtcatgtgtcgcacacttactgaagtaaacatgactagggtatctcatatttaactgaatctcccttacccttactgtgttctcgtatatgaagtgcaccccgcagggcattggatatttgatcgttcggcggcgagtggatggatcatgtcatcattat

SEQ ID NO: 71068 - DNA, 291 bp, Glycine max
aaggacgcgtgcactgactttaaggctgagatattcctttgcaaagtctaaatgataagcacttcatagatagggaaatgacatatagaatcccggttataagtgtacgacctgccttgtcactactatatcaccactctaaactacataaatttcaatttttaattgaaaactcctgttatttgcttttgaaaaatgaaagttaaattgtcaggatatacatttcccaaacaacacattattacttaaatgaatacatacatacatatatgtgtgtgtgtgcgtgtgtgt

SEQ ID NO: 71069 - DNA, 476 bp, Glycine max
actcaagcttccaccatactttcagcattggtaatctattttggcttctgcgtgcacacatgggtttatataattgaacaataggacagaaaccatcacaataaaaaaaatgtacaatactagaggaatcaacacttaattaatagagcacactctgcaaaatgatatggcattgcatcatcctacacatttttaaatcaagggagaggggttctacccaccggataagtacatatttgattaagtttctattctaagacaaacaaaagtgaagaaagaccgcatcattacatattaaactttacttcacttttttttcttttctggttagtactaattaattaattaacaggttcgatcaaattaaagggtcatgcactgactggacaacaagtattgttatgggtgtgcctcttgccatgccaagaagctcatttcctgatgctggatctctacagcacaccttgtcttgtcct

SEQ ID NO: 71070 - DNA, 490 bp, Glycine max
  unsure (1)..(490): unsure at all n locations
acacactaaaactcaagcttataacaagatcgccagtgngtgttgagatatatgttctattatcatatcaanagccttgtgctcatttctcccacatatatataatataaactacgttagaggtattcaaatatttaatatcaacatacacaaaagtttgttggaagtaatgataaattggatggggtgggggacttaaaaaaacacccatgtattatataaaaaaagggaatgttatctttagagctagtgaaatacaaagaaattattcaagagggtcttctcgtatcatggaaaatattaattaaatgcaagagaaaacaaaggctaattaattcgtatggtcatggaatcagatatctgtgaacaagttaaaccaaatactacttgcaacagcctgaaatggttcacacagatagagagtgagagagatagggtggtgtcctctgtttctctctcttgaacttctctaaaagatcaccttctggag

SEQ ID NO: 71071 - DNA, 290 bp, Glycine max
  unsure (1)..(290): unsure at all n locations
agctatgagggtgtcgacaataacttacatgngttccatgttcancaagggagaggctgtgaatgtctgtctgcatgatctagatgatgtcacangacgaatcgaacagtggctcattgtggttcaagcccatgctgtgactgtctttcatatccagccttgattccagacttctctacgatcaagccctgcctcaaaatgaaaagatttcgtgtctcccacgcccatgtaatcgattagccatacatgtaatcgatcaccaagctacctgaccgagtgtcatcgactac

SEQ ID NO: 71072 - DNA, 369 bp, Glycine max
  unsure (1)..(369): unsure at all n locations
gcttcgtgtntatntagaatacaagacatcattatggaaagtgtattcactccgngagacccataaccatgaactgaccccacccactgatattcgtcatattcctaagtataatgtgatgactgatttggataaaagccaagtggacgatagtttgcataaatttggtgttagaacttgccacatcatgggatgtttaatggctcaaaaggatagatatgatggagttggtttttcctaaagggatttatgaaatcatttttatcggaagcaacgagatatgatcaaagacaaagatgtttgtgttgcattaagttatttggcaagcaagttngccaatgatcccttgtcatattcaacattcctaac

SEQ ID NO: 71073 - DNA, 460 bp, Glycine max
  unsure (1)..(460): unsure at all n locations
tgtaagcctaagccaatagtaatgatcacatgcaatgcatacatatattgcagttaatgaaaaatggtttggaatcaaacctgacacaaatgagggatgccaataaatgtcctcttataaacaatgcaactgcttatttttcaccaaaatagccttcaaacatacagctacacaacttaaggcacagtatccccctgtgcaatgacctctctaacctccacacaaattcaacgtgtgactcattaggatacaatacaatttcagcaaacttttgatttaagatccaaaccttaatcctaatcacaacaatcatatgcagtggatacaaatacacgcagttttgtgactctcccgtcatctccttcattcctgcttatttcactaaacttcacagtaaatcttatcaatatggcgttggttttngtggtatattgggatacatcggaatgatgtcattttc

SEQ ID NO: 71074 - DNA, 468 bp, Glycine max
  unsure (1)..(468): unsure at all n locations
cggaccttaagcgactgagctgcaagcttggcacttgcttaagtctgatactttactttctttgaactccactttcattcacaaaatacttttcagcatttaatcaaggcaatgataatcaagattttctaaaacctaacagatcctctctagagaaatcatcattgtgcctacttgtacgtgccataaaaatagatacatattctaagcttcaaaattgtgaagaatccaaaatttactttcacattagaaatccttccacattgttgagggcccttcttgctaacatatactcttgagttagatctttattgggtttcacaatatactcctttatgaaaaactctaggccttgcctaacactntcaagttcaggcgtcactgctgcacgtgtgacgatattccataccatgatttcaggatactctaaaatggcctcaacagaatgcggaatgcatgatcctcttt

SEQ ID NO: 71075 - DNA, 476 bp, Glycine max
  unsure (1)..(476): unsure at all n locations
ctacaatttcaacattaatagctggtgaatagtttatttatattttattaaagaaatattaaaattacataaattctacaaaatatatatatatacattgaaatcacatagattcaataatatcataccacatgtttaacacatatttttatttgtagattattatatattattaaaatatattttttataaaattattgataaaataatttattaaatactaaattgataaagttaaaaaataatttaagattttttttttgcaaattaaaaaataatcaagttttaaatgatctaaacaagccatgtccaagacttttaattaggctcctttaaataaatgagttaagcttgagccacctactttctttcacaagccanacttaaattcaaatattcggcttaacttggttcattngtacccttaacctcaacaaccacctactagttgtgaaacttgggcttgcggcacatgc

SEQ ID NO: 71076 - DNA, 443 bp, Glycine max
  unsure (1)..(443): unsure at all n locations
tcaagcttcaacgaaaaagaagagcaggctacatattacatactccaaacatnattgcaatatggagttntgatggcaaaatgatattcgagaatattattgaagccacagaaaactttgacagcaagcatctcattggggttggagggcaaggatgtgtntacaaggcagtgttgcctacacgtctagtcgttgctgtgaagaaactccattctgttccaaatggagaaatgctcaatcagatagctntcacaagtgagatccaagctntgacagaaattcgacaccgtaacattgtaaagatatatgggttttgttcgcattcacaattctcatttttggtgtgtgaattcctggagaagggagcgtagagaaaatttgaggatgatgatcaacagttgcattgattgaacacaaggggaatgttgttaaatgtgtacaat

SEQ ID NO: 71077 - DNA, 480 bp, Glycine max
  unsure (1)..(480): unsure at all n locations
ntggtgataaatntagganatgaaagcaaatgtaataagaattgttgtagagtaacatttaataaccattcaaataaggaaagaagattagaggaaacaaaaaaatgtcagtaaaatccaaatccgttcaatagaagagattcccaaatatcaacattttattgcaagttaattacagtaaactatcaaataattaattagaacatgatcgctatatttaaaacaatttttttgtcttcaaaacttaatcaaggtatgactctgtattattgcttttatttcctaatagaatctatcccaaaaaagatgtttactcattactcaatactcattcatgcttccatcataattataagtactggaccactgataataaattggtacaaactatgcagatatcagacaataacttatagagttatagagttatagtaacttctttcatcacttgaggaagttacacatgtcattaaacattta

SEQ ID NO: 71078 - DNA, 418 bp, Glycine max
agcctggtcccaacgctctattcaaactctcccaatatctagaggtaaacctaggatctctatcagatactatgctagatggcacaccatgtaatctgacaatctcacttatatacagggaggtcaacttctccaaggaaaatctgatattaatgggaatgaagtgagcagacttagtcagtctatcaacaacaaaccagattgaatctaaacctctagcggttctaggtatgcctaccacaaaatccatggaaatatagtcccacttccactggggtatctctaaaggttgtaacttccttgaaggtctctgatgttctatcttaacctcctgacagactaggcacgcatagacaaactcattaacctctctcttcatgttgggccaccataacattcatctttaatactgatacat

SEQ ID NO: 71079 - DNA, 480 bp, Glycine max
  unsure (1)..(480): unsure at all n locations
gggttggaggtacttacccgttgaagactgaagaacgatgattatcttttgaagaacgtcgaagaacggtcgaaaaccttcgcgaaatcactcacggaaacgttacggaagcgcctcggcttggattttcttcacggaaacaattttcctaagcaaattcgaaagagagagaagtgtctaaggggctgaacccttttctacttcacttctccccctatttatagaaaattgggggagaagcttgccacccagctcgcccaggcgagcagggttgcttcctccagaagcaacagccttctggaggaatctttnggagggcccaagtgggcctggttgctatttgcacccncatttttactaaatacaccccctgcctttnttggtgattctttntttcgtaaagttaccgaaacttacgaatttcgtaacaatacttgttntcttttcgtaatgttacagaaccttgcggatcacataatt

SEQ ID NO: 71080 - DNA, 324 bp, Glycine max
  unsure (1)..(324): unsure at all n locations
ggaagaaagagaaagataagaggaaaaaaagaaaaaagacaggagaagattgaggaagtgaaagacaaaaatgaaggagtgtagcggcctcgtangaacatgactgataaagaagaaaggaggtggctctagcagtgcaaccagcgagcaagaggcaaaatggtgtcgtttgggtagagaaatgcggaagtgtgcggagagaggggttctataatggtcaaggagatgcatacagtcctaacaacgttactctcaaacgcagaagcaaaataaacacaggttgtggaaatatcatatatgccactggtttataccaagtgtcaa

SEQ ID NO: 71081 - DNA, 483 bp, Glycine max
  unsure (1)..(483): unsure at all n locations
tcacgggttccctcagagtttaatctccgatcgtgaccccatttttcttagaaaattctagcgggagcttttcaaattaagtgggaccaagctgcgcatgagcacaacttatcatccccaaagcgacgggcaatccaaggtgctcaatcgcgtcgttgaacaatatctccgcagttttgttcacgacaagccgacgaactagcacaaattcctgagtctagcagagtggtgctacaacacttcacgccattctgctacgggagtaaccccatacgaggtcacctatggtaaacccctaccggcaatccctgactatattccggggacatctgatgtcgaggctgtggatttcctcctcacttcacggtaggacatgttcacaactcttcgacgaaagcttgaacgatcacangctcgaatgaaagatcacgttgattgtcaccgtcgagaggccgtttttcatgtatgggactgtgtctatgt

SEQ ID NO: 71082 - DNA, 306 bp, Glycine max
ggagctaaagggatgtgcttgccctctccttgttgctatgccatcaattgcaacattcctcatataccttttggcgtttgctcattctcaccaaagacctgttattgctttggatgccatctttattcccctctacccctattatagtctgataataataagtgaaaaaaaaatgagggttattgtttagtattatgttgccagtgtgaatgggaaatgaattgaagaacatctgctcttggttagtctgttcattattactattcttattattattagttgaggagtgtatttacagaattattt

SEQ ID NO: 71083 - DNA, 486 bp, Glycine max
acctataaaactcaagctttaaattacacttagtagttaataagtttggactttgttctctaatgtgtgttcaacgattaccttcggttttaaaatttgtagaccgaattcatggctaggcttgctttgattattgaatctattgggaaccctgcgcatcatttgattaaattgattaatcaagctgattaatcaagcactttttccataatttttttattgaatgaaagcttattcgtaaacatgattgcgcatcatatgaaataagatagaagagggtttttccgtctatgattataaatatctattatggaaaatattctaattttatttggaaatatttataactcaagcattagttattaaatgcatagtgaaataagttatcatatttccattatcctaatgataatagttaaataatcaacaatgaagaagttttaattgaaatcatgatggatgtatatttgatctctaaaattaaat

SEQ ID NO: 71084 - DNA, 447 bp, Glycine max
  unsure (1)..(447): unsure at all n locations
agcttataggtcacatttaattcatactcaaccgtattacctaatttatgaaaaagttaggaggttaaatgttgaaaactaattcctccccgttgaaaacctcataaaggtatagcacttattctcattttagcacatggccattattatgaccatatgaaaatcggtgttactcctaccaaacttcaccttctagcttatgtatcaaattaatctcaacttaaaagacttgaataacataactactttgtgtatataaataattattattcagaagaataaaataaataacttagtcattgtcgaaaaactcgaatagatatattaacaccatcatgaattgttatgtatgtgcacgtaatactgactattaattttctcatanatgaatgagattactgaatttatccccgatattcacatttcaattttcatatgcgtaactac

SEQ ID NO: 71085 - DNA, 348 bp, Glycine max
ttgaaacctaagcatgacttctatcctaagggtaatttatgattattatatagcgaagtaaagttacttacttggattgatgactattgagcagaaggaaagcacagaagcagaggtagcaagtgaatagcagtgcagatgatagcataaatgccaaatgaaaatggaggttataaaatttgcacaaaagagtaactgcctagagcaattaagtcttatttttggcagtttcgactgcctcacttaacgcggggtgactcactaagcgagcactcagtgacgtttgaattttcagattttaaattcatgtgcttagcaggacatcttgcttagcccaattcgaaaatt

SEQ ID NO: 71086 - DNA, 456 bp, Glycine max
  unsure (1)..(456): unsure at all n locations
agcttaacaaaaggcatgcgaagtgtgtggaattcctagagcaattcccttatgttatcaaacataaaaagggaaaaggtaatattgtagccgatgctctttctcggcgtcatgcattactttctatgcttgaaacaaaatagattggtcttgaatgtgtgaaaagcatgtatgaaaatgatgaaacttttggagaaatttttaaaaattgtgaaaaattttcagaaaatggtttctttagacatgaaggctttcttttcaaagaaaacaaattgtgtgtgcctaaatgttctactagaaatttgcttgtttgtgaagcacatgaaggaggtttaatggngcattnttgggtccaaaagactctataaacattacaagaacatctttattggtctcatatgaaaaaggatgtgcacacattttgtgaacattgcattgatgtaaaaaggcaagtct

SEQ ID NO: 71087 - DNA, 432 bp, Glycine max
  unsure (1)..(432): unsure at all n locations
ggaatcggacattcgtgtganaagttatgatcatnttttattttctagagcttccgntgntcaatttctagcctgtcgacatattatgcgccagaatagaacatccgtgtgaaaagttaagaccatttgaatttctcaagaacttccgctgttcaatttcgagcttcttgacatattatgtgcccgaatcggatatccgtgttgaaagttatgaccatttgaatttcgcgatagattccgatgcttaatttcgagcgtatcgatatattatacgcctgaatcggacatccgtgtgaaaagatatgaccatgtgaatttcacgagagctttcgttgtgcattnacgagcgtgtctatatgtgatacgcctgaatcggacatccgagtgaaaagtatgaccattcgaattctcgagagtttcgttgtcaatttc

SEQ ID NO: 71088 - DNA, 443 bp, Glycine max
  unsure (1)..(443): unsure at all n locations
agctngngatacctcactagtaagcgacccaatcccgacactactgacccacaacacactgtgagggctgctgaaaactccatggtgatgacgtggttggtgaactccatggaggaagacatcagtagtaattatatgtgctattccacagccaaagaattgtgggatagtgtcatgtcatagaaatgtattcagatcttgggaataaatctcagatttatgagctcaccttgcaagctagagaaatccggcgaggtaacaatgtgacaagatacttccactccttaaagcgagtgtggcaagaccttgatctcttcaacaattacaactggatgtcagccgaggatgccaaacactatcaccatacagtggaagaaagaagagcatttcagtttctcgctggtctcaatgaggagctagatgaagttcgtggtagaatcatt

SEQ ID NO: 71089 - DNA, 472 bp, Glycine max
  unsure (1)..(472): unsure at all n locations
actcaagcttattgtgcacctcgaacaagcaactaactcctctgtataactatgctatgtgctcgcgactggtccctctctttccttcgcagcttgagttcactattgctaccccatagagctccgcgaagtttattccggccatactcttccttgcgagccctcttggtctcttgttcaagggcccttgtggtagttgcattctcttcccgtaacctggcacactccttccgaatgtgtgtagcggccaacttgaacttctccttggcaagattcgcctttcctaactcgcttttgagagcttggacttcttcgtcctgttccggtgcctcanaactctcttcgctgacgacttttaacttggcgagccaatctaaacctcgtatatgaactttcagccattcatggcagccaccaatgatgccattacgaatgcctctaaagtcttgatctgtcttaacagggttccatg

SEQ ID NO: 71090 - DNA, 429 bp, Glycine max
  unsure (1)..(429): unsure at all n locations
agcttgatttgtgagttgattatagcctctatttcactctggttattagtaaantgatccaaggaaacttccaaagaagaacgcctgattgattttttttattattttatttaaagatattttaattttttttattattatttttcaagatatgttgattatttaattattattttgctgtttttgggttaaccgaggttacaacgtgaacgatcggctagattttactttaacagtgattaaacgatgataccacacatatgatcagttgaaattcattctatcattgattatgtgagaaaactgtctaaatatacagttaagcacgttaacactgaagaaagaaaaccgaaattgaccgaatgaagatgaaagctataaacaacaaatgatttgaagtcttgattctaaacatacccgttgagaatg

SEQ ID NO: 71091 - DNA, 403 bp, Glycine max
  unsure (1)..(403): unsure at all n locations
actcggcttgtaccccttaaacacccctaggatgcctatntgtatgcttaatgacaccttgnggagggtgcagctcgcctagccaagctgaaacttaatcctgaagcaatgagctcgcccaggcgagctggtcccttatccttgaagttatttggtggcccatgcgagccaaatgctggcctgngcgatctggggcctatgaaaaataaggaaaatacctttttgccctcctttcttagtatcttttgtcttcctgatcgaaacaccgaatggttccttgctttgcactgtaattgatgttcaacaccgtaagtcgactattaaggatcaaaagatcaatgaatgatagtccccgaatgaaattanggtatgacagttgtccctctttactgtatctttattg

SEQ ID NO: 71092 - DNA, 472 bp, Glycine max
  unsure (1)..(472): unsure at all n locations
atcctcttagtcacctgcggcatgcaagctatggtaaatgagttctattcttcatcctatacttgattcattctcttgttctagcttctctaataacctanaattgtcattttgttttactcatgaaggaaaaccttgataactgaacatgcttaattcttccttcaagatttcatgagttatcaagaggtaagggggggtcaatcaaactcttgaatcctatgcttgttgttcaacttccttgaacatgttttgaaattattgtgctcgctatcatgtcatgaatatgagcactgagttgtgataactgctaaataattgtactttgataatcgaaaataaagaaaaactgtctttatacatgattatgtagtagttattttgcccttaatattaaagaatagatgcttcattgaatctggctgcagatataaaaattgtacgtgataaaagcaaacagtgggaataacta

SEQ ID NO: 71093 - DNA, 316 bp, Glycine max
  unsure (1)..(316): unsure at all n locations
ctgcataccccaaggatccattaggaaattatttgtganagtataccattanggtgggctcatgggccactttgggatagaaaagacccttgtcttactcaaagaacagtgttattggccccatatgaagaaagatgtccataagcattgcactaagagtgtggcttgtttacaagccaagactacggtgatgcctcatgggctgtacacacccttacccataccctctgcaccttgtgtagacattattatggactctgtctgtggtgcttctagaacccacagaggagtagactctatctttgtgttggtggat

SEQ ID NO: 71094 - DNA, 445 bp, Glycine max
  unsure (1)..(445): unsure at all n locations
agcttctnttggaccttgaacaggcaactaacttctctntcanaaccatgccatgtgctcgcgactggtccctttcttcccttcgcaacttgagttcactattgctaccccataaagctccgcgaaatttgttccggccatactctttcttgcgagccctcttggtctcttgttcaagggctcttgcggtaattgcattctcttcccgtaacccggcacactccttccgaacgtgtgtagcggccaacttgaacttctccttgggcagttttgcctttcctaactcgcttttgagagcttggacttctttgtcttcttccggcgcttcataattctcttcgctgacgacttttaacttggcgagccaatctaaacctcgtatgcgaactttcagtcattcgtggtaccaccaatgatgccattaccaatgcctctaaactcttga

SEQ ID NO: 71095 - DNA, 272 bp, Glycine max
acttaatgtatgaaaatctcaactatataaccatacatcaccccagccccaatcagctccaacttcatttactttgatatgaaacgttataatgaacatctatctcatgttagcgtcctacaaagaaggagaagagacttatgtcaaagtgaacaccaacatataagaaaagcaatgagaggcgctggagaataactttaagaagaaaatcactaatatatgacgctggagctgtatttgaatcattctgccagataataattaatacccta

SEQ ID NO: 71096 - DNA, 502 bp, Glycine max
  unsure (1)..(502): unsure at all n locations
atccttaagcacctgcggctgcagctangctaatagtctaacttcataatctattgagctgagtctagtccaacaagagggatctgaggatgaagcttagnttaagttagtctaaacctaggagagctgtctaaattgagcatagtccaacaagagggatctaaggaagaagcttggattgattcagtctaactagggatcgaggtttagtaattcaggctacagcatagaacacaaaagcatgattgattagagaaatatctttatatacataagttggtttgttagaaagacccaacatctttacctaatgggtgcaattntacttacttgcattnttactgattttagcctagacttagtntaatcttggtctaaatcatcaattatcaatggttctttcaagaatgccttatttctgaattcaaccttgtctaagactagttcccttgagtcgatactcggattcatctattttaanttcanatacttgacgatctag

SEQ ID NO: 71097 - DNA, 411 bp, Glycine max
tgtctcactaagcaggagtccattttggcactaagtgcgactattctcgctcatcacaattctctctcaggttggaattgcgcttagcgtgcttcttgtgctaagcaagaggtgaaacgttgttatttttcaaatcctaacggttgaaccatggggatatgggttagaaaccttcagtccaattttgtagacgatcgattaatgaattcaggatcatgactttactggaataggtttggataaaatttaaaatctcataatttcaacttaggttaataaaactcaacataactcaacatccacatcaagcaaatcacacatgactaatttacaccatacctcaactcattcaagtcaatcatatgatcaaataacatgataaatacaagtaaacaccaatttatagttagt

SEQ ID NO: 71098 - DNA, 346 bp, Glycine max
  unsure (1)..(346): unsure at all n locations
tccgcttcgcatgaaatcatagaccagtaaaaggtcgntttgtttctataccaacctgcttagaanaatgttacatcaacaccattgttgtactatttaacacccataacccatagagaatgattaaaaaaaaaaaacaacgtatttgtgtatgattggtgtcacctagcaactgtacgaggttcctgtgacgtatccttcctatggttgagatttctgacacgaactcctgcatgccttgttttgattcctccgagactctcttcaccgcgactacgatgttggacttggggagcacctctttgtagacgcgaccgaattctccgaacccaatgaggttcttgtc

SEQ ID NO: 71099 - DNA, 468 bp, Glycine max
  unsure (1)..(468): unsure at all n locations
agcttcttggttggtgagttctgctgaaacctttatgtatcactctcttactatctatttaatgttatttttatgggttcattgcttctaactatgcttattttacatacttatggattgatcacccatttgtatggatagtttggatntctagcattggaaaatgctataaagccttataacttggtagagcaagctagaaatctgtatgtctacgaatggagtataccgatctatttcatattatgttgtagacttaatgcaatacttttagactaagtatgttgagggatcaatgactaagtttaagagagttatgcttattcactagagggattctgtgtcgagtagtttctcagcataagaatactatgataacgtgaaatagagaaatatactccttcacattaagagaaattattatataacccaatgcttgtacttcaaaatcttaattttatttatatt

SEQ ID NO: 71100 - DNA, 474 bp, Glycine max
  unsure (1)..(474): unsure at all n locations
ctttgcgttgaatctatcgtcaagcttattctacttaatatttcttacttttatgctgaggagcagccactaatacatcttctctggcttgtgaggtatagctatcatgatagatctatttgctattagttcacaaacaagcaattatatcagataaatgatcctaatgacatattcgctatgaacttatatttgctgttggatcataaaagtgcaatgatctgcatataagattgctgtgcttgactacagatanatgctcttattagaaaacttgtaaaataacacagatcactgttgatgtcttcgtacgatatatttgtggcatataattaactgttcacttaactaatgaactggaacagtatagcttacatggagagagaccaactagactttcgaggtgaatattgcagcatatgaagcgcaactgttaactagttcatgagatgtgtgtgccatgggtatcacttc

SEQ ID NO: 71101 - DNA, 433 bp, Glycine max
  unsure (1)..(433): unsure at all n locations
atccttaagtcacctgcggcatgcaagctnggtngactgaagttctgatagcacacgtaacacactaaacatcattaaatagatatacagatatttacatccagtacctacaaggaagaaccaatagaggatttagctctccataactgggaagcttcctttacatcaaagagaagagaaagatgaaggattgaagaaataaaaaggtggggatgtctcctccacctctaggacctcacaatcactcacaaactcatctcaagctctcaggacggcttcctctttaagctccggcctctgcaggtctttacacagcagaatctctcatactctctataactttgacctttctctctctataaatctatatacatgccgaagcttcaagaaaaggccaaacctccttccanaatctgatttcaagcctaaatat

SEQ ID NO: 71102 - DNA, 463 bp, Glycine max
  unsure (1)..(463): unsure at all n locations
tgtcttagcgtttatgcgagacggagaccaacatgctagctattcatctcctagtaccaagaagagttaggtctagccacggcccacgagcatagaatcgcggatgagtatgctcaagtatatgcggaaaaagaggctagaggaagggtgatcgactctttacaccaagaggaaaccatgtggatggaccggtttgctcttaccttaaacgggagtcaagaacttccccacttgttagccaaggccaaggcgatggcagacacctactccacccccgaagagagtcatgggcttctcggctattgtcagcatatgatagacttaatggcccacataattagaaatcgttaggaaacttgtatggtctctcagaccttgactggatacgacttcctttntgaaataaaatgagttggtcccatgtttctactcccaaaagcttgtgcgaatcaagtcactccca

SEQ ID NO: 71103 - DNA, 414 bp, Glycine max
  unsure (1)..(414): unsure at all n locations
agcttctagacatcgctcttctaagattgatatatctcttctcgcattgctttgacccaatatttatcagacataacatcatctatatgctttgtctcaatcttggatagtagcgctatgtgcttgagacaattccttgtcaagattttgtccttaggatcaccaatgatttgggactttggatgatgtttccttagcaagggtccaattggttcttgataaacgtgaaatttaccgaatcttcatatgcatttgtatgaagttatttgacattttagttaaccttatgtcctgttttgaatcacaatagcttctaattcagcttttactttgtcttaggtacaattntatgttgtagttatttttaatgaaatattttattatttttcagcaaaatcttccacttaagcacta

SEQ ID NO: 71104 - DNA, 357 bp, Glycine max
  unsure (1)..(357): unsure at all n locations
ctcagctgccgcaaaatcctaaaaggatttaaggttcgataccttatgttnttctcaccaagtaaaatggttcattttgaggtccaacgccttaaaaggaccaccttccaagtaaaaataatcgtttgattcacccttaaaaaagaactacgtaggtctgatttcctcttcgatggaaggtacgtangagcaagagccccgctcttgtcgacctctaacataaaagagaaattaaagtttagatactcgatttcacacatttccaatccaaagctgttgtcctttgggacaaacgtgataggagctaataccttcctctaatgccgtacaactcctcaatctgggatattctctatg

SEQ ID NO: 71105 - DNA, 423 bp, Glycine max
  unsure (1)..(423): unsure at all n locations
agcttaatcatttagtgactgaataatagtcttttgaaatagttttcaagacaatacttggtatgaaatgaatgacgaanagtgctaagagaatgcttgataaaccgtccaggaaagaagtagaaaatcttggtttatactagttcacttaacctgagctatgtctagttctcctttacataatagtaaagggttccactaatcaaaacttgattacaaaataagtattttggcctaccactcctagctatacaagtattcttaataccacttttagcaatgtcttagactccccctgaatataagaaaatcaagtatgtgttaacactaagccactcctggctttcacagatatgtagttgaatgaatacaagtttcaatatcattaatgaagtatacacagtaaactaaatacagataact

SEQ ID NO: 71106 - DNA, 418 bp, Glycine max
  unsure (1)..(418): unsure at all n locations
nggcacaaaatgctcatatgaaccaagaactcagatttgttgttcccaagcttcaaaggatgaaaaaagaaatttggaaccgagaatgagagntttgcacgacaatggtgaaggaaacaagaagagaaagaagattaagagcattttacgaaagctttgagggaagaagcctcaagaacacttgtatgaatcttggaagaagaagaaaaagaaaatgcattcctctcactcccttgaagaactcgtgcacaactatggagaatgaaggttcaaagtttgatttttttggagaagtaaggaaataaggcttggtccaaatgaaacttggttaggcttaagggttataagatcaaattgaaaacatgaatggatcattgatagccatggtggacatgccanatgctgtcatatatgagta

SEQ ID NO: 71107 - DNA, 433 bp, Glycine max
caagcttataagcgcgggtctgggagacaaatgtctagtggtcgcgatatacacagatgatgttccgagtaaattagatgtggtacgaccatgccctcctgatttgcagctgggaaattggcgagtggaggaacgccccggcatttacgcaacgagcataatgtaaacctttacggttttaaaagctctatagttgggcctacgctttagagtttttcattctgttaaggctttgtgtcttatgttgttgattttataatacaaggatctttcttcatctgttcctacgtctctacccattctcatccatttgcatggttacttctttatttctaatatggcagatccgatgacaagtccccccgatgtactaatacctgggacccgcctatcaacttccagcagaaacgaatcaacggaagatgaaggaatg

SEQ ID NO: 71108 - DNA, 477 bp, Glycine max
  unsure (1)..(477): unsure at all n locations
tagatgggctcccanagctaagggctgttagagaggatgatgtctaagctacgaaagagagtgaggaggtacaagccctaaaggcggagcttgaaagagcccgggcaatcaaagagaagttcaagtcaacgaccatcaaagtatgaagagtacgatgaactaagggatgtcaatatggccaccgccaaagccttggaacgagaaaccaagagggcccgaaaggaagaacacaaccgaaacaagttccaaggggctttatggggcaacaattgactcattgcacggagagggaagcatgggaatgggtaattgactcattgcacggagaggcaatgatgtggatggaccaaattgcctttactttgaatagaagtcaagagcttccccgactgctagctaaggtcaaagcaatggcggacgtgtactcggcccctgaagaaattcatgggctctacatgatttgatgtatggctcaca

SEQ ID NO: 71109 - DNA, 395 bp, Glycine max
  unsure (1)..(395): unsure at all n locations
agctattntaatttattattataaaggttgaggacagtaaacctatttttttaaaaaaaaaaaactgttgtgttgctatttgcagccacgtttatgttttgttcacctactttcttttcgcaaatctgtcattttaatataatattaatcacgggtatatttttgttttaaatataaaaggaaaaatatatatattttaatacatgtataattatattaaaatgaatttatagtatattgtttgtgaatctatttgaatatttattattggatgtctaaactggttcactgacaacatgttatatatattttaatatggtttacttgaaagtgttctatttaatgttaacaatttattacctgatatattcttaacatatgaagcgcttacttat

SEQ ID NO: 71110 - DNA, 445 bp, Glycine max
  unsure (1)..(445): unsure at all n locations
atcaaactcagctgataaaagctcaccgacatttcataagttattgcacttgttccaaagcctataaaatttttcagccacaaactggaagcattgttgtcagcagagatgttcacttagtataagatgaagagtggaactgggatgaggtaaagaagaatgatcaaactgtggtagacctatagcttaagtctcttgcttcaagaatcgaagaagaagaggattggcacagtgaattggtagacgatgcccctgcaagaggaactagatcactctctgatatttatgagaggtgcaatattgtcatttgtgaacctgcagatnttgaagcagcaaagacagatcaaaattggatggctgtaatgaacgatgaattgtctatgattgagaaaaacagaacatgcgaattggttgatgcgaccccagatatgaacgtgattggagt

SEQ ID NO: 71111 - DNA, 436 bp, Glycine max
  unsure (1)..(436): unsure at all n locations
agcttccaacctttcataggtacaaagacagattgaattacaaatccattatgtgtagtatcattacaaaagagggagagtgagagcaatataantttgaatagtgcgagttttgtatgaaaaggaaaagggttcaagaaccttgtgaccagnttggccaaagatagcattatctgctgcaatagttatatcacataccatatgcaatacatgccctcctccaacagcataacctgctacctgttttaacgttagaaaaatagtttgcctataacaagaataggagagaactatacacacatgatatcattattcattaattggaattttgcggcctacagtcgtacattgtgaaatatcgagcaggagacgttattatattttccaattatccataaactgaaatgcatgttatattacccacgaggtataaata

SEQ ID NO: 71112 - DNA, 361 bp, Glycine max
tgttcattccatatgagcccgaacaacgaatgagttgagacatacaagcaaattgatggaggatcatatgttgttaggcagcaacaaaacttgtaacgaggttggaattggttctataacgcagagaatgtatgatggagtcaatgcagtcttatggtgtgcaaaaggtcactaactatcatgaaagggataaggaagaatgagatatactctcttgttgcgcaaacaataattggcgggtctacaaatgtaaccattacatatagtgttgaaccaaactctgaaaccacaaattgagacatgtcagtcataaagagatggatgaattagcaaaacatgacatgtttggacatgacaagat

SEQ ID NO: 71113 - DNA, 429 bp, Glycine max
agcttgttatctaatactcagaagactaaggattaagacgaacctctttggaaggagaagaacgaaaccaatgaagaagaagcttgcggtgaggttgctgggtgcacggcagaagaatgaaagcgcggaagaaaacattctttaatacggaagaagaagaaaatgttgtttttttaaatatgttaacttttattttttaaatgaagggtactttaggaagttcattctattgctgggtgcacctagcaacagtcctacaatcgatgtgttatcagatttacttagtaatcttttcctgagagctactattgtcttctatttacactcgccacgtgtgtgtaatatcttcttttcttaaaaaatcccttttcatgaaacatgattatgatgattaaatacacaatgaaatctagtttctgttgtctaaaa

SEQ ID NO: 71114 - DNA, 475 bp, Glycine max
  unsure (1)..(475): unsure at all n locations
tcgncntcctagagttgagggtgagagaagaagaaatatcatttgttgtctttgcctaantaataatgaaccacaacagccatttctgatcctaataaatctccatgttgcatgccggccaaatgaaccaacacgtatgttagcagtctccaggaagaactagaaccttccttatccagacccacaaggacagtcaccagacccaagcacttacgagattacgtgagttgaaagcacatgcagcacatgtaaatagttggtaataggcacatgtgtaatctagctacaagttgttagggccgttactgcggttataaccgtatgcatgtaccattngcagtatacatatgactgcatcatattaaataaaggcatgcaacaaacaagttcctatcttagctttcaggaggcaccttccctcgaagaaagaatactctctttctctctcgttctcgatcccaccatctaacactgg

SEQ ID NO: 71115 - DNA, 447 bp, Glycine max
  unsure (1)..(447): unsure at all n locations
agcttgtagtatttattggtataattntcctgttccattangctnttgatgtctttagaggttacttcctcgntgacatcttttgtcttgaatggaattgccatgacaggtttattgttactgtctctgatatttggtagttgatattgtgttgtgggaggtaattccgattggattaactcaccatccttcacttgccagtttgttatgacatttgttgttggatcacctatgatgtcttgtttccaagggtaatctatatcctttctgatggcataaacatgaaaccaatcaaagataggacattaattttgactctttcgacaaattcgtagaacttgtcttggacttgtttttgtatgacccttgtatgtggaaaaccatctctttgtgttattatccgaaataaaatcttctacggtttcttatatgctaattgtcaataca

SEQ ID NO: 71116 - DNA, 383 bp, Glycine max
  unsure (1)..(383): unsure at all n locations
cgcgaganctacggacgctcatgagagctctcgttcactcgaatagcagattggtaatagcttactttcgaatnaaaaaatacataagtatctatagatatcatatcgattgaacattctattaatattctgcagcacataagtaataagttcatccaattacaaaacataagctcttctccacaaaaggtcatacgatttgaaaacacatatagagaagatgaacctgattggagcaattgttacgaatggaatgctgatagaaacaatgctgtgagtgagatactaaactcttggactataagattgaaaaactaccaaatgagagaaaataagacgcactctgatcatcttcagctaagactgaaacgctatgcatgaag

SEQ ID NO: 71117 - DNA, 453 bp, Glycine max
  unsure (1)..(453): unsure at all n locations
agcttgatggtgtcgagaagaaatcacatgtttgtcatcatcaaacagggagagaatgtgaatgtatgtatacatgattntgatgatgtcaaaagaagaatcatacaaggctcattttgcttcaagattaatacaagattgtttcaacaaacaaagccttgattcaagatttcttcaagatcaagccttgcctcaaaatgaaaagatttcaagtcatccaaggcacatgtaatcgattaccaatacatgtaatcgattaccaagtcacatgatagtgtgtaatcgcatacacttcatatgtaatcgattaccagagactctgaacgttgggaattcaaattntaaatgaagagtcacaactgctcaataaataattgtgaatcgatacactaactctgtatcaattaccgagaggattttcatgaatatcgccacagtcacatctatcatttg

SEQ ID NO: 71118 - DNA, 345 bp, Glycine max
actaagctgtcattattcatgtcccgaagggttcctttggtttcggcatttgagactggtgtgttacttttataccacctgtgacgtgcttaaccatttacttaagtatttctcgcttaattataaataaaataaattccagcgaacgtttgaattgcattatccattaactttggtcaaaatcaattccgaccgttcggtcgtgccgcaaccacgttggaaatcaaaaagaggtaaaaaataatataataatccaaaagacatcttttagtataataaagcggaagatcaatcggacgttttctctatgggatttctcattcctaatacaattgattaataact

SEQ ID NO: 71119 - DNA, 359 bp, Glycine max
  unsure (1)..(359): unsure at all n locations
gctttttgtcgatggtgcctaaaaaatntacaatgcagttcggctaggattcttcgtgcgaactgaaccgaagttgtgtttcggccgactggcatgttctcattntgtcggccaggaaaacattatcccacctcggcataaaatacatgattcaccgatattgacaggaaaagaaaaatgctagccgacgtctgccaggaaagatgaccgaccgaggtctgaaaaagaagcatgaccggatgactccggtcgaacatattctaacagatatcatcctagtattattcacggatggaatacgaaaaacaatagccgacatcggtgttaaatagccgcgactgatatttttcgtgcgacat

SEQ ID NO: 71120 - DNA, 445 bp, Glycine max
ggagaaccaagccaatcagaatgctagacgaaatatagatgggtatatatgtttcaatggccggaatgacggaccgaggcagaaccgggttgagggagtaaagctcaatgttcctcccttcaaggtagaagtgatccaaatgcctacctggactgggaaatgaagactgagcacgtatttgcctgcaatgactacactgatgcgcaaaaagtcaagctagcagcagctgaattctccgactatgcccatcgttggtggcatacataccaaagagaaatgttgagagaggaacggcgagaggtagatacatggactgagatgaaaagggtgatgagaaaaaggtatgtgcccactatctataacaaaaccatgcgacagaaactccaagggcttgtccaagggaatttaaccgtggaaaatattataagagatggaatggcgttgt

SEQ ID NO: 71121 - DNA, 478 bp, Glycine max
  unsure (1)..(478): unsure at all n locations
cttgagatggtatctggtcttagaanttaatttgctaagagctctttctgtgcgattggccaacctgaggaatggtgtagtcttgctgctgactacttgcattgtggccccctgcagctcccattcatatacctagggatgcctataggtgttaaccctagaaggaaggtggtgtgggagcctataatcagaaaatttgaagccaaattgaacaaatggaaccacagaagcatctctatggctggcagaattaccttaatcaatgctgtcttgacagctttgcccttgttttatatgtcttttttcagggccccttcagcagtcatcaagaggctcactactatccaaagacaatttctttggggtggaaacttggaaggaaaaaagatagcttggatctcatggcagcaagtgtgtgctcctagagaaaagggagggttgggaatcaaagatatcaagggctttaatagagctcttc

SEQ ID NO: 71122 - DNA, 396 bp, Glycine max
  unsure (1)..(396): unsure at all n locations
agcttatgcatggaaaatgtaattatgaaacttttatgcctgaagaaacaccatttcctagttaaccatgcattangtaccatgttcaattattttttaaagtgaaacgggtttatgatcccaacatggttggctcgtggtgcctaacacatgaaactaagaatgtagtgtgaagtttcacgcttccccttttttgtttttgtagaggaaaacacaaggatgagcaaacatgaaaacaaatggtatgcaattttgcagatcanaaagttttgtgaacgcatatgcatgatgatgccatgactcatgccatatgtgaggctggaatatgataacggacaaatgcaggatatgtccattatgatgttatgacgagatgcttatgcgatgcatgatatg

SEQ ID NO: 71123 - DNA, 272 bp, Glycine max
  unsure (1)..(272): unsure at all n locations
cggctcgagggcttgcccgcngcagatcgaagaacgatgattatcttatgaagaacgccgaagaacgggtgaaacctttgcgagattcctgagggaatacgttaccgaaacgtttcggaagcgctcgggcttagattttgttcacggcaactatttgtgcaagcgatttcgatagatagagaactgcctcaggggcaggacatcctccttctatctttacatcgctatctataggttcttccgggaaggggccggcgaacatttcgcgcagg

SEQ ID NO: 71124 - DNA, 322 bp, Glycine max
ctggttatcattacctcataacacatggcatgtacctctgtctttcccctctggaggggctcattgctgcacagctctcgagcttctcccttgaagatctccatgtcatttgggagaatctacagtacaatttgatatccgcgtttgttggttccactctcattgtatttttgtctaccctatacattatgactcgtccacggcccgtgtaccttgtcaatttctcatgttacaagccacaagaagctcgccaatgctcgaagaagatattcatggacccagcccggaagagtggttttttcacacatgaaactcttgaatt

SEQ ID NO: 71125 - DNA, 335 bp, Glycine max
agcttacccatttctctaaaccgaccttccattctcgagggacaagtggaggtagatcatcttatcttggttaccatatataaaaaataataaacatcgtttttaagagtacaaagctgaagtattaataaaattgttaaacaaagaaaacttcatattttgggggactaagtcaacaagccggctagccctcataatacaagcagcttctacctgcctcaaagactgtaaacaatgtattggagaaaataaatcgaaaatcctaagtctaataatcaaactatgggtcacatgatacaactcatatgatgcggtccttcatgtctcatggagct

SEQ ID NO: 71126 - DNA, 479 bp, Glycine max
  unsure (1)..(479): unsure at all n locations
tanggtttttagaagaggagaganaggaaaagccttgagctctacatcaccacctcaccaaacccacgagaacaaaatccaaaaccaacacaaatgagagtttgcacaaccacccattatgggtcaactaatagaagaggaaagaaggaaagaaaaagaactcatcatccaacaatggatcacatgctcaaaaacggnggaaataaccatgtccttttgaaaggaaaacaagtctgatccttgatagagctctttgaagtggaagagaacatgaaagaaaagaaatctttgagagaaagaggaaaggagagcactaggttcctttgagagaaaatgagagtgtcaaaagaaggaaaaaaaggtaaggataatgaactctccagactaaagcctaacccaaaccaccaaagtctcatacaactatgaatctcttgcgacaacatanaacacaatccactttattttatattttcaataac

SEQ ID NO: 71127 - DNA, 382 bp, Glycine max
gcttgctctaaatatacattgatgtttgatttatgggatgaggttatatgccatcttttgctctaagagtaatgtcccactaaaactaactttccaaatgtttgccttcgcaggaatggcaccgaggaagcttgcctcaaagaggtctatgaaggacaaggcggccgaaggaactagttccgccccggagtacgacagtcaccgctttaggagcgttgtacaccagcagcgtttcgaagccatcaagggatggtcgtttctccgggagcgacgcgtccagctcatggacgacgagtatactgattttcaggaggaaatatggcgccggcggtggcaccacttggtactccatggcaagtttgatcaaaaatagtcttgagtt

SEQ ID NO: 71128 - DNA, 425 bp, Glycine max
  unsure (1)..(425): unsure at all n locations
tctagccaaatggacttaccttgaattaatacctttgatagttctctctgagcctattatcccctttctttgttgtgaagctcattacaagccttaagtgaaaaaccatgatatcaccttacccttaaggaattttggagctttggaatagttttgggaataagtgtgggggggtatgtttcattggaaaatatgatttttggccatggttaatgttttattttggccattcttgatgtatacatatattgcttagttctttctttaatcttcaatttcgtactgctcaatataaaaaataanaaatataataaagaaatgatatatgaataataaatataaaaaatctagttgctgcaaattctgcaatgtcgtactattcagaacaaagaataagaagaattctaagaaatgaagtgaagttg

SEQ ID NO: 71129 - DNA, 447 bp, Glycine max
  unsure (1)..(447): unsure at all n locations
tctttttgggaaattccttcccctataggagtatttttgttattaaaggtggcgntcggtcttggatgtgcaacgagttgattttgtggccgatttatgggcgatctttgtggctgattgagtgttcttggttggtagggtggtgggtaatgggaaagactgatattgactgagtagtgatattgttaaggattgcagccacaacatgaggttctccttccttattcctctggttggtagggtggaggatattgctacatgggattataaggagctagtggaaagtttggccatgccagcattgcagccacaacatgagattctccttccttattcctctcatcactccttccgagtcccccattaccaggattcacagaaacaacataattaaagttccctttccttagacctgcttcaattctctcgtcgatagtcactagatct

SEQ ID NO: 71130 - DNA, 442 bp, Glycine max
  unsure (1)..(442): unsure at all n locations
ggaaggtgtgtaacccatcaacttctcatagtagaatactggttatgtgtctactatcattgttatcatctccttctccgtcattgggggcactatttgagctgccaaatcccttcacccttggccgtattctttgaacgactctccttcttgcacaagttctatagctgcattctatccaaagccatatcagaattatactagtactacctaatgaaggcaaccattatgttcttccaagaacgaacccgggaagattccaggttggtataccaagtgattgctgccccagccaaactttcctggatgaaatgcatcaataattnttcatctttcgcgtatgccgccatttcctgcagtacattatcaggtgattcttggggcaagtagccccgtgtacttatcgaagtctaacaccttgaacttctgaagaatgaacatg

SEQ ID NO: 71131 - DNA, 303 bp, Glycine max
  unsure (1)..(303): unsure at all n locations
tgcaagcttgtatacaattgcatactgttttaagagcttacatngcncaaggcccacactttggctgcgcgaacataattcactatctgaacgacgaaagaacaacccaatagacttgatttattatcaatagatcaatgtcgcacatatactacaaattatctactcgtaatgaactggacctactacactccatatccatactagcgtcacaagcatgtcttcaccatcctaatatgcatcttgttctacatattgatcatgagtaatatcacttatggcagaagttacatatactccatc

SEQ ID NO: 71132 - DNA, 426 bp, Glycine max
atcatgttttctaagtcaaagtaccgatctcataaactgtgtatgattagaagcatgaatctaaagttagctataggcaagggagcagacatttgaagattcatacgactaaaggataatcaaaacatgcaatgcaaaacacaaaagagtctacactgtttaaacatagaaataacaaagaaaaatgccatacatcaatttacagaaaaaagtacacattcactcttatttaaatactcttttttttagagagtatattcttctctcatgaagtgatggagttcattatttattcttatattctacttttaatagcaactaaacaatctaaaaatttgtattcgacatatatattttcatcttccaaattcacatctttataaaaaatcttataaattcgaaactaatatgcatatgtactaattc

SEQ ID NO: 71133 - DNA, 72 bp, Glycine max
cgcaggcgacggaggaggaggatatccagaccaacccccgcgggggcgaagcgaaaaaagccgcagggaaaa

SEQ ID NO: 71134 - DNA, 388 bp, Glycine max
  unsure (1)..(388): unsure at all n locations
agcttcgagcagggactgtttattttatatgggggatttggaagaagatggaagagaacatgttagtgagaatttagcgataatgtagtagtgtactatgaagcatggactttgacacaggcattagacacgacacgaacgcatacactttgacacgactaatgtctaanatctaggacacggggatactgcatagtgcatacacacacaaacataaagactctaatgatatgaactatgaatacatataacaaaatatctaaattgatgttcaactttctaaaccaatcttctatgttcttcaagtgtattagttggtaaaggagacaacttagtgtcaagcaacaaaaatagtttttacattgcacttatataaatgttgacaagt

SEQ ID NO: 71135 - DNA, 167 bp, Glycine max
  unsure (1)..(167): unsure at all n locations
tcagagtcacctgcggctgcagctntcnattagtgtaccanactaccgcggcttcagccaagctatctttgaataaagtgtattaatagcttctcatgcttagagtgtgcacccatcttgcgacagtacatcttgagatggttcttgggacaagtcgtccctttata

SEQ ID NO: 71136 - DNA, 306 bp, Glycine max
  unsure (1)..(306): unsure at all n locations
tagagnttatctcttttatcttggngagagtgattctcctaaattcttgagtgattcaagaacaccctggctgtatcaaaggactttcacaacctttgtngtgtgccctcgctggaaagagtgattctttcctttctatcatctccacccttggtctttcaaaccacaattccagaaaatccacctctggcccaaaatatctcgtgaccataactnnccatttacacactcaaattaagtgattcttgagcctaaatngaatttcaaaacgagacctttcacctcgttttggaatcacctcatttg

SEQ ID NO: 71137 - DNA, 237 bp, Glycine max
  unsure (1)..(237): unsure at all n locations
ctctaggtcccttctctatctctctatctctctaccctttctcttgcacggngggtgcttgggcctcgaaagccaagcctaacatatcaccaaacctcaataaaaacaaccctttataattaatcaaaaaagtattttatacaataaaatatattntgcatttatngaaataatctacatttttattatttnttttcacagtaactatagactacatttcaaatntngtaataattt

SEQ ID NO: 71138 - DNA, 221 bp, Glycine max
  unsure (1)..(221): unsure at all n locations
tacgtctagtcatcaatcaagaataatgcgtgtacttgtctagccaacgatggggatcactattgacaacctatgctggaaatgtaaggtaaacagttcaatttataagagaggttaacatgtacgcgtctagtatgcgcatcgngtctattactgttatattattgctttgtgtgcaataatacaaggctacgagtggtctactggaatgaattcatcca

SEQ ID NO: 71139 - DNA, 267 bp, Glycine max
  unsure (1)..(267): unsure at all n locations
ttgttggaccgcttctgggaatatctctgggattggtcgacaaagtacaccatngccnaaacccattgggaaaatcgtaactgtggcggcttgaaaatatcagcatgaatgcttgagcgggtttttggtgccaaacccttagccaacatcacgtatcccatggtatacctacggatcaatggactgaaatctcttctttgtcagtctgaccaaggtctggtgagaacttagatcggaggtgagggtgtacgttggctttgatttgaa

SEQ ID NO: 71140 - DNA, 315 bp, Glycine max
gataaactggctttcgggaaaagagctagtttgaattgaaaagtacgtgggctacgctatcatcgcttaggcacttagcacactacgcaagaaattggcgacataaataaagtggcctacacacaggcttagccctagccgaactggctagccattactattggctacgcaaggggctaccatatccattcaggctataagctgcttggctattaggacacttaacatctacgctgaagcacatgccatacccatgccaatgaaaagctaaacgaaagacactggctgaccagttgcttggaaatatggtaaggg

SEQ ID NO: 71141 - DNA, 79 bp, Glycine max
gctcctatacattatataacatagtgtttgggtaaatgagttgtaaagagaacttaaccggtgaacgcctgctagatga

SEQ ID NO: 71142 - DNA, 95 bp, Glycine max
  unsure (1)..(95): unsure at all n locations
tgctgcagctcgaaactatatnntctaatgtacctgctgccattattctattttaaganaacatcatagtattctatgactattgagcgctacta

SEQ ID NO: 71143 - DNA, 524 bp, Glycine max
  unsure (1)..(524): unsure at all n locations
gctcaagtgtatgggagttacataccgagtgacacgcccccatgttctagtatcnccnctcatgagaaaggacgaatacttactaacgaaagttatactattttcatgcaatataaggatgaaacatggtaccactaatgcactaaccgtggataactaaagattctaagccatcccctccagagatgcttaaaactctttaaccattctatttcccccatcagggatattcatcatggtctctgcaccccacatgtacatacatatcacaaatcacacatcatcacaatgacattttcaacatcaacaacatctcatctaaatgcattatcaacatcaacatcatcttatctcaatgtcattgtcatcatcaatatcatctcgtctgagtgtattctactcatcacatcatctcattcaatgacatatcaacacaagaacatctttatatcacatatcataatacacatctctctatatatatataacacacatatctcgataatatgcatatatctcataca

SEQ ID NO: 71144 - DNA, 492 bp, Glycine max
  unsure (1)..(492): unsure at all n locations
gtgactcttcacattngaatttgaatttctactttcaaacacactggtaatcgattaccaaatcattgtaatcgattacaacattttgaaatgaattggaacgttgtanattcatgtgaaagctttntgaacaccatcttgctactggtaatcgattacaataatctggtaatcgattaccagagaagtaagactctgtggtaaaaggttttgagaanaattcatgtgctactctatttttgaaanaactttntaatacttatcttgattaagtcttctcttgattctcgaatctcgagtcttgaatcttgatcttgantcttggacctgaatcttgaacttgatcttgattctgaatcaatttctcttgacttgagtgtctgatcatctgaaccatcttgatctgaatatatcttgtatataagatcttgattgagctttgcatacttgtatataaactcttgataatcaatcatatgagctgtttcatct

SEQ ID NO: 71145 - DNA, 370 bp, Glycine max
  unsure (1)..(370): unsure at all n locations
gatcttaagtgacgcggctgcagctttcttacaatcatctgctactgataacaattcatatgcttnttacattcttgnnttttcgttggctaacatacaaacttgctcaaactcatgataagaaacacaaattcatcacaatcatgcactcaatccaaaatacagcatacaacccattttcacaaaaagatataagtgtttcacttgcatgtcatcaaaaaccaagttaaactatncaaaatacttcagaataagcaaaccaactatttataaatagaacttaacaaaaatgacttactgtaataagactattaataaaataataataaactaaatggcacaaaaatgtcctcagggaattaaaaatcct

SEQ ID NO: 71146 - DNA, 219 bp, Glycine max
gcttggcctgaagtagacacaagtcttctgagtgacatggataactatgaaaaagaaaggtgtggtcaacaacgatgtgataatacatctcttaagaaatatccgagcactgggggaagaaaaactgtttatccacttagagacaaggactgcgccgagttgcatcttgggggcagtcaagaaacaaatgaacatggtgtgcgaataagactagacgtg

SEQ ID NO: 71147 - DNA, 507 bp, Glycine max
  unsure (1)..(507): unsure at all n locations
tcagagtcacctgcggcatgcaagcttcttcctctgtcacagcgacccattcagctcatccactcatgtgatgttaatttggccattatttcacttgacttattggaaagctattancacttntgaccattcacactaatgtaactataaatctgataccctgtgtggatggaagctatcaatcaactatttcttaaacgtactngtgtggatgntctatgccaaaacatctggtgtgnttggataaaatgctgcatgtcactgccaaatctctntttaaattctgaatgattagtctcttgatttattttaccaccattgcatatcctgtaaaaaannaaaaaaactaaaaactgtattgatatgactatatttacactccttagtccatattttgctgangaatctactgattgaacataaagatcaatttagtgatccttgtggttattcaacaaaattgcaggctttgtgactgaatatctgacacaagcatgtttgtggcta

SEQ ID NO: 71148 - DNA, 190 bp, Glycine max
tcaacgaccacgactccacgagcccatctcgactctaacacggtcccacaatcctccagccgccaaacatccaggcatcaacaccaaacagatgaggcatcaaccaaaaaacagggagaggcagaaactcgccaaacacatcaaacacagcttcgaccaaaaccaggacagttctcctcgaacgcaccgg

SEQ ID NO: 71149 - DNA, 316 bp, Glycine max
  unsure (1)..(316): unsure at all n locations
atgggcttagcgccagtctcgtgcttagcgtggctgaaggcacttgtggcttagccacaactttgatngtgatgctctggcagattcttctttgcgcttagtgtgctgaagctgcacttagcgatggatatgcgcttagcccaactgctactttttgcaattcaaaacttagcctctttctcacctganaatgcacagatntcatcattaaatccaatggaatggtctaggacagtgtaacataacaaattattacaaattactcaaatgaacanatgggactatacagcttgaaatgatctatcaaagtatcgat

SEQ ID NO: 71150 - DNA, 189 bp, Glycine max
atacttattgattgattgaagttattactgtaattgcataggggtctacggttacctatctgagaatatgatgtagcttaatgcagatatggagctccctaatggcataacctcttgcgatactgatccagatgagtctccaggcccttactcacttacctaacttgctctgccgtttgaatgagaatg

SEQ ID NO: 71151 - DNA, 116 bp, Glycine max
gtatttttatgactcatgggcttaattaactattctatacccagttatatcattactataaataaccatggccactgagtgactcgctgctatgatcgctcctacttatatatgca

SEQ ID NO: 71152 - DNA, 276 bp, Glycine max
  unsure (1)..(276): unsure at all n locations
cagtagagtatcaccatgagctccgcatgaatgttagttggatatccgcagtgatctatggttcaaggccatntctaatgattccaccaaacccagaatgacccagcaggttaccaatagacactccatntgtattagctcatcataataaggaccatntggagccttccattcaacatgaatctctggttntccacaaagctggaacaccatattctgagaatatagcatttaatttagatgaatatatcacacgagacatattatagatcaaac

SEQ ID NO: 71153 - DNA, 309 bp, Glycine max
  unsure (1)..(309): unsure at all n locations
atatgcatgtgttttatgacgcatcaacaagaatcaagccaaggctattgtgcaagcaatcaatggngcanaacacaccatatgatatgatgatggatggctcanattctcacaaaggtaaactcatcactttcaaatngagctttcaaaactatcatgacatgtagagaagaatcaagggattcaagtcacaaaatgtcaagaacttttattntcaaaacaattacccatttcttgaacatatccctatattcanagaanaacatgcaaattcgtacgtgcacaccaaattgacccataatattaaac

SEQ ID NO: 71154 - DNA, 212 bp, Glycine max
  unsure (1)..(212): unsure at all n locations
cttaagtcgactgggctgcagctgccatgaaatgaataaggcatcagatatnctatattgttgttctattccgttaacatatgccgcttgatatctatctaaacatacactctaactcgtagaggagagagccaacttgaacaacaggacacaagaagattaacgacagagcttgagaacnaacatggagatatgacaatctcatgtcattg

SEQ ID NO: 71155 - DNA, 138 bp, Glycine max
gaatatgatactatcaaacgccaattctataccatataacaatacctgagatattcaacaccaaatatattaattattaaagacatgtttttactcactcatgaacttccaagattctaacatatcgcatgttacact

SEQ ID NO: 71156 - DNA, 364 bp, Glycine max
  unsure (1)..(364): unsure at all n locations
ttaagtcaccgcggctgcaagctgggacataccttcgacaaacacggncgtgtttctgtcttatttccatatntaangtgggctgcagcactggctccgcttccctaactgtactggaggcgcgtgtcgtggctttatcctctatggttttctggagttttaacatgacctccgagatggaagccatttgatcttttaaggccaatagaccgaccttcatctgttcctgcacgccctcttcattatccatttttctggatcgagttgtataggggtgccctggtgttntcttagttatgatgaaattcctaaagaaataaacaacggtgagtatggcaccaaanacatgagtattccaatgatg

SEQ ID NO: 71157 - DNA, 156 bp, Glycine max
gctgcatgtctgtgtttaccgttggattggttgctatattggctgaactgttatatcttatagatgctaaaaaaaggttcatggggcggtctttcctgaaagggggggggggggggcataaaaaaaaggggggggggggggaatatctaagttcat

SEQ ID NO: 71158 - DNA, 409 bp, Glycine max
  unsure (1)..(409): unsure at all n locations
ctgcagcttggangggtcattccangacacatacgtggtctactactttatctctataaagctganaggcctcaagggttcctgcaattgaatgaaaatatcaattctgtgatccttagaaacatacatgatcatttattagaggttcttgtgaggaagtaactcgcatcaaatctagagggatcaaacttttcacgatctgagaaaactttctggtcatggtggatagaaataacatctagggtgatggaccaaccttttctaactttataactcgcannagttaacacattggttttagtctctcattcaaagaacaatttcaataggcaaacattatataccatagnntgtccattaatntgtattgcatataccaccaatttcaaaatcctgggatgcctttctt

SEQ ID NO: 71159 - DNA, 197 bp, Glycine max
  unsure (1)..(197): unsure at all n locations
tataatttaatttgaagagaaaatacgttaattattaacaataaatataaaataattgtacgctatcatttcattatgaactatcttatgataaatgtattggattttatattaactacctaagaattcattctaacaataagttttaagtatctaatagtggaaagagtnttatattaaaaggtagctattaaaaa

SEQ ID NO: 71160 - DNA, 361 bp, Glycine max
  unsure (1)..(361): unsure at all n locations
atctctgagtcacctgcggcatgcaagctngtcagtgtacctgaagatgctattaagcttannctgnttttattcttctttatctgggaggccaagagatggntgtgttcattcaaaggcaacaatttaaagacctgtgatgagggtgttgagaagtctctaaaagaatattctctataatctaaaactggagagggaaaagttgtaatttcttcattccatcaatttcccgatgaatccttgagtgaggcattagaaagattccgtagcttgctatggaaaactcccactcatggtttttaagagcctatacagttgaacatcttcattgatgggttatggccgcagtcanagcagttac

SEQ ID NO: 71161 - DNA, 282 bp, Glycine max
  unsure (1)..(282): unsure at all n locations
agagtgaaccttgcatagagttcactcacacagagacannatacactatgactcaatgcanatggcaactctggcgcagacggaaatctagcttagataanttttatttctttgtcaagctntaataaatcaatagcacgcacacacacacacacatacataacacgaaatttatgataagaactatatctactgagataaattcatacatgacaaacgaacaacatagagtttcttggcagctaagtgaattntagagtgtacaacttactatntaatatc

SEQ ID NO: 71162 - DNA, 488 bp, Glycine max
  unsure (1)..(488): unsure at all n locations
agctntgtgtaagagacananatagtagtggaaaatactagtattnnttgtttgtgaaagaaagtggaacttggtagaatttcaagagttggacgtagtctcattggtagagataaaccagtataaactccttatgtctttgcttctatgnntgatctatttaattgaccttgagttgtgttttgtgtgacaccctctaccccatacatatatgtattaataataaaaggaataaaaattcaaatattaattaagagtatttaaaacattcttttaattacaagcctttcagaagggtaaagactcacattcacctttctaacatcataatanaacttgtctatataaataataaattcactttgcctcanaacaagggtcgtccaaacttcatacnantaatatagaacatatacnctaatgtcacantctatcagagcatttgtgtctttgtgtctctagcatganggtcttcatagtcattcacc

SEQ ID NO: 71163 - DNA, 394 bp, Glycine max
  unsure (1)..(394): unsure at all n locations
gcttataacaagctaaacatgcaaactaaaaactgaaattataactgttacttatatataaacccanantatagagggtactaaaagcaggaaatgataataaaagtgttcanaagaccaggaaatanngataaaagtcctgtcatgggtccctgtcgtgcaaaagggacataatccatagctgctgcatcatccttctccttagagagctccaataccacatgtgtcacttgggatgcctgcngagtagagagctccagcacaggtgtggtcactggtgatgcctgtggagtcgtctctagagtggcctncgcagtgtccttctgagtagctgggtcagtctctgggcaacctctggcatgtctgggctctggatatctggtgtggcttctgg

SEQ ID NO: 71164 - DNA, 246 bp, Glycine max
  unsure (1)..(246): unsure at all n locations
gattcctcttaccactggctactaaggaaggtttatgttctttctttctagactactcctctaaaggagtaatcttgnggttgactctaaaatctactactaggcggggaaggatcanagtcctacacagttctaactcaagttgataaacatatgggcttgacacttatcttgcaacccgtgggtgctctcaataagaatatctcatactcccttatcaacacaacatcactctaccaacaaact

SEQ ID NO: 71165 - DNA, 301 bp, Glycine max
cgtgaaccttgcaaatctcacgaaagtacgaacttcgaaactcgttaatttttacgaacattttcagcaatcgagaaggagtgctagggctacctttttctactctcctatttacaaaaggaatgttgcgcagtgccgtgccagcagcagtgtctcaacacagctttgagattttgaggcagggctgggtttgcccattactaacccttattttggatttttgaagtcgactacatgacatctgttttcgagtcgactggtctactccttatagagtcgactctatacacactctgatcgg

SEQ ID NO: 71166 - DNA, 149 bp, Glycine max
cctcacttaattatatcgtacctactgaatgggcacttgcatatcatatcatttaagagcaggttgagtcatgttggacatattatttagtgagtccaccgctaactaatatctgaattgctgaagaactgtagtattcactatggata

SEQ ID NO: 71167 - DNA, 463 bp, Glycine max
  unsure (1)..(463): unsure at all n locations
tcatcttctactgaggttcttgtatccaaattcatctcctattgattgtgagtatagncccagtacttaaatcttaataatatatttanaacataatattcatatttcatctctttaaagttagaagtaatatttaaaattaatagatagagcagttatgtatgtgtgtgttcgttcatgaattagtgtgtatttatcaacatttaatctcttgatgttctaaatcataattaatgtctaactgcatggatgtactaaaaacatattgttataatataatatcaacaatataaacaattataaatgggaataaacaatttatgaaagcctttaatacatactggctaataaaaattctctacattataagtanacttatatatatagtaatttatcatcatagagttaatagatatatatatcaatagaagcaataaagcccttatatactatggatttacta

SEQ ID NO: 71168 - DNA, 141 bp, Glycine max
  unsure (1)..(141): unsure at all n locations
gcctattntcccctttctttgntgtgaagctcattacaagccttaagtganaaaccatgatatcaccttacccttaaagaatntcagagctttggaatctgtttgggaataagctgggaataagtgtggnggggggggggg

SEQ ID NO: 71169 - DNA, 198 bp, Glycine max
  unsure (1)..(198): unsure at all n locations
cattaataaacatgggattgatgattntcatttcaacttcttgtggtgtgtctnttaattctttagagtacacactctcgatcttgaatctgggagccattggctccatcaatggggtaccataagcggttaagtaaaatgaacataataacacttggntaattggtgcacttaaaaatcctaagcataaacatgcat

SEQ ID NO: 71170 - DNA, 506 bp, Glycine max
  unsure (1)..(506): unsure at all n locations
tatcaccattgcacctttcgcatcaactaatttgtcactgtgttgtgacagagacttgaataatccaagtaactaagcaagtgtgtcgtaatctccagaaccagntccttcatcatggacgatcccattcatcaacaccaccagccctggagtgggactgggcccaagcattttagtgcngccgnncgtgaggtanggcacgactgcggcaccagaattggaggtgcaatcgcagtggtgaagggagaaaaaggatcttangaaagagaaaagtgtgaaaaggaaacaaagcttannggttcgagagagagaaaganggtactgagaagtgagcttgcganggtcttatgtaaaaacctaacatcggttttgtgttgagctttacaacatcattttaaaaaccaatggtaaatcattctgtaacatcaattntctaaaactgatgtaacatgacatttattacaaaatgtcgcgggcttttgtacatcattttcatannatcatgt

SEQ ID NO: 71171 - DNA, 316 bp, Glycine max
  unsure (1)..(316): unsure at all n locations
gtctatatatgttagttntggaggtatttgtctattaagaacataatgntaaatgcattaatcattntcacagcatcagagtgtgtcaaaaatatcggcacacttctgatgtatcattcattntgccaatgaatatacatatctcgttcaagtaagttcatcanatgtngcatttccattttacaacctctttgagatgaatgatacagagtccttgcattatatactggttttaatacagtcaaatttctttcattatgctctntgaatgtgaacaggatattccttatanttaccatactcttagtcatatcaa

SEQ ID NO: 71172 - DNA, 246 bp, Glycine max
  unsure (1)..(246): unsure at all n locations
tagtgaacctcacatagagatcactttcacacaactaaattacactaccacctagtgtacaacacaatnttggtacagatgagatttagttcaggcagttttcatatctctgacanactagaactaaacaaatatntacactaaatatagacatatataacacanaaaatatacaaataataaactanatcatatgaacacanaantaantactcagtacannatntcattggctaactcatcaca

SEQ ID NO: 71173 - DNA, 484 bp, Glycine max
  unsure (1)..(484): unsure at all n locations
agctntnngagtttgcccttaatagggttttattcttctggtatttatatctttttttctatagntcatttcatcatcattggaactatagctgcccattataaaatagcttaacaatctnggctactgcttctgaaccttntatttatccttgaagtagtttaattcttttttatttgtgttcaactagtgaagagtgaagactgaagttgttctatcagactcgttgattttcctttcatttcgacggaagcctaagcaatacactggcactgaatngccagtaagaanaattggtcatgaaacacacacacacacacacaaaccctaatgacacacacacacacacacgtatgatagaaacacacagacacacactgatgacacacacacactcacacactcatcatacanagacacacacacnagttngataacannattggtcaattatacatgcagaaattattcagttctgacttgt

SEQ ID NO: 71174 - DNA, 300 bp, Glycine max
  unsure (1)..(300): unsure at all n locations
tctctaagtgcctgcggctgcagctcaacaatctagatacatcttcttcaacctttgtcattcttgactcatttcattgaagcgcatatcactgcattncaagtgtcaacctctaccaacaaggttgaagaccgtcaactttccaagcttcgaaagagagatgaatctctcctcatgtccttctcacaacattttacaccctttcttatcagagccatcatgctctatataccaaggatgtatactgagcgctatangaatgactctgatgaactaggtcaaatcaaaggagtgagtgtg

SEQ ID NO: 71175 - DNA, 292 bp, Glycine max
  unsure (1)..(292): unsure at all n locations
gtgagacacctttttcattcaggataaatggatggtgtctataacttactatctnttgcataattcttcgcgtacttagagctagtccttacgatcaagattttgtgacatggcgtcaactaacacagtagagccctactactgattggttgcctttatatgcttgaagagtagattatgttgtaagaaatacttactgacctataggtctataagtatttggccacatacactcatggagaagcaacacaatttggatagttctctcttaatgtaacagctccagctatta

SEQ ID NO: 71176 - DNA, 294 bp, Glycine max
  unsure (1)..(294): unsure at all n locations
attacaagcgcttctttcttctgaacacacatggtcattaattcattgacagaccatttatcttatgtgtgttgtaagaaatcttaaatggcccatattcatgccgaagggtgttcanaatgaaatgcactangaaggactcagacatatcaacctctagtttcttaagttgagctgaaatatctcgcattttcatgatgtactcacgcacacctttcacactggtgagccgaagagaagaaatcttatgatcaggtgcttgctaagtctatctgaagtgataactgtcattaa

SEQ ID NO: 71177 - DNA, 224 bp, Glycine max
cttcctccagtcttggcttgttgcattttcaaccggactaagaaaacgcggagtcctcttaatcagatttgataaaactataactgtggaacggcgggactctcttaacagatatatctcatatgacccggttgcgtatttcaacctgttagaaccacaagtaattatactctgacggcctttttgcaaaggctgtcctgggtaagacgaaccctcgacgactt

SEQ ID NO: 71178 - DNA, 338 bp, Glycine max
gtgaagagcgcctcattagaataacctggaagaagacttcccccaaatgaccttgattaaacttggaagatgttcatggcgaaagaagaggaaaaagaagaggggggccgaaattgagaagaaagggaaaagttgacttgagtgtgttacaaacttattataagtacacagtgtcacatgtctattataactagactcctgaaacttctgaaaattctgaaagctactactacccaccttatactactactctgaagctctagagatctaaaagtactactcctcctttatgtacgcctctgataagtgactatcccccttatactactaccctgcaa

SEQ ID NO: 71179 - DNA, 447 bp, Glycine max
  unsure (1)..(447): unsure at all n locations
ctggagctcatatattctcttgtgtcttggcctggacgtataagttttcaaaaaatngctgtctggttttttgtttgcatatcctgttttaactgcatgttcttttcttctgtaactgcaaaaaaatatttactntgtgagtggcttctaactnctaataatcttaacaatttttaattaaggaatgatgcccatttgctgatgcatgaacaaatgaatnggaatccttccaatcctttgaataacttctcatgctatcatgcatgaaggaatatagtgcaatttattcatatgccgacatatataaattcttgacccaatcaaatatgttattaacttattatctattagtatgaagttctggtttgactggtacatttcatgtagaagaaggtggatctgagtatccaaacacatgccaggagctgatcacaagcaacccaatca

SEQ ID NO: 71180 - DNA, 222 bp, Glycine max
  unsure (1)..(222): unsure at all n locations
caatctgtaatacaaaacaatgcattatggatgggtgaatccataatgcaaaaactattntccattctccagccaggtaaccactatttttctaataatagagagtctctcacttaaaacagcgaagaagatcatattgtggtgggacttgatggcgttgaaggaggcccacgacaagatgatattctctagcgatggaggccgcggtgagggtgatctcta

SEQ ID NO: 71181 - DNA, 436 bp, Glycine max
  unsure (1)..(436): unsure at all n locations
acagatgagcctctacattatagtccttagtttcctttcttctaacataatacttcataacatatgtaattgggcctagtgttngctggcccaactcctcccttnctttngaatattagaaagacctacggataaaggagttggagtctccaaacaattagaatgaccccttctacaggctaagcttntgttaaaaggacctgtngttttttttgccaacaaatatcatatatatatataaattcagactaggtgactgaaagacaatgataagacanggcaatcagtctgaccccactaggggaataataacagacccatctaaacattagcattgctttagcaagtgatcgaggcaacatattcaaacattagcatgctccagattacatttcatagncttctcaaaaaaatatatcgctgatattgagatgta

SEQ ID NO: 71182 - DNA, 190 bp, Glycine max
  unsure (1)..(190): unsure at all n locations
cactccacgtaggcctncggatcattctttcctttaaatggaggaatgttgagtntaataccatcaattccggttgtgtgtaagaacaccatcatatcctcttctnctncntttttcttcattatgatctctattctccatttgatccaacctctcatggagcgcatcnatctcgtggttcattaacctc

SEQ ID NO: 71183 - DNA, 342 bp, Glycine max
  unsure (1)..(342): unsure at all n locations
tcttaagtcaccgcagctgcagctggaatcgatacacccctggaatcgataccagaagtcctatggtcttcctgacctcgttcaagcctggaatcgatacaccccgtggtaatcgattaccagagaccatcttagcctcctgtcttcatctttaggccttgtaatcgattacccacccttggtaatcgattaccagaggccataacccatatatcacacaagattcacagctggccagccaccacacaagcctncttgctntgtggtcctttgtccttttatcntgtgactgccaggagctcgcctgcttangtacatcacangttctcactgacttgacta

SEQ ID NO: 71184 - DNA, 279 bp, Glycine max
  unsure (1)..(279): unsure at all n locations
cgagcccaaccgacgttttgtttcngncaaaactggcatgtttccatttattcgaccacganaacattagcccatcttggcaaaaaaaatattttcaccgatattgattgaaaanaatgccagtcgacgtccgccaagaaagatgaccgatcgatgtctaaaaaagaagcatcaccgcatgacgccgatcgaacattnntcttaccgacatcataaattttcattaagggattgattagaaaactcaatagccgacattggtcgtgaagtagcccgact

SEQ ID NO: 71185 - DNA, 195 bp, Glycine max
tttggcagcaacttacaaggatgggcatattaacaactaaacacttaaatgaacaaggggcattagtctctcattggcatgaacaactcacaactggactttctgaactggctgatcaaagatgacgactgtgagagtctgtttctgttacctggatagctcagcttagggtctgctgttgacggctatacatga

SEQ ID NO: 71186 - DNA, 227 bp, Glycine max
  unsure (1)..(227): unsure at all n locations
gcatcacactnttccactcatatcactacattctcactntttaaccctaantaactctaccctcattctatcagtttctatcagcaattcagacacaaacatacanagcatatcataaaccctaaacataatggaaatttgctacataacatacagttaaatgcttaacaattcttacaatactacccaggctaactagaaactccatatattccaacaccatacca

SEQ ID NO: 71187 - DNA, 503 bp, Glycine max
  unsure (1)..(503): unsure at all n locations
gctaatcctgaaatgagggtggagattgccctgattatctaatgactactntccttagcacacttatgttcaatatngtggatntgccctggagatttgccctngaatttctnctttgaaaactatnnntatttggaaatccttcccaagacaccattgaaccactgatggaggctntggaggaagaatataaagatggaaataagataaacgaatcaaggcagtttattgaaggagtattggatcttgaaaagagaatcaatagactagatacattgacttagaaataaatataacanatttggcatttgtgacannnatatagctataaccanatcttaccatttgtaatatgtttacttattctgataaaacataatanaatacatgaatgtcaaaaatcaactacacatgatcttgaggattagcatatgttggttgtgatgaaaggtatgtatttatatatcttcacatcacctacgctcacatggatgcgtccacat

SEQ ID NO: 71188 - DNA, 360 bp, Glycine max
  unsure (1)..(360): unsure at all n locations
gctctactcaattcagctttcattatacggactcaattatatcctataaaagtatgagttgaattgctaggttcgattcattcagcgctcattatacggatcatcgacatcagaaagtatgtgttgattgctanacttcgatcattcagcttcaatatacggctaataacatcagaaagtatgagtgattgtaggttggatcattcacgctcatgatacgactacaactcagaaaagatgcgtgattgtaacttcatattcacttcattaacgactacactcataaagatgcgtgatgtcactaaacataaggtgatatcgctacgctcataatatggtgatgtcactaatattactcat

SEQ ID NO: 71189 - DNA, 303 bp, Glycine max
  unsure (1)..(303): unsure at all n locations
tagagnntatctctgttatcttagtgagagtgattctcctaaattcttgagtgattcaagaacaccctggctgtatcaaaggactttcacaacctttgtgtggtgccctcgctggaaagagtgattctttccttcctatcatcttcacccttgttctttcaaaccacaattccagaanatccacctctgcccaaaattatctcgtgaccataactcccatttcacacanctcaaataagtgattcttgagcctaaattgaatntcanaacgagacctttcacctcgttttggaatcacctcat

SEQ ID NO: 71190 - DNA, 421 bp, Glycine max
  unsure (1)..(421): unsure at all n locations
gtctacgggccttanacagagaaacgaatcaaggacctaaaaagggattattaaagagggtaanaaaacgggaattgtaaaacaagaataacataataacagtattttacttgagtcataacataatttcttttatatntattattngataatcgatacacattataagtatttagttttactatntatattggttactagatataaaacttagacggaatatancgcgttaaccgtaaaatcataaaaatgtctttcgatagataattatattntcatgctagatttatngacaatacgattttttttatcatgaatcataaaattatattttgatggtagtttttntataaatatataatttcaactaagatattgttatatgttgcaaaatagtaatataattcgatatatatctata

SEQ ID NO: 71191 - DNA, 226 bp, Glycine max
  unsure (1)..(226): unsure at all n locations
tttaaaaaaacaattatatctgggattaaagaanagggccataatctntaagtcattaaggcataggaacaaatgcaagccaggattccaatctcctcaacaaatatatcaaaactgcttcaattgaatttgaactatgtaagcattgaagggttcaaagagactaaactagactataccatgctttcttgaatcaattatatatcatacaaaaatatatttcatt

SEQ ID NO: 71192 - DNA, 294 bp, Glycine max
  unsure (1)..(294): unsure at all n locations
gataagggngatctagaattccatagaatggaaaaagggtaattaagtcataagagnttaaagtggagggcattntcataaatgactatataactagtttaaaaatagaaatttagtttaacctagtggtgactatataaagtgtctaattatatgatgtagaataattaaaataagttagagttgtacaccctcaaaatacaattcnactaacaaacaaactctatgtggtatctgtcatctatgncttaatttcagagtatatgttttaatcatagaattcgtctattatat

SEQ ID NO: 71193 - DNA, 193 bp, Glycine max
  unsure (1)..(193): unsure at all n locations
attataatatcactagacatatatcatcaaaataattaagtttaaaactcataacaattaagagtaagtaaatataatcatgttcagttatactaatcaaatattaaaagaaatactaagtattcaaatgtcatanaaatataaatcaattgggtaagtcactagcatctggcagcctaattctcttctaatg

SEQ ID NO: 71194 - DNA, 408 bp, Glycine max
  unsure (1)..(408): unsure at all n locations
gcatcaacaagaatcaagccaaggctattgtgcaagcaatcaatggngcacaacacaccaaaatattatgatgatggatggctcatattctcgcagaggtaacttatcactttcaaattgagctttcaaaattatcatgacatgtagaggaaaaacaaggatntcaaatcacanaatttcaagagaactttattttcagaacaattacccatttcttgaacatatcctataattcanagaanaatatgcannagtgtacatgccaaacaaatngacctaanatattanactagaaacccaacataactaacaaaactaacagnactaacatatntaacccanacaaaactaacanaactaacanaactagcaaaaccaagaacacttcccccatacttaacaacacat

SEQ ID NO: 71195 - DNA, 194 bp, Glycine max
  unsure (1)..(194): unsure at all n locations
tgcactgttctctcatctacagatagctggtgcccttaaccacatattatactccctgtagaccaaactctcattcttatttatataataataatatgcatttaactgaagacaaaacacttcgacactacatgcttanatattcatcaggtaagacaccacaggagtagatgactgcatcttttcttgaatcc

SEQ ID NO: 71196 - DNA, 125 bp, Glycine max
  unsure (1)..(125): unsure at all n locations
atatatatatatatatatatatatatatatatatatatatatatatataagtaaaaatataaaagataaataatttttttaagagacgcatatcttaataatagatataattntaaaaaacttat

SEQ ID NO: 71197 - DNA, 338 bp, Glycine max
cgttagaaactctggaatccaactttccacataggggaaaaattcagaaatcggaaggggaggggagacaaataccctcctggcacatctttgacgcactgcttcccttttttttttgcttccctcctttcagtgggttcacttgagatgaaatccctatctaacactgtcacagactaatatggtttttttttttcgtatgctacgatcaatccgcaactttatggcattacatgcctcctttttgtaatcttctttattgtccaaaatgtcccataaaaaatcctcctcctttacatctgaaaaaaaactgtgatctcgtctcttgtatgcttgtc

SEQ ID NO: 71198 - DNA, 223 bp, Glycine max
  unsure (1)..(223): unsure at all n locations
cattggntgctcgcatttctcttccatccaaacccaaacccaaagccantttcttgaacccatattccacttgtcaaattccccaaccccagatcccatccgttgtcgaggaatacgacgtcgctcaccacgttttggtttcttcgatgctgccaatgctccttaacatgacacccaattgaataaagatgaattcatcttgttctcccttttgattctattc

SEQ ID NO: 71199 - DNA, 474 bp, Glycine max
  unsure (1)..(474): unsure at all n locations
gctattgaacannaatgaagaaccatttctcatctttctatggtctactcacnatgttatattggagttgtgtagtgtcttctaagccctacacaaggcagataggtcgagtaagcacaaaatctgaaaattagctacaattctcaattaagctcaattcattngcctaagaccaaaactaagttaaggtgagaaaaatgctcaatcagtgagacgcatgttntctccacacaaatgccttccataattgaagaacatgaggtggatgatgtacatgcaaatcgcattgatcatgatgaaggtttatgggagaaaattcctatgtaactgtgttatatcttcatctaaagagattcanaagagctactccaagggaaccctttgacaatgctcagaggtttcctctagcatttattaatggtaatcttatacctgaaactccttactttgaantcatcttttgtgaacctattc

SEQ ID NO: 71200 - DNA, 327 bp, Glycine max
atctctggcccaagctacttggtgtcttctatctaacgcccttgcagagtaagattgcatatttcttcaccttgaagaggatttgacctcatatcccaatgctcttgaaactctgggcttttctctcaacacccttttctggattttcatggtgattattcctaccacacagtatgacaaaccacaggtgtcccatatcaggacctaagtttgtatcgtactaacaatagaacaacctacctatagtcctatgtacacaaatatgaaatgtggggacagtacctacagagaggtgcccatcaaacatatatccacctatttgcccac

SEQ ID NO: 71201 - DNA, 222 bp, Glycine max
tgaaagcaaaaaagaaatgaaggaatattccccaatcaaagagtgggagaaagcaaaaagaaaagaaaggaaaattcccaatcaaagaatgggagaaagtaaaaaggaagaagaagaaggaaagaaagctcctgatcaaggatcgaaagaaaccagaagaaatgtgcagagaggtctttggaccagacaatatctgaacagtacagaattgtcaccaaatga

SEQ ID NO: 71202 - DNA, 308 bp, Glycine max
  unsure (1)..(308): unsure at all n locations
tcatgaatgcccatatataagcctaacttaacacttctccataacttcttatctaaactttttttttatttagcagctttactttttgaacaaattatgtggttggtgcatgtcttaccataatcatcattacctaataccttcccccanatttgagaacaaattgccttgaaccacaatgctctnctacaacctanagaaaggtagatggagaatataattcaacaggtttaggggtcaactcaatcaatcagattcaagctcaaaatgggtgcaatggattcatcattcatgaacagggtaagcta

SEQ ID NO: 71203 - DNA, 263 bp, Glycine max
  unsure (1)..(263): unsure at all n locations
gagttttatcccaaaccatcttcacctaatctcacacttcacaattctccaacctatattngtcttcttctatagtcaccacctaagaatgaccactagtaggtcagggacatggttgaattttcttatcctcatccctattaaaggcangacanatacgcgtttaggtataaaagatgtgggtttaaaaatgaatacccatctcattctcatggaacttaagatatgtgacaccctctcctcgcnttcatataattaataaa

SEQ ID NO: 71204 - DNA, 420 bp, Glycine max
  unsure (1)..(420): unsure at all n locations
cgagacactgctacagtcttgttttgattcttgaaagtcttctgaggatatagagatcaagttaaaggaggctcattcccaagaggatgttttaaagaccaagctaactactgctgaggcttcttcaaagtccctccaattgcagattgaacccctcaactaggagtttgctctcttcaaggtggatgcttagaagctgaggcaaaacttaagagtgatcttggagaagctatggtcgagatctttaanactcacaaggttggcttcttcaaggccactcatcaagccaagtacttcttcaaggaagccaacctctcccttctcaatattgataaggatgtgaacccccaagggagttggttcctgaagctgaggtgctagctgaagaggccattgaagagcttgtcgagactaccacat

SEQ ID NO: 71205 - DNA, 349 bp, Glycine max
  unsure (1)..(349): unsure at all n locations
aaaaccagcggacaaactcttttttaatttggctggagaccagaagaacagccgactctgaaagatncagaaagagtacacgactatagagactcccagcttctctcagcgtgcttagtccagataagaggactccaactctggagtcttttctactccgttcatatgaggctttcatcctattaaccaaatataccgatactctagcgaggcatccttttctaatataatgctctttgaaagatagaaagatcaaatcaaatatatatttctcatgctgaattgccatgaacaacagagatgcctcaagcatcagctattacactctatagaacatcccgatatgagg

SEQ ID NO: 71206 - DNA, 344 bp, Glycine max
ctaagctgctacgtatccaaacatgatattatcgagaccctgggcataagatgtttgctttgcatatttcttagacgtggcacgtcattaaatgactcgacatatgtacttctttgcgtacacttaccaaattgaggcgagtaactatcattactaaaatatcatagcccaacatgctacttatagagcataaaaaatacattaggccacaaattattcctcccgtgtagatgatgagacctcaataatacaataacagctagcgtaaattttaacttaagaatatcgttagtccttatacaaagaacatgctttgatgttggacgctataacaaaaaggattt

SEQ ID NO: 71207 - DNA, 274 bp, Glycine max
agagatgaatggaaatatgtgagacatagtgtggaaaaatactagtggacgcagtccatctccactctatttgccttcaacaaacatccaacattatttccactccgcgtatatccactctccccacccctatttcatgttgccaaacagggcatacaagatcacactatgccactctagaaagtataacggtatgttactgaacgggtttgtgaatcctgaggcgacattcaaagatgtttaaggggaagccaaccaatcattcaaatggaag

SEQ ID NO: 71208 - DNA, 414 bp, Glycine max
  unsure (1)..(414): unsure at all n locations
agtgtaccacactactgcagctccggcctatctatcctgatagaagtgtattaatagcttttcatctttagagtgggcgcccatcttacggcagtacatcttgagttggtttttgggacaagtcgtccctttatacttgtcgaagtccggcactttgaacttcgggggaataacaacatcgggtactaagcaaagatccgtcatgtctgcgaacggatagtccccaaatccttccacggccctcaatctttcctcaaggagatcgagcttcctcctttctttcagttgctggggcggcccttccgtggacaaaactattggtggtgctgcgatgttgggttgaggcaacgtgcctggtgccggcccttcngtgatcggnggatagaactcgacatcccttcgagcataatcttg

SEQ ID NO: 71209 - DNA, 273 bp, Glycine max
acagccactgagcccctctcaaccttcttaaaagtagtgaacaatgaccatcaaatataaattcacaagagaaagacctccttacagtctacaaatatatgggacatggctctagttaatcaactcagttcaaatctgacaatgcttccaactgtcgaatcaaatatggagtgctcccttgagcaggaacaattgagtgctcacagtacacactgacctaacctgcagcttatctcactgagaaggataatagtgcccaaagaactctacaaa

SEQ ID NO: 71210 - DNA, 303 bp, Glycine max
  unsure (1)..(303): unsure at all n locations
tgtagtttgtgaaacaggttcctagtaggtagttcaaagacaccttttgaactgtggacaaataggatacctactataaggcacctgcattgtttgggttgccaggcagaaataaggatttataatccgcaagaaagaaaattggatgcacgaacaatcaatggatatttcattggttatccacaaaaagtaaaagggtatatgttttattggttaatcatagcatgagaattgtcaaaactgganatgcacggttcattggaaatgatgaaantagtgggagtacagttccacgagaaatgg

SEQ ID NO: 71211 - DNA, 397 bp, Glycine max
agtgcctgtatatggatgcgcctgaatccgacattcgagtgaaaaggtatgaccatttgaatttctcgagagcctcctatgtttaattttgagcgtctcgatatattatacgcctgaatcggacctcagtgtgaaaaggtatgaccatttgaatttctttagagcatccgttgatcattttcgagcgtctctatatgtgatgcaccttaatcggacctccgtgtgaaaagttatgaccatttgaatttctcgagagcttccgttgttcaatttcgagcgtctcgacatattatgcgcccgaatcggacatccatgggaaaagctatgactatttgaatttctcgagagcttccgttgttcaatttcgagcgtctcgatatattatgcgcccgaatcg

SEQ ID NO: 71212 - DNA, 378 bp, Glycine max
  unsure (1)..(378): unsure at all n locations
tgtcagagcttatggattgttttcaggcaatttgattcaatgtaatactgtgtaatagttggccctgtatcatacatcttggtatcatacagaagtaattctggaaaacttntacttatttctggcaacctttgtattcattgaattccttctagtataacccttctagactttaactattgacatcatctgatatttaatgcttgctgataacttgaaccatgtacttgcatataacatggtgtcttgctacattccctttgtagacatcctaataaaaagctttcaatatgccgtccacatctactcctattgggtgagccatactaaaaattatttatgattacactttagtttccttgactcaaactacacaca

SEQ ID NO: 71213 - DNA, 475 bp, Glycine max
  unsure (1)..(475): unsure at all n locations
ttgtgtaatcgattacacttatttggtaatcgattacttgttactatnntctgaaaatctaaagatgtaactcttcaaaaaggttntgacttttccaaatgggttttaagtcttttcaaaagttataactcttctgaatggccttcttgaccagacatgaagagtctataaaagcaaggctttgttctgaattttgtaatcaatcattccaatcttgaatactttttcaattcattcaaacaatcctttacaagccttgaatctctttgaacttcttcttcttctttgtaccaaaagctttctgaagttttctggtttttccaaaccttgaaaacttgcgctattcatccttttcattctcttctcccttngccaaaaagaattcgccaaggactaaccgcctaaattctttntgtgtctctcttctctcttttccaaaagaaggaaggactcaaccgctcgattcttttgtgtc

SEQ ID NO: 71214 - DNA, 436 bp, Glycine max
tgtgaatcaatgaatcatttatttgctaatgaatcaatgagaccatctaaatgaatcaaatttggctgtaaacaaatctgacctctctattgatagttattctaattttaaagcttcttgttcaaaatgaataaaatctgggacaaaatgaagatgacgaagcttcttgtataatctatttaaaaattgaccttaaacgagtaatatacatatcgatattttcacctggtaacatccatacctcataaaaacaattttaatacctcatagagaaaaaatgtcactaaaaattatgttacttgaattaatgggcatcactatatctgttggtattaacacgaagcataatcactgaaacaaaccaagttaaattatagtgacaccaaattacactcactacatgttggtggttgattcatatgcaacactatattct

SEQ ID NO: 71215 - DNA, 262 bp, Glycine max
ataatatatcgcgacgcacaaaattgtacacctgaagctctccataaatttgaatggtcataacatttcactctgatgatagattcggggacataatttatcgagacgctctaaattgaacccccgaagctctcgaccaattagaatggtcgtaacttttcacacgaatgtgagatttggggacataacttatctagacgctctaaattgaacaaccgaagctctccagacaattgaatggtcataacctttcacacggatg

SEQ ID NO: 71216 - DNA, 386 bp, Glycine max
  unsure (1)..(386): unsure at all n locations
agctttgaaacttcatcccctgcacaatngtcaggaatcacactatttcttctctggaggagtccaaccaactaatcccaaacaaggtcatattccatcgaattttttgctcatttaaagcatgcattgatgtgtttgctttttttaacacattgtgcaaatcgatggaacatggctatatggaagatacaaatggacgctgttaattgtagttgcacaaaatgacgctaacaacatatttgcattggcattttccattgatgacggtgagacaatagatgggtgacactctttcttcgttaacttgagaacacatgtgatgccacaatatgatatatgcttaatctctgaaagcacgaataatcagaattgatataacacctgac

SEQ ID NO: 71217 - DNA, 399 bp, Glycine max
  unsure (1)..(399): unsure at all n locations
agtccatggacgaaatgcttaccacctcataatactggaaagcggnttctaatgactcctctgcggcttccacataaggcatagaggatgggaagctcaccaacatgtcttcctcgcctgataccatgaccagatgcccttccactatgaatttcaactcttggtggagtgttgaaggaacaactcctaatgagtggatccacgggcgccccaacaaacagctgtagggaaggttaatatccattatttggaaagtaacttgacacgtgtgagggcctatctgtactgggagatcgatctcttccctaacctctctgccggtgccgtcgaaggcacgaaccacccgttgactcngctttaagtgggaggcattgaatggtaatttctccaaagtgctct

SEQ ID NO: 71218 - DNA, 247 bp, Glycine max
accttgaaacgctactaaacttttttcttttttgaacaaacccctatcatccagtatgtctattaccgctcataatcatgcacatcttttcaagcttctcaagctttctaatttgtgcaaattgacttgactcaaattgccctaattacattagctatagcctgaatccactcccttaccagaggattggctgcctactggcgactgcagaaaactgcctacatggactcctacccgctattatgct

SEQ ID NO: 71219 - DNA, 388 bp, Glycine max
actaacaagcaatatttttgtaagcaaccacagcctgccaccctgcgccaacagcaacacctgagagaacgggctgcacgttgctgatgacaatgcaaagggccaacatgggcgtgatctctaccacaatctttctcacatttgaatcatctgaaaacaagatagggtactggttacggaagattatcaacaccatcgagagcatgacaccgatcagagctcaagtaatcacaccaacaacaagtgaaaactttgctgctcttgggtgacatgctcctagatcatttgacaccctcacactgcccaagtaatttttggtcactgactgatttacgtgaattattccagctctaatgggtatgcacaactacgtacaacaggctatact

SEQ ID NO: 71220 - DNA, 345 bp, Glycine max
  unsure (1)..(345): unsure at all n locations
atcctaatctacctaaataaactaattacacanagcaaagtgcagattcgcagcccaattattcaagtgccaagggttttgacttccaagcccaatttgaccctttgaatggcagaaatagcccacacttattttgaaaaaattgaagttcattttcttacctttccaggaattatttacatgctctattttgagttctgtagtgtcatataggcccctgacaattattaagttagttaaaaatccaaaataagacacaattatcaattaagcccaattattttgctaagaccaaaactgagttaatgtgaaaaatangagtcatagagaggtccaataagctaa

SEQ ID NO: 71221 - DNA, 447 bp, Glycine max
  unsure (1)..(447): unsure at all n locations
ccgctgcgcatatcgcctaacttcacggcttgctgaacaaattntagtgcctgcagatgttctttccacacgcgatcgatattgcttaagattaggaaccgctctgcttctttcatcaagcctgctgcttgttgctccacaatatcctatggggcagcattggttgtaataaaaaggtaaatttaaaaagaaataaatggttaagaaaattatgtgaaaagacaaggccactgaaccaattcaagacgactcaatttttatacatgacacatgatggtaaaagtccaaccttaaatagcacaaagntattacaagctgcactgaggtttgataaatccctctccccctccccgaanaatgtataatcaattacttgatttatatcacttatctcatttctttgtcgtnttaaacttaattgaaacaaaaaccttactaacaaaaatc

SEQ ID NO: 71222 - DNA, 339 bp, Glycine max
gagacttccgttacttgaaaatacaaccataccagcaactagtttggaaaattcagcatttcacaagtttgcttgaaggtactatggacctttcaagtagtagaaagagtgtggcaaagtaccatacaaacttgagttacctgctggaacaagaatacacgatgtatttcatgtttcgctgctaaaagaacatcatggtcctcacatagcatcacaagaactaccactatacaatgaggagggtgaatttgtaccacaaccactactggttatggatagaagaatgaagacaagggcaacagaactgtcacagaagtattgattcaatggcaacatacc

SEQ ID NO: 71223 - DNA, 452 bp, Glycine max
  unsure (1)..(452): unsure at all n locations
ctcaagcttggacgatatggggtacccatcacatgtggtactatgtggtggtctggcgatggtgcacaacaaagttttcacattcacaaatcacgcataaagccaccatcccctgttgnccaccttcaactgagctcacgtactcccacgtagccaatatcctcgtttctctcaacaccgggtccccatcaatcctcccaagcttcctaacatccaagtaattcaacattcaaacaacacaaactatcacaacaaataaaacagggcaaaggcagagaactctgcccaaaacaccaacccaaatcacagcttttctcacttagagaccgcagtaacaattccttccttccaatttgttaaaccgtggatcgactcgaaaatnttactagaagtctctagtacttaagcctacattgcgaccgttcngatctactatcaaacgtccagaactc

SEQ ID NO: 71224 - DNA, 326 bp, Glycine max
catcaagtattattgcgctaataacatattcttctaactgggttgagaactggcattaggcttaatcacgtcttttatgttggaacctctttcgcgctagggtgaacctacacggaaccctcctttgtgcaagtagatggcacgacttttttgaggcatgagaattcaactgactcttatcttctggatcacatatctgaaatgctctcaaatgacttacacaatataatgagtctaattcgctctatgcttcaatctgatctctatacactaaccttgctacttgcaattgttgaaccaaaaataatttacttgattgtacatta

SEQ ID NO: 71225 - DNA, 284 bp, Glycine max
tgatcctagaatgactatccttttcattgaagaaactgaaatggtaagcattgaaatcccaagagatgaattggttggttgctgaatggcacgaaagagcgtgcagtgatttcagttgtatggatggcaagacttggaaaaaccactcttgccgaacatgttttcaatagttaaatcctaaaagggccctttgattgcactcttgcatcaaaagttctcaatcatacactttgagagggttatttatagacatgaaaaagtaattttgttagttgacctgttgg

SEQ ID NO: 71226 - DNA, 296 bp, Glycine max
  unsure (1)..(296): unsure at all n locations
cgcttcacagactttgttaaccggcggatcctccngaaatttggtcttcacctctcaagacatttatccacgatcctgaccgttgggatctttgacacaatgtctagagtgtgccgcaagcttccgctcccgagagcatttatcatttaagtattttagcccttgcttccgcgcagcttaggaaaaacaccatctcttcttctttctttcttccaaagccatttctaacgttccaagcactctctccatctaccacagccaccattagccaccacaaaccaccgttgttcttcatt

SEQ ID NO: 71227 - DNA, 257 bp, Glycine max
gccttatacacttgaacaacctactaagcctttaatgataaccaaacatattttgcaccacttacacgatgggcttattatcaactaacactctaatgaacaaggggccttagcttctcattggccagaacatacactgacttctctgaactggctgatcaaagatgacacatgtaaacttctggttctcttacctgcaagcctcaatctaaggactgcctgtctgacagctcaaaagatggctataacacaacctt

SEQ ID NO: 71228 - DNA, 395 bp, Glycine max
  unsure (1)..(395): unsure at all n locations
gatttattattctattttaaacttagtacactacttaatagttattatcatacacctcaacaatactatcaagcttggcattattttccagaactctattcgttctttggcttgtcattctccatttaacattgtctgttttcataagtacgcatttattgaattgaattgaattcttaagaatctangcattgtaatcgattaccacagacagaatacttagaggtttttcaaaagaagtttgaaatttgaatcttaaatactgtaatcgattaccatttaactgtcaatcgatcccagtaacgaaaattctagaaatttgaaatgaaaagtcatgacccctcaatgtataactgtgtaatcgattaccagtgacggaattctaaattgttctg

SEQ ID NO: 71229 - DNA, 372 bp, Glycine max
gggacactacagagcaagcgaagatggcatataagcttctcccattaatacaaacatcaatgtgaatttagagcgagctgatgcgcatgtttgcttactaacggaccttgcggaagatattctattaaccgaaaaaatgcacccatatacaatcaaggcagctttgttacctatattatctacacgtacttccaaggtgtatgtgtgacttacatcacacacatctacttggctaaatccacatacatgcatactccaagcatttgggggaccaaaaattgcacatgtgcacatcttggtatttctaatacctatacatacacgaacttcctgatgaatgttgactatctacacaataaggagctacatttc

SEQ ID NO: 71230 - DNA, 387 bp, Glycine max
  unsure (1)..(387): unsure at all n locations
ccgtaatgtggcggagatcgaatttatgttctntttcgtagccccatctactcgcctagtcaagctcgtccacaaaaataggttttttgaaagtttatcatttcagtttcttaccaagtaaaatggatcatttttaaggtccaacgccttaaaatgatcacccttcaagtaaaaagaatcacttgattcatgcataataaagaactacgtacgtctgatttcctcttcgatggagggtacgtaggagcaaaagccccgcttttgtcgacctcaaaaaataaaaagaaataaagttaaggtaacacaatttccacaattctaaaaaaataggttgttgtcctttgagacaaatgtgagaggtgctaatactttcctaaagcgtaaata

SEQ ID NO: 71231 - DNA, 333 bp, Glycine max
gcttgacaatcaacgacaactttactcttgtttttgagtcgaataataagcgctcgaatgaatgtgaactctgacaaattaaacgacaatatattttaatcggatgtctaattgagtcctataatataacgagacgctcgaaattgaatgttgaagctttgagcaaattcaaacgacaataacattttactcggatgtctgatagagtcccgtaatatattgagacggtcgaaattgaattgtgaagctctgagcaaattcaaacgacaataactttttactcggatgtctgattgagtcccataatatatcgagacgctccgaagttgaatg

SEQ ID NO: 71232 - DNA, 418 bp, Glycine max
  unsure (1)..(418): unsure at all n locations
aaaaattaaatcatctacttggacaaatgagaaaactggggccaatgaaaagggttagaatgaatgagaaacccatgctgcgattgtcatttctacatggccaaacttcccaccagcccaacaatgtcattactcagccgatatcagctcttctcattacccaccacccagtcatccacaaaggtcatccctaaatcaaccacaaagcctgcctaccgcacttccaatgatgaacaccacctttagcacaaaccaaaacaccaacaaagaaatgaattttgcagcgaanaagcctgtagaattcacctcaatntcggtgtcctatgctgactngctcctatatctacttgataattcaatggtagtcataaccccagccaaggttcatcaacctccatttctttgatgatacaactcg

SEQ ID NO: 71233 - DNA, 183 bp, Glycine max
  unsure (1)..(183): unsure at all n locations
ctaagctgcatgcacaagcttaatatgatagacaaaaatttcgttttcttttctanccnggcgcgcgcaggactctcactctttcattattccaactccttttccccctttgagtggtgttgtgtgtgtgtgtgagagagagacagatatgagtctcgggtggtgtgtccgtgtgtgtactga

SEQ ID NO: 71234 - DNA, 367 bp, Glycine max
actctgcacattcacaaaatacacatgaacccaccatccctagttgcccaccttcaactgagctcacgtactcccacgtagcccttatacttgttcctttcaacaccgggctcccatcaatccctccaagcttgcacaacatccaagcaattcaatatgcaaacatcatgaactatcccaaaccaagataacagggcagaggcagaatactatgcccaaaacacattccaataccacaactgtccttactcaaatactacaataacattctgtgcgttccgattcgttcaccgttgatcgactcaaaaatttactgggggtccttgtactaagtctacatttggaccattggatctgcttgaaatgt

SEQ ID NO: 71235 - DNA, 236 bp, Glycine max
acatcaaagcttctcttttgcttagtcttgggtgagtgacctggcatagactgtttgaacaaggccttatgcggcaaggtaacattctgctgctgcaggaaaaagtgacttttaaatgaccctacccactgttctaattgagacatataggccacaccggagccaatgcatgtgttactgcatcaacttatggcataacgtggtgaattgttacttttactacactcatctttacc

SEQ ID NO: 71236 - DNA, 361 bp, Glycine max
tatcaaaacttgtgtgggaagctctcttttggctattcctagggaggcgcctctctcactttctccttatctccgctgaactccatgtgaaaatactattgaggaccttattgaactcaaaaaccgcctcataaagctttcaacaatttcatcatatgccacccacggagtgactattgcagacacaccactgttccatgggtgccaccagacagtacgtgtatgcacacacgaccccaaaccagtcaacaattcttggatgatctcaaagctacaaaccaagcctactgggagtcccatattacccacttgctcatatggtattataatacacttgcaacccgcatgcttcacacatcac

SEQ ID NO: 71237 - DNA, 227 bp, Glycine max
tcacttatactagctcactggtaggtcccatgagcgctctatttttcaggcatctgtcatggttcggctgccttaagagaatatagagtaacctttgagaattgaagtttttagccccacttacatgtcaaaacgtattgacattatgctttactcaatgtttatacacacttaaatggatgccctcgtatgatgtacagaactagggtattttaattcacaagtaa

SEQ ID NO: 71238 - DNA, 421 bp, Glycine max
  unsure (1)..(421): unsure at all n locations
accagcttctgaaaactncttggagcttcttgaaaaactttcttataagctagagcgtagctacacacacccctcttataactaagctcaccttctttagaagcttccttaagaagaatcctcaagaagctagagcttagctacacatacgtctctaatagctaagctcacctccttgagatgagaagctacaacttagctacacattccctataatagctaagctcacccccatgaacaaatacatgcaaatacaaaaaaaatccctactacaaagactactcaaaaatcctcaaaatacaaagcctaaaccctatactactagaatgggccaaatacaatggcctaacgatggaaaaacctattctaatatttacaaagataaggcgggctcatacttagcccatgggctcgaatctac

SEQ ID NO: 71239 - DNA, 276 bp, Glycine max
cttaccaccctgggaggaagcagactgtgcacacaccccaatatacaagctaccctggcaaaatttgcatcaaaaacaatgtcttctcttacacctaaaaggccaaaaaaggttatacctttctcctgcaggccaaatctttgcccaacacagaaaactctttattttctagaaagtgctatactagccatggctcaatcaccaaagctagaaacctaggctccttgactctaccactatgagttcaccatgcctgggaagatggtaaaccaatca

SEQ ID NO: 71240 - DNA, 305 bp, Glycine max
  unsure (1)..(305): unsure at all n locations
tctcctcactaatttcaagggaaagcttagtacaaantattgctggattattaaattcagctcccttcctctatctataagagaaaaaaggaggtgtgtgccgcccaaaggcttcttaaggaagttttctgagtgcactccccaatttgatgaatacaccctccttctaggctgcttactgatgaacctttctgagcgcacccttcaatttgatgagtacaccgccctctatgctgcttagtgatcaagtttctttgcccacccccatttgatgagcgcacccctacagaattatctatatggtc

SEQ ID NO: 71241 - DNA, 383 bp, Glycine max
  unsure (1)..(383): unsure at all n locations
aatagagaagaaattgcgcttagcgagcatggctcgcttatcgcatgaacaaaattcaacaaaactgaattgccttgggcttagcgagtcatgatcacttattccaggcttattcaaacttcagaggcatggtggcttagcgagtgtggctcacttagccacaatcagaataccaacagcctctaagactcagacctaactaaactgactggctaagctcggcatgccggcttagcgagttcaaacatacatgcataaatgcanaaagaagtgataaactcgcttagtcagacaacgcccgcttagggtgttcatctgaaaacccagaaattcattccaaatggatgaactttgttatcaagcaggctcgcttaccgagtaca

SEQ ID NO: 71242 - DNA, 415 bp, Glycine max
ctcagcttgagccattctaacgatataactctttactcggatgtcttatcgagtcccataatatatcgacacgctcgaaattgaatgttgaagctctgagccacagcaaacgacaataacacttttactcggatgattgattgagtcctgtaatattacgggacgctcgaaattgaaatgttgaagctctgagccaattcaaacgacaataactttttactcggatgtccgattgagtctcgtaatatatccacacgctcgaaattgaatgttgaagctctaagcctattcaaacaacaaaaacactttactcggatgtccgattaatgacgtattatatcgtgacgcttgaaattgaatgttgaacctctgagccaactcaaacgacattaactttttactcggatgtcttgat

SEQ ID NO: 71243 - DNA, 298 bp, Glycine max
  unsure (1)..(298): unsure at all n locations
aaaacaaacctgaagagggttgtatggcgaacgagcatctgaaccgtacaagtcccactgaccagtagtgttgcctagatcctccaaatcaaagtacacactcttgtcaccgtactttgctacaacggcaccactcctgtaatattaaactttcacgtacaattagaacctatagagacttttnttggttttcggaacacatgtttatagaacaaaaagaagaggactatgcatgcatatcgaattaattaaatctcctgtagagtaatcatagtgcaatttcgtcacctgaaattct

SEQ ID NO: 71244 - DNA, 317 bp, Glycine max
cataatgaccaacaatttaccttaacaagatcaatccctaaatgtaaacagtccatactattctcatccatgagaaaaacctgcaacttaatatctacggtgattaattcaacaaattacaacttgcggagcccatcaatgctcactgccttgagagccaaaacaaaggttggaaattgagaccaaacaattcaaggtcatcaagcgaatcatacactctatacatcctggataagacgtaacaacacggactcctggcttgaccctcagacacacctgcgatcacacagagcaatctttggatggataatgcatga

SEQ ID NO: 71245 - DNA, 349 bp, Glycine max
  unsure (1)..(349): unsure at all n locations
gcaccgctgctgcactgtttgctatggagtcactnttgggtaacattttttttcttttcacccctcacctaatctgctatcactcccacctatctcgtaggcactctttggtgaatgcctacgcccttcctctacaactcaagtgtattgaaatccacgcaacatgcgatgctagacctgactaacttaacatcacgtacaatccggactatttacgatagtagtaattgaattctattcactaccacagatccatactcactcctcaaaaccctgatatcagctcctactatcatgcccatattcatactgtatcaatactgttatataatttcaggtcacctccctt

SEQ ID NO: 71246 - DNA, 158 bp, Glycine max
tcatgggagagaatgatccgcctgaacagataaggtcagagaaaagtcgtgttatatgacaaatgaaggagctcaactgagcttatatctgcctgttggggcattcatggatccactcagagggaggagtcccatctacacgccacctaaagctgcaa

SEQ ID NO: 71247 - DNA, 393 bp, Glycine max
  unsure (1)..(393): unsure at all n locations
caacaacattncatggggatgaaagactctggaatacgcatgctatgcatgcaaaatgtaattatgagaatgagatgccctgtcgcaacctacccttctgcgggagggcgacgcgagactcgcgggatgcgtgttccacgaaaggaatacgcgcggagtcgccaccaacgtttatttgaggaaaacgtcgggaaaactggaaaagacgcgatctacgaacttttaagtgaaaggttcgggagttgtatttacgcatggggaaagtattagcaccccacacgtccgtcccaagggacggcagcctttaatcgaatgtgcaaaccatgacttgattttttatgttccctttttatgtcttatatccattataccctttnttatatttctctcttt

SEQ ID NO: 71248 - DNA, 347 bp, Glycine max
  unsure (1)..(347): unsure at all n locations
attagactgcatttaatttataaaatgtttattagatgattcaactaagttgaacatatgatgaattattatccgcccacttaattatatagttataaaccattcaattcgatccaaatactttattttcctttaacaattagataaattagattgaattttagtattttacatacatgatagatggattatgaacagaaagattnctctgtcatcctggataaaactgattcttttacttatttctttttctataaaatacaaaaacttctagatacacgttttcaaaagagccatccatgttcaattttggcaaaagaaaaaaaagcattttgatgtgtacatga

SEQ ID NO: 71249 - DNA, 305 bp, Glycine max
  unsure (1)..(305): unsure at all n locations
gatgaatctagtttctgcctagtgtagatcatctcccaccctttttctctctctctctctctctctcttgggttgcagntctcctttgtccttttataggtcccacatgacaaactagccattatctagttggtatgatgattgggtgacttctttttgaagtagacataatgattttaactttacaactattagctgatttcttattagtctattctgatgttgtgatttaaatgatcagtttctgagcaactttttgatggtctcttagaaatacattcttatgtttgtgatgaagaacctat

SEQ ID NO: 71250 - DNA, 453 bp, Glycine max
  unsure (1)..(453): unsure at all n locations
tatatctggtcgagtgcaggtctgagcatacataatactcttatattctgtgcatacagaattgncttcatatgctttcgttccaaattatttctacgatattgtgcgagactaaattngtctcctttctgaattggaacgagagatgctgagcaacttttcatcctaaatctttctagtactttattgatatatgccttctgagacaagcctaacaatccttgcgatctatttcggaatatttctatccctatcaacatgacttgcctcacccacatccttcatttcatagttactatatagacacttcttattctcatgaagaacaccaagatcattagttgcaagcaatatatcatccacatacaggattagaaacataaccttactcccactgaccttcagatatatacaccgatcaacagtggtttccttaaatccaaaagaaacaat

SEQ ID NO: 71251 - DNA, 318 bp, Glycine max
  unsure (1)..(318): unsure at all n locations
gcttactgactctgtgcaaacgaagaataagacctttcttggaattctagtattatcatcacaatacagctcaattaggaatagaacatccatcaaatgtcaacatcccgagtcaatattataaaaaccagtatcaatagccaaatgcagcattatatggctacccttagaaacattgtattggcctgacaggtgcgaaagtgcttctaagcgtcaatagcaatgataatgaatcaagcaactctagnacgaaccaactgctagggatgagacttggatcctacattggaagcatangattctggtctagtgtttata

SEQ ID NO: 71252 - DNA, 432 bp, Glycine max
  unsure (1)..(432): unsure at all n locations
actaagcttacaacattcctggattntatgtctcgggtcggttctttttactattaacttctgactggcccaaagatgagcataacatcaccagagccgcctaaacaactttaattttcttagcctttgtttttagtaaactgcttctctccacaccaaatggttgttgtaactgcaattatcatgtctgtgttattgcagatgaggaatcccattatgagccaacactgcatgttacaatttattgccacattccacaacgacaaggtgatattcgacttctctttactcacacttgtttttccctgattctntttacctgatacataacacttaccattaccacaatttttgggcagaactatataaaaataccagcattctatcatgaacagtgggcaccgcactaccctgactttgtccgcttgacta

SEQ ID NO: 71253 - DNA, 350 bp, Glycine max
gctctgataccacttgttttacaagtggcctcagatatcttaagaagggggggttgaattaagatatcccaaactacttccccaatttaaaatttatttcactttcttttcaagttatagattcccttaataatgatcttcttaaatattaattcaaataaaacaatttgaatatgaatgtaaagcaataataaacaaaggagattaagggaagagaaagtgcaaactcagatttatactggttcggccacacccttgtgcctacgttcaatccccaagcaacccgcttgagagcgtcactatcttgtaaattccttttacaagttctaaacacacaaggacaatccttc

SEQ ID NO: 71254 - DNA, 467 bp, Glycine max
  unsure (1)..(467): unsure at all n locations
actaaaccaatcacacacacacacacacacacacacactttatatatgtccagagatcagcggagagggatcaaatggacaagtgagaagttagaacaataatgaaataggacaaacaaaatatgataaataataaacaatatgagaagtaagaaagcaaatatgaaaaaattttaaaacaaaaacatcaaagaaaacagagacaacgactaagccgcactgaatctattaaaggaaagaagagaagaaactgaagcggcgacagagccgcacaggatcagtcaagagggagaggagagatganagaaagaacttgataatttattgatgaaagacagaaaagcttacaaagaggttctcagagcttctctctctattcgtgactaaaactatctgtcagaaagggtgcctcacaatggagttgaggactccttttatagacataanattgaactgtagctatagta

SEQ ID NO: 71255 - DNA, 346 bp, Glycine max
tctcattttctcatgtatctctactgtttggctaatgtttaactgatctttaagttccctgttaacttgcataaagctagattgatttctatggtcaaattcttgtttgtgtgagtaagtccttggtttgcttgtatttttgtggtgaacctaaccataaattttacaaaatttaagtgaagaaactccaaatcagatgactgtccctattgagtttgctagagcatgctagcataacttgcacataattctatgtggctgattattcctgccttgctactattgtcagatgatgaattttaccatattgatggcaatctcatgtatatctacagtctgcaatcta

SEQ ID NO: 71256 - DNA, 418 bp, Glycine max
  unsure (1)..(418): unsure at all n locations
actaagcttggaaatcaaacttgccactggtaatcgattacagganactggtaatcgtattccagagaataaaaactctggtgacttagaaaatnttgagaaaaaactctcttgaaaaacaaaattgtgctatgtttgtttttgaaaaatgttttcaatacttcccttgtgaagtcttattgatttcttctcttgaatcttgaattcatcttctcttgaatcttgaaatcaaacttctcttgactcttgaatcttcttgatttcttcttatgaaactggaatttaaactngatcttgaacttgtttactgaatcttgaaatcattctttaagcttgttgtcatcatctttgtcatcatcaaaactactcgaatcaatcttgattcatcatcatgaagcttgcttctacacaaaatggc

SEQ ID NO: 71257 - DNA, 399 bp, Glycine max
  unsure (1)..(399): unsure at all n locations
ctggaaaatatcagttggggctatttaactaccgatgctggctactgttctttctattccacccctgaataatacttggacgatgtcgatttggaaatgtccgatcggagtcatccggtcatgcttctttntgagacctcgatctgtcatcttttcctggccgacgtccgctggcatttttttcgatcaatatccgtgaatcatgctttttgccaaggtgggctaacgtcttcntggctgatgaaatgagagcatgccagtgtctggccaaacacaatctcgcacgagaaaccctagccgacctacattgtaaattntgtaggccataccgaacaacaaagaaatattatcgaccagtggttgtaaaaaaatctccaatggttgccgaaaatatcggcc

SEQ ID NO: 71258 - DNA, 266 bp, Glycine max
cgagctcacttaccataacacatacttttactcgagccgattttctgccttatcaacccccaatgatgtgacttgaccatcagcacatactttctcgtgctgttggtcttataaccgacctcaatgatgtgaccttgaccatcaacaaatacttttctcgatgtgatgacccgctattcagacctcaatgatgtaacttgacaataacacatactttctggtgtgatggcctgctttgaacctcaattatgtgatcttaccatcac

SEQ ID NO: 71259 - DNA, 366 bp, Glycine max
aaccaacttaatggctgagtggtactgaaattgtggcaaccaaaagtcacccccaacaaccaacaagtcaaccaccatttggtcttccaaaagggcgatgccctaggtgccaaatgggcccttattacaacttggactaaagcccttttagttgattaacccaaaacatatttttggtcagccaactttacagggatgggccattatttaaacaactaaacactctaaattgaaataaagggtgtctttagtcctctcatttggtcatgaacactcacaccttgactttctcctgaactgggcttgatcaatatatgacgcactgtgagagctcttggcttctgctctacctgcatagtctcagtc

SEQ ID NO: 71260 - DNA, 420 bp, Glycine max
  unsure (1)..(420): unsure at all n locations
tctcgaatatatatatatatatatanataacttatatatacagacatanatagtggagaaactacctaaataaagcccacggagtggatattttattttactaaaggttcgccataattattgaaaactataatcatacaaagctcacatgcaatgttactaaaaacttatgttttattatttttaagaaaaaaatataatatattaaaagggaatcatatgaaaatattttctattattattaatataatgcatatatattatncaatcattttacttccgataaatcgaatgacttataataaatcttaaatattattaaataatttcgaagaagcgaaggctaaataatgttgtgagttaattagttattttaaaaaaaatcatttttaagactttgacaatatttgaaaaaaaaac

SEQ ID NO: 71261 - DNA, 360 bp, Glycine max
  unsure (1)..(360): unsure at all n locations
agctgnggatcctagtaagagtgtggagaggttttttttaatctaaacctggcctgtgggccaaatagttttgaacacccatcctagatagatgttgataatggtgagtgagcacccttttgtaaatatcatgctcacattttatatcgatacataggactatagtaggcggcttttttggcatgtgccatatggaccttagtttcgcctttggttgagtatacatgatatccaagaaggttgctattggttgtttcttatttttaataggaccagggtctacgatctagaaaaaaggcttctaatggtcctcaccagttaaggaattgggcttctgataacaacttacaaagttgcctt

SEQ ID NO: 71262 - DNA, 440 bp, Glycine max
  unsure (1)..(440): unsure at all n locations
atgctntattcattggttcaacctataattcgtggagctactatataaagaatgaccgatcaacattcaaaacagaagacaacttctcatagattatcccaataaaaaagcaaaatccctttcctctcaaagatatactagcacttcatacattaacatctactccttcttcctcttggatttcaacaacatattcaaaagtatggtctttgttaattaactagtgatattgaagatgaagattccttatctaaaaaaattgataaaagcaaaaaaaaaaaaaaaaaaactagcaagatcttttagcctatcatagagaagctatgtngaattgaaagaaaagatgactaagtataccaatgtctggacaaccttcaataagagagaaggaattatatgtgatgggataaagaaaagtctaactaaccactaaaaaagaa

SEQ ID NO: 71263 - DNA, 240 bp, Glycine max
ttcattaatcgggtgaaaattcttacgaagtttccctcaacgctttaaattacatctagtgacggttatacagaactccaagatcttaatatcccagaaaattgcaggcaagtgcacctgcagacctgcaattaaaactatcactcccagtaaatgacgtgcgccccactcaagttactgggtttcatctcttattttgtgggtcctatgtaaattccactcaattacggtgttggaaac

SEQ ID NO: 71264 - DNA, 338 bp, Glycine max
tgagttggagaggaaccatgtgccttcatgggaagatgcccagcaaatgagccttcagaccttaccttgcttcaacatactaaacaccactaatacatatgttcttattctttttacacgtgttgaggaaaaaagcccagcgcttcaagaacctccggattcgaggtcaaatcctttccaaggcggagggaatgatgcaatcctaccccgcaagggcatcggatagaaaactccacgtagattgggccagagatgcaagagcaagccctacggttcttatgaaccttacggtagatttcggcccatggcgaagtttgagcccattatctctgaaatat

SEQ ID NO: 71265 - DNA, 332 bp, Glycine max
  unsure (1)..(332): unsure at all n locations
tatgtcgcggggggtaggaaaacctcgggacgtcacgtggggtgctattgcccaaaccagcttgacaatccgacccacctcggcatagtctggtcagtgagaaacctgtgatgtacctaaacaagcgagctcctggcagtcaacagataataggaacaaagaccacaaaccaaggaggcttgtggtagctggccagctgtgaacctgatagnatgtgagatatggtctctggcaatcgattaccaacggtgggtgatcgattacaacgcttanaaatgaacacagggggctaagatggtctctggtaatcgattaccacgggatgtaatcca

SEQ ID NO: 71266 - DNA, 420 bp, Glycine max
taagcttatctattaatatatgatcgatgggaattctaatattttcttttgtttgttgcttctcaagctggttattccttgcataagacttcaacaagagatgtaagtcgtctttattttacactctaaattctaattattagattgagttattgagatctgcaagactgatcaaattgtttttgacttattatctcctgtatcatatttatcttattattttttcttttttcacagaagatatatctggccattagttaataagggtcccattccacaaggatgccattagtgttattttcttcaaccttttcactagtgtggcatggttctattaaacctattctattctctctcccagttattggtttgcatctagcttgcacttcaagtctacacataacatccatgatatgtttt

SEQ ID NO: 71267 - DNA, 277 bp, Glycine max
  unsure (1)..(277): unsure at all n locations
gtaaaactaactttccaaatgtatgcctatccacgacatggtctctaggaatcttgcctcaaagaggtccaggaatgacaatgccaacctaaggaactatttccgctcctgagtatgacaattacctctatatgagcgctgtacaccaacnacgcttggaagccattaagggatggtcgattctccaggagcgactcctccatctcatggaccacgagtttactgtatttcaagatgaaatacggcgccggcggtggacatcactggttactcccat

SEQ ID NO: 71268 - DNA, 449 bp, Glycine max
  unsure (1)..(449): unsure at all n locations
tctcccntntctgctttagagctctntccctaaaaggtttctatggctactctggaatttgtgccctggccattctgtacaagtgtgtagaagctaacatagaaggtgtaccctaattctacacaagacaggctttaaataggctctgaattcaaaacgttgcgcttagcgccaccctcacgcttatcgtgagtaaggggaattgggcttagcgccagtctcgcgcttagcctggctaaaggcacctgctgcgcttagtgcactaatctcgcgcttaaggcgcgactntgatactgatgctctgccagattctcctttgcgctaagcacgttgaagctgcgcttagcggtggtgtcatacccctatttcatccnggaaccatccgttgttgggatgcgaccctcgcttgaccacttcgaggtacttggcacccatcgttaggcaattcg

SEQ ID NO: 71269 - DNA, 396 bp, Glycine max
tcaaataaaattaatctttttaaattgaacaacatattttaactcaaaactcttacaaaggagtttaagaggaatagttttaagatttttgactttctagaaaccttcctaaaacttggtgatccataacatacttgtattactcatgatggttactgagtgatgtctatgatgaagagctaaccattcaaagaatgattatggaattgtcctttaatcaaaatgacatattgcctaaaggtgtaaaattatgatagcatgttatacttaatatgcatgttgtccatggttaacattgagtataacttgtaactatcccatactaactaagtgagatacactcgtaccgtgttgatcagtatctatgagcaagctttctatgtccttaagattatg

SEQ ID NO: 71270 - DNA, 420 bp, Glycine max
tagtggatcatcttaattcatttataagtaaaatgttctacgttggtagaagatcaaatttaaactcttatcataatggccaattatcctccgtgttcaaagttgtgttgtgtgtaagcattcttatttaatactgaagactattgttaagaaacccaaaaagctaatccttcaagttgaaatgtaaagaatataaactttgattcttcagtaatgttcataacaaagaaaaagtttcagattttcaactcacacttcacttcaatcattaagccatggttaccaaaacccaacataattacattcacaatgtacacacttttaattttgttggaagtaactggattggatgccaaaacaacaaatcttcagactttaatccataaattaatgcaataggttgacgacattctttaaata

SEQ ID NO: 71271 - DNA, 239 bp, Glycine max
  unsure (1)..(239): unsure at all n locations
tagcacattgccccaaagtgatccagttgcaatggtcttttccacttgaactaactactaaaccctttgttgataaccaaacatattttggtagncacttacaagatgtgcatttttaacaactaacactctaaattgaacacaggggtattagtctctccattggcctgaacaactacaactggactttctctgaaactggttgattaaaagatgaagactgtgagagctcttgattc

SEQ ID NO: 71272 - DNA, 385 bp, Glycine max
  unsure (1)..(385): unsure at all n locations
aaggaaaaatatacttaatttttaatttttgattctggtaaataattaaccatggtttgtggttaaattaaataaatacaattaccagtcacaaattggatggatctagtaagtcttaagtaagctaagttcaaagcatgtatttgtgtgtgtgtgtatatatatatatatcttgctaatgagtgctcatagggcattagttatgaaactaaaaggaaagaatatttattgtgaaaatcatagtagaacgtaaaaatagttatggacaacancaatttatgtatcccaataaaaatatcttttaattcctaataaatggtctaaggtactagtaacatctgcctatattatatagggggaaatcatatagttaaaaaatatctta

SEQ ID NO: 71273 - DNA, 100 bp, Glycine max
tcttttctcattaaccacacacacatttatttaagatcctacagaccaatatacctatatatatatatataagtttcttatttgttttatctacttatta

SEQ ID NO: 71274 - DNA, 333 bp, Glycine max
  unsure (1)..(333): unsure at all n locations
ttctggaggaatcttctggagggcccaagtgggcctggctgctatttgcacccccatttttactaaatacaccccctgcctttttttggtgattctnttttcgcaaagttacggaaacttacgaatttggtttctttcccgaatgttacggaaccttgcggattacataatcatcccctttttgacttacggaatgttaccgaacctcagtaattgtgcaacgatgcttccatttgatttccagagtgtcacggaaccttacggattgtgcatcaatattatcttttgtcttccggcatgtcccggaatttcacagattgcctaatgatgggt

SEQ ID NO: 71275 - DNA, 343 bp, Glycine max
gctagagcttagctacacacacgcctctaatactaagctcaccctcttgagaagcctccttgagaagcctcctagagaagctagagcttagctacacacacctctctaatagctaagctcacctccttgagatgataacgtagagcttagctacacaccccctataatagctaagctcacccctatgacaaaatacatgaaaatacaaagaaagtccctactacaaagactactccaaatgccctggatacatggcttaaaccctatactactagaatggccaaaatacaatgcccaaaagaagaagaatacctattctcatatttacaaagaagagtggacc

SEQ ID NO: 71276 - DNA, 445 bp, Glycine max
  unsure (1)..(445): unsure at all n locations
actcagcttgcgattggtcttcgcagtgaaggattatgtgggttctaaaagagggcaaattgatcatcctactaggacgactgagaaaactggggcaaatgaagagggtgagaaagagggagaaacccatgctgtgactgccattcctatacggccaagtttcccaccaaacccaacagtgtcattactcagtcaataacaaacctcctccttacccaccacccagttattcacaaaggccatccctaaatcaaccacaaagcctgtctaccgcacttccaatgacgaagaccacctttagcacaaaccataaaaacaccaacaaaaaggaattttgcagcaaaaagcctgtacggttcaccccacattccgttgtcatatgctaaactngatcccatatccactcaataattcaatgctagccataaccccaaccaaggttcat

SEQ ID NO: 71277 - DNA, 305 bp, Glycine max
atcttaagtccctgagctgcaactgtgacttctcatagtcatgacccttttttcacctatcacagcttctccttttgacttacttattgcaatagaatatttctgaagtacaagtgtgacactaaaagactattatgtgaacaaatctgcgtcattcaacataaaagcaaggtcttatagggaaatgatgataaagccttgtgaacttaaacagaaggtgcatttaatgtgcacaccaccccttggtcactgtgaaactattttgggcaacttttgtgagcttctgaaaatgagtgggatctggc

SEQ ID NO: 71278 - DNA, 172 bp, Glycine max
tcactatctatgttgctcgcttatccctgcgccgattattatctctcccctcttcgggggcactccacttttacactatccgccaagacatgaggaagaatcccctcttggcccttgcttcaccttaaagattcgtcccccattaactcccccacccaacatagtccgccat

SEQ ID NO: 71279 - DNA, 270 bp, Glycine max
  unsure (1)..(270): unsure at all n locations
gacacacactggaattggacaaaccaatatacattcacttcccataaccaaaccagacccctcaaaaagttccaaaagaaaaagaacaaggtacactaaccccaccctttttaaagcccacaatccttaattggttaaaacacattacactatgtatcaagcgatcaattttaagaaatggcacattctttgttccacacaactcaacacattaccactataaacaaaccatacccaatttgcacaaacagaaactntagacattcaaag

SEQ ID NO: 71280 - DNA, 306 bp, Glycine max
  unsure (1)..(306): unsure at all n locations
ttctctcactttcgaatttgcttggaaacaatgtttccgtgaagaaaatccaagccgaggcgcttccgaaacgttttcgtgaggaatttcgcgaaggtttcgaccgttcttcgatgttcttcattcgttcctcatcgntcttcgatcttcaacgggtaagtacctcgaaccaagcttttcgattcattctatgtacccgcggggggccacattgtgtttcgtgtattttattctcgctccattactttttatacccccttttgacgtgcttaagccatcttatttaagtcatttttcgcttaacct

SEQ ID NO: 71281 - DNA, 412 bp, Glycine max
gccctttcttgctttcgcaacttgagttcactattgctaccccatacagctccgcgaaatttggtccggccatactcttccttgcgagccctcttggtctcttgttcaacggctcttgcggtaattgcattctcttcccgtaacccggcacactcctttcgaacgtgtgtagcggccaacttgaacttctccttggcaagttttgcctttcctaactcgcttttgagagcttggacttcctttgcttcttacagtgcttcaaaattctcttcgctgacgacttttaacctggcgagccaatctaaacctcctatatgaactttcagccattcgtgggacccaccaatgatgccatttcgaatgcctctaagctcttgatcttttcttaacggggtttccattgcttatggat

SEQ ID NO: 71282 - DNA, 244 bp, Glycine max
actggtaacttatacagaaatagaccccttgactttcaggagtgggctaacttataagaaaaactggtgatcaaaaatatgtgacattgcgaagatgagacacaagtgctgaactgacgttgaagcatatctgattctctgcgccttcccacacaatggttatgacagaaacagactttcaagctgtcgcatctatgcaagactccttatcttggtgagctgacctctgttatcctcattccct

SEQ ID NO: 71283 - DNA, 436 bp, Glycine max
  unsure (1)..(436): unsure at all n locations
atactgcgctcactaataattatataccacaccagatnatttatttatttttcaccaggataaaagactttaggctgatgtaccgaaattcgcaccgcaatcacactaaggatgacttaacttactaaagccgtttattgataaccgaaacatatgtggcaccaactttcatgattggccattattagacaacctaacactctaagatacacaatggggccattaatactcctcatatggccatgatacactaacacctcgactgtttcttgaactgggctgatcaatatatggcacactgttgagacttcttgctttctagttaacctagcatggtctcattcctcagtgatcttgcctgtctagcatgtctatatctctccctggaagattggctaatcgattcctctcatatgacatgcacccattaatcact

SEQ ID NO: 71284 - DNA, 312 bp, Glycine max
ctaagctgcttgattggcttctgctgagatagatttttttgttttttaaacatccatgggtttagccatcctgaaatacgttcgtacaatgctcatatctaacagcattgaaaaccaatatgttggcctaaaatgggatatctattgatggatctcatcatcaagaagatacaacataccacgtaagtatacaatcatactttttatcatccatcctattaaactcaaaataatattttttgtcaagattaagtggaacaaaaatcaaatgacttgtgaatgaaaatttcaaccacaatatttatttaattt

SEQ ID NO: 71285 - DNA, 370 bp, Glycine max
  unsure (1)..(370): unsure at all n locations
gcgtctcgacatatatgcgcccgaatcggacattcgtgtgnattgtatgtctatantgatctctcgagagttccgatgtttaattcgagcgtctcgatatattataagcctgaatcggacctccgtgtgaaaagttatgaccatatgaatttctcgagagccttccgtgttcaatttcgagcgtctctatatgttatgcgcctcaatcggacatccgagtgaaaagttatgaccatttgaatttctcaagagcttccggtgttcaatatcgagcgtctcgatatattatccgcccgaatcggacatccgngcgaaaagatatgaccatttgaatttttcgagagcttccgatgttcaatttcgagcgtct

SEQ ID NO: 71286 - DNA, 342 bp, Glycine max
  unsure (1)..(342): unsure at all n locations
ctaagcttaacattaatttcagcgtctcgatatatacgatcccatttctatcatccgagntaaacgttatgggcctttgtattggatcagagcttcaacatccaatttcgagcgtctcgatatgttacaggactcaatcagacatcagagaaaaaagttatcgtcgcttgagttggctcagagattcaacattcaatttcgagcgtctcgatatgttacgggactcaatcagacatccgagaaaaaagatattgccgtttgaattggctcagagctctaacattcaatttcgagcgtgtcgatatgttacgggactcaatcagacaatccaattaaaagtta

SEQ ID NO: 71287 - DNA, 289 bp, Glycine max
atcctaccagggattaccatagatttggaggcttatatacgttgggtcaaagtgctctatacaaaagttagttgtgtaagacgactaacaaacttccccaaatttacagttttgcttgttctctagcaaagaaagaatagctcagttgtcctcaagtgacaaaatcacagtggatattcacaaggtgtctgctccagagaatctgatcacatgaaatgaatggcatacgattcttcaatcatagatactcacaagacatgcagcttttcaaagatgtgaagcatgatat

SEQ ID NO: 71288 - DNA, 359 bp, Glycine max
  unsure (1)..(359): unsure at all n locations
acacacgcatcaaactagagacttgtttttatgtcaaaaatcatataaggctaaaacacatgaatttttttctctctgatgtaacaagaaacctaatatccgtagatataagataggttggataattaatagagacaaaaacggaanaaagattgtaagtttgatcctctgctaacacaaaataaacaactaacatttgtcaattaaaaaaaaaaaaaagctgatatccatgatgcaccagaactataaccaaagagaatgaataagattgtgcttgttacctaatacccatgtttcttctgccacaaatgttcttcaaattgatgaaacaagtcataatataattcgtactgaactag

SEQ ID NO: 71289 - DNA, 276 bp, Glycine max
  unsure (1)..(276): unsure at all n locations
atgtttatgttatggagngttcagcgctttatacaacacattcatatagntgtttatcttgtgacctgtttaagagcttgtactctgaagatcaatatagttgtagttatttagtatgatagcaactataggatgcttggagaatggttagttgtgctcattccatgccacttgtcttcatttgaagtatatgattgaattttgagcatgcataacatgcagctatgcacgaggaattataatntgacatatagaaacctaaattcaatttgattc

SEQ ID NO: 71290 - DNA, 163 bp, Glycine max
ttgaaaagtgagaaaatagttccgtgaaaaaccaaccaagcgcttctactcgccaaaatgtcatggtcgatccgtggatagttacaccatcccttgttcttattacacgttctctgtcttcaaccggtgagatcgcatatcgaactttcagttatctatgtcc

SEQ ID NO: 71291 - DNA, 375 bp, Glycine max
  unsure (1)..(375): unsure at all n locations
ntcctacaagtcctaatggacattctaaactatgaccaactcactttagactccgatttccactaacctcaaatttgggctttctcaccctcaaaatctcacacttttccacctacaacactaccattctcacatttaaccctaagttaagctctcccaatcatctctaccagttttctaccaacatttcaagcatacatatatcgcanaacatcattattaaaccctaaatcagcatgggtaggtttgctcacatcaaacatgtcaaggttaacatgattccaacanattccttcacaaacaactactctaaggcaagaacctagtagaactacccatcatagctnccanaaacccaacacccacanaattcaa

SEQ ID NO: 71292 - DNA, 359 bp, Glycine max
  unsure (1)..(359): unsure at all n locations
ctcgtaccgcgatctctaagtcacctgcngcatgcagcttaatcggtggaaactctaaagaatcatgttaacaacatttagcacaatacatgtgaggagatacatggaganaaatgaagaaacaacaatagaagagaanggtaagcataanaataacagaaggtttaaggggagcacctcacttgaagcttcttgtgctctataccacttngatggaagcttgcgtgtggngcttctatggaggctggatgaagagctaaatgaagtcctctaatggtgaatttcaccatggagatgcagaggaagacaaaggagaagaggtgagaggaggcgccatccactanggaataagccatgga

SEQ ID NO: 71293 - DNA, 396 bp, Glycine max
  unsure (1)..(396): unsure at all n locations
gcagcttaactaattcgagaaatcaacgggtttcaaggctggactgtgttttaccaaggcagcttcatgtagcttccttgagaagcttcattaagaggctctctcgtggctttttaagaagctntctcaagaggcttctttgagaagctagatccttatctacccacacccctctattaactaaattaacctcctttgaaataattatgaataaaataacacaacanatataatcagacattaaacataattactaataatatatagagatatatatcanggtggtacatgagtcgccttggcatatctagaatgtgagcttagaacttatagtanataccaaatatatggcttccatggcccaattntntcatgtcaacacgtaagttcttatct

SEQ ID NO: 71294 - DNA, 327 bp, Glycine max
  unsure (1)..(327): unsure at all n locations
agtctctgcgtgtcaaccggctcgcttgcctctggctgactaaaggtgcggataaccataaggtaccttcgcatgtcatcggactctccgtctctggatgacaaaaggtgcagaagacgatgttagtctctgcgtgtcaacaagctcgcttgcccctggttgacaaaaggtgtagatgacgatgttagtctctgcgtgtcaacaagcttgcttgcctctggtgggcaaaatgtgcatatnaccataaggtacccctgtatgtcatcggctcactgtctctggatgacacaatgtgcagatgacgacgttagtctctgcgtgtcaaca

SEQ ID NO: 71295 - DNA, 294 bp, Glycine max
  unsure (1)..(294): unsure at all n locations
atctanattccatagaantagaacaagagtaattgagtcataatacagtggagggcatnttcataaatgactatataactagtttaaaaataaaaatttattctaactagttggtgactaattaaagtgtctaattatatgatatagaataattaacataagttaaagttgtcacactctataaattacgacttagactgacaaagaaaactctatgttgtgtccgttgtgcatgtatgaatataatctcacgagatatatgttcttaatcatacaatatcctgttatgtatgt

SEQ ID NO: 71296 - DNA, 187 bp, Glycine max
gattattaccagtacgtatcattaacacggaattatttttaataccaaagactataagtacctcaagggtaaatatgatgataatccaccatggacctggctaagataaatggtagctcctgaacaacagaacataactcaacgtactcaattcaaactagactgacctatatttcgaattcacata

SEQ ID NO: 71297 - DNA, 524 bp, Glycine max
  unsure (1)..(524): unsure at all n locations
tgggctacatcatgtggtagcaaagcatgttcatctaagngatgttcttttgcttcctctatcttatgttcggtccattcactttaattccttgntcttcattgtcttctccattgccttgnnggttgatgtagtttagagtagattaaaaaaaaatcgatctacacttgctcttgcatttcaatggttcaaaatttatagatatactctcgaatcatgtnntttgtgtgattntaagttctatcattnttcattcataatcttaatgtgttgaacctttagaatcttaatttcttcgaaaatattgattagaaatgaanatacaacaatatangggtanatcacttcattcaagtngtcttagaagtcatgttagtcatagtaattngcacattatgttctannagttgtgtgaattttgatttagtgattgagtctagatacattngtcatatattcttganatcttagcctatcattttaatntgagtctaatcatgccatgtattagtcatacatgtcta

SEQ ID NO: 71298 - DNA, 413 bp, Glycine max
  unsure (1)..(413): unsure at all n locations
agcttangaacccanactttttatcttcaatgtaagaaaacatactcatgactaggaacccaaaattnggttntagaattatgatagcatgaaaatanggacttgcttgtaagaattcgggctaccccatgattggtactttgcacctaagtaacgtgggaaatgcttttcaatggtatgtagatatatgtgtaaatataaggggcataaaattcctcgccaagtatggataatttgtttcctaaatgaatgtatgatagcgtggaatgctcttttgaatgcanatatgtgcaggatgtaattagctttcanatatgcatataaataaacatgagtgaaacagtaaanatttgtatggtgtacttcanatgtatgtaagtagtttgtgatagcaaatgtttaggaatataaat

SEQ ID NO: 71299 - DNA, 386 bp, Glycine max
  unsure (1)..(386): unsure at all n locations
nttcgattcattctatgtacccgtagtggtccgcattgtggttcgtgccattttattctcgttntggttactttctataccccgtgttgacgtgcttaagccattctacttaagcatttctcacttaacttagaaataaaatcaatttcaccgaacgtttgaatgtatatccgttaacttcgtaaatgaatccgacgtcggtcggccgtaccacgttggaaatcaaagagtgaaaataattataataaaaaacatctttagtaaaanagcgaaaatcatcggacgttttctcttggattctcatctaatcaatgataaaactaaggaactaagctaatcactccctgtaagctgtcacacatagctttcagttgcattcattctac

SEQ ID NO: 71300 - DNA, 209 bp, Glycine max
  unsure (1)..(209): unsure at all n locations
ttcctcagttctttaacaagctntgaacaatatacttggccttcatttaactgtctttgggcttggcggccacactcaacaaagtactttctacacctactgtacgttgatttaccaatggtgtatgggaatagtgcgacaatcctttaaaaccttattgatacattctgagaggttcgttgtcatgtggccatatcgatgtccttctc

SEQ ID NO: 71301 - DNA, 282 bp, Glycine max
  unsure (1)..(282): unsure at all n locations
gcatgtctattacatagtgaacaatttctgattcttctgtcagagttatgaaacatccgatatagtgcatggttttgagtttatgctttctagattgcgaagttgtgatagtaatcatatcatcatacttcttttcttctggcaaactctttgatcatcaaaaggtaactggtgatttttttgtaaagagcangcagattgagactttccaactcacttttcctgattatctttgctttatcgccacaatcagaagtgtttatgacagcaagttaatctcaa

SEQ ID NO: 71302 - DNA, 270 bp, Glycine max
  unsure (1)..(270): unsure at all n locations
atgtggaaagaatntatcaccataccattaatgatcngagtgtcaattgaactttcccatgaaggaaagaaaggaatgtttctaggaataaattttagatttgaatttgtcctangaataaatggtagagtcaaggcttacctacgaanattgggacttcaaggtangaaaaagagagggtccccaccttganacccaagaaggattcatntccaacattatgaaggagtcatggaactggaaatacaagcatttgtctgataataattt

SEQ ID NO: 71303 - DNA, 146 bp, Glycine max
  unsure (1)..(146): unsure at all n locations
gaagttgggattgaacctcanaactggtattgaatggagaatgacatcttggaagaatcccaatgatccatcctcaggagacttttattgtggtcttttgcttataattatcctgaggtttatctgatgatgggaacagaaaagtt

SEQ ID NO: 71304 - DNA, 373 bp, Glycine max
  unsure (1)..(373): unsure at all n locations
nagctgaanggtacaacctaccattntccataatagaacactagnnatatgtctactatcantgttattatatctttcttcatcggtaaggggaaacacattgtgctcgccagatccctcctacactttgggcgtattcttttaaaagatcccgnngccctctnntntgcagtatgttctaatagttggcatcctatctgaagacattatactgacactggctaacgaaggaaccattatgtccttccaagaatggactcgggaaggtccaagttagtgtaccaggtaacagctaccgcagtaagactttcttggaaggaatgtatcancaattccttatcttttgcgtatggccccatcttccgacaataca

SEQ ID NO: 71305 - DNA, 295 bp, Glycine max
  unsure (1)..(295): unsure at all n locations
tgctggaactacttcacatggactttgtggtgcctatgctagttgaaagccttggagganagaggtatgcctatgctgttgtggatgatatctccacattacctgagcaactgtatcagagnaaaatcagacacctctgaagtattcatcgagttgagtctacgacttcacagagataaagactgtgtcatcaagagaatcatgagtgaccatggcagagagnttgaanacagcaagtttactgaattctgcacatctgaaggcatcactcatgagttctctgcagccattacac

SEQ ID NO: 71306 - DNA, 301 bp, Glycine max
  unsure (1)..(301): unsure at all n locations
agctngagatgaggaagtgtngaagggtgaaaacttcctgctttattgtttaccacagagtggtacctggagatatgtcgcggtggtcaggagaaccttgggacgtcatgtggggtgctattgcccaaaaccaagcttgaccaatcccgacccaacccgggcatagtcngtcagtgagaacctgtgatgtacctaagcaggcgagctcctggcagtcaacagataaaaggaacaaagaccacanagcaaggaggcttgtggtggctggccagctctgaattntgtgtgatatgtggattat

SEQ ID NO: 71307 - DNA, 53 bp, Glycine max
  unsure (1)..(53): unsure at all n locations
ngtagaattcacccacactctggtattggatgctaacttactcccatatctac

SEQ ID NO: 71308 - DNA, 213 bp, Glycine max
  unsure (1)..(213): unsure at all n locations
attccttcatctgacttagcatcaaactntcctaagttntcttttccattggttaatacaaaacactcgcaaccaaaaacatgaagatgcgagatgtttggttcctaacatngaacagttcatatggagttttctttaaaatgggtcttactaaagccctattcatgatatagcatgcagtattaacggcttcagccccaaaatattttggaa

SEQ ID NO: 71309 - DNA, 361 bp, Glycine max
  unsure (1)..(361): unsure at all n locations
cgtaccancactatttttcatacgtaaacactggtgatgtgtctactattattgtgatcatctctctctccgtcaatggaggtgcactcgagctgacaagtctctgcacacttgggcatattctttgaaagattcatgcccctctatgcacatgntttgtagatgcatcctatccggagccatatcaatagtgactgatactgnctaacgaaagcaaccattacgtccttccaagaatggactcgtgaaggttgcaagttagtggaccaggtaacagctaccccagtaagactttcttggaaaaatgtataacagatgctatcttttgcgatgctcccatcttccacaatacatcttagat

SEQ ID NO: 71310 - DNA, 308 bp, Glycine max
  unsure (1)..(308): unsure at all n locations
gcttctcactatntncattttattctggtggtggaataaattgtggggcatcaagtggattaataatggaagaaggatatttaattcatggtttattgcaggatgtctgttgattctcttttccattttaaataatattggtcttgcttgtggtaaggcacaagtggggtcacagtgataacttaagatgtgattggtggtntatatgtgtggatgcatttcctcctgtactggacatatatgtaaagcananggtagattgcatgatgcatgannggatactcaatgaattctattgacatttatac

SEQ ID NO: 71311 - DNA, 361 bp, Glycine max
  unsure (1)..(361): unsure at all n locations
atgtgactgccctatntcttgttngagaatatgtgactgccttgtttccttttgtaatctagtctctacttctagtgaccatctgntatccctatatatgtntgaatagntagctaataaaattaaaatttgctagatggtggatgccattctttaatggtgtcattntcctaacttgtggctcaaacatgaacaagtatatagatccttatcctccaagaatgaggataaatgagtaattatgtaaatataataacaacgatgataattaattgctgaaaatttctattgatgatatactccttaatgataaggataacaagggaataagctttgtatatataacaatggaactctcact

SEQ ID NO: 71312 - DNA, 288 bp, Glycine max
atcaagttttcgtgaaaaaacaggcgggcactatatgccacgaatttaccaatggcatttttaaaccggcgaatgtttattacgaaagaaattgttgggtgcaaaaatacacgggacgctagtttcggcaaccacgaggtgtcgacacctggagtgtctctatagagaaaagacgcgcaccggaaacaaaaaacatatcgaatgcaaaaaaacgaccttgaaatacacagtaaaaactacgaagcaaaatcaacaaatcaatttcggagaaaaacaaccctgcgaagc

SEQ ID NO: 71313 - DNA, 197 bp, Glycine max
acaatacatttgccaatgctgaagtcacctaaccaggcacacatatggtggatcagaccaagatcatacagaatttaagcaccgaaagaagctttgacacaagtacacaataattaatattaagtattacatagctgtttttataatcacaacaaggtgttagccagcattcagataaccctacaatatgagataca

SEQ ID NO: 71314 - DNA, 246 bp, Glycine max
  unsure (1)..(246): unsure at all n locations
atgggatacccatcacatgtggtactaggtggcggtctggcgatggtgcacaacaagttntccacatncacaaatcacgcataaacccaccatccnctggtgccacctncactgactcacgtactcccacgtagcccatatcctcgtttctctcaaccccgagtccccatcaatccttccaagcttgccgcnnaaatcaagtaatacaacattcanacagcacaaactatcacagccaagcaaaac

SEQ ID NO: 71315 - DNA, 493 bp, Glycine max
  unsure (1)..(493): unsure at all n locations
cgaggtacttacccgttgaagatcgaagaacgatgaagaacgaatgaagaacgtctaagaactgtcgaaaccttcgcgaaattcttcacggaaaatgttacggaaacgtttcggaacacctcggttatatttcttcacggaaacaattttttcaagccaattcgaaagagagagaagtgcctaangggctgaacccttttcttcttcactttcttccctatttatagcaaaataggggaggtggnttgccgccagctcgccatgtgagctcactcgccaggcgagcaggttgtttcctcaaagaacaccttctgangatattcttngaggccagtggcctggtgcttttgaccccatttactagacacccctctgcttttttgggattctttcgaagtacggaactacaattcgtacatcttgttcttcgtatgtacgacctgcgatactatcatctttttgctacgatgtacgactacttatccacatctcg

SEQ ID NO: 71316 - DNA, 350 bp, Glycine max
  unsure (1)..(350): unsure at all n locations
ttgaccgcgatctctgagtcacctgctgcatgcagctntataagcgcgggtctgggagacaaaggtcaagtgttcgcgatatgctaatatgatgttccgagtactttggatttggtacgaccatgccctnctgatttccagctgggaaaatggcgagtggaaaacgccccggcatttacgcaacgagcataatgtaaacctttacggtntaaaagctctatagtggggcctangctttanaagttttccttttgtaaggctttgtgtctttggtnttgaatttatatacaaggatctttcttatctgtcctacgtctctacccatctcattcatttcatgttactttttt

SEQ ID NO: 71317 - DNA, 282 bp, Glycine max
  unsure (1)..(282): unsure at all n locations
tcggaagaaagtgatgaggtacaagccctanaggcanagcttgaaagagcccgggtagtctaagagaagttcaagtccatagccatcaaagtctgaaaagagtatgatgaactaagggacgtcaatatggccacagctgaagctntggaacgagaaaccaagaaggcccgaaaggaagaacacgaccaaagcaaagttntgaggggctttatagggcagcaatagtgagctcaagctccgaagaggtgaaaggaatcatcacgggtcaaaggcatgatcttg

SEQ ID NO: 71318 - DNA, 124 bp, Glycine max
  unsure (1)..(124): unsure at all n locations
tgcagctattcaatttctccgtgcttcaaaatacgataaacttatcaanaaatatttttcatctctctaaggcaaattctagactaccctcatttccactagggctttaagacagcttgatagc

SEQ ID NO: 71319 - DNA, 244 bp, Glycine max
  unsure (1)..(244): unsure at all n locations
ttgttctttttatgtttatgtatagaannnnnnnttaagaggcagtgaaccatttaacccactttcgccttagtacccttatctttagaactacctggctttgagagtctaaagcagtccggactgaaatagaatgcgaagagcatctcatttatcagtctagaccatgatgtgcacaacgacgcagcagtggtggtgcaggtgtatactcaatcacaggcaggatagtttacctaaaatgtca

SEQ ID NO: 71320 - DNA, 91 bp, Glycine max
acttcactatttctaggtagaaattccaatattctatattacctgctcattaactgtaggaggaaagcctcaacatacacccgcctaacat

SEQ ID NO: 71321 - DNA, 411 bp, Glycine max
  unsure (1)..(411): unsure at all n locations
catttggagagtatagtttaccaagaaatgctattcttattatctaaatggcatacgacctctctcaataacacaaacatcaatgttaatttagagcgaactcatgccatacttcctttcgaacattcactcgcaccagatattcttctaactaagaagaatgcacccaggcacaatcaaggcaccttcgntacctagatcacttatatgtacttccaaggtgtatttgctacctacatcacatgcactttctttgctaaatttacatacatgcatactcaaagcattttggctaccacaaatagcatacgtgcacattctggtatttctaatacctatacatatacacaacttgtgatgaatctnggctacctacacaataaagtgctacatatcatgctctattcaagt

SEQ ID NO: 71322 - DNA, 268 bp, Glycine max
ccccccctcaagaaagtagaccccccaaacaaaaatttgatagaatacattccgagtaaagggacgacccagggacgggctacccccgcacgcaaagataaaaaggccaggaaacgctccaacaacagacacgcgacagggtgcacgcgaacggaagaaaaaaaggcccggcagaaaactccgagaaaaccacacgacaggcgagagcgccgacagcaaaaggacaaggggtgaagagggcagcagacagaccagccacaagaaccgc

SEQ ID NO: 71323 - DNA, 330 bp, Glycine max
  unsure (1)..(330): unsure at all n locations
ctcactgatgcctcactacagatactttgaaaatagtatcccgttactcagacagggacaatctctgcttatttacgcttctatagctcgataacttttatgatatatacaatgcctgcatgcgtatatatcactacattgctagcatgctatagctatattacaactttgtgacaacgcacttgttatgtcctatcggactgtttcttcaacaaacaaaggactgaatatgactctgacaaatcgactacccctgtggactaccttaaaaacaacaacaagagctgtcatctgtacnaagagttcgcttacttatcttctcagacatca

SEQ ID NO: 71324 - DNA, 69 bp, Glycine max
  unsure (1)..(69): unsure at all n locations
ccctatttgctataaataggggaagacgtgaagaagaaaagggttcagccncttatgcacttctctctc

SEQ ID NO: 71325 - DNA, 347 bp, Glycine max
tatactcctcaatatttttgctcaagtttttgttggaagttcacttttcatatctttcataaacctataagctcacaaagatcatgaggggactcattcactacagatttggacagtaggagcttacgtgcataaggacactgtaaacatatgagagtatttaggtccatttaggaacttatgatgattttgagatatcaaaacctttgattagtaaaaggatctcttgagaatccttgtatataatgttgctatgagaattctatactacctctcagctaacatatgagacatttggctatgttgtagctactggagctcacttgttatctaattacttatgctat

SEQ ID NO: 71326 - DNA, 142 bp, Glycine max
gagttcctatctcggcatgtgagctcacttatacctaatcttgcacttggcaatgaaccaactcgaacaagacgttcatcgaaatcagacgataaggatgtcctcgattctattttagtaagaatctacgagtcactcgaaa

SEQ ID NO: 71327 - DNA, 313 bp, Glycine max
agtgttctcaaacatcgcttagagaattttgaagcccaatgagcatctaccccaaggatgataaaactcaagaaatgggcaaaagcagagaagcctaggtctatgacctaggagatttggccatgctaaatgaccccttattggactataataagttattaatttggctgattaggctctatgagtaggcctaaataagatttaccttgtttaggactaatattttgatagggagttgaattaatcctaggatttgatggggtggaaaatatgatggaagccatcataattaagggagacttgtatcccctgc

SEQ ID NO: 71328 - DNA, 352 bp, Glycine max
  unsure (1)..(352): unsure at all n locations
atctctaagcacctgcggctgcagctntaatattatgaaaacacgaaacttacttaacccaattttatgggataaaagaaaggattntctaaaatctcttaacaacaaagatgaacactcaagaacacaagtgtagaagtgactctataattgaaacangttgggatacgcaaagacaacaaataaactatcacacaaaaaaatcacataggaaacaatntatcatggaccaatcatgattaagaacacatatganaaatgacatctgacacaagaaatccaagtacataaatganacanaagacaactataataatatggcaccgaacaacttagctattaatggaacaat

SEQ ID NO: 71329 - DNA, 243 bp, Glycine max
  unsure (1)..(243): unsure at all n locations
tgctgtaataaagttggccaattcatggaaatcccttggatgctcattgtgctgcagtgaagcgaattctaagatatctaanaggcacagntctttatggtcttcatttaagacctgctgctttgggcaaccttacttcattagagcactttgtgatgctgattgggcatttgacattgatgacagacgatctacctctggtgcagctggatatnttgggtctaatctcattttctggtgggc

SEQ ID NO: 71330 - DNA, 148 bp, Glycine max
  unsure (1)..(148): unsure at all n locations
gcttctagcacactccagacaatagtctcaaagatcccaacggtcagatcatgaaaaagtgtcttttnagtttgatacaaaatttcgagatgatccaacggttaacgaaggctgggcatcattttaccgagcagcttctgtgttttct

SEQ ID NO: 71331 - DNA, 468 bp, Glycine max
  unsure (1)..(468): unsure at all n locations
gcgtctcgatatactatgggacacaatcttatattcgagtaaaaagttattggcgttttcatttgctcagagcttatgttctgaatgtcgagcatctcgatatactaccggacacatatcagacattccgagtaaaaaagntaattgtcgtnttgatttngctcagagcgttcaattctgaatttcgagcatctctgtatattacgggactcattcngatatccgagtaaaagttattgtctttgattggctagagcttctgtttgaattcgagctctcgatcactacggataaatccgcattcagtaaaagtatgtcgttgatctgctagactctgtctgattcagcgctcattactcggaccatcgactcgagaaagtatgcgttgattgtcaacttctttatacacgttcttatacgatcatcgcatgagaaatatgtctgattgtaacttgttaatcactacaa

SEQ ID NO: 71332 - DNA, 334 bp, Glycine max
  unsure (1)..(334): unsure at all n locations
ctcagcttgagccaatcaacgatataactntntactcgtatgtctcgatgtgtcccgtagtatatcgagacgctcgaaattcaaaacagaagctcttagaaaaatcaatcgacaataacaattttctcggtactccgattgtgttccgtagtatatcgagatgccccaaaatcggaatagaggctctgagcataatcaaacgaatataactttttactcggatgtccgattggtnccgtaagttatcgagaccctcgaaatcaaaatagaagctctgagcaaatcaaatgacaatcacttttactcggatgtccgaatgaatcccgaatatatc

SEQ ID NO: 71333 - DNA, 412 bp, Glycine max
  unsure (1)..(412): unsure at all n locations
tgaaatattaattttgatattttctacgagaatgaatgtcaatttatgatatacctcacaatgtcataaattattagaaaaataattttactaaaaatgttattcaaatatttttaaatgcttgatattatcaaaataaaaatttaaaaatgaagaaattgaagtttcttatcctgtataaaattcgtgaaatgaagaaatttaattttttaatccacattttttttgaaaatgaaagaattcanttgaagcattaaaatacctcattcaacacactctaatgtaatttgatcccctattttaaaatatganatttgcatggcactatatntaaagtaaaacattaatcttcttggattttagtctctatataataagacattagctctattgtaaatcacaattgtttcat

SEQ ID NO: 71334 - DNA, 385 bp, Glycine max
  unsure (1)..(385): unsure at all n locations
cttcaactcactcacaaagccaccaagtaaacctcatcactttttaatttaataagtaaggaaggtgcggcgtaaccacagaacctatattttgttctccccatcaggtaataatgtggacactattggcctttctctctgcatgtcatatcccgctgttatggctcacgtatgtgctgctattaaagatcacttctagaagccgactattgtntttcttgggtttaattatgccttgatcaatgaatggtggtttaattttgttttttaattcgtactgatgtgaatgtttatataactgctatacgtgttctttacgcgtaaacaacattatgtagaatattgtgttgatggtacagaaattattttcgttctttggtacata

SEQ ID NO: 71335 - DNA, 327 bp, Glycine max
  unsure (1)..(327): unsure at all n locations
accccgatcttaagtcacctgaggctgcagcttancttggttaaccncgtnatccaaaggaatgttaattctgatttctaatactncaacaacatctcatatggatgaatgactccggcatactttaagcttatgcacgggatatgatattatganattgagatgcccgaagaaacaccatttcctagttaaacatgcattaggtaccatgttcaattattttgttttgttgttgtgtgctctttctttagagttgggttaatgatcccaacatgggtggcttatggtgcctgacacatgccactaagattgtagtgtgaagtttca

SEQ ID NO: 71336 - DNA, 92 bp, Glycine max
  unsure (1)..(92): unsure at all n locations
gcttgataatgagaattgtccttctacaagcnttgaaattggcatctgaagtctgaaagctctaggcagataagtctgcaaaagctggaagt

SEQ ID NO: 71337 - DNA, 412 bp, Glycine max
  unsure (1)..(412): unsure at all n locations
agcttatcatnntaataatnntcatgaaataatgacatataccacactggttaatggacttgtttgttgtgttatcagaganttatattttggtagcatttatcacattagcatactgcatatgtatgtngagtagtccacttgaaagaannaataattttgataaagaccagtttcatcattcaatgattgaataagaataactttgcaaacaggatttcaaacaggtactttatgtgagaagaatgatagaaaatgctacgagaatacctaatatatctaataaacagattaacagattaacaaatgttcagtttactacgncaaatttaatttgtaacatcttcaacgggagggagatgaagatgatgacccaccatttncactcattctntcacccatcaaccgaaca

SEQ ID NO: 71338 - DNA, 509 bp, Glycine max
  unsure (1)..(509): unsure at all n locations
tgattattaaacacacatatttggagttcttatgttttattacctatacttaacataaaggacttataacactacaaaataaccatcaattggatgagtgtgatcaatttacacaagttttatacacaaaagttagtcatattcatcgactaacaactcccccaaatttacaggtttgcttttcctcaagcagaaagagaacaactcacttgtcctgaagtgataataacatgcaatgatcatgtacaaaggtgcatgcagaaaaaattcttgattgcatgataagagaatgaatgtaaatgacctcattacttgtctttcacacggtatgcagttatccaaagagaagaataatatgtaaccttaagaattagatgaagtaggcataagacagatatcaatgaaagtagctanaccacagtctacnggctactgttcactcaacacaagtgttanactattcattataacaactacagagatccatctttgacttatctatgcataag

SEQ ID NO: 71339 - DNA, 259 bp, Glycine max
  unsure (1)..(259): unsure at all n locations
ataaaagggatgccccacattatttccatgacacaaatgcaaaaatgatgagttggaaactttatgcaaaactggtcatgcatgcacctatgcggacactcaagtgtcaaaattttatggtcatgtgatgctagggctcacgattcatttcctctattttaatcaacccaatgtttccaaaatatgttcttttatcaatttgtgcattcatccgagtccatttcgggcgtccggnggaaattcacagcattcacccttc

SEQ ID NO: 71340 - DNA, 398 bp, Glycine max
  unsure (1)..(398): unsure at all n locations
tatggggtacccatcacatgtggtactaggtggcggtcgggcgatggtgctcaacaagttttccacatccacaaagcgcgcataaacccaccatcccctcgttgccacctccaactgagctcacgtactcccacgtagcccatatcctcgnttctctcaacaccgggtccccatcaatccttccaagctttcccaacatcaaagcaatacaacattcaaacagcacaagctatcacagccaagcanaacagggcagaggcagaatactctgcccaaagcaccaaccaacatcacagctnttctcacccaagaccccagtaacaattccttcgttccaattcgttaacccgttgatcgactcgaanatttactggaagtctctagtacttaagcctaca

SEQ ID NO: 71341 - DNA, 326 bp, Glycine max
tgcagcttatgagttggaacctaattcgtcaggccttgttttacagcacttgttggcctggaggctggcccctttagcattgtgaaatcggactgccgaacaaaaaatttgagccatcgtagatcggaccaccgaatcaatgagcatgtgccatagtgagtcgacattcgagtcaaagggtatatgtatccaggtcgacattcgaaaaacagttataaaatctagttcatcttcaaaaaatacaaaagaggggctataaagggggaataaccagcatggctcaaatctcaagtgtgtttgagacactgtgcggcatgggacttcca

SEQ ID NO: 71342 - DNA, 405 bp, Glycine max
  unsure (1)..(405): unsure at all n locations
cagctngaccggatgtaagatacatcttcttcaaccttagtcattcttgactccatttcattgtaacgcatatcaactngcagttccaaagtatcaaacctctcaccaacacaaggtttgaagaccatcaaacctttccaaaatattcgaaagaagagatgaatcttcntcctcatgttcttcttcaccaacatttctagcacccttctttatccaagatccatcatgctctntaacatgttcaaaggatgctatgactgaagcgcctataangaatngatctcttgatggaacatanggttcagaatcaagagggatgtngaagtgttgaaggaatagagtaactagatgaggataangcaatggtgcattcaatcgcaatgccttatgtatgcgatatctaac

SEQ ID NO: 71343 - DNA, 212 bp, Glycine max
tgaaccactatataattgtgctaaggtcttcctcctttgcgttaactgactaggattgattgatttgttgaaaccatctttttgcaattgctttatgttgagttaagttcaatattgttttgtttcaatattttaatgtacttggtttaaaaagttaaaaatctaaatacatcacctctggattttctttcacccctttgggtaatccctac

SEQ ID NO: 71344 - DNA, 282 bp, Glycine max
  unsure (1)..(282): unsure at all n locations
gatatanaaacaagataaacacgtcttggtcgtatttcatctangngcaggtacaatatcatggtcttcatagaaacaaacaattgttgcactttcaatgacagaagcgaaatacatttgcaacaactatgttgtgccaagcaagcagtaagatagaagaaatttagaagtgatgcaacataagcagaattctcccacnaaaatattttgtgacaacaagtctgccattgcattgataaaaatccaatttttttcacgtgaggtccaagcacattgatattc

SEQ ID NO: 71345 - DNA, 159 bp, Glycine max
  unsure (1)..(159): unsure at all n locations
tcagctttcagcagcttcatagggaatcnagccagagctcagttggcttttaaccttctattttcagtttaccttctcctncactgttgtttcgtcattctctatctccatgtattatctacatgtgttgtgttgaatgtttctaacatgatatcttat

SEQ ID NO: 71346 - DNA, 254 bp, Glycine max
acaagttatcaataacaatcaaatattttgctcaacctcgcaaatatggtaccctcataatgggatgtattcgcctttttggatccactggagacagggtgaggctatcttcttcaatttaatatagaatagttatatttaaacacccactatatttaaacatctattctatattcatcatttctctcttctttacgtcacatcatatataatagatattatttttctttttttatatctttcattacatatat

SEQ ID NO: 71347 - DNA, 375 bp, Glycine max
  unsure (1)..(375): unsure at all n locations
attcttcttcattaaaattattctttcctctaatggtgagaaatttagagaagaggagaggagattaacatatttaagtgtgatgactaaaatacttatattcgtgttttaaaatttttaattattacggataaacaaataaaattatattttaaaatatttttctttcatttgcaacaaaacaaaaaatangtggtttttcttccctgcatttaaatccctctatcacacatgatgtctaaatcaaatatgttgattttaattataatcaaataattacgaatgaatcnatctctctttataccctctaatntttaatagatcataattttcggatgatcaaggaacnttaatttgaaataagttttttaatat

SEQ ID NO: 71348 - DNA, 345 bp, Glycine max
  unsure (1)..(345): unsure at all n locations
tcattggggccaaacacaccaaaagattatgatgatggatggctcaaattcttataagggtaacttatcactttcaaatttgagcttttcaaactatcatgacattgtaaggaaaaacaaggatttcaaatcacacaatgtcaagagacttttattttcagaacaattacccatttctcanacatatcctataatggngctgtccaatcangtgcctgaatgatangggtggtagtcagtgctctttttaggcaatgaaaagcctctttgcatttatcattaaagtcanactccaccttcttttgcaacangttggatagtggaangggctactttgctaaatct

SEQ ID NO: 71349 - DNA, 466 bp, Glycine max
  unsure (1)..(466): unsure at all n locations
gcttatangatctatgcaccatgactacacctactatttgatangnttttatattatgctttgggccacgtacttttggcatgtatatctatatttcaattcttcaaactctatcttcatttctcttcatgtaaatgtattatcttctccaagtcggaagatgtttctacaccttccacctcgctgcgggattatagatataactactagccttaggtaatacaacctatctttagctaatatgatcatgtagttaattaggtcaaatactctagtagctacagctagtactctcgtactacatatgtattaagacacattgatcatgtatgagtgaaattgctcactgagcatatccaaaaaatataactaggtgactttctcattcttctttcattgcttcttctcatgagactgaattatatcatcaacatttaccatatatgtcttcgaacatctatatcta

SEQ ID NO: 71350 - DNA, 172 bp, Glycine max
  unsure (1)..(172): unsure at all n locations
cagctngaatctgaagctgaacacagccagctcacttntcaagataatatttttatgaagangctgcnacaagatccattatgcataanatgaactcttatgccacaaaagttattctatacactagaagatgtactgctgtacgtgaaaagaaagggaccacactttctgt

SEQ ID NO: 71351 - DNA, 270 bp, Glycine max
  unsure (1)..(270): unsure at all n locations
tcctgattcaccatataccttgacccacggtgagaatgtcaatccttattctctgaagcanaaaaagaatagaggggaaatntccaatcaaagaaaaagagaaggaatatctccaatgatagcaaaanaagaaaagaaggaagattccccaatcaaagagtgggagaaagcaaaaaaagaaaagaatgaaaattccccaatcaaagagtgggtagaaagcaaaagaaaagaaaggaaaattcccaatcaaagaatgggagaaagtaaaaa

SEQ ID NO: 71352 - DNA, 436 bp, Glycine max
  unsure (1)..(436): unsure at all n locations
atactctatgtctgagattcattttgcagaaaactgtgtcataagacatattcctaagatatatcgaatcctatgaagaataaataaagttcaagatctgagagttgccaaacaacatcaaaaggcgcactctattatgatagacctactctaacgcacaggtgttaagtcaaaatatatttatgtcttaagatgaatcaagacctttaattattttgattagatgtatataaataccaagggtagaagttgagtcttatgcactataataacatgccttgaaagtatgcattngatgtttataccataccaaataaagcatgatctgatccaccttacaatgacattaagacttattantattttgtggtgggactatttgcataacatcccttgactatgatctatgaagtaatgagcaaattaaatttcatca

SEQ ID NO: 71353 - DNA, 389 bp, Glycine max
  unsure (1)..(389): unsure at all n locations
gcagctgagctcgtgctactgccccatanagcccctcggaacttattcctgctccattcttnctttcnnggctcttttggttcccgctctaatgcttcaaccgtagtcatgtngacatctctcagctcatacactctttcctgacccaagtgactgccatctttagcttctccttaaccaatctcgttctttcgagcttcgctttcaaagctggcacttcttcgcttttcttaaggacttcagcttctttcccacttgggcctgttagctntgggagccaagttatcccttgcgtcctagacttcaaccacttgtggtagccacatacgaacaccattgctacttccgtaangctctcatatntcctttccactgtattccattcttta

SEQ ID NO: 71354 - DNA, 475 bp, Glycine max
  unsure (1)..(475): unsure at all n locations
gcttccgcataatngggagagtttagagagagaaaggtccaagttcttagagaattgagagtatatgttgtgtgaagatctgcagagaccagagctggaagaggaagccgtcctgagagcttgagatgagttngtgagtgatgtgaggtcctataggtggaggagacatccccactactttgatttctgccatctttcatctttctcttctcttttgtgaaaggaagcttcccagtatggaaagctaatcctctttggatcttcttganggacttgacgtaatatattttatctattaatgatgtttgtgtgtcactgtctatcaaacttcttctacatgctttgctgatccgtgatgctatgtttaggacttcatagtggaatggtgatctanactgtagacggctagtgatatttctaggatgngtcataccagtgtgatgtattatgagctgcgagtatcacagagatgcgt

SEQ ID NO: 71355 - DNA, 147 bp, Glycine max
attgttggtgatgttatcggtgtctgggcgaatatggtcttttgtgaccacaactgcagttctttggtgaagtgccatggaaaacagagcgttggacgagttcgaaatctcagaaaactattgtgaaatgctggttaaaacacgaat

SEQ ID NO: 71356 - DNA, 409 bp, Glycine max
  unsure (1)..(409): unsure at all n locations
gcttaccttgagaacagtatgttgcaaggtgcgtcaacactcaatagggcacgatgaccctatgttgtggtggtgcaaacaacacgcgacgcggaggcgcgacaatgtacgcttccttttgcggagctcacggtggtgcagggagaatgagcccaacaggagacgccagttgatagtacaactttcagacagtgatttcgatgtacgcgccgtgtcaattattgcacaatggggagatatatgaaagcatgttaacgacgatgtatttggtaacccgtctttcatactcaatatttctacgatgggtgttacaaatacactatctttgataaccttcggcctaacctacaaagacgatgttagcacanaacgtcattgtagacgtcacgctgccgtgtgtataccctaa

SEQ ID NO: 71357 - DNA, 489 bp, Glycine max
  unsure (1)..(489): unsure at all n locations
tctaagtcacctgcggcatgcaagcttctaaacttatacaagaatgaagctcggattatacttgntagactattgggctcagatatcttaagaggtnggggtgaataagatattgcanactattccaccaattataatccatctctattctgaccgcaagttacagagttccctttaaaatgaacttctacataatgattcaaatagaacaatctgaatataaatgtaaagcaataatatataaacgagtttaagggaagagaaagtgcanactcagaattatacaggttcggtcacacccttgtgcctatgtccagtccncaagcaacccgcctgagagtttcactatcttgtnaaatcctgttacaaagtctgaacacacaaggacagtccttcctttgtgtcagatatcttacaacaagagaccctggtctctcaatctctcttgaaagagatagatgacaatctgagcactaataattcttattg

SEQ ID NO: 71358 - DNA, 352 bp, Glycine max
  unsure (1)..(352): unsure at all n locations
agaaagatgttcggaangttattcaactaccaaattgatagagttttgttggagcanaatgggtctttcacaacaaactatatgataatggtgaagttatgagaaacacagcatggttagttgctatagaatactcacaagaagaaagtatagactacaaagaaacttattcacctgttgcatgtttagaggcgatacatatcttactttcatttgcagcgtataaaaatatgaagctatattcaaaggacgttaaaaatgcatttctaaatggcttaattcaagagtaaggttatgtgaacaatctccatgctttggaagtgaacctttcctcacatgtttcacactcaca

SEQ ID NO: 71359 - DNA, 406 bp, Glycine max
actttactttatgggatttgacctttgggccttatgggaagtctcaattgtgggcaatttggttgtttctgcttgatgggtcgaattggggtttgtatgaaatggccctacgcctataatgcgatttgaagccatgggacatgccacattctccacgttctcttgctttgatgcctaaccgcgcccccaagtgtcggtgaatgcctcatggcttacgcggagttatatgaacaccctgggctttggtgccatttttattttggactcttattcaaggtagatgccctttcagcagacaatttatcaaaccagaggggcttggtagtcctttggccatccttacccctcatattctcctaagtagattgtattaagatagtaatagataatcttgcatacttggggg

SEQ ID NO: 71360 - DNA, 101 bp, Glycine max
ctcactgccgcacgagtttccactatctttgtgggggaacgcttcaaagttatactgaatgaaagccacggtgatacatggcagaatgaaaagatcataga

SEQ ID NO: 71361 - DNA, 480 bp, Glycine max
  unsure (1)..(480): unsure at all n locations
gcaccaacttctcatttatgcataacatacaagttcgntatttaattttatgtntagtaacaagactaaacttcataataatatgaaagaataatttttatttaatacttggtaggatatattgaaaagaaaactgttgaaattagtatattttgattaattttgcaacatataagaaaggtgttatgtgtgctttctttaatgatacgatgntacgtggtntaatagacttataatgtaatgtaacattgaaacatcaaattatatatattttgtataanaattaatgggtatatttttgtggatgtatttattcaacanaaaaaattattggatgtgtttatttttgggattggcctcctgtttctcagctaagttgccttgcagactattatcaatgccgtttaacatgtttaattanatattcttataatgagaaaaagaatggacanggtnaatagtcatagctaacataaactt

SEQ ID NO: 71362 - DNA, 329 bp, Glycine max
cttgaagcctggcacaaggaaaaccttttatggagatgtaatgctctaataccaatgagaggatgatgatctctgtgatatgccagttgacatattattccaaactaataactttaaagtataaactgtattcaaataacccaagatgattagtgattttttgaaaatataaaaacatctgttgagtgctgtcaactgcaatgcatacaactagtacttttttgggatttaccccccccacagcaataattaaattgtttacagctatgcatttctctggcggtacacaaaatatggaagaactactttgtattgacaagatactagat

SEQ ID NO: 71363 - DNA, 175 bp, Glycine max
actaagcttgagaggttgaatgttcagggtgggccacctattttcttataagaaaatagaatatattgttgaagatatggaatataaaagagtttggcagtctacaacaaaagcaaaaagaatttgaagagatgagtgagcttgacaagaaaagggagagacagattaaatgatg

SEQ ID NO: 71364 - DNA, 158 bp, Glycine max
ttgcacccccattttactaagtacaccccattggctttttttttgtgaattctttttcgtaaagtacggaaacttatgaatttcgtaacgatacttgttttcttttcgtaatggtaccgaacctctgcggatacataatcatcccctttttgacttac

SEQ ID NO: 71365 - DNA, 393 bp, Glycine max
  unsure (1)..(393): unsure at all n locations
cttgacactaagcttactattaaaatgtactcttctaaagcttttactatgttgttaagtaaatgaagaatatanaagatacttatccaaaagtaaaagcgggaattaaagtgcatagtggaaattaaaagagttgggaagaagatacaacacacaagagtttttatactgtgtcaacaacaacccgtgcctacatccagttcccangtgagctgcggtccttgagaattcttntcaaccttgttaaaatccttttacaagcaaagatccacaagggatgtaccctcccttgttctctgtgaacaacctagtggatgtaccctccactagaactgatccacaagagatgtaccctctcttgttctcagtcaacaacccaagtagatgtaccct

SEQ ID NO: 71366 - DNA, 142 bp, Glycine max
  unsure (1)..(142): unsure at all n locations
agcttctaagggaagtttctcaagaaagcttctcaaggaagctttctagtctatataatagaagcatgtgtaacactctgttgtaactcttgatgaatgaaagtcttatgagatacacttcanagttccacttctctccctc

SEQ ID NO: 71367 - DNA, 271 bp, Glycine max
  unsure (1)..(271): unsure at all n locations
gtctaagtatggtntcatttcccaattagaattctccttttgcttnttagtaatgatttgatcaatcctagaggctttagatgtcaaaagattcaaagttggacaatattttgtaacaacatttctcttaattgagggtgtattgtactcacggccatagtaacatattctacttctggaggctataccttacatttgctaattaacatcctaaatctttctatgaaatcaataggtgtttcatccatttnngtgttcatatttagtacgt

SEQ ID NO: 71368 - DNA, 394 bp, Glycine max
  unsure (1)..(394): unsure at all n locations
gctctgctaccgcctgggctcaaaatcccaaaaccaaccctctattactatctattntgtattctttagntcctgaatgtacaaccttcaaattgtgctcgtcccctcctctttctgcaaaaagaaatcaaatgcttgtcaaacatggatgaagtcctaagataatcaatatccaagaaaacatagatgaaatcaccattaaaaagcacaactacctatctttcagagtcctttggttaatttgtcctgtctccttatgtggcgaggttttggttaataatcttatacttttgccttccanaaanaacttatcactaatcctcttttcttaatccaatattgtatgtattgatanaaatcatgggtgtctcacttgctcactcctctctccttc

SEQ ID NO: 71369 - DNA, 134 bp, Glycine max
  unsure (1)..(134): unsure at all n locations
tcagcttccccatccgttcttggatgacctgaaggctgctttcatcangctgtatctatacttctctaacatagctnctgatagaatccaattgtataacatgtgcaagaacgagcatgactctttcttgagta

SEQ ID NO: 71370 - DNA, 336 bp, Glycine max
  unsure (1)..(336): unsure at all n locations
atnggattatgggacacccgtcgtatgtggtactaggtagcgatcgggcaatggtgcatatcaactctcccatattcacaagtcaggcataagcacaccatccncaggtgcccacctttaaaatgagctcacgcacttctacgtaagccttattctcgttcctctcagcaccgggtccccaataaacccctcaagctttcacaatatncaaaaaaatcaatntcatttgtcatgaaactaccctaaaccaagaaaaacagagtggaggcagaaaactcagcataaaactcattcaaattccacaagttttcctactcacatacctcagtaacattc

SEQ ID NO: 71371 - DNA, 381 bp, Glycine max
  unsure (1)..(381): unsure at all n locations
agctnggaccaagcatgtncataacctgcatacatactctaaaaaaaatttaaatagtaagtggtgatgagaaataaaatgnngtgtgtgtaggtcataccatcacataatattccccttgtctttcttttgagtgtactttaagtattccatggctgccaccaagggtgcttttcacaaaacaaaacananaactcangcaaattcacttatcgaaagcaattgacaacatatatctcttgcaacataaacaaagcacctacttgtatacttgccactcgtaaggagggccataanntacagccttgctgntcctatgctcaaatttcaatgccacctganacacaaaagataagaaacatttcaatcaacttaaatcat

SEQ ID NO: 71372 - DNA, 411 bp, Glycine max
  unsure (1)..(411): unsure at all n locations
tggctagcatgtaacctaaccgatggtggtggtgcgctaatggaaagaaacatatatagatactattagtgtaaataataaaccgtctcatgtttttggttacaatcggatatgcaagattcgctgagctattctgactnttcatgctcactattnnttcttaagctagggtactaggtattatntatgtaacccgctgattttattctttgaagaatcatgattcattacagcgaanaaagcatcatgcatcattcatgcttgtttactgtaaccccagatttattctggatcaagatacttatggtggaagcgacaagttaactgatctgtgcctaccactaaatgaaaggctgtcgtgtactgttgacatcacacaattcaatatgttcgcattaatttataatattc

SEQ ID NO: 71373 - DNA, 360 bp, Glycine max
  unsure (1)..(360): unsure at all n locations
taagagggaatgtgcctcttcctaagggcactcttaagatcatttcattactctattcanggatccccatgaatacttcattccctaacaagggaagtccaacaatagaggcatactcttgaaagcttaaggtatgtcataccctaatttcgtccggggaaccttgcttgatgacatgcgacctttgtttggtcctttgtaggtgctnggcacccatcattangcaatttgtgaaattcgggacatgccgaataacaaaagacaatattgatgcacaatccgtaaagggtccgtgacacaccgganatcaaatggaagcatcgttgcataattagtgaggttccgtacattccgtaagtc

SEQ ID NO: 71374 - DNA, 263 bp, Glycine max
  unsure (1)..(263): unsure at all n locations
gaagctcgtaagcaaattgaacgacaatgacatttactcggaagtctattgagtccgaatatatcgagacgctcgagaattaanatcgaagctcgtagaagatacgaacgacaataacttttcactcggaagtgcgattgagtcccgtaatatatcgagacactcatanattanaacccangctctcagatacttctaacgacaataacttttcactcggaagtcctgatgagtcccgtaatatatcgagacgctcgaaatta

SEQ ID NO: 71375 - DNA, 424 bp, Glycine max
aattcgagcgtctcatatattacgggactcaaccggacttccgaacgttatgatattgtcgttataacttgcagagagcttcggttgtaaaattcgagcgtctcgatatattacgggactcaattgacttccgagtgaaatgttattgtcgttcaaatttgctacgagcttcgatttaaatttcgagcgtcacgatatattaccggactcaatcggacttccgagtgaaatgttattggcgttcgaatatgctacgagctctggattaaatatcgagcgtctctatatattacgggactcaatcgacttcgagtgaattgtatagtcgtagaattggtgcgagcttggtttaaatttgaggtctgatattaccggatcatctgactcgaggaatgtatttcgtcgaattgctcacttcgtttaa

SEQ ID NO: 71376 - DNA, 266 bp, Glycine max
  unsure (1)..(266): unsure at all n locations
cgattgatttctcgctctatcttactaacaggtattttatattattatattatntatttaccttctcttttatctcccacgtggttacggcacgactgaacggtctgaattctatttaaaccaaaataacggatgatacaatttaaacgatcggtgtgaaattaatttatttttagattaggcgagaaatgacttaaataaatgacttaagcacgtcaaaatgtgtataataagcgaatgacaacgagaantaaaatacatgaaac

SEQ ID NO: 71377 - DNA, 271 bp, Glycine max
ctctcttaaacctgctagtgctcttattgttttttttccctcgcacttgagtcactattgctacccatcagctccgcaaattgttccgcatactttcttgcaagccctttgtctttgtcgaggctctgcggtattgattctcttcgtacccggccactctccgacgtgtgagcaccacttgacttctctggcagtttgctttctaactgcttgaagctgactcttcgctttcgggctaaatttcttgtacactttactgggagccatttac

SEQ ID NO: 71378 - DNA, 263 bp, Glycine max
gaaaacaaaaaaaccgattttttcctataaaaaattattttgatttacatggacttttaggttaaactttcaaattttataccaggtcaattaagggaaaaacttaggttttattttttttcaggaaattatccactttaaaaaaatagttgtgccacccttggaacacttaaattctaaagggtgtgagataaattaggattattaaattaattaatgattttttcaatgggggaaaaatagttgggaaaaaagaaaaaaaa

SEQ ID NO: 71379 - DNA, 297 bp, Glycine max
ccactgaacacttcagcggactgatctacgtttgccatttcaattaatttaatggcatcgacttaatactgcatctaaaatctaccacaatattgtcctcttattaaagcaattgaatccgagctattcggggaactaaaacttttttcataaaatcgatacgtgttacccttttaagtactaattgatactataaaaaatcctaccctctcatttaatgtaggaaatttggcattcgaagtaaaaaaatctgtaaaacacaagctgagataaatatatcactttgtttaatatgac

SEQ ID NO: 71380 - DNA, 454 bp, Glycine max
  unsure (1)..(454): unsure at all n locations
acacaaatctaggtatcctatactcctcaattatatgnngatttcaaagttgagaaagtgaaatgagaatggggtacatntggagcanactctcacctcacacaagtctataacatcaatttaaacttgttcaaactggatttacacactaaattccaccgaaccaaaatttgaactcctcaacacccaatttaccctagaaagtggctcttgttcactntggtcattgggttttctctctagcacagcccaaactttctcataagtcctaaatgaaaattcaagctaggaataactcactntaacctccaaataccactaaatccagaattggccttcaactctanaacctcactctttntcactcatacaccatatctcactttctacctangtaacttaccttcactcaacagtttcataagcaatcaccataacatacagcatatataaa

SEQ ID NO: 71381 - DNA, 264 bp, Glycine max
  unsure (1)..(264): unsure at all n locations
tggaagatcttgagacattcaatcggtcttaacttttcactcgtatagtccgattcangcgcataatatattgagacgctctcgtgatatacaatggtcatacttccactcgatgancgaatctngcgcataatatatttgtgatgcacattattgaacaacggaagctctctagaaattcatatggtcatacctcttaactctcgagtctgatttaagcgcataatacattgagacgctcgaaattgaacatggaagctctcg

SEQ ID NO: 71382 - DNA, 255 bp, Glycine max
  unsure (1)..(255): unsure at all n locations
ctgcaactgacttggttanactgatgatcatgattgtgacttgtatgtaattattcggcaagattggatgagaggaagtgtgaatntcgaaatctgcattttgtgcagaatnttgctgtgaaattgtgcagcanggatttgcacaagtgcagaaaaatgctatgnttttgctggttgtggaaagagtagtgcanaatgagttctggatgcttgctagtagatcccaacggtcacaatgtaggcttatgcactata

SEQ ID NO: 71383 - DNA, 203 bp, Glycine max
gaagatcaagtcaataaccatcatagtctgatattgtattatgaactgaatgacatcaacttatccactgccgaagccttggagcaggaaaccaagagggcctgatatgaagaacacgtctgaaacatatcttgaggagctttatggggcaacaacagcgagcttaagctctgaagagacgaaagggatcagtcgcgagttga

SEQ ID NO: 71384 - DNA, 343 bp, Glycine max
attactttattctatggaagagaaatcacataatgaattccactctattgtgcttcttgttatcctaagaagcaactgacttacagaggcatgcatgtcttgcaatattattaagtatggagctctcattattcgaagataccgatattctattcaacactttgcgcgtttaaatcacaggttgggctctgcgagatctcttgtcgattatgctaacagattgtttcaccttgttaatgggcttctctccttcttattggattgtctgcttaaaggatcttgaccatccaatgtatgttctatttctataagaatttcttctaaaaccaaggtgggttcttaa

SEQ ID NO: 71385 - DNA, 219 bp, Glycine max
  unsure (1)..(219): unsure at all n locations
ccaaaananctagaatcttcgcacaccacattcatgttttttggggactttgaaccaaacgcaaacttactataacgacaagatatttagaagacgaggaatgccatcgcgacacaaaaaccgaccaaaccagttagggtatcacttgcacacaaacacaaggaaacaacaaccaagggggcagaatctaggctataacgctagggtgcacttcgcaca

SEQ ID NO: 71386 - DNA, 447 bp, Glycine max
  unsure (1)..(447): unsure at all n locations
agcttgaagatccttagagtgacaccaaatgcctttctagtggcatgaaagaagcacttactgggaggcaactcagctttctaactcttacattttacattacatttatttaggatagnttttagctttaagtttggagttcaaaaaaaatcatcactcagtagcataacactaacttgcttttttttagttttgttcatcatgtgcagccttattaatggccagctcgtttggaggaccacatacttgttgaccagggaggtggtgaggctgcaatggatgagaggaaatgttgagggttgttcanccctaagtgaagccttctcaagccctttcttttactctttgtgaatttttctttattagattaggtgtttagtatatgtgtggtagcttacgaatatgtctattcttatgaagataacgaaacttatgtgataagcaaca

SEQ ID NO: 71387 - DNA, 170 bp, Glycine max
  unsure (1)..(170): unsure at all n locations
ctctggcagatagacttgcttagctggaatggagctgaagtacatatgcacggatgccaactatnggtgcaaaggaagagggaacattaactgctctgagcttggtcattcttgcctctggaaaataagccgtctggtcattctcattccaacagctccttattatataa

SEQ ID NO: 71388 - DNA, 398 bp, Glycine max
ttaagtcacctgcggcatgcaagcttctggaggaagcctcttaatgaagcttctatagaatgctacatgaagttgcctcggtaaatacactgcccagccttcgttaaccggtggatcttctcgaaatttggtctgcaactttaaaagacaattgtccatgatctgaccgttgcgatctttgagaagatgtctggagtgtgctagaagcctcttaatgaagcttatggaggaagcctcttaatgaagcctctagagaaaactacatgcagctgcctcggtaaaagcgctgcccagccttcgttaaccgttggagtgtgctagaagcttccgttcccgagagcatctcttatttaagcatttcagcctttgctttcgtgtagcttaagaaaaacgtcatt

SEQ ID NO: 71389 - DNA, 421 bp, Glycine max
  unsure (1)..(421): unsure at all n locations
taactcatctttgncattcataatgactggcatacctcctttcttggggacaacctgcacctggctaacccatgcactatccgaaatggggtatataaggcctacttccagcaacttaagcacctccttacgcacctcttctttcatgagtggatgaagtcttttttgaagatgtctcactggtttgtaatcagattccatattgatnttttacgtgcaataagatggactaattcctttcaagtcagatatatgccattcaatggtagctttgtgtctcttcaaaatctgcaccagctgaacttcttctgttttctttaataagctactaataatcactggttttaattattgtgctcacaaacacaacttacatgtcangtaaaggcttaattctgttttgttttctgtatccactgtc

SEQ ID NO: 71390 - DNA, 366 bp, Glycine max
  unsure (1)..(366): unsure at all n locations
agcttatatctttcgntctccattctttgtccctaagtccttgtacaactcttcatatgctttgaaccgtgcttcacttaccacttttcttgtctcattcttagcattttaataccttgatcaattttcagcaatgttgcacctatctctcttgtttttaaccttttcttgaaccttttcataccaccaccaagattccttacctcttaacccaaaaccttttgattcacccaagaatgctttggcaacttttcttatcttcttggccggntataacaaaaaaacaaaaacagaaaatactacaaaaaagaataataaactaaactcattagacaagtacacacctcagttctagaaaagacttta

SEQ ID NO: 71391 - DNA, 506 bp, Glycine max
  unsure (1)..(506): unsure at all n locations
tcttgttcagaggtatattagatagtgataaaatgaatagagtatatatgtnctattctatattgagggcattctaaaatgaaatactagataagaacatgaggactaacctgngtattctcttgttggagagttaaaaactaatctcacaagttaccaagataagagattgattcttctctagggtttgattctaaacaaaacataatgatcaaatcctttaattgatcatatacttaaagaagatgattatttctcaactgtattacaccatattagtaaaacaacatgagaataaaagtatatttcggttttcactaaaaggtggaattgaagagattaagagagcataccagtaattttaattttgtctactcagcagaccccaccatagtgtgatggttttttggtactgtctaanaattctctactttttagattttgngttcaacccatatggtcatttttgtgagcaattgagtaatcaactttattattcaatatgt

SEQ ID NO: 71392 - DNA, 329 bp, Glycine max
agcttgagccaaaatcctgactcaccatagaccttgacctcaggtgagaatgtcaatccttaccctcggaagcaaaaaaggaagagaaggaaaatttccaatctaaggaaaaaagagaggaaaggaaatttccaatctaagagtgggagaaagcagaaagaacagaaagaaaattcccaatcaaagaatgggagaaagaaaaaaatacgagaatgagaagaatgaaagaaagctcctggtcaaagatcgaaagaaaacagaagaaatatgctgagaggtctttggaccagacaatatctgaacaatacggaattgtcaccaaatgaaca

SEQ ID NO: 71393 - DNA, 487 bp, Glycine max
  unsure (1)..(487): unsure at all n locations
tacccatcacatgtggtactaggtggttgtcgggcgatggtgttcatcaagatttccacatccacaatgcgcgcataaacccaccatcccctgttgcccacctccaactgaactcacgtactcccacgtagcccatatcctcgtttctctccacccgggtccccatcaatcctcccaagcttccacaacattcaatcaaaacaacattcatacagcacaagctatcacagccaagcaaaacagagcanaggcagaaaactctgctcaacacatcaaccaaaatcacagcttttctctcttaaggaccacagtaacaattccttcgatccaattcgttaaccgttggatcgactccaaaattntactggaagtctatagtgcataagcctacattgtgaccgttgggatcgactagcanacatncagaactcattctgtactactctttccacagccaaccacacacaagcaatttctgcaccaagct

SEQ ID NO: 71394 - DNA, 497 bp, Glycine max
gacctcagagtcacctgcggcatgcaagcttccaagcctgtatagtggcttagggagttttgctgtcttccctaacttttggggtctgcgatgaactcgctaagcgaacatgcttcgctaagcgagttcatacgttttgatgaaattctgggtttcaggatgaactcgctaagcgcagcctgttccgctaagcgagttcaacaagtttgtttaaatttctacaggttggatgaactcattaagctattgcactacgacttagtgagtctttgagtcttgcttttatatttgtggggttgtatgaactcgttaaaccggccatccgtacttagcgagcacacttagatagttctgaaacttagatagtccatcatgctaagcgcaatttcctctcttgtagtgaataaagcttagcaagtcactctcgcttatccactgctgtcttttagcttaacgagaaggtctcgttaagccagtgttattatttttctattatc

SEQ ID NO: 71395 - DNA, 359 bp, Glycine max
  unsure (1)..(359): unsure at all n locations
ggggtgaattaagatatttcaacttctcttctaattgaaaacctatcttactttctactcaagttgtgaattcccttaatgacaaatttcttaaatattaattcaaatgaagcaactcgaattatgaatatatagccataataatttaaggagattaatggaagagaaaatgctaactcaggtttatactggttcggccacacccttgtgcctacgttcagttcccaagcaacccgcttgaggagtccactaacttgtaaatccctttacaagttctaaacacacaatgacgaccctttccttgtgttagagattttatcacaagagactcacagtctcttaatcccttnagaatgaga

SEQ ID NO: 71396 - DNA, 424 bp, Glycine max
cagcgcgctcagcttatgtggacaaggaatcctttccttgcggacctcgcggatggcccatgcttctactcatcctttctagagaacttctcctcacgtcagtgcatgtaggcttatatcctagccagaaccttccttgtttctctttgaactccaccaagctcgccacaccatcttcgttccgacccaaacccattttgggctcgtacccatgtcctaacattacacgggctaccatcaatgcagcactagatgagcagggttgcactgtgggagactcgacataagtggtgctcaccacctccaatgcttgaaaagccgtctccaaggactcctccgtggcttctatatatggcgtagaacaaggacaacttactagaatctcttcctccctcgagactatgactaacttgctcttcaccac

SEQ ID NO: 71397 - DNA, 390 bp, Glycine max
  unsure (1)..(390): unsure at all n locations
agctngatgtgagaaagcgtggaagagtcagtcttcctacnttttgttgttgaccacagagtggtacctggagatatgtcgcggnggtcaggagaccttggggacgtcaggtggagtgctatttcccaaaaccaagcttgaccaatcccgacccaacccaggcatagtcagtcagtgagaacatgtgatgtacctaaacaggcgagctcctagcagtcaaccaataaaagaacaaagtccacaaagcaaggaggcttgtgtggcggctggccagctatgaatcttgagtggtatctgaaatttggcctctggtaatcgattactaatgatgtgtaatcgattacaaggcttaaaaatggagacaggatgttaagatggcctctggtaatc

SEQ ID NO: 71398 - DNA, 420 bp, Glycine max
  unsure (1)..(420): unsure at all n locations
agctngattggtgatatatcaacgtgcataaattttatatcacaaatctaagaccaaaacaataaaataatcacctatatgttggtgagtatcttgtcataatgaatcataaattaaaagttataaactatatatgaatcggacaaaaatgttaaagaaagaaaactcaccaacacattgaaatgaagtacattccttattcttaaactaaagaaaaccacaatgacatatgagtgtttttgtctcgcaagaaatctataccacttctacttcttatccttgaacattccctttggatcccacaacattgatatagaggcataaaaaatcaaccctagtagcactaaacacctagaaagaaatgttgtcacgaaaaaaatctacacgaaacttaataaataaaattgattcaccaaattc

SEQ ID NO: 71399 - DNA, 457 bp, Glycine max
  unsure (1)..(457): unsure at all n locations
actcagcttttatccaggcaattcttggtggtgattctccttcttccttttcttattccctagtggatggggcctcccctctcctcttctcctttgccttccgctgcatctccatggtgaaaaatcaccattgaaggacctcattgaagctcanagatccagcctccatagaagctccacaagcaagcttccatcaataagtctgggtctcatgttgaaagactatgaaaacagagaagaacaaagttgatacattgatagctatttctccaaacacatggcaggagatgcataagagtntattcatatttctccccaaaatagtgaatatgtgatttatgaagacaacaaacaaaggtcacttgatcaacaagcccaacaagtgatatcaaatgatacccacaggtcacttgtctttgnatggatacttctgatgaattntgtctatgattgtaac

SEQ ID NO: 71400 - DNA, 458 bp, Glycine max
  unsure (1)..(458): unsure at all n locations
agcttataactttgtagcaatggaatcaagtttatcaaacgagtaatcaaagcagtaggctgctacatacttaaggccagagaagacaaagaatattagtctccaaattttgtagaaatattttttaagctctatgcacctcttaaaaagtaagccacatgaataaattgtaacctaaaaacttgggctacagctccagcaacatatcagaaaattatatagaaaaatgtattaacgatttttctcaaattaaaatcgttaaaattaagaaacaaaatattatccagtttgaacttatttttatataaaacaagtgtaagaacccatgacaatttggcgaatgcaaacaaacaaggatagggcatagttccctaccctctatataaacgaggtgggtcagaattatctaactgtttttcaaaagaagttgatattgtactatacngcattttgaagat

SEQ ID NO: 71401 - DNA, 426 bp, Glycine max
  unsure (1)..(426): unsure at all n locations
tattggattgtcattaactgaaccctatactttanatgattatctcctaataccttgtttagattctaggagagcatatggttccagacatatttactctaaatttgggggagaaaagttgaaaagaatgaaaagaaaaaggtttagcatcaacacacacaacaaataagttgtatgttaaaaaaaaagaaaaaaaaataagttatgttgttacaataaggtcaaaagcaaattaagaaaagggaatagtgagaaggctatttgtacaaaacaagaaaagatcaacgggaatagtctaggacttgtgctctcttagaatctaaacctttgaatccttgtaaaaccaatgaatttttgtagccaagccttactacaagcctgagtaagtccttctgattttgttatgcattttgacttgaggcatga

SEQ ID NO: 71402 - DNA, 420 bp, Glycine max
  unsure (1)..(420): unsure at all n locations
ttaagcaccgccgctgcagcttgctagacgagatgaagttattatttttgatatgtntncactttaaatggtggtgcagtaagttggaaaagtttcaagcaagctacgatagcatattcaactactaaagcagaatatataacggcaagtgaagccgctaaagaagttgtttgaatgaaaaagttcatatttgaacttggtgtggttccttcattagaagagtcggtcccattattgtgtgacaataatggggctattgctcaagcaaaggagccaagatcacaccagaagtccaaacatattttgcgaaggtatcacttgattagagagataatagaatgtggtgacgttaaaattgaaaaggtagatggaaaggagaatgcagcatatcccttcaccaatgcgcttggcatataagag

SEQ ID NO: 71403 - DNA, 421 bp, Glycine max
  unsure (1)..(421): unsure at all n locations
tctctcagtattntaatacntcttgattctgccggtcatatgggatgagatagaatacttcatgccaaactccgtatgccatgcactgtctagcgtactatgcttggttctcaccaccatagctcaacgaaagcatgaagatcgcacgatgcagttcctgcgagggttgaatgaacactttgacaatatacattctcatgtgttgctgatggatccaatacccacaatacccaaaatctattcgtacgtggcacagcttgaaagacaactaagttaccatcctttatcaagtttcaatctcgaacctatagaaatatctttcattaacgctgtcgaatgtgtttgtgaattctgtggacgcactggccataatgaaagcgtttgctacatgaaacactgtctactctctcattacaatgga

SEQ ID NO: 71404 - DNA, 289 bp, Glycine max
ctcaaacaaacaaatcaaacgttacaagacaattataggtgctggttgaatacctcacccactcaagtgtattacacaattatggcttttctctaatgaacactctggccttttaccactctaattccccttgagttcttatgccattcaagagattatgaccacaacatagaacaattcaccaatatgtgtaaggtaaggctagagagacaaggaaaaggcttaccaacaaaaaggcttacaatggttttaggcgcacatgaaggaaatataattcagaatctatgaa

SEQ ID NO: 71405 - DNA, 423 bp, Glycine max
  unsure (1)..(423): unsure at all n locations
atactcagcttgttggagaagtgttgacacccatatgtttgctagattctgtagaagacctcaccttaggacctgaagtggtacaacaaaccaccgataatgtcaagttgatccaagaaaggatgatgactgctcacagtatgcataaaagttatcacgataaaaggagaaaagacttataattcaaggttggtgatcatgtattcttgagagtcattccatggactgnggttggtcgagcattgaaatcccaaaaactcacacctcgctttatcagtcctttccaaattcttataagagtcggtcctgtggcatactaaattgcatatccacctttcttttaatatttacaatgtccttcatgtgtcttaactcccgaagtttatacttgatccatctcatgtgatcatattggatgacgta

SEQ ID NO: 71406 - DNA, 330 bp, Glycine max
  unsure (1)..(330): unsure at all n locations
ctacaatagcccatcataccggtagccctacttcatcgcaagccaataaaagtccttcttaatcgatcttgtgtttctcactccttggtaagagatgaagtacgaatattggacctcttgttagaggttattgctaaatagcttaaacacatatgactgagtgaaacagtggccgtgagactgtgggtagcacctttcatgaancagcctgctgcctatctttattgacatgagacgctcactaacatgttatcttctctaacaaactgcctgccttgtgactagaaattgactaagacaggatgcttcatcttgtatcatgagatgaat

SEQ ID NO: 71407 - DNA, 421 bp, Glycine max
  unsure (1)..(421): unsure at all n locations
tatgggttccttgagcctcagtctatatacatgtcaaggatagacattatatatgtcaacattacattgaagcatgggtcaaggaatcacaacgacaagtgttcttaggagcttacttgaatcagtaagttaaatttatgtagtacattataaaaatgttagcattataagtacctaattataattgtcaactntatggcacattcgcaactggttgttttgtgtccaccagacagtattggtgtttggttntgttctttgcgtaagaagtctgatattagcatcaaagctgcagttaacaagtaattatttaatttataattaatttagtgtttaaaaattgttaatatgcaaaaaggatttcgtgttatatgtgttatgttatttttgaaccagcgcaatgaagacagtaaccactact

SEQ ID NO: 71408 - DNA, 445 bp, Glycine max
  unsure (1)..(445): unsure at all n locations
gcttgtcgcacatcgttcgcgtgaggatatttatttttcaggttngaagtaaaggagaccttctatcctataacgcaacgtggcggacaaaaatgggtagttaacttgaatgaccattattgtcaatgcggaaggtattctgcgcttcactatccatgttcacacattattgcagcttgtggttacgtgatcatgaactactaccaatatatagatattgtttacaccaatgaacacatcnttaaagcatactccgcacagtggtggcctcttgggaatgaagcggcaattcctccttctgatgtggcatggacactaatccctgacccaactacaattcgtgcgaaaggtcggcctaaatcaacaatgataaggaatgagatggattgtgtcgaaccatctgaccaccgacatatatgtattatatgtggagctgaatggcaca

SEQ ID NO: 71409 - DNA, 425 bp, Glycine max
  unsure (1)..(425): unsure at all n locations
gtcacccaactcgcccaggcgagcaaggaggcttcctccatattctatcgccttctggaggaatcctctggagggcccaagtgggcctgagtgctatttgcacccccatttttactaaatacaccccctgccttttttgtgctgcttatttcgtaaagttacggaaacttacgaatttcgtaacggatacttggtttctttccgtaatgttacagaaccttgcggattacataatcatacctattttgacttacggaacgttacggaacctcacgaatagtgcaacgatgcttctcttttgatatacggatgccacggaacactacggattgtgcatcaatactttctttngattttcggcatgtctcggaactttacaaattgcctaatgatgggtgccaagcacctcacaacgaccaaacaaa

SEQ ID NO: 71410 - DNA, 421 bp, Glycine max
  unsure (1)..(421): unsure at all n locations
agctngacaaatcagtttcgtgcagaagattcttcattctgttggtccatatatatcctctcatcgntgtatctagcattatattagccgccactccttcttgggtgagcccgaaagcaatntttcatctgagagtgaatcctgatgcatgggcctggtcttgggatcattgatcagttaattaattctaggaccgagaaaacattttctaatttcttcaaggtcaatatgacgtagattccttgcacgatcctctataacattattttctctgctcttctccaaatatttcttctttaggcgttgctcttgctggtacttccttagaggttcacctncaattatatatgtactgtccatcattttagcatgagcagatgcctcatcaggggccatctgctcttccatgtactttctttga

SEQ ID NO: 71411 - DNA, 468 bp, Glycine max
atcttgatagcgatagacatgcaagatatagatattacttataaaaattcttgtgcatttaagttatgttaactgaacaataaaatcttcacataaatataaatatagtagacaattggcaaccacattcttatatcaaaataattattttgcaggtatgttttatttcatcttaaatggaaaatataataaaaagacctgaatcaaaataattaacgtttgggaacatgaatcagaatcttcctcttttatataaatacatataagtactttttgccaataaaaatataatcttcctttcttaaaagaaacatatgaatatagtgatgacggatgcatcatttcgtttatgatactcaggaaaagagatagtttaaagaaccatgttatatgcgtacttgcactataaaacgagaatatgtcattgacatgagttaatttaataatatttattttaatattaataat

SEQ ID NO: 71412 - DNA, 259 bp, Glycine max
cttttttcgaaaactcccggaatatgagacctattattatgactgtacgtttgactacatcagtttaactgctggtggctcgccgcctatttgtgaataatctgaaactgataagtccatatgatacacatgcaaacttatcacacgcttaattgcacctaatgatgcaactacaaggggataagcactcagaaacttgtacatactttaactaccattttcgaattatataagaacctctcgccttttcacctttttg

SEQ ID NO: 71413 - DNA, 486 bp, Glycine max
  unsure (1)..(486): unsure at all n locations
acctgcggcatgcaagcctttcttctaccaaattatttgtgtaaatatatattttatatttaagtatatatatatatatatatatatgtatataatccttaaataacaattaaataaaaattgagccataattccctatccctttacttttatatgagcatgtctatttaatttgatatctatttatttatttgagatggttctttactattttaagtattggtgtcaattcaacttatgtaataaataaataatcttaatttaattaagcctatatcatactttttgcttactacaatttctgtatattntctntactataataagtttaaattactaacagtgatatcctaataacttttttcaaatgagtattcaatcaactcaatttcaattacaaagatctatatcaacctatacaatcttgattttcaaagttcacataggataaaatgaacttcctcctttatnttatttattatacac

SEQ ID NO: 71414 - DNA, 341 bp, Glycine max
  unsure (1)..(341): unsure at all n locations
acaaatttttatacacatcttttactattngtatatatttgcatctaataaaaataattaggagtcattatttgtctttaagacatcaaaatctttgacttgacaaaatacaaattgtgatgtgctcaaaattctggatgctagcatgagatcttgcttacctagccaaggtatgggctataagattaagttgcctctagctgaaactcaccaaagagtttggtaaaagagaacggatggttctacaattattcacaatacaatgaaaatcaatggcacctttatggacatgtttgactccctcgacnactgcttagaagtctagctcaaactctgtgtga

SEQ ID NO: 71415 - DNA, 287 bp, Glycine max
acttatagtctctgtgcataaatcaaacttgcagtaaacgtatgcctggatcactaggacatgaataacaagatgcgcaaacatttgcttcttgtgtatatatgaatatacattcatttgaaagtcatgcattttagacagcttatttctaacataatgtgaactaatatctgagaaaaataatatttattgtctacacagctaagatattggtcttattatttgggtacacaatatttgaaggttgtgttgatgcaatcctatcccgcacgggcattgtgtagaag

SEQ ID NO: 71416 - DNA, 446 bp, Glycine max
  unsure (1)..(446): unsure at all n locations
agcttctacttatgtggcagggcgggcttccttcaccttcttgtctccaacgngaactntgaccattgttcttccttcccgcgatgcttcttttcatgtccgcctgagtgggcttatagcctaaaccatacttcccacgatttccttgggtatttatcaggctagttatgccgccgttgtttttttctaaacccatcccgggttcataaccgttccccaacataactcgggccatcattaccgctgcatcggacagacaaggctgcccaaagagggagtccacggaggaaatgctgaccacctcanaagactggaaagcagtttctgacgattcttctgcggcttccacataaggcatggaggatgggcagcttaccaagatatctttctcgcctgacacgatgaccaagtgccccctcactaccaatttcagcttttggtggagt

SEQ ID NO: 71417 - DNA, 419 bp, Glycine max
  unsure (1)..(419): unsure at all n locations
cgagatgaggaagtgttgaagggtgaaactttctgcttctattgtntaccacagagtggtacctggagatatgtcgcggtggtcaggagaccttggggacgtcatgtggggtgctattgcccaaaaccaagcttgaccaatcccgacccaacccgggcatattctgtcagtgagaacatgtgacgtacctaagcaagcgagctcctggcagtcaactgataataggaaaacaagaccacatagcaaggaggcttgtggtggctggccagctgtgaattntgtgtaatatgtggattgtggcctctggtaatcgattaccaagggtgggtaatcgattacaaggcttataattgaagacagggggctaagatggtctctggtaatcgattaccaaggggtgtaatcgattaccaggcttg

SEQ ID NO: 71418 - DNA, 387 bp, Glycine max
  unsure (1)..(387): unsure at all n locations
agctntgagccanaatcctgactcaccatantcttttatctcgggtgagaatgccaatcgttaccctcggaagcaaaanaaaaaagaagagaaggaaaatttccaatcaaaggaaaaaggagaaggaaaatttccaatctaaggaaaaaggagaaagaaaatttccaatcaaaggaaaaaagagaggaaaggaaattcccaatcaaagaatgggagaaagcaaacagaaaagaaaggaaattcccaatcaaagaatgggagatagaaaaaaacagaagaagaagaaagggaagacagttcccgatcaaagaaaacagaagatatatgcagaaaggtctttggaccggacaatatctgaacaatacagaattgtcccaaatgaacaaa

SEQ ID NO: 71419 - DNA, 441 bp, Glycine max
  unsure (1)..(441): unsure at all n locations
tccatcaagtggtaatcagagcacaagatcttcaagtangtgctccttatacctccattaatttgttgctgtaccttctcttccattgttgtttcttcattntttttctccatgtatctcctcacatgtcttgtgctaaatgtctttaacatgattctttagagtttccaccaattaaacttgctatagaagctagatttgattttctatggttcaaatgtcttgttcttgttcttgaaccatgaattgtgtagagtttaggttcctttgaggtttgtcttgttattatttgtggctgaaacataaatcataaaattcttacaaaaatattaaagtagaagaaaacctcacaaatctatagtgacttgttcacctattgtagttatgtcatataagtcatgtctagtcatgaaacttgcacataagattcttatgtgtgct

SEQ ID NO: 71420 - DNA, 441 bp, Glycine max
  unsure (1)..(441): unsure at all n locations
agctngctnganaagcttctatggaggctagatctttgagcttcaatgaggtcctttaatggtggatttcaaccatggagatgcagcggaagataaaggagaagaggtagggggaggtgccatccactatggaataagccatggaaggaggagcttcaccaccaagagagtgccttggataagaagcttagagaggaagcttgaatgaatgaaaaaaatgagaaagagagagggggcacataattgaaggagaaaaagaggcagagagggtgaactttgaagtgtctctcacaagtttcacattcatcaaacttacccacagtgttacacaagcttctattatagcctacgtagcttccctgagaaaattcttgagaagcttccttgggaagctagtgttacacccctcaatagctaagctcaccccatgccaaaatacat

SEQ ID NO: 71421 - DNA, 423 bp, Glycine max
  unsure (1)..(423): unsure at all n locations
cgcagcccaccatcttttatattggagtaccgtttatgtgnctatcatcacgattatcgtctccctttccattattgagggtaccacctgagccgccaaatccctccaccttttgggcgtgttctttgaaagatccatccccctttttgcacatgttctgtagttgcatcctattcagaaccatatcaaaattgtactgatactgcctaacacagacaaccattatgccctttcaagaatgggctcgggaaggttccaagttagtgtaccatgtaacagctaccccagtaagactttcttggaaggaatgtatcagcaattcctcatcttttgcgtattcccccatcttctgacaatacattcttagatgggtcttgagacaagtagttctcttgtactttgcaaatccatcacctcgaactt

SEQ ID NO: 71422 - DNA, 289 bp, Glycine max
gccgcaattctattagaggctattaaaaccttttttacagagaaaaaacacggccttgctaacctaactatactggaaatcagattcatatttaacatagagctgatatacagtgataggggctacaattagatgaaaattaacacataaagggattagatttaaaagaaagcaaattccctaaatatttataattcttaattataaaaaactataaaattaactacatcacgttaatacttcatcttttgattatgctgtagcattagctttaaccgaattataaaga

SEQ ID NO: 71423 - DNA, 483 bp, Glycine max
  unsure (1)..(483): unsure at all n locations
agctntagaagaaagtttggcttttacatgccctactcctttgagtggcattagtattgggtgttaacttgattgttgtatcttagtacatctgatatctatgttgcattttgcatcaccatagagtgactgaagaaaatttttataagttaaaaaaatttcttagacgcaaaaactcactgttntaataagttacaatgttgtcgtaatcgattacaacaagttgtctaaagcttaaaaagttaactctcgtatcagtttaatcgattatggtagtactttaatcgattacactattgtttgagacaatgactaattntttcatgagtctctactttaattgattactagatggatcaatcgattacttctctctagnttcaagtngtcanaggtgaacaagaacactttaatctattacttaggtcatctaattgattacattgttcttgaggtggtttcagatgtggatgacacttcatc

SEQ ID NO: 71424 - DNA, 457 bp, Glycine max
  unsure (1)..(457): unsure at all n locations
gctttctctctcctcactcagcanaacagaaatttcagacagccctctctctccctcacgttgccattctcttcttcttcattctccattgaagctccacacaaagcttcaacctttggtgctcatttctgccccaaatcgtgaaaggagagcattttcggggtcgtgaagtgcgtggctacgagtgggacttcgaaaatccaggtttgggtggacttctttctctcttaaatttcgtgggtatggggttntgggagatatgatggatagttntgttagttttctgctgtgtgatgtttatttgtgaaggaactctgtgagaacttgttgaaattgccatggtggaatgagttaaacatacccattctggtntaacggttttgtgatgatgtttgtgatgtttatatgctgaaattgctgatggaaatctgttagagacgaagggtagaactaacct

SEQ ID NO: 71425 - DNA, 356 bp, Glycine max
  unsure (1)..(356): unsure at all n locations
agctntgaaaanatctacaagcttcgtatggtcttaaacttgttaaagggcatggtataaggaaatcgaccgctattttctaaaaagaaggttttaaaaagagtgataatgaagtcactttatatgtgaagtgataaaaaaatgaagtgccactcattgttttcttatatgttgatgatatatntcttatatatagggaatcaaattccttataccaattcaagaatagtggaaccttggagaatctttatgatagatacaattaatgtataagaaaatgatggagagctaccatgtcgaagatcaatacaataaatataaacaacatttgacagcttctagaaagagaaaacaat

SEQ ID NO: 71426 - DNA, 362 bp, Glycine max
ctcattcaacaatgaacatgcctattctatctgtaattttactcaacagcgaccaccccacgacacataaagcttagggattggaatatatacctctctcccgccatgtgtcatgagccatcactgttcaactaccatgaccagggtcccttttctgctatctaggaagcccaccacaagagattaatcttactcttaggtacccaagacttttgagtccttttcttgtgagcctatgggtgctgataatcactggataaaccctctgatgagttgcccttatcatggaggtcactgcactgatgagactcatgacccactttgtcaaacaatagcaaataacgacttcttcaccatgcata

SEQ ID NO: 71427 - DNA, 466 bp, Glycine max
  unsure (1)..(466): unsure at all n locations
taagtcacctgcggcatgcaagcttcaccttctggtcctcctcataggaggtgtatgataaaacatgctctattntcatctcccactccaagtaggccttcggatcattcttttctttaaatggaggaatgttgagcttaataccatcaattcggttttgtctaggaacaccatcattccctcttctcctcctttcttcttcattatgatctctattctccatttgatccaacctctcatggagcgcatcatctcgttgtttcattaacctctccaaatgttgcatcaaagcttgcatttggaattgcgaaagccccactccatcattaggattagtacctgacatctcaaacaaacaaatcaaacgtaacaagacaattatagttgcgtgttgaatacctcacccactcaagtgtatcacacaattatggcttttctctaatgaaacactctngccttttaccac

SEQ ID NO: 71428 - DNA, 419 bp, Glycine max
acattattattgctaatatacatgcacctatattcgatcaatgcaccctcgttacctatattattcacatgaacatccaaagcgtgttagttacctacatcacacacatttcctttgataatatcacatacatgcatactctaagcactttggctatcaaaaatagcatacgtgcacatcttgggatttctcatacctatacatacacaaacttcatgatgaatattgactatctacacaataaggtgctacattatatgctttttcaagtgaattactacactaagccgcatgcaaatagaagtatatttcttttgctactaaattgattcaatacaaggtatgttgtatgatttctttaataaatgcacaattatagattttggagacatttacacaataatattgtcctcatcaga

SEQ ID NO: 71429 - DNA, 182 bp, Glycine max
aaacaatattaaaacaaaaactaacccaacgctattctggtacctcagttaacccaaaaaaagaaaattattactaaataatccaaatattttggaaaaaaaagtattatcaaattattaaaaaaatccatcggacggttttctttgaaaagtttctttaattaattgacttatacccaagt

SEQ ID NO: 71430 - DNA, 474 bp, Glycine max
  unsure (1)..(474): unsure at all n locations
tcagctgactggtggggcaatgctgtggggtcattccatcttgctatttgttgtttccaatactgagacattanctaatattatatgtgcgctctatttgatgtgttcttgatatttaaactatttgtctaaggatattattgtgttaaatatttgcgttaatattggtgtcgcttacgctatctattagttgtggtcttgatattacaaatatttgtttcacgttaatattatgtcaattatatgcgtcacatatcttacgttaatgatctgtgctaatattctcgtaatttaggttaattatttgtgttaatactacacaccttacgtataattattngtgtcaaatagctttgtagtaatattcacaagatatattgtgtaactttgcacatattgtataagattgtcttngcataataatccgtgctcattgaatatatatatatgtatgtctctatctctatatatata

SEQ ID NO: 71431 - DNA, 474 bp, Glycine max
  unsure (1)..(474): unsure at all n locations
gatccttaagccacctgcggcatgcaagctnttctntctcaatcaacctgtctatagacttacaattctaatcgcaagtgcacattctagttctttctttgtctaacatacatacttgctcaaacttatgaaaagaaacacaaactccatcacaatcatgcattcaacccataatcaattcataacaccaattttcacaaaaagatataaatgtttcactgcataatcatcaaagtcaagttaaactgttccatatgcttcaaaacatgcatactaactatccacagaagaaatagaagtatatatgaacattaaccaaaataactaagacactgtactgaaatataataattatatataaaaaaatatccaagaagtaaaatcctcacgaattaaaattcttgagacatgtcctgagtatcatgcgtctgaacatcctcctcatctgtcagatgaagtactggagtctggagt

SEQ ID NO: 71432 - DNA, 476 bp, Glycine max
  unsure (1)..(476): unsure at all n locations
aagcttctaaggttcacgcttagcggcgccatacagcttagaanatatactaagtatgggtattgccgtaacgaaatgcgcttagctcaaggtaagctggcttagcgtgcggcttccaacaaaaaatatgactaagttacctgggcttagagattcagcttcgcttagccatatgcatcttaacgtggtaggcgcgcttagcgagttcttccaagaacgcgtatattcaatgaatactaatgaactctcttagcgtagcatgctcgcttagcaagttcatcgcgttttccagaaaaaacgcagaaaacacagttcattttcttgcacttttttgagcctctaaaggcaaatcaaacatgcaaaccaaccaaaatgacttctacagtacaaacatatataaagtcctaatctttaactacttctaaaaacattcaaaccttaagaatctanagttaaatttaagaatttctaaccta

SEQ ID NO: 71433 - DNA, 461 bp, Glycine max
gctatcaagcatcatttcatatgtattctctattgttacttttctctaatatccattaacgtattcacatgttggaataatacttgaatctgcaaaatagaaaagaatgccaaagcttatcaagcatcatttcatatgtattctccattgttacttttctctaatatccattaacgtattcacatgttggaataatacttgaatctgcgaaatagaaaagaatgccaaagcttatcaagcatcatttcatatgtattctccattgttacttttctctaatatccattaccgtattcacatgttggaataatacttgaatctgcatattatgggcagatgcacaaacttgttttacctgtccaagtcctatataacaaattcaatatatgctgtcctatgtatctcctcgcacacaacgcccaaataactaaaaatatgtgacatgatattgccaaatcatg

SEQ ID NO: 71434 - DNA, 469 bp, Glycine max
  unsure (1)..(469): unsure at all n locations
agctngcaatgaaagatattgggtatgtatgagtttggtgtcaatctaaacacacaaatcaaggccataattcanaataggtaagatagaaatgatgatagtcattggcacaaacattgacttctgcaactgctactaagcttgcaatcaaagatattgtatatatagtaatgaactttccattcagcaacacaaatttgttttatttgtatgcttaaatctgttagattgcctgttcaacttgaaatgtcaaatttctatcttacatcttttatttggacaatatctaacanaagatgcaacaaagaangttactaaaccttgtatcagagatgggcattagttctttatatattgcttggctggcgcaccacanattctttnntgatttgttttgccatagatagacctgtttatatagtctcattgctctattaaaatggatatacttgctaaccgtaatgactta

SEQ ID NO: 71435 - DNA, 363 bp, Glycine max
  unsure (1)..(363): unsure at all n locations
agctngtaactcggctgtcatcgcttattcttataccatgttgagatgctntagcatatgtcttaggctcagttgatgtagaaatggaaagaacaaaatgtctgtgggatgatgatagacgcgaataatatagtacagaatcgagaggatgacacactatagctgaattatctagaggatggctcactgaagctgaattggtattatcagttgaagtgagaaatgcatgatagtcgtgaacgtatgtaagaggtcttctatctcatgtgaaacggcgtaaaggtgtggctgaattattttttgatatgcactagatgtgggtaagcttacaggcacaacatcatgtgtctcaaaggaaaatga

SEQ ID NO: 71436 - DNA, 425 bp, Glycine max
  unsure (1)..(425): unsure at all n locations
ctcagcttagggaataactgtaccactaatatatattgcgcatctttctacatggattcggatggcagcctaacgattatggagctagctgcgctccttcggtcaatagggctgaatccctcgggggatgaaatccatgccttgttggccaacatggactcaaatggcaatggctttgtggagcttgatgagttggtggatgcaatatcgcatgacataagtgcagagattttgttgaaacaagaaatgctatttggggtgttcaagtgttttgaccgtgatgggaatggttacataacggcagcggagttagcatgggcaatggtcaaaatgggtcaacccgttacatatagagagctcacagagatgatcacagaggctgacacagatggtgatggtgtgattagtntcaatgaatttgtcac

SEQ ID NO: 71437 - DNA, 374 bp, Glycine max
  unsure (1)..(374): unsure at all n locations
agcttatggtctgaatatatgtgcgacttatattatntgatatatgacttgaattagtcatgtgtgaatntcttgatgtggatgttgagttatgtggagttttgttgagcaaagttgaaattatgagaatttagattttaccaaaacctatgtccgtaaaatccagatactggattcgttaaccgttggatcgtcttccaattttttctgaagcttcataagacatgtttctagagtctgaccgttgcgattttggaaaaaaaacaacatatgatattccgcttagcgcaattccaatagagaggaagttgcgctcatcgcccataggtggcgctagcccaatttcaacagagaggaagttgtgctgagcgccc

SEQ ID NO: 71438 - DNA, 458 bp, Glycine max
  unsure (1)..(458): unsure at all n locations
cctgttgtaccatcacanagttctagattctatagatctatgtcctgctgatagataanaaaaagatgttggatggtagtaataacatataagtcaatgttatattactcatggtgatgatatcatcgcctgccaccagatggcagatgttggtgttggaatatataggtagaaagggtgccaagcaatgatggcattagattntgctttctagtttgcatagttttcttttaataccttnggccgacttccgcttatttattcaatattggtaagtgttaatttcttgatttccttgtagtttttttagatgcccaaatgtaacatcccactttttgtaaatacattaaaagaattttatttaaaatagagttttaggatagtaatgagattcttgtattaaattaataggagaatagtttataattaaacgagatttagggtataaataatattgt

SEQ ID NO: 71439 - DNA, 447 bp, Glycine max
  unsure (1)..(447): unsure at all n locations
agctngngcttgttntatttaaattcctatgatcctgagcagctaggtgtgtcaaaggtgatcaaataacaagcagagatttaaaaggtactaggttccctcctagtagcgcttctttaacgtcttgagctggacaccttatgacttgtcggtcacgggcctagtactttgcttacctttggctttggacttggtcgcctattggttgaccatgtgtcatatgcaacgctctaaccttattgtggatgagctgaggtgaactctataggtggtggcgggtgcgtctgttgctcgtgccggccatccttatgctgccgtggtgtctcgccctgcgcctcgcctggggtgcagtacttcttgatgaaagcccgattaatatggagcctgatgaacttggtgtgggtgacgggtgcttcgtaaaactgacaaaggcccgtaatcagagct

SEQ ID NO: 71440 - DNA, 447 bp, Glycine max
  unsure (1)..(447): unsure at all n locations
ctttaactgggtccatgagttaacaccagttgcaattntaaattgtttcatttcacgcctcatccctgagactcgtactgaaataagcatattacaaccctcttcccttgctgttagtgtttagctctactgagctttaaaagattggctaagattntgttaaaacataagcacttatacaatgaaggaaagctggagttgctgcacatgatgtccaacgttatgtcaaggaatgagatcgggctgcacaatgtacaatgcaagataaaatggcaaatgaagaattgaagttgcaggatccacgatgtcggatacaatgccctgacatcctgcccgagaatactggagttgctgtacaatgcaagataaangcangtgcataagtgaagctgctggatccacgatgtctgacacgatgtcctgacatccggcccgatnatactggac

SEQ ID NO: 71441 - DNA, 437 bp, Glycine max
  unsure (1)..(437): unsure at all n locations
agctgcccagagaaagaatccacggatganatgcttaccacctcgaaagactggagagcggtttctaatgactcctctgcggcctccacataatgcataaaggatgggcagttcaccaagatgtcttcctcgcctgatacgatgaccagatgcccttccactacgaatttcaaattttggtggagtgtagagggaacaactcccactgagtggatccacggacgccccaacagacaactgtaggggagttaatgtccattatttggaaagtaacttggcatgtgtgagggcctatctgtactgggaggtcgatctctcctctaacctctcggcgggtgtcgtcgaaggcacacaccaccattgaactctgctttatgtgggaggcattgaaatggtatttctcaaagtgctctangcatcacgtttaactggaccat

SEQ ID NO: 71442 - DNA, 385 bp, Glycine max
  unsure (1)..(385): unsure at all n locations
agcnnttggggctgaaactatataacagcacctttgttctagtttaagctctcgctccttcccctcttcttcctctctctttcggctctctcttctcccctctctctctttttcgttttagttattagagtgctactctctttttcgttttagtcacttttcgttttagcaataaaatttcgttcttgcttcaatctacattttcgntctctattgattaatggaaggctaagtctccagcgttgttttctcttgaggatcaagcacagntctctttgaggttctattattactattaaattctggatcagttttcctcttcaccaattactctgtatttggtgctattaacccatggatgcttagtgctggattaattgtctct

SEQ ID NO: 71443 - DNA, 401 bp, Glycine max
  unsure (1)..(401): unsure at all n locations
cgagacttaattgctgttttcttnccataatcattagtcagtattgcactctcacccatctccattacaagcctctcttcttcctgaacacacatggtcattaaatcattgatagaccaattatctctatgtgtgttgtaggaaatcttatatggcccatattcatgctgaagggtgttccaaatgaaatgcactatgaaggactcaaacatatcaacctctaggttcttaagttgagctgaaatatctcgcattttcatgatgtactcacgcacacctttcacactggtgagccgaagagaagaanacttcatgatcaaggtgctngctaaagtcttatctgaatcgatgaactggtcatcaatggccctaagcgagtttcggaacttttcatgctggtc

SEQ ID NO: 71444 - DNA, 409 bp, Glycine max
  unsure (1)..(409): unsure at all n locations
agcttcacccttntctctgtttcacgaaattcctaatctttctccaccaccctgtccaataactttcattccctccttcacccatctcccaacaaggtaaccgcacttcgaaaacgcgatcaaaatttgatttttcggtatttttagtagtggggggtttttctagggttttagggtttattgaaaactccacagttttgggatttttatgccatctgtgagttcggtttatcctgttatgaattttttctaagaattattctgccaattttagaattactccactttccccttacgattctgtgttgagcaaatttagttttagatagaaattctcgttaagtctatgtgtgttttgttatgtctagctgattctgcttcacaaccaatttatgaattcatcattgac

SEQ ID NO: 71445 - DNA, 434 bp, Glycine max
  unsure (1)..(434): unsure at all n locations
acacttagcgaagtgctctcgtgcttagcgcgtagccttgattcctgtgctctttcagaatgctaggggacactaagcgcgctgaagctgcacttatcctaagatgcgtgctaagctcaatgcttgcgcttagcacaatagctactttgacacttcataatntagcctcttttgacctgataatgtacatattttatcattaaatcatatggaaagtattctagagacagctatatcaagagaacaaaatttatttacaaaatactacaaaataaccctaaagtgcggaactatacagaatctagtcgtataagatgactaacaatatgcctataagcgaacacaccataggggaaagtgaaagttctctggatctttaggaccactacaatctgattatagccagaatatccatctagaaagcaactaaatga

SEQ ID NO: 71446 - DNA, 425 bp, Glycine max
  unsure (1)..(425): unsure at all n locations
caagcttatgctgcatacatntataatagaccccttcatcttcaaaaccaacaacaacagactaattatgatctttcaagcaacagatacaatccaggttggaggaatcatccaaatctgagatgggcaagtcctccacaacaacaacagcctatccctcccttccagaatgttgctggtccaagcaagccatatgtttctcctccaatgcagcaacaacaaagacaacagccaattgaggcccctcctcaaccttccttataagagttagtgagacaaatgaccatccagaatatgcaatttcaacaagagacaagagcctacattcagaagttgaaaaatcagatggggcagatgactactcagttgaaccaagctcagtctcaaaattctgacaaattgctttccacactatgcataatctg

SEQ ID NO: 71447 - DNA, 441 bp, Glycine max
  unsure (1)..(441): unsure at all n locations
agctngttgntgaatgttaaatacagagtacattgtagattgtggaggccaaggaaaatgttaagtacctttttgttgcttcttccattggcctgaanatatgaatggactaagtctaaaacaagtgctaataaatgagtttcagtttatgtctatatcatctagatgatattcaaaccactatgctatcggccaagtaattttaatgtttctgaagtttgtattgtacgaaaaattaacgatattagaactcaataagtggcagataccatagccaagaaaatgtatttggaaaagacataaaaactatggtttcatgtgaagtatcacttttgtctatattttatggaaaatgataaatgactataatagagatcaataagtggctacataactcttattctatggaaagaaattaatttcataatatattacgactca

SEQ ID NO: 71448 - DNA, 439 bp, Glycine max
  unsure (1)..(439): unsure at all n locations
acactccatctcttataagacacccctaccttgcaagtattttggtaaataatgtgattgagtaaatttttattagatttaattaaataaatgtttagtattttgttctttcctattagtctgttgatagctaactggaataaaagaaaagctaaattgcggggaataattctcatatctttttatttcatcattacccctttttatagccatttcatacaagataatttgctaagttgttataatcagaattttgaaatgcataaccacacaagtatcaagttaaacgtggaaaaagctttaagcgcgaagtaaaaggaattctagaatctgctatcgggcttgcagctcctctggtccttatacgaagtcactgaggtacttgngcctgtgtgtgttgcgttttggtctggtattgcctctgctatttgtagtcatg

SEQ ID NO: 71449 - DNA, 377 bp, Glycine max
caaccctcaaagaggcacaaaactaatgtgtggatatagggtgacgcaagactgcattctaacactaacccaccaaaggctaccagcctctaatgaaaaaaaatatgtgacccaacaacggagctaagaaaagctctactaccaacataaaatttgggttaaggacctaacatcaacaaaacaaaccaccttgtaatgagaaaacatgaccagaccatagaggctctattaaacccataactagtccaaatgggactaaacaccacccttgaagccgaacaatgcattccctaataacaccacaacgaagcttggtgtgctgtactaatgcggcttccacacaaaccacgaacattctccaataactaaccaaaaaa

SEQ ID NO: 71450 - DNA, 495 bp, Glycine max
  unsure (1)..(495): unsure at all n locations
ttgtctgccacaagtgtccacatttccatcatcattgtttatgtgcttctttgctacattcagattanttgtcattgtacccttatagaccttacctataaatgaaatccattaataagaattcgttatacatacagattcaatcaagcttggacaatttaaataaataagtggatgtcttcaattggttaggcaaggcaaagaaccaagattntcagtttttaactctaggaacacttatccaattccatgttatgctagtgtgatcctgtatctgcattgatagtaagtacctaaagtcacatgcgctaataggctgattacatctttcacaatgccatgtcccatctgcgttattagtcacctttttgtacattgtctatccactatcttgagagggcaccctggataacagaagttatcaaccttaatgtgtgaaacaactatcaagacagatatcctattcggcttctcttgagtccctaacttctcatc

SEQ ID NO: 71451 - DNA, 277 bp, Glycine max
  unsure (1)..(277): unsure at all n locations
acctgcggcatgcaagcttcttgcgtagccgctcttggtgctcagaatatccaaaacaaatccctcttattactagctattntgaattctttagttcctaaatgtacatccttcaaattgttgctcgttcccctctttgagaatgaagaggatcttcataggacttcatacagctgatgtttgtcggcaatttcatcatccaccacccttttcttctgtgccttctcacgttcattattgttaaacccatatttatgcctctctcccttcatgtctt

SEQ ID NO: 71452 - DNA, 446 bp, Glycine max
  unsure (1)..(446): unsure at all n locations
caagcganatcaatagcaagaccatttggcagaatctcatatcattaatccatgaaactatcaaaccttaaccaccaagcaaaaactatacctcanagtttgaccacttggcagaagcaacgggtcttaaccatcaagagtaggagcaaaacaacaattcaatgcttaagaatccatggcataagcttaaacaatgcttaatcaccatggacagaagctttacgtcaacaaaatagaagaatcacaacaattgtcttctatgaggacttttcacaaacactttgtgaaccaactataaccaaggcttaaccatccatgacagaagctataaataatacttaaccaccatggacttaatcaaacaccttgtatgctttcaggaaagcaataattgatcctattgatctcgaagtttgaacacttcagtgactctgccaacatttgca

SEQ ID NO: 71453 - DNA, 361 bp, Glycine max
aggaaaatcacccccgacttagcgatctttgtaaaaggatttttttctatgtcactcgaatcggggagtgtcagcgaccgacatccatgcgacgatgtttggggcgactgagcgggttactcaataggaagcctcgtgctatacaaacgtggcgtctatcacacctatcccatcatggatgtgaccaggggttgaacacataagccgccttcgcctaatgaacaaggctcataatgagcctgttatctctaaacctgagatatcacttactggctgactcagatggcagcgacttggtgcaccgcttatccgacttaaaatacgtccgttttcgaggtttaactgatactcttttagctgg

SEQ ID NO: 71454 - DNA, 330 bp, Glycine max
  unsure (1)..(330): unsure at all n locations
atttcctttatatacttgtctcttataagaatgactcctcctgacttttgtggagtccaattcaatatatatgtatcttgattatattattcactctgccagtgacacactcacactcgaggcatgcttgctccagataaaaaaatgctatgccgntaaatcttatttggataaggagatatatagtgacatactatcattctctattaagccatgagtatcaactacctttccattttatattttaagttattgaattcttaaactagtataaaaagcagtttcgtaaatttatctatgtttcacttactcttctgctttacctctaaa

SEQ ID NO: 71455 - DNA, 410 bp, Glycine max
cgacaatacctcgtgacacggatgtggttatgagtcactttatatctcgagacgcttgaaagtgaataccgaagctctgagcaagattcaactgacaataactttatactcggatgtcggattgagtcacgtaatatgtcaagacgctcgaaatagaataccgaagctctgagcaaatttcaacgacaatacctaatgactcggatgtcggattgagacacgtaatatctcgagacgctcgaaattgaataccgaagctcttgagcgaattcaaacgacaataactatttactcggatgtgcgattgagtcccataatatgacgagacacttcgaattgaataccgaagctctgagccaattcgatcgacaatacattttactcggatgtctgattgagtcacgtaatat

SEQ ID NO: 71456 - DNA, 402 bp, Glycine max
  unsure (1)..(402): unsure at all n locations
tcagatatcttaagaagggggggggttgaattaagatagtccatacttgttcccctaattaaaaaaatctatttcactttttactcaagttatgaattcccttaatgacaatcttcttaaatattaattcacatgaagcaacttgaatatgaatataaagcaataatatataaaggagattaatggaagagaaaatgccaactcagtcttatactggttcgggcacacccttgtgcctacgtncagtccccgagcaacccgcttgagagttccactatcttgtaaattccctttacaagttctcaacacacaaagaccatcctgcctttgtgttagagatcctttcaacaagagactacagtctcttattccttacaaatgaatgaagaaaagaacaaattc

SEQ ID NO: 71457 - DNA, 430 bp, Glycine max
  unsure (1)..(430): unsure at all n locations
tataagaacaaaagtgcctcaatcatatcttaatatgcatgtgtattangaagcatcaacaagaatcaagccaaggctattgtgcaagcaatcaatggggcataacacaccaaatgattatgatgatggatggctcaaattctcacatatgtaaactcatcactttcaaattgagctntcaaaactatcatgacatgtagaggagaatcaaggatttcaagtcacaaaatgtcaagaacttttattttcaaaacaattacccatttcttgaacatatcctatgattcaaagaanaacatgcaaagtcgtacatgcacancaaaatgacccaaaatattaaactaataatctgacgaaactaacaacatttacaaattaacacaactaacatattaaccaaaccaacanaactagcataaccaaagaacac

SEQ ID NO: 71458 - DNA, 434 bp, Glycine max
  unsure (1)..(434): unsure at all n locations
tcgtctggagaataaacacaaactcacataacatgttttgatgacacataagacataacttntaatctttgtattttttacatctaacaaaaataattaagaatcctaattcctcttaagaaacaaatatcttttgacttaacaacgttatagaaaaactattttatagtaataaaattctaataatactttcttactagaacaggaattggttacatgatagattcanacataaacacttatctctaacattatattccaaggttaaatttaatatcatttgatcgcttggcttcattcaaattccaagatgtcaattcccttgtgtgttacaccatgaaaataaataaaagtcatggacaaactttgtctcaagttggtggagtacttttgccaagaccanattaatgatcacatggtcaatatgttacact

SEQ ID NO: 71459 - DNA, 433 bp, Glycine max
agcttgctcgaggtccaagagaagtttgtctcttcgtttatgtgagacagagaccaacatgttagccatcatcagcaagtaccaagaggaactaagtctagccacggcccacgagcatatggtggcggacgagtatgcccaagtgtatgctgaaaaagaggctaggggaagggtgatcgactcgttacaccaagaggcaaccatgtggatggaccgattttctcttaccttgaacgggagtcaagaacttccccgattgctagccaaggccaaagcaatggcggacacctactccgcccccgaggagatccacggacttctcgactattgtcagcatatgatagatttaatggcccatataattagaaaccgttaggaaacttgtattgtcactctgatctcgactagttataaaatctttgtatacaatgac

SEQ ID NO: 71460 - DNA, 479 bp, Glycine max
gctttgaaatcacaacttcgtcactggtaatctataccactctttgtaatcgatttccctagagtaaatactctgataacttagagaaatatgagataaatcttcttgtccacaaaaattgtgctatgtttggctcttgaaaaatcattatcaatacttcgcttgtgaagtcttgacttgttgcttcttggtgtcttctcttgaaacttgaacatcatctaatgtctattctttaatcttgatcatgaacttggtgactcaatcatgacatcattcttttgggcgttttgtcatcatcagaactacttgaatcaacttaattcatcatcatgaagcttggttctacattttttgtcacttctttcgctgagatagagtataaccgaccatcttgtacacatcactgtatatgtcttgatatcaatgatataatatatatttttttcaaaaaattaagactctgggctatttacaattga

SEQ ID NO: 71461 - DNA, 399 bp, Glycine max
  unsure (1)..(399): unsure at all n locations
agcttctngatatattacaggtactcatatcggactatccgagtaannaaggtattggtcgttttgaatttgataccgaagcttccgttatcaattttcgagccgtctcgatatgattccgtggactcacatccggcattccgagtaataaagttattggtcgtttgaatatgctaggagcttctgttttcaatttcgagcatctcgatatattaggggactcactcggacatccgagtaaaaaattatggtcgtttgactttgataagagctntccgtttcaatttggagcgtctcaatatattccgggactcagtcggacatccgagtaaatagttattctcatatgaattgctcggagcttctattttcaatttcgagcgtctcgatatattatgg

SEQ ID NO: 71462 - DNA, 364 bp, Glycine max
  unsure (1)..(364): unsure at all n locations
ctctatataagctgaaccattttatcaataatcacaagtngagttttattcacaacattagagtgtatctcttttatcttagtgagagtgattctcctaaattcttgagtgattcaagaacaccctggctgtatcaaaggactttcacaacctttgtgtgttgccctcgctggaaagagngattctttccttcctatcatctccacccttgttctttcaaaccacaattccagattatccacctctgctcaaaattatctcgtgaccataactcccatttcacacactcagattaagtgattcttgagcctaaattgaatttcaaaacgagacctttcacctcgttttggaatcacctcatttg

SEQ ID NO: 71463 - DNA, 342 bp, Glycine max
  unsure (1)..(342): unsure at all n locations
agctngagatgaggaagtgtngaaaggtgaaacttcctgctnttattgttgaccacagagtggtacctggagatatgtcgcggnggtcaggagaccttggggacgtcatgtggggtgctattgcccaaaaccaagcttgaccaatcccgacccaccccgggcatagtctgtcagtgagaacctgtgatgtacctaagcaggcgagctcctggcagtcaacagataaaaggaacaaagaccacaaagcaaggaggcttgtggtggctggccagctatgaattatgtgtgatatgtggattatggcctctggtaatcgattaccaagggtgggtaatcgattac

SEQ ID NO: 71464 - DNA, 483 bp, Glycine max
  unsure (1)..(483): unsure at all n locations
ggtcgggtacatgagcatatgcaatgctcctcaatactctcaagtgatcaactcttggcttcactccactccatgcttcttgtggngtttgatctttgacattctttgttggggagcgaatggacaaataaactgcacatgcaacagcttctgcccaaaattcctttggcatatatttagccttcaacatacatctagtcatattaagaatagctctatttttctctccgctaccccattttgttgtggagatctatgaaccgttagagggcgacgaatcccatatttttcacaaaattcattanattctttagatgtgaattcgccacctctatcggatcttagagctttgattacataaccactctccttgtccacaagagctttaataatttaaaagctacaatgcctcagattattgctctagaaaataacccaagttttctactataatcatcaattaaaagcaagagatatttattg

SEQ ID NO: 71465 - DNA, 376 bp, Glycine max
  unsure (1)..(376): unsure at all n locations
agcttctagatgagttatgtctgcgaatcggacatcctgttaaaagttatgaccattcgaatttctcgagtgcttccgtcgtttaatttcaagcgtctcgatattttatgtcctcaaatcagacatcggagcgaaatgttatgaccattcgaatttgtcgagagcttccgtttttcaatttcgagcgtctagatgagttatgtcaccgaatcagacatctgagtgaaatgttatgaccattctaatttgtcgagagcttccgttgtcaatttcgagcgtctagatgagttatgtcaccgaatcggacatccgngtgaaaagttatgaccattcggctttgccgagagcttccgttgttcaatttcgagcggctcga

SEQ ID NO: 71466 - DNA, 390 bp, Glycine max
  unsure (1)..(390): unsure at all n locations
tgagagagtcncagatcagatcgagaggaagaataatatctatgcttaacatgccaacanagggagaaagaatgttgtcttcgaacccggagattgggtttgggtgcacatgagataagaaagggttcctgaacacatgaaatcatagcttcaaccaaggggagatggaccatttcaagtgcttgaaagaatcaatgacaatgcttacaaagttgagctgctcggtgagtataatgttaattccaccttcaatgtctctgaattatctctttttgatgcagatggagaatccgatttgaggacaaatccttctcaaagggagagaatgtgaggacatgaccaagagcaagggcaatgatccacttgaaggacttggaggacctattgatg

SEQ ID NO: 71467 - DNA, 351 bp, Glycine max
aaactctgcttgatcttcaccaccgcgcaccatatgagagatacatatttattatcatatgtcaccgtattttcctcgatttggctatttactatatcaacaatcactattcctatttcatggatgtttaccaaatatacgtatggtactgactatgtgcgatttataattaatctatacatgatggatcttcatggtcctgcttatgaatggtgatatttccataatgatgatggagctaatataatgtatgctcaattgtacgcacttgctttagtgatgccaaggggagagaaatagtataaatcacaactcacatgagaacaacttattttaatagaacctaaattc

SEQ ID NO: 71468 - DNA, 494 bp, Glycine max
  unsure (1)..(494): unsure at all n locations
ttaagtcacctgcggcatgcagctatcattttttccttacatagtctttcttattttttctgtcaaattgggtaatttaatcaagttctccaattatttaaaaacattacaattaaactaacggaaataatggaaaatgataccatcgtaatagttttaaataattgacgattcaattaaatatttttaaacaaactttttaattgaatttttaattataattaaaaaatcaattgtatagttaaacttttttctatcaccttagatatcatatgtgtcactcttataatatttataatatntatgcagatgcttgagtaattatgattgtggttttcaattataaataaaatttgactaanatatgtttgtgataactgatgaaatctaacatttgtgggtattccttaataatattttctttgtttctgctctatgacgatatcactaataactttttattttattagagacatgtacgtgctcgatcatat

SEQ ID NO: 71469 - DNA, 448 bp, Glycine max
  unsure (1)..(448): unsure at all n locations
atgctcttggcatttaatctatcaactctaagtgcttatacatctaaaattatggctggacatgcataaagctcattactcattcaaatatcaaaacaacacatggaatggtcattgtagcattttatcaaacggttgatggcgcatgttaaaacatgttaaagaagggataaagaacaatatgacatgcaaaattacaatataatcaaggataggcctagagccattcattgcagcccttaatcaaagcattcagcccatggatttacaaattcctcacaaacattgcaaagaaacaacaaataaagcaccaataccacaatgaagaagtgaaaaatatatggagatagcacttacttgactgggattaatggaaagcaagaataattgagacanatgtgcataaaaagcctggatttgctcaacaatggaggtctcgtggttccta

SEQ ID NO: 71470 - DNA, 470 bp, Glycine max
  unsure (1)..(470): unsure at all n locations
agcttgtagngaggtttggctacaaaaaattctctgttttttctatgattcaaaagtttagattctaagagagcacaagtcctagactaatcccaatgatcttttcttgttttgtacaaatagccttctcactattccctttntcttaagttgcttttgaccttattgtaacaacacaacttattgtctttnttttttaacatacaacttatttgttgtgtgtgctaatgcttaacctttttcttttcattcttttcaactttcctcccctaaatttagagtaaattttccttgaaccatatgttntcctagagtctaaacaaggtattangagataatcatttaaagttcagggttcaattcatgacaaatcaataagctttatacaagggagcanaagatacaagtatcattcaaggaagctatttggtaaaagagcttgtgctatcaattcatgcccttatcatgtt

SEQ ID NO: 71471 - DNA, 428 bp, Glycine max
  unsure (1)..(428): unsure at all n locations
tctagcacaatggacttaccttgaattaattccttgatagcctctttgagccttgttttcctttccttgttttgaagctcactacaagccttaagtgaanaaccatgatattaccatatccttaaggaatattggagctttggaattgttttgggaataagtgtggggggtttttgtttcattggacaacttgttttgttggctatgcttcatgatgtattttgggccatacttgatgtacattgtatattggttaaatgttggacatgctgaatgaaatgttgtntctcaaaggctaaagagtaaaaaaaaaaaaaaaaaaaatatcaaaaataaaaaattctaaaacaaaaaagagaagcaataagttgagtgaataagatcttaaatggcacaagaatgatgaaacttctggttctactcttcat

SEQ ID NO: 71472 - DNA, 465 bp, Glycine max
  unsure (1)..(465): unsure at all n locations
atctctaatcagcgccgctgcagctnctgatgtcgatgaggagagtttcttgttngtntgatgatcacaaagatgatgactgtgagccctagagaatgatttcaagattgagtcacgaacaattcacgagtcaagagaagtttgatttcaagattcaagacaagatgaattcatgtttctagagaagaaatcaagaagacttctcaagggaagtattgaatagatttttcataaaacaaacatagcacaattttgtttttcataagagtgtttctcaaagatttctaagttaccagagnttttactctctggtaatcgattaccagtggcaaagattgttttaaaagcttcatctgaattactacgttccatttatttcagatggtgaatcgattacagatattgtaatcgataccatgtgttggacgtggaatctaatcattgtgagagtccatccttccaaaa

SEQ ID NO: 71473 - DNA, 178 bp, Glycine max
aaaatgttgtatcttgacaaccaccatgctgcagggacatgcatacattcccgtagttaggcgccacgagcccatctatggtatagaatacgatacattataatatgactccctcacctattgtgagctcaccgtcaattcctccatgcgtcactcagaggcggctctctcgatatgc

SEQ ID NO: 71474 - DNA, 383 bp, Glycine max
  unsure (1)..(383): unsure at all n locations
agctngatagcacgcatagactaatgtcgtcttctgctcccttcgncaatcgcggccgacaagcccgttgacacgctgagatttacgtcatcttccacgctcacaagatctgtcatactgactcttgagtcccgctgacgggcggaaatacccaagtggttatccgtataaactntttgctgtctgtaagacgacaagcctgataacacgcaaagactaatgtcgtcttctgcgcccttcgtcaatcgcggctgacaaacccgttgacacgcggagatntacgtcatctttcgcgctcacaagttctgtcatactgacttttgagtcacgctgaccggcggaaatacccgagtgggtattgttagagattaactctactgagt

SEQ ID NO: 71475 - DNA, 430 bp, Glycine max
  unsure (1)..(430): unsure at all n locations
agcnttgatgatatggtcttcaccgaataaaggatcaaagtgggtctaaaaagaggcaaatctgatcatcatgcnttgataaatgcaaaaaaaaaaaaaaactatggcaaatgaaaagggtgagaatgagggagaagcccatgctgtgactgccattcctatacagccaagtttcccaccaacccaacaatgtcattactcagccaataaacaaaccttttccttacccgccgcctagttatccacaaaggtcattcctaaatcaaccacaaagtctgtctaccgcacttgcaatgacaaacatcacctttagcacaatccaaaaacaccaaccaagaaatgaattgtgctgcgagaaagcctgtataaatcaccccaattccagtgtcctatgctgacttgctcccatatttacttgataattcaatgg

SEQ ID NO: 71476 - DNA, 460 bp, Glycine max
  unsure (1)..(460): unsure at all n locations
ctcgaccgcgatccttagagtcaccgcngctgcagcttaggaaacttatttcttctcaatgtttgaaaaactttntagtacttatcttgagtgagtcttttcttgattcttgaatcttgagtcttgaatcttgatcttgattattcttgattcttgattcttgaaacttgaaacttgattcttgattcttgaattgttcttgactcaatcttgaagtcattctctcgggctttttgtcatcatctttgttatcataaaaacaccttgaatcaatcttgattcatcattatgaatcaatcttgattcatgactcaatcttgattcaatcatgaagctngcttctacaatctctccctttntgatgatgacaaccctganatcaagaaacacatacacatactttttcctaggtgatctctcacttacatntccatattctccccctttgtttngagttatg

SEQ ID NO: 71477 - DNA, 384 bp, Glycine max
  unsure (1)..(384): unsure at all n locations
agctntctcttttctcttcatttcaggaataataatggctttctgacctcaaaggcgtgcttagcgtgagtaagtgaacatccgttgggtgaactgggtgcacttaacgtaggaagagacaaacgtctcgttgagcgacctgatgatgcactaagcacacggatgcttctcagattctcccaactcgctaatcgggctgagtgccttgcttagcgcatgattctcactaagcgcacaagcctcgcttagcgagacaccagctgctagccttcacaaatttcatcctttntacctgaaattgaagttgaaacacattaaattcacaatgttgggcatttctacttaacanaactaaactaaaacctaaaatatgtacaaacctat

SEQ ID NO: 71478 - DNA, 449 bp, Glycine max
  unsure (1)..(449): unsure at all n locations
gcttcacatcctcgtatcttctcattgtacttctatttggggtatgtacaacactctngctgcatattttctcgttcttttatgcaggtgtgactgatacatcttttattttcctataacttctttctattnttggttgtttgaataaccggttaaacccggtgaaccacccgtcctcatcgatttacccagtttaattcttggtttactgggtttagtctggttttctgggagggtggttcaatgttgcttttggattggatgcctggttcccgggtggaccagttgaaccggtcgatccgatctntgtttgaaaaccttgattaaaatagaacttatgggtctgtgaagcgtaaatatccatattaatgtatgatgtgtggtgtaggtaggggaagccaaacatcgtgattccaagtattaaagaataaatcaagttattggttttc

SEQ ID NO: 71479 - DNA, 362 bp, Glycine max
  unsure (1)..(362): unsure at all n locations
agcttatgcgcatatttccctacgaacgttcacttgcacaagacatcctattaactaagaaaaatgcacccatatacaatcaaggtagcttcattacctagattatttacatgtacttccaaggggtatttgttatttacatcacacacgcctccttggctaaatttacatacatgcatactcaaagcatttcggggtaccaaaaattgcacgtgcgctcatcttggtatttctaatacctatacatatacaaacttcatgatgaatcttgactacctacgcaataaggtgctacattncatgctttnttttttcaaagtttttgctacctaaagccacatgcanattcaagcatattttcc

SEQ ID NO: 71480 - DNA, 429 bp, Glycine max
  unsure (1)..(429): unsure at all n locations
actctgcccataacaccaaccatgatcacaacttttctcacttaaagaccccagtaacaattcctttgttccagtttgttaaccgttggatcgactcgaaaattgtactgggagtctctaatacataatcctacattttgaccgttgtgatctactagcaaacatccataactcattctgcactactcttcccacagctaaccacacacaagtattttcctgcacttatgcaaaattctgctacataatttcacagccaaattctgcataagtgcagatttcgaaagtcacactntccctcatccaatcttgcccaaatcaaatcctacaagtcccaaatcatgtatcaatcatgtctataccaaagtcaagcttcanaacacagcaacacanaatctatgtgtgcaataccccctcaattaatggatt

SEQ ID NO: 71481 - DNA, 349 bp, Glycine max
cttacacaactgctgcagactttgttatctctgatccattacacacccgagcccacttataggtgtgaggtgagtttatagacttagcggagagaaagaacatgtgttgggatccctataagaatacaacgctgttaactcgggaagggtagagcactggaattgctagcccatgaggataaacacgatatactcgtgcgtcatgaaccaattgaaaatctgacgcgggttgaccgtaagattgaatgctctggggagctgcaagcatggctgttcccctctgatattcattccttgatttgatatgatgatgggagcatatttgaagggattgacatcccatgatacg

SEQ ID NO: 71482 - DNA, 484 bp, Glycine max
  unsure (1)..(484): unsure at all n locations
agtctcgatcatttaatcgatgacacggtgtcatatccgatcacactatcgcctgagacaangactgatttattcaggagtctctgctctaattgatcaccaagtgaaataattgattactgttttctcattgagttgttcaaaagtgaacaataatactctaatcgattacttagggcatctaatcaatacattgttcttgaggtatatccataagttgggatgaacactatatttgattacttataatatctaattgagtacttcattgaattaatcaattactctgtagatttaattgattataggcaattataatcgttttatctataaataaccagcttgtgttcacatattcacatcatgagatcaatagaagatacttaatacatctcaaagatacatcttatctctgaatgatcatattctgtgctgcatttgtgaatacaaaagaagcttaaagtactaacaacttctaatcgtg

SEQ ID NO: 71483 - DNA, 437 bp, Glycine max
  unsure (1)..(437): unsure at all n locations
agcttcaccttctggtcctcctcataggtgaggtatgataaaacatgctctatattcatctcccactccaagtaggcctccggatcattctttcctttaaatggaggaatgttgagtttaataccatcaattcggttttgtctaggaacaccatcattccctcttctcctcctttcttcttcattatgagctctattctccatttgatccaacctctcatggagcgcatcatctccgtgtttcattaacctctccatatgttgcatcaaagcttgcatttggaattgcgaaagccccactccatcattaggattagtacctgacatctcaaacanacaaatcaaaccttacatgacaattattgtgctgatgaatacctcaccactcaagtgtttacacaatatagctntctctaatgaacactctgcgctttacac

SEQ ID NO: 71484 - DNA, 488 bp, Glycine max
gcttcttacatagtccgcctttgcttgaccttctttatgcttattaacagaaacattatgcatatgcaaaagatcaagaggagttagtgggttaaaaccataaacaacttcaaaaggagaacaattagtggtgctatgaacagctctattgtaagcaaattcaacatggggtaaacaagcttcccaagtttttaagatctttctcaaaactgtcctaagcaaagttcccatagtcctattaacaacttccgtttgcccatcggtttgtgggtgacaagtggttgaaaataacaatttattgcccaacttgctccacatagttctccataaatggcttaggaacttagagtccctatcactaacaatgctccttggcaaaccatggagtctcacaatctccttgtaaaacacatcagccacatgggaagcatcatcaactttttacatggaataaaatgagccattttagaaaacctatcaacaaccac

SEQ ID NO: 71485 - DNA, 330 bp, Glycine max
  unsure (1)..(330): unsure at all n locations
taagtcacctgcagctgcagcttgcttatcaactacttgatccacatgggctttattgggctcgnnacttggacaagggtaagagggccgtgaaagacaggattatacgctcaaagaatgattgagggttatattgaatgagaaccttaagagcaaagctcgtgcctttgagtgggactctataccttttggtttatacactaaacaaccatcgcacttttgtgcccttcttgcaaaaattgaagatcctttgcctattatttcttcacgcgacttctgcagaaaccatatattatgtttattatcgttacccaacctcatgcatgtgtt

SEQ ID NO: 71486 - DNA, 244 bp, Glycine max
acagcgagcagccaaaagagagagagaattttttacctcgccgctgccagaccaaaacaatacgtatgcgtctccgtttatcgactactagatacaaaggatactcgtgcaaacattacacccacacccttctatagatattgctctactttcttcactggggcaactcatgacccatccttagatgggacacgtatactggcatgaataatatactacctatgtgaaccccctacccattgaa

SEQ ID NO: 71487 - DNA, 76 bp, Glycine max
agagataaagaagagaacagaggcgagagcaagaaaaagaagacgggagaagacaaaaaggacggacacgccaaag

SEQ ID NO: 71488 - DNA, 420 bp, Glycine max
  unsure (1)..(420): unsure at all n locations
agcttcattatttttgggcctcgtatttatggatccatatattangnacggnaccctagaaatggaagactnttcagcccttgtattttaaggcacctagactagtttttgtattaggggtagttttgtatttctacatgcattaagtgaatatttgatgtgtgtgctggaaaataaatttaattgaattgtgagaagcccaatccaattaaattttagagggtgaggtgagcatttgcttgctacaccccattgccacatcatatagtcacacgttgtgcatgtccttcatgctttacatgctgtcataccctaatttcgtccggggaccattatatgtcggcatgcgaccttcttttgaccacctcaaaatgtttaacacccatcgttgtggaatccgtaaagttcaagatgtttcga

SEQ ID NO: 71489 - DNA, 332 bp, Glycine max
  unsure (1)..(332): unsure at all n locations
accacagagtggtacctggagatatgtcgcggcggtcagagataccttggtgacgtcaagagaggcgctattgcccataaccaatcttgaccaatcccgacccaacccgggcataatctgtcagtgagaacctgtgatgtacctaaacaggcgagctcctggcagtctacagattaaacgaacatagaccacatatgcaacgagtgcttgtggtggctggccaactgagaactttgattgatatgtgggctatggcctctgggaatcgattaccaaggctgggtaatcgattacaaggcttanaaatgaacacacgatgcttaaatggtctc

SEQ ID NO: 71490 - DNA, 419 bp, Glycine max
ctctcaaggagctattgaagaagaatgtggcattcactctgggtgaaagacaagagcaagcctttgctttgctcaaagaacagctcacccaggcacctgttctagctcctactgacttttctaaaactattgagctagaatgtggcgtctctggagtgggtgtgggagctatattgctgctaggtgggaacactattgctgtttatagtgaataccttcatggtgccaccctcaactaccccacctatgatagagagctttattccttaataagagccctccaaacttgggaacattacctagtgtccaacgaatctgtcattcatagtgatcatgaatcacttaattacattatagggcacagcacgtttatcaaatgcatgcacatgggtatggtgctagagaatttcatatgtatc

SEQ ID NO: 71491 - DNA, 386 bp, Glycine max
  unsure (1)..(386): unsure at all n locations
agctngagatgaggaagtgttgaagggtgaaactttcttcttttattgttgaccacagagtggtacctggagatatgtcgcgggggtcacgagacctttgggacgtcacgtggggtgctattgcccaaaaccaaactagaccaatcccgacccaacccgggcatagtcggtcagtgagaacctgtgatgtacctaaacaggcgagctcctggcagtcaacagataataggaaaacaagaccacaaagcaccgaggcttgtggtggctggccagctgtgaatnttgtgtaatatgtggatggtggcctttggtaatcgattaccacaggtgggtaatcgattacaacgctttaaaattgaagacacgaggctaagatggtctcttgt

SEQ ID NO: 71492 - DNA, 366 bp, Glycine max
  unsure (1)..(366): unsure at all n locations
taagctccttcaactacacaaggctcttaatatatgaagagtattcttgnggatatcttacccgacgaagacactgacaataacttatcttcttcttcttggaaaaagtatggcaggctacgggcaagtaaattttcttcccatcagaccttggatgcaactgcgatcgtatatccatattagctagatcttgacgggtattcaagccatccttcgtcttgccttgaatgttaaggagcgtcccaatcacactgtcacaaacatatttctctacatgcataacatcaatacaatgtctaacgtcatgatcacaccagtacggaagatcaaagaagatggacctcttcttccatatgcaactctaac

SEQ ID NO: 71493 - DNA, 373 bp, Glycine max
  unsure (1)..(373): unsure at all n locations
ctcanagagatccaggagagacaaggttgntgattgaaccaaatccgctcccgaatatgacagccatcgttttaggagcgctgagcactatcaacgctcttatgccatcaaaggatggtcattccttctggaaagatgtgtccagctcaaggacgacgagtatactgacttccaagaagagatagtttgccggcggagggcatcgctggttacccccatggtcaagtgagacccagacgtagtcctctagttttatgccaatgcttggcctacagaggagggtgtgcgagatatgcgatcttgggtgaggggtcagaggatccctttcgatgcggatgccctcaaaccagtcctgcgataccctttaatgctg

SEQ ID NO: 71494 - DNA, 295 bp, Glycine max
  unsure (1)..(295): unsure at all n locations
agctngcctttcagaaccatgaaacaataacctttatacacaatcatgtttnctaggtcaaagagtagatatcaatagttgtatatgatcaaaggcatgatgctagtgatagtttaagtcaaggggtagatataaaaaattacacatgacttaaggatcatcaaaagatgaaatgttgtgacaacaagtgaagatagacgtgtctacaaagttgagaagcacacactaggagttgtcaatatctacgtcatgtagtcgtaaatatattcaaaaggaaagaaagcttagccctaca

SEQ ID NO: 71495 - DNA, 444 bp, Glycine max
  unsure (1)..(444): unsure at all n locations
agcttaattgcaaaatagtctccctatttatcttaactcactaaatcaattctcttatattttaattcactattagagtctcantttttttttcaaattgactatttgagtcccatgactaanattagacattgtctgccacatgtcattatctaattagaagttgatagttaacaaaaaatgttgacggtcaggtgtcattatctaataggtcattaattttcatataccattttaacgaccaattagataataacatgtgatagccattgttttccttaatacccatggtccatttttggtccgagaatacaaatggtttatttggaaaaaaaggactctattattgaattaaaatataagggatccaatttttaagttgaaaaataatagagggactatttttccaattaagcctaatgaataagatactaaagttattta

SEQ ID NO: 71496 - DNA, 416 bp, Glycine max
  unsure (1)..(416): unsure at all n locations
ntcttatcttgtgcaccacgtgtatcaatgaccatgatgttgttcttccatttctcctcatatccatttttaatatttgttgggttaccttgttctatagcaaaaggatcaggaatctttgaggttgttcctcgtgattatactccaaatccccaataatgtggaagaatgccaccattacatgtgccttcgtttctttggaaaaaaacatcctcatgacgacgaagcttatgattangtgacatggttatattttggtgatactttattgcaaaccaatgatgaaggtaagtttcatacgaacgtatagagttcccttcttggtcaactagttccgcatcaaaactcttaattccaacatgacctttatgaaactttatattctcaaatgtttttgttgcaattgatcagggtcc

SEQ ID NO: 71497 - DNA, 465 bp, Glycine max
  unsure (1)..(465): unsure at all n locations
agcttctagccaaatggacttacctngaattaatttctttgatattctttntgagccttgnttccctttccttgttttgaagctcactacaagccttaagtgaaaaaccatgatatcaccatattcttaaggaattttggagctatggaattgttttgggaataagtgtggggggttattgtttcattggacaatttgttttggtggctatgcttcatgatgtattttgggccatacttgatgtacattgtatattggttaaatgttggacatgctgaatgaaatgttgtttctcaaaggctattgagtaaaaaaaaaataatctaataaaaaaaaaataacaatatagttgagcgaataagatcttaaatggcacaagaatgaagaaactcttggtttactcttcatgttaaaattatcttcacttcttttaatttcttattctcttaaacgccttatccccat

SEQ ID NO: 71498 - DNA, 418 bp, Glycine max
  unsure (1)..(418): unsure at all n locations
tcactcccgcattctatctctagcatgcattgtttgttggnctcgtcctttggcacgggaagccggaaggtccatatcaccttcttaattgtacacatggggcactgcgcctccaaatgcgcaagtaataagagataatattcctggctctcgtgtccgtaaaatgcattcatatcatgcatcgcataagcatctcttcataacatcataatggacatatcctgcatttgtccgttatcatattccggcctcacantttgcatgagtcatggcatcatcatgcatatgcgttcaacaaactttttgatctgcaaaattgcataaccattgttttcatgtttgctcatccttgcgttntcctctacaaaacaaaaacaaaaaanggggaagcgtgaaacttacactacattttagttca

SEQ ID NO: 71499 - DNA, 307 bp, Glycine max
  unsure (1)..(307): unsure at all n locations
agcttgtaatttctctgacaaagtgccacattttctttattatngantatgggctttattgcaacattcagattatttgtcattgtacccttatagaccttacctaaaattgaaatccattaataagatttccttatacatagagattcaatcaagcttggacaatttaaataaataagtggatgtcttcaattggttaggcaaggcaaagaaccaagaaatttaagttttaactctaagaacacttatccaattcatgtagctcttatttcatagtaatatgtatctgtattatgcctaggcatct

SEQ ID NO: 71500 - DNA, 448 bp, Glycine max
  unsure (1)..(448): unsure at all n locations
aacagatgtgattcatcnagatacatctctgtttataagaactntctttttcgagtgtgaccagatcatatagcctttcaccccatcaccataacccatgaacagaccctttcttgatctaagtaccatctttccttcattgacatgataataagcattgcagcaaatactcttangtttgagtagtttgttggtttgtcattccagatttcaatacgagttttaagtcctatagtcgtagagggtgtgttattgatcagaaaacaagttgtattgataccttctccctaaaaacttctgttgagaccagcattagacaatagacatcttgttctttccaagagtgttttgttcattcgttcagtaactctattatgctgaagagtgttcctaacagaaagtagctagcaattccttcatctctgcagaatgtgttaaattctattga

SEQ ID NO: 71501 - DNA, 436 bp, Glycine max
  unsure (1)..(436): unsure at all n locations
agcttcttatccaaggctcatcttggaggtgaagctccttcttcatggcttattccttaatggatggcgcctcctctcacctcctttcctttgtcttccgctgcatctccatggtggaaaatcaccattataggaccccatngaagctcaaagatccagccttcatagaagccccacaagcaagcttccatcagctacacacacccctctcataactaagctcacctctgtgagaagcttccttaataagattcctaaagaagctagagcttagctacacatacctctttaatagctaagctcacctccttgagatgagaagctagaacttagctacacaccccctatgatagctaagctaacccccatgacaaaaaacatgaatatacaaataaaagccttactacaaagactactccaaatgccccaaaataca

SEQ ID NO: 71502 - DNA, 428 bp, Glycine max
  unsure (1)..(428): unsure at all n locations
cgcgggtctgggagacgaacgtcaagtggtcgcgatatactaagatgatgttccgagtatcttttatntagtacgaccatgccctcctgatntccagctaggaaattggctagtggaggaacgccctgccatttacgcaacgagcataatgtaaacctttacggttataaaagctctatagttgggcctacgctttagagtttttcttttgttaaggctttgcgtcttttgtttatgaatttataatacaaggacctttcttcatctgttcctacgtctctacccattctcattcatttgcatgtttacttctttttctgaaacggctgatccgatgacgagtcccccgaatgtactaatacctgtgacccgcctatctacttcgagcaagatatgaatcatacggaagatgaatgaaacgaggatgt

SEQ ID NO: 71503 - DNA, 173 bp, Glycine max
acactgagctgcactgacagcagagaggaggggagttacttgttttttcgagagccagaagagaaccaatgaaagccgtgtttcgttattacaaaaagatgtatgtgaaaataaactacttctaacctcgttttgaatatcaatgcgggtaccgcactatcgaacggacggaa

SEQ ID NO: 71504 - DNA, 406 bp, Glycine max
  unsure (1)..(406): unsure at all n locations
gctccttagtatgacagtcaccgctttaagagcgctgtacaccagcagcgctttgaggccatcaagggatggtcgtttctccgggagcgacgcgtccagctcatggacgacgagtatactgatntccaggaggaaatatggcgccgacggtggacatcactggttactcccatggccaagtatgatccggaaatagtccttgagtattatgccaatgctcggccaacanaggagggcgtgcgtgacatgagatcctgtgtaaggtgtcagtggatcccgtttgatgccgacgctatcggccagctcctgngatattcgttggtgtggaagaaggcaggaatgcagtatggccgaggaggaccggtctgagggttcgagaggatgcatcgccattctattataccgg

SEQ ID NO: 71505 - DNA, 96 bp, Glycine max
  unsure (1)..(96): unsure at all n locations
acaggcagctgacgctccgcctgggacacaagatcatgaggtctantgtgatgtgcaatcacattcatggcgaccatttacagtgaatactcatgg

SEQ ID NO: 71506 - DNA, 173 bp, Glycine max
ctcgaccagtatgaaggacacactgttgcttgctatacttggttggaattcataatggtccatcacggatgcgttgtggtacttctggaggacgtagctattcctattcgaatgggtagggatgaagatgcactccctgcaaaataatagtccatgatacaacttgaacaact

SEQ ID NO: 71507 - DNA, 364 bp, Glycine max
  unsure (1)..(364): unsure at all n locations
agcttctaaactntatacaagaatgatgttcttataccacttgntagacaagtggcctcacatatcttaagaagggggggttgaattaagatactacaaagtatttccccaattaaaaattctatttaactttctattcaagttataaattcccttcataatgaatttcttaaataatgattcagaagaacaatttgaatatgaatattacacaataataaataaaggagtttaagggaatagaaagtgcaaactcagatttatactggttcggccacacccttgtgcctacgtccagtccccaagcaacccgcttgagagttccactatcttgtaaaatccttttacaagttctaaacacaca

SEQ ID NO: 71508 - DNA, 327 bp, Glycine max
ccactggtataactaactttccaaatgcttgccctcacacgaaatggacccaaggaagctttgctctaagatgtccattaaggacaatgcagccgaaagaactatttccgctccggagtatgacaatcaccgctttatgagctctgaacacctgcaacgctttgatgccatcaagggatggtcgtttctccgggagcgacgcggtcagctcacggacgatgaatatactgacttccaacacgatatagggcgccggcggtgggcattacttggtactctcatggccagtttgatccagaaatagttcttgagtattatgcccatgct

SEQ ID NO: 71509 - DNA, 434 bp, Glycine max
  unsure (1)..(434): unsure at all n locations
agcttccatcaagtggtatgagaattaaataactttaattattttgatgatgcttttgtaacctagatggtagtttgcgggctagtgcaatgcaggtatgttgattgggctgagctgcataaaaagggatntaattaacatcctgaatattcggaaaatcgtataaatccttgctttcaatctcttggaaaattcatatcctcttaaatttattggtaatgcctgttactgaactanataaaaacaaaagtttttaagctgagatctgctaccttgatgttcttcatcttttcatccttcagtttagtattctagaaaaactntactgcttttccttggttntaaaactttgatttcttattataaataatttctctataagtggctaacattnattgcttcatgaacgtacagtnaaatatactttgaaatca

SEQ ID NO: 71510 - DNA, 439 bp, Glycine max
  unsure (1)..(439): unsure at all n locations
ttacatgcatgttcaaaccatatgtactatacttcgatcatctgatgcaatctatctgagtgaanagataattatattacacttctaatgtagtcgacaactaatagaaaatatatacagagagttatgctttagccaatcaaatcaaatcatttagaatctcatcattactatcatgcatctcacagagaaggagaatcaggcatcataatgtatagcacaacaaaacattaaaagaagacatgccttctaaagccaaccaaggtaaaaatgtatttatatttgtgaacttcttcaaaattataacacatatataaccatatataaaaacatggttgaacaatctgaccacatgcacaacacattccacacattatttctgataatgagtggtaagggaatataataaagcattgttattaaaactgtatgtgcacta

SEQ ID NO: 71511 - DNA, 428 bp, Glycine max
  unsure (1)..(428): unsure at all n locations
agcttcaaaatcaaggaagtcacttaatcattatgtattttttcagggaatcaaggacatggaaagaaatttatgatgaaacatgataagggcatacggctattaaattttaatatggcattngtgcaaatccaaaataaaacataagccttggttaaaaagaaatgtgagcttaatgcttatgtatgattcaaatcaaatttaactgaaattccccatgacacatggtggattggttacggatgtacgaactctgtctctgatacgatgtanggatttcttacaatccatactattagcccacatgaaaagcttatcttcatggagaattgagtggaagctctagtggaattagtcacgacttatcattaattctttgacattgacatcattataatttgtgaaaacttttctatgcctagttatct

SEQ ID NO: 71512 - DNA, 332 bp, Glycine max
agcttctatggaggctggatctttgagcttcaatgatgaccatctattgtgtattccaccatggagatgctgtgtaatacttatgagaagaagtgagaggatgctgtatccactacgtaattttccatggtagaatgagcttcttccccaagaatgtgtcttggataagaagctctgacaggatgttttcatggatgaaaacaaagagacaggggggagcttgaaatctaaggagtaatagatggagagaagttgaacattgagttgtgtctcacaagactctcattcatcaaagtttgtatgccttggatctccttcattaatgtgatcct

SEQ ID NO: 71513 - DNA, 379 bp, Glycine max
ctaaatgacagcaaacgaaagagctatctgtcttgtcattcataaccaagaggaagcctcggctatagagctttaccctgatatattgccctccattattctctgctgtagctaatggatccatggtgatcaacgattgcagtgagtatgatgctgatggggctgaagaatagccgaactcttatgttgaagaccggaagcccgaccatcatcatacatcataccctgtgatggagagaatgatgggaaggatgccatttcacaaacctctcatcccatgaatggagatgttgtgccaacctatatttcatcctgaagaggaagatatctagtgactttcacatgatgatggatcataaaatctacacatgtgatcatc

SEQ ID NO: 71514 - DNA, 417 bp, Glycine max
  unsure (1)..(417): unsure at all n locations
cggcatgctgctctttgtgttcttcactcggatttaagagcttttctttctctgtggaggtgaagaacgtgttgtcacgatctggaatttcactgaagctttggaaattgaacggagagcccgtgctttatgaggaattccattagacaacagaatgagtcctgacagagctgatcaataaaagtggtcggagtgatcagtgctcacttgtcaccaagaacaatgctgtcacttgtatgttaagtcttggttcctattgccanagcaataaacgtgggatgagcggaaagctcacagcatattgactgatgcatgctcatgtttgcttatatgcaccaattatcgatcctttattatttaattattacaaaattgatgtatagaatattttagtttcaagcaggtaaactgacctga

SEQ ID NO: 71515 - DNA, 372 bp, Glycine max
  unsure (1)..(372): unsure at all n locations
agctntgataccaactgagataacaataaacactctataactaagggggttgaatagtgtgtatatcaaacatataaacttttgcaatattaaagcagatatagatagtgaaatatatatgtgtcaagtcatccattgaagatatatatgtgtcaagtcattcaaataaatacttgttgttaaaaatgtgatagagagtgctataagaatgattaataaactgatatcactttgatttatactatttcactcaaccttagctacatccagttctcctttagtcactagtaaaggattccactaatcaaaacttgattaccaaacaagtattctaacctaccactcctgggtttacaagtactcataatacca

SEQ ID NO: 71516 - DNA, 334 bp, Glycine max
  unsure (1)..(334): unsure at all n locations
taataactaatctcatcgtccaattggtgcagtaggtcgcagtgagcaatctttgattcaatctttgttgacaaaactacctagtcttgggcaccacagccttaaatccacagctgctaacactaattaatatccacacttaccactgtttgtttgggaattcctaaagatcatacacatgaagacattctanattagtgttacctaagagctgccatattcgatattatcccagcttctaaagctgtttgtccatgcctcctctgtgattgtttagcatgatgagaatctgcaaggcttggtgatacatgaccacactcgaattttatctcca

SEQ ID NO: 71517 - DNA, 456 bp, Glycine max
  unsure (1)..(456): unsure at all n locations
agcttattgagtcacttacttgttggttagggcttctcattttcatgttagcctctagattntgtttttttattaatccctggttgtattcatcatntcattaatatagaaatgatgtagtgatttcataaaaaaaaagtttgagttggactttnttgctaaacaaaggcgaacgagtaaaatatncaaatagtccctcatttttagaggcactgtcaatttgatcccttgagaataaaaaaatcaaaatgatcctcgattttactttcttttgccacgttagcccctgcattagtaatctcctatgaccgtagtaaatgtgtgatttgacaccttaaatgtgaactagaccaacccgtgaatctcccacatcaagtttttttacttgccacgtcaggagagacataattgacattaaagagactaaaatgacttatattcgtgatcatctttttc

SEQ ID NO: 71518 - DNA, 464 bp, Glycine max
  unsure (1)..(464): unsure at all n locations
tatcaatccttgtgatctattatgcaatatttctatccatattatataactgacctcacccatatctttcattttaaagttattagagagagatttcttattcttatgaaganaaccntgttcattagttgcaagccatatatcatcaacatataggattagaaaaataaccttactctcattgaccttcagatatatacaccgatcaacaagtattcccttaaatccaaaggaaacaatggtatcattaaacttcaaataccattggcgggaagctggcttaagactgtatattgatttctttaatttgcacatcatgtgttcctctgagaaccccattggttggtccatataaacattttcttncanatctncattatgaaatgaagttntcacattcatctgatgtagctccaagtcataaatgactattattgcatgataatctgaaagaatccttcgtg

SEQ ID NO: 71519 - DNA, 349 bp, Glycine max
  unsure (1)..(349): unsure at all n locations
tgagactgataacgttgctggttaatacacagcattattaacaactgtggtgggaaaggacaatattgactcatgaatattttatcctttaactctagagggttggtgagtggtgtcaatggtcagccatcacaagaatgaccttgaccaacaatcttgatgttctatgtatccaagaaacaaatatggaagccattgataggaggataagtcagnatttatgggctgactgtaatgttgcctcagaatgtgccccttctaattatgctgctggtggcctcctttgcatctggaataagatgctttttcagttgaaagaaaagtagtggtggcacgatatattcttttg

SEQ ID NO: 71520 - DNA, 448 bp, Glycine max
  unsure (1)..(448): unsure at all n locations
ttcatggatcaagccttggtaagtcactgtgtctaataggctgtntaacatatattatgcttanagtcaaaagtagatcatttaatcaatgacttaattgaagtcataagtcatacctagaagaaataagagtgtccatagttaaactcctttacgtggtttgtaaaagcaatatatagatccctatcttgagcagacactgcttcgtcagccatttccgtgagctattttctttctaaatgcaatcaacaatcatcatataaaagagcaaaaaaaaacaaatacagttcaaaaaccacaataaatctataatagaattcaaaagattcttaaaaaataatccagtgtatgtagctgtaaaatcattactgctaaaactacttttgttagtgagtttaatagaaagcagaaaacaacaaccaccacactaataataattatagagagt

SEQ ID NO: 71521 - DNA, 446 bp, Glycine max
  unsure (1)..(446): unsure at all n locations
agctngnagncattacttgttgagaaccataagtcaaagtctattgtttctttgatattatgaagaattcattttgcatccttgagatgagtagtcattagagtctccatgtatcaactgatgagtccagtagcatataaaatgtctagtcttgtgcacatcaaatcgtaaactacccaccaaactcttgaactttgtagcatccacctttcctgcttcgtcgaactttgataacttaattttgcactcaatcggtggtccaattggcttgcaagtatccatcttgaatttattgagcatctggtgtgtgacatagccctttcacacttatgagatggcaaagtgtctntgtgagtggttgatgttgatggagtgagctcttgctgaacatgttgaggtggtctatcttctttaagtggagacaaaaagatgtattccttttcatg

SEQ ID NO: 71522 - DNA, 339 bp, Glycine max
aaatattataaactgttgtgacgtgaaatcatatatactccacaaatatttcatcgaatgacatagctaaagtttacaattgtgccgttctcatggagcaaatctcaagtatttcattaacgcgtaattttatttaaaatacaaacatatttcagcacaccatataatagttatctgttaattatcttggtaagtatttataaataaaaaattaagagtcaaaatgcaatttgttttcatcttcaatcactagaaaaaatcttctgcaaaaataaaaagaatcttcttgatactaatatgttccaacagatttaatagatagttggattccttgggaaa

SEQ ID NO: 71523 - DNA, 395 bp, Glycine max
  unsure (1)..(395): unsure at all n locations
agctnntacagcagatttagtaatgacccactaatcctattattaaataacttaatgccattaacctaaggaattaaaaaaaaacttaatggctgagtgtaactgaaatcgtggcaaccaaaagtcaccccccacagccaacaagtcagccaccatttggtcttccaaaaagctgatgcctatgttgccaaatgggcccttattacaacttgaactaaacctaactaaagccctcttagttgattaacccaaaacatatttttggtcagccaactttacaaggattgggccattatttagacaaactaaacactctaaaattgaaacaaagnggtgtcatttagtccttcctcatttggccatgatacaactacaccttgacttttctcttgaac

SEQ ID NO: 71524 - DNA, 281 bp, Glycine max
taatatgggaggactttgagtgataaaccctccacaatctactctattctactcaagatgagactctgaattatatctcgaatgcgggtgctgtcttcctaattgctgtgcctagttatgaatggatatcatgcatgttattgaatcttaactactattatacgcaatgagaatgatcacgtggcagtataacttcacaattccctgcgtaatttaacttgtataaggtggagtgatgtttactaggaaaatataagttgtagacgtaacggtttgtggtt

SEQ ID NO: 71525 - DNA, 414 bp, Glycine max
  unsure (1)..(414): unsure at all n locations
agcttccattgtagaaaggtatgttgctgaagatactattgagttttggtcacagaacatggaaacagttgaagctgtgggggtaccgaaaattcgtcatgatcagacacgaggaggtcaagggacacgaggcttcaatgttgttatcatgagtctacaagatgtgtcacaggcgcatttgtatatcttgaataacacacatgaggtcattccatacatacaaactcacaaacaatatctgacatctattaacccaaaattgaacatgatgaaattgttgcaagagcataatanaactntcatgaactggtttaaagaaacaattatgactgatgacaatgctttcaaacattaagattgttggctactggtctgaatactaatgtccctacttggcaggggtatgacataaac

SEQ ID NO: 71526 - DNA, 431 bp, Glycine max
  unsure (1)..(431): unsure at all n locations
catcaagcntggccattaagttgatgattaagttttattttcttgggngncaaataatntattcaaacaaaatttaatgctagatattctcgaaaggcagaccttccagtaaatatatgctcccttatacccaaaatggtgggttttctttgcccattgtgttcttttcgaaattcttccaatacatttctcattttgaaagattcttcataatagttatccttaacaaaaaaaaaaaaaaagttaggagcactgatttgtatagaaagtactacttaactcatattaaactgaagttcaaggaaaagttacctgattcatgtctctagtctgtaaggcttctccacgagtaaatataatggcatgaatttgattntcaggtatcccctcaccgattagtgttggaggaccaggtagcttgatgcgatata

SEQ ID NO: 71527 - DNA, 472 bp, Glycine max
  unsure (1)..(472): unsure at all n locations
tatagaacgttcgttcctaatttctctattattgcatcatctctcaatgagttattgaagaaaaatgtggcacttacctgcgatgaaaaacaagagcaagcctttgctttgctcaaagaaaagcttactaatgcacctgttctagctcttcctgacttttctaaaacttttgaactataatgtgatacctctggagtgggagtcggagctatattgctacaacgtgtgcaccctatcgcttagtttattgaaaaacttcatagtgccacccttaactacctcacctatgataaagagctttatgccttaataagagccctccatacttgcgaacattaccatgttttcaaggaatttgtcattcatagtgatcatcaatcacttangtacattagagggccaagcaagtatacaataggatgcaaaatgggtagagtacctacagaaattccatatgtatcatatacaaaag

SEQ ID NO: 71528 - DNA, 377 bp, Glycine max
  unsure (1)..(377): unsure at all n locations
agcttctgatggtaggacaaagaagaaagttcttcanactgtcggngagtggnggtggcacgttaaatctgatttgacgaggaaatggacactcgcagccaacaaggacggtgtggaggacactgtctctgaaaaatacgacatttgcaaggagaaatgggcccagttttgtcagacctgcagtgacccctcgtgggaggtatgttctttgtcattttaattgttntccacaaaaaattctcttcttataattcattgtagtaatgattttcattaatgtttgatttttgcaggatgtgcggaaaaaggcacaggccatccagaagcaaaatactgccccccacatgttgtctcatgggggttatgattatttataa

SEQ ID NO: 71529 - DNA, 400 bp, Glycine max
  unsure (1)..(400): unsure at all n locations
gtttaactctttagcacggactntccactagttaaactcttctgacaatgcatcatcttgctcttatgccatcttcaaggcggcatttttctctttaaccaatttcaatgggttaatatctctcagagattacttcaactccaaaaaacttttataacccgaagtgacatgagtcagatacccctttaatctagctaaaattgacaaagtatgaaaaatcgttcttttgaatggactcccaatcttctaacaagatgacatgataaatctcattgcccgaaggcatccacacaggaggaacaccaaacttgctagcagggaccaagctaganaccggtgattccaaatcgtctacaatattgacgaccctctgtctcttaaaagaatgaatacgtatgtc

SEQ ID NO: 71530 - DNA, 430 bp, Glycine max
  unsure (1)..(430): unsure at all n locations
agctntctcataagtgctatatgacatntcangttagggttaactcactttaacctccaactctcaaaacctcactctttatccactcataacaccatattctcactgtctaaccctaggttgactctacccttcatctctaacagttttccataagcaatttcagcacataaacatcacaagcatcatcataaaaaccctaaaactgaatgggtgagcttaactcatccaaacatggcaagttcaacatcctttcaacaaatttcttcacatataactatcatgaagcagagacctagcaaaactacccatcatatctctccaaacccaatacccacgataatcaagtgagaaagaagtctacccaaacctgaaatttcaaggttccacacgtagagatgcgcttcacgactccgagaatgccttcctt

SEQ ID NO: 71531 - DNA, 454 bp, Glycine max
  unsure (1)..(454): unsure at all n locations
tnanataggctcgtggaccaagccagactnttatgtaagcctttccgagtcttaaaaaaagcctatgacagttaatgagccaagctcaagccttacgtattcaactcaagccgagctcaagcctagtaaagcttggcttggctcatttccacccctaccaatgacatagtggcggaagctcccttcttcatgagaatatcaatgcaaaacattcacttcttgtagagtgtagatgatacgaacctcccattggagggccaaaagtgacttaatagatgtaactatcatcacatatagatgaagcgaaagtgattgttgttcaattacgtggatagaagctaaaaaatctatctctacgatgttatgtctaaacccattatttcatgtatgatgcatcccattgagtatagcacggagctcagcatacatgttcgtagtgtaccacaataacgat

SEQ ID NO: 71532 - DNA, 141 bp, Glycine max
tcccaacacgcaatgaccctcatagcggacggaggacctcttatgtttgaacgcacttgatcaatgcgacagctattgttaagcttgttagacaatataattctaaaagatccgaaaatttgtcggagacgactaaaaaat

SEQ ID NO: 71533 - DNA, 412 bp, Glycine max
  unsure (1)..(412): unsure at all n locations
atcttagtcactgagctgcagctctctcttcctataatgggaggatggagacaatatgtcacccttccgtatctgggatcacttaaatagtgagaaaatgttccgtaananatcaactgagcctttgtatgcttcatacattcttggcgattcgaagggtttcccattttttattctcgtcgtcttatcttacccgtagtccgaatcaacttcaatattttgtacctagggcctattgttccagccctatttattattacttcgacccctttgcggcttatattattaacattttccttataaataaaaattccccgactcgatggacatttatctgtaataaacacgtagctgctacacttaacaaaaggaatcattttataatattcttataaacaaaacacgcttttct

SEQ ID NO: 71534 - DNA, 97 bp, Glycine max
aactcactcataacccttcaaatgacataagcttaatcctattttttattaacacaaaaataaacgtttgtcatcctatcctatgtgagtgagttaa

SEQ ID NO: 71535 - DNA, 205 bp, Glycine max
cgcaatttatagcgggtaattacatctcgtgcttacttactaatacgtattgaccctactcttagactgtctttgctatgcgatgacattataattgtagcgaagtcagctcctgatattcttcaatagacataaatgaacgtcattggggcacgctattattccctccgttagtgatcgaatcggggcgaagatttaacctagt

SEQ ID NO: 71536 - DNA, 418 bp, Glycine max
  unsure (1)..(418): unsure at all n locations
aatgagcaagaaatcaatgaaacctcaatcaagttaaaaacaaatattgaaatcaacaactaaataaaaacaatcacaaacttatgaaataaaaaatgaaacctttggtaaaaagaccccttgtgagaagtntgttgaaaatgaaaccaaccctgtatgaaccaccatgagagagcagtggtctcaaaattgcaagggagcgagaacgtgtgggttgagaagtgtggctaagaagagtaatagtgttgtacaaggaaagacgagagagagaagaaggatgatgtgtaaaaatgaatcttaatntagagattcaatattcttttgtngataaatctgtaaatgacaaatcattccttaatatatcaacactattaatgtaaatcatgccataaatgatacctatagatgtcaaccaagt

SEQ ID NO: 71537 - DNA, 207 bp, Glycine max
tagttctatgcacatgcacttgttgaagaaattggggaggagaagagagatgtatgtgtatgcctcattctttttgaatatacttaaaatggtaaaaataatatggcaatacaatcataatttagtctattctaatgacaaattcatatttttttttttggaaagaagacatggtctattattatggctgataaacggtaatgataa

SEQ ID NO: 71538 - DNA, 290 bp, Glycine max
ctcgatcgtgcggttgcgctgacgctgggagactctgtttgcatctacactattagtggttttatatcagtctatcttaaagtgctgctggagagtgtgatgacatgatgctctgctggatgattttgataaactggatacactggattgcactgagcaggactgtttcttgtgaggcacaacgaattgggagtgtgcgcttacaaacttgtaaagttcaaagatacccatgaggattgaatgaaattagtatttagctaaagctcttgatagattttatcgaaagaatt

SEQ ID NO: 71539 - DNA, 382 bp, Glycine max
  unsure (1)..(382): unsure at all n locations
atccttaagtcacctgcngcattgcaagcttggtggtttcatccaaatggtcatgatttcttgtcanaaatgttcataacatccactgtaatgaacctcgtgggaattagattcgaaaccaatatcttaccataatttttgaacaagaaggaagatagatgaagcttgtgagatgcgtgatgacccatcaacaacaatctttgaaacacttcataaggagatgggttacctcattgcacaagaagagatctactgaaggcaaggagtacaggtgttcttcgtcgaaagaatgagacattaattcaaagtatttccatttcacaacaagtgaacgtanaagactacaacatctttctttgcacgtgatgattgattgttgtta

SEQ ID NO: 71540 - DNA, 412 bp, Glycine max
  unsure (1)..(412): unsure at all n locations
aacttcgagcatctcgttatattacgagtctcaatcagacatccgagtattaagntattgtcgttngaatnggctctaagcttcaacattaaattttgagcatctcgttatattcccggactcaatcagacatccgagtaaaaagtatgatcggttgattggctcagagcttcacattcaaattcgagcgtctcatatatgacggactcatccacatcgagtanaagtattgcgttgaatgctctagctcacatcatttagcgtgttatcgactataactcagaaagtatgcgtgatgctaaatcacatcattagcgtgtttacgatatcactcataagtatgcgtgatgtaactacatatcacgtgttatcgatatcaatcaaagatgctgatgtcactactatcacgtat

SEQ ID NO: 71541 - DNA, 338 bp, Glycine max
  unsure (1)..(338): unsure at all n locations
tcacctgacgctgcagcttcagctatgtgacataaacgctttttgttgttcattntcggcttggttcgggatgtatgatgtgtatttactttcttggcacaaaaacaaagcacaagctctgagctcttgttcatcaaacgtgtttgttgatcgttctctgggtggttcgngatgtatgatggttctttagttatttcgcacaaaaacaaaccataatctttgacctttttgttcataaacgttgtttggtcttcgattacggcttggttcgggttgtatgatggatntttactttattcgcacaaacacaaaccatatgccttgatctttctggtcat

SEQ ID NO: 71542 - DNA, 408 bp, Glycine max
  unsure (1)..(408): unsure at all n locations
tttgctcccctaacagggaagtccaccaatagagggcatacccttgatagctaagggtatccaatggaacttttctctcttcactaatatgatgagaagcanagaaagtgtcaaccttcatttccaatctatgtaggcctcaacattatcttttccatggaaatatgggaggctaatgttaacctctcgaggccttctatacttttctctttttggggaatgatgnntagtatgtgaactaatggcgctcttataatagtcgttaagttcttcacataaactcttgcaagagtcatgactactataggagaacatcttntctctnttcatttctttcattatttntcttctntcttcctcaatntctctcttttatctngacntaattcttccacnntcttttttcct

SEQ ID NO: 71543 - DNA, 227 bp, Glycine max
  unsure (1)..(227): unsure at all n locations
cttcaccaatccagcaacaacaacaacaacagccccagaaacaacanacagttgaggccctttcgcaaccttcctttgagaaactgtgangcnatgactatgcanaacatgcagtttcaacaagagacccagagcctcattcagagcttaactaatcagatgggacagttggctataccagtaaatcaataacagtcccataattctgataaataccttctcaatct

SEQ ID NO: 71544 - DNA, 281 bp, Glycine max
  unsure (1)..(281): unsure at all n locations
ctttattgtttaccacagagtggtacctggagatatgtcgcgtgggtcaagagaccttgcggacgtcaggtggngtgctattgcccaaaaccaagcttgaccaatcccgacccaacccgtgcatagtctgtcagtgagaacctgtgatgtacctaagcatgcgagctcctggcagtcaacagatangaggaacaaagaccacanagcaaggaggcttgtggtggctggccagctgtgaaacttgatcgatatgtganggatggcctctggtaatcgattac

SEQ ID NO: 71545 - DNA, 337 bp, Glycine max
  unsure (1)..(337): unsure at all n locations
aaactgtatattataaaaagcttggaatttgcacaagtgtgtacaaataccanaagcaatagcccgcatttgatactggctaaaattagaacacacacttatggttaacgattggttggtcataaatctaatatgcgcgattagaaaataaaatcaacatattcaataatntaatttgacattgtatttttatttacttcattggntgtcggaacccggccacaatgaccactgatgcatggtcataatagccacttcatgacataactatggctgctacaaagcaacttattaaatgatgcaggcagatagtgatgtatgcataatagagtacgtt

SEQ ID NO: 71546 - DNA, 292 bp, Glycine max
tactccttcagagactatttaagggggactactttcttagagtttaggggactatttaatgggggactaacctcttcagatttctaagagctcttagagttcttaaaacctttccgaacttctagctataatagaactgtgtaccttgtggacttatgagaagctagaatcactaagtcacttttcttttatctcatcggccccctctattttctcataactcttcactctatcagcattgtggaccttttctgctatccaggatggctccttcttttctgctcgtgattct

SEQ ID NO: 71547 - DNA, 330 bp, Glycine max
tatagtctggttctggatattgctctgaaaaatagactcttgtcgcttgcgctacagtcagcgtctggtttgtgatttaaaatttgtaatactacactcaccctacagtcatagttatgggttggtcctcgagtagggtatatcttatagactggaattccaacttgctgtgtaatgcataccctaacacatttgtatttttagactggctacgtgtgctctagcccatcgttactttggcgcttgttttgcagactacgcctacctaccaggcttcgtgcatcaagtacgcgcccgctacgctaaattattgggtactgcttacctccc

SEQ ID NO: 71548 - DNA, 278 bp, Glycine max
  unsure (1)..(278): unsure at all n locations
atttaccctagaaatggctctttgttcactttgatcaattgttnttctctcntgcacagcccaaacgttcttataagtcctaaatgacatttcagctaagataactactttaacctcaataccataatcagattggcctccactctaaaactactctgtccactataacacatatctactttaaccaggtaactttccttctcttacagtttctaagcattttgactaacatacatcatatcgaaacctaaactgatggagctactctcactacagta

SEQ ID NO: 71549 - DNA, 118 bp, Glycine max
cactctacttgttattcgcttatgtataagtcatcacctatatatatcgaattgtatatattggaaaatgactgtgacctataaattgtatatgaaactattggaaaatgatctatat

SEQ ID NO: 71550 - DNA, 273 bp, Glycine max
agtcacctgctgcatcagcttgaaaaatttgacatatcaaaattaagttaattcatgcttcaaaaaattatatatactataactttttttacaatatattattttatacctcattggtgccaccactaatgagataaaatatcatattaatttaacaaatatattatatctacattgggggccaaataagcatatatcttcatacaattaaatacttattttattactttaccacaacgaggggcatgtttacttagacataactccctttgt

SEQ ID NO: 71551 - DNA, 315 bp, Glycine max
  unsure (1)..(315): unsure at all n locations
gcttttatccaggcactctcttggggcaagctcctcttcatgtgttattccctagttgatgactnnctctctcacctcttctcctttgtcttccgctacatctccatggtggaaaatcaccattgaaggatctcattggagctcaaagatccaaccctcatagaagctccacaagcaagctttcatcaagtgggtatcataacacaagagcttcaagatgttctacttanactccataatttcagcttacttctcttcatagtgtcttattttctccatgatctctcacatgctgtctaatgtgtcactgatctt

SEQ ID NO: 71552 - DNA, 499 bp, Glycine max
  unsure (1)..(499): unsure at all n locations
gatcctcttagtcacctgcngcatgcaagctatancatgcttagaggtctctctctctcttccatngcagngcatttatttatcttacatttcntttntctcttaccattaatacagacgtcaaattcgtaatgtctatgtgcaatgatgtatggactcccactcacaaggaagattnctcttgatcctatctccagatgtattagaatctccttctttgccttgcttagaatgaggaactcaacagttattaatgaattagtatctaagatgatattatattctgcacacatgggcaatgaattgcattcatgtcaggcttgtaaccttaaagggtattaacgagagaaccaatgtcatcatccattacactacttcctatttgcaacagtataagtgaatctttctgcatttgaattgacattaccaacatagaactttctctatcttatgaacatntgttatctttcattatctctcatcatttgaatggaaataa

SEQ ID NO: 71553 - DNA, 220 bp, Glycine max
  unsure (1)..(220): unsure at all n locations
gtcacctgatgctgcaagctgaaaatctctgcaaaaacggaaattaccctgggttaaaggcncctttcaaggactatctgcacatgcaagaccatgatactacatcagactcctctgaaagcggagatcagacaggttcgataccctcttgctcgatctaagggcatgcttgaacaactcaaacaaccgtgtgctgtctgaagaaggacaaggaacgccc

SEQ ID NO: 71554 - DNA, 276 bp, Glycine max
  unsure (1)..(276): unsure at all n locations
agtatgctttctacaaaaaaatctctcattgtgtgttggattaagctgattttatgattgctattagatagaaagagacattttatagcttactaatgcaggatatttggaagaatgcttgctaagtatcgaatgaanggatctacttgataatgcatggatgatcttcttctaaccaactgtatgtaattcacatgtagaatgtcaacaaatgcactgcagtaaaatgaaaaatccacaggtgttgtgctggatggttgtgcatctcatgacatt

SEQ ID NO: 71555 - DNA, 269 bp, Glycine max
  unsure (1)..(269): unsure at all n locations
agcttgtacgcacatcgttcgcgtgtatgatatccactccacaagggctttagtatatgagagcctcaaccctataacgcaacgtggcggacaanagtgggccagtaactngaatgggtcgcaattgcaatgcggaanggtatctgcgcttcactatccattgtcacacattattgcagcgtggtggtacgtgagcatgaactactaccaatatatagatgttgnttatacaaacgagcacatcttaaaagcttactccgcacaatggt

SEQ ID NO: 71556 - DNA, 377 bp, Glycine max
  unsure (1)..(377): unsure at all n locations
ctgcttgacacaagtcattcatatttgttcttataaatgtgacctacacgcttatgtcataatgctcttgagtttgtattatcaactctacgtttaataccacacaattttgcattatatgattaccataagaagctacaatatccattaaatatagactatcattaatctagagtgaaccatgtacaacattatgtgactttaaagacaacctaaacacagtgtttcaaattaacacaaataactcaatttgtccagataagaaactgaaaccatattcgtctaaatgacagacaacataagtgtgttcanatccaaatacaactaatacactatatggtatctaattgcatatactttcacttcaccgattacat

SEQ ID NO: 71557 - DNA, 256 bp, Glycine max
  unsure (1)..(256): unsure at all n locations
tatctttctgttgactngattttngaaatgtcacattcttctcttatagatggcctcaagaaagagagcaagaactgaagacatcccttcatcatccaacccacctacttcgatagcaaccatggaaccagatgcccaacangcaccacccataattcctatngtgcagagcttattcangaggcagctggtgattgtatacaaccagtagtatgtagctcacaataggctaataatatccatggaacaatttctg

SEQ ID NO: 71558 - DNA, 129 bp, Glycine max
  unsure (1)..(129): unsure at all n locations
gcgtctcgatatataagggactgaatcagacanttcagtaaaaagttattatcgtttgaattgcacagaactttgtattcatattgncaactcgattatatctgactaatcanacattcgagtaacagt

SEQ ID NO: 71559 - DNA, 247 bp, Glycine max
atttttgaatatcatcacacccctgatcatgagcgcctcactatagcttcttttacatggatggccgtgccttggcctggtaccagtggatggccagcaacggccagctctcttcctgggcaggtttcctccatgctttgcaaacctggttcgcgtcctaacagtatgaggatcccacaggcaccctgttcaaaataactcagcaaaccacagtccaagcttacctttcggagttcgaagatatcgc

SEQ ID NO: 71560 - DNA, 290 bp, Glycine max
  unsure (1)..(290): unsure at all n locations
atctactgaacttttaagtgaaaggttcgggagttgtatttacgcacggtgaaggtattatcaccccacacgctcgtcctatggacggcagctttaaggaatgtgcaaccatgacttgattttgtccctttatgtcttatatacttataccctnttatatttatccttttcgtggcgacanggggtttcctttgttctcgtattctcaattggatgaaaatcaacctcgtagtcttctgacagagtgttgttagttgtttgctttattgacatatgtttatgacaaagca

SEQ ID NO: 71561 - DNA, 156 bp, Glycine max
  unsure (1)..(156): unsure at all n locations
tctatatataacgcaagttgggttttatactatcttgaatgccacgataaatattngtatgcttatcaactacccatattttcagctttaatctgtccaagaatgtgggcatttcatgtgaaaactaatgttttattttatttttctagaaataca

SEQ ID NO: 71562 - DNA, 116 bp, Glycine max
  unsure (1)..(116): unsure at all n locations
ctcagctgtcatgcttcaggctctccagggcanaccttgtgttagatgagtctctggagattcatgactcactaagggtggatcttgggtttgacgagcctctggagaagtgagac

SEQ ID NO: 71563 - DNA, 285 bp, Glycine max
ttttgaaaaatttaaaacagtccttgagaattggagttggaatgtattttcaaatcaacattggaatcgataccattagggtaatcattaccattacagagtgactttattttaatttgaaaaataaaacgttagaagctctgggaatcgattacaagtattgtgtaatcgattacaccaagttaaaatacctttaaactgtttaaacataagttataactcttgagattgaaatcttaacatttaaaacactggtaatcgattactaccttctggtaatcgata

SEQ ID NO: 71564 - DNA, 295 bp, Glycine max
  unsure (1)..(295): unsure at all n locations
catacttgctgtgncatgttccatatattaacctctttgaaacgacttgagaatcaacaaatacttactggagtcgatggagccgatgatattagacgctcgtattgaaacgatgtctgagaaaatgaacactataatgttttaactcgatgtcctattgagccctgtaatatatcgagacgctcgatattagaatggatgctctaaagaagtcaacgacaatactttaactggatgtcgatgagtccgtattatcaaacctcgtattgaaactgagcttgagcaattaacgaca

SEQ ID NO: 71565 - DNA, 53 bp, Glycine max
ctgttcagactaccgtgagatcagacgagataccatgagactttttacgttta

SEQ ID NO: 71566 - DNA, 87 bp, Glycine max
tacgcccgctgcactatcgagactgtgaatcataacatctgcgactgagcctacaacggatgagactgatcgcgcgatacacctgcg

SEQ ID NO: 71567 - DNA, 398 bp, Glycine max
  unsure (1)..(398): unsure at all n locations
ctgaatataatacatcttagcgtgaaaacacaatcntctctcttctctctctaacgccctatccaaccctaacacgctcttcttcaccacccacgaccactagtgcncaccacgagccaccattgcgttgccgctcaaccaccatacagaaaggaacactttaatctgagcggaatccttagaatccacctcaaggatttatggaaaacaagccctcaatctttcgttatagctttttgaagaacttgactttaatcctttcttctagtagttagatttctctagtgctcttgtgtctacgacaaaanggtgtgttacacttccttgaaaacttgaaatgagatgtgaaaagtatctttataaatgatgtttttgaacctttataaatcgaacaccct

SEQ ID NO: 71568 - DNA, 303 bp, Glycine max
  unsure (1)..(303): unsure at all n locations
ttataatgattcacatacaacaatctatgactacaaattattcaacctcactagagtgccaatatagttatctttcaagcattcacttattaagntacaattaactgtcgctaacagacttaaaatctggtttgggcttcanacgagacactcagagatactaaatttattctcactaatactaatactttctgaaaaaagagattctttgagcttttctgcaaagctacttgcgacattatgtacaagttcttattgctctctaagtctaagacaattaaaaaataaccggtgaagggttac

SEQ ID NO: 71569 - DNA, 66 bp, Glycine max
attgggaccttcggttccaggaggtcctacttctgctggatcaggaaactagcctaccaaccctac

SEQ ID NO: 71570 - DNA, 236 bp, Glycine max
  unsure (1)..(236): unsure at all n locations
aacctggttaatggctactaaatctccattcttcaggccaaacctttgtaaactcgaccataagctcccttttcaatctcatctnccagcatctgcttcaaatctcacatacaaacaaagcaatcaggcattataaaatcaagcctatcagtgatcccatgtcatatactatttaagaataaaacaacacnaaacgccaatatttgagatgaattcactataatanaaagtaaatc

SEQ ID NO: 71571 - DNA, 342 bp, Glycine max
  unsure (1)..(342): unsure at all n locations
ccgtcttgatatgttaagggactcaatcatacatccgagattaagtatgggcgnntgagtggctcagagcttcaacattcaatttcgacccgctcgatatngtacgggactcaatcagacatccgagtaaaaagttatggtcctttgaattggttcacagcttcaacatttcaattcgagcgtctcgatatgttaccggactcaatcagacatccgagaaaaaagttatcgtcgtttgaagtggctcagagcttcaacattcaatttcgagcgtctcgatatgttacgggactcaatcagacattcgagtaaaaagtattgtccttgaattggtcagagctc

SEQ ID NO: 71572 - DNA, 152 bp, Glycine max
  unsure (1)..(152): unsure at all n locations
agtggagaatgactattgttcctatgctgtggcccagtcccttaatacatttgacacttcctcntcaagtctcatgcaagagtcttngtacagggcacggattgactctggtgtctctagaatcaaatgttactaaataactaagtcaatgg

SEQ ID NO: 71573 - DNA, 416 bp, Glycine max
  unsure (1)..(416): unsure at all n locations
atactcacnctcgtccaccacataaaagggtccaaagaggaatgccaaagaataatagaaggagatctgttgatgaagacaatgtcacatgacataagctaaagaggaaatnggctgagtttacatgtggaaggtgcggccaaaccaatcataacattagaagctgtaaaatagtggagttcctgttggccaaagaaattgttgaccataacttaaataagatgaccctattattagataacaacttgatgagctaaaaactgcgtcatgtcataaatccgtggaatattatctagctattgcacgaaagactgagtgaggaaattgacacaatagttattaccattgtgacattatttatttacatatatgttgattgatgagtctcactttgccccatacagatactactacaa

SEQ ID NO: 71574 - DNA, 357 bp, Glycine max
  unsure (1)..(357): unsure at all n locations
gagtgtctcctcacttattgctgcgcaactcttccatttctactcagatgagttacttatctcatacttatgccccagcgatatntctttcaagagtgagtctcttctaaatggtagcctaccncttgagtggaagcaattntcaatccacgaatatccataatgtgccttatagcttaaccatctggtgttccacctagtctaaccattgctgccaatatgatctattatcttgcatcatcacaacacctaccggatccaatacctagcctccatgcattgactcactccttatttttctgatgctatatgttaatgacatgctgattattgattaccatttgaattatgtgaatg

SEQ ID NO: 71575 - DNA, 107 bp, Glycine max
cacgtcacccaccacacacatcatcctgctaagactctgtggaaacctagctttttaagcaaagcctgcctcttaccgatttctttgtatgacaagttgcgagtaca

SEQ ID NO: 71576 - DNA, 353 bp, Glycine max
ctgatcctatattgttgtttcatattgttacaaacgtgagatcaatcatgtgacatatttcaatgcggcttagtcataggatggtaatcatcagttaatcaccaacctcctatgtattttgatggaacctatatcacatgttgcttcttaataaaatacctagaaccgtatgattcaaggcggcttcatattatcatattatgatgctaaacaagctaaccttcagctatactctgtaattcttactgagctataataaatattatttatcttggataatttagcttataataagattatgtgttagagtttatatctttaggctatacaaaaaatatccaataatctatatg

SEQ ID NO: 71577 - DNA, 293 bp, Glycine max
  unsure (1)..(293): unsure at all n locations
ctatggcgatagcatcgctaataattcatagagctgattaatgaagtattaacgatatagcctgattttagataacgattatttgattactaagatgggaagatattggaaagtgagaagaaaaaaactcagtgcttgataagaaatatatcttagtaataaaaagagtagataatanatcttgtatcactgtcaatttgtcaaaaagagctaatttaacaaaaggttttgatagaataaataatattttaaaacaacacttatacaacaatgaaccatttattaagacttgt

SEQ ID NO: 71578 - DNA, 111 bp, Glycine max
ttttaagtcattttgttactgcaagatgacttaatgtgcaattgacagtactacacagcgtatatgggcaggcgaaatgaacttacatcacctcacacaagcagacctaac

SEQ ID NO: 71579 - DNA, 117 bp, Glycine max
  unsure (1)..(117): unsure at all n locations
gctaacatcatntgagcgctcattatacggactcatcgacatcgagtattagtattgttgttgaattgctcagagcctccaccattcaattcgagggtctcgatatatgacgggact

SEQ ID NO: 71580 - DNA, 194 bp, Glycine max
  unsure (1)..(194): unsure at all n locations
tcaaagttaatgaccatttcctttgtaaaacaatatacatatnntttctttaaagcaaattttttataattataactaacaatttaaccaaataaattaanagaatcaagtccacaactctaatattgttcctttaattttatgtataaagaatattatatctatatatatatatatatatatatatatatata

SEQ ID NO: 71581 - DNA, 352 bp, Glycine max
  unsure (1)..(352): unsure at all n locations
agcttcatgatgaatcaagaatgattcaaagagttttgatgataacaaatatgatgacaaanagctcataagtcaagaacacttcatgataacaaagatgatgatctcaagaatcanagaatgagttcaagatcgaatcaagaacacttcaaggttcataacgaaatatgttttctcgaatcaagaatctagtttctagttccaagaaacaagatcacgattcatgactcangattcaagaatcaagagaagactcaatctagataagtatgaaaaagttcttcagagactgagtatcatatgaatgtttcttataacctcctaccacagagctcttactctctggtaattg

SEQ ID NO: 71582 - DNA, 286 bp, Glycine max
  unsure (1)..(286): unsure at all n locations
agcttctcgattattatgctccttaatctgacttnncgttgaaaagtatgacaatatgaatttctggagagcctccgttgtgcaatgcgagcgtcttgtatattatgcgcctgaattggactttcgtgtcataagttatgaccatttcaatttctcgagagcttccgttgttcaatttcaagcttctcgatatattatgcacctgaattggacttccgtgtgacatgttatgaccattntaatatttcgagagcatacggtgtcaatttcgagcgctcgattatta

SEQ ID NO: 71583 - DNA, 101 bp, Glycine max
aagtattgcgtcgatagcttgacttaaatcattcggcgctaataatacggactcataacatcgacaaagtattgcgttgattactaagcttaaatcattca

SEQ ID NO: 71584 - DNA, 125 bp, Glycine max
actctggtaatttgtgagaacctcttgagtgcttacatactcaaattggtatcacatagtaattattttagaatgttcctactgttgaaaatgtaaaatcttagagtaaagagacaagtagtgaa

SEQ ID NO: 71585 - DNA, 181 bp, Glycine max
cattatagacacccgctttggattttcgagtatgactcaatctagactgttttcgatgacgacctggatcaacatctttgctcgagacgactatatggccgagtcttgatcgggacggacacgaggcaaattttgttcgtgcgataaatgcagaggcacctcagcacaatggttacagctg

SEQ ID NO: 71586 - DNA, 312 bp, Glycine max
  unsure (1)..(312): unsure at all n locations
agcctataatatatcgatacgctctaatataacatctgtaaatcctgtatatatatatgggcattactcttcacccggatgttctattctggcgcattatatgtcaagagtctcttaanatgtaccactgaagctcttgagatattcaaatggttataactcttcacacggatgtccgattcaggcatatcacatatctagacgctcataattgaacaatggaagctcttgagaaatgtatatggtcataacatttaactcgaatgtccanttaggcgcactacatatagtgttacttcgaattgaacaacg

SEQ ID NO: 71587 - DNA, 302 bp, Glycine max
  unsure (1)..(302): unsure at all n locations
ctcactttacccccaatttctactaaccncattatttagctnttcaaaccctcaaaaccttacactttttcactcacatcactaccattctcacattatacctagggtaactctccccatcatctctaccaggtttctaccaacaatttcagcccacaagcatcacagaacatctgtataaacccctaaacagaatgggggtaattggctcacatcanacatgtcaaggttagcatgcgttcaacanattccttcacaaataactacccataggcataaacttagtaaaactacccatcata

SEQ ID NO: 71588 - DNA, 427 bp, Glycine max
  unsure (1)..(427): unsure at all n locations
tactccgatattaatagtcttggattattttcagaaatgtagtattagagaaatgttagagagaaattacacaccaatagaagtattgagtatattaaaactttagattcttttccaaatgtttacatttgatattaaattttaatactgctgaaagaagttttcaaaataaaattgcttanatctatctanatcaacaatatataagatagattgatgagttagtatttatcattgaagtgagtgtagaatgttgatataaactctataatgatttgcgctaaaagctcagataatataaatagtattatgatatactagctcttaaatctgtaaaatgacccttaacattctctaacccaaatgcttcgaatctggatgttcatatttacgtatgcacgtttgatacaggatcacatatatacta

SEQ ID NO: 71589 - DNA, 280 bp, Glycine max
gctccataatgatccactgaacttgatgtcatggctgacccgaaagaattgtacaccaaagcaccctggattcaaagaatctaggagtctgatggcgaccacatagatgtcctatatacaatgtcttggcttttcatgactctgtcgatgagttttttcaatgtcaagacaaacttgggatctctatataatatatattataattatattcacatccagatggcggtcattaaatcaacaaacaaatatctctgacaatggctattgtgactgtaggaaa

SEQ ID NO: 71590 - DNA, 360 bp, Glycine max
  unsure (1)..(360): unsure at all n locations
tagctgttgtaatcagttttggcactggaatcgatacatctctggtatcattactagagagaaaatcttggccaaactttttgctacttcaatttgaattcccttcctatttaatataccctttctaagactctatagactgtcttgatcatccatcttgaatatctnntaattgcttgtctngaataaagctttgagacgcatgtgatattttggcatcatcaaaacatcngcttgatcctttgtctacanccttatcatttangaacaacgacctgagtgggtaacgcacaagacagatctgcacctttatcattangaccacacctgagtggtaacgcgaagataatctgcccttat

SEQ ID NO: 71591 - DNA, 281 bp, Glycine max
  unsure (1)..(281): unsure at all n locations
atgttgatgggtatcccgtgaagatatggatgaagaacatgtcctctctagctcagacatgaagtgttctttacttctctaacctgattgctcacctccatacttctgatgtcaccctagatagagcccaactcatttatggcaatatcatgaagatggacatgaatgtggngtacctcatcttccnccagatctcccttatggctcagcatgacacttctaaacttggattcccagccttgaatacaactntatgtaaggctaggggagttcagtctgac

SEQ ID NO: 71592 - DNA, 372 bp, Glycine max
  unsure (1)..(372): unsure at all n locations
tgtgagctgtaacctggcatatattgaatctaattatttttcaggtcttaacaagaatgtaaatgttaacgcaaacaaagtggttgcatctatcactcatactgactttgcatcttttgagctccagtggctttcgtcgaagttgtaattctgtctggctttgtagtgcaaaatattgaagtctgtatgttaatactgataatgtttttggtggtagttacttgttatgttttactaccatagctaaagactctatattctttgttgctcacagcattgtggattgctcgttatattctttgtaatttgtgctgtatcttacngtgggaagtactacaattgctactagtaaatgggactccatctctgtat

SEQ ID NO: 71593 - DNA, 271 bp, Glycine max
actatacgcgctcagctaaacaattttttaaatttagttgtacatttagtgaataaacactcaccctaatttatactgtttaagtgacaactttagctagagattacacagctttcaggcctccaggtgagactattaagaaaggtgaaaaaaactctctggattaaagtaaggaaattatactgatagtctaccacgatggaaacttttgactattaaaatgataaaaggacttgaaaaaagttgttctggccgtgtagagttatctttt

SEQ ID NO: 71594 - DNA, 463 bp, Glycine max
  unsure (1)..(463): unsure at all n locations
tctacttatgtggcagggcgggcttccttcaccttcttgtctccaacgcgaactntgattattgttctttcttcctgcgatgcttctnttcgtgtccgcctgagtgggcttatagcctaaaccatacttgccacgaattccttaggtatttatcaggctagttatgccgcctgtggttntttctaaacccatcccgggttcataaccgttccccaacataactcgggccatcattaccgctgcatttgacagacaatgcctgccaaagagggagtccatggaggaaatgctgaccaccttaaaagactggannagcagttctaacgattcttctgcggcttcacataatgcatgaggatgggcagcttaccaagatatcttcctcgcctgacacgatgaccaagtgcccctcactacgaatntagctnttgttgagtgtgaaggacaactccactgagtgatc

SEQ ID NO: 71595 - DNA, 207 bp, Glycine max
  unsure (1)..(207): unsure at all n locations
gtcccgtaatatatctatccgctcgaaaatgaatgttgaagctttgagcacattcacacaacaataactatttactcggatgtctgagtgagatccgtaatatatcgagacgctcgatnatgaatgttgaacctctgagccaattcaacgacaacaactttttactcggatgtctgatngagtaccgcaatatatcgagacgctcgg

SEQ ID NO: 71596 - DNA, 344 bp, Glycine max
  unsure (1)..(344): unsure at all n locations
taacattcaacttcgagcgtctcgttatattataggactcaattagacatccgagtataaagttattgtctgtttgaattgctcagagcttcaacattcaatttcgagcgtctccatatattactggactcaatcagacatccgagtaaaacgttattgtngnttgaatntgctcaaagcttcaacaatcaatttcgagcgtctagatatattacaggactcaatcaaacatccgagtaaaatggtactgtccgttaaattngcttagctctccaacttaaatatcgagcgtctcgatatatgacnggactatatcagacatccgagtnaaaagtattgtcatt

SEQ ID NO: 71597 - DNA, 318 bp, Glycine max
  unsure (1)..(318): unsure at all n locations
actattatcacatgacgcttatggctcaaaataatttgttttaacttctngagatttaacagaaacacttggtaaggtgcaactaagcttgctattggtaacctatgcattcttctgntttgcanggtgcagggtgtaccatcttgtgtgaggctcatgaaatatgccaatgtattcccagtgaagaacacanctcagaagttcactatatgggaaatcaagagacaaggatatactcaaagagggatttcaggcttctagcanggtccttataaccaacaaggacagtggagatcacaccctggcaatcaattcaac

SEQ ID NO: 71598 - DNA, 328 bp, Glycine max
  unsure (1)..(328): unsure at all n locations
gctcaactgcacnagagtgacggtaaaagatcgcttcactctagagtgcttggctttgtatgagagtccaacattctgtatttctcagatggtgagcatcactaaaaatggaaatgtataggaagtctggaaatcctcacttaatcagtttgctttgtccactgaaaacagattatactgcttggcctctggtctcgctcaaaaacaggaattacatggctcgcctctcctctagacacttcatcaaccaagcagtcgcacttgctgcagctggaagaaggtccacctccatcctggagatgtccacaagcgaagattgcagtcacca

SEQ ID NO: 71599 - DNA, 222 bp, Glycine max
atatttgtttgtgttggggttttttaaaatggttatgatccacatggtgctatgggctacacatgcactagatgagtggaagttaccttcccttttgtttgtttggagaaaccatgtgacaactgaaacaaggatgcatttgcaataaagttgtgaaccttgctgagagctgatagcaatggagtgattatacgcaagcgatgatgtatttagttgaaatgt

SEQ ID NO: 71600 - DNA, 230 bp, Glycine max
acaataaactttactcggatggtcgaatgaattccattatatatcaagacgctcgtatttgaatacataagctctacgcatattctaatgataataactctttactcggatgtcggaatgagtcctgtaatatatcgagacgctcgtaattgaggacggatgctcgtagcatattcaaatgactatatcgagatgctcgaaattggcaatggaagctcttgagcaatcaa

SEQ ID NO: 71601 - DNA, 130 bp, Glycine max
gataaaagaaaggaacaggcaaacatatcagacaaactacaaaagccgctgccctacaaataaaacaaacgggcagaacctacaccgaaaacaaaacaccaacacaaccagccgaaattatgccaagaaa

SEQ ID NO: 71602 - DNA, 409 bp, Glycine max
  unsure (1)..(409): unsure at all n locations
gctcattatgaaacacatcacatatggcagttatcatgctccttcaccacatactacataatgngtgaacatggatagtgaagtgcaaatacttccccatgacatatggtcttcagttactgccactttatctgccactgcgtttaggatgaggctccttacttcaacctgtcagtgatatcataacgcgacatggcaacagcttgtctgattttcaagtttttacacctaaacaaaactgtcttattaatgtttggttacgcacatcaacagacttcaccctatttgtgatcacacgtgtatgttgtgcacatcttcatactattcactctgagtggtgatggcctacactccttttaaagatggcattcttaagcacaacagtcatgtgctctgcaattttaattac

SEQ ID NO: 71603 - DNA, 311 bp, Glycine max
tcattttctatttggatcatgtgactaaatgagtctaatgagatttatgacaccactataattctttatgaaaagatacgttctgactgactatgatatcatatataagagtataatataaagaacattacttcttgatgacgagaaatgatcttaattttgaaagatatgattctctatagagtatatttgaagacacaactctatgaagatgaaatatactctgattgaatcataacaatgattatgttcttatggagagtagcttctcttcttctcataatatgatggatgcataactatgatttaca

SEQ ID NO: 71604 - DNA, 258 bp, Glycine max
  unsure (1)..(258): unsure at all n locations
gaagtgtatctcataagactntcttcatcaaagtacacaagtgtacacatgcttctattttagactanggtagctccttgagaagctntcttaagaaaactctcttgagaagcttctttgagaaaacttccttgagaagctagagtntagctacacacacncatctaaaaactaagctcacctccttggaaagctagagcttagctacacacacccctctataactaagcctcacctcttgagaagagaagctagagc

SEQ ID NO: 71605 - DNA, 379 bp, Glycine max
  unsure (1)..(379): unsure at all n locations
agcttgccttgccccttgatatatttgatggacatcatggcactatgtatgactaaatcctngggatgaaggtagtgttgccataatttgaaagcccgtactaatgaatacaactccttatcataagttgaatagttaagggtaggaccacttaaactttcactaatataagcaattggatggacttcttgcatcaatacagccccaatcccaacattngaagcatcacactcaaattcaaaagattttgaaaattggcaacacagtatggtgcattattagctttgctaaaacatgaagcttctctgtttctctccattgaaccaacatttcttgacactataagaaggctgaatgtgcaaatcctacaaacgtataa

SEQ ID NO: 71606 - DNA, 430 bp, Glycine max
  unsure (1)..(430): unsure at all n locations
gaacctactctgcagtgccctactacaactaatatgancaagtgtcttctgcatggancatcggaaaanatctttcaataattgggtaagacaaaaacatctgatcttagctttcttcttttcttattttaaaaaacgcaagtgattgacgcccataaacataaatctgattaaaaatgtcgatctggtatttaactgtcaaaatcaaaaaaaacacttctacaaatctacaatgtaagctgagaaaacattaataaacagccggtaaaaccatcacaatcttcactgtagataaccatcaaacttatatggaaaaatgaagaaaatacggaaagcatatccaattgtacattatcgttaatatatatctttaaactgaataattaagtctcttttaaaatatccaataaaaactcctacaatcatctat

SEQ ID NO: 71607 - DNA, 276 bp, Glycine max
  unsure (1)..(276): unsure at all n locations
ctgcagcttcagtatttttattctagttcagaaaaatggtttgatattgtgaggaattttaataaagaattcacttaagaattttgagattttttattctagttgagaaaaaattgatcatattttagtatttattaacacttgagcttcagtatttttattgtagttgagtaaaaattgatatagttttagtattttaatanactaattcagagtaattttttagtattttttattgtagttgcgaaaaattgatataattttaagaatttaata

SEQ ID NO: 71608 - DNA, 269 bp, Glycine max
  unsure (1)..(269): unsure at all n locations
tgctaaaactatttcctctggtgatctctttctaactactctttttctctatatgaatgtgttgtcctctattcattagtcatctttgtttataataatagtttgcctttgtgattttctatatatatgatgaaataaattgcatgcctataaaaatatctacctttcactccctataccctgatataatgctgtaatatatttgatangatatatgtttcttacaaacttggctaaaaaagtttctttgcttaaaattttctctaaca

SEQ ID NO: 71609 - DNA, 253 bp, Glycine max
  unsure (1)..(253): unsure at all n locations
agcacaaaactacttatactgcagcccactgttactataactttactaagactaatacctgttgagctgataatgagtcaacgatggcctgaactctgcattactgccaagatatattatgtagcataaccagggatctctttactttttctattgaagaatttcagatntgcatgtggctaagggggaatacaggtaatgggatctgatatctatgggcaaaaatggaccanaaatctcttttttaattttt

SEQ ID NO: 71610 - DNA, 118 bp, Glycine max
aaacaggtcttatagggtaatatgaaaaccttataacttaagcaaggggctataagtgccacacacccctgtcctggaaactatttgtcaacttttggtatctgaaatattaggttct

SEQ ID NO: 71611 - DNA, 254 bp, Glycine max
ctacttaaaattctttgttgtccctgaactcaactcaaagcactttttgaagcttctttcttaaggatgcaagctgcttttactgttagtctccactggtaccaaaagatctaaaaattcctgctcaacccactaaaagtttcgctagcctatgaaagctttatctggaattaacttccatgctccaaatttaccttttcatttttagatgactgaagtatacgcgggactggctaccctaccatatgaagtca

SEQ ID NO: 71612 - DNA, 416 bp, Glycine max
  unsure (1)..(416): unsure at all n locations
gagctgcaactatataacaaaagcctcatcaataccatatgctgtgactatgttcatcacaagaataagccaggctattgtgacgcaattatgggcaaacacaccaatgatatgatgatggaggctccattctacaaaggtaactctcactttatattgagcttcaaactatatacatgtaaggaaatcaggatttaagtacaaatgcaaaactttatttcaaaaaaataaattacccattttgacaatcctatattcaaaaaacatcaagcntcatgccacaaattgcccatatattaactatatccgcgaaactatcacttacatatacacacttacaatacaaccccagacttcaaaccaaaacctccccccccatactaacacacttgcctatgtgccaataaaaataacat

SEQ ID NO: 71613 - DNA, 312 bp, Glycine max
tttccttttttttgaaacagcttaaaaaggatttgattgattcaactgtaccattccatgggggtattatacagtactgactctgaattcattaaaagccgacctttaaaatactggtaacaatactaaaccgtatcattcttggaaaattcaaacactttgacagattatctttaacctttgaaaccatggctattattgggtcgctcaaagaagaaagattctaaaactattgcaagttttatacttggcaccttgaacttggatcatctgactaatgattcatcctaacaaaatcctagactcattgta

SEQ ID NO: 71614 - DNA, 348 bp, Glycine max
ataacacataaatgtttatttgtctgtactatactgaatacctcttttggatatagaatggtgaacatgtttttcttaatttgaagacttaaaatttttacttcaaagacttccaaaccaatttccttcaaaaatttgctttggaagatttcgaaacaatttaattaatttaagtctttcaagaattttttcaaagcttccaattatgttttatacaagagtaattttgattcaaggtcttctaattaaataaatgttcaaactcttctacttattgtttgaaagcttcaaagagtaatttgtttcaaatttcaaacaaatacatattaattttgaagaatctttggc

SEQ ID NO: 71615 - DNA, 199 bp, Glycine max
caatgctttcagattattcaagacaactttgctcaaacaagtgttcgatacatcaaggtgggaatcgatccagccggtatcataccaaaacatttgaaaatactctagaaggttgaatttattaaagtgaacgaaccatgtgtggatcgatccacacgactctgaatcaatgaaagcatgacttcaattacttgatcat

SEQ ID NO: 71616 - DNA, 245 bp, Glycine max
tgagcatcatgcgagcataatcattatatggaccccttaccctattaatagtcaatatacgaatttgattaaaccattaaattttaacacattaagacttcattcaaaggaaaagtacatccttattacataaataactgtcaaaaaataatcttagtaaacagcgtcgactagcatacataaacatcccacgcatctataagatggtccggcttaatagtctaatatccaacttctctcacccg

SEQ ID NO: 71617 - DNA, 211 bp, Glycine max
cactgaaccatttaaattagctactcactaaattaacagctattgccttctgacacaagccagaacctcccataggtttgcattatactcaagaagttcgtagtatagaacagtactgcaaaatgcctacatagatttgccttacaaatatcgatccagagaaccaatcacacgagagttgcaagaatgcgttttttaaaatcttcagcaa

SEQ ID NO: 71618 - DNA, 329 bp, Glycine max
  unsure (1)..(329): unsure at all n locations
tccttggattctccattttgaactcttcccagtgatcaatcgtttatagcagggatcaggtcataacatangaggaatgccgtccttcatcacagcatatgtaatctggtctctatgcaggatgtggctctaagagtcaggaatgttcggatcaatggattgaacttgaggtacaattatttttaaaactatanatgcggtctccacctgcccatcataaatataacaaataagaaaaaaaaacctattcataataggtcagttaactcgatgacacaacatgcttgtttcaccaatgaaaagaacaacctgtacatatatactctgta

SEQ ID NO: 71619 - DNA, 295 bp, Glycine max
  unsure (1)..(295): unsure at all n locations
acaatatataacatttactcataannatggataacacattatagcctncttgcaattcaaagaatacatattttcacatgtattggatttaggataataaatggtagagtgagttaataatagtacttacaactgaaattgactttgcaggcaacangtatcataactcagtgagttaactaactagaatccaacatcttcaatgctttaggtcttctataccacaatattgcanacaatagagttctcaacagaaccccattttgcaaataaggaataattatacgtactcagt

SEQ ID NO: 71620 - DNA, 417 bp, Glycine max
  unsure (1)..(417): unsure at all n locations
gtaagtggctcactcaatgtgttntgtcttcttcaagcatgtttagtgcgaagctaacggtgtgactgctagctatgattcacaatttttattctgattaggttcccgtctaatagaggttgatagtttagtttggggcttngaccccttttgctcacccaanataatatgttagaacctaaaaatttatgtanactattcctctatactaagtcacattaaagcgatgtanggaaaaaaatagtangtattatcactttcggaaaccttcgagcaatttaagaattcgcatattcatagagagganggatcgtgtgcagacgctttagctaatgctgcttatatatatatttatgaatttaaaataaaatnanatagtcttatatacatttaaaatattattgaataaatatatac

SEQ ID NO: 71621 - DNA, 95 bp, Glycine max
gccattggcttgtctagacagaagccagagataatagcatccacccaataagaagcttaactaaagtcagagaacccacttgatgcattatgaga

SEQ ID NO: 71622 - DNA, 489 bp, Glycine max
  unsure (1)..(489): unsure at all n locations
cttaagtcacctcggctgcaacttaaggctttaactcatttggatttataaatatggtattatatntatgcanaagtttaaattacataacatatctaacacgtatctcactcaagataatcaaaaaacttacatgaattctaattagatacatactgttaatgaaatatagaattctttaaacttgatatcttactaaaaaaaataaaatatctaaacgtgagaaacatgtcaatatcttaatccaatttatagaataaaagataatcgtaagaacctctacatcacttgccctattatnttgcatcattctcatttctcccctcacanaagaactcacatgacacatctcaagacataatacttaataattgtgctcttcgaatggtttaacaagacaacgtntatctctttgtattgatgagaagatatgaatgtgaagtcgtacaatttgttagtgctttatgactataaatactatgtattaat

SEQ ID NO: 71623 - DNA, 313 bp, Glycine max
  unsure (1)..(313): unsure at all n locations
ggaaagctatttttaacccttgaatatattagctcttaaattaaagggtgtgatataattctttttctttttatcctctctttcttgttaccctttcaaaatccaacaaccctagctaaccattccccttcttgattgcgtacctcccttcatcccaactttcacaacccttgttaggttgtctncaccttcaacctcattgacaacatcaatctcaaggccatgacatgacccccttcaactctcactcatataccgcacatgattaccattttctactaatcattataggtagatcaatgtagtttatttg

SEQ ID NO: 71624 - DNA, 451 bp, Glycine max
  unsure (1)..(451): unsure at all n locations
tgcttatgcaactgatctcatgtggctcaatattagtgataaaccatcagtttggccttattcctttctataagcccatgtttatagttanaatgtctttctttggttggggagttgattgcttatgatgagcatttgtagttaatattttctattcttttatctcattgacatctcttgactttatttttcacttactagnttggctaaggaaatgattanggtattgaaactgagtcaattaaaattgtctacttgactatctgctatgcaggctaaggacctaaaaactcaatgactggatagccctgaaaatagaaaagactcattttacaattgattgcatctacattaggcaataacttgagcaaacttgctgatatggcgagtgacttgttggatagtagtagagtagtatcacctctttaatagagtatattgctgtgactca

SEQ ID NO: 71625 - DNA, 383 bp, Glycine max
  unsure (1)..(383): unsure at all n locations
gcaagcttactgtgcaagtacgtacaaacaagtgtgacattcccaaatgattgtcttattggcaatntggcattaagcacgttgggtatttcttccatgctataggctataactcanaacgttttnttttgaaatattataataactttataaatattttttatatacatataggcataccaatcattctctcttcttttacccaaaggaaagtatatataggcataagagagacatggcgcaatgtcattatttctatctcntttcatattatgcattcattcccaccttcaatttataaattcaatctctctatccctctcttgtntatatttaacatataattcattgcacgctaacaaatatttagagtttttttaact

SEQ ID NO: 71626 - DNA, 259 bp, Glycine max
catatatggtggaaatgctaaaaatttcagtttggtatcaatagtcttattgtgctatcacataagtaataaaatgcaagagctaggtctatttgctaaactctcaacatgcactgcagtaaaaaatcattattcaaaaaaaaaataccacttttacagggaactggctcatcaccacagaaattggatgctcaaacataactttcatatattaaatatcctgaactatggttcctttcagcaaatgatagacctggtg

SEQ ID NO: 71627 - DNA, 75 bp, Glycine max
cacgagctgcactacttgtgaggcgcttctacttctgctcacctttttacactgtgtctccgcagctttgtatat

SEQ ID NO: 71628 - DNA, 376 bp, Glycine max
  unsure (1)..(376): unsure at all n locations
gtgacctgcggatgcagcttgatggaaacacttattatttaaagaactatgttgtttttagttacactaatctaaaagaactaattgtaagtttacccgaagttattgaactataatagagttntatagaaatgtcataataagctactttcacaaggctaaataagctacgataaatgctgcataatgccagtatgcaataaacgagagtattgaaatttgaacaaccggttctggtggagcttgatcaatgcatcttctttgaacagatacatgggcttagtctgagctgagtcatcgtatcgtgaagctgtgctgaaaanatgctcacgtctttgcctttataattgggcttataaataaaatatactgtaat

SEQ ID NO: 71629 - DNA, 443 bp, Glycine max
  unsure (1)..(443): unsure at all n locations
gaganacctataatggctctagagtagagtatatattcctaataaaaagactcaagaaacctctagttntggaactcttttttcacactcaatttcaattgaaattcagaacaagattggataaactatgcaccaattatagaacaaattntgagccaaaacaacaagcacacttccctttcacttttttttcctggacacctgattttctgccaacttgtgtgatatttcttatntnttcctttaatccaaattggcttttttctttttcattaatttattccagatgtctagaaactcacgtaaatttaagataaaaaacgtagtgacaattccataattatacaagtcgatgtcaactgcacactacgatcaacttaaatcaaagatgttatgtgcgaagctggaagtacattatgttgctatgctcatgctgatacaca

SEQ ID NO: 71630 - DNA, 156 bp, Glycine max
  unsure (1)..(156): unsure at all n locations
ttactaaacgcaccctcattttctatattttgtggaattctttttcccgaaccgtaccaaactttacgaatttcgtaacgatgcttattttcctttcgcaagggtatgaatcttacggattatgtanttactctnttttggctttcaaagaagtta

SEQ ID NO: 71631 - DNA, 243 bp, Glycine max
  unsure (1)..(243): unsure at all n locations
tcatgaactattgttcnactatctggtaattctcatgtatatatatatacagagacagcggaataagagcaaacggacagatttgaatgtagaatgcagtatgattaaggaaagcgaaatatatactgtanagcagatatcaatggcacaccgaaacggcttacaaacccatgttntttgaatataagaaaccgaagcggcggcagagccacacatgatcagtgaggtgagaatggagatatg

SEQ ID NO: 71632 - DNA, 229 bp, Glycine max
aatgcctttcatatagtaacaactctattcttttccacttcactaccttggtcatctgcgtgatatgtcactactcaactgaatcttactactctacgatccgcatgatgacaagatgcatatgcatgcttgctcatgctgacgaagtctatgtgccacaattaaacaagtgttatcatgtacaatttcacataagagcttatggcataccatcgatggagccaaatgg

SEQ ID NO: 71633 - DNA, 254 bp, Glycine max
atattatagactagaatcgttcactatatatagactaagaataaaagtagtgtctcacattctactattcttcttacaagtctctattatctagacctatgtattctttcttcaagaaacctctttacctcactttaaagaaaatattgatgtattatgagaagacattaatactcatgatactgaagtatctctaaactgccataattgcatgaactatatgaacttaaaatgaccaaagataatgttcttac

SEQ ID NO: 71634 - DNA, 329 bp, Glycine max
  unsure (1)..(329): unsure at all n locations
atccttcatctgacttttcatcaaattctcctaagatttcctttccattgtgtaatacacagcatttgccaccaaaaacatgtagatgtgagatggttggttttctaccattgaacaattcatatggagttttctttaagataggtctgattaaagccctattcatgatataacatgcagtattaacagcttcagcccaaaaatattntggaagaggagtatcattcaataaggttctagcaatttcttccanagacctatntttcctttcaacaactccatttttgtgaggggttctaggtgcagaacaattatgttcaataccatgc

SEQ ID NO: 71635 - DNA, 244 bp, Glycine max
ctcaacaaatctaaatatattgcactctaaagtgagaaattctgattatggctctctaaataataatgagattagagaaggactgcactataatccttattttcctggcggggctattgctatgcctaaaatgcttaatgatggtgctggtgaatatgaagatggtacccctgctacagaatctcaagtactttttgttgttgaggaatgtgttcagtaaatctcatcacatggattatctatg

SEQ ID NO: 71636 - DNA, 258 bp, Glycine max
  unsure (1)..(258): unsure at all n locations
tccgtgtctacaacttgcanactaagaaactcgtcatcagtcgagatgttgaagttgatgaatatgcttcatggaatcgggatgaagaacaagtggagaagaacgttcttatacccgttcaactacctcaagaagaagatgaggaagaaaacccaggtgaaccaccttcaccttcatcacaacaaccagatcaagaactatcgtcaccagagtctactccaagacgagtgagatctttggtagacatatatgaaacct

SEQ ID NO: 71637 - DNA, 360 bp, Glycine max
  unsure (1)..(360): unsure at all n locations
acatcgtatcatcgcattgcatctagtncttggttaatgtttctttctgcacgggtttctaacctgtagtagagaagtatcaatctgacattggttaataccaatacatacttgtcacattntattcgntgtattcaagctccagtacctaccaagcacactatcctgtcgaagcccaaaccaacatcggcacataacatcaaagcccagaaccaacatcgacacctttcattanggatatgctatgtgcacccagcaatattgctggtgcacccagcaatgtattgaaactaccattttacccttcattaaagaagttaaaatatataaataagtgtcttctcctctcccggaatcact

SEQ ID NO: 71638 - DNA, 415 bp, Glycine max
  unsure (1)..(415): unsure at all n locations
aagtgaccgcggctgcagcttctcttctttcctataataggggaaggagggaagaacaactatgttcatccctcctggtatctaagaatcacttaaaattagtgagaaaaattgtgtgcgtgaagaaaatacaagccgagaccactttcgtaatggctttcgagacgttttcgtgggtgatatcgcanagatattcaatcgttcttcgtcattcttcggtcttcaacccggaagttcccgaaatcgaactcttcaattcattctatgtacccttagtggtcctcatctgtgtcgcgtgcttctattntcatatcatttactctccgtaccccctcttgacatactntagtcatttatttaagttattttctcacctaatcaaanataaaataaatntccactgatcattcgtatt

SEQ ID NO: 71639 - DNA, 280 bp, Glycine max
  unsure (1)..(280): unsure at all n locations
tgctgctgtctggtcaatatatttatatgcggcgatgtctcaatggtagactcatatataaatcccacatgctgttgctgtttgcacctactcgttcgggaatatactctccaggtgatgctgggttcgttagtggatgtttgtgggctggtactgctagctccatcttgttcatggggtgtatgaatagaaaggcccatactcctgctatccgcttccacatgtgtgngcacatcacgtgagtgcctctcattcaaaaactttaccgctagcacatcat

SEQ ID NO: 71640 - DNA, 267 bp, Glycine max
  unsure (1)..(267): unsure at all n locations
gtgtacttaacgaccaaagatcattggtctctgagtcatgccacaagacccgaagcaggatatgttcctcaaggtcaacttgtgctttctctttcaccagatatagcaagagatcctcaactgaagaagattctcagtcaaaagcttctaatgatcaaggttctctatgctctcgcctgagcatggaatctatataatattccaaagactattgtcgtactggtcatgacttacaattacattcangcaactggtattatcttgatg

SEQ ID NO: 71641 - DNA, 278 bp, Glycine max
ctcactccaaggagtggattcactcttgtcttgcgatcagttagggatgaacgctcctacccttatttatactacttcaccttcacaatgaatggtggaaattacttgtattctgccgtggaaatataatctctagaatgctccacacattctagaagtctctacactcttctactctcttcaataatccttcatactctttcataagatccagaaggttcacacatttcagaatattcagaggttccacatcttccacagcttctagagagtctacc

SEQ ID NO: 71642 - DNA, 191 bp, Glycine max
atcttaccacgagctcacttctcggttttgaaactttcactctttttaaacttatcttttatcccccttttactaattacttctaaatattcgataaatacgacaatatcaacatcaacattatactaatatatatagattatatttatcaggtgtacaatagcgattatgccatgcatgtgtgctaacct

SEQ ID NO: 71643 - DNA, 386 bp, Glycine max
  unsure (1)..(386): unsure at all n locations
caggaaagaaannaacatggatatacatggtgtagtggatggtaatctatatcgtgtttagtgtcggacgcaacacatgtgagaattctagtgtncatttattataccctctgctctttctatatctctacggcaatagcatttagaataatgtgaacttattatccttatatatatgtcctgcattattccgtttactatacgggcttattggttcattataccttctgtcaatagtttctggtgtatgtcaacaattatgctatgtcaactaataaacgaacataacatttaagatatacgccactgtgttcgttggtattgaaaatcaatgtcattacgtcatgtagatctatatctatatcttaatcataatggtctataat

SEQ ID NO: 71644 - DNA, 395 bp, Glycine max
  unsure (1)..(395): unsure at all n locations
gcttctatacaaggttcgttcctaatttctctacaattgcatcacctctcaatgagctggtgaagaagaatgtggcatttacctgnggtgaaaaacaagagaaagcctttgctttgtaaagaaaagctactaaggcacctgttctagctcttcttgacttttctaaaacttttgagctagaatgtgatgcctctggagtgggagttggagctgtattgttacaaggtgggcaccctatttcttattntagtgaaaaacatcatagtgccacccttaactaccccacctatgataaagagctatatgccttaataagagcccctcannactgngaacattaccttngttccaanggaattgtcattcatagtgatcatcaatcacttaagtacatt

SEQ ID NO: 71645 - DNA, 244 bp, Glycine max
  unsure (1)..(244): unsure at all n locations
tgctacttcttaacatcataaatcatagtgggctctatgctttatggtgctcctctcctaatgaaggtggaggagaactaacagagaaacactcccctgagtgtatcattaagttccacgacaacgtgaaatcacgccacttgaatgtaagggaagaatctggcanaatattgttgttacttgtcaacggnggacatcaacataagagtatgtgtaataagcagccgattatgaatgaaaatac

SEQ ID NO: 71646 - DNA, 336 bp, Glycine max
  unsure (1)..(336): unsure at all n locations
agctnttcgattcattctatgtacccgtagtggtccacattgggtttcgtgcatttttattctcgntntggttactttttatacccnctgttgacgtgcttaagccattntacttaagtcatttctcgcttaacttaaaaataaaataaatttccaccgaacgttngaattgtattatccattaacttcggttaaaataaattccgaccgttcggtcgtgccgtaaccacgttggaaataaaaaaaaagtaaaataataataaaataatcaaaatatcttgaanaataataataaaataatcaaaatatctntgaataaaataatananaaatcaa

SEQ ID NO: 71647 - DNA, 240 bp, Glycine max
  unsure (1)..(240): unsure at all n locations
tcagttgagcggtgtgcatacttacctatgatgacgtgaccttgccacgggggtactggcaccctgtgtgactgatagaggcccgtaaccagagctggaaacccagggccctggtggacttttcccggtccactgggtgtcttgtgggtgcgatccctgcgaacaatagatggtatcagaaatcagttgaactatatgcatacttacccatgtcnggaccacacagaccaactgatactt

SEQ ID NO: 71648 - DNA, 426 bp, Glycine max
  unsure (1)..(426): unsure at all n locations
cgcgatcttagcacgagctgcgctttttgcctgacagcatcattcttttaaacctgttgtctccgatggccctttttccttgcactgagtactatgctcccctaagctcggaaatgtccgcatattttcttgcagcccttggctctcgtaaggctctgcggattgattctttccgtacccgccactcttcaacgtggtacaccaactgactctcttggcagtttgctttctaactgtttgaaagtggattctcgctctgcgtgttaaatttttcgtgacacttacttgcagccattaactgatgcacttcgcttcggaccacatgagcttcatgcttactttgactctacnggtctgctatgtcttgtgctgattggccaatctcagaagactgcttcgggtctatggctatgtatcacggatgat

SEQ ID NO: 71649 - DNA, 417 bp, Glycine max
  unsure (1)..(417): unsure at all n locations
tgagctgcagcttgcttctcaatctnnccctttttgatgatgacacatcctgaaatctatataatatatgcaatattngatctatcattcactcatctctttctccctctttctnntttgaatgtgtgcttaattaaactcagtaaataaatttatgtcttgatttctaaaatacccattttctctccccctttggcaacatcaaaaagccaaagtgcgcggaaatgaaataaaatatcaaacatatatcatatgctaatagacatagtaacaagaacaaaaaaactcaatgaacacctatttctctaagtcactaacatctaanaggccaagttctcgtctaatagcaaagaatgtttcctttgggagagggttggtgaagattcagcaagttngatttagtatctacaaattcta

SEQ ID NO: 71650 - DNA, 403 bp, Glycine max
actcaataaaaagtcaggtttattctatttgcttcctttttcagccgggtgcatgtttcgacagaattattttacgacccgcacccacccaacattatccgcacagaacagattgttttttctgttattaaccagatacccgagtacccgccatttggctctttaattaaatttgtcgtctcaggggtgcattctggctcaccttcttaatttgagttgacctattaattcaaaacttttatggatagaatatcccactatatatcaaaactttaatcattggactaagcttctaaaacaccggcttcatagatgacctattttatttaaatattcactatttctctcacacactattatcacttcctatctacacgaaggctatttatcactcttaaatatt

SEQ ID NO: 71651 - DNA, 397 bp, Glycine max
  unsure (1)..(397): unsure at all n locations
tagaatcgcatttgggcacccactttatattcttcatgctgtccctatacatanaaaacagttccacaaccccaaacttacaaaaccatgctcatgtgtcattgagacatttcaccgagcacatggtgggcgcatgtntatgcatgaatagcaagagaatggnggcaatgtggcatgccccattgcttcnaaatgcaacatangcctttgggccgtccatacaaacccctaactcacaccaatcaagcatgatacgaagcccanantgccccacatatgtgagcacattcccacaacttagagcactatnagaagaccanaatacatcaatggaaagctagaaagctcaaggatgagatacttatcttgtggagcgagtaacaacacttaagaatgg

SEQ ID NO: 71652 - DNA, 194 bp, Glycine max
  unsure (1)..(194): unsure at all n locations
tcttgagtcacctgcggatgcagcttaagtccctaacatagctggtagtgaaactcccttatatagcttatgtgcgctttacactaaatagacaccanatgtctcttaccccanatcattattcaaagataacccaactacctaaatgaaattgaccttagtgaacaatttaataccttcacagacttggcacc

SEQ ID NO: 71653 - DNA, 393 bp, Glycine max
actgagctgcagcttaccaaaaagttactacacgtctcacaatctattgtttgttttgttttacattgagaagcatatattgttcttccacaacactcactatcaattaactacaatcataactgaagaaacctgagatggaaaccatcgtttatagctagttgatcagcaaagccggagcagagaaagcggtataagcaaaagccatctgatgtcagatagtgccatgcagttcaatccactcatccatactaagagatataccaccaagaccccctatagtgtatgcactgcaatcgactccaacatgctaagatcatgtcgtatcaagtaacatctatatcttacatcagctcatatcagaataatgtgaacatatcaattagttgtgta

SEQ ID NO: 71654 - DNA, 465 bp, Glycine max
  unsure (1)..(465): unsure at all n locations
tatcgcggtgtaactgtcggcattgtgttccttcaacgttagcaagatgttttcgcgttcaccatcgactctgtcatatcagcaataattttcttttctttcttagtcaatcgcccggcgtatggatgtccaacttacgacttcgccaattcatgattatgaatcccacagatcaacttcaccatccaaccttccccctcacgcactgtgtttccacgaagcctgaagggacaaccacatntcctacttccggtgtcttttctaacgaattcgttatttctacacttgtacgtaccactccttttacacacaantaacacanatgaacttcttcctctgctacccggctctgtgtagatctataatcactggcacaatcatttcatggcaactgtcgagccattgaaacatatctgagtgcaatactcacgcacctacatataattcatcaacctcattcaccat

SEQ ID NO: 71655 - DNA, 297 bp, Glycine max
  unsure (1)..(297): unsure at all n locations
gcttctcngctcatgctgngaacgcctctatctcaacacccgtgcagtctatatgtatctacccagagggaagctccncaagttccaactccgaacgcaactcgaccggccggtaattcaacacacaaggacttcccttcgaggccgttgccggaattcaccccgctcccaatgacgtacgaagatcttctaccatccctcatcgccaatcatttggccgtggaactcccggaagggtcctcgaaccccctttcccgaagtggtatgaccctaatgcaacttgcaagtaccatgggg

SEQ ID NO: 71656 - DNA, 360 bp, Glycine max
  unsure (1)..(360): unsure at all n locations
tgcagcttgatgattcaatatctgactggaacacaattgagctgtttttttacacggcttatcactntttttaatccttcattctctagtttctcttccgaaagacgaagctaaattataatcagcgttgagacggggaagttcaaacagatgtgcttactggtttagtcacactttcaaacaatcttgctcttattctggtcagttactcatatcagtcatgataaattatgaacattttcataaacaaggcttggctgctacttggataattggggcactttctaacataaatatgccaattctatgtagacaaaaatcgtgatgactcatcgctgcagtcaatcacatgagatatgt

SEQ ID NO: 71657 - DNA, 294 bp, Glycine max
  unsure (1)..(294): unsure at all n locations
tgcagcttataatgaagtaannattttttaaattgtgggccctcatatgaggattctgaaccgnattgatcatcntgtgcatgtttacagcagctatgtaatctatctataatgacgagtcacatanagcacataatctcttactccaataaaaataatgagacattaataagttactaatctaatactatattcaaagcattaaatctatgaaaaaagaatctctacgaacaattggaatattattgatgaatagaataaatccacagacctagacatgattgtcgcgactag

SEQ ID NO: 71658 - DNA, 180 bp, Glycine max
tcaagcacgagatgcacttacaatacaatactttatgagtcattttttttttatagcctcgaatgatcagaactgtgaaaattctaccgcataacttttactcgatgccgaatgagtcacgtaatatatcgagacgccctgaaattaatacagaaactctgagccaattccaacgaccat

SEQ ID NO: 71659 - DNA, 272 bp, Glycine max
aaaaaatggtttaaatttttttttttttttaaaatgcctgccattggacaaaggcctttcttatgctctctagccaagaaaattgacttttggaggaactgctgtgagcgctttatcagttacgtttgccgcggccttcaagagcatgtttttaacctaaaaactacgtgtaagtggtgtaattatgtcaacaatttatatatggatactatgcagtgtcttctatacaccgtttccagcactaccaatcttccgaaacattatttttttat

SEQ ID NO: 71660 - DNA, 159 bp, Glycine max
gctgcagcttctactttgagcaacctgatatcttttttttacaaacccagaagcatgtgggaggaacgattatctacagagagtggggaaaacacgagacttctaatcaaacgttgaaggtaccatttcttatcgatacacaagtggttgtggaatata

SEQ ID NO: 71661 - DNA, 204 bp, Glycine max
  unsure (1)..(204): unsure at all n locations
gtcatacaccaagaaggtgcgaattttttctgctcttacctcttacgtctgtcttcatgcatatatatcacattntggtcccacatggcagagaaagagctgagttaaatntttgatacatagtatatgctgccgtgctatggaaccatctttatganaattatctcatggcattgtttctttcttctctctaataaacattcc

SEQ ID NO: 71662 - DNA, 485 bp, Glycine max
  unsure (1)..(485): unsure at all n locations
agctntannaattgaattanaatgttcaataactgctggttatcgattaccatatatgtgtcatcgattacacagtgcanattntgaattcaaattttaatagctgttgtaaatcattttttgccactggtaatcgattacatcctctggtaatcgattaccagagagtaaatctcttgaaaaagactttntaacttaaatttcttggccaaaccttttgctacttcaattaagaantgcctttctatttaatataccccttctaagactctagagactgtcttgatcatccatctngaatatctttaatttcttttgcttgaataaagctttgagaagcatgtgatcctttggcatcatcaaaacattcagcttgatccttttgctacacatctccccttttgatgatacaatccctgaaacaagacagctattacaaatgataccgtcacacaccctactccctatcttggctgatcctactt

SEQ ID NO: 71663 - DNA, 319 bp, Glycine max
  unsure (1)..(319): unsure at all n locations
tactttacagcttatgctaagtattttgtcttctggacccanattttgacactgttttaacactattaaacacccttgccaatgaaagcaaagcatgacatgacgaaatctcttctcctatatagattaacaactatatattaatttccaactataaaaaccctgttcttacctcattataatttctactttaaggaaacattactgataacaaaaaatactcgaaatagattatatcatattatgtgaatgaacaacgctatatgaatacatctaaacgcatataaacccctgtctttttagataataattcatcttc

SEQ ID NO: 71664 - DNA, 485 bp, Glycine max
  unsure (1)..(485): unsure at all n locations
agcttatactccgaagagagganatggaccaatcactattttacagttgatcttganagatgaattgaaggcttgctcaaggtccaaaagaagtttgtctctgcggttatgctagacagataccaacatgttggctgttatcaccaagtaccaagaagaactaaatctagccgcggcgcacgagcatagagtggcggacgagtatgcccaagtgtacgcggaaaaggaggctagaggaagggtgatcgactcgctacatcaagaggcaatgatgtggatggaccgatttgcccttaccttgaacgggagtcaagagcttccccgactactaaccaatgccaatgcaatggcggacacctactccgcccttgatgagacccacggacttctcggctattgtcagcatatgatagatctaatggcccatatatattagaaaccgttatggaacttgtattgtcactcagatctcgactagttataac

SEQ ID NO: 71665 - DNA, 525 bp, Glycine max
  unsure (1)..(525): unsure at all n locations
tctgagtcacctgcggcatgcaagctagtaggattatggagtacccatcacatgtggtactatgtggtggtcgggcgatggtgcacaacaagttttccacatccacaaatcgcacataaacccaccatcccctgttgcccacctccaactgagctcacgtactcccatgtagcccatatcctcgtttctctcaacaccgggtccccaacaatcctcccaagcttccccaacatccaagtaactcaacattcaaacaacacaaaccatcacagccaagaaaatagggcaaaggcagaaaactctgcccaaaacaccaaccaaaatcacagctgttctcacttaatgaccccagtaacaattccttctttccaattcgttaaccgttggatcgactccaaaattntactggaggtctctagtacctaagcctacattatgaccgntgtgatctactagcanacattcagaactcattctacattactctntccacaaccaagcagatcataagcattttctgcactt

SEQ ID NO: 71666 - DNA, 408 bp, Glycine max
  unsure (1)..(408): unsure at all n locations
gagtcacttgcaggcacgcatgcttcttatccaaggctcatcttggtggtgaatcttcttcttccatggcttattccttaatggatggcacctcctctcacctattctcctgtgtcttccgctgcatctccatggtggaaaatcaccattaaaggacctcattgatgctcatagatccagcctccatagaagctccacaagcaagcttccatcagtaagtttccagagtaatgctttcaattcattctatgtacccgaggnggaccacatattagttcatgtatntttattctacgcttcattcgacttttataccgccttttgatgcgcttaaaccatttatttaagtcatttctcgactaatataaaaataaaattaattttcaccgatcgattgaattgtatcat

SEQ ID NO: 71667 - DNA, 321 bp, Glycine max
  unsure (1)..(321): unsure at all n locations
agctatgtggacccaccactttagtcatntgtatttgtttatngntaccacccanatgtntcaacaaccatatgagtcagtgcacaacccgaattgcatgagcatgatcagtgcaagacccacagcacataactcatgttcacctgaaaatcgcatactcctcatgacacagtctcgagctatctaatcaggttaggtcatgttgcttacatgtatgatgtcttctattcatgtagatctctcgcatcattcattctcatatcatacttatgaggaatgatatgccattcattcttctggtagttctttttaaaggatact

SEQ ID NO: 71668 - DNA, 457 bp, Glycine max
  unsure (1)..(457): unsure at all n locations
aagcttcttataagctgagaccatttatcaatattctcaagttgagttntattcagaanattagagtttatctcttttatcttagtgagagtgattctcctacattcttgagtgattcaagaacaccttggttgtatcaaaggactctcacaacctttgtgtgttgccctcgctggaaagagtgattctttccttcctttcatcatcacccttgttctttcaaaccacaattccagaaaatccacctctgcccagaattatctcgtggccataactcccattntacgcactcaaattaagtgattcttgagcctaaattgaatttcanaacgagacctttcacctcgttttggaatcacctcatttggagccctgtagcttcagttattgtcatttctatatttctgtccagccaccacttaacctacgtnttaccattccattcatccattttatg

SEQ ID NO: 71669 - DNA, 408 bp, Glycine max
agctagagttccatactccactaacaatctcttttttataactccatagctaaagacatctgattcttctgagaacagttattgcattgtatatctatgagacatatatatagccactgcattgaaatgtatcacatttaattattgtccaagtatatataattactatatcctgaacaaacatggtgtacttactatgttccaacaactatgctagtataaacctgatcctcattcccaccaaagattctagccataccaaagtcggacatacttggatctaatgtcaaaattgttaaagtggtttctagactattgaatgatatgaaacaacacgatcgttaaacctatgactttctcaaacactcaatagacaacactagatcaagacgctcggcacttcttcat

SEQ ID NO: 71670 - DNA, 377 bp, Glycine max
atcttaagtcaactgccgctgcagcttgagcccaatctgactcccattaccctattcccggtgagaatgtcaatccttaccctcggaagccaaaaaaagaatagaagggaaacttccaatctcagaaaaagagaaggaaaatttccaatgaaagcacaaaaaagaaaagaaggagaattcccctatcaaagagtgggagaaagcacaaagaaaagaaaggagattccccatccaagaatgggagaaagtaaaaaggaagaagaagagggaagaagctcctgatctggatcaaagaaaacacaaaaatgtgcgagaggtctttgaccggacaatatctgaacatacataattgccccgatgacacaaagaaagaagga

SEQ ID NO: 71671 - DNA, 351 bp, Glycine max
  unsure (1)..(351): unsure at all n locations
agcttgtccttggtttagacatgattggtacatgattngngacttgtaagattcaatttgngcaaaattggatgagggaaagagtggttttcgaaatctgcactttatgcagaattttgctgttggaatgtgcagcagaattttgtataagtgcagaaaaatgcttgtgtatggctggttgtgaaaagggtagtacatatggggttctggacattttctagcagattccaacggtcaaaatgtagacttatgtactagagacttccagtaaaattttctagtcgatccaacggttaacgaactggaacgaagagaatgttactggggtaattgaatgtgaaaagctgtgat

SEQ ID NO: 71672 - DNA, 393 bp, Glycine max
agaagctagatcttagctgcacacactcctctcataactaagcgtacctcattgagaagcatccttaagaagatctctaaagaagctagagcttagctacacatacctctctaatagctaagctcacctccttgagatgagaagctagaacttagctacccaccccctattattagctaagctaccccgatgacgagaaaacatgaaaattctcaatgagttcttattacaaagacaactcataatgcgccgaaatacaaggctgaaaccctatactactagaatggccaaaatacaaggcctatacgagaggaaaacctattctaatatttacaaagattagcgggctcatacttagcccatgggctcgaaatctaccctaagggttatgag

SEQ ID NO: 71673 - DNA, 413 bp, Glycine max
  unsure (1)..(413): unsure at all n locations
actggtaatgtgtctactatcattgtcatcngtttttcgtcattgaggtgccactttgagctgccaggttctccacctttgggcgtattctntganagatttgtgccccctttntgcacatgttctgtagttgcatcctatccgaagacattatactgacactgcctaacaaaggcaatcactaggtccttccaagaatggactcgggatggttccaagttagtgtaccaggtaacagctacccagtaagactttcttggaaggaatgtatcggtaattccttatcttttgcgtattcccccattttctgacaatacatctttagatggttcttgggacaagtagtccccttgtacttgtcaaagtccagcactttgaacttggaggtgtgatgatattgggtctagaacaac

SEQ ID NO: 71674 - DNA, 304 bp, Glycine max
  unsure (1)..(304): unsure at all n locations
tactcctncctcacagtgaagtgtgtagactatatcgatcatttgtactgtgcatgaaacattatactttaagttgggaactaataaaacattatggaccactagcacacctttattcgtcttcaccatgacaaagcgttagacttttcgctcggccactaattcttttactgacccaccttttcattgacagactcatcattgctttgtataacagcctgaatcttcgcaatgtaattgctccttaatgcatccaaattccagttgccgtcttttnctatacacttctaggattatacaatac

SEQ ID NO: 71675 - DNA, 298 bp, Glycine max
gaagttctctcaagaaagcttctcaaggtagctaccaagtctatgctagatacatgtgtaactcttgttgtaactctgacgaatgaaagtcgtatgagagacacttaaagagatcactcgtttacctgtatgaggactgaaatgtcgagcgtccggcttacatatcgctagtcctccactaaagcgtcctctttaagcttcctatccaaagatgctcttggaggtgcaactccttcttccttggataaccactagagggagggcatcatccctactctcatccttgccgtacgctgat

SEQ ID NO: 71676 - DNA, 418 bp, Glycine max
  unsure (1)..(418): unsure at all n locations
caagcttgagccanaatcctgactcaccatanaccnngttcattgtgagaatgtcaatccttaccctcggaagcaaaaaagaatagaagggaaatttccaatcaaaaaagaatagaaggaaaatttccaatgaaagcaaaaaaagaaaagaaggataattcctcaatcaaagagtgggagaaagcaaaaagataagaaaggaaattcccaatcaaagaatgggagaaagtaaaaaaggaagaagaagaaggaaagaaagctcctgatcagggatcgaaggaataacagaagatatgtgcagagaggtctttagactggacaatatctgaacaatacagaattgtcaccaaatgaacaaaatgaaggataggaaaccacgacctataatggtcttctccctttgattaccaaccaaaat

SEQ ID NO: 71677 - DNA, 205 bp, Glycine max
caactggaaactcgcctcttcgatagtggaagtgatgactcacttcttggatagggatgaagaaacgtggcaatacattctttactcgccaccacctcagaggaaccgagaagaagatcaggtgaaccattattctcccatacagcagatctgactttctatcgagctctccagacagtagacttggggactatagaactgtaac

SEQ ID NO: 71678 - DNA, 175 bp, Glycine max
ttatagccgtgaggagagctgcacttgatgagtatcctcggatgaaccatctatcgaattctgtcacgtccaatatacctcttagggctcgagtggattgaggagttggcctatactggacagcttcaatctttgccggcatttgatgccactccctatgatgtaagatatgacc

SEQ ID NO: 71679 - DNA, 471 bp, Glycine max
  unsure (1)..(471): unsure at all n locations
agcnttgaacttgtgcagtcataaagcttacccagtcttgttcaatacanaaaggtgttttaaagaaattacaaaatccagcacaatgaactatgctgaanatnttgagtatagctactgtgtangatcctaaagaatattaaatntttttggaaataatatttaatgtacctaggaaatagtagattcatgtatcacacaataaaatgtcatttattactcatgggtattaatttctataaagtcacactcaattaatatcagagtaatcaatatcatggtataacagcatgaagtagcaaaatgaagtggtccttgaatgcaacaagattcaaatagcagtactatcgcgatacactactagaatttatacatttaacatcgcacagttaacatangttatntaaaaaactgatgtngacannagcaggtgtcaattttcgtaaataattgagtatcatagtttttaaa

SEQ ID NO: 71680 - DNA, 442 bp, Glycine max
agcttatccttatggcctgcctccggacttctctcttcgtgccaccccggaagagttattccaagccccttactttgaggggcaactcccaccttatgaagactatcccgggcaagacgatggtgaaggagatacctatcttggccccctgctccacctcaaagatccgtccccgcatgaactaccccagccgaacatagtccgccatatcccggcctcacccacacccgtaaaaagaatctgttcccttcgcggaagataatggatagattgatgcgcttgaatagaggttgagagcagtcgagggcctcggcaattacccattctctgatttagcggatctatgtctcgtgcgcaacatcgtcattccttccatattctaagtaccggactttgataagtactaagggtcgacatgtccgaaggggcatcttcggatgta

SEQ ID NO: 71681 - DNA, 382 bp, Glycine max
  unsure (1)..(382): unsure at all n locations
agcttattcttatgtcttgcctccggacttcaccctccgtgccaccctggaagatntaagccaagcccctactttcgaggggcaagtgccaacttatgacgactatcccgagcaagacgatgaggaaggagatacccatcctggccccctgcttcaccttaaagatccgtcctcacatgaactaccccaaccgaacatagtccgccatatcccagcctcacccacacgcgttaaagaatctgttcccttcgcggaagataagggaaagattaaggcacttgaagagaggttaaaagcagtcgagggccttggaattacccattctctgatttggcggatttgtgtatcgtgcccaacatcgtcatcccttccaagttcaaag

SEQ ID NO: 71682 - DNA, 402 bp, Glycine max
  unsure (1)..(402): unsure at all n locations
tagctacttgagatgataccacaacaaacacaattttgtcttcttgacttccaacanatacatgtaaacagatgatttcatctgaactatatgtctttccacaaaagtcaaacacaactatattataacgaataagatcatcaatagtcttaccaaaccttcatagatattggtagaatgttgatagatgctcctccatccacctgaatattgttgataatctgatcctccaccatagtagttagataaaggggctacatatgagatatcttttcatctgaaggtggaaccaacacagtggcatgatgataaagagtgaaacaatacactttagtcacccaaacagcctttggactcagagaaagatcctcaaaacactattccttgcttaatctctatcac

SEQ ID NO: 71683 - DNA, 498 bp, Glycine max
  unsure (1)..(498): unsure at all n locations
gctataagcctntgtgggtgggaatcaagctggtttttaaatattcaagattgtgaagatcactctgcccaatctgaaagaaatggatattctttaggcccaagcaagactcaacttcatcttactcaagatcctgngtcaaaggcagtttctgcttctactaaattggatgccagaaaggcaaaggcacctcttaaggagtctagacttgactctaggttacctttgcttgattgtagcttgtgtggcgctacagttagaatttcagattttctgacagttcctcgtcctgctcgttttgcatctaacagtatagatattcctgattctagtaaaaaaataggattgactcgtggagcaagtgcagctagtggaatcaatggttggattgcagctgatgatacagagaaagatcagactgaagaccgtgacgaagttgcaacaacaaatgaggtgaaatntgtggcgaacacggatttagaattaaatcttaccatg

SEQ ID NO: 71684 - DNA, 448 bp, Glycine max
  unsure (1)..(448): unsure at all n locations
agctntgatgcaacatatggagaggttaatganacttctatatgatgcgctccatgagaggttggatcaaatggagaatagagatcataatgaagaagaaaggaggagaagagggaatgatggtgttcctatacaaaaccgaattgatggtattaaactcaacattcctccatttaaaggaaagaatgatccggaggcctacttggagtgggagatgaatatagagcatgttttctcatgccacaactatgatgaggaccagaaggtgaagcttgccgccacggagttttccgactatgctcttgtgtggtggaacaagctacaaaaggagagagcatgacatgaagagccaatggttgatacatggactgagatgaaaaagatcatgatgaagcggtatgtgcccgctagttactctagggacttgaaattcagctccaaaactaac

SEQ ID NO: 71685 - DNA, 455 bp, Glycine max
  unsure (1)..(455): unsure at all n locations
tgattcaatattatgtcgtagcctagatacctttaatattttgtatacctattagaatcgagatatgtaatcatcataacatcgttgactgtttcnttagaaacaaaaattatcattattatgatttctaatatattattaattaatatataaatatatgtaacaatatatatagacatacataataatgtattatttgatttctattctaaatattaatgtaaaaatttatataacaaataaaatattaccacttatacatattattaaaattaatatttaattcagtatttgagatctaaaacactttacattaacaaattattaatttatatgcctcatttgatgtttgtaattatgattaatctttaaattaagaattactgtttaaatgtagagtatatttcatctattgtaaaacatcatatattgatttcatctatttataataatta

SEQ ID NO: 71686 - DNA, 509 bp, Glycine max
  unsure (1)..(509): unsure at all n locations
gctatangagctagaataagtactcanatgtgtcttatgcctatgaacccaagcttttgatttcgaatgcaaaagagcatganagtgagggcatgttggtgaggattcccctttagaccaatgcttggtttgggctacatcatgatgatttcttggcgcttaaatggtgtgaaaatgttcttcaccatgtacatgtgtatatagaataggtagcaagaggcaaatgcctttcaaataaagcgtatatatgttgaataggtagccaagtgcttttgcaaatgtgcatctatgttaaatatggcacgaaaatgcttctcaaaataggaacatattacatganattgcctttcanaaatgtgaatgggtagtacaaaaatttcctttccgatgaatgtgtaacataaaaattgcctttccaatgaatgtctatatgcgtgaatgcatgacatggaatngattntcaaatgaatgtaaatatgtgtgaatgatagcatgaagttgctctcagt

SEQ ID NO: 71687 - DNA, 214 bp, Glycine max
  unsure (1)..(214): unsure at all n locations
gcttcattgtanatttcgagcgtctgatttcttatgcgcctgaacctgacctccgtgtgaagagttatgaccatttgaacttctcgagagcttccgctgttcaactttgagtgccttgatatattatacgcctgaatcggaccttcgagcgaaacattatgagcatttaaatctctcgagagcttccgttgttcaatatcgagcgtctctatat

SEQ ID NO: 71688 - DNA, 362 bp, Glycine max
  unsure (1)..(362): unsure at all n locations
agcttgactngagttntgtacaacgttgaatacactatgtctttcacaaccatcaatgaacctttggtaagcttccattttccatcactaaagttgttgccttatccggctaaatctagagcatgcacaaaaatcatattgatacacaaatctatgacatgccacacgtcctttagtgttagtgtgcaaccaatattggctgtaatgcacacaccaccaattcaaaaatcttgcaatgatctattggcatattactttccaaagctctacttatactagtaaaaattcttgtagaaaggatagaaaatttctgatcatgacccttcacaatgatttgacacacacttctttcaacaaaaaaa

SEQ ID NO: 71689 - DNA, 269 bp, Glycine max
  unsure (1)..(269): unsure at all n locations
tattaaggacctcatagctatcatcacaattntaactttacagaggctnttcttatgtttagtagaattgtcatcacatggttttatataggggtgggtaagcgnggccggccnncntgcgtaacgcccgcttgcataagcacacatngacaacgaactgtgccagtccatcccacattcttataccaacctaataaattggtccgtcccgtgggtcaaacttggcggtccaccggcctaatttaaaacaattttatttcaataaaata

SEQ ID NO: 71690 - DNA, 431 bp, Glycine max
  unsure (1)..(431): unsure at all n locations
agcttatccttgtgtngagaaatcaattagctttttatagtgcgatgacggcttaagctctagttaagattatcatacaaaaagcaggattctntacatactaagttccatttgagtcttcttgttttggtcaatatttttcgaaaactcgtgatcataaagtagattaagcgcggtgagatatctactccttttaaaatccaagaattttctggtattaagattacattaattagacatctgttgtgaaaacgggcatgatgtgtaactcactcatcttaataatcaaagtaataataattcatccaataaagttggaatcaccctgagtttttgggcgtctaattatattcatcactactttgtatataaagagagctcgatccaacatgtagaattttaatattcttactcgaacatgtgtccttttt

SEQ ID NO: 71691 - DNA, 332 bp, Glycine max
ttcttgatgatacaatgatttcttacgagtctttactctactggattaccgggtgatataatccattacttctatcttagaatgtgttatataagtgatcaagaacactttaatcgattacattgagaatctaatcgattgcatggatcttaaaagctctcccgctctccactttctgggaagaacactttcatttattgaaacgatattattattgattacttcttcaacattatcatttacattgtatacttaaccactttcatgcagccataaatgttcttctatacattaccaccccgtgtctcacttataacatgcttaacaacctc

SEQ ID NO: 71692 - DNA, 405 bp, Glycine max
  unsure (1)..(405): unsure at all n locations
tatagtttctaaaaatatttttatgttatgctgagtggcataagggattaatgtccttttttnnnttcttaccttctccatagctgttgatttgattaaaaaaaatacattttgcccaaaatatgaataattatgcaactaaataaagttgataaaaaataaaataaatttgagttaagcaagttgttgatgaaaaattaaaatataaagtttgaattaaatataataaagtaaatatgtaattatatattaatcatgctctttttttataattttacatagatattaaatggataggtattcaaattatgaaattaagatcattcgtttattttggtagcttttaaaaattatctttaaaataaaaattgactaaaatgctattttntagtcgagcggtcattt

SEQ ID NO: 71693 - DNA, 334 bp, Glycine max
cacgtgggtctttagggaaaaacaccataactaaacgcgccgctagggatccctatcgcaccaaatccaaatctacaacgatgggtgatcaagaggagacgcaggatcagatgatagccgacatatcggctctgaaagaacatatggcctccatgatggacgccatgttaggtatgaaacagctcatggagaagaacgcggccactgccgccgctgtcgagtcggctgccgaagcatacccgactctcttggaactacgcaccatccttcctcaacatagtaggacggtgaagggacacgctgaggcacgatggctgtcctcacctgagataca

SEQ ID NO: 71694 - DNA, 268 bp, Glycine max
  unsure (1)..(268): unsure at all n locations
gatcaacgacaacgccttacagaacgacttgcctagtgaatatnatgtctgtgccactttcaatgtgtctgagctatgnctttttgatgcagattgacgatccttggatttgatgacaaattcttttcaataatgagggagtgatgaggacataacctatggctatgaccatgaaacacttgaaggttccatgatcttaggcagacttacacaagcccatcactttatagagacaaggctaatcatttgtctagctgtctttgatatt

SEQ ID NO: 71695 - DNA, 411 bp, Glycine max
  unsure (1)..(411): unsure at all n locations
agcttgaggtagctcctttggctgcctgtgtcagtttctatganagttgtgttgatcccttaggacagaacccagacacggcagcatcagacaggatattgtatgttgatgacaatcctacctgtgtggttgcccttggaagattttattaggggtcgacaaccatgcacaacatccttttcggcaatgatcaggtgaaggtgggtgttgaggaagttcaagatattgatgcttgcatccttctacccactaaagagatttagttagtggggaagacccttaacaccctccttgcttggntgccacatcttgtacaatctttntcagagaaggtatttcctttttgtgtgtttatattattaaaaatgatttgtacaataaagattgactttcttggctatgttataactg

SEQ ID NO: 71696 - DNA, 354 bp, Glycine max
  unsure (1)..(354): unsure at all n locations
agcttatgtaaatntatgatagtttctggttctaatttatttagtctctggcttaatctaacgctcggtgatatctatcacgcctcaattttatttttaatatattctaattgaattatactgatatttaaattcctcactcccaaaataggtttaactaccattaaatattatatatgtgaagttgcattctaacaaagctttgatttagactagaattgttaacatgacaattatatatcaagtcttcttcgtcgataatattatgtcattatttagtcaaccagttgaaatgtatctgtaattctaatatcaaaatatattgcaacattgacattgtatagagtcatgtta

SEQ ID NO: 71697 - DNA, 428 bp, Glycine max
cacctgcacgcatgcaagcttgcatagtctaatggataccaatctcctacttcattatcaatcgctgtcttctctatgccactgatttggctgcatcatctgctatgcatcattctactcactattaagagaaatgtggtgatacatgtcactatcaagagtgttatacaaagcattcatatgcttcttctccataaggatgtggcttggaactactcttcccgtggcgtatgaagcatagactttgttctatgaacagccctgtgttgccatgtactactaatctgcataagcatcagcgcgactccaaacaaaagatacgccgttaatcacaacctacatgtcttgtacaaactctgaagatatctgatgggtgagaaatgctataaacatactcttgtcactctcatttaaacatattactctct

SEQ ID NO: 71698 - DNA, 484 bp, Glycine max
  unsure (1)..(484): unsure at all n locations
acctctgagtcacctgctgcatgcagctatatttttttgttgtatngagtatgaaatatttgtgatcgantaaaatagagagtgttgtgctcttgaagaaacttttctaagtgataaattttacttcacactaaccatgatgatgaatgatgcaagacagatatcacatgtactaagatgcaacataccaaataacaatcaatacaaatatcactcaatggagttaggcatgtaaaagtcaaaacatctttaagctnttgcttgaccttgaagctatggactatatagttgtcaccatgttgctcatgttgttccccctatctctgacaatctctcctttttggctctgatgatgccaagcctaaatatgacatgaatgcatttggaggggctgagtcttaagattggagaacttgatcttatgttatcatgaagaaattctaacacttaagaagagaataggtcatcatcatcatcatatatc

SEQ ID NO: 71699 - DNA, 260 bp, Glycine max
agcttgtatggttcaccccaaattccgttgtcatatgctaaacttgatcccatatctacttgataattcaatggtagccataaccctagccaaggttcatcaaccttcatttcttcgagaataccactcgaacgcaatgtgtgcttgtcacggagaagcacccgtgcgttccattgagcattgtatggctcttaagtgtacggcgcgaagtctaattgatgctggctgaaattcgacgagaatcgcgtgtaaatcctgac

SEQ ID NO: 71700 - DNA, 392 bp, Glycine max
  unsure (1)..(392): unsure at all n locations
gctgctgcacgtaaattaaagcctacaacactcacattntctgcttcggtaataaaatattatctttcactccatatgttatattgcgaatcgcaatggtcaaaatgcggatatgtgacctacgaacctccagaagacattntaagatgatccaacggttagcgaatccgtagagcgattttactgaaatacgttcaggtagctttcttgagaggcttctttgagaagcttccttgagaggcttctttgagaagctctcttgagaaacttttttgagaggctatagtttatcacacacacccctataataactatactcacctcttgataagctctcttgaattaaacatggataaatacacgataattaattaacatcgtcatatcattat

SEQ ID NO: 71701 - DNA, 430 bp, Glycine max
  unsure (1)..(430): unsure at all n locations
gctntggctctagcctatcctcgcccggctagccttgttcaccttggcgtaagctccgtcacggcgaggaaccctccaccaagataggctccagatttcaccccgatcgcaatggcgtacggagacctcttgccatctctcattgccaaccaattggccgtggtgactccgggaaggatctaccagtctcctttcccaaaatggtataacctcaatgcgacctgcgcataccatggtggaacctcgggccactcggtcgaacagtgcatggccttgacacatatggtccaaagtttgatacaagcaagatggttgacgtttcaagaggatgggccctatgtaaaaacaaacccactcgccaaccatggaggggcagctgtaaatgccatcgagtcgtgtccgctcaccaactacaacatctaaggatgta

SEQ ID NO: 71702 - DNA, 436 bp, Glycine max
  unsure (1)..(436): unsure at all n locations
atcttaagtcacctgcggcatgcaagcttataataagaaagtgaagtcagaactttattgttggatcattagttgggaaggttattctgcccatggatagtaaggatcgagcctttggcacatggtccccatattgggaaggaccgtttaaaataattcagatctattcgaatggtgcttatgaattagaggaattaacccctcagaaacgtactttgagcataaatggtaagtttttgacataatatacaccaacactgctcgaagtctatataatgcttgaatatgaagaaataatggaaacatanacatgtcgatatacagtgtattgccacgaaagggcatgtgttaatattacatcttatagtaaaatctatatacacaactctatattataaactcatatgttctactcttacatgatcagatccttata

SEQ ID NO: 71703 - DNA, 471 bp, Glycine max
cagcttcttagtttcagatgatgcagatgggtttgtttctcctcatgcactcctctaatgactatggcatcatttctggcgctaaactgctgggacgtggaggccatcttctcaattaaatatctggcttcagcaagagtcatgtctacaagggctccaccactggcagcatctatcatacttctctccatattactgagtccttcataaaaatattggagaagaagctgttctgaaatctgatggtgggggcaactggcacatattttcttaaatctctcccagtactcatacaggctctctccactgagttgtctaatacctgagatatccttcctgatggctgtggtcctggaagcagggaaaactatttctaagaatactctcttaaggtcaatccaactcgtgatggacctggagcaaagaatacacccatcctttgccctcctctatgaatgagaaaaccttcaa

SEQ ID NO: 71704 - DNA, 273 bp, Glycine max
agctacttattcaaggctcatcttgagggtgttgtttcttcttccatggcctataccttaatggatggcgcctcctctcacctatcttcctttgtctatcgctgcatctacatggtggaaaatcaccatataaggaccccattgaatctcacagatccagcctccatagatgctccacaagcaagctttcatcttaaactatatcgaattcaaataataatacctgtcacctaacgatacgtcctgagaaggccggtacatcaaagatatatt

SEQ ID NO: 71705 - DNA, 306 bp, Glycine max
  unsure (1)..(306): unsure at all n locations
tgcttgtacatgagcaaacccgtgggattatttctttgcactcgacgaagtaagcgcatcctctatataactnttccttataacttctcttcactcgacacacattatctgagcgagaggatattttccgctgtacttgttcatcctttctaagacaattaccattatatcttccacttcttctccactaatgccgctacaataccggttgcatggcagactaccatccgcgcatgtgacgtggaccactgtcctgccgtcatgcattcgctatagtgacatccaactctgctccattcatagcga

SEQ ID NO: 71706 - DNA, 489 bp, Glycine max
  unsure (1)..(489): unsure at all n locations
gacttgagtcatcaagagattataaatatgtgaccatggcatgagtttcaatgaatgatctctcatctatcatctatctttcaatctatctttcaatatcttctttcatctctttcaacagatctttctaaattatttctcttcatttctctaaaagtttttttcaacactttctcttccaagaaaagttntttgttcanaaacttgtgctattcatctttttcattcacttatccctttgccaaaagaaccaaggactaatcgcctgaattcttttgtgtctctcttctcccttacaaaagattcaaaggactaaccgcctaagaattctttggattcttccctttcccttaagaaaaagatacaaatgactaaccgcctgagatatcttttgtttccccttacacagattcataggactaactgtctgagaattctntgtctcacacattggagggtacatcctttatggtacaagtagagagtaca

SEQ ID NO: 71707 - DNA, 354 bp, Glycine max
agctatagatatctatttatggacgtataacaagctcttaggaaaaggtatgagaggcctagcaacttccttcttgaacaaaattatgagacagaaaattctggatatatacttctctcattaacacgatctcttattacatttgactcaggcaagtttatgtggatgacatcataattggttccactaacaaatcactttgagaagattatgtgcgcaagatgtaaggagagactgacacgtcaataatgaaggagttatattactctcttggtctacaagtgaaacagatggaccatggaacatttctccaccaaacaatactgcatggaactctccagaagattagattga

SEQ ID NO: 71708 - DNA, 422 bp, Glycine max
agtcttggaaaatgatttctaaacaaaagttagtcttatatagcgactaacaactcccctaaatgtacagttatgctcgttctcaagcaaagaaagaacaattcacttgtccttaagtgataaagacagaggccaatcataacaaaatggtgtttgattcatcaaggacatcaaccatatgaactgaatatcatggaatgcttaaatcaatcacttctcacaagcatgcagtatttcaaagataggagcacaagtatcagagtcacagctgaaataagctagtaagcatgacataaatcaaggaaggatcatcaactcaaacctcacagacattatctcactcaaactcaagtgttgaggcttattccatcataaacaaccaacacaagttccgagcccttgcatttcatctgctatcatac

SEQ ID NO: 71709 - DNA, 513 bp, Glycine max
  unsure (1)..(513): unsure at all n locations
atcttaagtcacctgcggcatgcaagctagctngagaagcatctatggaggctggactcttttgtgttcaataaggtcctttaatggtgattatcagccatggagttgtagcataagataaaggagaagaggtgagaggaggcgccatccactatagaataagccatggaaggaactaagttgggggtttgaaaacaaaaggtaaaataaactatggttgaaactagccaaaataaacacttaaagtggtgtgaaagataatgtaaaaaccaataggttaaaagtaagttatctaggcggtttgacaatggaaggtaaaggaaatttaaagcaagctagacggattcctatgtgaaggcttggatgaccctttggaggtcccaactggctcttcacttagtctacatatgttacaccaagctattcacacaattagatgtttgggtgtcttctgagacttccaatccccctgagaatgtcaaatacatgaatgcatagcaaattcacctccat

SEQ ID NO: 71710 - DNA, 396 bp, Glycine max
  unsure (1)..(396): unsure at all n locations
atataagcctattttggtttggctctattagttgtacatttatcagatatctcattgtgtgtgtctccttgctttatttggatgcaaactgtctgttctctctgctntatcttgatctatagtttaggaaatgagcgatttggtctgttatggtgaaatgagttactatttagttgcaagttgcaacagttgattattttttggtttgtgataagtgagggtagtgtatcatcagtaaaccagatttacataagggcacaatggactcaatttgaagttctttttatgaataagaaattcattaacccaaaatgaacaaaataatctatttttcaggacaagaatgattttgagcaatcaacactttcagcacttgtccctgtcttatagtctgct

SEQ ID NO: 71711 - DNA, 414 bp, Glycine max
  unsure (1)..(414): unsure at all n locations
gcagctattgtcaaatagtcgggatgatatttcttcttaccggcacgncaagagatatgcgacagatgcttgtctcgctcacccaacacggatatgccttctactcacattccaaatgttgtttcctancaacttgaaccactcacttaaccattcccctgcctttctagacaagttgcgtaatgttctgatctaccccagagacgaccttgaatactcaagtcaacaagagcttctctttatcaggagtaattttggctccactaattgtcttttatcccctgttactagacgaatttcatctacccctctggatgccacgtgggatacatatgcctacgtatgtccacgaaatttgatggacggatgcatatgatgtcaatgtccgtatccatgactattgcatacgacaat

SEQ ID NO: 71712 - DNA, 412 bp, Glycine max
  unsure (1)..(412): unsure at all n locations
agctngatagcatgcatagactaacgtncgcttttgttatccttatcantcgcggccgacaagcccgtcgacacgtggagattacgtatcttccggctacaagactgcttattgacttctgagtgacgctgactggcggaaacacccgagtggttatccatataaacttgttgctatctgtaatacaaaatgcttgatatcacgcatatactaacgtcgtcttgtgcaccctatctcaatctcgagcagaacgcctcgtgacacgcggagatatacgtcatcttccgcgctcacaagatctgtcatactgacatcttgagtcacgctgacaggctgaattacccgagcggttatccgtattaacctatttgctcgcttttagactaaaagcctgacatcacgcagagactaa

SEQ ID NO: 71713 - DNA, 379 bp, Glycine max
  unsure (1)..(379): unsure at all n locations
agctatcatcatgtggtatcaagagcatcttgatctangtgatgtntctttgcttcctctatcttnttgttcggtgaattatctntaattccttgttcttcatcttattctccttgtatatcctccattgtcttgtggattggttctttttagagtagattaaaaaataataaactgattaaatcttagatctacacttgttcttgcatttctatggttcaaattatgtagatctactcctgaatcttgtttttcgttgattttangtctatcatttttcattcataatattcttgtgttgaaccttagatctaaatgttcttccaaaatattgattaaaaaacacaaaatctaagtgtaatacttaatccatgtgtct

SEQ ID NO: 71714 - DNA, 395 bp, Glycine max
  unsure (1)..(395): unsure at all n locations
agctngttatgattgatggngacccggcgttgatttgtcgaggataanggctacgtgggagtacgtgagctcagttggaggtgggcaatacgggatggtgggttatacgtgatttgtggatgtggagaatcgttttgcaccatcgctcgaccgccacctagtaccacatgtgatgggtaccccataatccgacaagcttgaaatgaggaagtgtaaaagggtgagacttcctgcttttattcgtagaccacagagtggtacctgtagatatgtctcgggggtcatgagaccttgtggacgtcatgtggggtgctatagcccaaaacataacttgaccaatcccgaccctccccgggcatagtcattcaatgagaacctgtgatgtaccttatcat

SEQ ID NO: 71715 - DNA, 330 bp, Glycine max
ctgcagctgttttctttgcttaccctgaaggagttcttagagtacccttagagccttgtactcatatccttgcattggaacacactacacgccgtaccttaaaaccatgactatgccatattcctaaggatttatacgccttgcgaacgttctgagataagaggcgggcggctggttacttggaccattcgcttaagtggctatgcctcatgacctgtagatattgcgttaatgtaggacatgctgaacatactgtgatcctcacgtgcagttgatctaacttaatgcttgtcatttataataagacgatccattaatgtgcattaatac

SEQ ID NO: 71716 - DNA, 495 bp, Glycine max
  unsure (1)..(495): unsure at all n locations
gcttcaattttntcatgctncaaatatttaggattttcttacctaatttatataggtgttgatatatatatagtatactattgaacttatattagtcaatcttataagttgattattgtaccataaattctgagcaaacaaataagtttaaggtttatataccaatagcaaccatccctagattcaaaagcaagctggttggcgacaataagcatgcacctaataattgatatcacatgacatgaaatgaagtcattaatctggttntccctcatgcagactaacagccctcacttctagttgatctagcttaatgcatgtacatatatattntaccgatctatntctgtgcgtcaacactgcacaaatactgcgttttttggattgacatanacgcgccacatttcattttgtaaatttatgcagtcttttgtcccttcanatgtaaaagatgctggtatgcttatctactgtactgataactncctaaacatg

SEQ ID NO: 71717 - DNA, 462 bp, Glycine max
  unsure (1)..(462): unsure at all n locations
ttaagtcacctgccgcatgcaagcttgtctntggtttaaatatgaattatacatgatttatgacttgtangatccaattcgagcaaaattggatgagggcatgagggatttcgaaatctgcccaatttgtgcagcaaacagctgtcaaattttgtgcagcagaatttggctcttgtgcaaaaaatgtttgtgtattgttgggtgtggaaatggtagtacatattgagttctggacgttttatagcacatcccaacggtcaaaatgtacacttatgtactanggacctccagtaaacttttcgagtcgatccaacggttaacgaattggaacgaagagaatgttactggggtatttgagtatggacagctgtggtattggaatgctgtttgggcagagaattctgcctctgtcctgtttcttggttacgatagtcatgatgttggattcgaatgcttgatgtg

SEQ ID NO: 71718 - DNA, 435 bp, Glycine max
  unsure (1)..(435): unsure at all n locations
gctttaccgcaatcccatttatgtgatgaatntaattttatgatctatcagtctttatgtatttgntcattttctnttctcaacaaactttctcattggatgaaaataatgttntataggcaaaagactctcggttatcggacaagttgtagccaatgcaacatggtccaggggcagttttgtggagatggcttgtatatgaggtatgccttctaagacgtgttcctctcctctaacatctatggtaagagatgatgcagtctcctcattgtgctgatatggtaggatacttatagacaaataaggatgaagttgaatggttgatgccccagtcttgtgtcgtggtatctntttcgagtaaagaagtattgaatgatttatcattagttaatagtgcaaaaacttgtacatagacagtgtatacgtattaaactc

SEQ ID NO: 71719 - DNA, 309 bp, Glycine max
ccgccccggagtacgacagtcaccgctttatgagcgttctacaccagcagcgcttcgaagccatcaagagatggtcgtttctacgggagcgacgcgttcagctcatggacgacgagtatactgattttcaggatgaaatatggcgccggcggtgggcaccactggttactcctatggccaagtatgatccagacatagtccttgtatttatgccaatgcttggccaacagaggagggcgtgcgtgacatgatatcctgggttaggggtcagtggatcccgttcgatgccgacgctatcatgcagcttct

SEQ ID NO: 71720 - DNA, 429 bp, Glycine max
  unsure (1)..(429): unsure at all n locations
tcacctgccgcatgcagcttgactccagtataataaaccagattatacttacacataaatattgtgtaccatatattgtaatgaactttcattatgagctaatanatcaatcacctactagactgaatttacttacatcatacatagatgtagtatagatatgttcaaacatttgtcacctagaataattacagatacatctgcatgtgcgatgaaaagaccttctttcacattatgtatctcacatgatgacccatgccatgacaactcaattggctcttggtaaacatcaaacaacgttgatcgaggccgtacccgaatcaaataaacattaatatgttgtaactacgaagtgatcctatgtcgactcgcaacgagcagtgacaagcctaatggtcataatatactcgcagtaacagtaacaataac

SEQ ID NO: 71721 - DNA, 396 bp, Glycine max
agcttgatgtggaacttgatttaagaagccatatgtgtctgtgataaatacttataacttattcaagttagtgaaacttggcggtttgccaagaattggatgtagtttatgtggttaagatgaactggtataaacatcatgtgtcttatactgattatctctctaaactaacttaaggtttgaatttgatctttgcttttgaaaaaaactgatccaataacgctttgttagataggaacaaacttgataaatatttataactctcagatagagtattagaacggaaaacttcattagataatgaactattgattctaagccatctctggcaatgaatcaacagttcataatgcctttcttgcgtattcttgataaatcagtgtttatatacagatg

SEQ ID NO: 71722 - DNA, 350 bp, Glycine max
  unsure (1)..(350): unsure at all n locations
agcttgaangagtntcatgcatganggaacatttttcatatacaagttggctccaattgtgctggctagttctcagcttacctatttggatgtgggatcatggctgtcttgtcccaactttccatcgtggattcagtcacaatacatacttatatatttacgcatgtctcacacagggattatagatactattcctacacagatgtgggaagcacaatctcaaggttcgtatttaaaccactctcataatcatattcatggtgagcttgtgactacattataaaagccaatctctatctcgactgctgatctaagcacaaatgacttcatgtggatattacactatcttt

SEQ ID NO: 71723 - DNA, 502 bp, Glycine max
  unsure (1)..(502): unsure at all n locations
agctatanaacacaacaacacataatctaggtgtctctcacccctcaattcaatgggttntctaggtttgagaagtgaaattgagaatgaggtaaatttggagcaaactctcacctcacacaagtttataacatcaatctaaacttgctcaaactggatttacacctaaaattccaccgaatcaaaatttgactcctcaacacccaattntgccctagaaaatggctcttggttcactttggtcatttgtttttctctctagcacagtccaagctttctcataagtcctaaatgatatttcaagctaggattaactcactttaacctccatttaccacagaatccagatttaaccttncaactctcaaagcctcactctgntttcactcataacactacattctcactttctaaccctaggttaactctatccttcaattctacagttttcataacaatttcagccataacattacaagcttatcataaaagacctaaactg

SEQ ID NO: 71724 - DNA, 418 bp, Glycine max
  unsure (1)..(418): unsure at all n locations
agnctttttttttgtnagtcgattcatggtctctcataaacaggtggtataattgtatagatatagttaagaatatgaactttcttattggtcacatatacaaagagggcaattcttgtgcagacacacatgtttcttgatgtgtgaaatgtgtactcgttaagggcaagtataccctgtgcaatattattgtggactcgaaagtccagatattgtaccctaaagactagttcacaactacaaatgaagcttttaagatggtggaacataaatggtgtaccaaaaccgctttaaatcttggttgtggcattttgtaatattggaacactaacgatattttacctaaaacattgttaacattttgtgaaagcatctaatagatatttaaaacaattggaaacagtctatatgatctaaa

SEQ ID NO: 71725 - DNA, 426 bp, Glycine max
agctttaactctgttgttcgagtcaagcgcataatatatcgagacgctcgaaactaacccacggaagctctcgagaaattgcaatggtcataactattaccaccgaggtccaatttaagcgcataatatatcgagacgctctaaattgaacaacagaagctctcgagaaattcagatgtcataactctccacaccgaggaccgattcatgcgcatgatatatcgagaccctcttaatttaacaacggaagctctagagatataccaaaggtcataactattcactgggatgtgcgattcacgcgcatagtacatggagacgcatcaaattgaacaaccgaagctctccataatatcacatgcgcataactcttcactcggatgtacaatttacgcgcttatatatcatacgcccgatattgacaac

SEQ ID NO: 71726 - DNA, 426 bp, Glycine max
  unsure (1)..(426): unsure at all n locations
agctantatcactttatccanatctggccttcagttcaccagacctagcacagctgattaccgagtgaaggttgtgtatactgcatacaacggctctctctgaatctgtttgttattttttataattatgagcctgagcttcccgaaaaccctcttggccaagatcatgtaccatgtcttacatacaatctccgcgttgtacatcaactatctcaagctgaggggttgttgaaacgtgtggcaattcaccatgccatattcaatttgtgttactcggactanacccctcacatataagatgtgacctgatgtcattccatgattgacgtcttctattcacacanttaacacatgggcgataatattctgcagctaatactggtgcatttgctagcgaagtgcaaaaatcttcactctctttgatac

SEQ ID NO: 71727 - DNA, 390 bp, Glycine max
  unsure (1)..(390): unsure at all n locations
ccgcggtcgcttggagactggatgtattcacnggttattgccaaaccagtataanaactcttgtgtgtttgtttccttcttccctactctnttactttccattgtgcatttaattntctcttttactttctgttaagtttctcttctactcctcattctcttaacaatntagtaaaagccttagaagagtaattatttaattagtaaaggtttaagaataattaattcaaccccgcttcttaattattttgaggccactcgatccaacagaaagagtgcgagacatgcgttcatgggtaaggggtcagtggattccctttgacaaagatgccctcagccagttcctgagtgacccgctagtgttgaatgaaggccaagagtgcgagttca

SEQ ID NO: 71728 - DNA, 427 bp, Glycine max
  unsure (1)..(427): unsure at all n locations
gtgncaagcttgagattggctagacatgatacatgtcatgttttgttttgggtcaaggataaaaaggatgcggcacattattttcatgacacaaatgcaaaaatgatgatttggaaactctatgcaaaactggtcatgcatgcacctatgcggacactcaagagtcaaattnttatggtcatgtgatgctagggctcacgattcatcttctcctatttaatcaacccaatgtgtcaaaatatgttctttatcaatttgtgcatacatccgagtccatatcgggcgtccggggaaatttcacagcattcacccttcaggtgtagacacattttccaaatattggttatgatcaacgaactntttcacagaaaangtgggaatcgtctcttttcaaaagcatgtcgttgtttagctagacaacctatat

SEQ ID NO: 71729 - DNA, 436 bp, Glycine max
  unsure (1)..(436): unsure at all n locations
tctcttgcatctatggctcaatctttgtggagtcttctatccaatgcccttgcanggtaggattgcatcacattaatggtattagagcacgctaaacctttcagccagtgagttgtgagtctgctatgtttttctgtgcattctctggttgccttgctgaatacttgatgtttattggttactttcggaacttattcactatgttgcgttccttatgttatagatatttgattgtctgctataccatgagtntcagtgttgtgtcatgagttatcagactggccatctgtataactcgtgaagtgcaatgggatgatatggcaagcgatcaggaaatacaagtgataaaaagtgagtgttaatgtctcgagaaaggactaatgataattgtgattgtgcgctgcttatatttctcgcgagatactttccatgtctc

SEQ ID NO: 71730 - DNA, 450 bp, Glycine max
  unsure (1)..(450): unsure at all n locations
agcttgtgactctnggcaatntctctganactagtttcttaanaagatgtgactnttgaaaaaaatcttcagaaacaagtcacttgaagaattgtgacttttggaaatgtatgttttgaaattagtcactagtaatcgattaccattaaggtgcaatcgattacacatcgacagatgtgactcttcattttgaattttgaaaattaaaacgcttagaagctctggtaatcgattacaagtattgtgtaatcgattacaccagtctaaaatgatttaaaactatttaaacacaagctgtaactcttgaaatttgaaatcttaaacgtttaaaacactggtagatngatactaccttctggtaatcgactaccagagaagtaaactcttaggtaatgattntgtgaaagcttccttgactactcactgtttggaaaacttctttgagtcttc

SEQ ID NO: 71731 - DNA, 432 bp, Glycine max
  unsure (1)..(432): unsure at all n locations
gcttcaatggaggaaaagaaagagggagagatagagagagaggggagcacgacattgaaggaataaaagaggcagagaagtggaactntgaagtatgtctcacaagactctcattcatcaaagttacaacaagtgttacacatgcttctatttataaactaggtagcttccttgagaagctttcttgagaaaacttccttgaaaagcttctttgagaaaacttccttgagaagctagagcttagctacacacacccctctcataactaagctcacctccttgagaagcttccttaagatgattcctaaagaagctagagcttagctacacatacctctctaatagctaagctcacctccttaagatgagaagctagagcttagctacacacctcctataataactaagctcacccncatggcagaatacatg

SEQ ID NO: 71732 - DNA, 387 bp, Glycine max
  unsure (1)..(387): unsure at all n locations
agcttatgcgcatatntccttacgaacgttctctttataagacattctattaactaagaaaaatgcacccatacacaatcaaggcagcttcgttacctaaattatttacacgtacttccaaggtgtattngntacttacatcacacacatcttcttggctaaatttacatacaggcatactcaaagcattttggggtaccaaaaattgcacatgtgcacatcttggtatttctaatacctatacatacgcaaacttcatgatgaatcttgactatcttcacaaaaaggtgctacatttcatgcctttttttttcaagtgtttgctacttaaagccgcatgcaaatncaagcatatattcctttgctgactaaaatcttattcaaata

SEQ ID NO: 71733 - DNA, 451 bp, Glycine max
  unsure (1)..(451): unsure at all n locations
gctggaactacttcacatggactttatggngcctatgcaagttgaaagccttggaggaaagaggtatgcctatgttgttgtggatgatttctccagatttacctgngtcaactttatcagagagaaatcagacacctttgaagtattcaaggagttgagtctaagacttcaaagagaaaaggactgtgtcatcaagagaatcaggagtgaccatggcagagagtttgaaaacagcaggttcactgaattctgcacatctgaaggcatcactcatgagttctctgcagccattacaccacaacagaatggcatagttgaaaggaaaaacaggactntgcaagaggctgctagggtcatgcttcatgccaaagaacttccctataatctctgggctgaagccatgaacaccgcatgctacatccacaacagagtcacacttagaagagggact

SEQ ID NO: 71734 - DNA, 493 bp, Glycine max
  unsure (1)..(493): unsure at all n locations
ttaagtcgaccgcggcatgcaagctatgacttaagtcatctagagattatagatatgttatcatgacatgagtntcaataataatcagataatctatcttatacataatcttctttcaacatccttcaatcaatccttcaatatcttctttcatctctttcaacactttcaatatatctttctgaagtatttgccttcatctttctaaaaggttttgttcaacactttctcttccaagaaaagttctttgctcaataactggtgtgattcatctttttcattctcttctccctctaccaaaagaacgaaggactaaccacctgaatgcttttgtgtctctcttctcccttataaaagattcataggactaaccgcctgagaattctttcgattctttccttccccttaagcagaagatttctaaggaccaaccgcctgatatatcttcttgtgtctcttacacagattcaaaggactatcgcgctgagaattc

SEQ ID NO: 71735 - DNA, 479 bp, Glycine max
  unsure (1)..(479): unsure at all n locations
cggccgagaactccgacgccgatactggtcgcaacgacaaccactctgtttgcgcgtcaccgtgtgttatgggcagagggggcacctctaacgacaacttcgacgaacccacaaagacaagttcctccacggtgtcgctgggaacttcctcgtcgacgtggtgactgttgatcaatgaagaagatgggatcgggatatgccgtttcaaaagagggtcacgatggaatggagttgagcggcagtgatgttggtaatgagagcttcgagacagtccaagcacttagaggagagttcgtcgtccaccatcggagctaaatcanagcaccaaattgttatgggtgctggtgtttctggagttcaaggcccagaattcctccatagaaagggataagataaggaaaagatactttgatgtcagcttgcacattcattacatnggattgacaattataagcttaatttgctaattattcgttcct

SEQ ID NO: 71736 - DNA, 448 bp, Glycine max
  unsure (1)..(448): unsure at all n locations
agctgtanggtggccataaggagcttgattcctatctttctgatgtggagaagaagtaggtgatgaagatactagttgcaggatcatctatcccatttcagatagcactcgggtttcacctgtccaagtggtccctaagaagtcgagcaccaccggtgtgaagaaccaggataatgagttgatcccgaatagagtggccaatagttgataagttttgactgatatacgagacttacttggaaaattgtaggaccacttccctctccattcattgatcaggttctagagagggttgaataccctgagatatataagtataaatcaatgtttaattgatttattgtgttgttactatatgaagactgaataagtgaagatgcctgactagcatgtggaattcttgatcgatgtgaatatgtgtgttttgtgactaagtgaagttgagatt

SEQ ID NO: 71737 - DNA, 485 bp, Glycine max
  unsure (1)..(485): unsure at all n locations
ctgcagcttgaagaaactagatgccttggtaacctgttttttctactggccatgaataaaatatctgcacctgtcgccagactctatggtttatgctcctctaccgaccaccacacagaccttntcccttctgtgcaacaatctgaagcaattgaacagcctgaagcttatgctgcaaacatctacaacagacctcctcaacctcagcagcanaatcagccacaacagagtaattatgacctctcccaaacaggtacaatcccgggtggaggaatcatcccaaccttagatggtcgaatccttaacaacagcagcagcaacaacaacaaacttattttcaaaatgctgctggcccaagcagaccatacgtttctccaccaatccagcagcaacgacaacaacagcctcagatatagcatatagttgaggcccctccgcaacctttccttgaagaacttgtgaggcaaatgactatgcacaacatg

SEQ ID NO: 71738 - DNA, 462 bp, Glycine max
  unsure (1)..(462): unsure at all n locations
tgatgaatcagggatcatagttaggaacaaggctgggtnttttgctataggatacaaccaagaggaagacattgattatgatgagacctatgcccttgtttctaggttgaaagctattagattgttagttgatcttgcttgtataatgaatttcatgttatatcatatggacgtgaaaagttcttttctcaatggacacattgaagaagacatatatgtggagcaacctccaggntttgtagactntgatcatcctaatcatgtttacaagttgaaaaggactctatatggattaaaacaaacacctagatcttggtatgaaagattgagaaatttcttaattggacaatcttttgtaagaggtcaagttgacaaaacattgtttatcataagatcaaacaatgagttcttacttgtacaatattatgttgatgatatatgttttggtgcctctaatgaatc

SEQ ID NO: 71739 - DNA, 208 bp, Glycine max
gatctctaagcacctgcggctgcagctctgcacgttttcttctctatgaatctttatttaggaactagtcaaccagcatagtgtctgggtttgtatacataagtctatctacaaacacttcttgtatacgaaactaccacgagtaataatgaccttcttctatacactcaaattatcttatatctaaggcatgtttgaatgagctcca

SEQ ID NO: 71740 - DNA, 418 bp, Glycine max
agcttgaacgcaaactggatgcatagggtaacttgtttacccagctggtcttgaatcagaaatctgttcctgtcgcaagggtttgtggtttgtgctcctctgctgaccaccatacagacctttgcccttccatgcagaaacctagagcaattgagcagcctgaagcttatgctgcagatatatacaatagacctcctcaacctcagcaggaaaagtgaccacaacagaacatttatgacctctccagcaacagatacaaccctggatggaggaatcaccctaacctctgatgtgccatccctcagtaacaacaacaacagcctgctccttccttccaaaatgctgctagcccaagcagaccatacattgcttcaccaatcctacaacagcaacagccccagaaacgaccaacagttga

SEQ ID NO: 71741 - DNA, 64 bp, Glycine max
gtgccttggataagaagctcatagagaaagcttcttatgatgaagagagggagaggcggggggg

SEQ ID NO: 71742 - DNA, 394 bp, Glycine max
  unsure (1)..(394): unsure at all n locations
tattgaagaaaatgcttcctgaacattatcacattgccgaanaatcactacgaggcacanaagaatttatgtcctatatgaatagagtatcggaagatccatgcatgccctaatgatntcatattatataaaaatcagtttgcagaaatgcgttagtgtcccacttgtggggtatcatgatacaaagtccagcatgatgaattcagtgatgatgcaagcaaaaagaatagtcatccagcaaaggtctgctcgtatcttccaataataccaaggtttaagcgattggttgctaatagacataatgaacaaaaccttacatggcatacagaaggcagaanaagtgatggaatgcttctacattcggttgattcttcacaatggaagataattgatc

SEQ ID NO: 71743 - DNA, 399 bp, Glycine max
  unsure (1)..(399): unsure at all n locations
ttgctcttatcagagagacaatatcatggttgttgttgctactgcgatataaacctgagagatggcatatgacactttctgaatggttggggatcagctgttgtattgagatatagagcttccatctgcgtgatggtgccgaggagtgatgatgatgttgagactatgagctatggtgaatctgtgtctcaagcatgttctgtaattgcttcatgcgatccctgaatgagtagcttatactttaggcatctactagcattgatgcgtctagtaccattactacatgctcgatcatgatgtttgcatcctagtagacatgatacttctattgccttaattgttgtgttgtatctaggtacatatgcgacattcanagcatgtcgcccacttgcaccacca

SEQ ID NO: 71744 - DNA, 316 bp, Glycine max
  unsure (1)..(316): unsure at all n locations
taatgcgattcaaagttaagtatgctgctctcacatgncatttattagatctcctttattaaatcttcaagacggacagcgagccaatatcttaaccagaatgcatactttcaaatntacctttagattattaattcatgatgtaacttccaatatgtaattaccttatcttaacattatacgaacttggaaggaggtatcaccaaaaccattgatggactccaccttttcctggaaaaccctgaatgcctcatacctctctggagaagttatgaaccacagcctgtacttcctctgtcattctataatattatct

SEQ ID NO: 71745 - DNA, 341 bp, Glycine max
  unsure (1)..(341): unsure at all n locations
ctcagctcaactcgtaccctgctgggagtcctaaagctgatctcttccccctgctggcgagtctgtgcatgggtttggaaaccgctagtttgactagcgggttggctttgcaggactgctcagtcgtagcctaagcggtgcagctatgctgtggtgcatgttgcaagcgcatcacgaaatctccagttatggtggcgatctgcttngatcaaaattttattatcttccctataaagcaatgcacgagggctgtagttgcttcgttgatgaatcttcactgcatcgcttcttccttctactccctttgctatttgcttcctccagtgaactcatattatttt

SEQ ID NO: 71746 - DNA, 365 bp, Glycine max
  unsure (1)..(365): unsure at all n locations
ggatagcacgcagagactaacggcggctgctgtgccatgcatcaatctcggccgacaagcccgttgacacgcggagatatacgttatcttacgcgctcacaagatctgtcatactgactattgagtcacgctgacggccggatatacccgagtggtcatccatataaaccttttgttgtctgctatacaaagagcctgatatcgcgcagagactaacagtgtattctgcgaccttcgtcaatcgcggccgacaagcccaatgacgcgaggagatgtacgttatcttgcgcgctcacanaatctgtcttactgactttcgagtcacgctgaccgacgcgaatacccgagaggttatacgtatcttc

SEQ ID NO: 71747 - DNA, 431 bp, Glycine max
  unsure (1)..(431): unsure at all n locations
agctngacatcatatatgagagatgacccactaacctagtatataacataacttaatgccactaacctacggatattaaaataacttattggctgagtgtaactgacatagtggcaaccaaaagtcaccccaacagccaacaagtcagccaccatttggtctaccaacaggctgatgcctatgttgccaattacgcccttattacaacttgaactaaacctaactaaagcccttttagttgattaacccacaacatatttttggcagccaaatatacaaggattgggccattatgtatacaaactaaacactctataattgagacaaagtggtgccatttagtcctcctccatttgggccatgatacaactcacaaccttggacttttctccttgaaacttgggcttgtattcaaatagtatggacaacac

SEQ ID NO: 71748 - DNA, 484 bp, Glycine max
  unsure (1)..(484): unsure at all n locations
tactcagcttccctctatgagtacgaaattgagtccattgtatcgcaattttgtacagggctgtctcctactgcatangaacgtgctgaatctgctgatatgtttaactaccacacacgattcttattcatggcagaagaaccatttcttgtatcatgtacatataatctactacgttgcaatttcaaatatctagctacttgcaagctgtgaatcagtgcatgtattgcggtagctagattaattgttaggcttataggttactaacatagaagctactagttaaaaaacatgtacgtggaccttgtgttataaatggatatacatgcataatcaccaataaaagccgctatagtattagtattacatagcgacaataacaacaataatgacatttatccacagtataactatgtggagcatgatcaagtaatagagccaaaactggaagaatgacgaatagggaatccctacatacaaacaa

SEQ ID NO: 71749 - DNA, 382 bp, Glycine max
agcaccgcggctgcagcttgagctaaggctaggttgaagaagtttttcttctacatgcctaactctcttgagcgggatttgtattggcgataaactacattggagcatcttagcacatctgatatctatattgcattgaacgtcagcttagagtgagagaagaaaattttctcagttagaaaaagttcttccaagactataactatatgttttaatcgatcacggagttgttgtaatcgattacaacaagttgtctgaagcttgacgagtccagtctcatatcgcgttaatcgattactctgttgattgagacaatgactgattgttcacgagtccctgctataatcaattaccaggaggactaatagaatacttctctctt

SEQ ID NO: 71750 - DNA, 488 bp, Glycine max
  unsure (1)..(488): unsure at all n locations
tactcagcttagttaccccctgagaagctctaagagctgctagatngtggtctcaaccagtcaatgaaaatattcagctgtatgggctcagagaatccatgagtaggagttttccgcagcaagctacaaaatctttctatggctntactcacagatttatctgggaactggtgaaaggaagagatgacagcctttccctctgcagtcttggactctgagaaatatttcttcagaaacttttccacaacttcatcccaagtcctcaagctattacctttgaatgaatgtagccacctcttggcttctccagatagtgaaaatgagaataagttgatcctaacaacatcttctggcactccagcanatttgactgtgttacaacattcaatgtaagttgctagatgtgcataaagatcttcattgngcaaaccatgacattgattgccctgtataagctaaatcaaagaatgtggatatgtgatattctg

SEQ ID NO: 71751 - DNA, 229 bp, Glycine max
agcttgccacacagctagccgcccagcgtcgccagtgatttatgttgcttactacacaacggaccgacttttgaagatcttactggatagccgtgaaaggcctgaatactttctatacgactcgtatgctctatacaccaatcacttacgatcgcaaaaacatctcttgagctgagggttattaacaatttactctagcaattcttgtatggaaaggaatcacaacgct

SEQ ID NO: 71752 - DNA, 366 bp, Glycine max
tatgaaactcagctccgaaagtgctatttttcaccttctcgctaagccaatctgctggcttatctagcgtccgctaaacgcaacactcatgggctaagtgcgaggaagactctggaagaagatgagctgtacatgtttgctaagcgcaacgcttcatcttactaagcacactgtttcattccatcctctaagcgagaggcatgcgctaagccaagactcgctaatgggcgctaagcgtgccataattgcactaagcgcacagagcatgacaaggccacctagctaaacctgaaatcgatatgtagagagagagacgtaggactgcgattcagagctttgcatgtctagatattgtagagagagaaa

SEQ ID NO: 71753 - DNA, 412 bp, Glycine max
  unsure (1)..(412): unsure at all n locations
ctggggtagatntcttcactagattcttccacttttgcttcttaactntcactagaggaaggtgaagtagtagcttcatattggctactataaatttcttggcccctcataatcatagttttcttggtggggcattgagaagtaattcgttctcttccaagacatttaaagtactttatagagctagtcttctcttgcatactagccttagggggttggttttctattgtcttccccttatcatctatgggcttagaaagcgccgtccctaagatgccttgaccttggtctttctttggataagagtgagagccatatgattctgaagtacacttccttntaagttgttgctctacccatatttcccaatctaagtaagcctctacattgtcctttccatggaagtatggga

SEQ ID NO: 71754 - DNA, 503 bp, Glycine max
  unsure (1)..(503): unsure at all n locations
atccttgagtcacctgcggcatgcaagctngtctcgctaagtgggagtccactttntgctcttatcgtgacaattcgtgcttagcgtgactccctctatgctaattctcgcttagtgcactaattcttgctcaatgcaattccctctcgggttggaattgtgcttagtgcgctcctcgcgattagaaagacattagttgttattatgttcaaaatcccaacggtcagaatgtggagaattgtcttatgaaccttcagacacaaattaaagataatccaatggttaacgaatccaggatcacgaatttacagaaataggttntggtaaaanttgaaatctcataatttcaacttagctcagccaaactccacataactcaacatccacattaagaaattcacacatgactaattcaagccatacctaaactcattcaagtcaaccatatattgaaataacatgataaatacaactaaacattgatttataattagtaatatttc

SEQ ID NO: 71755 - DNA, 479 bp, Glycine max
  unsure (1)..(479): unsure at all n locations
cgcttgtggggcttctatggaggctggatcttgagcttcaatgtagtcctntaatgagtgatttccaccacgaagatgcagcagaagacaaaggagaagaggtgagaggaggcgccatccactatggaataagccatgagagaaggagcttcaccaccaagatgagccttggataaaaagcttggagaggatgcttcaatggaggaaaggaaagagggagagaaagagagaggggggagcacgaaattgaaggaagaataagggagagaagttgaactttgagttgtgtctcacaagactctcattcatcaaagttacaacaagtgttacacatgcttctatttatagactaggtagcttccttgagaagctttcttgagaaaacttccttgagaagcttctttgagaaaactttcttgagaagctagagcttagcaaaacacacctctctaanaactaagctcacctncttgagaagc

SEQ ID NO: 71756 - DNA, 457 bp, Glycine max
  unsure (1)..(457): unsure at all n locations
caagcttgaagctcaaggaaagcttgaagatgtttttattttacatgcctaacttccttgagtnggcattgtattggttgttatctggtatgtttcatcttaatacatatgatattagtattgcatcattcatcatcatggntagtgtgaaagaatagttcttcaagaggcaaaaactctctgttttaatcgattataggtctatcataatcgattacagcaagatgtttgaagcttanagagttgagtctcgtatcatnttaatcaattacagttgtttcaaaatcgattacgttgttgtttgagacaatgactaatttatttaggagtctctgctttaatcgattaccaagtggtttaatcgattacttctctctcgcttagttgttcaaaagtgaacaagaacacttgaattgatactttgagatctaatcaatacatttgtcttgagtatttt

SEQ ID NO: 71757 - DNA, 473 bp, Glycine max
  unsure (1)..(473): unsure at all n locations
atggtanaataccacctcaagctgatattattattggtgtgcaagtgtttctttcgcaagaagaaaggacacatgaaatagaattgccccggattccagaaatggcttgagaagaaaggaaatcaatctcattagtatgttatgaatctaatatggttagtgttaatattaacacctggtggattgattctggatctactattcatattgcaaattctttacagggtatgcacaacctaaggaaaccagtgggaagtgagcaaagcattntatcaggcaataagctaggctcacatgtggaggccattggaacttgcattttgactttaagtagtggctttattntaaaattagaaaggactttttatgtaccaagtttttcccgaaacttgatttctatttcaaggcttgtaccgtttggatattcctttaatttcaaagacacatcatttgagttatttataattctgaat

SEQ ID NO: 71758 - DNA, 465 bp, Glycine max
  unsure (1)..(465): unsure at all n locations
agcttataagaacaaaatngccttaatcatttccatatatgcatgtgaattangacgcatcaacaagaatcaagccaaggctattgtgcaagcaatcaatggggcaaaacacaccaaatgattataatgatggatggctcaaattctcacaaaggtaaaatcatcactttcaaattgagctttcaaaactatcatgacatgtagagaagaatcaaggatttcaagtcacaaaatgtcaagaacttttaatttcaaaacatttacccatttcttgaacatatcctataattcanagaaaaacatgcaaagtcgtacgtgcacacaaaattgacccanaatattaaactgaanatccgacgaaactaacaacattaacaaattaacacaactaacaaattaacaaaaccaacataactagcaaaaccaaagaacactccccncctccccccatacttaaacaacaca

SEQ ID NO: 71759 - DNA, 471 bp, Glycine max
  unsure (1)..(471): unsure at all n locations
cgatatgaattcaagaaattctgatgagcttctattgtgtgactttacatgaatgtgttctctagaaatcattatatcatctcataaagaanagaaatcttcatattagctgcaacaatccatttatggaaatgaaaaaaaaaacaataaatgtaaatgaagatgagagaagtttataatataaaataaaatattagtggtacaaggagttactttgattgtgtaagaaaaaaaaacaaaaaaatagttcttgtgaaattaaacgtattagtttttggttattaaatcttctttattaatattatgtcaaaagcttttgttntccctctaagcctgtaaaatttttttgctggaactctaagcctataaataagtacatntattctggagatttccctttctttccatttcaaatcttctatcatcattccgagataaaaaaaatccataataaaaatngtgacatcattc

SEQ ID NO: 71760 - DNA, 479 bp, Glycine max
  unsure (1)..(479): unsure at all n locations
agcttgttccactgtcacattatntggttaanaacattctagttcacagagaccaaattaccggtgaatgaatgaagatataacatcataaatgtgaaaaaaatgaagaatttatataagattggtatttactatataagaagcaccaatgatcacaaaaacaaattaggagctgaagtttagtaattatttactctagcaattcttgtatggaaaggaattagaatgcttgagcagagttgttcaatgttccaacaaaaaaagcacaatatttagaggataagttgtatcctaagccagatacatgttaaatgaaagaggttttaaatagggaagggaaaatttgattcttagaccanaccttgatattttgcaatggagaaggaaataatgtttcttcatcggagacaaaacatgttggcaaagagaagagggggagagacaaaaattcctgtagaagtcgataagaaaaaaatgga

SEQ ID NO: 71761 - DNA, 508 bp, Glycine max
  unsure (1)..(508): unsure at all n locations
gacactatgaatctcagctttaatttcatacaaggaagcatgacttacgcctaggaatctaatgtttggttntgaatgtaaaaaggcatgaatattaggacatgtttgagacgttnttaaattntggtgccccatgaggaataccttgcacctaggtagcatagaaaatacctttcaacggtatgtatatatgtgaatatatatagcatggaaatgccttgcaaagtgtgtgaatatatggcataaaaataacttgcaaagtgtgaatgtatagcaaataatgcattntgaaatttgtatatgtaggataggtagcataaaaattcctttcaaaatatgtatanttgtggataggtagcatgaggagcctttcaaaaaatgtacccatgccaaaaatggcacgagaatgcttcccaaatgaatatatgatgtggaatttcctttcaagtgtaaatagatgacatgaaagttctttctcaaanttaatgcagtgtgtgcatgacatgag

SEQ ID NO: 71762 - DNA, 365 bp, Glycine max
tgcttgcacaatctataatgttaattgctctcactgtatctctctgtgaatgcatcaggcgtatggtaactaacaaatacttgaactcacttcattgccctctctgactagcgtcttaatactgtatagatcattgatctcacaagaccacagcctgttaaatgagagttatcatataatcttgacaatgtggacaactgtcatcgacatgagagtacacaatgaatttgccaatccatttccttattaaagttaattgttctaatatcatgatattgttctacttataacaaccgaaatcaactactccgggattcttgctcttccatgctttatggtggcatttaacataaccaatttttgat

SEQ ID NO: 71763 - DNA, 368 bp, Glycine max
gcctttctatctgagatatgaggtggaagattattttgtgcttccaatatcttcttgaagcggtggcattcaaaacacaacagacaattctcataatagaaatcatgaataatgcaattttgtgtatctcaataaaaatcaaaccagataatctattacagaatcactgtggagaaaattggtcaaagaacggaacaactaatacaactaggtgaaaaaagaaatttacagtatgtcaataaaaaattgcttaatataacatcattctaattcttttcttaaaaaaacgaaaataagcacctatcatgtactgttttttctaacaatacactagttattggcatttagaatttcataaagattccttc

SEQ ID NO: 71764 - DNA, 303 bp, Glycine max
tcatcctcctcggtagtgcgaagaaaagtttcttccagacgcacatactttctgatttaaacgacaattaggtcatcattatctactaccccaagatgtttgaagcttaaaagtcggccctcgatcactctaatcactacagctgttcacaatcaatacctgcgtctgaacaagactcatttatatggagtcctgctttatccataccaacggtcatacatacttcttttcctatttgtaacatgacagacactgattatccttgagatcaacactacatgtttgatattttcatttataaac

SEQ ID NO: 71765 - DNA, 481 bp, Glycine max
  unsure (1)..(481): unsure at all n locations
ctccatctatccatgttgtctctccctaatctcatgcatttgtattcaagtggctgtagaatgtagagaaattgaaatccttaatgttcattcaaaatctttgtgacccaaaccttagtagaattctgagtctacactggaagagagggtctgggcacttcatgtttctttntcatctgttgctcctctataacaattttttcctcctccttttgttgatgggcaggccttttggtttggacctttcccttctgctccctaaggatccttttaacgtttatagcaaggccaaaagtttccaaagccttgtctttattagcaatagccttggccagtttcttctacctcttttgctgaatgtcatcctagttcactagaggaataagtatgttcctcttgatgtcaaccttcattaccttcanngttacaacacttgaaagtgtgtatctagtgatgaagctgccttngttgatatggactg

SEQ ID NO: 71766 - DNA, 463 bp, Glycine max
  unsure (1)..(463): unsure at all n locations
agctngaggaagtctagtggagtgtccttttgttctatagttcgatgactgccttattaagtgtgaaattacttgctcaccatggccaatgcttgttgactacgtgaagataacatggttgattccactttatgaaagattcgtttgagcctanacgaataatgtgatgcgtatatgaaacacaacattctacatgtatgaaagatgagaatatattttggtggcatggtctaaggtctaacatataacaacaattgattctgaatacttagttgagtatttgaaatgcaggatagagtctggtcattgggcataagacatactactgtaaagtgtccttggatacctatgcagagcttgagaagccataaacgatatgagcatattgcttctctctcggatacagcctctgttgagacaagaacacgtgtggatgcacatagtttctgagataccttataca

SEQ ID NO: 71767 - DNA, 472 bp, Glycine max
  unsure (1)..(472): unsure at all n locations
tagccctagaggggatggaccttttcaggttntggagaggatcattaacaatgcctataggttggacctcccaaaagagtatggagtcagcaccacttttaacatttctgatttaactccttttgcaggtggagctgatattgaggaagaggaactaacagatttgaggtcaaatcctcttcaaggggaaggggatgatgcaatcctccctatgaagggaccaatcactagaaccatgagcaagaggctccaagaagattgggctagagctgctgaagaaggccctatggttctcatgaaccttatggtagatttctgagcccatgggccaaggttgggtccaattatctttgtacatattacactacgatgtcattatatttggtccttgtatatagggctccatattgtaggtagggtaccctagaaatataagaatcttcagccccttgtatttttgggcacctagact

SEQ ID NO: 71768 - DNA, 478 bp, Glycine max
agcttatgttgctcaaggatctggctctatgtctctcttttgcacgaactacaataattacaatggtggaaatcagtacgttagcgctggcattggccgtggtggcggtggcggttggaattttaatcgtggtggctgcaatggtggctgcggcaaaggtcgatttgctcatttccagtgtcaaatctgtcataaatatggtcatgaggcttcttattgtcatcataggcacaatgatgactatgttcctactcagcctatggattatcccagccagtatcctgatcaaaatcagtctcagatctctactaaccccaatcagaaccagtaccaaagtcagagtcagaaccttaattcctatcaaacacagcagtctaatcagtctcagttcaatcaatactcagcattctcctcaagcctatctgataagtgttccttcagcctcttcttcgagttgatatcctgattcaggggactc

SEQ ID NO: 71769 - DNA, 371 bp, Glycine max
  unsure (1)..(371): unsure at all n locations
gtgcgtgagctcaatttgaaggtgggcaactgaggatggtacgttaatgtttgatttgtgaaagtgggagagttgatttgcgccatcgcccgatcgccacctagtaccacatatgacgggtgtgccataatccactaagcttgatgtgagagagcgtggaagattcagtcttcctacttttgttagttgaccacagagtggtacctggagatatgtcgcgggggtcaggagaccttgnggacgtcacgtggagtgttattgcccacaaccaagctngaccaatcccgacccaacctgggcatagtcagtcagtgagaacctgtgacgtacctaaacaggcgagctcctagctgtcaaccaatataagaaca

SEQ ID NO: 71770 - DNA, 155 bp, Glycine max
atcatagcgtgcaaaagcgatagggattattgagctcatcacctcacgaacgaatgcaataactattgcaatactgctaatcctgtgaacataaaacataataactcgcatcttacatgcatgagaaggatcaaatcagtctaaaatcaaataaa

SEQ ID NO: 71771 - DNA, 367 bp, Glycine max
  unsure (1)..(367): unsure at all n locations
aagagtaatgtcccactanaactaactttccaaatgtttgccttcgcaggaatggcaccgaggaagcttgcctcacagaggtccaggaaggacaaggcggccgaaggaactagttccgccccggagtacgacagtcaccgctntatgagcgttgtacaccagcagcgtttcgaagccatcaagggatggtcgtttctccgggagcgacgcgtccagctcagggacgacgagtatactgatctccaggaggaaatatggcgccggcggtgggcaccactggttactcccatggccatgtttgatccacaaatagtccttgagttttacgccaatgctnggccaacagatgaaggcgtgcgtgacatga

SEQ ID NO: 71772 - DNA, 482 bp, Glycine max
  unsure (1)..(482): unsure at all n locations
atcctctgagtcacctgccgcatgcaagcttctcaagcaagctttcattaggtaaggtgaatttatggctccaatcacatccaaataaaagcctcaacacttgggaagaggtggaggataaattcatagcgagattctttcctccatcaagatttatcagtgcaaaatccgccatcgcgatgttttcccaaggatctgacaaacctctctatgacacgtgggagagattcaaagctttgttgcggaggtgcccaaaccataactttgatgatgctgcacaactatgtagaagcaagcttcatgatgaatcaagattgattcaagggagtttgatgataacaaagatgatgccaaaaagctcaaaagtcaagaacacttcatgttaacaaagatgatgacttcaagaatcanagaatgagttcaagattgaatcaagaacactttcaggctcatgaggaaatttgatttcaagaatcaagaat

SEQ ID NO: 71773 - DNA, 447 bp, Glycine max
  unsure (1)..(447): unsure at all n locations
tactcagctacncattctgtttanggttntatgatgatgcttgtgatgtttatgtgctgaanatgcttatggaaaactgttagagatgaagggtagagttaacctatggttagaaagtgagagtatggtgttgtgagtggaaaaagagtgagactttgagagttggaacgccaaatctggatttagtggtatttggaggttagagtgagttaatcctagcttgaaatgccatttaggacttacgaganagtttgggctgtgctagagagaaaaacaaatgaccaaagtgaacaaagagccatttctagggtaaatntgggtgttgaggagatcaaatttgattcggtgaaattttangtgtaaatccagtttgaacaagtttaaattgatgttatagacttgtgtgaggtgagagtttgctcgaatttatctcattctcaattcact

SEQ ID NO: 71774 - DNA, 363 bp, Glycine max
  unsure (1)..(363): unsure at all n locations
agctaatgagntgagggtagagctgtgtttcccttattatgatgacttcagcatccgtaggctccatatcatggtaaacacatgaagcacactatgctgagacaaattcaataatcctaagtactttattaaacatatgtattctgtttttaagatgttgaacttgatagtcaacaaacggtacggggacctggccccatgtgctttaagtaaaggaaaatgaccctttaagaagagatggagatgaattaaaaccgtgtgacaatcatactaactgtccaaattcatataactggcagaaattggttgtggatgtgcacatgttagagtaggtgagcttgtggggataatatataactctaa

SEQ ID NO: 71775 - DNA, 504 bp, Glycine max
  unsure (1)..(504): unsure at all n locations
cgtacgcacatcgttcgcgtgtatgatatccactccacaaggtttgatttatatgagagcttcaaccctataacgcaacgtggcggacaaaagtgggcagtaaacttgaatgatcgtcattgtcaatgcggaaggtattctgcgcttcactatccatgttcacacattattgcagcttgtggttacgtgagcatgaactactaccaatatatagatgttgtttatacaaacgagcacatcttanaagcttactccgcacaatggtggcctcttgggaatgaagcggctattcctccttctgatgacgcatggacacttatccctgacccaactacaattcgtgcgagaggtcggccaaaatcaacaaggataagaaatgagatggattgggtcgaaccatctgagcaccgaacacaatgtaatagatgtggaaccgaanggcatatcatgcgttgctgtcaatgcaatctgagcgcggagttgttaaatagtgattatgtatgt

SEQ ID NO: 71776 - DNA, 467 bp, Glycine max
  unsure (1)..(467): unsure at all n locations
agcttctaccatgccanaacgaaggagactgagtatttatttaaganaacaaagctagtaacagtgctctgggtcaaacacccacatcactacatgaaagagctgagagtatttcgggttttacaaaggaacgtaatttggaaattccgaccacgccaatgtgaccggtgtttagtgtaggttacgaaaataacatgcatttcatgaaaggataatgtctacaaagtctctttctctaaggttnttcaaaggaagcataagacaagcaatggcagttccaaagtcagaaaagatgctaagacaagatgaaactaacaagatacaatcatagaaccatgattacctcgaaagataacgaaagatcagattatggttttcgttctctaccgaaaccgcaagccaagttggaaattctgcttcggatgaagggttcctctcggtgtgggttctcaatggagaacaatgat

SEQ ID NO: 71777 - DNA, 469 bp, Glycine max
  unsure (1)..(469): unsure at all n locations
ctacagcagatattagtaatgacccactaacctagaataaatttttcttatgccattaacctagggaagtaagaaaaacttaatggctgagtgtaactgaaattgtggcaaccaaaagtcaccctcaacagccaacaagtcagccaccatttggtctcccanaaggctgatgcctacgttgccaatngggcccttattacaacttgaactaaacctaactaaagcccttttagttgattaacccgaaacatagttttggtcagccaactctacaaggattgggccattatttagacaaactaaacactctaaaattgaaacagagtggcgtcatttagtcctcctccatctgggccatgatacaactcacaaccttggactgttctccttgaaacttgggcttgtattcaaacagtatggacagcacttgttgaagagcttcttggcttccttgctctagcccttgcat

SEQ ID NO: 71778 - DNA, 478 bp, Glycine max
  unsure (1)..(478): unsure at all n locations
agctntatcccacacctgatggagtcaaacacggatcatttaatatcaganaccaattgttctttagaagccatgtttctgtccatatctaaagaacaataacaacaatagtgatngtagctacatggatcacacaatgttactgggttcagttaaaaaccaaattctcaggctattcatgtctaaaatacattcaatgtaattntacattggctatcaactgcccaaaattacgcacctcttttatcctagcctgagacaatataaaatttgactaacaagtacaatattggaaaagttccaagaatattattcaaacaaatattttgcatgttaaaagctcatttatttttgtctgcagctntcccaagtcaatcatcattaaacttgcactttccaaaatgacaggcagtaatactggacatcttcagggtgtcaataatataatgatattacagattcaactatgcttccacta

SEQ ID NO: 71779 - DNA, 484 bp, Glycine max
  unsure (1)..(484): unsure at all n locations
cggacgaatccgaacctaagtttctgatgtgtgtccactaatatctagacactatcctactttntctttccctttctctctctctctctctctaatccaacgatcctagcctctcttccttctctntctctacccttcgccgtctctatttctactcggaacccttcttgcccttgcctttcctcctctcacctccatgacaacctcgatgacaagttgttcgccttcccctctttctttctccctccaaatctaggactccgacaatgacttcctcctcatcaagtcggtccttccacctcctctattggctcaaccctgacactgtgcaccactgtctcttcctccgatggatgcctctacatcgancaaccagattgcgagggtgtatggtggaggctntgcgagggtggacttgcaatntgtgagcctgaagttggcctctattggaagcttcttgatgatgcgttgggtgacgatgatg

SEQ ID NO: 71780 - DNA, 315 bp, Glycine max
agcttgatagcatgcagagactaatgtcgtcttcttttctcttcgtcaatcgcggctgacaagcctgtggacacgcggagatatacgtcatcttccacgctcgcaagatctgttctactgactataaagttacgctgactggcggacatacccgagtggttatacgaataaacttcttgctgattgtaagacgaatagcctgataccacgcatagactaaagacggcttctgcgcccttttgaaacgcggccgacatgcccgtagaactcggagatttacatcatcctacgcgctcactgatcttacataatgac

SEQ ID NO: 71781 - DNA, 480 bp, Glycine max
  unsure (1)..(480): unsure at all n locations
cctacactttatacaagaatgaagctctgataccacttgtttattattggtctcagatatcttaagacaggggggttgaattaagatattgcaaattactttcccaattgagaatctatttcactttatattcaagttataaattcccttaataatgaacgtcttaaatattgattcaaatcaaaacaatttgaatatgagtatactgcagtaataaccaaaggagattaacggaagacaaagtgcaaactcatatgtatactggttcggccacacccttgtgcctacatccagtacccaagcaacccgctcgagagctccactatcttggaaattcctcttataatgtctaaatacacagggacaatccttcctttgtggttagaattcctctacaacaagagacccacggtctcttaattccttagagaatgangagaagatgaacaatgaatctctctacgacgagatagattttac

SEQ ID NO: 71782 - DNA, 347 bp, Glycine max
agcttccatcactattcacacagaggtcagattctttctataatatgtcgagatgctcggaattgaaccacggaagctctcgagtaactcaaatgtgcataacttttcacacagatgtccgattcgggcgcataatatgtctagtagctcgaaattgaacaacggaagctgtcgagaaagtgaaatggtcataattttttacactgaggtctgatgcgggctgatcctatgataagatgctgagtattgaaccacgcaagctgctgagatatacaaagggccataacatttcacacgggtgttcgattcaggcgcatcacatattcagacgctcgaaattgtacaac

SEQ ID NO: 71783 - DNA, 463 bp, Glycine max
  unsure (1)..(463): unsure at all n locations
cgaatcggacctcagtgtganaagttatgaccatctgaatctctctatagctntcgttgttcaatgtcgagcatctcgacatattatgcgctcgaatcgaacatccgtgtgataagttatgaccatttgagtttctcgagagcttccgtggttcaattccgagcatctagacctattatgtgcccgaatctgaccttcgtgtgaaaagttatgaccatttgaatttctcgagagcttccgatgtttaatttcgagcgtctcaatatattgtaagcctgaatcggagctcagggtgaaaagttatgaccatttgtatttctcgagagcttccttggttcaattccgagcatctcgacatattatgtgcccgaatatgacactggtgtgaaagttctgaccattccgatctctcgagagcttccggtgttcaatctcgagcgtcctaatatactgtacgcctgaa

SEQ ID NO: 71784 - DNA, 463 bp, Glycine max
  unsure (1)..(463): unsure at all n locations
cgagatgaggaagtgtagaagggtgaacttcctgctnttattcgttgaccacagagtggtacctggagatatgtcgcggnggtcaggagaccttggggacgtcaggtggggtgccattgcccaaaaccaagcttgaccaattccaacccaactcgggcatagtcggtcagtgagaacctgtgatgtacctaaacaggcgagctcctggcagtcaacagataaaaggaacaaagaccacaaagcaaggaggcttgtggtggctggccagctatgaacttgattgatatgtgggatatggcctctggtaatcgattaccaagggttggtaatcgattacaaggcttaaaaatgaagacatgaggctaagatggtctctggtaatcgattaccacggngtggtaatcgataccaggcttgaatacgaggtcaggaagccatgaggacttctagtaatcgattacca

SEQ ID NO: 71785 - DNA, 476 bp, Glycine max
agcttcagaccaaagcaactcagaatctaggtatctattacccctcaatttagtgggttttcaagggttgagaagtgaaaatgagaatggggtaaacttggagcaaactctcatctcaaacaagtctatatcatcaatcgaaactcgctccaactggttttacgacgaaaaccctaccgaatcaaaatttgactcctcaacacccaattttaccctagaaatggctcttgttttcactttggtcactcatattcctcatttgcacagtctaagctttctcataagtcctaaatgacatttcaaactaggattaactccctttaacctccaaataccactaaatccagatgtggccttccaactatcaaagcctcactctgtttccactcataacatcacattctcactttctaaccctaggttaactctacccttcatctctagcagttttccataagcaatttcagcacataaac

SEQ ID NO: 71786 - DNA, 389 bp, Glycine max
  unsure (1)..(389): unsure at all n locations
cgagatgaganagtgtngaagggtgaaacttcctgcttttattgttgaccacagagtggtacctggagatatgtcgcggtggtcaagagaccttgnggacgtcaagtggggtgctattgcccaaaaccaagcttgaccaatcccgacccaacccgggcatagtctgtcagtgagaacctgtgatgtacctaaacaggcgagctcctggcagtcaacagataaaaggaacaaagaccacaaagcaaacgcttgtggtggctggccagctgtgaaactngattgatatgtgagatatagtctctggtaatcgattaccaacggtgggtaatcgattacaaggcttaaaaatgaagacaggaagcttagatggtctctggtaatcgatacca

SEQ ID NO: 71787 - DNA, 245 bp, Glycine max
  unsure (1)..(245): unsure at all n locations
agcttaaagatgcccgagtcattcatccctatgtgatgttgttgaagtattggcgatcacaattgccattccttggattatagggttgaaccaagctcatgcttttacaaaaaggttcgtcaagttaagttgaaatatggaagtaaccgtcttgcaaaattggggcaaaagatgagtcgagtcacatcactgcttcgtctactgccaaacatatntatgattattgatgtcctggtactttcaat

SEQ ID NO: 71788 - DNA, 431 bp, Glycine max
  unsure (1)..(431): unsure at all n locations
tggtcagcagaggagcacaaaccacagacccttgcaacaggtacaaattcctggttcaaggccagctgggttaccaagttaaccaatgcattccagttgccttcaagcttcttagtttcagatgatgcagttgagtttgtagctacctcatgcactcctctaatgactatagcatcatttctggcgctaaactgctgggagttggaagccatcttctcaattaaatttctggctttagcaggagtcatgtctccaagggctccaccactggcagcatctatcatacttctctccatattactgagtccttcataaaaatattggagaagaagctgctccgaaatctgatggtgagggcaactgtcacatagttntttaaatctctcccagtattcatacangctctcttcactgagttgtctaatacctga

SEQ ID NO: 71789 - DNA, 492 bp, Glycine max
  unsure (1)..(492): unsure at all n locations
atccttaatcaccgcggctgcagctttagccaatgactacctgaataatttttttgatagccctttgagccttgtttccctttcctttgtttgaagctcactacaagccttaaatgaaaaaccatgatatcaccatatccttaaggaattntggagctntggaattgtnttatgaataagtgtggggagatntttgtttcattggataacttgttttgttggctatggttcatgatgtatcttgggccatacttgatgtacattgcatattggttaatggttggacatgnctgaattgatgctgtttctcaaaggctacatagtacacaaaataatattattaaaaaaaaatcgataaagataaagacaagcagtanagttgtgtgaataagataataaatgacaaaagaatgatgagactcttggttctacatcttatagttaaatnttatctntacttctttntattttcttatgntttcttaatatgca

SEQ ID NO: 71790 - DNA, 423 bp, Glycine max
atatatcgagacgctctatattgaacaacggaagctatcgagaaattcaaatggtcaatacttcgaactcggaggtcctattaaggtgcataatatatctagacgctcaaaattatacaatggaagctctctggctatacaaatggtcataactgttcactcaaaagtccgattaacgcgcataatatatcgagacgctcataattgaacaatggaagctcttgagcaattcaaatggtcataacttgtcactcggaggtccgattcagctgcataatatatcgtgacgctcgaaatcgaacaatggaagctcttgagcaattcaaatggtcataacttgtcactcgaatgtccgattcatgcgcataatatatcgagacactcgacattgaacaacgaaagctctcgagaaatacaattgga

SEQ ID NO: 71791 - DNA, 400 bp, Glycine max
agcttaataacatataatccaagcaccttctcatctttcttctggcaatcacaataaaatagcccattagcaacactatataaagattaaggtcctgttctgataaatttctccataaacacttataggagaaaaaaaaaacaagaaggtaaaatgaactgaactctcataagttaaaatcaatctatgcactgcagtctttagagaagatagatgagaaaacatcgatgtcaaattatgtgtattcatgcttgcttgtattttatgcatagcttgcttcagaagacagcatagtaatagcccaacaaactgacttatcattaagccctgtattgtgcatatatgtatgtgtgtgagaggcaatataattaagctaagtgagtctacttttcaactcact

SEQ ID NO: 71792 - DNA, 471 bp, Glycine max
  unsure (1)..(471): unsure at all n locations
ttgatggagtatcctagagtattgtattatatacgcgaacaaactgaatattagcgcttcatagatttggatacttcacctatacttatcgacaaagtactgaattcggatattgatacgcgaacaaatngaagcattggtgcttcatacccactaaccacanttttggggtgaatttggtcatatgtcttctcaagtgagaagtgcaacatggtttaagactagaacagctaaggaatgaatggcgaagagtggaacatagaagacgatagatttattaatggactattataatgtatctaacaaaaaaatgattacaaatataaaattgaatatttctgctctttcacaaaatattatatatcttctctatatactatttggctgcggtaaattaaaatataccattaattgaagttgagttaagtttcgttaactcaaatctagctgagttaaactatgaacatattt

SEQ ID NO: 71793 - DNA, 285 bp, Glycine max
agcttacgaacccaaactttatgagcgtcagcgcattatatcatactcatgactacgaacccaaaattgggttgtataatactgaaagccggaaaacctcgacctgaatgaaagaattagagctgcccactgattggtactttgcacctaagtaacgagggaaatgcataccaatggcgtgcgcatatacgcggaaatataacgggcatcaaatactctcccaatgaagatccaaacgttcctctcaatgaaagaatgataccatggattgccctttttaatgca

SEQ ID NO: 71794 - DNA, 396 bp, Glycine max
  unsure (1)..(396): unsure at all n locations
tgctagcaactctgtaggaattctgtcatggatgattttttttctcggtnaacagtaatgataataataataatctaacattaataaaatatatcctaatagatataaaaaaataatgcttgtaatgataaacaaaataaaaaaaaaatagtaatgcttgcttttgtgtagtttaatcactgtctgacagaaattgatatattaacacagtgaatntatgcttgacaaattgtatttggacatgaatattcgtggaaaagagttatgaagggaagacaaaataatgcggaaaatattgtcataacaaatgtttatgaatatacactcttacgtaatggacgacatgagcactgcaagttttctatctaacataacataacataatattgtggaaat

SEQ ID NO: 71795 - DNA, 442 bp, Glycine max
  unsure (1)..(442): unsure at all n locations
cgcttggaaaatctcagcaacgtataattctattataagattgatttttctttttgcttgaggcctctntcttctatacttaacctttttcatttcattttttatattaccactgaccattttttttataattatgtgaatttggtagatatgatataatagtagatgcaacagataatgctcctacccgatacttgatcagtgattgctgtgtggttctaggaaaggtaaatcttaatgtgttgatgtatgaacagattgtgaccatttgaattaatgttacatgggccttttcacttgttgctgtaattttttggttcctccatgaatacactctctaagtcagcattatnttttatgttttggntcatcaatgcataagatatctacattaattcaacacaaaggaaagtatgcgtgctcctatgtgcatgatgcctat

SEQ ID NO: 71796 - DNA, 472 bp, Glycine max
  unsure (1)..(472): unsure at all n locations
agcttatagnaaggtccaccacaacatagagcatattcattgtcaagngaataatggatctacactggaccctacgcaacccccatttccaaagaggccggatcttagcctatacaccaccgaaatgcataaaggaagattcggacctatataagatatggcgattgcattgtctaccaatatgaatacacatatccacttcatctatgtacctgtcacttacagccagcaattcatgaagccttattacatgatatatgatgaggattgactgcatcatgtgacatttcttaattgttgctgttcgattgcactatttatgggaatactcgtcggaattaggacctcacctaactatctcaattaataagattaatttgagaccagtttgatctaaaacatagggaacatgtgtgagttttttcgattagaacacaatccaattgatttctaactaagaaacctcttcctg

SEQ ID NO: 71797 - DNA, 454 bp, Glycine max
  unsure (1)..(454): unsure at all n locations
ngatggtggtgtctcacaatcgaagagaggttaagaatgatgtcttattgtgccaaactcggttcagttgcttgatcatagtcctcagaacactgcataacaatatgctgagacttgccttggatcactttcttcatgtaagacatgtacgacgcttatgatctcatatggggcaattgggtatctgaagaaacttactgagatggacattccangagctacatagctgcatgaaacgttggaaagaaggaaatttacaagtttatttatcaagaaatagaggaaaaaattgttaattcttaatcttttttattttgtattaagaaacacatgctaagttgcanactggaatgaacacgtttgctaatctatgtattatacaatcagtgtagaatatattactaatatttaaatttctgtgctctctccctccaccctttctcttctgaaattc

SEQ ID NO: 71798 - DNA, 482 bp, Glycine max
  unsure (1)..(482): unsure at all n locations
ttaagtcaccgcggctgcagctangtaaatattctaaactgtcataagctatgttagttgagcctagtccaacaagagggatctgaggacgaagctnggattgcttcagcataactagggatcgaggtttagtaatttatgctacaacatataacacaaaagcatgatcgattagagaaacatctttatatacattagcttggttgttagaaagacccaacatttttacctattgttgtcaaccttacttacttgtattctatactggttttagcctagacttagtttaatcttgtgctaaaccatcaattattaatgtctctttcaacaatgccttatctatgaatttaaccttggttaatactacttccctgagttcgatactctgattcatccattttaatataaaatacttgatgatccggtgcgcttgtcggcaaaccagatttcccttgaacatattagtacaaagagaaatggac

SEQ ID NO: 71799 - DNA, 266 bp, Glycine max
tgaaagccttggaggataaaggcatgcctatgtcgatgtggaagatttctccagaattaccttggtcaactctatcagagagaaatcacacacgcttgacagagtcaatgagttgagtcctacacttcaacgagcaaaagactgcgtcatctcgagaatcaagagtgaccattggatatagtttgaaacagcatgcttactgacatttgcacatctgacagcatccctcatgagcgatctgcagccattacaccacaacaataagg

SEQ ID NO: 71800 - DNA, 459 bp, Glycine max
  unsure (1)..(459): unsure at all n locations
agctngcatatcaaatgatgaaagggtgctcgactttctctcctctgattaaagaacaaatatgtgaaactcatttaatgcggaaacaccaaagcgtccactccacacaggaatagggattaatactgcctgtggctgcaattcttgtttaaaactccataggatcctaaaccctttttttcggtattatttcgttaacttacatgggagacttgaaataaaaatcaactatataaatctttatgctggaagctattcataatgcaattgttagttatcgctcaagtcatctatattacgtaatgggcctgcctatagatgtgttatagcccaaactgatagtgtgacagttggtattagttggacttaggtcaagtgataaaagctgtatgtggatactatcaaaatatagcgactcatggctctacagtccctattaattgattcttctcttttcac

SEQ ID NO: 71801 - DNA, 492 bp, Glycine max
  unsure (1)..(492): unsure at all n locations
ctctaagtcacctgccgctgcagctttgaaccaaacttttaagcttagtgcatatatcatactcatgactaggaacccaaaattgggttttagaatgtgaaaagcatgaaaatatggacttgtgtgtaggaatttgggctgcccaatgattggtactttgcacctaagtaacgtgggaaatgctattcaatggtgtgtagatatgtgtgtaaatataaggggcataaaattcctcaccaagtatgaacaagttngtttgctaaatgaatgtatgatagcatggaatgccctttttaatgcaaatgagtgcaggatgtaattatctttccgatctgcatataaataaatatgatagaaacaatcaatctttgtttggtgtacttcaaatgtatgtaggtagtttgtgatagcataatgtctatgatataaattaggtgtaaagatcgacgcaacactatgagcatgaaagtgtgtatcactggataccgaatt

SEQ ID NO: 71802 - DNA, 429 bp, Glycine max
  unsure (1)..(429): unsure at all n locations
ctaagcttcgaaatagtgataggtcaagccctaaagcagagcttgtttatctctggtagtcgaagagaatgtcaagttcatatccatcaaagtctgaaaagagtatgatgaactaatggacgtcaatatggccaccgttgaatccttggaacgagaaaccaagaacgcccgaaaggaagaacacgaccaaagcaaagttttgaggggctttatatggtagcaatagtgagctcaagctccgaagaggtgaatggaatcatcacgggtcataggcatgatcttgaaggacgagctaaaggtttgccttangtcgaaaagaaatttgcccaacagtttagcgagactgaatggaatatgtgggccatcatcgataagtgcatagagaatctaaatctagcggcgactcacgagcaaatgctataggatgag

SEQ ID NO: 71803 - DNA, 343 bp, Glycine max
  unsure (1)..(343): unsure at all n locations
agcttataatattcataaatgaaggagcattgtctgttcttaacatatatgtacattcaattgctgngttgtgtcttnttttaatatttatggattaactaattgggtttggtttgtgtgtacgcaaactggaaatgtgtacaataatgtgaagaggaagattgagagaggtgttgctttcccaacatgttcatcaatcaacaacgttgtctgacatttctcttcactaaccagtgatgaggccgcgttggaagaatgtgatatattgaacatgttagattttcaggacatgaatttgcgatgaaggggggggggggggatctatcttctattgctcgtttca

SEQ ID NO: 71804 - DNA, 401 bp, Glycine max
  unsure (1)..(401): unsure at all n locations
tcgagtacggcgtcgaatggagattnggcggtaatggcggatgttctactttaccccatcgccaacttgaaattgcacgtcccggcgatgacgatcagcanatgagttcatggctgtctgggctttcagtagacgtcgctgtagtatgcgatgaaagtcctggcgggtaaccaacatggagtccgctgcctccaccggagaggttccggcgacgtaatgtggcaatgctgggggaggtttgccatatgtgacttcgtatggagagagaccggtaccagaatggacagaagtgttgtactccattctgcgagagctaaaaggacgaccataatgcacggcggtcatggacgaacaatctaagatattgttcgagaatgcgcgtaaacaccttggtctgccat

SEQ ID NO: 71805 - DNA, 316 bp, Glycine max
cacaagataccagccctgatcatgactatcacagtataactcttgtgtgatatcaaactaccggggatgtaagaactttgaattaagaactgtattataaagagaagagaataattatctgtgtgatggtgcacacgtgtgggggcgatgttaataagaagaaacatggaaaatctatatcctaatagttctaccgtaatcttttataaaatcactgaaaaagtaacttatacgtcatgcaactaattagtagattcttcttgcaccattccctagatatcacacaaaattatattatacaaaccgaaatcaaact

SEQ ID NO: 71806 - DNA, 445 bp, Glycine max
  unsure (1)..(445): unsure at all n locations
agctntgagccaaaatcctggctcaccataaactttaccctcggaagcaaanaaaggaaagaaggaaaggaaatttccaatcaaagagaaagcaaaaaaggaaggaaaggaaattcccaatcaaagagtgggagaaagagaaaaaaagaaacgaaaggaaattcccaatcaaagagtgggagacagaaaaaagaaaagaaagaacattcccaaccaaagaatgggagaaagtaaaaaagaaggaaaccatgacctaaaagtggtcttctccctttgattaccaaccaaaatcctgtgcgctagcgactnttcgtcccgcactaaacaaaaacagaaaaggaaataagccaaccataaatcagaagccaaaaacacacaaaagccaataaaaaccatcaaaagaacccattcccaagggaagtcttattgatccatgatcacgcat

SEQ ID NO: 71807 - DNA, 466 bp, Glycine max
  unsure (1)..(466): unsure at all n locations
cggtgtagagctngactntgtaagagccataagtgatagtgaactatacttgtagctcgtgtgaagttagtgaaacttggtggttttccaagaattgaacgtagtctctgtagtagagactaaccaatataaagcttcttgcgcttgatctttcttgattttctctaagctttatttgactaaagggtgcgaatttgtttttagatttaaatagacatcttgtgttttctaaaatcatttttacattgtctgataggttttttgaaaaatctattatttgctttgtagaaagttttatcatatgaaaatgttgactctttggcaagtgtaccaattcgctctaagtagtaattctcggaagtccgagtatcatttccatagggattntattacacttttattgaatactcttcaatttgtaagtacgaaatatatagttcaaagcaagactaaaagcaagagtaat

SEQ ID NO: 71808 - DNA, 380 bp, Glycine max
  unsure (1)..(380): unsure at all n locations
agcttatccttatggcctgcctccagacttcacctttcgtgccatnctggaagaattaagacaagcccctacttttgaggggcaactcccaccctatgaagactatcccgggcaagacgatggggaaggagatacccatcttggccctctactccacctcatagatccatccccgcatgaactaccccagccgaacatagtccgccatatcccggcctcacccacacnccgtaaagaatctgttcccttcgctgaagataagggaaagattgaggcgcttgaagagaggttaagagcagtcgaaggccttggcaattacccattctcggatttggcagaattatgtcttgtgcgccacatacgcatccctgccaagttca

SEQ ID NO: 71809 - DNA, 488 bp, Glycine max
  unsure (1)..(488): unsure at all n locations
actaagcttctggtcatataggcctcatctttaagtgtttggtgtctcacaatatatagaattcttcacttgttctttggttgatagaaaatggtcgttggatcatttattgcttgcattaaatgcatgtcttttcttcatgcaaagagtagactctntgttgctagcgtcttgaacactacacaggaaatgccttcctttntgtcagagtaagtctatgtagcagagctcttcttgtgatggtgattgagaaattttagaatttgacttcatttatccttcataggattcaatagatcataggggaatgtttatgcaaaataggtcccaaacacaaagtattaaatgaagtcttatatgtcatttgtaaagaggcatcagatcatgcttttattcggctatctgctgaaacatcaaatgcatactctacaaagcatgttcttatagtgcataagactcaacttctacccttgtattgattacatcta

SEQ ID NO: 71810 - DNA, 456 bp, Glycine max
  unsure (1)..(456): unsure at all n locations
gccatgaactcagctctgcaaggaagagaaaagaagtcaagatgatgttcanagatattcacaggctgtaaaagaatatatgataaagttaatgaaatgcaaatcaaggtcttgcttatatagactcttcatgtctggtcaaaggaaaccattggaagagttataacctttagaaaaacttgagaaccatcggaagagttacatcttttgatttttgttcagaactcgtcactggtaatcgattaccacatccttgtaatcgagtacacaaagctttttgtgaaaagatgtgactcttgacaattgatgttgaatttcaacgttcatagacactggtaatcgattaccaatatcttgctatcgattacaccactttgaaatcatttggaacgttgcatattcagctgaaagcttttgaaatcaaactttgccactggttatcgattacaggaaact

SEQ ID NO: 71811 - DNA, 472 bp, Glycine max
  unsure (1)..(472): unsure at all n locations
agcttctntgaganaactttcttgagaagctagagtatatctacacacatcctctcataactaagctcacctgcttgagaagcttgcttaagaagattcctaaggaagctagagcttagctacacacacctctctaatagctaagctcacctccttgagatgagaagctagagcttagctacacacaccctataataggtaagctcacccgtgtgccaaaaacatgagaatacaaaaaagaaagtccttactacgacgactactcaaaataccccgaaatacaaggctaaaaccctgtactactagaatggccgaaatacatggcccagatgaaggaaagacctattctaatatttacaaagaagagtggatccaaccttgacccatgggctaaataatctacagctttatgagaaccctacggccttctttagtagctctggggcctcttagagtcttctatccaataccc

SEQ ID NO: 71812 - DNA, 500 bp, Glycine max
  unsure (1)..(500): unsure at all n locations
ntgatgatatggtcttcaccgacgaaaggatcanagtgggtctaaatagaggcaaatatgatcatcatgctttgataaatgcaaaanaaaaaactagggcaaatgaagagggtgagaatgagggagaagcccatgctgtgacagccattcctatacagccaagtttcccaccaacccaacaatgacattactcagccaataacaaaccttctccttacccaccgcccagttatccacaaaggcaatccctaaatcaaccacaaagtctgtctaccgcacttccaatgacgaacaccacctttagcacaaaccaaaaacaccaaccaaaaaatgaattttgcagcgagaaagcctgtagaattcaccccaattccagtgtcctatgttgacttgctcccatatctacttgacaattcaatggtagccataaccctagccaaggttcatcaacctccatttctccgagaatacgactcgaacacaacgtgtgcttgtcacgg

SEQ ID NO: 71813 - DNA, 476 bp, Glycine max
  unsure (1)..(476): unsure at all n locations
agcttgtaaggaagctacctagtctataaatatattcatgtgtaacacttgacgtaagtttgatgaatgagagtcttgtgagacacaactcgaagctcaacttctctccctttttcttccttcaatttcgtgctcccccctctctctttctctccctctttcttttcctccattgaagcatcctctccaagcttcttatccaaggctcatcttggtggtgaagctccttcttccatggcttattccctagtggatggcgccgcctcttacctcttctcctttgtctgccactacatcatcatggtggaaaatcaccattaaagggccttattgaagctcaaagatccagcctccatagaggctccacaagcaagcttccatcagtggttaatgagaagggctgatatnggctgagtattgatatcgctgagcttgtgggaaatntggccacatatgaacggcagtcacagcatggg

SEQ ID NO: 71814 - DNA, 449 bp, Glycine max
  unsure (1)..(449): unsure at all n locations
ctttattgttgatcccagagtggtacctggagatatgtcgcnggggtcaagagaccttgnggacgtcaggtggngtgctattgtccaaaaccaagcttgaccaatcccgacccaacccgggcatagtcggtcagtgagaacctgtgatgtacctaaacaggcgagctcctggcagtcaacagataaaaggaacaaagaccacaaagcaagggggcttgtggtggctggccagctgagaattntgtgtgatatgtggattatggcctctggtaatcgattaccaagggttggtaatcgattacaaggcttaaaattgaagacaggaggctaagatggtctctggtaatcgattaccacggngtgtaatcgattaccacgctctgaaacgaagtcaagaaacttatggagcctctggtaatctgataccagcctgtgtaatcgattacaca

SEQ ID NO: 71815 - DNA, 476 bp, Glycine max
agccttaacctcattgactctcacagtcttagattttgtagccaatccaatccttgtgtccggactcttagccacttatgatagccgccgatgatcccattactgcttcccctaagctccctgtcctttcttcacgccgcatcccatgccttgcgaactccttggagtaccctcgcgttgtggtcactgaaaaccccgagtgatgaaaggcgtgatgcttctatctgatggcactcctctcatggggcagccaagctgtcttatggcgaggacgggattataattaataccaccccttgttccatcaagggaacatttggacatccttcgcatgaagatagaatcctgattcttcctttcttctagcgagggaaccaattaacagacgcccctccttgctagccaagagttggtcccaattctccttttctttttcgacgcacgaacagtgaccttgttacagatagacgggccta

SEQ ID NO: 71816 - DNA, 459 bp, Glycine max
tactcagctcgagggcgacccaccattttcatagtataacactggtaatgtgtctactattattgggatcatctctttctccgtcattgtaggtgccacttgagttgccaagtctctccatctttgggcgtattctttgaaagatctgtgccctctttttgcacattctttgaaagatctgtgccctctttttgcacatgttctgtagttgcatcctatccgaagccatatcagaattgtactgacactgcctaacgaaggcaaccattatgtccttccaagaatggactcaggaaggttcctaagtaagtatactaggtgacagttgtcccagtaagactttcttgggaaaaatgtatcagcagtttctcatcttttgcgtatgcccccatcttctgacaacacatctttaaatggttcttatggcaagtagtccccttgtacttgtaaagtccggca

SEQ ID NO: 71817 - DNA, 451 bp, Glycine max
  unsure (1)..(451): unsure at all n locations
agtcatccttggcagcagccccaattttccattgtgcactattgctttcattnttcgcatattctttaatctcctacaagttagtaccatctcccttcaaatttcggctttccattgtggtattctggtgctctggttgtcatgttctttgcaaatttcatgagacaatttgtttgtgaatccatgctttgattgtttgattggggctgtagacataggatcaagctgaatgttttgatgatgccaaaggatcaccatgttttcaaagctttattcaagacacagaaatttaagatattcaagatggatgatcaagacagtctctagagtcttaggaagggtatattaaatatgaagggaattcataattgaagtagcacaggtttggccacgaatctaagttaaaagttcttttcaagagattactctctggtattgataccgaggatga

SEQ ID NO: 71818 - DNA, 414 bp, Glycine max
  unsure (1)..(414): unsure at all n locations
cgagatgaggaagtgtagaatggtgaaacttcttgcttttattctttgaccacagagaggtacctggagatatgtcgcggaggtcaggagaccttgtggacgtcaggtggggtgctattgcccaaaaccaagcttgaccaatcccgaaccaacccgggcatattcagtcagtgagaacctgtgatgtacttaaacaggcgagctcctggcagtcaacagattaaatgaacatagaccacccagcaacgaggcttgtgtggtggctggccagctatgaactttgattgatatatgggttatggcctctggtaatcaattatcaacggtgggcaatcgattacaacgcttaanaatgaagacaagaggctaagatggtctcttgtaattcattaccaatgggtgtaatcgattacc

SEQ ID NO: 71819 - DNA, 410 bp, Glycine max
agctacccaccaatggtatgtgatatttaatgatctctttgtttcctttggatctaatgagaacactgctgatctgtgtgtatatctgaacgtcactgggagtaaggctatgcctccaaccctgcatgtagatgatatatcgcttgcaactaatgatcttggtcatctttatgagactaagatatttctttctaataacttctaaatgaaggatatcggtgaggcatgctatgtgatctggattcatactatcctcaactagatcacaaggatcgtcacgctcgatcatactgcctatatcaataaagtcctggagagatttacgatggataaatgctcatcatctcccgttcaattcagaaagggacagatttatctccccaatgtctaaaaatgatctgaacagatca

SEQ ID NO: 71820 - DNA, 481 bp, Glycine max
  unsure (1)..(481): unsure at all n locations
tcaagaataatggcctcaacanacttcttattcccagaaggatactataaattaggcctcctanttttaatggagaggggtaccactactggataacccgaatgcaaatgttcattgaggcaatagacttaaacatttgggaagccatagaagttggactttatgtacccaccatggtggctagaaatacaatagagaaacctatagaagagtggtctgaagatgacagaagattagtgcagtacaatttataggctaaaaacattattacttctaccctacgaatggatgaatatcttagggtttcaaaatataagagtgctaaggatatgtgggacactctacaagttacacatgagggaacaactgatgtcacaagatctangataaatactctaactcatgagtatacactatgtacgatgaagacatatgaaagtatacaagatatgcagaacagaattacacagataggtaatca

SEQ ID NO: 71821 - DNA, 418 bp, Glycine max
  unsure (1)..(418): unsure at all n locations
agcttgatgtgagaaagcgtggaagagtcagtctttctactnttgtttgttgaccacagagtggtacctgtagatatgtcacgggggtcaagagaccttgaggacgccacgtgggttgctattgcccaaaaccaagcttgatcaatccctacccaacccgggcatagtcagtcagagagaacttgtgacgtacctaaacaggcaagctcctgcggtctaccaattaaagaacacagaccacgaagcatggaggcttgtgtggcggccggccacctatgaatcttgagtggtatctataatttggcctcttggaatcgattaccacgggtgtgtaatcgactacaaggcttacaaatggagacaggatgtacaaatggcctctggtaatcgaataccaattgtgtgtaatcgattacac

SEQ ID NO: 71822 - DNA, 421 bp, Glycine max
tactcagctctgaaacacttttatttaaatacttggccaacctttgttaattcaataggaattcccttcctaatattctagtgatcatcttgatgttgcgactcgtaatcgtgaagtattgccttgaatcttaatcttgaaaagcccatttgcatcaattgcaacacatcatcatgatcattatcaaaacatcaaagccaattgcatctacaatctccccctttgtgatgatgaacatacaatacctgaaatcaagattcaagcaacaaacaattgtatatagataaaatgtgcatccgttctctccccctatatttctgaatacatgatcacttgacttctaagttagctaagcttattcttaagcttttgctacaacctatgtctccccctgtggcaacatctaaaagccagagaactc

SEQ ID NO: 71823 - DNA, 55 bp, Glycine max
  unsure (1)..(55): unsure at all n locations
ncggtcttanatttcgagcgtctcgatatattacgggactcaatttgacttccga

SEQ ID NO: 71824 - DNA, 487 bp, Glycine max
tcagcttaggctgctcaatcgctccaggttgctgcatggaagggcatatgtctgtatggtggtcagcaaagtagcacaaacacaaacccttgcaacaggtacagatttctgattcaaggccagctgggttaccaagttaaccaatgcatccagtttgccttcaagcttcttagtctcagatgatgcagctgagtttgtagctacctcatgcactcctctaatgactatggcatcatttctggcgctaaactgctgagagttggaagccatcttctcaattaaatttctggcttcagcaggagtcatgtttccaagggctccaccactggcagcatctatcatacttctctccatattactgagttcttcataaaaatattggagaagaagctgctccgaaatctgatggtgacggcaactggcacacaagattttaaatcgcttccagtactcatacaggctctcttcactgaggtgtctaatacct

SEQ ID NO: 71825 - DNA, 391 bp, Glycine max
acaaggaggcaaagccatttttacatcacagaggcgggactttaataaccgagctatccaaaaggagggagtgaccgtactcaaaagactctacatactcccccgatttggaggaccccgaatgacaagatgcaatagcacggctgttcatgatcgaacattaatgctacaataaacggggtgatgggcttaattataattaaacgcttacgtgcacccgctgatcgaaccaaatggctccggatctataggccacatcgagagcgtatgttcttaaggacatgagaagtaaagacacacgcagaggtgagatgcaatcctaacccacacgataatgttggatatgggcacaaagacttagacttgagacccaagaggcttggggacagca

SEQ ID NO: 71826 - DNA, 489 bp, Glycine max
  unsure (1)..(489): unsure at all n locations
tgttctctatgctgatgccaaactcctttgcatagggattattcttataattgctttgntgaattgtctgcaagtaaatacggaagttctagataaataaaacaggccaaacacaaatttttgtttgatgaggaagagcttatatgactattaaaggatgaaatcaccatgattgcaatttaatacatggcaaggacctatttaaactatataatgtccaatccactgataaaaaaaaaaggatcagtaagggaaggatggagggtgagaccaagaacccatgataatatgacctgcagaatgtctgtctcttgttcgcggtgcctttgacatgagatcttcagcagagaagttatctgctnttcatttagccctttggtatatctctggcctccgactatcttgcatgcctgggacgagattcacatgagttctcgatggagaagctagaatcaagtaattcgattaaatttaaaggaaagattacct

SEQ ID NO: 71827 - DNA, 345 bp, Glycine max
  unsure (1)..(345): unsure at all n locations
tgtatgggctggatgttttattctcgccgctcctggtgcngagatgatggtacagatggtgaaccacgagctgaagtttcttttggtgaggtagccatggcaaagcagagctgttggaatgatttcgtaaatttctgagagctgttggggaatgcagaaaacgagattaacacgaaaatattagtttgaatgaagaatgtatagggacgtgtgaagcaactgtctacatttctttgtctaggaatgaacgtgctataatgttattgattctttgggcactacatatatcagagttgtacaattcctctacagacaaagcgcagcttgcccttagtttttcaaact

SEQ ID NO: 71828 - DNA, 479 bp, Glycine max
  unsure (1)..(479): unsure at all n locations
tctccgaagggcatggttatttctagtttcttgaaaatatctaataatctcgccaaatgacggtccttctccttcttggaaggtaccacaagatatggtgcttccataccttcgttcacagctttatcacttctactcttctcttcattctcatttttttcatctttttcaattttttattttctttctctttttctagatctttttctttttcttggtcattaaattcttttttcttgaccattatttgtttccctttttcctgattgctttcacctttcacatcatttttcttgccatcagtacctttcttttcagcagctttcttcttgtgcacaacactctcctcaccctcagcctccacaaacctcttactccttgtcatcacagctttgcattcctccttgggattcttttctgtatntgccacanaattgttggatgacttgtcagctatctgcttggctagtttcccacct

SEQ ID NO: 71829 - DNA, 477 bp, Glycine max
  unsure (1)..(477): unsure at all n locations
agcttaaagatccagcctctatagnaagctctcatgtcttcttccatcatgtacctagtataaatggactcataattgtaaatgtaataccaatctaaaaaaaatttagaaaatttaaatgttaatcaaatcgtttaaattacagtggtgtatgtaatcatcagaaagttaaataaatattaaaatacaaataaggtggcacaaatataattattttacaaaatttgggaaaattaaattaaaaaaaaaattctaactaatcttaaagattatgaaagtttaaaacagtcacaaacattcttaaaagagaaaataaaaaacattacgacagttctaaaaccgtcgcaatacttttgtaaaaaaaacattaccacagttccataactattgcaatattttttccaaaaaaaaatattacgaacataattattgtgaattgaatgaattataaatgacatgaacacattgaggcagttg

SEQ ID NO: 71830 - DNA, 433 bp, Glycine max
gcatcaacaagaatcaagccaaggctattgtgcaagcaatcaatggggcaaaacacaccaaatgattatgatgatggatggctcacattctcacaaaggtaactcatcactgtcaaattgagctttcaaaactatcatgacatgtagaggagaatcatagatttcaagtcacaaaatgtcaaagacttttattttcaaaacaattacccatttcttgaacatatcctataattcagagataaacatgcgaagacgtacatgcacacagaattgacccataatattaaactagagatccgacgatactaacaacattatcaaattaacacaactaacaaattaacacaaccgacataactagcagaaccgaagaacactcctcccccccctcatacttaaacaacacattgtccttaatgtaacacaattaaaa

SEQ ID NO: 71831 - DNA, 450 bp, Glycine max
  unsure (1)..(450): unsure at all n locations
agctttggggctgantaactatataacagcaccattgttctagtntaggtctctctctctctctcctctctctcttctatntttcgtctttaggtgtagactctcttctctttctcttttagtttttttgtacagatccagttcagacttttagttttatcaataaaattttgttctctatttgattaatggaaggctaagtccgcaacgttggtttctcttgaggatcaagcacagtgctctttgaggttctattattactggtaaattctgttcagtttttcctcttcactaattactctgaatttgttgctattaattcatgcatgcttagtgcttgattaattgtctttgcgcttaatttacattcttgcttaatgatncgttatgagtaattggtgtgtgtgatgcttaatcacataatgaatgctttatgttaatttcgcttag

SEQ ID NO: 71832 - DNA, 352 bp, Glycine max
tactccgctggctagtgaactgacagtgtagtgaggatactttctattggagctctttatcttgcgggcaggcgagtttcactagggcccatgtcgaccgtctaacatggcaactaagaaatatgagggacgtaaggagggggcatccaagtctattatgtaattgaatacaactagtatcactttagtacagtattcttcttatcacgggaacgcgaactgacgaacaaacaaagaggtgtgagatgtcttacaagggtgatcagcattgaatgagtatagaaacaactcaagatgattatttgaattgtcgttagtgagatgtactgcacatatgcaacttaactattat

SEQ ID NO: 71833 - DNA, 356 bp, Glycine max
  unsure (1)..(356): unsure at all n locations
acctgctgcatgcatgctntctgatcactattgatgttgcttgagaatttttgtactgaacatgtgttcaagaactatgcataactggacttctagatatctatgagctgattttcttttagtggagagccgactcaaaatcctattgtatggactgaattattcatgctataacatcgagaatggagtgataccctctgcaagttggcgctgttgctggaaaaatgatggatacgttatgtcgcttgatcccactcacgaaattttatggacatgtgattgcacatgactttgttataattagaaactacacagcacttagctctctctagatatgaaacatattcgctaagtta

SEQ ID NO: 71834 - DNA, 503 bp, Glycine max
  unsure (1)..(503): unsure at all n locations
gaccttgaaactcagctagagtaacactgagtaaggagtcatatgtgacagtgacaaatactcgtatcttgttaaagttaatgaanattgatggtttgccaagaattagatgtagtcttggtggttgagacaaacccgtctatatttcccgtgtcttactcttattattttttcttttgctatttgaactggcctanggtttcaatatgatctttgtgtntgaaaaactttgtttgttntacaaagattcgaaactatcgtacgatttgctttgcaaaaagtccaatatttattttcttaatttttacttcatcaaacgataactttcttggttacgaaaaagatttatatttacaganaatcaccattcaaccctcccttcttgtgatatatgcctttgcatatagatatgttactaaatgttcatacacataaccgatatataaaaatgaagactagatatctagaggatatgtatatgctntcttacctatataacgatg

SEQ ID NO: 71835 - DNA, 408 bp, Glycine max
agcttgtcctctatcaataagatctacttaatgatcttattttataaataagactttcatcaccctagttatcgaattcactactttagtaactgtgccaagttttattgatacaagctattaacatttcaattatcttctcttatattatctattttttgttttatctattgataattaaactgcgaagattcgattgtctattgattctatatacatattagattatattggatattaccatacgacaaagagatccacaacctatgatttagtaccagggattagtctttcatatcatgacgaactataattcaatgatatgttacaaacagtcttacatttaatattcattaatactttcaataagatttctttcgaaaaagatctttgcagaaaaaaactgaa

SEQ ID NO: 71836 - DNA, 404 bp, Glycine max
  unsure (1)..(404): unsure at all n locations
catcattatcatatgcgtgtcatggaaatgatgtgacgcattcccttattcctaagatacttgctaaacaaacattccgacatacatcatgtccaccatttgcatgcccgttaagccaaaactcaaccctctntagccagaaccttgacctaagattatgcatggcaacagggtgaaatgggaacgggtattgcatttctcaccctcgccccgactctgtgaccgatccccgaccacgcctctgatccacaacgggattaaaagatacagacccattcccatccctgatgtgggatgtgagctcacctccttgagaagagaagctagagcttatctacacacaccctataatagctaagctcacgcccatgacatataacatgaaaatgataagaacaaagtcc

SEQ ID NO: 71837 - DNA, 414 bp, Glycine max
  unsure (1)..(414): unsure at all n locations
agctngcccagngagtcatttgactcttctcacgcttatcgatcccagctcactaagccaaatttcactaactcacgcttagcgagccaatctcgctaagtgagccttcataatctgaaacatccatgagcctttaaaaacactgaagatggcagaaactagggagagatgagttgaaaaatatagcccagagagaagcccaggcgacagaaacgaagcctccaagagagtataagttagtggagtgagattagggttctagaggttgaaggagacatactcaaccattcttagccatttgcttacctcaaaatctatcctttgtgctgacaagtcattacttgtaatggaaggctaaacctcttggtggggagttctgctaaacctttgatgaatactcaattactatctata

SEQ ID NO: 71838 - DNA, 406 bp, Glycine max
  unsure (1)..(406): unsure at all n locations
aagtgctgaagggtgaaacttcctgctnttattgttgatcacagagcggtacctggagatatgtcgcggnggtcatgagaccttggggacgtcaggtggggtgctattgcccaaaaccaagcttgaccaatcccgacccaacccgggcatagtcggtcagtgagaacctgtgatgtacctaagcaagcgagctcctggcagtcaacagataaaaggaacatagaccacaaagcaaggaggcttgtggtggctggccagctgtgaaacttgnatgatatgtgagatatgggctctggtaatcgattaccaaggtgggtaatcgattacaaggcttaaaaatgaagacaggagactatgatggtctctggtaatcgattagcacggtgtgtaattcgataccaggctt

SEQ ID NO: 71839 - DNA, 384 bp, Glycine max
gtgaaatctcttctcttctcctcgtgaatcatggattcatatatgcttctaagcggatctcctcaagatctaggaattaaagcctccttttcatacctacttcatcaaagccatgttacacccttcacttcccaataagcacggtgctctatctctcaccaaaggtggcatgccttaccaaaacccactctattaggagacatcctcaaaggtaaatatgtaagcgatcctgtgggcccatatagcattctcaagtttcttgctccactcctatctaatgggtagactaccttctgcaacactgcttgatctctctattaaaacccccgcatgcccataatttggggatgataagttgtagcaactttatgcacaatcccatac

SEQ ID NO: 71840 - DNA, 481 bp, Glycine max
  unsure (1)..(481): unsure at all n locations
ntctagctnttcattggtgtattntgatctcactttggtgctctatattgtgggagtgtgctcaaatatatggggcaattttggtttgttttcttgcttgattaggttgaattaagggttggcatgggatggccctaggcctataatgcattttgaaacaatgggacatgccacattgtccccgttcccttgctattgacgcctaaacgcgcgcccaccaagtgttcggtgaaatgcctcaatagcattagcgcgtgacttttgtaaggaaacaacccatggngcattntggtttgtacatagtttctatctttggaacatgtattcattcccgaanaaggctagagtaattgccccacatatagcctatgcctaggaactaanattntatgcacacagaatacataaggaggtgcatattgggtaaagtacccttttttggcagcaatagctatcggcacactataatatttcctaccct

SEQ ID NO: 71841 - DNA, 462 bp, Glycine max
  unsure (1)..(462): unsure at all n locations
agctngaattggacctctgtgtgagaagttatgatcttttgaatttctcgagagctttcgatattcaatttcgtacgtctctatatgtgatgctactgaatcttacatctgtgtgaaaagttatgaccatttgaatttctggatagcttgtgttgttcaatgttgagcgtcttgacatatcatgctcccgattcgggcatacgtatgaaaaattataacccattgatattctcgagcgcttccgatgttaatttcgagcatcccgatatattataagcctgaatcggacctcagtgtgagatggtatgtccatctgaattgctcgagagcttccgttggttcattcgagcgtgtcacatattatgcgcccgaatcggtgatcgtgaaaaagtataccaattgatttttctagacttgcgatgttaatatgaccgtctcttatattagtatctgaattgacct

SEQ ID NO: 71842 - DNA, 438 bp, Glycine max
  unsure (1)..(438): unsure at all n locations
tatactatatcgagacgctcanaatagacatcgaacactctctatatattcaaatggtcataactctctacacggatgtccgattcgggcgcataatatgtcgagagtctataaattgaacaaccgaagctcttgagaaattcatatggtcacaactcttcacacggatgtccgatacaagcttataatatatcgatacgctcgaaattaatcatcggagactctcgggaaaatcagatagtcataactatttacacggttgtccgattcgtacgcttaatatgtcgagaggctcaaaatcgaacaacggatgctcttgagaaattcacatgatattactttttacacggatgtgctgattaagcatatcacatattgagacgctcataatgaacaacggaagctctagagatatctaacgctctaacatctaactcg

SEQ ID NO: 71843 - DNA, 451 bp, Glycine max
agcttctccacacatttaagagagcaaattatacattcttattctctctgctgtttaatcgcattcttatcacaattacaatttggagtagctagtgaaagctcaagccaaaaaacatactcggagaatatgagcataatgccactaacaacaactcattgttttaaactatacttgacacttgtcacgaatatgattattggcaaaatactaatattatttgagacactcataataatatataaggccctctgaccacaaatatctctttattattatcagtagttaataatatacaatgctgtactcctctgctggccggggtcatttattaatagacaatttatggtccataaaatccttgaattgtgatatctctccagcaatctctacttaagtgaagacaggaagctcacaaccacaggactgatttaattctatcccacttaat

SEQ ID NO: 71844 - DNA, 476 bp, Glycine max
  unsure (1)..(476): unsure at all n locations
ctaagctgctggacaacaacttgttctatgccaacaaagcattctgtgatgacaactcaaccaaacttctcttggtgggaatatgtgtcctatcatgcaagatagcgtgatcactagcagccatgttttctattaattccatggcttctttaagagtcttcaacttaattttacctcctacagaagcatcaagtagctactttgactgcggccttaacccatcaatgaaaatttttagctgtataggctcaaagaatccatgcgtgggggtcttccactgcaaactacgaaatcgttctaaagcttcactcaaagattcatcgggaaactgatggaatgaagaaattgcagctntttcctttgctgtcttggacttanganaatatttctttaggaacttttccacaacttcatcccaagtccttaagctattaccttcgaatgaatgcaaccacctcttggcttctctagatagt

SEQ ID NO: 71845 - DNA, 425 bp, Glycine max
atccactgctgaagcgcaatatattgttgtcggctgttgttgtgcacagatcttatggatgaagcagcaattatttgactatggtatccttcttgatcgcatacctataaggtgtgataatactagtgccataaatctatccaaaaaccctgttcaccattctagaacgaaacatatagaaattatgcaccatttgctaaaagaccatgttctaaagggagatcgcttgctagagttcgtcgatacaaagaatcagctggctgatatctttacaaaacctctcccacaagatatattattttcaataagaagagaattaggtcttttaaaccttagtgatttggataggtaatgtttatgattgattgattgtgctttgattaagtatgacgcttgtttatgactaattcattctactgttcttg

SEQ ID NO: 71846 - DNA, 453 bp, Glycine max
  unsure (1)..(453): unsure at all n locations
tactcagctctaaattgaattanaatgttcaataactgctggtaatcgattattttatatgtgtaatcgattacacagtgcaaattgtgaattcaaattntaatagctgttgtaaatcagttatggccactggtaatcgattaccagagagtaaatctcttgaaaaagaattttcaacttaaatttcttggccaaaccctttgctacatcaattggaattcccttcctatttaatatactcttcctaagactttagagactgtctcgatcctccatcttgagtatctctgatgtctttgtcttgaataaagctttgagaaacatgtgatccttcgacatcatcaaaacattcagctcgatcctttgtctacaatcttcccctttgtgatgatgacaatccctgaaatcaagacaagctatatacaagatgatagcacgttcacacaaccctta

SEQ ID NO: 71847 - DNA, 443 bp, Glycine max
atgcttcctatttatatgctaaagagggtggttttttatgataaataggtatcttggattgaagcttttctgaaaagtagttatgtgttcttttttggtaaatgggagtccaactaaggtatctaaaggtttgaggcaaggagatccatcgacatcgtatatgtatatggtggttgccgaaggattaataaaagaagctattgagttgaatatgttttcgagcttcaaggtgggaaatgaaggtgttcaagtgaatttattgcaatatacggatgatacaatatttgttggaagacttctttgaagaatgtcatgactatctaaacaatattagttagatgcttcgagttaacttctggcctaaaggtaaatatttcaaagagtcacttcggaggattggagtggaatggttttattgagtggtttgtggatggtataaaaat

SEQ ID NO: 71848 - DNA, 436 bp, Glycine max
  unsure (1)..(436): unsure at all n locations
tgtgatgtatatgttacaatgttcttanatttctaanaagtttttatgaacaacctgtntaggtaaattntttcagaaagacttctaacaaaataagaaaagaaaagtntttcataattaccttataaaccagctaatgatagaagctctttcatattagttnttttcaaaagatatttttagattatgtataaactagcattaacttatagaaaagtttatttaatttttttctttctgttttctttttttagtagtacttctaaatacatttatccagatagacccttaatattaatatatatcaacaatacttagaatcttatgagactgagcaggattattggaggcaagtagtatttgactcctacgggtctctntttgatctcttgcaatctgagctaacatagaccgtggagaaatatttcgaaatgac

SEQ ID NO: 71849 - DNA, 463 bp, Glycine max
  unsure (1)..(463): unsure at all n locations
agctnntttcagtcgtctgtaaggatgaatgtgtgttataaagcggcgatgcctactgtagactggttttatcccatgtttaagttgtatgtagcttgtggtttcttcacagatggcgcatgcatgatgacccttaacactggaaccgttgagattcccatatgctggaaagtcattaatggtacaaaatatcattgcacgcattacgaacgtctgcttgcgaaacgcatcaaacactacaacnccctcgtcccacaactttctcagatcttcaaccaacggacttagataaacatcaatgtcatttcctggctgtcttgggcccgatatcatcatagacaacatcatgtattttcacttcatgcacaaccaaggaggcaaattgtaaattactagcagaactggcaatgaactgtgtagagtgcttaaggtgccatatggattcattccatcactggctagt

SEQ ID NO: 71850 - DNA, 402 bp, Glycine max
  unsure (1)..(402): unsure at all n locations
ttttagataaaaaggtcaaacccaaactatattaatagcttggtaagtttgacaagcggacctgtttaagtagtagtagtagtagtaataataataactattattattattaaataaaaaacttttaaaactcttcagattcttataaaataataaatagaaaataaaagtaccatctaggttgtatcgtaacttgcacgcatttcacctgtacgcacgtccctgtgcatgctcactatcttaattcattgctgtctctaagttcttggatctacgccaaatagtcttacccatcctagttaaagtcattccttgtctttggatgcaatttataagtttccttttttgtgggtaggtttcactagattntaaaataaataattgatcaaagacatctttaag

SEQ ID NO: 71851 - DNA, 344 bp, Glycine max
  unsure (1)..(344): unsure at all n locations
agtcacctgcggcgtgcagcttacgtctacataatgcaaaagtnatacttaatatcactcggtatttncgctcggcggcgcgacttataagtcagtatgacagatcttgtgagcgcggaagatgacgtaaatctccacgtgtcaacgggcttggcggccactatagacaaacgtcttataaaacgacgtgaggctgtgcgtggtataaagactttttgtctacagaatgctaaatttccttcgggtaccattcgggtttggcgctccgcagcgtgactcaaaagtcggttgacagatcatttgagcaccgataattacgtaaattcctcgtgtaacggtcatgt

SEQ ID NO: 71852 - DNA, 475 bp, Glycine max
  unsure (1)..(475): unsure at all n locations
agctnntatcaaagttganatgcataggttgatttttatttattgagaagtgaatcgaagttttaataaattcatggactaanatgttggtttatataatgtgatggattagtttaaggtattactaccaagtttttttttccagatgggtttttctagtgccattacagatattggacattcttgttctgtccttttttgcagacaagagggatcccggttgcagaccatcgccagcatcagtttctgctatacaacaaagatgcgacacagcacctttttgaagtatctgctggtcttgattctcttgtgttgggagaaggtcaaatccttgcccaggtgaagcaggttgtcaaagttggacaaggagtgaatggctttgggaggaacattattggactattcaagcatgcaatcactgtggggaagagggttagaactgagacatacattgctgctggtgcagtttctgtta

SEQ ID NO: 71853 - DNA, 468 bp, Glycine max
agctggcttgacatgtgatgacccgaggaagatattgttccgtggaggaggagaagatagtggaggatgacatacatcaactggtaattgaaccagcacctgaaccagtgcaaccctttgtggaacttatagaggaagaagatgaggaggaggatgaacagatgagagagacgccaatatttttgagtgaaaaacaaataaatgaggaagaaaaagtggacttagacgcagatcctgaaaatgaaaaaaatgaaaaagacgaagaagttgaaatagaaataaatgagataaatgaaacagataacgagagaaacgacgagatgagaagaagcatgagtgggtgtgctagagagaaaaagaaagaagcatcttcagctgaagggagagatgtaccatatcctttggtaccttctaggaaggacaaagaaagacatctagctagatttctggatattttcaagaagctag

SEQ ID NO: 71854 - DNA, 438 bp, Glycine max
  unsure (1)..(438): unsure at all n locations
catctgttaatgtgctggagaaaaagagtaacaaggtggtgataaggaagaggtgcatttgcccgtaatgccttatgcatacggtagcggacaagatgagcttagtcaatttgatgatcagtgtgaatggcccacaatagaattaaatccttctctgaagcttgagaaagaattgtagaatagggaagcaagacacggcacataatatagtgcatgatacgacattcgaaagtgaatgagccagcaagcaaacgacccttcatatcagcagtttcattccaaaccattttacgagcatcatgactagatataaatattttccagtcatcaacgatggtgccctcaaaaggtacaccttgactacttaattctttcggggaataaaatacggactgatcaataacaatatgaattntatgcaccttagaaaagatgaca

SEQ ID NO: 71855 - DNA, 371 bp, Glycine max
  unsure (1)..(371): unsure at all n locations
tcttagagtcacctgcggctgcagcttcatactctgccactgtnggcataatctttaccttggcttgatcctttgcctacagagggtgctgcagcaattgcgtcatcttccaatgccaataccccttgtgagtataagtctcttcaagctctaaacttttatcactacattcaaccgtcttctgcacattcactatacacttccttcaagctttgttcaatagcgaacactaactggattggatgatagtgggcactacttatgggggccccatgattctgaatttggaaagaaaacatttgggatgaattctggaatggatttacaatgtcacaacaacaacaaccttcttcttatcaatagtaagatgt

SEQ ID NO: 71856 - DNA, 345 bp, Glycine max
tgaacttcctgactctatttgagtattttaatatatatcttttgggtagtatagactctagactttagttaagttatgaacttcgatttgttatgttatttataggttcatgcaaagaggacaaaccacttgcatcacagaaagacgaatgagttaattcatgtcacgtacaacttgaagctgaaaagtagacaaataagagaaattattgctcttccatttgaagatatggaatctgatgatgagtggattacacaagagggatatgatatttttgatgaaattgaatacaatgtcctacttgagcaacctctatgtgaaagtggtagtggaagcaatattgac

SEQ ID NO: 71857 - DNA, 449 bp, Glycine max
  unsure (1)..(449): unsure at all n locations
agctnntaactcatccatttagcatctagcttgactttataatacaagaaacagaaaccacaccggacacatatcanactaaatgtgaaaatntaaagcacacacaaagagggagaacctcacaacatggtattacatgggttcaaactccctactttntatttaatcatagacgctcatgtagcagtgaccattaatactttatattaaaatagttntagctagcccaaggtttcaaattgcgattatggttgtaacaacatatcgtgatgttgtggtggtagagatcgagtcaaagttaaaccatctgacgcatgcacaatcggaaacctttgactcacttatcagttcgggggccttcttggtcccttctttcgtggaatggaggttggttcctccccggcaccatgtacaggatgaggtggtatgtgtttatgcgggtagctatc

SEQ ID NO: 71858 - DNA, 129 bp, Glycine max
  unsure (1)..(129): unsure at all n locations
ttccttttctttgtttgaaacctctggccaatcttaagtgaaagacctggatatngccttatcttcaaggaattttggaccttggaaattgttcgggaaaaaatgggggggggtttggttccatggaaa

SEQ ID NO: 71859 - DNA, 434 bp, Glycine max
  unsure (1)..(434): unsure at all n locations
tttccccaagctccaagctntactcttcatgagattcatgttgctctccttatctctaacaaatctccactttntggctgtgatgatgcttaacttgaatatgacattgagtgcatctggagggtctgagtcttgagattggagactcgattcttagtccatcctaaagagatcttaacacttaacaagagattaattcatcatcatcatcatcatatatcttactcatatatatcatcgatgctattacaatgctcaatgcttatgcaacgcaaccaatatgcaaatatgcaagagtgtatattctccctcttttggcattaacaaagcctaaaagtttgattatacacacaacataatacacacatctaatgaagataaagtcatatttattaatcataaacccttaatcgaacaacgagacttaactatca

SEQ ID NO: 71860 - DNA, 473 bp, Glycine max
  unsure (1)..(473): unsure at all n locations
agctntgatacttacagctgatgcgataaccacagtctgtccaacttcaaggccatttattccagcatgtatattgatggaatttgtgcaaaaaacagccaatagccccatatatagtttatacatccatcctgccccataaaacaaagtcaaaatagtgaatctttacagcaattagtaactcctcaagtgtcatttacataaaggtagaaaaagcttaccaagattcaaaacgtcaatcccaatgtgtgggacaagtggctctggataactatagttgtgtgtgcagcatatgccattaacataggaagtgcgacaattgatgggagtagtaatgttctgttcttcacattgacataaagtcaaaaacgacactactctaacattagttaacaagcacaaattcatgaagcaaatgatgaaaacttatatactcacactcttcatgggacatcaaggacatcgtcaacaaa

SEQ ID NO: 71861 - DNA, 479 bp, Glycine max
tgatcttcatgttgctccccctatctctaacaataagaatattatttgattgaaactctacacatcaattgctatctatggagtggtactattaacaaggtgggtgaaacaatacagagagaaaaagattgaaatttttatgtaaagggtaggtgttaattgcttcaacaaatctagggagagattacagttatacttacaacttcagctccttgtttgagaagaatgagagagttatctcttgagtcaatttcagtcaccataatgttgaacatttctggcaatgaaattcttggtgtatttagtccaaaaaggaaaagataaatattataaaatggaaaagaataaataaacgcgttgctagaagaatacttggagggtgtattgtttgtttgtcccttcgttgctatgatgtgatgactgataaaagatggaattaaagagataacaaaatgtgaagattggtagaagaacatgtg

SEQ ID NO: 71862 - DNA, 445 bp, Glycine max
  unsure (1)..(445): unsure at all n locations
aagcttaacattcaactgcgagcgtctcgntatantttatcgactcaattagacatccgagtaaaaagtnattggtcgtatgaatttgctcacaccttcaacattcaatctcgagcgtctcgatatatgacgggactcaatcaggctttcgagtaatacgatattatcgngtgaattggctcatagcttctacattcaattttgagcgtttcgatttgttacggtactcaatcaggcattcgtgttaaaagctacggtcgcttgaattggctgagagcttcaacattcaatgtcgagcgtctcgatatggttcgggactcaatcagacatccgagtaaaagttattgtcgtttgaggtgctcacagctcaacatcaattcaaccgctcgattagacggaccaatcagctcgcgaaaagtatgtgttgattgctggagctcacttc

SEQ ID NO: 71863 - DNA, 422 bp, Glycine max
  unsure (1)..(422): unsure at all n locations
tgcttctacttgtagacatagacttgcttgtatgctatctacacttctccataagaaaccttgcaaaggcaaaagctgatctcacagctgcaagaacagctgcgaatgctatttatgttcctccacctcaacaaggtgccatagatctacagagggggattcttcacgcagaggagaaggatcacaaaactgcatatagctatttctttgaagcttttgagtctctcaatgctcttgatgaccccaaggctgaatttaacctgatgtacatgttgtaatgcaagaatatggtgagtcaagctgatgatgtggctggaatcatatcttctaaagctggcgtgcaatatcttgggcctgattnggatgctatgaaagccattgcagatgctcattctaagcgatctctgaagttattcgaaatt

SEQ ID NO: 71864 - DNA, 340 bp, Glycine max
  unsure (1)..(340): unsure at all n locations
cggatcgatctcgaacatgtntgtcacagaccatgcttataagtctatgtgctcctggataacctgttgtattcagctaggttgtcattgggtaattggtttcccaactgagtgacctgtccttccttatgtccgagttggaaagtgggagtctcctctactggcttcactcgggtgtcatcattagatcctggatcaagctctaactcatccacctgtgtgatttttgtcctagtctccacgcaatggacgactgctggggactacccctcgtatgaggacataagcaaatgctgccaatgtagtattctctggatgcctttgattgatgagacaatta

SEQ ID NO: 71865 - DNA, 444 bp, Glycine max
gatcttaagcgacgcagctgcagcttgcttgtcatgagcagaatgattgttctatgatgttgtggagcgcgtactagcccggaatgggtttaagcaaagacaacggcggcataactagcctgataaacgccataggacatagtgagaagtatagcttaggctatgaacccagacaggcagagatgaagagaaccattacggataagataagcggaagttaatgttcgcggttgagacaagaacgcgaacgaagcccaccctgccacataagtaagagctgtacaagcgcggggataggggactaatgacaaatcgttgcttttacaaagatgatgttccgagtgcattgaatttggtacaaccgtgccctcctgatttcgactaagaaataggtagaggacgaacgcccggcatattctcggcacgcataatgatgaccattac

SEQ ID NO: 71866 - DNA, 432 bp, Glycine max
  unsure (1)..(432): unsure at all n locations
cgtaagctacatttacaaccatacattgactgtgaacatcatgagtaaattcacacaaaaaactgaattggtgagacacggagttacaagatttgctaccactgtcttaactntgcaaagattgcataagcaaaaggccaatcttaaaaggatgtttacttcggatgaatggttgaagtctaaggcagctaaagagaccaaggcgaagcaagtaatagatgttgttcttatgtcatcactatggaatgatgttgtctacactgtaaaggctatggagcctcttgtaagtgtgttgaggttggtggataatgaaaaaaaaaatctgccatgggtttcatttatgaagcaatggatatggccaaagatgcaattcatagagctntcaataacaatgaatggaacgacaaggatatctttgcaatcattgataaa

SEQ ID NO: 71867 - DNA, 87 bp, Glycine max
  unsure (1)..(87): unsure at all n locations
agcttctaaactctatacaagaatgaagctcttgttctcactngctggacaagtggtctcggatatcttaagaagggaggggggttg

SEQ ID NO: 71868 - DNA, 412 bp, Glycine max
  unsure (1)..(412): unsure at all n locations
cctttctctttctatcaaccccactttcaccacccttttcgtctttcttgtccaacaaattgccctctaatatcttattcttcttctttttcacgtcttccttatccactttacttttccttccaccctcttgagcagaagaagaacttcctgccacatcatcattcttttcagcaaacttgatcaccgttttgccctcatcggcctcactctcaccgtcatccttcggaaacatctttctttntctaccgcgattttcgtcttgaacatcatctttcttgtccatcaaatcgccctctaacatctccttctctttcacatcctctttatcctttatacctttttcgccaagcttctttctcacgccttctcgatcagaagaagaagaagaaccccctggcacgtcatcatt

SEQ ID NO: 71869 - DNA, 372 bp, Glycine max
atccttaagtcacctgcggcatgcaagcttccatcacctttcctaatgcttctaaactttattgtttaacacctctgcttccttagctcgaatacaacttgcacaatttgaattctgaaattgtggtttgttggtgcttggtgttgttagttgtatatgattccttcttcaacttagccgtaagatgctaattgaggagattgtttcttctacaaaatttagctgcattgttgcttctgataattgctattattggtacacaatcttccttgctcctccctaattgtaaacaatgctaacatgattaggatttgtttgagtaatcttcttcctagtctccttgtttgatcgtattcttcaatattctcactc

SEQ ID NO: 71870 - DNA, 475 bp, Glycine max
  unsure (1)..(475): unsure at all n locations
agctngccacccagctcgcccaggcgagctaggtttgttttctccagaaggcaggagaacttcctggaaggccctggttgctatttgcaccccatttttactaaatgcacccccttgcctcttttgctgattctttntccgtaacgttatggaaacttacgaattacgtaacgatacttgttttccttccgtaatgttacggaaccttacggattacataatcgtccctttttttccttccggagtgttacgaaactttacggattgtgcactaacacttccttttaatttccggcatgtcacgaaacttcacggattgtgctacaatgctttcttttgacttccagcatgtctcggaacttcacaaattgcctaacgatgggtgccaagtacctcgaagtggtcaaacgagggtcgcatcccaacaatggatggtcccagacgaaattatggtatgacacacttgcatttatct

SEQ ID NO: 71871 - DNA, 359 bp, Glycine max
  unsure (1)..(359): unsure at all n locations
tagaagactccaagtagattgtgccagagatgcaagagaagaccctaaggttctcatgagccttatggtagatttcgggcccatgggctaagtatgcgctcacttatcttagtacatattacaataaggtttcattattcttgggccttgtatttacggctccataatgtacgtaaggtacccttaaaatgtacgatttttcagcccttgtattttatggcacctagactagttgctgtattaagggtagtttcgtaatttcacatgcattaagtgaatatgtgatgtgtatgttggacaataaatttaatcgaatngcgagaatcgcaatgcaattcaattttagagggggaggtgag

SEQ ID NO: 71872 - DNA, 443 bp, Glycine max
agcttgtagagggcgcgactccatatacatctccttttctaaaagatgatggtagaatgggtgagccctccactcctcaaacgccatgaacaacaaaataacaataaaaaaaaaccatagtatacaatctacgtaaccattacgtgtggttgtttaagcaaacaatactctcgcatcctaagcgcataactattccacttgtttcacaatagggtccaaccactaccaccaaacctcccaggtcatgatggttttacacttttatatggatgaaaattgagagtgatcaccacatacagatacaatgtacatcaatcctcagccgccaactcagaaagcatagtctcataaccagtgaggaatatcaaagtgaagcctgtgagctccccgcgccatatgagtgcaccaaatgtcgagtagtcaccattcactaatgttggatc

SEQ ID NO: 71873 - DNA, 455 bp, Glycine max
tccaaaacccctcaattctatggcttttctacggttgaaaggtggaatttagaatgacgtataattggagcaaactctcacctcacacaagtctataacatcaatcgaaacttgctcaaactggatttacacctaaatttccaccgaatcaaaatttgactcctcaacacccacatttgccctagaaatggctctaggttcactctggacattagattttctctctagctcagcctcaaccttctcacatgtcctatatgacatttcaagctagtattaactcactctaacctccatttaccacagaatctatacttagccttccaactcgtaaagtctcactctctcttcactcataacatcacattctcactttctaaccctaggctagttctaccctgtgtctgtaacagaattctatcagcaatttcagcatatacacatcactaacatta

SEQ ID NO: 71874 - DNA, 214 bp, Glycine max
  unsure (1)..(214): unsure at all n locations
agctngccagagcgatgcagcagcaatgatggctctgttatgttggngaacggatacgaacccgatatggatttaagcaaagacaacggcggcataactagcctgataaatgccaaaggaaatcgcgggaaggatggtttatgctataagcccactcangcatatgataagagaagcatcgcgggaaggaatggccatacttcaaactcctggc

SEQ ID NO: 71875 - DNA, 498 bp, Glycine max
  unsure (1)..(498): unsure at all n locations
atactcagcttgcaccagctcgccaggcgagctcagctagcccaggcgagcttgtttgcttnctccagaagtaacagccttctggagggcccaagtgggcctggttgctattagcacccccatttttactaagtacaccccattgcctctttttttgtgattcttttttcgtaaagttacggaaacttatgaatntcgtaacgatacttggtttctttccgcaatgttacggaaccttgcggattacataatgcatccctttttgacttacggaatgttacggaacctcactaatcatcccctattttgatatccggtgtgtcacggaaccttacggattgtgcatcaatattttgttttggtttccggcatgttccgcgatttcacaaantgcctaatgatgggtgccaagcacctcacaatgaccaaacaaaagttgcatgtcatcaagcagagggtcccggacgaaactacggtatgacagcgtgtaatactgac

SEQ ID NO: 71876 - DNA, 379 bp, Glycine max
agctatgccaatttagttgtctccagcaaaatgttttatgttgttctaagatgaggaaattttgatcattctactctgataaataaaaagcctgcggaaaatggagaaagtaagaatgacggaggaacccatgttgtggctgacattcctacatggtctaagtttccaccagctccacaatatcaatactctgccaatatcaacccttctctttacccaccagcctataaatcaagaaccctaaatcagccataaaggccaccccaagaacattcaatgcccgacaccaactcttgcacaaaccatgacaccaaccgaggaatgaattctatggaattcaccccaagtccggtgtcatatgctaacttgctctcatatc

SEQ ID NO: 71877 - DNA, 398 bp, Glycine max
  unsure (1)..(398): unsure at all n locations
ctagttggattagagttttagctgcctgatcatgatgttcttctatggttntgtaactagtggtaggtgatcatttaatttgtaaatattttatgcttaagtaagatataagtaaatttacactggtgtatgtggttcaattagtaaaattatgctttctagcgtgtgtgagtgcatcatatcccgcaccatgggtaaagaattttttcaccatgaacggttgatttgatgcaatcaacgttatgttagcacaccagattataggaccgcaactccttgggtcgtgtaatcctttgaggccgcgaagccaagcgcatgtaacatactctcaatctcaaataaaacataatnttgtccctcgacattgctgagaggatcatgtacgacccccatgatcg

SEQ ID NO: 71878 - DNA, 479 bp, Glycine max
  unsure (1)..(479): unsure at all n locations
agcttgcgttcctaagcctaaggtcattttcggctcttattctagttcctacaagttgtccctagactcaacaatgacagtcacatatgcacaagtcagttccacaaacaaaattcacaaaatcatgcaaaaatgccattgaggcatttcaccgagcacttgatgggcacatgttttgacatgaacaaaaggcgaatggnggcaatgtcgcatgcccattcattacagactacaccataggcctacggccatgccctacaactacctactccatcaaaacaagcacgaattcaaggataaattgcttcttggatttttgcaagaatgagcaaacaaagcatcaaaacacaacaatggtgatccataacaaagagcanaggagaagtgcacttacttgcagggagtgaacaagagtaccataatggaagcaaaagcacataattggtggtttggggctgcanaattcgtgaatctcgtga

SEQ ID NO: 71879 - DNA, 487 bp, Glycine max
  unsure (1)..(487): unsure at all n locations
tctggtgggacatctngacttgctttccaatctgacattcactttatattctgccttcttctantttcagaatgggaatgcctctaacagcacctttgtcaatgaatntcttcatgcctcttaagtgcagatgtccaaatctttgatgccatattctgacttcatcttctctggagaatagacatgtggaggagtaactggtttcttgaggtgtccataggtaacagttgtcctttgatctgctgcccttcattaagacttcactcttctcatttgtcaccaagcattctgactttgtgaagtttacattgaatcctttatcacacagctgactgatgctgatcaagtttgcagtcagtcccttcaccagcagtactttgtccagactaagcagtccatcatggactagctctcccattccagtgatctttcctttagagccatcttcaaatgtcacatggctaagtggagcaaggctcaatgttca

SEQ ID NO: 71880 - DNA, 501 bp, Glycine max
  unsure (1)..(501): unsure at all n locations
atccttaagtcacctgcggcatgcaagcttcgggctgttcaattgctccangntgctgtatatattggcaaaggtatgtatggtggtcagtagaggagcacaaaccgcagacccttgtgacaggtacaaattattggttcaaggccagctgggttaccaagttaaccaatgcgtccagtttgccttcaagcttcttagtttcagatgatgcagctgagtttgtagctaccttatgcactcctctaatgactatcgcatcatttctggcgctaaactgctgggagttggaagccatcttctcaattaaatttctggcttcagcaggagtcatgtttccaagggctccaccataggcagcatctatcatacttctctccatattactgagtccttcataaaaatactggagaagaagctgcttcgaaatctgatggtgagggcaactgtcacatagttctttacatctcttccagtattcatacaggctctctccactgagtt

SEQ ID NO: 71881 - DNA, 479 bp, Glycine max
  unsure (1)..(479): unsure at all n locations
tccttacttgagaatgtctctgannattgctggtgtttntaccatatacccaatatgaaaattctgcttaaatgtatgtctttatgaaaatttgttaaggtgataattacaaggattaagccatatatagtttaaatgcaaagttctaaggccaaagtattatttggaaacaataattagcttcataatcaattgttacccttctccagtcttcctctacttagttgccattntcatggccaccttacactttggttgacttatatatatcatcaaaccacttaaagcacaagcacatgttctatctgacagcaactcctagccacctcacataaggcatttcatgcttttangattcgttcgttctagttaananagaatgaanaaaacagttaaataagatagagtccattcctaataagttattaagtgtatgccatanattaaaaggaaatattagtgagaaattgtttgactat

SEQ ID NO: 71882 - DNA, 59 bp, Glycine max
aagcttagatgggctcattcacaattttcttgttcatttctagattcttaattggttgg

SEQ ID NO: 71883 - DNA, 476 bp, Glycine max
  unsure (1)..(476): unsure at all n locations
ctagcaactcttttcttttgttagtcaaaacttctaatgctcttatatctctcctcatctaaatcaactaactcatctgacatcattttccaataatggtcgattggaatgtccatttgtttttgtaccctggctgattgcaaatgtatttcgaccggaagtacagcatcatgcccataagtcagtcgaaatggggtagtattagttgattccttaggagaatttctacatgcccatagaacttgatctaacgttntattccaatttcttggctttagggcaatgtgttttttaatcaagttaattacaatcttattggctgcttcgacctgaccatntgcttgcgcgtaatatggtgttgagggttaataatcgaaagccagtttttgggcaaattcttggcattttcgtccagtaaaaactgaaccttgatcagtggtaattgtttcacgaatanccatacctataataatatg

SEQ ID NO: 71884 - DNA, 456 bp, Glycine max
  unsure (1)..(456): unsure at all n locations
agctnggagatagctttntgtatgaggcagaagtgtatgtgattaatacttgtaaccttgttgagagttaatgataactcggtggattaccaagaatntgacgtatcctcagtggtagagatgaaccagtataaaatttctatgttctttccctatcttccttatatgttaactgaatttttaagttgtggttcttttgtttgtaaaatttgttaaagagtttatgtctgctataacagtacctttaaaactttgtctttaccgtctttagcttatcaaaataatgtctaactcttgtttccttaaaacttgtaaagagtttatgtctgctataacataacagttgtgacaatttntaaatcacagttcaactctcttgtgatgtttgcctttatagaanatatcataggcgttagtccaaaaatataatatactttactaaaccaataagatcaa

SEQ ID NO: 71885 - DNA, 497 bp, Glycine max
cgtggttcaggtcaatggaacatgattgtacgataagtacaatgttaccctccttgtggcagttgcacaagatgacaacaataaaatccttccaatagctcttgttgttgtcgaaagtgaatcaacaagagcatgactcttctttctacaaaatttaaaaaggcatgttactccacaacatggtctatgtttgatttgaaagagaacaagtcaataaatagtggctactcaagacgtgatagtgggtggacgacacagaattctatgcatgtgttctgcatttgacacattgcacataattacatgaggagatacaagaacaatgccatcaaaaaatcaatatgagtgagtgtcaaacttctttctcttcctaattaaatatcacttcatttgtactattcacaatattaaaattatatgtctataactactcagcatatgcaacgatagagcctatgctcaatcactactatagcattctaacggaggaagcatat

SEQ ID NO: 71886 - DNA, 400 bp, Glycine max
atccttagagtcacctgcggctgcagcttattctggaaaatggaagctctttttcttatctttctagggactactcatatgctttatttggagttctgtagtgtcttataggccctgcacaaggcagatagatcaagtaaacacaaaatatgaaaatgaacaacaattatcaattaagcccaattatttgcctaagaccaaaaccgagttaaggtgagaaaataatagtcaaatagaggtcaaataaagccagaagaacgtgaaataccaaaataaaaatgtcaatgaaatttcccaacactttatcttttgcacttcggtgaaatacttaataaaagactaatgaaaagaaatgtactatagtaataccaccactcaaagaaaggaatgaatctgccac

SEQ ID NO: 71887 - DNA, 432 bp, Glycine max
  unsure (1)..(432): unsure at all n locations
actcagctggtaattataatctccatctaccttgtcttaggttgtaggagagcatcatagttcaaggaanatttgtcccagatttgggggagtttattgggtgacagcaattgtggtaagaagatgacaacacacacagtaaaatcaataagcagcatgtaaaagatgctaaaataaaaaaagaaatttcaaaaataaaagctaagtgtgtgctgttgtcaaagccaagtgaagctaaatgctaaaaggcaagtaatagaagttggaataaaggaaaaaaagggttgatctaaggatgaatgctctcctagaacttaagaattttacatcctaganaaaccatatattgtttgcaacccagcctcattacaagccaagaaaagtccttcggattcaatttgtgtggttgtgactgtatggcatgagatgaat

SEQ ID NO: 71888 - DNA, 479 bp, Glycine max
  unsure (1)..(479): unsure at all n locations
gtgcaagcttgtgtaatcgatacaaggatttggtaatctattaccagtgataagttntgannnatttataaaagatgtaactctttcaatggttttcaggttnttctaaaggttataactcttccaatggttttcttgactagacttgaagagtctataaaagcaagaccttgatttgcatttgaacaatacttacaacctttacaaacaacttttcctcatattcacttacaacctttgaatctctttgaacatcttcttgaacttcttcttgaacttcttcttcttcttcttcctttgcaaaagctttctaaagttttctggttttccaaaccttgaaaacagaagtgcgctatatcttttcattctcttctcactcttccaaaaggaattcgccaaggactaacctcctgaattcttttcgcgtctctcttctcccttctccaaaagaacaaaggactaaccgcctgaattctttt

SEQ ID NO: 71889 - DNA, 478 bp, Glycine max
  unsure (1)..(478): unsure at all n locations
gctagaggacttgttccatatgattntggagaaagatagtttacgtatggaagaagtattagaaaggaagaaagttggtcttattttgatattaatatctcctcaacattgttagacttttcttatattgataaaaaggatggattggaatctatttttttatattttattataaaaggaagctatgtaagaatgatctgaaaacaattgtatgtaaataacatggatacgtgtaacaaatatgtcagatttgcatgtcgatttatataataacatggatacgtgcaacaaatatgtacaaatattgaagattgctcaatgaggaagagaagttataggagcacataatttaattgcaagcttcaggatagaattaattttaaacgacggaaggaagacaaactaaacatggtctaatctatatgacgaacgtacaagccatactaaagataacttagcattcaatgacgcacttgtt

SEQ ID NO: 71890 - DNA, 368 bp, Glycine max
  unsure (1)..(368): unsure at all n locations
agcttaagctccttcaactgcacaaggctnnttaatatttgaagagtatcctngtggaaccttcacccgactaatacattgacaaataattatcttttccttcttggacaaagtatgacaagctgggggaaagtaaatcttcttcccatcagaccttggatgcaactgtgatcgtatccccatcctagctagatcttgatatgtattcaacccatacttcgtcatgccttgaatcgtaaggagcgcaccaatccactgtccatacatttttctacgaagcatagcatcaacacaatgtctaacgtctatgtcagaccagcacggaagaataaagaaaatggacctctctttccatatgcaagtgttac

SEQ ID NO: 71891 - DNA, 440 bp, Glycine max
  unsure (1)..(440): unsure at all n locations
agttccataagctgctntagtagttcttcanaaggagttnttactttataatattatatagtgcataactaaataggatattgatgtttttatttacatgcattaacttaataagaaacttaaccattagtaagttttaaactatatgattgacaaaagaacaagatgaagagtgaaagtttccaaacagtagtccttgacaaaacaaaaagctggtttgagcaaataaatcaaatcaacactgagaatgagaaataataccaacatccctattagaaaaatattcgaggatgagacatgaaaaaggtcaggattttcatgctggtaatgttatatctaacataataatcctaaaccatttatatcttgttcctatntntattcattgagaagcaaccatagaaacatgaggaaagggcctcttcagtgctcatatctac

SEQ ID NO: 71892 - DNA, 405 bp, Glycine max
  unsure (1)..(405): unsure at all n locations
attctatcaatagacctccaatctttaatggagagggttaccactactggaaaacccgaatgcaaatttttattgaggcaatagacttaagtatttgggaagccatagaaatggggccatatatacccaccacagtagaaagaattacaatagatggtagcacatcaagtgaaagcataacaatagaaaaacctagagataaatggtctgaagaggatagaagacgagtacaatacaatttaaaagccaaaaacataataacatctgccttgggaatggatgaatatttcagggtttcaaattgtaagagtgctaaggaaatgtgggacactctacaattaacacatgaaggaactacagatgttaaaagatctanggatagcacactaacccatgagtatgaac

SEQ ID NO: 71893 - DNA, 425 bp, Glycine max
  unsure (1)..(425): unsure at all n locations
tactaagcttatgatcaactctttctcttttttctctaactattctcattctttttttttactnntgtcttccttttcttgcacanaatttgtggcttttccactagtgatgatcatggaaggctaaacactcaatcaattgaaggatccactccaagcaagactaaatttgagttatggtctagtatntttaataggtgtgaatgttcaactttttcttcaatcctattttcaattttcatgattatgaatgggcttaagattgaaaatgaattagtttaaggattaatttcctaacttcaactttaatcacatattatttagacgatattccaacctaattttttatctaaatgaattttgggattaaattgattgaattaactctaataacattgattgaaccttcacaactngatcattct

SEQ ID NO: 71894 - DNA, 500 bp, Glycine max
  unsure (1)..(500): unsure at all n locations
agctnttaatacacttctttcaagatagcttggccggagccgcggtagtgtggtacactnaattggaaagcttccgtatccgtacttggaaggatctgattactgctttcctaaggcaatatcaatacaattctgatatggctcccgaccgcactcaactgcagaatatgttcaagaaagagggcgaaacctttaaagaatacgcgcagcggtggagagatttggcggcacaagtagcttcctcccatggnttgagagagaagatgatcaccatgatggtagacactctgccagtgttctactatgagaagctagtangttatatgtcgtccagcttcgcggacctagtgttcgcccgggaaaggatcgaggtatggttgaaaagaggaaagttcgattacgtttcctccacgagtgcgaatgccaaaagaatcggggcaacaggggcaaaaaggaaggaaggagatgcccatgccgtctcttcaacacccgcgtgggtc

SEQ ID NO: 71895 - DNA, 441 bp, Glycine max
  unsure (1)..(441): unsure at all n locations
ctaagcttctaagggaagtttctcaagagagcttctaaggaagctacctagtctatatatagaagcatgtgtaacactgggtgtaactntgatgaatgagagtcttgtgagacacaactcatagttcaacttctctacctctgttattccttcaatttcgtgctcccccctctctctttccctgcctctttcttttcctacattgaagcatcctctccaagcttcttatccaaggctcatcttggtggagaagctccttcttccatggcttattccctagtggatggcgcctcctctcacctcttctcctttgtcttccgctgcatctccatggtggaaaatcactattaaaggacctcattgaagctcacagattcagcctncatagaagccncacaagcaagcttccatcaagtggtaatcagagcacaagagcttcaa

SEQ ID NO: 71896 - DNA, 484 bp, Glycine max
  unsure (1)..(484): unsure at all n locations
agcttcaccatntctcctagccaaaggtgatggtgaacttgaagaagatccatgtgagctcttcttttcccctaagtcttccttcggcgaattcatattctctgacaaagcagaatcaagcaaagaacataaacttgactgagatgagaaagatcccatagactggaaagaccgtgagttgagtgattcaagttgagtttcatcaactgacattggcctgaaatgagaaggaggtgaatcagcaccaaattttcctttagattcaatcattccatttctagaagaagacacctcggaaatcttctttcccaaatccacctcttggaaattcatgtttcctgaagcaggcacataggaagtcttcttttgttccatttcctcctctgggaaattcacaatttctgaatcatgcacataggaagtcttcttgggtccgatgtcctcctgaaaattcatattttctgaagtatgcatatgggaagtc

SEQ ID NO: 71897 - DNA, 474 bp, Glycine max
  unsure (1)..(474): unsure at all n locations
tcctctcagtcacctgcggcatgcaagcttctctccttatttcctataaatagggggaaaagtgaaaggaatttatgtttagccctcctggtaatctgagattacttgaaattagtgaaaaaaattgttttcctgaagaaaatccaagccgaggtgcttccgtaacgtttccgtgggtaatttcgcgaagattttcaactgttcttcgacgttcttcgttcgttcttcggtcttcaaccggtaagttcccaaaatctaacttttcaattcattctatgtacccttagtggtcctcatttgtttcgcgcactcttattttcgtttcatttactttccgtacccccttttgacgtgctntagtcatttacttaagtcattntctcgcctaatcaaaaaataaaataaatttccaccgatcatttgaattataaccatccgtaatttctggtaaaatgaaatccgaccgttcggtca

SEQ ID NO: 71898 - DNA, 506 bp, Glycine max
  unsure (1)..(506): unsure at all n locations
ggcccagagaaggaatccatggaggaaatgcttaccacctcgaaagactggtaagcggtttctaatgactcctctgcggcctccacataaggcatagaggatgggcagctcaccaagatgtcttcctcacctgatacgatgaccagatgcccttccactacgaatttcaacttttggtggagtgtagagggaacaagtcccaccgagtggatccacggacgccccaacagatagctgtagggggggttaatatccattatttggaaggtaacttgacaggtgtaagggcctatctgtactangaggtcgatctctcccctaacctctcggcgggtgccgtcgaaggcacgaaccaccattgaactcggctttaggtgggaagcattgaatggaaatttctccaaagtgctcttaggcatcacgtntaaactggaaccattatcgatgagcaccttggccacgatgtggntcatacacttgactgacacgtgcannagctttatatg

SEQ ID NO: 71899 - DNA, 476 bp, Glycine max
  unsure (1)..(476): unsure at all n locations
agcttcaagctgttcaattgctccagaatgctgcacataagggcaaatgtctatatggtggtcggaagaggagcataaaccatagagtcttgcgataggtacagattttttattcatggccagttcggttaccatgttaaacaaggcgtctagtttaccttcaagcttcttagtttcagatgatgcagatgattntgtggctacctcatgcactcctctaatgactatagcatcatttctggcgctaaactgttgggagttggaagccatcttctcaattaaattcctggcttcagcaggggtcatgtctgcaagggctccaccactggcagcatctatcatacttctccccatgttaccaagtccttcataaaaatatcggagaagaagcttctccccatgctcaaaaggtacaaaatgttcagggtaatcaggatgcacactatgcctaactaatctatgaaatgtcctatcta

SEQ ID NO: 71900 - DNA, 515 bp, Glycine max
  unsure (1)..(515): unsure at all n locations
tgcccaggcgagctggttacctaaggttgaagatatttcatggcccatgtgagctagatgctagctngggcgagcttgggccagaaaattccataaaatgactatttttcccatttccttgtggttntcattcctggatctgataatcaatttgagcgatcgctcaaccttgcgttgcaaccggtgtcgaacgataaaagcattcctcagatgaaattagagtctaacaatgttaaaatggaaaacaaatgaaaaactctnttactagtaaaaatattgtttcgacctctagacctctacaacaactacaccttcatctgtttggtctaaccagaactgcatccgctagtggaaagaggtatggacttgttatagtggaggactactctagaaggacatgggttatgttcttaaaccacanagatgagtctttcgatatcttctttaaattccataaacatgtngaaagtgaanaaaaggagtatgcattacttcaatcagacagaagtgatcat

SEQ ID NO: 71901 - DNA, 444 bp, Glycine max
  unsure (1)..(444): unsure at all n locations
catctangctcagctccggtggacatcttgacttgctttccgatctgacatactctaattattctgccttctgcaatttccagatggggaatgcctctaacaggcaccttgtccatgattttcttcatacctcttatgtgcagatgtccaaatctttgatgccatattctgacttcatcttctttggagaataagcatgtggaggagtaactggattcttgaggtattcataggtaacagttgtcctttgatctgctgccctccattagaacttcactcttctcatgtgtcaccaagcattctgactttgtgaagtttacattgaatacttcatcacacagctgactgatgctgatgacgtttgcagtcagtcccttcaccagcagtactatgtccgactaggaagtcatcatggactgctttcccatccagagatctttctta

SEQ ID NO: 71902 - DNA, 458 bp, Glycine max
agctttgtgactcttacctgagtcagtgttccctactttctttatttcattaaacagcaccctcaaatcctgtcaaaattctggccttattttgttatctgtgtaacattactcatgttgaaattactgttaagtaaattatttgatagtgtacaattttagggtaaccagttcaattctaagtctctatcatgaatagaaataaaagcaagtcattgatgaataatccttatccttactactctaaacatgacagacacaagacaagaatcattgaccactacttttactagaaatcaaagccttgtattctggaggtacaaaagccgaacaatcaatgcttcatattaaagtttttgctgtcaccaccaagggtagaataacattcactcatgaatataattaaaataatgaataagtaacagcccaaattagtggagcacttacatgtatccaac

SEQ ID NO: 71903 - DNA, 316 bp, Glycine max
  unsure (1)..(316): unsure at all n locations
atgttcattgatctgagttgattctactaatatacaattcggttcatttaagcatagctttgaatctaagttctgtaaatgataacaataatataacctcaatgtgccatgacactcaccctntcttatcagattaagttagtacaagagttacttctttaggaattaatcatctcttaagaaaagagaaaaatattaaacaatttaattgttcaaaaattaccaacaagatgttagtcaaacgttcagattcgaagattcatgttctatggatgaaaaaataaaatataaaatttaattgttacgagacttacct

SEQ ID NO: 71904 - DNA, 385 bp, Glycine max
  unsure (1)..(385): unsure at all n locations
agctngaagaggaagtcgtcctgagagcatgagatgattctgtgagtgattgtgaggttctagaggtggaggagacatcctcaccgcttgtatttcttcaatccttcattnttctcttttctttgttgtaggtacttgatggttcttcaatcctcaccgctaaatcctctgttggttcttccttgtaggtacttgatgtaaatacctgtatatctatttaatgatgttttgtgtgttcattgtgctatcagaacttcattctaacatgtttttgccttgatcacgtagatgcatgtgttgttaggatcattcaatagtggaaactggtctgattcttagaacttgataggacggngctagttaatcgtattatcacgagggatcg

SEQ ID NO: 71905 - DNA, 412 bp, Glycine max
  unsure (1)..(412): unsure at all n locations
tagcgatgaagtaaccagctcgctngggtgagctaggttatttcatgatgaagcaagcagctcacctgagcaagctgagctcacctaagcgagctgctatgcaacctctacccctcatttgctataataagcgtgaaggggctgaaggaaaggggtccggaggttcctaaggtccagaggtccagagtgatgagaatcatgaaactggccaaatacaggctaaaggcccaagtggagaaggacgaatgcccaagtggagaaagacaaagcccccaagtggagaacgatgaaggctcaagtggagaaggatgaatgcccacatgcagagacactatcaagacaattaattgttgctgaaggcccaaactaatttgaaggcccaagttaaatatgttnttagttataatcttta

SEQ ID NO: 71906 - DNA, 380 bp, Glycine max
  unsure (1)..(380): unsure at all n locations
agcttctcggctcatactgggaacgcctctagttcaatatctgtgcagcctaaggcacccacccagagggaaactccccaagttccaactccgaacacgactcgaccagccagtaattccaacacgacaaggaacttccctccaaggccatttccggaattcaccccactcccaatgatgtacgaagatcttttgccatccctcatcgccaatcatttggccgtggtaactcccggaagggtcctcgaaccccctttcccgaagtggtatgaccctaacgcgacctgcaagtaccatggnggtgtcccagggcattccgttgaaaaatgcttggcccttaaaatcaagggtccaacattaatggatgctggatggctgac

SEQ ID NO: 71907 - DNA, 484 bp, Glycine max
  unsure (1)..(484): unsure at all n locations
ctgcggatntggtcttcgccagtgaaaggatcgatgtgggtccgattatatgctttattgatcatcctactaggacgactgagaaaactggngcatatgaagagggtgagaaagagggagatacccatgctgtgactgccattcctatacggccaagtttcccaccaaacccaacagtgtcattactcagtcaataacaaacctcctccttacccaccacccagttatccacaaaggccatccctaaatcaaccacaaagcctgtctaccgcacttccaatgacgaagaccacctttagcacaaaccaaataaacaccaacaaaaaggaattgtgcagcaaaaagcctgtagggttcaccccanattccgttgtcatatgctaaacttgatcccatatccactcaataattcaatgctagccataaccgcaaccaaggttcatcaacctccatgtttctgaggatacgactcgaacgcaacgtg

SEQ ID NO: 71908 - DNA, 432 bp, Glycine max
  unsure (1)..(432): unsure at all n locations
agcttcattcttagaaggaaacaacaccagganattattctaccatcattntaacaaaagcagagaacataaatgaaactaggagcagaaacgtaaatgaagataaaagcatgaaacgtaaatgaaactaagaacaaaaaacataaatgaaactaaaggtagaagaagaaacaagaacaagattgttattagaagcagaaaatgggaaaatgcattacgtgaatagtagcattagaacagaaaaatgtagaaaccctaaaccgtgctctgaataatgaatagcccccttacatgaatcccaaggctactatttataagggtcactcaaagccattgggtcctattacaatactctggcccaaaacgaaataaaaactgaacacaaaaaaataaaattgcaatctcctaattaagaaataactanggtaaaca

SEQ ID NO: 71909 - DNA, 469 bp, Glycine max
cgaccggatgtaagatacatcttcttcaacctttgtcatccttgactccatttcattgaagcgcatatccacttgcaattctaaagtatcaaacctctcaccaacaaaggtttgaagaccatcaaacctttccaaaatcttcgaaagaagagatgagtcttctccctcatgtccttcttcaccaatatttctagcacccttctttacccatgagccatcatgctccttaatataaccaaaggatgctatgactgaagcgcctataaggaatgatctcttgattggaacataaggttcagaatcaagagggatgttgaaatgttgaaggaagagggtaacaaggtgaggataaggcaatggggcattcaatcgcaatgccttatgcatgtgatatctaacaagatgtgcccaatcaatttgtaaacctttatgaaaggcccacatgacaatgagatcttcttcagaaacc

SEQ ID NO: 71910 - DNA, 407 bp, Glycine max
  unsure (1)..(407): unsure at all n locations
gctaacttcaagcctncattatcatacagtgtatgaggcgctcatngcaagtctgaagctaggaagagaagtcgaagtcaagaggctacgatgctacacaaactcgcagcttgtccaaggataggttgcaaacacataccacaccaaggaaacaatgttgctcaagtactatcacataatgaagtctttcattgacaatttcgaatgtttcaaagtgtactacatccccaaggaaaataatacatgagcgaacttattctccaagctggctagcactaagaaggccaagcacctcaagaccataatctagaagatgctctaaactcccaccatggatgctgaggaaattatggtcgacgaagaggaggaaggaaactagatgacccccatagaagaattcctaattc

SEQ ID NO: 71911 - DNA, 336 bp, Glycine max
  unsure (1)..(336): unsure at all n locations
aagatgatgacanaggtgatgaacaaaaagctcataagatcaaagaacaactcaagtgaatcaaagaatatctcaagtgaatcaagaacaagtcaagagttcaagaatcaagaagaattcaagactcacgaagaaagtctacaataaagaatcaagattcaagattcaagatctcaagaatcaagatccagattcaagactcaagattcaagaatgaagaaaagactcaatcaagataagtattaaaaaggtttttcaaaactttgaatagcacatgagtttttgacaaaacctttaccanagagtttttactctctggtaatcgattaccatata

SEQ ID NO: 71912 - DNA, 459 bp, Glycine max
  unsure (1)..(459): unsure at all n locations
agctntactaaatcaatcacacatacacatacacatattacgaaattctatgattaaaacatataagtactgaaattaaattcatacatgcacagatgacacgacacanagtttcctctgtcagtctgagttgtaattttttaagatgttacagttctaacttattttaattattctacatcatataattaaacactttaattagtcaccaactagtttaactaaaattctatttttaatttggttatagtcatttacgaaaattccctccactttaaactcttatgacttaattacccattttctaattctatggaatctagatcaccattaattatccccacttaatttctaactgtacttacattaattactaattctattttatgcttctaatntttatgtctagaccaaaatccaattattaacatcaaagtcattaatgagtngaccattatt

SEQ ID NO: 71913 - DNA, 395 bp, Glycine max
  unsure (1)..(395): unsure at all n locations
ctcagctgctctaattacttgtgttgtattattgtaagggttgattgccttnntgnttaagggtagcatttcttggtaaaactaactttccaaatgtttgccttcgcaggaatggccccgaggaagcttgcctcatagaggtccaggaaggacaaggcggtcgaacgaactagttccgctccggagtatgacagtcaccgctctaggagcgctgtacaccaacagcgcttcgaggccatcaagggatggtcgtttctccgggagcgacgcgtccagctcagggacgacgagtatactgatttccaggaggaaatagggcgccggcggtggacatcactggttactcccatggccaagttcgatccagaaatagtccttgacttttattgccatgc

SEQ ID NO: 71914 - DNA, 405 bp, Glycine max
  unsure (1)..(405): unsure at all n locations
ttaagcaccgccgctgcactgaataggaatgtaaaggtgaaacttctgttttattctttgaccacagagtggtacctagagatatgtcgcgggggtcaggagaccttggggacgtcaggtggggtgctattgcccaaaaccaagctggaccaatcccgacccaacccgggcatagtcaatcagtgagaacctgtgatgtacctaaacaggcgagctcctggtagtcaacagataaaaggaacanagaccacaaagcaaggaggcttgtggtggctggccagctgtngaatttgtgtgatatatgggttgtggcctctggtaatcgattaccaagggtgggtaatcgattacaaggcttaaaaatgaaggcagaaggctaagatggtctatggtaatcgattacca

SEQ ID NO: 71915 - DNA, 390 bp, Glycine max
  unsure (1)..(390): unsure at all n locations
gtctctgcgcttaatntacgttcatgcttaatgatcgtttatgagntaatggngtgtgtgatgcttaatcacataatgaatgttttatgttaaatttcgcttagtaatntaatntaaggttggattaagtggtgttgaactgataaaggataaattctcgcaacctatgataagagacttgcttgtgaatcaagggaaagccaacgtatttaattctgataatttctaattcaattntactcgctgtttaatatacaaaagcaaacaaccccccccccccaatttggtactatttcctactatctgttatgaacatttggtgtatcattgttcattgggaaacgacctangatcacnttctagttactacatttcaatatttatttgatt

SEQ ID NO: 71916 - DNA, 518 bp, Glycine max
  unsure (1)..(518): unsure at all n locations
tctcagtcacctgcggcatgcaagcttgtactccaatcattcataaacctaattcanactttttacatatatatttgtaatggtacatngtaacgaacattatntattagttaataaataanaaacctattaaaccaanattacttacatcatccataactgtagaatggatatgttcaaacatttatcacctagaattatctcagttacatctacgtgtgtgatgaanaagcaatctttgacattaggtatcccaaattttgccccatcccacgacaactcaatngacttttggtaaacatcaaacaagctcttaaccgattctctcaatggatcaactgtagccactgcttcatccatttcagtagatgcaaccggtttangcacacgctnttgtgcatcctgcgagggtaaaatccaaactcaattacgcanactntatttacccatttcactnaaaataatattcagatgaaaaaacananaaccttaacagatatatgcttgacaagatgtgt

SEQ ID NO: 71917 - DNA, 458 bp, Glycine max
  unsure (1)..(458): unsure at all n locations
accttaaatctaagctgaaggcctgggatggaaggactcactttggattatttttcgcaaatttgccaaatgattactgcatgcatgttggctagtctagtaactattaatctagtaccattacaaaatccttgcgtttggtctaagtttcttagtaacattataggactaccgatntttagtttgatacgatgaattggcagaccagatgtgtttagtgaattgagaaattcagttgtgattgattggaaatngccaactgttaatggttctgacttctctatataattagagcttaagtattccatttgttcacctatntatattatttgaggtagcatgcaaagttaaatagagaataaatactgagtagaccttangttttgtaaatntcatatgtgcataaataccttgaatcaaggaaagtatataatcattcacctcttcaacttgttcat

SEQ ID NO: 71918 - DNA, 488 bp, Glycine max
  unsure (1)..(488): unsure at all n locations
agcttgcagaattggtcttcgccagtgaaaggatctttgtggttcctaanagaaggcaaattgatcattctactangacgactgagaaaactgnggcaaataaagagggtgagaaagagggagaaacccatgttgtgactgccattcctatacggccaagtttcccaccaaacccaacaatgtcatttctcagtcaataacaaacctcctccttatacaccacccagttatccacaaaggccatccctaaatcaaccacaaagcctgtctaccgcacttccaatgatgaagaccacctttagcacaaaccananaacaccaacaaaaaggaattttgcagcanaaagcctgtagggttcaccccaaattccgttgtcttatgctaaacttgatcccatatccactcgataattcaatggtagccataaccccaaccaagggtcctcaacctncatttttctgaggatacgacttgaacacaacgtgtg

SEQ ID NO: 71919 - DNA, 496 bp, Glycine max
  unsure (1)..(496): unsure at all n locations
atactcagcttaagatgaatcaagaatgattcanagagntttgatgataacaaagatgatgacaaatatctcanaagtcaagaacacttcatgttaacaaagatgatgacttcaagaatcaaagaatgagttcaagattgaatcaagaacacttcaaggttcaaaaggaaatttgatttcaagaatcaagaatcaagtttcaagattcaagttccaagaatcaagatcaagattcaagactcaagattcaagaatcaagagaagactcaatcaagataagtattaaaaagttntttcaaaaactgagtagcacataatattttctcanaaaccttttaccaaagagttgttactctctggtaatcgattaccagattattgtaatcgattaccagtagcaaaatggttnttaaaaaaaaacctttcaactgaatttacaacgttccaattgattcaaaatggtgaatcgattcaatgatttggaatcgataccagt

SEQ ID NO: 71920 - DNA, 516 bp, Glycine max
  unsure (1)..(516): unsure at all n locations
atcctctcagtcacctgcggcatgcaagcttgcgtatgtgtaagtgagaaattgccttgcttattatctgcctctccctcaaacacaaaaatcacattcctatgttatganaaaaatcaaatctttgtatgaattatttattgtccttgggtttcaaggaatttgcgaagcacttaatagatcatgcgggtgctgcggaagcattntggaagatgaggtgcagcgtgaacattgtgaagttatccctctagccttcttcttggtattattttatttcaacctctcatgtngaatacactgatacaaaaaaattgcactacctacatatgcaacaaatccaactttaaaaaataaaaaaatgcagacagataggctcatcagtgtctgtctttccggtagttataggtaacaagaaaaaccagagacaccttgcctaaatggtagctnntaatattntaaattttctttgattatatggtnggnaatcctgctatggtagttgtggatggctttttg

SEQ ID NO: 71921 - DNA, 471 bp, Glycine max
  unsure (1)..(471): unsure at all n locations
ggggcactccacanagcacttcaatggctggaacaattacaactctcatatgttacaatcganagtgatngcaaagtggtaactgataacttcaatagttgttgcaaaggcatttcggattacaatgttaatttaaataagtgtaggcaacaagtctcctcaattccaaattctatgatgagttntataaaaagacaagttaatcttgtatagtttatcanttgacaagggcttcaagattttatgtttcttctcgtgagttntattacatcccttcttgtattattccatacaatatgaataaaatgatataactatgttttctttntaaaaaaatgatttcacaaattacattaaaaaacgctaggggaaaaaagcgcatcataatggtggacatgcaataaataaacagaaattaagtaacctttcaatattgtngatcaatgacgtgaatatttgcgtggatacatg

SEQ ID NO: 71922 - DNA, 474 bp, Glycine max
  unsure (1)..(474): unsure at all n locations
agctntgtcgggagatgctgaagtcagatgggaaatgtatccagcaattaatagtgctggnggattactgtgtatttggagtgatgaaactttcaaaatggagaagaaggtgaagggcaatggttttatatatttggaaggaacatgggctggtgatgttggaaaagtgactatagtcaatatatattcaccatgtgatacaactttcaaaagaatcctatgggatcaagccangcagcttagagctgcaaacaatggnggtctatgatgtattttaggagatnttaattgcatcagaaggtcatcataaagagttggagtgtgtcaaaggttacagggtgggggtagccacaanggaattaatgattggatcactgacttgaaggttgaggatgtgcctagtgtggngagaaaaattacctggaaccgaccaaatgggacagctaaaagaaaaattgataggatccttgtctc

SEQ ID NO: 71923 - DNA, 437 bp, Glycine max
  unsure (1)..(437): unsure at all n locations
ntgagccanaatcctgactcaccataatccttaccctcggaagcattataagaatagaagggaaatttccaatcaaagaaaaagagaaggaaaatttccaatgaaagcaataaaagaatagaagggaaatttccaatcaaagaaaataaagaaggaaaattccccaatcaaagagtgggagaaagcaaaaagaaaagaaaggaaattcccaatcaaagagtgggagaaagcaaaaaggaaagaaagaaaattcccaaccaaagaatgggagaaagtaaaaaagggaaggaaagaaagttcttgatcaaagaaactagaagaaatatgcagagaggtctttggaccggacaatatctgaacaatacaaaattgtcaccaaatgaacaaaaaaggaaggaaaggaaaccacaacctaaaatggtcttctccctttaatt

SEQ ID NO: 71924 - DNA, 424 bp, Glycine max
  unsure (1)..(424): unsure at all n locations
tgagggccatggcaacttacaaggtgaagctgataactccagagggagagcaagaatttgaatgcccagatgatatatacattcttgatcaggcagaggaaaatggcattgatcttccctactcatgcagggctggttcttgctctgcatgtgctgccaaagttgtgagtggcaaactggaccagtcagatggtagctttcttgatgacgaaccaaatgatgcaggaattgttctcacctgcgttgcttaccccacctcagatattgtcattgagactcacagggaggaagagctcactgcttaaataagaactctcatctttactttaaatgacaacatatgtttggtggcattttgctctgtaaaatctattgaactaaataanttttgtcagtgagtctaaagcttgagctntagtagtct

SEQ ID NO: 71925 - DNA, 484 bp, Glycine max
  unsure (1)..(484): unsure at all n locations
gtgctgcacgatgtgtgtcactaaatgaagaagaacgtcttgggcttgggaagtctgtatgggaatggaaatggagttaaattgcttcttcagagtccctgcttggagattatgcgttttgaagggtgtggtgtggttcacacacagaaagaggaggaagaagccttttgtgagtattataagtgtgtcaagtgggaagaagaagtcatcgatgaccatgaccatcaaggacgttgtggctgatcttacattccattcttgatgactgaggctcaactcgttcttctcaatgttcaaccgctataatacataatatatgttntgttcttgggcctgcatggaaagggaatgcactacaaacattcgtaccaagcctaattaacgtgattggtacgtatggagtaggcagagaatacaagcccttgacgggatgncatgaatatgatgattcgagctctttttctctgtctttcttcttaacttc

SEQ ID NO: 71926 - DNA, 477 bp, Glycine max
  unsure (1)..(477): unsure at all n locations
agcttagcaagcccanaatcagaaaccttggagttctattggcgatcaatgagtatgttacttgatttcacatctcggtggacaacttttggttcaagaccctcatgaagataggccaatctgaaaagacaaacaaaaagtacagtgatcaaaacaatcaagcatcatcatagattccactgtatgaagattaatcacaaatacggtaccctcttgctgttcccaatataatgttcatccgtatgttccatgtcaaagggcttacagctccaacatccncatgcagccattggtctagattgccattgtctacatactcatacacaagcatcctgtgaaaacagtgccacacttcaaatcttacatcttgtcaaaccgaacaaanattgatagcatcaattttttctttntagttnttaagagaagaaatcaatacctgtaggctccctcgacacagtatccaagcaacctaacaag

SEQ ID NO: 71927 - DNA, 451 bp, Glycine max
  unsure (1)..(451): unsure at all n locations
ngatgttgttcatgttcctactatggatcagattgcagatgttctgtataaagctntgtctccttcttccttcatttcttttaggtccaaactcaaagtggttgaaagaccttcttccaacacctcttgagcttgcgagggagtataagtgtatactttattccttttgtttttntactctctgtgttgtattctggatcatcactatagttagtagcgagttctctttctattgtatgttaactgactcaagtttgtagagttagttgacagttagcataactgtataaattgtcttgtaacaacttttcaattgggttgaataatacaagaggaagtagacgtgttcaatgaatttattcagcaaccaaantgaaataaaaataanaaattgaaaaataataacgtataaagtttgctaaactacagctcattgtcaataaataaaaag

SEQ ID NO: 71928 - DNA, 392 bp, Glycine max
  unsure (1)..(392): unsure at all n locations
agctntgagccanaatcctaactaccttataccttgtctccaggtgagaatgtcaatccttaccctcgaaagcaaaaaaaaggagagaaggaaaatttccaatcaaaggaaaaaagataggaaaggaaattcccaatcaaggagtgggagaaagcgaaaagaaaagaaagaaaattcccaaccaaagagtgggagaaagtaaaaggaaggaaagaaagctcctgatcaaggatcgaaagaaagctcctgatcaaggatcgaaagaaatcagaagaaatgtgcagaaaggtctttggaccggacaatatctgtacaatacagaattgtcaccaaatgaacaaaaaataagggaaaggaaaccacgacctgaaagtggtcttcttcctttgata

SEQ ID NO: 71929 - DNA, 469 bp, Glycine max
  unsure (1)..(469): unsure at all n locations
tgaaggtgagtggcccaccatcttttcatagtagaatactgttaatgtgtctactatcattgtcatcaattttttctccatcattgaggtgccacttgagctgccaggtctctccacatttgggcgtattcttttgaaagattcgtgccccatttttgcacatgttctatagttgcatcctattcgaagacattatactgacactgcctaacgaaagcaaccactaggtccttccaagatggactcaggaaggttccaagttagtgtaccaagtaacagctaccccagtaagactttcttgaaaggaatgtattagtaattcctcatcttttgcgtatgcccccatctttcgataatacatctttagatggttcttggggcaagtagtccccttgtacttgtcaaagtccagcaccttgaacttgggagggtgatgatattgggtactangaacaactcttctatggta

SEQ ID NO: 71930 - DNA, 412 bp, Glycine max
  unsure (1)..(412): unsure at all n locations
agcttgcttccacataattagntggaattttttactttntcattgataaaaaagaatttaacatcaattctaaacaatagttttagaatcgatgttgaatcgaacaatgttaatagtgagaagcttcaacatcggtttttactagaaccaatgtaaaaaatgtttttactaaaaccaatgttgtaaaggtaatttctatatcggttggtgccataatcgatgtagtttctacattatatatatatatatattggtccacaagaaccattttcttgatccatttttaaaaaaaacataataccgtgaccatgaagaacaaaactaagacactataatattaatataataaatgcaacatgaagtaactagtgaacttcaaaataacttatggtgaaccaatgatttgatgatc

SEQ ID NO: 71931 - DNA, 444 bp, Glycine max
  unsure (1)..(444): unsure at all n locations
tctactnttcttctccttagtctcctcttcagccatcccagtcatgtgttagtttgtggcctcagatatcttaagaaggagggggttgaattaagatattcgatactttttcttctaattaaaaatctatcttactttctacttaagttatgaattcccttaatgacaatcttcttaaatattaattcanatgaagcaacttgaatatgaatataaagcaataataaataaaggagattaagggaagagaaaatgcaaactcagttntatactggttcggccacacccttgtgcctacgtccagtccccaagcaacccgcttgagagttccactaacttgtaaattccttttacaagttctaaacacacaaggacaacccttcctttgtgtttagagattctttacaacaagagactcacagtctcttaatcccttanagaatg

SEQ ID NO: 71932 - DNA, 279 bp, Glycine max
tgcagcttctgaaccctctgagggcggttttctctcttcatttattccacctaaactcagaactgcttctctctcctggttcactctgtactctcttccctcaatcgtctcttcttctctatgctcaggaatgtcacctttttcctttatttctctgtgttgcctcagcggcgatactacagatccactttagctgaagttgcacctacacccaacgatgtgttttgtatcctcacacttacccatagcatcaccgttcctttcctttcttttctctca

SEQ ID NO: 71933 - DNA, 397 bp, Glycine max
  unsure (1)..(397): unsure at all n locations
actcagctttcccttttgcataataggggagaagtgaaaagattttggtcagcctcttaggcacttctctctctctcaaaattgctgaggaaaattatttccgtgaagaaaatccaagccgaggcgcttccgtaacgtttccgtgagtaattacgcgaagattctcgaccgttcttcaagattcatctttcgttcttcattttcttcagtcttcaacgggtaagtacctcaaaccgagcttttcaattcattctatgtacccgtggtggntcacattttggttcatgtanttttattctcgntttcatttgctttttatacccccttttgacgtgcttaagccatttatttaagtcatttctcgcttaatctaanaataaaaataaattccaccgat

SEQ ID NO: 71934 - DNA, 403 bp, Glycine max
  unsure (1)..(403): unsure at all n locations
agcttgaaggtgtgtagcccattatctntncatattatataaactggaatgtgtctactatcatngttatcattnttttctccgtcattgaggagccacttgagctgccaggtctctccacctttgggcgtattctttgaaagatctgtgcccctttcggcacatgttatgtagttgcatcctatccggaaccatatcaaaattgtactgatactgcctaacgaaggcaaccattatgtccctccaagagtggactcgagaaggttccaagttagtgtaccaggtaacagctaccccagtaagattttcttggaaggaatgtatcagcaattcctcatcttttgcgtatgcccccatcttccaacaatacatctttagattgttcttggggcatgtagtcccc

SEQ ID NO: 71935 - DNA, 424 bp, Glycine max
  unsure (1)..(424): unsure at all n locations
gatagacaataggcaattctgcttttctatttactgggattggccaggccagagcacttctcgaatggcataaaatatcacgatgttgtggacattgtggagagataacagtccctatggaagctgggagacgtaaacagtgctcaaatgaatcatgcaaacagaggatatatccacgacttgacccggtttgccatcttctgttctaatagttgagtgatcaatggatgatcaggttntgctgaattcatgtagtcaccttaacttatgcaggtggtcattatgctactnattgatcgggagaatgaccgcgcccttntgagcaaacaatcgagatttgtacctagaatgcggagctgcttagcaggttttatagaggtgcatgctngacctaatctacaaccacttcatttttagttactta

SEQ ID NO: 71936 - DNA, 430 bp, Glycine max
  unsure (1)..(430): unsure at all n locations
agctngcttctatgtccttntcattgctntaattgttgagtaatccttgannaaatgtcttgttaaaattccattggtttagctttcatttcattntatttggtctttggttattacttgtctctntgtttccttgtttgttggttgccatatanggaatcggaaggaggattggtgccatcccttgaagaatttgagttaagaagaaaggggccaaccaccttaagagctattggactaagaagcactccaaattgagtgaatcaccaaagagagaacaaccaccaaaattgaggactgttttgtaattntgtaatttgcaatntacttaccttcattgctttcaagttttgtaacaaaaaggcgtttcattggaagtgtgtgggggagcctcanttggttaccaaacttccatttgtgtgaataattt

SEQ ID NO: 71937 - DNA, 464 bp, Glycine max
  unsure (1)..(464): unsure at all n locations
tcttctccaccacccacaaccaccggtggccacctcgagccgccgtttttngccgttgaagccccacgccaagaggaacactntaatcggagcggaatcttcaaaacttcgaggatttgactgagaatgaagcctccaatcttacctttgcgatattctttgaggtaaccatgattctaagcctgttccttgttagttggagcctctctatgcatctcttctgacttgggaaccattattggatgtttttatacttcctttgaaaaaccctagagaatgagacattgtaaaagttatctttttaaaacattgatgttatttttgtgaccttcactaaaccccggtcacattggcctgatcagaatttcaaaatgatgtttcctttttgtagaatctgaaacacccctcagctctttantgttgacagggggtattgactctgaaatgttgtcataccttgttct

SEQ ID NO: 71938 - DNA, 497 bp, Glycine max
  unsure (1)..(497): unsure at all n locations
agctngaatctttaccagaaagcttcaacctttacaactatgtatggagctagtgatgcttctgagttccaaaactccatccctaaggttgacaccataattnttcacattgaggatgaaccaactattcacatagagcatttctttgacatctcttctctggaaagcatgggtatgaacctgaatgaaaccatgctntgttgtggtatttgaggctactacaatgacgtatagacaatatatccagagctaatcagaatggtttggcagaaaactaagttcaacataggacacactatggtctccattgtgctaggaaagacaatgactctcaacatagagaccatagcccaagctattggctgcatgagggaaggaagcaaatacaatagcaagtgggaacaagtgtgcggggataatgttccaagggctctntacaaggacaacgctcagaaggcccaaggaaaaaaggcatctacaatctatcatgtgatcta

SEQ ID NO: 71939 - DNA, 435 bp, Glycine max
  unsure (1)..(435): unsure at all n locations
actcagctatccttaggctgctccgacttactccccggccccccggtgattattccaagcccctacntttgaggggcaactcccaccttatgaagactatcccgggcaagacgatggggaaggagatacccatcttggccccctgctccacctcanagatccatccccgcatgaactaccccagccgaacatagtccgccatatcccggcctcacccatgcccgtaaaagaatctgttcccttcgcggaagataggggaaagaatgaggcgcttgaagaaagggtgagggcagtcgagggcctcggcagttacccattctcggatttggcagatntatgtcttgtgcccaacatcgtcatccctcccaagttcaaagtaccagactttgataagtacaaagggacgacatgtccaaaggggcatcttcggatgta

SEQ ID NO: 71940 - DNA, 252 bp, Glycine max
aattctgaaaagaaagcacagtgaaacataaaaaaataatacatactcgtgatctgaattcaaggactgagttttagagaagggcaagttcaccaagttcttatagtgaagagccttatgaaacttgtagggtgcaatcatttccttctgattgaaagtggacatgttcagtacatattttgtgatgtccttattcggtgaaggactctagtaaaaaggaaaatgagtcgccccctactgagtaaaataaat

SEQ ID NO: 71941 - DNA, 486 bp, Glycine max
  unsure (1)..(486): unsure at all n locations
attgaattaagacgttcagaaactgctggtaatcgattaccatatttgtgtaatcgattacacagtgcanattntgaattcaaattttaatagttgttgtgaatcagttttggccactggtaatcgattaccagagagtaaatgtgttgaaaaagactttctaacttaaatttcttggccaaactttgtgctacttcaataggaattcccttcctatttaatataccctttctaagactctagagactgtcttgatcatccatcttaaatatctttaatttctttgtcttgaattaaagctttgagacgcatgtgaaactntggcatcatcaaaacattcagctagatcctttgtctacaatctcccnctttttgatgatgacaatccctganatcaagacaagctatatacaagatgatagcacgttcacacaacccttacttccnctatctttttggctgatgctaacttacttatgataattc

SEQ ID NO: 71942 - DNA, 480 bp, Glycine max
  unsure (1)..(480): unsure at all n locations
agcttncttgagaagcttccttgggaagcaagngntatatccctccaatagctaagctcacccncatgggaacacacacccctccaatggctaagctcaccccccccccccccaaatacatgaaaatacaaaaaaaaagtccctactacaaagactactcaaaatgccctgaaatacaaggctaaaaccctatactaccagggtacccgtaatttgtagggtagtgtgcccttaatttgtagagtaccctacaaacctaaaaatggccaaaatacaaggcctagaagaaggaaaacatattctaatatttacaaagataaatgggtttatacttagcccatgggcccaaaatttatcctaaggctcatgagaaccctagggccttctcctgcatctctggcccaatcttcttggagtcttctatccaatgcccttggggggtaggatngcatcaataatttcgatgcaacaacaagtaac

SEQ ID NO: 71943 - DNA, 409 bp, Glycine max
  unsure (1)..(409): unsure at all n locations
acccggtgccgagaggaacgaggataatgtctacttatgagtgcgtgagctcagttgacaggtgggcaactggagatggtgtgtttatgtntgacttgtggaagtgggagagttgatttgcgccatcgcccgatcgccacctagtaccatatatgacgggtaccccataatccactaaccttgatgtgagaaagcgtggaagagtcagtcttcctacttttgtttgttgaccacagagtggtacctggagatatgtcgcggcgtcaggagaccttgnggacgtcaggtggtgtgctattgcccaaaaccaagcttgaccaatcctgacccaacccgggcatagttagtcagtgagaacctgtgacgtacctaaacaggcgagctccttgcagtcaaccaataaaagaac

SEQ ID NO: 71944 - DNA, 483 bp, Glycine max
  unsure (1)..(483): unsure at all n locations
tcttcagtcacctgaggcatgcaagctggcaaccgatatcaattacctacaccggttaggatgtcttgattcataacaattagttaatttaggtggcatatattttatttttcttaatattaagatattgagtttaaattttgtatatataaaaaaaatgcacattaaaggtgaaaatttcaccatattatatatgttcgtgtcccgaataaagttttttttttctttctttcaaatgaagttgttggttgtttctcataaacatttgatttaaaaaatactactccaacactaagacaaagtgatttagggtgcatttaattgtgtttttggttgtcttaatttttaaatgatcttgtaagacaancttttatttttaaaatctaatttctaggaaatagaaatgagaaaatataacttgaaagtgtangagaaacataaatgatagaaaatcttatatagaaaactaaaacacattagaga

SEQ ID NO: 71945 - DNA, 487 bp, Glycine max
  unsure (1)..(487): unsure at all n locations
cgtgcatttccaagtacctcagtttcactatccacatattcaccaactcagtctaaacatataaatgaaaaccaaacaaaaagagagaaggataatctaacctttgaaacagcaatgagactatatgggatttttgtgtgtgaaagagagagacagagatctgggatgagagtggattttggttacaaatgaaggaaaaagaagagttttttattttagacagaagattatactgatgggcaaagacaaagaagtgagagaaagtcacgagagcattattaatcaccaaggctttttgggaactcaaatcactttctactttctactttcttcttcttcactcaaaaaaacaagcttcacaacacagaatctatgagatggnggagatgaatgagatacatacacattcgtataatntaacatttactatgactctngtgtttcttaaacnaggccactggttattaaatatattataaattataga

SEQ ID NO: 71946 - DNA, 485 bp, Glycine max
  unsure (1)..(485): unsure at all n locations
cactcagctatgatctatgccgtatgggcgttaaanaactatacataagtaataatcaagacatatattcaataaaatatttntaagattgtgataattcagcacgttaaagttgcatcgctaaaaattctttgtgagcttaacaatgtcaaaatgtaaacttatatagctaggttgcatattattatcataaactagattttaaaccttataatgcatgggttcatttaaattgcatatntttaatatatntatatttattatttatttaatatataaaaaatttatgcagatacataaataaaatgaattttaaagtatttagtagcatactaaatataattatatgaaaatttagaaatatgagntaatatatntatatttnttaattaagtcgatgttgcaaaaaataatcttaagtataataaacattattatgattntttaaataataatagtgatgcaatccttataataaaaataaa

SEQ ID NO: 71947 - DNA, 401 bp, Glycine max
  unsure (1)..(401): unsure at all n locations
tcatttaattgtctttgggcttgtcaaccacgatcaacaaagtactttcgacacctactatatgtggatttcaccaaggctgttatcggtatgttgcgacaatccttcaataccttatttacacatttggacaggtttggtgtcatgtgaccatatctacgtccttcttcatcataagtcatagtccaatttttcctttgaaatgcgatcaatccatgttgctatggctagacatcaattgacgaaattttctaaatattgatcaaatatatgcttgcaacgagtgtagcctgcataaaattagttagcaataacaatntaaagtatatatgaaacttaatataacttcatattataagatatatcttacccagttcttcacatttcttttgtttggcatg

SEQ ID NO: 71948 - DNA, 413 bp, Glycine max
  unsure (1)..(413): unsure at all n locations
accttatatactcagctgttctgattttcctagttcttaacaagctntgaacaatatatttgttcttcattaactgtctnntggcttgcngccacgctcaacaaagtactttcgacacctactatacgttgatttcaccaatgctgttatgggaatgttgtgaccaatcctttaaaccttattgatacattctgagaggttcgttgtcatgtggccatatcgacgtccttctctatcgtaagccatcgtccatttttcctttgagatgcgatcaatccatatngctatggttggactcagttcacgaaatttttctaaattttgatcaaaaatgtgcttgcatggagtgtangctgcataaaattagttatgaataacaattttaagtataaattaaagtaaaataaacgtga

SEQ ID NO: 71949 - DNA, 454 bp, Glycine max
  unsure (1)..(454): unsure at all n locations
cttacccattctgtttanggttcttatgatgatgcttgtgtgctgatatgtctgatggaaaattgatagagatgaagggtagaattaacctatggttaaaaggtgagaatgtagtgatatgagtggaaaagtgtgatgctttaagggtttgaaaagccaaatctggatttagtggtaattggaggttagagtgagttaatcctagtttgaaatgtcatttatgactgtgggaaagcttgggctgtgcacaggaggaaaatgagtgaccaaagtgaaggcaagagccatttctagggtaaattgtgtgttgaggagtcaaattttgattcggtagagttttcgtcgtataaccagtttgagagagtntagattaatgttatagactttgttgagatgagaagttgctccanagttaccccattctcatttcacttctcacacctttgaaaatcac

SEQ ID NO: 71950 - DNA, 416 bp, Glycine max
  unsure (1)..(416): unsure at all n locations
agcttgagatgaggaagtgttgaatgttgtaactttctgtttttattgtngaccacatagtggtacctggagatatgtcgcggnggtcaggagaccttgtggatatcaggtggggtgctattgcccaaaaccaagcttgaccaatcccgacccaacccgggcatagtcggtcagtgagaacctgtgatgtacctaaacaggcgagctcctagcaatcaacagataaaaggaacaaagaccacatagcaaggagggttgtggtggctggcccagctgtgaatttgtgtgatatatgggttgtggccaatagtaatcgattaccaagggtgggtaatcgattacaaggcttaaaaatgaagacaggaggctaagatggtctctggtaatcgattaccacggngtgtaatcgattacca

SEQ ID NO: 71951 - DNA, 442 bp, Glycine max
tgaagcccagctcgcccaggcgagcaaggttgttgcttctgtatgtttcttctggagggcccaagtgggcctggttgctattagcaccctccttcttactaaatgcaccccccttctattgtgttgtaattatttgtccgtaacgttacgaaactttgtgaatatcggaacgatacttattttccttccgcaaggatacgaatccttacggattatgtatttactcttgtttagctttcgaagaagttacggaaactcacggattgcgcaaaaacacctcttttcgacttgcgccacattacggaatttcacggatcgcgcaagcctgcttccttttgatttctgagacgtctcaggacttcatttattgtgcggcaaaggacaccaagtatctcacagcggctaaccaaaggatgcatgtcatcaagtgataatccccgga

SEQ ID NO: 71952 - DNA, 449 bp, Glycine max
  unsure (1)..(449): unsure at all n locations
agcttanggaaggtgcattgaatcaatgtaaacatgctatcttaccttntctctaccttcaaacatctttattgcaattaagctaacattttagagcttttgagaagtccttcatattcaataattttaaattttacaacctctaaactcatttggcattgttattgatttattatttaacatttattgtacaaaaaaacgtacatgatttttagatgacacgtcctcaaataaattcaaacgagttacaataaaaaataagcacaccttataaatgtgtaccaaagatttatcaattgttgatatctgtgatgtanagtttatagaattctaccaataccaaagttgtaggtatatgttntttgaaattttaccaataagtttgagtttaactacattaaacagttgtcggaaaagtattttaggctttagcttacaataattatgtt

SEQ ID NO: 71953 - DNA, 432 bp, Glycine max
  unsure (1)..(432): unsure at all n locations
ntgagtctaggttaagtcacttaacaaattagggatctgacttaatattctatgattaatcaccaaagacattaggattaatcattttagtttgaattctggatgaattgaactgcgatattgattaggaacgaattacatacataaaattctttggatctcatctcagtcatgctcttctgctttcaaatctgatgttgctccaaagtttcttcagacaaaccagaattggtttattctcgtcatagtgaattcttaatttgatatagcggaaacctttcttaanaatgtacaatatcgtgacattcaaagcgaattgataactccatgcatgaatgcttctaacattcacatgttgatacaataactcagatacttattgtttcttattacaacagactaggttcatttccctatctcaagagtacaaac

SEQ ID NO: 71954 - DNA, 453 bp, Glycine max
atccttcagtcacctgcggctgcagctgatgaacattatattaactatttgtgtatatctggaatgtgactgctgaagggaaagagagactatttcaaatacttcttctttctgggtctcgaacataaataatattttttttaaatataaataaatctcaattattcattatatcatgtaatgaaattatttctaaaatatcttccatataataaaacttaatattttttatgtgtaatatcaaattttaataaaaaataatctaaaaaatatttattctttaattaaaaataacacagtctaataaaattaattaacttttttaataagtacatgaaatatttttttcttcttcttagaatcgagatcagataaataaatactactactataatggagtagtggtagcttatttatttaaattaagtgtactatataataacttcaatattt

SEQ ID NO: 71955 - DNA, 250 bp, Glycine max
atcacacgacagagtcggtgcacagaggagattcacatttatcttgcgacatggatgcataatctacgtcagaaatccgcggaccaagacttggaagaatggaacggacgaatatttgtcattacatactcgatttctttcctcttatgcacaccaccattcattcggagaggtgatcaccatatcacgcggatgaagaatcttcccaatatccaacaaaacggaccgtgctttcctattacatgtcaac

SEQ ID NO: 71956 - DNA, 482 bp, Glycine max
  unsure (1)..(482): unsure at all n locations
agctngataatcattttctttgtctcataaaatgatcttggaagctntccatgttcaaatgcatcttgcaagagttacaaaatcattgccatggctttgtcattcatcccacacatgcatttaatatgatacaatttcaacaaaaaagacaaccttgaatattttgaaccttcatacaagggttgttctgcatctnttggtaattcataaaactcttcggcttcattcctttcttgagtggtttttggaaccatatcttcatccctatcaacctctacattgaagcaatgggcacttcattcgtatgctgcctatcaactctaaaagcatcattaatcatatnttggataggaattttaataatgttgtcttgaactacatttgtatgtgagacatttcgagtttcttcacttctagactccccatggtacaaccaaaatgtgtaccctaccggaaatggtgtacagattaagtgatcataa

SEQ ID NO: 71957 - DNA, 439 bp, Glycine max
  unsure (1)..(439): unsure at all n locations
ntgtccataanaatcacctaaaaagccatttaaggtccaacgccttatacgagcctctntgcttntattggttaacgtggactttcgaaggcctagagtcaacatgtaactntgtcactactttcaaaaaccaagagatcattaatggtccaatgccttaatgtttctctcccttcaaaagaatcaaaaggtcgttcaaatggtctaacgccttaaacgaagtttgtttggtcaaaatatatcttgcaaaaaagggataaaaacaacttaacccatgcccagttctcgaagaactacgtaggtttgatttcgttatcacaattgaggaatacgtangagcaagggaaacacccttgtcgaccacaaaaagataaanaatataataggcataaaaagacataaaaacgtanaagggaaaataaaaccaaattgagtcata

SEQ ID NO: 71958 - DNA, 410 bp, Glycine max
  unsure (1)..(410): unsure at all n locations
agctntgttctttnntgtaaatgagaagttcttatctcatcacgttatctaaaaaactctgnggtggatccaagtgctccgatcattcatttgcatgttcatgttttggtggcatactcaccgttgtttatttctttaggaatttcatcataactaagaaaacaccaaggcacccctataacactcgatccagaaaaatggataatgaagagggcgtgcacgaacagatgaaggccgatctatcggctttaaaagatcaaatggcttccatctcggaggtcatgttaaaactccagaaaactataaaggataaagccacgacaaccgcctccagtacagttatggaagcggagccggtgctgcagcccgccttaaattctggccgagacagaaacacggcagtgtttggt

SEQ ID NO: 71959 - DNA, 480 bp, Glycine max
  unsure (1)..(480): unsure at all n locations
tatgcgccatatttcctacgaacgttcacttgcacatagacatcctattaactaagaaaaatgcacccatatacaatcaaggtagcttccttacctagattatntacatgtacttccaaagtgtatttgccatttacatcatacacgccatccttgtcaaaattacacacatgcatactcaaagcatttcggggtaccaaaaattgcacatgcgctcatcttggtatttctaatatctatacatatacaaacttcatgatgaatcttgactatctacacaataaagtgctacattntcatgccttttttttcaagtttttgctacctaaagccgcatgcaaattcaagcatattttcctttgtaactaaaattgatatatatatntttttggaaatgtttcttcattcacatattatatatatttttgtgaacatttgactacaaaatatatatactacatcaagattcgtatataccaa

SEQ ID NO: 71960 - DNA, 406 bp, Glycine max
  unsure (1)..(406): unsure at all n locations
ctgccgctgcagcttaagaaaatcaacgacatactttaactttatgntggatgatccccngaaaatatcgagacgctcaaaattgaaaattgatcactcagcaaattcaaacaacaataacttttgactcggatgtccgattgtgtcccgagtatatcgagacgcttctaattgtaaactggagatctgtgaaaaatctaacgaccataacttttgactctgatgtcccaatgagtcccgcaatatatcgagacgctctttatatgaaatagaagcactgagcaaattctaacgacaattactttttactcagatgtccgattgtgtgccgcagtatatcgagacgctctaaaatgaaaactgaagctctgagaaaaatcaaacgacaatatctctttactcggat

SEQ ID NO: 71961 - DNA, 429 bp, Glycine max
  unsure (1)..(429): unsure at all n locations
gacctataaaactaagctntgttctcattacgagcgtctcgatatattacgatactcaatcgtatattcgaatataaagttatggtcgcttgaattgtctcagaacttctgttttcaattacgagtgtctcgatatattacgggactcaatcggacatcagagtaaaaagttattgccggtcgaatatgctacaagctttcgttgtcaattacgagcgtctcgatatataacgggactcaatcggacatccgagtaaaaagttattgtcgtttgaattggctcagagcttctgttttcaattacgagcatctcgatatattacaggcctcaatcggacattcgagtgaaagttattgtcgtttgatgtttctcacagcttcagctttcaatatcgagcgtctcgatatgctacgggacacaatcggaca

SEQ ID NO: 71962 - DNA, 519 bp, Glycine max
  unsure (1)..(519): unsure at all n locations
tacagtcacctgaggcatgcaagctntggtagataccccgtgtactttacttccatatgcataagtgttgtatcccaacataattattntagaggtaatataataactaaaatcagaacaatgtctggagacataataactaatgatacaaaaaccagaaantttactatccaattatctacaaattgtgatatctttggcaacaaaatctttataaataaagcagatgttgtagatttgcaaccagccaaagaaaaaaagatnttatgactagactntatcgtacatgataacatatcagtcaccattacaaaagattacttattaatttctacaaactcacaaatgtcacctataatagacgaacttacatcagaggtgcgaacaaagcatgatagtggnggcatcaccatgctntgttcacaaaagcttttgctcatacgaaagatcttgttagagacctaacgcctatggctattaaccctangtgtacatatcttctatttgtgctaagaagtt

SEQ ID NO: 71963 - DNA, 435 bp, Glycine max
  unsure (1)..(435): unsure at all n locations
tgctgaggtatgattcatatgctatattattaatacaatttagttataggttgctaatgacctaatgtataatcgatctttcanggtagccaggccacccaaaatggntttagtcccctaaattaaaaaaaaaaacagaagtcattttaggcttattgtataatcgatttatttttaataaaataataaaacaccaaatttaactaccaaaaactaacaacacccaacaaatattgactagaggcaaatcanatttgattggtgtcttaccatatatgatcacagtgttcccaatcatgcactactagaaaatagaatttttacatcggttatttaagactttcaacattgattagtgaccaatgttgaaagtaccaacgttgaaagtattattgtaatatcnnggttataaatgatgtaatgtaaaatacacat

SEQ ID NO: 71964 - DNA, 482 bp, Glycine max
  unsure (1)..(482): unsure at all n locations
agcttatcccatgccaccttaatggatgttgcatcatttatattctctatcgcatcatcatctaatgctngaaagatgaggaagaaagctttcttggctctctttcttgaatcctttaaagtttccttttgtgcttgggatagtgaagtctaatcttgcggtctcttataggcttttttaaccatttcccaaacatcatgtgctctaagaagggccttcactttgatgcttaaattgtcatatgtgcttccctttataagtggaacatggaaggatgccgctccattgctggccataactaaagaggaaatatattaatataggtgcttctctactanatattttctggataanttgatctaaatatttcatgtataagtgacaacttctttcgctccatccccgctggggcatagaacccatcactgtcttcggtgtgctatcggaggctttgggagagtccgaataggataacactcatc

SEQ ID NO: 71965 - DNA, 384 bp, Glycine max
  unsure (1)..(384): unsure at all n locations
agcataaaccatagactcttgcgacaggtacaaatttctgattcaaggccaattgggttaccaagttaaccaatgcatctagtttgccttcaagcttcttagtttcaaacgatgaagatgagtttgtagctacctcgtgcactcctctaatgactatagcatcatttctggcgctaaactattgngagttggaagccatcttctcaattaaatttctggcttcagcaggagtcatgtctctaagggctccaccactggcagcatctatcatacttctctccatattactgagtccttcataaaaatattggagaagaagctgctccgaaatctgatggtgagggcaactggcacataatttttttaatctcttcagtattcata

SEQ ID NO: 71966 - DNA, 492 bp, Glycine max
  unsure (1)..(492): unsure at all n locations
agctntaatattattatgcctcagcttcaatcctagtgtcgatcacctatatagtggtcccaacgacactaagctataatattactaggcctaagctccaatcctggtgtcaaccactgacatagtggtcccaacgatatatgtaacatcatgtattttgtaaaataaattaaaaagggttttatttaaaaataaatagagttttagaaaaataatgagatttttataattaaataaataaggagaaatattnttattaattaaaataatagttttaacgtaaataacataaatatgtattattagaaaataaaaggatactttagttattcatttgataggaagtaaaatagagttcattttataaaataataaaataaataaaaaaatagagtaaataatacgctcacagtatcttaactataaatagagacatattangtcaagttntacatttatgataagtttctacgctctcttttccttccattt

SEQ ID NO: 71967 - DNA, 319 bp, Glycine max
  unsure (1)..(319): unsure at all n locations
ctgttgcgctataaaccatgcacattntatgtctgtatcccatcatcatgcactgcactgccaaatgttgcaagtaagaagagataaattntctgggctctcgtgtccataaaatacatttgtgcatgcgccgaataagcatctcttcatgcatccattcgatgatagatgttgaagtattgatcaaaccggatttttcattctagtaaacatgggatcaaatcaaacacctcttttcaagaaaagggtctatcaagtcaaaatcaagagcttagaggtcactagtttacgagagttggggcaattaatgggtcaactt

SEQ ID NO: 71968 - DNA, 441 bp, Glycine max
  unsure (1)..(441): unsure at all n locations
agctntacttcaatgaaaacatgtgtctcaacctactctttcgcgggagggcgacgcgtgacttcgcggatgcgtgttccacgaaaggaatacgcgcggagtcgccaccaacgtttatttgaggaaaacgtcggaaaaaccggaaaagacgcgatctacgaacttttaagtgaaaggttcgagagttgtatttacgcacggggaaggtattatcaccccacacgtccgtcccaagggacgaaagcctttaatcgaatgtgcaaacatgactntgatttttacgttcccttttatgtccttatatcctttataccctttntatanttttcctttnttgtggtcgacaagggtgtttccctttgctcctacgtattcctcaatttgcgatgaggaaatcagacctacgtagttctttcttatcaagtgattcttttttactta

SEQ ID NO: 71969 - DNA, 384 bp, Glycine max
  unsure (1)..(384): unsure at all n locations
tttcataatagaacactgtttacatgttcattatcatcgngatcatctctctctctgccataggggcactacttgagttgccaggtctcaccacctctgagcatactctttgaatgactcattgtctctcttggacaggttgtgcagctgcattctgtctggcatcacgtcagaatcgtattggcattgcctaatgaaagcatccatcagatccctccaagagctaatctaagagggttccaggttagtgtaccagataatagtctcctcagccaggctttcttgaataaaatgcatcagcagcttatcgtccttcgcataagcccccatccttnttgtatacaaccttacatggttcttagggcaagcggtccctttgtatta

SEQ ID NO: 71970 - DNA, 423 bp, Glycine max
  unsure (1)..(423): unsure at all n locations
agctntataagcgcgggtctgggagactaatgtcatgtggtctcgatatacgaagatgatgttccgagtacattggatttggtacgaccatgccctcctgatttccagctgggaaattggcgagtggaggaacgccccggcatttacgcaacgagcataatgtaaacctttacggttttaaaagctctatagttgggcctaggctntagagtttttcctatagtaaagctttgtgtcgtttgggttttgaattataatacaaggatctttcttcatctgttcctacgtctctacccattctcattcattngcatgtttacttctttttctgaaatggcagatccaatgacgagtcctccgaaggtactaatacctgggacccgcctatcgacttcgagcaagaaatgaatcaaacggaagatg

SEQ ID NO: 71971 - DNA, 423 bp, Glycine max
  unsure (1)..(423): unsure at all n locations
cgttagtgtgtgtttaaatgtctanaataaaagacaaattattgtttattgtctctttgaagaaaattttatcagcgaaaataaaatattctgaatatgaattctgtagtatttctttaattagattaggtcggtgttaatgatttattagtgtgttaataattcatgaacgtttcaactttcatttaaaaaaattagtagatcatatttatttgaagaaagtattctgagtatgaaatttattttaatatgaagttgcagtatttttttaattagattaggttcattntgttgtgttaaaaatcgataagcgttcaagttgaaaggatatttgatgatgttttgttgcatcttgtatcatatttaatttaatatatttcgagtaatttctgtattaccctatttcattttgaaggtattatt

SEQ ID NO: 71972 - DNA, 452 bp, Glycine max
  unsure (1)..(452): unsure at all n locations
gttatgggtgttcctaatttttctagcattctgtntgcaacgtattgctcgatntanatcttaattantttggtaacaatttatataactgantttgctagaatttgatttgttacacagtttttctttcttnttgggcttcgaagttttttttcactanaaaaaaataaataagagaggatttgattctgctagcatctctagtactcatattacgagaacgcttgatatctttgggagaagaagaaaatattgtgagttcaatctgttccactaacaaagttaacattctaaaaaaacctaatattgtcggatatttaggtgtttcttgtttgttggtaggattagtgttcaagttgcctatcaagaaaaataaaacagttagtgtgtaagttatctttaaaaagtacaacctgaatagggtaagggcatanttgcactaataaactctc

SEQ ID NO: 71973 - DNA, 292 bp, Glycine max
  unsure (1)..(292): unsure at all n locations
agctnggaatcatcctcctaaagtatgtgatgcacgtatatggaaggattgattccagcaaggtcagcaagtatccccccaatggcctttntgtggcctcttaacacatgcaataacttcacctcatgctcaagtggaaggatgttggatatgatgattggaagcttttgagcatcgtctaaatacgcatatttaaggtgctcaagtagtggtttcaactccaatgaaggtggttgaatggtggaaagcaaacgaaggttggtggttggtggttggtggttggtggttggtg

SEQ ID NO: 71974 - DNA, 393 bp, Glycine max
  unsure (1)..(393): unsure at all n locations
tactcagctcttggtcaaaggcttatgtatgtacaatcatggccttcatcatgttctcgttaatacatttcattctaaaattcagagattcatgcanagattattagtcacagctagtcgttcactcacaatttaacgtcacaccctcaccgattntggttcaagtttttctttctcaatcaatctgtctactgactaacaattctaaatgcaagttcacattcttgttctttctttgtctaacatacacatttgctcaaactcatgataagaaacacanactccatcacaatcatgcattcaattcagaatgaaagcatacaaccattttcacaaaaagataaaagtgttttactgccatgtcatcgaaaacaagtcatactgttcaaaatg

SEQ ID NO: 71975 - DNA, 442 bp, Glycine max
  unsure (1)..(442): unsure at all n locations
agcttgccacccagctcgcctaggcgagctaggttgctttctcctgaagcaacctccttctggaggaacatcctggaaggcccaagtgggcctggttactatttgcagccccgtttttactaaatacacccccttcccttttttggtgattctttttccataacgttacagaaacttacgaatttcgtaacaatactttttttctttccgtaatgttacggaaccttacggattacgtaatcatccctttnttgcctaccagaatgttacgaaactntacagaatacgcactatgctttcttttggctttcggcatgtctcggaacttcacgaattgcctaacgatgggtgccaagtacctcaaagtggtcaaacgagggtcgcatcccaacaatggatagtccccgaacgaaattanggtatgacacanagttatcttaca

SEQ ID NO: 71976 - DNA, 460 bp, Glycine max
  unsure (1)..(460): unsure at all n locations
agaaactcagctgggaggatgcttcagtggagganaagacagagggagaganatagagaggtgggagcacgacattgaaggaataaaagagggagagaagtggaactctgaagtatgtctcacaagactctcattcatcaaagttacaacaagtgttacacatgcttctatttatagactagatagctctcttgagaagctttcttgagaaaacttccttgagaagcttctctgagaaaacttccttgagaagctagagcttagctacacacacccctctcataactaagttcacctccttgagaagcttccttaagaagaatcctagagaagctagagcttagctacacacacatctctaatagctgagctcacactcttgagatgagaagctagagcttagctacacaccctctataatagctaagctcacccgcataacataatacatgagaataca

SEQ ID NO: 71977 - DNA, 471 bp, Glycine max
agcttgtaggattatggggtactcatcacatgtggtactatgtggcggtcgggcgatggtgcacaacaagttttccacatccacaatgcgcgcataaacccaccatcccctgttgcccacctccatctaagctcacgtactcccatgtagcccatattctcatttctctcaacaccgggtccccatcaatcctctcaagcttccacaacatccaagcaaaacaacattcatactgcacaagctatcacagccaagcaaaacagagcataggcagaaaactttgccaaaacaccaaccaaatcacagctgttctcacttaaagaccccagtaacaattccttcgttctggttcattaaccgttggatcgactcgaaaattttactggaagtctctaatacttaagcctacatttcgacgcgtgggatctactagcaagcatgcagaactcattctgcattactctttccaca

SEQ ID NO: 71978 - DNA, 414 bp, Glycine max
  unsure (1)..(414): unsure at all n locations
cttgatgatatggtcttcgccggcanaaggatcgatgtgtgtctgataaaaggcanaattagtcgtcctgcttggacgaatgagaaaacttgggcaaatgaagagggtgaggatgaaggagaagcccgtgctgtgactgccattcctatacagccaagtttcccaccaacccaacaatggtattactcagccaataacaaaccttctccttacccaccgcccagttatccacaaaggccatccctaaaatcaaccacaaagactacctactgcacttccaatgacaaacaccacctttagcacaaaccataaacatcaaccaagaaatgaattntgcagcgagaaagcctgtagaattcaccccaattccggtgtcctatgctgacttgctccttatctacttgataatcaatg

SEQ ID NO: 71979 - DNA, 468 bp, Glycine max
  unsure (1)..(468): unsure at all n locations
agctntcataggtgaaatcatgtgcaaccattttccttatagtcctctcacggggtggaggttgtgccatgttctcagaatgttcaaaatcagaatgctcagaatcagaatgctcaaaattataatgctccaaatcaggatgttcaaaatcaccaataacagaatgcacagattcaccagtaatggaatgctcaagatgatcaaaaggtataaaatgatgcctaactaatctatgaaatgtcctatctatctcaagatcaaagggttgtaagtcagatggattgcctctagtcatacactacattcagcatgcacaactagttgccttgtcatgtaaataaaggtgcaggtttgaactatagctaccctcaaatgatatccaaatgactttaaattntgtgagcaaccttataaaatgatgagaagatagcacannaaatttcaggcaaanattcaaagtctaactat

SEQ ID NO: 71980 - DNA, 423 bp, Glycine max
ccttgcagattggtcttcgccagtgaaaggatcgatgtggttctgaataatacacaaaaaaagggcaaatttgatcatcctactaggacgactgagaaaactggggcaaatgaagagggtgagaaagagggagaaacccatgctgtgactgccattcctatacggccaagtttcccaccaacccaacaatgtcattactcagccaataacaaacctcctccttacccactcacccagtatccacaaaggccatccccaaatcaaccacaaagtctgtctaccgcacttccaatgacgaacaccacctttagcacaaaccataaacaccaaccaagaagtgaattttgccgcgagaaagcctgtagaattcaccccaattccagtgtcctatgctgacttgctcccatatctacttgaatattc

SEQ ID NO: 71981 - DNA, 439 bp, Glycine max
  unsure (1)..(439): unsure at all n locations
agcttatgctgcanacatctacaatagacctnctcaatctcagcagcaaaatcagctaaaacaaaacaattatgacctctccaacaactggtacaatcccaggtggaggaatcatcccaaccttagatggtcgagtccttcacaacagaagcaacaacaacagccttattttcataatgttgctggcctaagcagaccatatgttcctccaccaatccagcagcaacagcaacaacaacaaccctagaaacagcaaacagttaaggctcctccacaaccttcccttgaagaacttgtgaagcaaatgactatgcaaaacatgcagtttcaacaagagaccagagcctccattcagagcttaactaatcagatggggaagttggctacacagttaaatcaacaacaatcctagaattctgagatattaccttctcaatct

SEQ ID NO: 71982 - DNA, 438 bp, Glycine max
  unsure (1)..(438): unsure at all n locations
tgtgcctcttcacgtctggaatatgaatgtagcatatagatccaaagacccttanggtgcttgctgatggcttcttctcgttccaagcttcaattggagtcttgtcttttacaaacttagttggacatctgttgagtatgtaaacagcagtgtagactgcttcagcccagaatgtgttaggtagtcccttctccttgagcatctctagccatctccataactatgtgattctttctctcggacanctccatttgttgaggagaatatacgactgtaagttgtcgcttaatgccttcatccttacaaaatctttcaaactcgcgagaggtgtactctntgtcgcgatcacttcttaatacttttatccgttttccactttgatttcaggaacggcttgaactttttgatactcaaagacttctgattttctttagaaaa

SEQ ID NO: 71983 - DNA, 501 bp, Glycine max
  unsure (1)..(501): unsure at all n locations
atcctctcagtcacctgcggcatgcaagcttctggtgggacatcttgactngctttccaatcttacattcaccacanattctgccttcttctattttcagattgggaatgcctctaacagcacttttgtcaaggattttcttcatgcctcttaagtgcagatgtccaaacctttgatgccatattctgacttcatcttctttggaggatagacatgtggaggagtagctggtttcttggggtgtccataggtaacaattgtcctttgatctgctgcccttcattagaacttcactcttctcatttgtcaccaagcattctgactttgtgaagtttacattgaatccttcatcacacagctgactggatgctaatcaagttgcagtcagtcccttcaccagcagtactttgttcagactangaagtccattatgaactagctntcccattccaatgatctttcctttagagccatctccanatgtcacataactagtggagc

SEQ ID NO: 71984 - DNA, 417 bp, Glycine max
  unsure (1)..(417): unsure at all n locations
acctataaaactaagcttaggctgctcattgctccanatgctgatagaaggcaaagttcattattgtggtcagcagaggagcataaaccacagactcttgcgacaggtacaaatttctgatacaaggccagctgggttaccaggttaaccaaggcatctagtttaccctcaagcttcttagtttcagatgatgaagatgaattcgtggctacctcatgcactcctctaatgacaatggcatcatttctggcactaaattgctgggagttggaagccatcttctcaattaaattcctggcttcagtaggggtcatgtctccaagggctccaccactggcagcatcaatcatacttctctccatgttactgagtccttcataaaaatattggagaagaagttgctcagatatctggtgg

SEQ ID NO: 71985 - DNA, 475 bp, Glycine max
  unsure (1)..(475): unsure at all n locations
agcttatcctanatggcactccttggtattaccaaattctaactcagtcatttttaaagtcctactaaatgaatacaaagtgacttgcagtagtttggtgagtaagtcaacattgtatataataagtacaaaacacctctatctgtcaaattgtaaaatcatatacatatctaagatgaacttaatgttaatttcaagatgtgtcaagtatcatgtactcatttatganaggtgcaagattcacccatctgaatntaaaagggattacggaatgcaaaattgtttataatcattggaggaagtttgtaaaaattggctatggatggagggactttacacaatcacaaaattttgaagttagaagtcaaatacaatttgagtttctagatgcaacatctaactntgttttattttggatttgtttgaatttaagtacattatactatactaatattngaaattttaattataattc

SEQ ID NO: 71986 - DNA, 441 bp, Glycine max
  unsure (1)..(441): unsure at all n locations
agcttgtaatcgatttcacatatactgtaatcgattaccagagcagattttcagaanatattatcaatagtcacatctttntatgtggttcttgaatggctatcaaaggcctatatatatgtgactcgagacacgaatttgctaagagttctttagaacaaaaaggtcttatcctcttaaaaagtaaaatcattttatcctcttacaaattccttggccaaattacttgtgattcaataaggaattatttaaattctcaaattgttcaatctatctctttcaagagagatttcttcttttcttcttcttcattctgaanagggattaagagaccgatggtctcttattgtgaaagaattctaaacacaaaggaaggggtgtccttgtgtgtttagaacttgtaaaaggaatntacaagatagtggaactctcaagcgggtt

SEQ ID NO: 71987 - DNA, 300 bp, Glycine max
  unsure (1)..(300): unsure at all n locations
agcctanacaactcaacagccaagtacatacttgcagtttctttaacttatcagtacatgcacatgaatctaacagtactcaaagcatacacattaaaagaagctcataaactaatcatgtcttctaccctatggttttgcataagcataaggtacaatacatgagaggggaacttactgggaatgcagacaatggatgaataatgcaatgctagcggaatgctgatgatgagggaagacaagaaacggcacaattatagcgagaactataagtaactgccctaaggtagatatgtcttg

SEQ ID NO: 71988 - DNA, 484 bp, Glycine max
  unsure (1)..(484): unsure at all n locations
agcttgagagctattcttcgaggaggcttgaacaaagataatgtatatttatggatggcagtgacgacagaattgatgagagtaacctctccagccatggataaaattgtctggttccatttagacaatttatcttcatatttcctgatccgcggttcccacaccaagctgttggtggacttttacccaatgggaatgcccagataatagaaaggaatctccatatgtctatagttcaaaaattctgctgcctgatgaatccagttgacctcatctgcatagataccaactcgactacttgcatagttaatcttcaatctatatggcgattctaaacccctcaggatatacttcaaagcaataacattatcccatgaagcatgccccacaaatactgtatcgtctgcatattgcagaatattaacatgctcagtaagcttcctacctanaacttgtgacagatcttcttattgcaccctatcat

SEQ ID NO: 71989 - DNA, 427 bp, Glycine max
  unsure (1)..(427): unsure at all n locations
agctntcaacanatgtcttcacanatttatcatcacacattagaaacctagcaagactacccatcatatctccccaaaccccatacccacgaaaattaaaggagaaagaagtccacccaacctgaaatttcgaagtcccactcgtagccacgcacttcacgaccccgaanatgccctccttttgcgatttggggcagaaatgatggccaaaggttggagctttgttggggtttcaatggagaatggagaagaagagaatggcaacgtgagagagagagagggctgtctcgaaatttgtggggctgagtgaagagagagagagagttgctttttggtttaaatganagggtttctctcttctatatttngttaagcaatgcacatgtctcatttgagggagcaaaaggccactttccttttgactgga

SEQ ID NO: 71990 - DNA, 491 bp, Glycine max
ctacagcataatttagtaatgacccactaacctacaattaatattacttaatgccattaacctagggaattaacaaaaacttaatggctgagtgtaactgaaattgcggcaaccaaaagtcacgcccaacagccaacaagtcagccaccatatggtctcccaaaaggctgatgcctaggttgccaattgtgcccttattacaacttgaactaaacctaactaaagccctttcagttgattaacccaaaacatatttttggtcagccaactttacaaggattgtgccattatttagacaaactaaacactctaaaattgaaacaaagtggcgtcatttagtcctcctccattagggtcatgatacaactcacaaccttaggactttctccctgaaactggggcttgtatcaaatagtatggacagcacttgttgaagagcttcttggcttccttgctctacgccttgcataggcctccaagccttcaagtgg

SEQ ID NO: 71991 - DNA, 442 bp, Glycine max
  unsure (1)..(442): unsure at all n locations
agcttgtatcaaattcanacgacaatttcttntactctgatgtntgattgcgtctcgtaatatatcgagacgctcgaatatgaaaactgatgctcggagcaaatgcaaaccgcaataacttttaactcggatgtatgatagagtaccataatagatcgagacgctcgaaagtgaaacaagaagttctgagcatatgtcaacgactataactctttactcggatggccgattgagtcccgaatatattgaggagcacgatattgagaacagaagctctgaccataatcaaaccaaaataactttatattccgattngcgactgagtcccgtagtatatgaagacgctccatattgaaacagaagctctgatcaaattacaacgagaattactatgtactcggatgtccgatntgagtcggtattatatctagacgctcggaat

SEQ ID NO: 71992 - DNA, 400 bp, Glycine max
  unsure (1)..(400): unsure at all n locations
ntgagcacattcanacgacagataacttttactcggatgtctgattcagtcccgtaatatatcgagacgctcaanattgaatgttgaacctctgagcaaatgcaaacgacaataattttttcttggatgtctttttgagtcccgtaatatatccacacccctcgaaatgaatgttgaagctctgagcaaattcaaacgataataactctttactcggatgtctgattgagtgctgtaatatatcgagacgctcaaaattgaatgttgaacctctgagcaaatgcaaacgacaataatttttttctcggatgtctttntgagtcccgtaatataacgagacgctcaaaattgaatgttgaacctctgagcaaattcaaacggcaatatactttttctcgaa

SEQ ID NO: 71993 - DNA, 475 bp, Glycine max
  unsure (1)..(475): unsure at all n locations
agcttgtccacacaaacatataagatatatgtgcaaatctttagttaaccacgagaaacttgtgcacacaattagagacatatatcagcaagtgagtcaaactatgtattgtcgtaccctgatgccctgcatgtgttctctctgtggattctgccttgaactgatggactgagatggatcaatagtgccattcacaaataatatatatgagcgtgcttcttcaatggtttgagtcaatgcaagctcattatcatggcacataattaagagggatatgaattggttctttctattttcattagaagctcttctttctagtgcaagaaattgaccaagggatggaggattgttctcagcatcagggttactaccactattactatntgagcacagacagaataaccatgacctgnactttgacttcttgcccctctttctcttcaagacttgngttttgctcttctatcgatcttct

SEQ ID NO: 71994 - DNA, 471 bp, Glycine max
  unsure (1)..(471): unsure at all n locations
agacttcctcggtccgtcacancgcgatagtaggacataatagatatgccatctctttgagactgttcagcattgtctgtttctttctccgtcgacagactacaggagagtttaatatttnttaacgacaagacggtgacaaataattaaggaaaaaactactcatagatcatttatttgctctttctttcacctgaatcattgtgttataacaatcagatcagatcagttgattatatccgtccaaccaaaatccaataaatcaaccggttcaatttaattcttggataaaaaatatcatcaacatgacgccataatgtaattccattattgagtttcataatcaacctatttcaactccttttcattcttatgacaatatctggcttaatttatttaaactntctctctttttttataaaaagttgtcaaattattctgaattgaaaacatttaaaataagatcaatta

SEQ ID NO: 71995 - DNA, 443 bp, Glycine max
  unsure (1)..(443): unsure at all n locations
agcttggcctcaaacttactgatgatatgctgccaatcactccatctnttagaactcgtccctactggaattccaagataagaaaaaggctttctttctctctttggccaagggaaggaaactgaacaccatccaaggttggcctattaaaattctcctcagaaaatctgtctttgaaatcatataaagcttgcattttaacactgttaggctcatggacccacacaccatctatgatcagaccttgaatagcattgtgcctccttctatgattaatcagtctatgaaaatagttagaattgttgtccccttcttttaaccacttcagtctggccttttgtctcagcatggattcaaaagcataagctgcattccagagctgatccagaaggtatttcttgagctccacttcagcttaagacaaggttctatcattaatacct

SEQ ID NO: 71996 - DNA, 426 bp, Glycine max
  unsure (1)..(426): unsure at all n locations
agcttgccacccagcacgcccaggcgagctaggttgcttcctccagaagcaaccgccttctggaggaatattctggaaggcctaagtgggtctggttgctatttgcacccccatttttactaaatacacccccttgctcttttttgatgatttttttttcgtaacgttacgaaactttacaaatttcgtaatgatgcttgttttctttccgtaatgttacgaaaccttacagattacataatcatcccctttttgccttctggaacgatacgaaactttacagattacataatcatcccctttntgtcttctggaacgttacgaaactgtacagattgcgcactaacacttcctttcaatnttcggcatgtcacaaaacttcacggattgtgctacaatgccttcttttgacttcccgcatgtcac

SEQ ID NO: 71997 - DNA, 455 bp, Glycine max
cgcttctacttcaaatttcaatttcaaaattaactcttcatatttcaatttcttattcaaatttcaaatttcaatttcaaaatctccttttctagatctgaaatagttttcttcaaatatgaaactaatttgacaagtttaatagattctttatgcaagtcattgaatgcatcttgaagttcataaaaagaaacatataagtcatctcatagttagatgacattacctcgtcaaagacaataaaaaactcaagcataaataatcatcaaagacaatcaaaaatcaatcaagaacaatcatcaaaaactcaatcgaaagttaacaatcatatgcgaaaataatcaaaagtaatcaatcaaagacaagtgacctgctggtatcatttgatatcacttgttgggctaggtgattaagtggccttggtttgttgctccatagatcacatattcactatc

SEQ ID NO: 71998 - DNA, 388 bp, Glycine max
  unsure (1)..(388): unsure at all n locations
aagaatgtagataggtgtatgtgcacagtctatcggagatgcctcttcatagatatgatgaggcaagaacaagctcaccaccatgcgaggccgtggataacagcattgcacgaagagaatatgagtgtgtggaaagggagaatacgaacgaatncatgtatagagaagagagaggacgcatgtctgaacttcgaagtctaattgctgagatgatcatgggtgacacatgcatacacaaggcttacatatatagcctatgtgtcacacaggattggaggaacttttgaatttctattagagctcgctgcaatttgaattaggataagcatttgcggagacagcattgtagccacatattcactatttatgaggtagcgaattcaactac

SEQ ID NO: 71999 - DNA, 466 bp, Glycine max
  unsure (1)..(466): unsure at all n locations
agctgttatacttatattatatgtatatatgtgcttttaattatctctacctgtttaggaatgtgataactcactccatgtgtgttatttctgtttggatcctgtcatgatcttgaaccttgtgttcgtgggagtagatggctaggtggattgctataaggaaccttgtgctggaggacatctggacataatgctttgataggatgtgacattggggcatgagtttctattctaattgcatgatattccaacactttattttactttattttattttgatgcttaagttgagttcctttgtaaacttgaacgaccttattttgagccgaanatgtctctcgatagttttattgggtaacagtgaagtgaatatgaaccttttaccgatgtgaactctttattgcttagaaaataaaatctcattttatgtagctcggtactttcatggatttataatataaatatg

SEQ ID NO: 72000 - DNA, 427 bp, Glycine max
  unsure (1)..(427): unsure at all n locations
tagagacgctcaaaattgaatgacgaagctatgagcaaattccaacgacaataactttntactcggacgtctgagtgagtcccgtaatatatcgagacactcgtaattgaatattgaagctctgagccaattccaacgacaataactttttactcggatgtctaatggagtcccggaatatatcgagacgctcgaaagtgaatgttgaagctttgagcanattcaaacaacaataacgtcttactcggatgtctgattgagtcctgtaatatatggagacgctcgaaattgaatggtgaagctctgagcaaattcaaacgacaataactntntactcggatgtctgattgagtcctatcatataacgagacgctcgaaggtgaatgttgaagctcttgagcaattcatacgaccataactttttact

SEQ ID NO: 72001 - DNA, 391 bp, Glycine max
  unsure (1)..(391): unsure at all n locations
gacactatgatactcagcttaacattaacttcagcgttcgttatatacgactcaattatttcttcagtanaagtattgcgttgaattgctcagagctttcacattcaatntcgagcgtctcgatatatgacgggacttaatcagacattcgagttaaaagttattgtcggtttgagttgctcagagcttccacattcaatttctagcgtctcgatatatgacgggactcaatgacacatccgagttaaaagtattgtcgttgaattgctgagacctcaacattcaattcgagcgctcgattgttacgactcatcaacatcgagtaaaagtattgcgtngaattgctaagctcacatcatttcagcttcattatacggactatcaacatcca

SEQ ID NO: 72002 - DNA, 361 bp, Glycine max
aacttttttcgctccggagtatgacagtcaccgctttaagagcgctgtacaccagcagcgcttcgaggccatcaagggatggtcgtttctccgggagcgacgcgtccagctcagggacgacgagtatactgatttccaggaggaaatagggcgccggcggtgggcatcactggttactcccatggccaagtttgatccagaaatagtccttgagttttatgccaatgcttggccaacagaggagggcgtgcgtgacatgagatcctgggtaaggggtcagtggatcccgtttgatgccgacgctatcggccaactcctaagatatccgttggtgttggaagagggccaggaatgtgagtat

SEQ ID NO: 72003 - DNA, 497 bp, Glycine max
  unsure (1)..(497): unsure at all n locations
actaagctntgctacaccttttcttccccttggcacatcaaanagccaaataactcggaaatcaacacagttataacaatggagtagcaagatataagtatcagagtattaaatccaataagccaaactcataatcaagaaaataatccaaccacaattcaaataacataaaatgtcaacaatcacaaaatatccaagaccgaaacacaagataaataagcaaagtacttagcataataatgtaaattctaagaaactaaaagccaaaatacacggcttataaaagataaataagcagaatctaaaatctaagaagacggaggaggtggtggaagatcaaaactctgacgaatgtatccgacatcctcttcaagctgtgtaagacgaatgtccataccggcaaagcgtgaatctaacgagtcaaagcggtcaccaacatacgaacgaagaccccgtaattcggagaggacttcattcatgagtgcggaatcttcacg

SEQ ID NO: 72004 - DNA, 459 bp, Glycine max
  unsure (1)..(459): unsure at all n locations
agcttccatcactactggctggatggacagaactcggtacattttatgtactcgttgcaaatcatcaagtgaccatgactcatnttggatagagtattttcttcctcaccatcttcaaaagttgctctgaaccaaaagtttatcctaaatggcactccttgcactgccaagttactaactcaatcacttttaaagtcctactgagtgaatagaaagtgactagcagtattttggcgagtaattaagcactcctctgtctgtcaaatgttanaatcatatacatatctaatatgaaattaatgttaatattagaatgtgccgagtaccatgtactcatttatgaaagttgcaggattcacccatctaaatntggatgggatacggagtgcagaattatctataatcattggaagaagactagcaaaattggaaatggatggaggactcttgcacaatcac

SEQ ID NO: 72005 - DNA, 468 bp, Glycine max
actcagctcgtgaatcgattacactaattggtaatcgattaccagtgactattttctgaataatatttcaagatgtaactcttcaaaagggttttgactttctcaaattggttttaagtttttctaacagttataactcttctaaatggtcttcttgaccagacatgaagagtctataaaagcaaggctctgttttgcatttttcaattcaattcattctttcatactttttacacttattcaatcaatcctttacaagccttgaatctctgtgaacttcttcttcttcttgtaccaaaaagctgtatgaagttttttggatttctaaaccttgacaacttgcgctattagtttcttcattctcttctccctttgccaaaaagaattctccaaggactaaccgcctgaattcttttagtgtttctcttctcccttttacaaaagaacaaaggactaaccacctgaatt

SEQ ID NO: 72006 - DNA, 491 bp, Glycine max
  unsure (1)..(491): unsure at all n locations
agcttgacgactntggactgaacatattctctaatgatatgatgatctatgtcaatgtgcttagatcgttcatgatgagcanngattgaagcacgacttatagcagatctattatcacaaaataacatcacagagggcacatcaacttcaaagtgaagaagtaacctgtgtaaccaaacaatttcactagtaacagaagacaagacacgatattcagctttagtggatgattntgaaacagtgggttggttcttagaacgccaagaaagaaggttgtttcccaaaaagacacaaaagccagaagtggatcttctagtatcaacacaattggcccaatcagcatccgcaaaggcagtgaggttgagagagttctgagcatggaaaaacaaaccttgtccaggagcaaatttgatatactgcagaagatgatgaacaacatgtaggtgaggaactctaggtgctntcataaactgacttaagtgattcacagc

SEQ ID NO: 72007 - DNA, 442 bp, Glycine max
  unsure (1)..(442): unsure at all n locations
atcttacagtcacctgaggcatgcaagcttnnctttgcggttaaagatgttaccaaaaatatctttattccatttttgcaaaagcttcctaaagagcaagagattgctccctgcaaacaccatcattctcccataaatctttaataaaatactcaaatcccttatgcacacatataggaaaccaggaatctaaaaagtctccttctgttctctccttttttgcaaaacattttaattacaaccaccatatgatcaaatttaaagaaaggtaaatgaaggataagagcattctgaaacctaatccttctctccaaattaatcaaaacatggtcaagtctttcctgaaggttacctctatgtcaggtgaaagttggtccttgaaagcctacattaataaggtttgcttatgaaatcatctcctgaaaatcagaagcttctctct

SEQ ID NO: 72008 - DNA, 435 bp, Glycine max
  unsure (1)..(435): unsure at all n locations
cagctctcttgtttatcttgtctctcttaatccgcggcacataagtaaaacacaagcatcctatattctttatagattttcaagaaaggtttataaccataccaaggttcaaaaggagtctttccgtttactgctttggtgggaagtcgatatagcaagaatattgtagtgtttgcagcttctgctcaatattccttaggtaaccctntctcatgaagcatatatctgaccatttccattatcttccgattctttctttcactaaccccattttgctgaggggtgtaaggagctattaattgatgctcaatgtctgcttcctcnacaaacatggtgaattgtatngaagtgtactccttgttgtattagacctcaaagcttgaatcatgcatccactttgctnttcaatccactgcttaaatctcccaaatacac

SEQ ID NO: 72009 - DNA, 422 bp, Glycine max
  unsure (1)..(422): unsure at all n locations
agcttgttacanatgtggtaaactcattataaactatttgtggttngagtcttgtgggtgcgctagataaacatggctcgacgacagctaacgaaggcttacaatgatgatggagtccagtgtgacgcttgtcgaagatacgtcacgcgtcatgtgcatgaacttcacacaccagggcctttcgtggggttgcgtgcagaatgttntgagttggcagcgcatgtggacgacgtggtggcggtgttttgagttggctgcgcacaatggtcgaaggtgagctntgacaaaaaggcatcaganagtttgtcatacaagggcagagtagtcgtgtggtactattcactgctaagagaggctacctaanagggaaaacaaagggaaaccttcaggataagagctccgatcacantgaaactttgggt

SEQ ID NO: 72010 - DNA, 390 bp, Glycine max
  unsure (1)..(390): unsure at all n locations
tggacgaccaattcgatatatatatgcgcgaagacacttcttatttggcccagagcctatcagagagctcgncaagttgcagcttggacccaaacctgtgccatgtacgtagctcagtaaggacctcactagccatgagcacagacacattgttgatgtcctacatagaaacacgaacttattcgcttggcatccatctgacatgccaagaatccaccccaacattatctgccacaagctcgccatttatccgcatgcagaaccgatatcataaaagaacaacgcacagctatgggagaagaacgacgcaaagatgtcagagaagaaatggacaaactcctaaatgtcaacttcattatagaagtaagatataccatctggcttgctaac

SEQ ID NO: 72011 - DNA, 461 bp, Glycine max
  unsure (1)..(461): unsure at all n locations
agcttgtacctgagcactggcttgtgttgtttctgttatatattaaatggctgctccccccatcctaaacaatacattggcaataagcttggacttggtattacctctgtagccatttggggctacagcttccatgctaagaactaaagccagtgaaattttgtgaactctcggcagatctttggccaggcttattggcagcaatctggcgctgcaacccattccactcaggttcacactctntacgttgctccggaatccaaacttggtaatgatcattgatgtaatggatggtgtaagacagaataggctacagtttgacacaaggatgtcaaagctcttggatacactntgtgtttcaaaaggaggtctttgacaattctgaatagaaacgattcaccttctgcttgcgcgcgcctcatgtgaatctgtcgggggagctcatgaaccaatgctggcac

SEQ ID NO: 72012 - DNA, 477 bp, Glycine max
  unsure (1)..(477): unsure at all n locations
agcttaaaggaagtgaacgaattagcatgggcagatatgtctccgcatngattggtaaatctgttcctcanattcctgaaaaatgcaaagatccaggtacattcagcataccttgtattatagggaatagtaagtttgacaatgccatgctagatttaggagcctctgttagtgttatgcctctgtcgatttttaattctctatctctaggtcccttgcagtcaactgatgtggtaattcatttagctaatagaagtgttgcctatcctgttggtttcatagaagatgtcttagttagagttggtgaactgattttccctgttgatttttatatcttgaatatggaagatggattntctcaaggatcagttcccataattctaggcagaccctttatgaaaactgctagaactaagatagatgtttatgcangcacactgtccatggagttnggtgatataactggtcattttaata

SEQ ID NO: 72013 - DNA, 312 bp, Glycine max
tcattctatgaacgactgaagtgaatcatagatcaatctctgaacaactcttgtgaatcgagatccattcacgagttcatgattacagggattaggaattccatactctagaggaaagtggagagtcaggaggcaagattgaaggctcaagatctcgagattcatgattaagatcacgactcaagattcacgaatcgagagaatgcattatcatgattagtatgataagcttgtctcagacatgggcgtgcgcatgagttttctcacatcatgtgtaccaaagagttttactctctggtaatcgattaccag

SEQ ID NO: 72014 - DNA, 455 bp, Glycine max
  unsure (1)..(455): unsure at all n locations
agctngtcaaaacccagggaaaacatgcccctggtcttatgctctctaaacccaaggttcacccttggtgagcccttctttggctaagntccatatccacaagaactcaaggtacgcaaggtctaccctcgacaatcttttctattattatcttttatctgggcaggaatacaagtctataaaaaaccaaggtccctccttggtaccaaaaacccaaggtctacccttggtatgcacgcctacaaaacccaaagcaccccgttggtctgctcattcgcagcaactacaacggacaaagtccaaggtctaggctccatgagtcaagacgacctacccctaaactggctggcaagggcttcaaccaagtgcagtccanactaactcctcacaagcatcaaagaagaagctccgcanagcacaaggaagccccaccagaggggtgactagacctttaa

SEQ ID NO: 72015 - DNA, 448 bp, Glycine max
  unsure (1)..(448): unsure at all n locations
agcttctttctcttctcatcaggtacatgtttgaagtataaagacccaaacaccctcacatgcttcactgttggcttccttggtgtcacacctcttccagcactttaatttttaacctcttaagtggactctttatcaatattatacacggcgaggaaccaccttcctccccaaaattctgatggcaggtgtttctccttcattacagacctattcctcctttcagccagcccattatgctgaggagtatatggagcagtaacttcatgaattatgccatgttggatacagaaaaattcacaatcctttgatgtatactcccctccaccatctgttctaataaccttgnatgctgttccactntggttttcactcaacactttaaactccttgaatatagaaagcacttcactcttgggctttatcaggtacaggcacatcatcctac

SEQ ID NO: 72016 - DNA, 507 bp, Glycine max
  unsure (1)..(507): unsure at all n locations
tactcagctttgatgacttgaaacagaaactgatctatgcacccattatcattgctccatatnggacactagattttcaaataatgtgtgatgcaagtgattatgtagtaggagcagttatgggtcaaaggaaaaataaaatttttcatgtcatacactatgaaagcaaggttttaaacgaaactcaaattagttatgccacaattgagaaagaattgcttgcaatagtatatgctttggaaaaatttagatcttaattgataagatctaaaattgtgggttctactgatcatgttgctataagatatatgttggttaaagctgattctaaaccccgacttatccattggattctattgttgcgggaatttgatttataaatcaatgataaaaagggaagtgaaaatcatgtagctgatcatctgtctcggctgactattgatgaggtgaccacacaaggacctgagattcaagaagagnttctaacgagaagctataacatttcat

SEQ ID NO: 72017 - DNA, 465 bp, Glycine max
  unsure (1)..(465): unsure at all n locations
agcttgtaggaatatggngtatccatcacatgtggttctatgtggcggtcgggcaatggtgcacaacaagttttccacatccacaaatcgcgcataaacccaccatcccctgttgcccacctccaactgagctcacgtactcccacgtagcccatatcctcgtttctctcaacaccgggtccccatcaatcctcccaatctttccccaacatccaagtaactcaacattcaaacaacacataccatcacagccaagaaaacagggcaaaggcagataattctgcccaaaacaccaaccanaatcacagcttttctcacttagaggccccagtaacaattccttcgttccaattctgtaaccgttggatcgactccannactttactggaagtctctagtacataagcctacatcttgaccgtggggatctactagcanacatgcagaactcattctacattactc

SEQ ID NO: 72018 - DNA, 464 bp, Glycine max
gcttgcgattggcttcctaggaaagatcttgtggatctgaaaagaggcaaatgtaatcatcctgcttggacgaatgagaaaactgcggcaaataaagagggtgaggatgagggagaaacccatgctgtgactgccatccctgtacggccaagtttcccaccaacccaacaatgtcattactcagccaataacaaaccttctccttacctaccgcccatttatccacataggccatccctaaatccaccacagagtctgtctactgcacttccaatgacgaataccacctttagcacaaaccaaatacaccaaccaagaaatgaattttgcagcgagaaagcctgtagaattcaccccaattccagtgtcctatgctgacttgctcccatatctacttgataattcaatggtagccataaccctagccaaagttcatcaaccttcatttcttcgagaataccact

SEQ ID NO: 72019 - DNA, 485 bp, Glycine max
agcttgaaatgaacaacggaagctctcgagaaattcttatggtcataacttatcacaccgaagtccgattcaggcacataatatatcgagacgctcgaaattgaacaacggaagctctcgagaaattcaaatggtcataatttgtcacacggaagtccgattcaggcgcataatatatcgagaaactcggaattgaacaacgaaaactattgagcaattcaaatggtcataacttttccaacggaagtccgattcaggcgcataatatatcgagaagcttgaaattgatcaacagaagctctcgagaaattcaaatgggtataacttgttacacggaagtccgattcaggcgcataatatatcgagaacgctcgaaatgaacaacggaagctctcgagaaattcaaatggtcataacttgtcacacggaagtccgattaatgcgcataatgtatcgagaagcttgaaaattgacaacggaagctc

SEQ ID NO: 72020 - DNA, 360 bp, Glycine max
  unsure (1)..(360): unsure at all n locations
ttacagcagattntagtaatgacccactaacctagaatgaatatattcttttgccgttaacctaaggaatgaacacaacttaatggctgagagtgactgaaattgtggcaaccatatgtcaaccccaacagccaacaagtcagccatcatttaggctcccaaaggctgatgcctatagacgcacaagggccctataacaactggaactaacccaaactaacgccattgtattagaataaccaaaaacatatgtgtgggcacgccactctacaacgattgacccattatntagactaactagacacatcaaaatggagacatagaggcgccaaatagtcctcacccatgtgagccatgata

SEQ ID NO: 72021 - DNA, 483 bp, Glycine max
  unsure (1)..(483): unsure at all n locations
agcttcagagagaanggacatttactcctaanaatatattattgatgcctactatntangcatttctactcacgatccaagcatccttactaattcttattgtttatctgttgttgcttcttatattttctaaattagagaaacaaataaaaaaaattgcctaaataattcaatattgcatgcctgcaacttggaattcaagtgaattgcatatcctcttttgaggataagaggataagagtgaggtgctttntaattgtggttccataagaatcagtggaacctcaaaatggctcgatattggtgtttggagatgatgtcaagagccacacatgtctaggataatctttgttagcaattgagggttttggttatctgcttctatatatatataaacatttcngtttgctttaagcggccttattagtttttctcaattaatgggtttgaggacatgtgaatcagactttcgagtctgatctt

SEQ ID NO: 72022 - DNA, 430 bp, Glycine max
  unsure (1)..(430): unsure at all n locations
tctcanagatgtacttaaccgtgtccatcttggatatcaaccaggtggtatggctcagcatgtatcgtcttagacggtgggacgcccagactaaagcacaacacgttctttcaagcacggagtagctcattccataggccgagaacttcttactcaagtagtagacaacgcactctctcttcccacactcgtcatgttgccccaggatacatcccatcgactcgtccaaaatcgtcatatacaagatgagaggccgtgcgggtaccggcggcataagcatgggagggttcatgagacactnttgtatccttccaaacgcctcttgacaatcctcgatccagcggacgaattggttcttgcgtaagagatagaacaacggctcacatataccggtgagctgtgatatgaatctggccatggtattcaaacg

SEQ ID NO: 72023 - DNA, 490 bp, Glycine max
  unsure (1)..(490): unsure at all n locations
agctngngagttcttcttgtcctttagctnttgcatgttgcgccaagcttgatatggagtcacctcagtggaaggtcgaacttattgctgagttttgagtgctagcgaatagggaggcatattaacaatagttggctacactgggcgagtcaattgtgggggaggcaaatgaactattacatctgatggaagagctgtcaaggcctcaggcggagtgtgcacaaagtcatagtgtgtctaggtgggtgcttgaacatatatggcnntttgtaccattgtgttagagaaaaatagctttggagaatatggtgacaagtgtatgattattgtgaatgaatgccagagggaatctctagtcattagataatggctccctcggagctgcccttctaaacctacccaggtgtagagtagaaggaggtggacatggtttaatgaatggtatagaattatagacgggtgagatangagtgtcatcaatggactcact

SEQ ID NO: 72024 - DNA, 490 bp, Glycine max
  unsure (1)..(490): unsure at all n locations
cttgttgtagagtcaaaagtgacaatgaacaatactnngtaaattgcataagttagtgaaaacttaatgggttgctaaggactagaaatagtgtcagtagtaaagatgaaccaatataaatcttnttggttctgatttatttcccttattttccttaactaactaaaagggtttgaatttgatttcgtctttaaaaaggatatgcaaaatctattaagtatcatcggactatgttttaaaaactggtttaatttttaaaacttttagatgataactgtttttctaatcacaattcaatttcccttcttatctttacaagaagtttacttggcaaatngacttctcaaacttctatataaaatctagccaaaattaataattaaacaataacttattcttggtcttagaattcctcanagtacttctcactgcctttacataacnaatgattanggaatataagctcttgattttgggaaagttggaacta

SEQ ID NO: 72025 - DNA, 489 bp, Glycine max
  unsure (1)..(489): unsure at all n locations
gcttatgcgcatatntncctacgaacgttcacttgctctagacattctattaactaagaaaaatgcacccatatacaatcaaggtagcttccttacctagattatttacatgtacttccaaagtgtatttgttatttacatcatacacgccatcttgtcaaaatttacacacatgcatactcaaagcatttcggggtaccaaaaattgcacatgcgctcatcttggtatttctaatatctatacatatacaaacttcatgatgaatcttgactatctacacaataaagtgctacatttcatgcctcttttcaagtttttgctacctaaagccgcatgcaaattcaagcatattttcctttgctgactaanattgtattcaaattatatatatattttttggaatatgttttctttcattcaacatatttatatatattttttgtgagacatnttgactaccanaaattatatatacatacattcaagta

SEQ ID NO: 72026 - DNA, 314 bp, Glycine max
  unsure (1)..(314): unsure at all n locations
accaacctnccaaagggaggagaactttcaacactattgattaagacaacgaaacctgtagtcgatgttcggctagacgcttaacatctcaaaacaacatatttctggaacaagacactgacactaagagttatttccaaataccgagagacatggtggattattgaaccgcgaaagaactaatttggaatatcgagctacttgtgtaatccccagcccattatcacaaggcataaaatggtgcttgagtaccacctagctggacgatgactaatttgcacgtagtgcgcactcatctatgttacgcatgcctc

SEQ ID NO: 72027 - DNA, 426 bp, Glycine max
  unsure (1)..(426): unsure at all n locations
agctntcatcaagtggtatctgagcacaagagcttcaagtatgtgctccttaaacctccattaattttttgctctaccttctcttccattgttgtttcttcatttttttctccatgtatctcctcacatgtcttgtgctaaatgttgctaacatgatactgtatagtttccaccgattaaacttgctatagaagctagatgtgattttctatggttcaaattatgtgttcttgttcttgaaccatgaattgtgttgagtttaggttcctttgaagtttgacttggtattttttttggctgaaaccaaaaccataaaattcttacaaaaatatctaagtaagaagaaacgtcaaaaatctagagttactcgttcacctatngtagttntgtcatagaagtcatgtctagtcatgaaacatgtcacat

SEQ ID NO: 72028 - DNA, 395 bp, Glycine max
  unsure (1)..(395): unsure at all n locations
tgaaaggatcaatgtgggtctgatataatgcaatttagtcatcctgcttggacgaatgagataactggggcaaatgaagatggtgagaaagagggagaaacccatgctgtgactgctattcctatacggccaagtttcccaccaacccaaaaatgtcattactcagccaataacaaacctccttacccaccacccagntatccacaaaggccatccctaaatcaaccacaaagcctgtctaccgcactttcaatgacgaagaccacctttagcacaaacaaaaaaaaacaccaaccaagaaatgtaatttgcagcgaaaagcctgtatgattcaccccaaattccggtttcatatgctaactngctcccatatctacttgataatgcaatggtag

SEQ ID NO: 72029 - DNA, 399 bp, Glycine max
  unsure (1)..(399): unsure at all n locations
agcttatataattntgtctttttttcctanattttttccttttaaaatatgcaagatcacttgttgctacttgcatatgctacatcattttagtgtatgtttggattcagtggcatcatccaagatggagggctctttcaatctcagctgatcaacattgaagacggngtggcgggcaattatagtttgaacgcattctcctcgaccttctcttacatagtgaatgctttaagcttgcggttggtacccttccttangcaagttcaatccttgcattcaaataagggaatggtctcaagcttgatattttctttctcgattgataccagcacacaaagatcttccctatgaacaggaggcaagaattttgctagctagggatgggggtaggataaaacg

SEQ ID NO: 72030 - DNA, 499 bp, Glycine max
  unsure (1)..(499): unsure at all n locations
tcttcatcttcttctatcaataacagtttcccttgtagcaattatcttttctgaacaaaacaagcttgtccactactatcttgaacttagtggtggatgtggccacacaaagacacctacccttagcccaatctagaaaaccctattctagcatgcctttagaaattcatgcatacactaacaacatgttaaacacacaatgttaacaacttacttttaccatgaatgcttcaaaaaatgaagtttagaaggtgtgagtcgcacaaacttattcttagaactttttcttttctcttaaaagtgagaacataaggtcattatttatagagaaaatagttataaccgctgtaatcgattatatcacagaagtaatcgattagattatcagtttaatcgattaatgtgttcttcccaacattggaaagctttcaagaacaatataattgantagattatncatgtaatcgattgaagtggtcttgatcacttattagtagtc

SEQ ID NO: 72031 - DNA, 444 bp, Glycine max
  unsure (1)..(444): unsure at all n locations
agcttgcanataaggcactattggtttataattctggttgaagctaacaagatacagtatacaaaaattgagccacctctctaagtgtaaagtgtggctctgaaaatgaatcagtttttgtatgtttggtgatcaaactttagatttgcatccaaaggtgttaatattagggattaaataaaaaggagattagattaaaataatttcataaaagatatcattatttgcttaattatgtctctaacttgtttgattgcatgacctacaggatgtgtttggaatgaaggagaaaaattttatattttttntaatgggatccacatcttttattctattctaaatgtttaattcaaagatttttctttttattnttggttccatctttctattctcatcctctaaatcaaatgcattcttatttcaccactatcttgttctctcatc

SEQ ID NO: 72032 - DNA, 402 bp, Glycine max
  unsure (1)..(402): unsure at all n locations
cttgaagtgccctntgtgtctngatgaagttcagtcttgcttacatttttttttcgcttgccctanagatgacttggtgtgacaaagtgttgctcgtggataaattttcatacggctttgccaagggaaaaggagatgcatccgtgccaagacttggctnttttttattaaaagcggtgttggaaaagatagacggcatgtggtttggtgtgcggctttatggtgcatatggaagacaaggaatggttgcattttcgataatacaactctttgaagagaaacaggtgattggagatatataattcgtggcctggacgtggtgaggagtaagtgtacgtcgttcgattactccattccttatcagtctctaaaccatggtgagtgcattgatgaggagatgca

SEQ ID NO: 72033 - DNA, 437 bp, Glycine max
  unsure (1)..(437): unsure at all n locations
ttcagtcacctgcngcatgcaagcttgccgcccagctcgcccaggctatcaatgttgcttcctccagaagcaacagccttctggaggaatcttctggagggcccaagtgggcctagttgctttttgcacccaccctttatactaaatgcaccccttctatttttttggtaattctttttccgtaacgttacgaaactttatgaatttcgtaacgatacttattttccttccgcaaggttacgaatctttacggattatgtatttactcttttttagctntcgaagaagttacggaaacttacggattgtgcaaaaacacctcttttcgacttccgccatattacggaatttcacggattgcgcaagcctgcttccttttgatttctgacacgtctcgggacttcattcattgtgcaacanaggacgccaagtacctc

SEQ ID NO: 72034 - DNA, 424 bp, Glycine max
  unsure (1)..(424): unsure at all n locations
cagcctggctgaaggcacctgctgcgcttagcgcactgatctcgcacttagtgcgcggctttgatgttgatgctctgctagattctcctttgcgctaagcgctctgaagctgcgcttaacggtggatatgcgcttagcccaactgccgagcttagcccaactgttacattttgcaattcaaaacttagcctcttttttacctgaaaatgcacaagattcatcattaaatccaatggaaatgttctagagacaacattaaccataaaacaagatttatttaccatagttacttcaaaatgaccataaattgnggaactatacaagctgtggaaaaggatctctatacaaaagttagtcgtataccaagagaatacaacactggagactcagccttccattaatcagcagaaaagaaaacgaattc

SEQ ID NO: 72035 - DNA, 366 bp, Glycine max
  unsure (1)..(366): unsure at all n locations
agcttataccactacaaaacctacttttcacttcgcattaataatagaaccgatgtacacctaaacgtggtggcataatcgtatataacatgatatctgcaactatgtgtctctaaacaattgatgttaatgtgaatttgctaacataagtatactaaaaactgatgtttacgtgagttgtgcagcatcacgtgtttcaaaaatcgaggttaaccaattttcattaacatgcagaattggaaacaagaataacgacgttgtatagtcccatatataaattatatacgcttctgacagtacactcgtctctccctcacgaaccctactttgataactcactctcactcttacggcattganaccact

SEQ ID NO: 72036 - DNA, 205 bp, Glycine max
gatgccccacattatttacgtgacgcagatgcctaaatgatgatgtggaagctttatgcaaagactggtcatgcgtgctactatgtggacactcatgtgtcaaatctttatggtcatgtgatgctaaggctcatgatgggctgtatcctagtcatcccaacgttctcaacatatgatcttttattcagtggggcgttcgtccgac

SEQ ID NO: 72037 - DNA, 456 bp, Glycine max
  unsure (1)..(456): unsure at all n locations
tagcttgtgcgaatcatatatctcctgcatntgtatctctttccatgcatagctttctttcgtatagacactcctcgacgtgtggtattgtagcggaaaaactaccattactaacacgcgccacatgagcatccactatcgcaccatgattcagatgttattacgattcggtgatcaacgaggagacaccgagaacagatgaaagccgacttgtcatctctgaaanaacaaatggcctccatgatggaggccatgatacgtatgatgcatctcatggagaagaaagcggtcaccgatgacactgtcagctcagttgtcgaagctgacccaactctgttgggactgcgcagcctacttcctgaacatagtaggacagagaagggacacactatggcacgatcgcagtcgtcacataggatacacccaatcggcttaccttatagattgcgaccaata

SEQ ID NO: 72038 - DNA, 440 bp, Glycine max
tcttttgatttgaatttaaatacaaggatctttcttcatctgttcctacgtctctacccattctcatccatgtgcatgtttacttctttcattttaaaacggcagatccgatgacgagtccctcgacagtactaatacctgtgacccgcctatcaacttagagcatgaaacaaatcaaacggttgatgaagggaacgaggatgtgggacttcccccggaattagataggatagtcgcccatgacgaccaagaaatggcgcctcatctagaagaaacagaactagtagaattgggaattggccgcggataaagggaacgtaagataggcacaggtattaccgcacctatgcatgaagaactaatacacctgctaagagactaccaagacatctttgcttggttgtaccaagatatgctcgtgttgagttctgacattgtac

SEQ ID NO: 72039 - DNA, 379 bp, Glycine max
gcctgtttcttagcagaaatcactcggtctttatttgacatcttcatgtacaggtattaactcacacttaactcacttcaggtcactcaaaccactttgatctgtttatgagccacctagtgataccacagacgctgattcttgatgagttgatcaactttttatgttaaaaaaaagataaattacactgaattttcatatggggcatacgaagttttgtttcctttgtctatgatctagaccttagactgttcagatctagaataaaggtacgataattatatgattagttcgagaatgtagaggatgatcttctctctactattggctggagtaattttttaacattttattggtatttgagtcgcacaagtattta

SEQ ID NO: 72040 - DNA, 364 bp, Glycine max
atactcagctcgtcgcatatttggctgttgaggacataatcgattggacatagacatgcgacggaatgctaatgaactgtatccatgaggagactagtttgcatgagcaatcctatacgagatcggcattggaacgtacacatgatatcatcgcctatgtatgagatatttaaagtatgctcaatacacatacaataaacctctctactggcagtgctatgtcaagaaccttacacatgatgcattgttgtttgagtatcattgatccagctgatagtttcccacattgatggcacagattatatgtcatcatcacgacattgtcccatgtaactgcagtctcgcactcgtcgtcgtctacact

SEQ ID NO: 72041 - DNA, 469 bp, Glycine max
  unsure (1)..(469): unsure at all n locations
agctngaaagagcccgggtagtcaaagagaagttcatgtccatagccatcaaagtctgaagagagtatgatgaactaagggacgttaatatggccaccgatgaagccttggaatgagaaaccaagaaggcctgaaaggaagaacacgaccaaaacaagttttgaggggctttatagggcagcaatagtgagctcaaactctgaagaggtgaaaggaatcatcatgggtcanaggcatgatctggaaggacgagctaaaggcttgccttatgtcgaaaagaaatttgtcccaacagttaaagtgagattgaagggaatatgtgggccatcatcgatgagtgcaaagagaagctaaatctagcggcaactcacgagcaaaggctagaagatgagtacgccaagatatcagcagaaagggaagcaagggaaagggtaattgattcattgccccagaggcaaccgtgtggatg

SEQ ID NO: 72042 - DNA, 479 bp, Glycine max
  unsure (1)..(479): unsure at all n locations
ttaggacctataaatctcagcttgcttcccaatctccccctttgtgatgatgacaacttctgagatcaagaaacacacatacactttntcctagtcgatcactcttataaatgctcccccttttgttttgaatttatgcttatcttaaaattaaattgattactcatgtgagttctagatttatccctatttctctccccctttggcatcaacaaaaagctaaagtgtgtatcacacttaaagtatgcaaatatatcttaaccattcatatagcattcataaaaaatattaaccacaacatgaagtaacaatcataaacagattaacttataaaatccacatagtcaaataacatacgggttcaaccaaaccatgcaaataaggaaataataaattgttcagataccatagtaatatagccaaaatacaaggctgaatatcaaagtagtaataatattaagatataattctaagatgat

SEQ ID NO: 72043 - DNA, 492 bp, Glycine max
  unsure (1)..(492): unsure at all n locations
atccttatagtcacctgccgcatgcaagcttgtganataantaacctagtatataagacaatgtcttgttcttgttgttgcaatgttgcatgcttgtaaaattaagcacacttccttcttccatccattagtagtgaattatttttcttagaaagaactaatgcaaaaagatagccttgtctacaacaatatagtatatatatatatattaatctaagtcttaatgatatgatacatctctatatataacaacagtcaattaagttgatcttgttagtgaatatttatgaatnttttggtttggcaatcagagctggtaccaagaggtgtcaaagctaaaggcaaagtatgattctcttcaaaggacccagaggtaatcacttatgcccctactaaagaatagacttgttntaatatatatctaatatctaataccttatgatgaatatattatcatgctntcagcaatcacatgcatatgtatcttaatca

SEQ ID NO: 72044 - DNA, 483 bp, Glycine max
  unsure (1)..(483): unsure at all n locations
ctcagctaatacgtcttggtcttgctcanaatcagataggaggggagataccattggagattgngatgcttgctaagttgaatgaactggttntatggtgaaaccagttctcaggacctattcctaaagagattgngaattgtaccaatcttgagaacattgctctgtatgggaataatcttgttggacctatacctaaggaaattgggaacctcagatcattgaggtgtctgtatctntacagaaacaagttgaatggaaccattccaaaggaaattggaaatctttctaaatgtttatgcattgatttctcagagaactctttagtaggtcatatcccttcagagtttggcaaaatacgtggtctaagtttgctctttctctttgagaaccatctaaccggtggtataccaaatgagtttagtaacttgaagaacctgtcanagctggacctgtcaatatataatctcacaggttcaattc

SEQ ID NO: 72045 - DNA, 491 bp, Glycine max
  unsure (1)..(491): unsure at all n locations
agcttaacanaaggcatgcgaagtgggtggaattcctatagcaattctcttatgttatcaaacataaaaagggaagaggtaatattgtagccgatgctctttctcggcttcatgcattactttctatgcttgaaacaaaattgattggtcttgaatgtttgaaaagcatgtatgaaaatgatgaaacttttagagaaatttttaaaaattgtgaaaaattntcagaaaatggtttctttagacatgaaggctntcttttcaaagaaaacaaattgtgtgtgcctaaatgttctactagaaatattcttgttggtgaagcacatgaaggagggtttaatggggcatttgggatccaaaagactctagaaacattacaagaaccattttattggcctcatatganaaaggatgtccagcaaatttgtgaacattgcattngtatgtaaaaggcanagtctaacgtaaagcctcatggattgtatactccattg

SEQ ID NO: 72046 - DNA, 510 bp, Glycine max
  unsure (1)..(510): unsure at all n locations
ngagagcaagacaattcanaatctaggtatctaanacccatcaatttatgtggattntcaaggtttgagaagtgaaaatgagaattgggtaatnttggagtaaactctcatctcaaacaagcctataacattaatttaaacttgctcaaactggttntacgacgaaaactccaccgattcaaaatttgacccctcaaaacccaatttaccctagaaatggctcttgctttcacctttgtcactcatttttcttatgtgctcagcccaagcttacctacaagtcctaattgtcattntaaactaggatcaactcacgttagactccaatttacactataccccaaattagcttctctaaccctcagaatctcacactgttctacctacaacattgtcattctcacatataaccctaagttaactntccccttcatctctaccaatgttctatcaggcatttcagcacacaatcatcacatagcatcatcataaaacccttaaacagaatgg

SEQ ID NO: 72047 - DNA, 482 bp, Glycine max
  unsure (1)..(482): unsure at all n locations
agctngatgaagttntactcagactcaccaatcatcaactatccctcggcgaatccatgcactcactcactcaaaaaattgatgaactccttaatcgagtcactcccatcctctcgtcatcttcttatgcaacacctccaccatcaccatcggtacctgcaaacaatcaccgaatgaagttagatgtgcctcgttttgatggcaccgaaccacttggttggattttctaaatcaaccaattcttcgaataccatggcacaccaaagaatgaaagacttaccatagctttgttctacatggaaggcangacgctcgcgtggttccaatacattctatatgagcctttctgtcccttgccctcttttctttgaagaactgcaccaccaattgaaggatcatactgagtatcgacatcttcgacaagcaatcacggtggaccccgatagcactctggatcactcttgtcataactgatccttgga

SEQ ID NO: 72048 - DNA, 461 bp, Glycine max
  unsure (1)..(461): unsure at all n locations
aaaagattcgtcttcttactcttagatgtgactctgagcgtttggttatggaggagtccgagtcaattacttattattnttctcgagtattggccgtagtcaatcaacttataagagatggtgaagatgttgatgaggtgaaggtcatggaaaaaatacttcgaactttatatccaagttttgacttcattgttaccaacattgaagaatacaacgatttaaagaccatgactattgagcaactcatgggttccttacaagcatacgaagaataacataagagaataattaaacacaaggaggctacggagcaactactacaactcagcgtagaggaagcagactatgcaaattactagagccaaataggacgaggtcgccgccaagatcgtggacgtggacgatgacatggatgataatgaagagatggttactacaaccactccaacatattcaacaat

SEQ ID NO: 72049 - DNA, 432 bp, Glycine max
  unsure (1)..(432): unsure at all n locations
agcttaaacattcaacttcgagcgtctcgatatatcatgagtctcaatcatgacatccgagtaanaagttattcgtttgaatttgtccagagcttcaacgcgcaatgttgagcgtctcgttatattacaggactcaatcatacatccgagtaaaaagatattgtcttctggattggctcagagattcaacattcaatttcgagcatctcgatatatgacaggactcaatcagacattcatgttaaaatttattgtcgttgaactggtcacaactcaacattcaattttgagcgttctttatcacgactcactcaacatccagcaaaagtatttcgttgaataactcaacgttacactaagttcgagcggttgatatacggactaatcaacatcgagtaaagtattgctttgatggtcaagataaattattta

SEQ ID NO: 72050 - DNA, 460 bp, Glycine max
  unsure (1)..(460): unsure at all n locations
tgacaataactgtntactcggatgtcttattgtttttgtttataacgagacactcgaaatcgaatgttgaacatctgagcaaattcaaacgacaataactttcttctcggatggttgattgagactcgtaatatatcgagacgctcgaagttgaatgtttaacctttgagctaattcaaacgacaataacttcttactcggatgtctgattgaggcccgtgatataacgagacgctcgaaattgaatgttggagctctgaactaattcatacgacaatatacttttactcggatgtatgattgagtcctgtcatatatcgagacgctccacactgaatgtttaagctctgagccaattcaaacgacgatagctttttactcggatgtctgattgactctccgtacatatcgagacgctcgantatgaatgttgaacctctgagccaattcaaacgacaat

SEQ ID NO: 72051 - DNA, 465 bp, Glycine max
  unsure (1)..(465): unsure at all n locations
cttatgctattcagnggtccctctctcntttatgttattccaggctgaaaaagggctcactgacctcgaggtcgcgcttagcgccattctcgagcttagtgcgagtaagtgaattttcgctcagcgccaaactcgtgctaagcctggaaggtgacaaatgactcgctaagtgagctgatgacgcgctgagcgtgtgcctgcgtgacatattcccttctagattcctcctatccgctaagcgcgtcgatgcctcgcttagcagatgacactcactaagcgcgttgagctcgcttagcgagacattaactntagcacttcttcaaaataacttctttttgcctgannatgaagagaaattgacattaattccatacacaaggcttctactgagcacagataanaaccaagcacaatttatttacaatcctacagaaagaaccatanattgtggaaaatatatacatt

SEQ ID NO: 72052 - DNA, 450 bp, Glycine max
  unsure (1)..(450): unsure at all n locations
agcttgtaggccttngatcttcttcattaatagagtctttngcttcttgaagatcaatggaagtggaataaagaaggaggataggtgattggagatgccacttcaaggagaagatgagtcaagaacaagctcactaccataggaagccatggataagagcttgaaggtaggagaaaatgagtggagggagaggcagagaggggggaacaaaatttatgcctcanatgaggtcagaactntgaagtctaatttctcaaatgatcaaagttgaaaaaattcacacacaacgcctctatttatagcctaagtgtcacacaaagatggagggaaatgtgaatntctattcaaatttatcttgaatttgaatttgaattgttggagccaacattggagccaaaattcactaattatgattagtgaatntcagctatgggtcaacccactaatcta

SEQ ID NO: 72053 - DNA, 412 bp, Glycine max
  unsure (1)..(412): unsure at all n locations
cgtcgttggagcggctccatcaactgccctaactctnttagactggtgattcctaggctccttaccttgactagataaaacctatntttaagcgaaggcatttgacttgaccccatgttttactaaagtgaaacaaaacccagtgagaatcaaaactccgacatctatcatgggtggaatggatgaatgcatgaagaaatgcatatgacacagatgcaatntatgaatacgggagcccgagaaattgtccccttcttggatacaatgtctgggcagcatggcacccgacgtttgtatttaagaaggcaatgcaggccctccgttggtttgccaaagtaaggggatcaagacgaaactcgtgcatgatgcatatgtgaaaggcacaacatggggatgtacatagtacgacaat

SEQ ID NO: 72054 - DNA, 299 bp, Glycine max
  unsure (1)..(299): unsure at all n locations
gaaactactgtgtaagatnttctttttttccttgttagngttcttgatttgtgaatctcacttaaattttgagcttaatatgtggcatgcattgtgaatcacatntttaatctttatcagctaaattgagttgtttatgtatgttgtagggcctttcaaggagaaacgaagcaatgagcttaaattctaatagctcaaaatcacatataattttcacatttgtcattgagtctttgtgtaaggtactcgtcaattttgtaattctacctaacattaccaacagttgtgtatggaaattg

SEQ ID NO: 72055 - DNA, 486 bp, Glycine max
  unsure (1)..(486): unsure at all n locations
cggtgtacgtaanataattagcactaaagcttatattattttatgtatttatcacagtgtgcaaatgagatgattgtgtctaactatttccataacatataggcctgatgttntattttagaagtttataatctgatcttcagaatgtgaaattttttctttacattcttatcaaaggaacgtcgttttaatcacgtagagtacaattataaacatataaattacacaaattaaatataacattttatggtttatgatgatgagtgagatgtggtaatgggagagcaataaagaaagcattctggatccacaaaacacgacatgaagcttcttgcaagttttcaaataatcccttcacgatcggttttgggatcttgcacatattcttgtctcacatcctaaacttccacgagttgacatggctgtcaactgttgttgcattcacctctttttgttacctatacattggtaatgagctatgcctct

SEQ ID NO: 72056 - DNA, 428 bp, Glycine max
  unsure (1)..(428): unsure at all n locations
agcttttanaacaaactntgccactgtgtaatcgattactggaaactggtaatcgattaccagagagtaaaaactctggtaacttagaaaaatttgtgaaaactcttttgaaaaacaaaattgtgctatgtttggtttttgaaaaatcttttcaatacttcccttgtgaagtctttttgatttcttctcttgaaacttgaattcatcttttcttgaatcttgaaatcaaacttctcttgaacttgatcttgcaacttgtgacttaatcttgaaatcattctttatgctttttgtcatcatccttgacattatcaaaacttcttgaatcaacttgattcatcatcatgaagattgcttctacagaaggtcctttggggttcattgtaagaagtggaatttgcttcttggtgtaaacactgaacacaaag

SEQ ID NO: 72057 - DNA, 487 bp, Glycine max
  unsure (1)..(487): unsure at all n locations
tagaaatcaagtgattaaggggtggtgtagaagcttagatatcaagttattaagtgatcatcaattccaaaacatatgggagtatgaaatgaatgaacgtaactttatatcttgcatatactttgcttgtatcttgatttcaggaattaaattgtcatcatcaaaaagggagagattatagaagcaaagactttgactttgatgttttgatgatgccatatgatcatgatgttntttatgccatatgaacatgcgcttctcaagttaagatcaagacanaaatccaagagattcaagatacatcatcaagaagatctctagtgatttagggagggaattccaaattgaaacagcaagaggtttggccaagaaaattaagctaanatgtctttttcanaagattactctctggtattgataccagaggatgtatgataccagtggcaaaatgattataacactattagaatttgattcaatttacact

SEQ ID NO: 72058 - DNA, 456 bp, Glycine max
  unsure (1)..(456): unsure at all n locations
agcttggttggccaatgcanaggcaataataatatttctactaccttccatcgagtagtcaggtgataaagtaatactttataatgctgcttttcctgcgtgacgccaaaaggttgaaaaggaaaattccactgcccaacatttcaaataatctaatgactaatgataagtattagatgtatcttacattctaagatatggcctataacactcgttgctgcctcagaattccacttatcaaaatgacaaaacgaaaggctgttattaagagaaaaaatatagaatttaatttgtgattttaattttgatatatcattaatgcaaactgtcaactaattaaataatatactaaatttatgattgattgataccgtaaaaattaacaaaattttattaaatccttatattaatgttgttgtaaatttttttgtacatcaattagtatataagatatat

SEQ ID NO: 72059 - DNA, 469 bp, Glycine max
  unsure (1)..(469): unsure at all n locations
ctcagctgcctcaatagaagtgaggaactgccatgatgtatttatttccagcaagatagagttgctgcatacaaagttaaggatttcacactgctattattaaataaaaattcacatctttcaactttcctatctcagccataagacaacatcatccacacataanaagggtaaattaaattaaatacaatacaacatacctgcagtactttgcaattttcaagaggctcaaatccaggtcccttaaattcattaaaactcaaatcaagaacctgaaagaaaataatttctttcaatcagtctgtaacaattatatgtgagattattcaaacgtaacaccccagatgtaaattattatataaaaccttcactctcgtcaatacttctactccttccagtgtagacaagagaatatctcngagataaacaaactgccaataagaatcataaagtaagtgctatgaattat

SEQ ID NO: 72060 - DNA, 413 bp, Glycine max
  unsure (1)..(413): unsure at all n locations
agcttcatgatgatgaatcaatctgattcaagatgttttgataatgacaaagatgatgacaaaaagcccaaagaatgatttcaagattaagtcaacaagttcaagagaagtttgatttcaagattcaaganaagatgaattcaagtttcaagagaagaaatcaagaagacttcacaagggaagtattgaaaagaattttcaaaaaacaaacatagcacaattttgtttttcaaaagagttttcacacaattttctaagttaccagagtttttactctctggtaatcgattacctggttcctgtaatcgattaccagtgggcaaagttgttttcaaaagcttgtaactgaatttacaacgttccaattgatttcaaaatggtgtaatcgattacaagatattggtaatcgatta

SEQ ID NO: 72061 - DNA, 485 bp, Glycine max
  unsure (1)..(485): unsure at all n locations
aaaccctaattatgatatttctcacatctgaatggaataatgtgccctaacccacatcgcactgatcgttgaagagaaaaagatatgaagagaacaattgtggaagcgaaaaagagtgaaagtgacaagtagagtgaggaagatggagtgttcgggttaggtctagtggattgtgatgttggatcgattgtttgggtttgaagaatgaacggttcattgtggccaagtcatatacttggccttgatcacctttctacttctcatcttacttctcctcattcaggaactcccgttaagcttctcagaaaggaagattccaacaagtaattgtctttttttttccttttatacatttattattcttattcaataattcatatcacactctcttgattattatagtggtcctttgttntagtttagccactagcacattaagtataagttatgtgatcgtgaatgtgagtatatacttatcgaatggc

SEQ ID NO: 72062 - DNA, 398 bp, Glycine max
  unsure (1)..(398): unsure at all n locations
agcttctggtaaacacaacttattgtattatgtcaatctattatactcatgttacgcatgaacaatatccatgttataaatgttgttaacaaatatttagacatgaataggagaaaataattgatagaattcacacattttctgaatttcatgatgccacaatacataaaaaaatttatattggccttgctattattcaatgtgagatgaatcttgtaagctggatcanggattggtatcatataatacggaaattctaaatctagttttttttttcgcttaattgcacgttttacccccaactcttaaaaaacttgtgaattctaccctctgtcattntacccctaacataattgcactttctaccccacaacatattttatatttttgccaaattt

SEQ ID NO: 72063 - DNA, 303 bp, Glycine max
agacacaactcacatgctggtggatacttgtgtgaaagactctcgtatgccagaagatggaacacctgatgaataatgcaccaatgctggagagatgatcaagataataacaggagataatgtcacacagaggggccatatcttatggtgtgtgattctatatgatgaagtggtattgaagatgaatcactattggtagagcgctttctatacagagagttgctcacacctaagagaagaccggagagagattgaccaaatcatagtcttcggtagatcatttcgctctgacgagcttgtgat

SEQ ID NO: 72064 - DNA, 405 bp, Glycine max
  unsure (1)..(405): unsure at all n locations
agcttagcacaggtgcattactcagagcctacttctttatgaggaaagcttggtcagcgtcaacgttccagtgaaaggagtctttatttaggagagttgtgagggtagctacgagtgaggaatagcctttagtgaaccttatctaatatcccgacaaccctaagaagcctcgtanggctcgagtggatcagggaacgggccaattctggattgtctcaatcttatccagcactggttccactccccggaaagacgctatgtgaccaagatattccacctgagaagttcaaaagaacactttgaaagcttcagaagaaattagtgcaagcttcggatttcaaacgctttgcgaaggtgctccaagtgttctgggaatgtttngctatacattaaaatatcataaaa

SEQ ID NO: 72065 - DNA, 393 bp, Glycine max
ctctggtgtcttctatacacacaaactcaggccataatggaaaataggtaaggtagaaatgatcatagtcattggcacaaatattgacttctgtaactgctactaagcttgcaatggaagacattgtatatatatattgatgagatttgcattcactaacacaaatttgtctaatttgtacgctcgaatctatgagcttatgtgttcaacttgaaatatgaaatttcattttacatctttatttgcattatgaaccttgtccacacatcacaattttcttgatttctctggcctagatagacctgtttataaggctactttgtgagtaaaatcaaatatagtgcgtagccatcatgattaaaattgactgaatatcgacacatgattagcaac

SEQ ID NO: 72066 - DNA, 352 bp, Glycine max
  unsure (1)..(352): unsure at all n locations
agctggcttagccacatacatganagcaataaaagaatttctatgtgtctgaaacacattacttgattagcgcacagacgtgcttagcgagttcataaacattaaatcattcatcagataagatgaactcgcttagcgggacagggccggcttagcgagttcatctagaaatccagatattcatcaaaaagtgatgaactcacttagcgcattcatcgccatttccaaaaaaattggtggtggatcaggtggcctggaataattaagaaggggggggggttgaattaattagtaatgaacctgttctaatgaaaaatctatccttctgaatgttactagactaaactacgct

SEQ ID NO: 72067 - DNA, 350 bp, Glycine max
  unsure (1)..(350): unsure at all n locations
gagaagagaaaaatgaaggattgaagaaatacaagttgtggtgatgtcttctncacctctagaacctcacaatcactcatagactcatctcatgctctcagcaaaagctctcaaaactctctggaacttggacctttctcgatctagaaatctctaaacatgcaaaagcttcgagaattggccaaactccctcttcattctggatttcaagcttaaataagtggtcttggtggtgcttgcattgctagcgcaactatggatcacttagcgcgcattagttgaattcaacttaacacgcgtcttctcgctcaacggatggactcaagcggtgtgcttagcgggatggtcct

SEQ ID NO: 72068 - DNA, 461 bp, Glycine max
  unsure (1)..(461): unsure at all n locations
ctaagcaccgangctgcagcttgatggtgatggttatgnttatgtatatttactgtgcatgttattgacgaacatatgattgtcttggagaaagcaaaatccgagtacaataagatgaactaagtgatggatgaattgcgtgcatctgaggtactggttcattcttgatgtaccataaaacttgaacttttctcatcgcaatcattaatgtgcaggttgatgctgaatttaaattaaaagacatgaagaaagcatataaagaattggaaatgaaggtgagatggtacatgaaaagactacatgattggcaaactgctcttcatatgcatatagaacagtatgtcatcagattactgatnttgaatagtgtttatcattttgaagttttataacactgaaatggtgtgcaaattacgcagattagtggacaagatagctcaggctcattgctgagaacattt

SEQ ID NO: 72069 - DNA, 263 bp, Glycine max
  unsure (1)..(263): unsure at all n locations
gcattaaacacatgcatatttgagaccatccactatcgcacaatgttatatgaccgctgaaagaaagctggattcaagaacaattaactactattttgatggctatgtcgaacgctctcatgatataagctatacgatcccactngaagaaccttttgcgacacaagaaatgcgagatgtattgagaaagcttgaatcgggaaagcatgctgtctatcttgaataacctcctattgacagcgagatggagctctatatggagc

SEQ ID NO: 72070 - DNA, 371 bp, Glycine max
tctgaagatgacacttagcttaagttaatctacaccaaagagggctgtctaaattgagcctagtccaacaagagggatctgaagacaaagcctggattgattcacgctaactagggatcgaggtttagtaactcaggctacaacatagaacacaaaagcatgattgattatagaaatatcgttatatacatcagttggtctgtaaaaagacccaacatctttacctaatactggccaatttaatactttccgttttactattttagcctagacaagttaattctgtctacacacaatatcatggtcttcaacatgcctattataattaacccgctagacaatcatagttgaactcggataccatttaatta

SEQ ID NO: 72071 - DNA, 483 bp, Glycine max
  unsure (1)..(483): unsure at all n locations
ggagactacgaagtggttccctattaattttctttatggaacttttcatgccaagtctcttgacataagagtagagtcactacaatctttattacctataaatgatgctcttgaagcagttctttgtgattctaaatcaataaaatcttgatggctgtcattagtaagcctttccttacagtatgtgattatgacattgaaatgatttatacagatcctcagtttcatcatttaggataatcatcttctcttcaacatcttttacaatgccatgagcattagtttccaaatctgcattcaagcatggagataaaatgcagaaaactctctgatttctntcagagattattgggtctctcacaatttctaattgacatataaacctaaataaaggccacgatagatagggattcttacctcaataaagaggaagtggagcacagagtggcatatagtcccacaactgtgaagtgaggttgtatg

SEQ ID NO: 72072 - DNA, 442 bp, Glycine max
  unsure (1)..(442): unsure at all n locations
aactaagcttcaccatacaactacaaggagtgtggcatcaaggggaaatttgatgaacagtccattattcttctcgcaaccaaactgccgctaaaagtctaactttgtgacatatgaagataattttaagaaccttaatttactgctttacatgcacattcaataaaattaaagcaataaatatattattgataaaattacatgcacacgaagatgtttgactgattggtgtggaggctgctgggttgggcctacaaagtagtaagcatgcagctactttaagaaaggagaagctggngttttggatggatctatgagctatcttttgcaggatgatgatgggtaaataatngagcctcactctatcagtgcanggtaattcattctggtagcatttctttaccctttctcttgtctattcatgtntnntgtcattccagtt

SEQ ID NO: 72073 - DNA, 490 bp, Glycine max
  unsure (1)..(490): unsure at all n locations
agcttgacaagccagcttggttaactaacaataattattatattataataataataataataataataataataataataataataataattgtattttatcaaatcttatcttatccagattttattctatgtagattttattttatccagattttattccatctaaattttatttcgtccaaatattatttcatccaatcttattctatcttgttcagattttattttatttcggacttggacttataatagatttgtgagctttgaggctgaggacctatataatagcaccaatattntagtttacggattctcttttcggagaggagaataattctaggattttagaattccagttgttattatcgttcatgcacactcttcacgtagaataaaatttattttctgcaattntgtttcggcttcaatctacagtttcgtttctactgattaatggaaggctaagtctccaacattatnttctcttg

SEQ ID NO: 72074 - DNA, 380 bp, Glycine max
acatacacatggtttaaccattaaagcagtttaattcacttccttaataatatgcatgagttattgacttatttgtaaaaaaaattatatgtaacaggatcaattcttataaataaaaataaatatataaaaaatacacagatattaagcggttgactatttttaattaatcaatttaattttcttccacagactaatttaactaaccctctcccttatctaaccatgggtattaccaatttaccatttatttaaaaaaaatagttttggtaaatttctcaatatatatttataatagaaaaactaaaagataactcagattatattcttctataaattaacatcaacactgtaatataattacaaataacttatatatc

SEQ ID NO: 72075 - DNA, 496 bp, Glycine max
  unsure (1)..(496): unsure at all n locations
agcttntatgaatatattagtaattagtatcntagtctttcgttgtataaaataaatatctatgttatataactaacattataataaataaatattttcagcacaatatatattatattaaaattcanaattggaataaataaatattttatatattatttttaattacacacacacatatatatattatttntaattagtgataaaatattaaaattctaagcaaaactaaagtatttaaatataaatatttcttgcgtaattttaattaaatctttatttaattctaaacacatataatcttatttgaaaatacaatactctattgaaaattaaaatataatgtaataatttaaagcaatagtataatattaaagacaatggtagataagaaaccttgttaatgtatctaatggaaaaatgaagaaagtgacatataatctcagatgatattttaaatactgttaatttttctcataaagtataaaataaatta

SEQ ID NO: 72076 - DNA, 513 bp, Glycine max
catgcaagcttcctatgagacttctttgaaaagctagagttttatctacccacatccctctaataactaaactaacctccttgaaaataaaacatggataaagtaacacaacaaataaaatcaaacatcaattacaataactaataaaatatatatacatatcagggtgttacaataatcgattacaaatgttgtgtaatcgattacataagtttgaaaatgttttatcacaagttgtgactcttgaaatttgaaatccaacgtttaaaaacattggtaatcgattatatgtccatggtaatcgattactactttgtaaaacaattataaaattgtttgggcttctggtaatcgattactgccttctggtaatcgattaccagagagtaaaaactctggtaaaagaattttctttgaaaaacaattttggacatattgtgctattcaatattttcttttgaaaaatattctatacttatcttgatgattttcttgaaagtcttgcatatcttg

SEQ ID NO: 72077 - DNA, 206 bp, Glycine max
  unsure (1)..(206): unsure at all n locations
acgcacccatatacaatcaacgcagatacgttacctatattatttacacgtatttccaaagggaatcttgatacttacatcacacacatctccttggctaaattcacatacatgcatacccaaagcattntgtggtaccacaaattgcacatgtacacctcttggtgtatctaatacctatacatacacaaactttatgatgaatc

SEQ ID NO: 72078 - DNA, 307 bp, Glycine max
  unsure (1)..(307): unsure at all n locations
tacatctcatctatagcatgcattttttttctttacccactcctcacgtttggntttttagggaaaacaccataactaaacgcgccgcgagggatccctatcgcaccagatccaaatctagaacgatgggtgatcaagaggagacacacgaacagatgaaagccgacatgtcggctctgaaagaacaaatggcctccatgatggaggccatgttaggtatgaagcagctcatggagaagaaacgcggcactgccgccgctgtcagttctgcttgcgaaacagacccgactctcttggcaactacgca

SEQ ID NO: 72079 - DNA, 493 bp, Glycine max
  unsure (1)..(493): unsure at all n locations
atctctgagtcacctgcggcatgcaagcttcattgcctaacaagccaacttacaacagcaagcttattagactcagcataaggatgcacagaccanagttgcgtatgtaaaanaattgtatgaccaagtgaaggtgcaaattgcaaagaagaatgaaagctatgccaagcaagcccaaaagaaaaggaaggaagtggtacttgaacccggtgatgatcttggacatttgaggacaaatgttttccaagaaggagggaatgatgagaatcatgaaacaggccaaatacagtctataggcccaagtggagaaggacgaatgcccaagtggagaaggacaaagcccccgagtggagaaggatgaaggcccaagtggagaaggatgaacgcccagaggcagagacactatcaagactattaattgatgctgaaggccaagaataatntgaaggcccataataaatatgttctatntaagttataattttattttatg

SEQ ID NO: 72080 - DNA, 379 bp, Glycine max
  unsure (1)..(379): unsure at all n locations
agaggggagccaaattgagaataagagtaagaagggacttgagatgtctcacagactctcttcataaagtacacaagtgtacacatgcttctatatatagactaggtagcttccttgagaaagcttcttaagagaactttcttgagaagcttctttgaaaaaactntcttgagaagctagatgcttgctacaccacccatataaaactaagctcacctccttgagaagcttccttgagaagctaaagcttagctacacacactcatctaaaaactaagctcacctccttgacaaaatacatgaaaatacaaaaaaaagttcctactacaaagaactactcaaataccctagaatacaaggctaaaaccctatactacta

SEQ ID NO: 72081 - DNA, 382 bp, Glycine max
  unsure (1)..(382): unsure at all n locations
gagagagagagaaagagagttgtgggatctctaaattgaacgaagaacagaggaagagaagtgaactttgaagtttgtctcacaagactctcattcatcaaagttgcaacaagtgctacacatgcttctatttatagattaggtagcttccttgagaagctntcttgagaaagcttcctagagaaaacttccttgagaagctagagcttaactatacacacccctctaatactaagctcacctccttgagaagcttctttgagaagctttcttgagaaactctcttgagaggattcctagagaagctagagcttagctatacacacctctctaatagctaagctcacctccttgagatgagaagctagagcttagctacaca

SEQ ID NO: 72082 - DNA, 504 bp, Glycine max
  unsure (1)..(504): unsure at all n locations
tctgagtcacctgcggcatgcaagcttgangaatatggnngtacccatcacatgtggactatgttgcggtcgggcgatggtgcacaacaacttttccacatccacaatgcgcgcataaacccaccatccnctgttgcccacctccatctgagctcacgtactcccacgtagcccatatcctcgtttctctcaacaccgggtccccatcaatcctcccaagcttccacaacatccaagcaaaccaacattcaaacagcacaagctatcacagccaagcataacagagcaaatgcagaaaactctgctcaaacaccaaccagaatcacagcttttctcacttagagaccccagtaacaattccttcgatcctattcgttaaccgttgaatcgactccaaaattttactggaagtctatagtacataagcctacantttgaccgttgggatctactagcaaatgtncagaactcattctgtactactcttttcacaacctaccacac

SEQ ID NO: 72083 - DNA, 136 bp, Glycine max
ccttattggagagtcgccatataagggatcggaaacgacgattggtgacatgccttgaaacatgtgaggcagcatctatggagaaaaccaccttgagagctattggacttggaggcactccaaattgagtgaatca

SEQ ID NO: 72084 - DNA, 336 bp, Glycine max
  unsure (1)..(336): unsure at all n locations
agctngacctgcccggcgagcaactggttgtaggtgactctctttacattgacctgngtcgccagagccgacatgaactggaacgcgtccacctgcgcggcgagcagcgcctgataatccatcagcgataacgacaacgtcgtgccgagcagactgcccatcaactggttcagcaaacccgcattcaacgacagcaactgcgtgccgatcgcgaacgacgccatcgagcttgtggcggccgtcgcctgggcgctgacattaatgcttgtgctgccgacgagctatctgcccaaatagatcggtgtctgtgtttgaaaatgacccgactgcattgat

SEQ ID NO: 72085 - DNA, 463 bp, Glycine max
  unsure (1)..(463): unsure at all n locations
agcttgtttcccctcattgtcctgatattagaagatggtggtgtggggtcacacacacaccacacaaccagatcacgtcgttacattacaataatcaatcttatccctctttctcatcattcccactattcttcacattcacttctcttctcttctcattcacttctcttctcttctcgcgaacaaacatatagcaaacacacgcacacacacataagcacaggtgcatccattggactgccttcaattttttaattccccccaaaaaatgagccagtgtgttgctagatgggatgtcaagacaacccaccacccttaagagtctctcttcgctgccactccaattcaactgcccctgatgttcccatgatagctctcttatcttctctctctatgtatccgtacaaaaantattatatgacccgagatttatatatatatatatatatataacactagtcgg

SEQ ID NO: 72086 - DNA, 238 bp, Glycine max
cactgtgctatcagaacttcattctaccatgattttgccttgatcacgtagacgcatgtgtttttaggataattcaacagtggaaactggtctgattcttacaactcgataggattgggctagtttatcatattatcatgaacgatcggcgtacggtaatctagttggtgtatgtttgtcttaatgcgattctgggtcgagttagtcccataagaagaatatgcgaatgatgcatgat

SEQ ID NO: 72087 - DNA, 453 bp, Glycine max
  unsure (1)..(453): unsure at all n locations
gcttacactgtacttnggcatctattctcaattttttatgctaagatgcacaacaaaaatctgaattacatgtgaatctgaaactatcatgtgacctctcatattgtatctagtccaatatttcttaatttattgagcggggggttgtctttctatttttggcaagttagaacattgaaatttctattttagtttacaatgaacaacttgtacaagtatctgtagagcttctaatgattttgtttactaattctcttactggatttgtaggagttaactattggtgatgatatttatctttattatctgtctctataggcatgttactgtataaagatgaatggatcggttccctcatgagattgaccataccttgtcattgactgtctgattgacccaatgggaatatatagcattaataagttaaaaacatgtctgccttttgtgacggat

SEQ ID NO: 72088 - DNA, 488 bp, Glycine max
  unsure (1)..(488): unsure at all n locations
agctntgaacaatatacttggccttcaattaactgtctttgctcttggcggccacgctcaacaaagtactttctacacctactgtacgttgattngaccaatgctgttatgggaatgtttcgacaatccttcaaaaccttattgatacattctgaaaggttggttgtcatgtggccatatctacgtccttctctatcataagccatcgtccatttttcctttgaaattcgatcaacccatgtggctatggctggactcagttaacgacaattttgtaaattctgatcaaaaatgtgcttgcaaggagtgtangctgcataanaatagttatgaataacaattttaagtatataggaaacttaaataaacgtcaccaacaaataggaaatcttacccaaatttttcaacatttctttgtgtttggcattatagaagtctccgatcgaagttgcttgctatgtgtcgcacgcagtacacatgataaccgt

SEQ ID NO: 72089 - DNA, 360 bp, Glycine max
  unsure (1)..(360): unsure at all n locations
acacaagatactcagctgctgtaggctttatggggctgatcttgagcttaatggngttcttaatggtgattttcgaccatggagatgcagcggaagacaaaggaaaagaggtgagaggaggcgccatccattaaggaataagccatggaagaaggagcttcaccaccaagatgagccttggataagaagcttggaaggatgcttcaatggaggaaaataaagagggagagaaagagagaggggggagcacgaaattgaaggaataatagagggagagaagtggaancttgaantatgtctcacaagactctcattcatcagaagtacaacaagtgttacacatgcttctatttatagact

SEQ ID NO: 72090 - DNA, 507 bp, Glycine max
  unsure (1)..(507): unsure at all n locations
tcttgagtcacctgccgcatgcangcttgtctcagcgtttatgcgagaacggcgacattattctatctatcatcgccaagtactaagaagagttaggtctagccacggcccacgagcataggatcgcggacgagtatgctcaagtataggcagaaaaagaggctagaggaagggtgatcgactctttacaccaagaggcaaccatgtggatggatcnggttgctcttaccttgaacgggagtcaagaacttccccgcttgttagccaaggcccacagcgatggtggacacctactccgcccncgaagagattcatgggcttctcggctattgtcagcatatgatagacttaatggcccacataattagaaatcgttaggaaacttgtatggtctctcagaccttgactagatacgactnntcttttgaataaaatgagttggcccatgttttactccaaaaagcttgtgccatcanatcactgctacatntcatctctagcatgcat

SEQ ID NO: 72091 - DNA, 298 bp, Glycine max
  unsure (1)..(298): unsure at all n locations
cttcttcaacccattagaaaaattgacagttatctgggtctgtttgaggtaatgcacacatatagaataaccttcctgggtttctccttgttcttgcagttcgaatagctgcacgtcttccatggtggcattgccgaatgaaactaccagaatatgcacaacaactgccacttgcatacatggacaaaatcaactgcaccaagcatcatgggactgagccttatagtanaagaagaagaagcatctcagcgtgggaagaagaagaagaagaagaagcgaccagcagttcgtaaaccct

SEQ ID NO: 72092 - DNA, 319 bp, Glycine max
agaatgtcaatccttaccctcggaagcaaaaaagataagaaggaaatctccaatctaagagaaagccaaatataaaaaataagagaagagaggatattcccaatctaagagtgggagaaagaaaacaaaaagagaagaatgataattcccaatcaaagaatgggagaatgtaaaaaaagataaagaaataggaatggaatgaatgttcctgattaatgaatcagaagaaatgtgcataaaggtctctagaccagacaatatctgatcaatacagaattgtcaccatatgaagataaggaaggaaaggaaaccatgacct

SEQ ID NO: 72093 - DNA, 468 bp, Glycine max
  unsure (1)..(468): unsure at all n locations
aagaaagagggttagaaagagatttggggagcacgaaattgaaggaagaaaaagggagagaagttgaacttttgagtgtgtgtcactagactctcattcatcaaagttacaacaagtgttacacatacttctatttatagactangtagcttccttgagaagctntcttgagaaaaattccttgcgaagcttctttgagaaaacttccttgagaagctagagcttagctacacacacccctctcataactaagctcaccttcttgagaagcttccttaagaagattcctaaagaagctagagcttagctacacatacctctctaatagccaagctcacctncttgagatgagaatcaagagcttagctacacacccnctataatagcttagctcacccncatgancaaatacataaaaatacaaanaaattccctactacanagactagtcaaactggctcgaaatac

SEQ ID NO: 72094 - DNA, 499 bp, Glycine max
  unsure (1)..(499): unsure at all n locations
agcttatgcgcctatntccttacgaacgttttcttgcatattacatcctattaactaagaaaaatgcacccatatacaatcaaggcagcttccttacctagattatttacatgtacttccaaggcgtatttgttatatacatcaccacgtctccttggctaaatttacatacatgcatactcaaagcactttgcggtaccaaaaattgcacatgtgcacatcttggtatttctaatacctatacatacacaaacttcatgatgaatcttgactatctacacaataaggtgctacgtttcatgctcttttcagtttttattctttttttgctacctaaagtcgtatgcaaattcaagtatatgttcctttgctgactaacactgtattaaaaggtatatattctttgtgaatgtattctcatacataacatgcaacatatgtatatatattctttgtgagacattctgactaccacaaattatatgtacatacatccaag

SEQ ID NO: 72095 - DNA, 445 bp, Glycine max
  unsure (1)..(445): unsure at all n locations
tctcaagcattacaaagaagtgatccatatattataaatgctatgaaattagctattgtgttcaaacaaaggttacaaacaatgaaggatgattgacattctctgctcggtgatgtttcattattttgtgaaaaacacaatactattgttcaaaatatgaatgacacttttcaaacacaaggaaggtcaaggcgccatatggaaaaagttataatttgcatcatttttaaaaattgtttatcaaatgatngatcgacaacttcaagagttgcaataatcgtttacaaaagtgaatattcgagtgcttctctgtgtagctcgcttaaatctaagaanatatcttctacatcttgatagaaagtgattgtttgcatactctatcctcagagtntctcttgtgactntngcactagatatcactngaaatatntctatatgatgtctc

SEQ ID NO: 72096 - DNA, 402 bp, Glycine max
  unsure (1)..(402): unsure at all n locations
aaatgtcaatgttaatggtgagataatgtgaatagaataatatatgatcatatcttatatttgctctattatattagattctctggattctcaatagtctactctgtccttattaaataagaagacttattgagtccaagcatacaatatttcatcatgtatcataaatgtgttaattattataataattacgttaaagtcatattactaattatttgcgattgaatgataaattctagatgaaaaatacatgattattacactctataatgttaagaacaaggccaaaatacttgttagtatgtcttttattgataagctaatacaaaacttgatatctcttatatgattctttcttatagttcattatntgatcttacatacacatgttacaaataagaa

SEQ ID NO: 72097 - DNA, 379 bp, Glycine max
  unsure (1)..(379): unsure at all n locations
gctttgcagaagtaacaagtaacagattctttggagaatgatgcagaattctgtaattgttttgttcagccctggagtatgagaaaaaacatagtcagtacccatgcattgtgtgaatgttgaagagcttcttgatgtacatgatgnggtccatggattgggtcaaaaacagaactgtaccaaggtgttttgctcatttatacgctgaatgtatggaaggtaaagcttctagcataaccctgctagaaaagaaaaatgtgtattcgaatctcgcttgcctattatattagttctcacaatgtaaaagaccatatgggcttgcgtcctggtaccctatggataatatatctaacagctattggtcgtattatcaaagcat

SEQ ID NO: 72098 - DNA, 495 bp, Glycine max
  unsure (1)..(495): unsure at all n locations
agctntataagcgcgggttcgggagacanaggtcaagcgttctctatatgcgaagatgatattccgagtactctggatttggtacgaccatgccctcctgatttccagctgggaaataggcgagtggaggaacgccccggcatttacgcaacaagcataatatccgatgacgagtcccccgaaggtactaatacctgtgacccgtctatcgacttcgagcaagaaatgaatcaaacggaagatgaaggtaatgaggatggtggacttccctcagaactagaaagaatggtcgcccatgaggaccaagaaatggggcctcatcaagaagaaacagagctagtagacttatgaattggcagtggaaagagggaagtaaagataggtacaggtattaccgcacctattcgtgaagaattaataatcctgctaaaagactaccaagacatctttgctttgtcataccaagatatgcccgggttgagttctgacattgta

SEQ ID NO: 72099 - DNA, 442 bp, Glycine max
acattcatacagaacaagctatcactgttcatataacagggcaaaggcagaagactctgcccaaaacaccaaccaaaatcacagctttttctcacttaaagaccccagtaacatttccttcgctcccattcgataaccggtggatcgactcgaaaattttacttgaagtctctagtacataaatctacattttgaccgctgggatctactaacaaacatccagaactcattctgtatactctttcacaaccagcaaatacataagcattttctgcacttatgcaaaattctgctgcacaatttcacaacaaaattctgcatagagtgcagatttcgaaaaccacacttcccctcatccaatcttgcccaaataaaatcctacaagtcccacatcatgtatcaatcatgtctaaaccaaagtcaagcttcataacacagcaac

SEQ ID NO: 72100 - DNA, 483 bp, Glycine max
  unsure (1)..(483): unsure at all n locations
atctctgagtcacctganngcatgcagctngcacaacttgtgaagccaaggaactngtttatgtattctataaagcactttttgggtggcttacttacacaccaatgattaggaactagtgataaaactcgaaggttgagtcatgtagatntgaaggtaatcattcaaaaagtacattgttcacatcaacttggtggacatgccaatcagaggagaaatcagtactaagaataatccaagtcaaatcatactggggatttgaaactttgaaggaaactcttgtcaatttgtcaagccttattgtttcgaaaggcaccaccgaacattatggttggttctaaatacttacaaccaatagctgtcttgttaggtgataactcaatcaaggtccatgtgttgctgtgaatcaaggcaacctattgattttgcatggcttgaagccattcagatctaccttccgcctattggtcatgagatgaacat

SEQ ID NO: 72101 - DNA, 404 bp, Glycine max
  unsure (1)..(404): unsure at all n locations
cactaagctattgcataattttgaacctactgcatcatcgcanctagnctattaataatagcatcctatgctatntatgactnttatctgaattaaatctatcactctcaaatatatatttaagatattctttagatttcaagtgaaagtattaaataaaatttttgaaacattcttttacattaaatattctttttttgtattaaatactgcttatttattggtcaatcttttgttctgacctaattactttttcaatcccggaagttagatcaattggctctattattttaatttaatgttagttcttatcgtttctaattatataagntcacaaattctctgcaataattaaaagaacataacgaaagtgggatccatcataagtataatagataatcaaa

SEQ ID NO: 72102 - DNA, 467 bp, Glycine max
ttaagtcaccgcggcatgcagctgtaactgtgcaatcatgatgacctacttttatttatctctgggattggtccaaaaaagtcccacctctgaaggaaccaatctggaaaactgtatatcatgttagtcttgaagtatattaaccacgagtgcttgtatttgttcttttgatgccaaaaaatattggtctaagcatccatatagtcccaataggtataactaatgggatcaaagggtacacttttcttttgaatacattaaggttggaaccaaaaatgtctaggtgtgaaaacctttaaaatttggattgacgatagagtatttaagagagtgtcattcgggtatttgaaatgtttaatagattctgagtttgaatctattaaaatgaattcataaaacggtcttgttctattgtttgctattggttagaagtggagtctgggatgaaacgccttagctgtggcttg

SEQ ID NO: 72103 - DNA, 118 bp, Glycine max
aggcggcggaaaagcaagtccgaaggtatttttcagactggatggccactcctcgattcactgggaatgggagggaggaacccccggattacgcacagcataagtaacccacggttaa

SEQ ID NO: 72104 - DNA, 372 bp, Glycine max
  unsure (1)..(372): unsure at all n locations
tgaggcatgcaagcttaacaagagtcttcacagataatcatcatgaatcgataactaacanaactacccatcatatgtcccanaaccccatacccacgaaatttaagagagaaagaagtccacccattcctgaattttcgaagtcccactcgtagccacgcacttcacgaccacgaaaatgctctcctttcacgatgtgnggcagaaatgagcaccanaggttgaagctttgtgtggagctttgatggtgaatgagggacgaaaaaaatcctctcgagggatagggagagagagcttctgataatgtggtgctgagtgaggagagagatggttgcgttttggttttaataaaagggttacctctttctctat

SEQ ID NO: 72105 - DNA, 234 bp, Glycine max
gcacgggaagccggaaagtccatatcaccttcctaattgcacacatggtgcactgcgcccccaaatgcgccaggtagaagagataacttctcgggctctcgtgtccgtaaaatgcattcatatcatgcatcgcataagcatttcttcataacatcataatggacatatcctgcacttgtcacgtattatattccagcctcaccttgtgcatgagtcatggcatcatcatgcata

SEQ ID NO: 72106 - DNA, 238 bp, Glycine max
  unsure (1)..(238): unsure at all n locations
acctggagatatgtcgtggtggtcatgagaccctgtggacgtccagtggggtgctatngcccataaccaagcttgaccaattccgacccaacccgggcatagatagtcagtgagaacctgtgatgtatctaaacaggcgagctcctggcagtcgacagataataggaacagagacgactaatcctcgaggtttgtgtggcggctggccatctgtgaactttgattgatatatgggata

SEQ ID NO: 72107 - DNA, 393 bp, Glycine max
  unsure (1)..(393): unsure at all n locations
ctacacttacatggaccaaaatngaacatatgcaagcttacaacactaaaaataaccaaaatatcttatatagaccaaatttaagaaaacgcatacttacacgtactattaattaaaagacgttaaaaaagcgcatgtatgttgttggtcccaataacatatttaagattatatgataagtagaaatgcaccgcttgaccgagacgtattacttattgttgagttaaaattatggatattcatgggtccaggngacccgcgaacccaacctaaagtgaacatattggcttgaattatttaagtgtataggtcaaagttgacccaacccaatactaaactggtgggaaatgaattttgatattaaactcatgacccaacccaattggaacactt

SEQ ID NO: 72108 - DNA, 377 bp, Glycine max
  unsure (1)..(377): unsure at all n locations
caagaaccaactnaagacatcaactggtgtattgctcagccttttccctattagtccattaaggcctctcccttctgattcaggtccaacccagaaaacattntaacacacanactctatgaactgtacataacacacgactcatcaattggtctcacaataattntatcttgtcgcgcttgtgattaaacttgtcgggtccccatagaggtttccatcataatattcgtcgtgcattaacttcgtcgccttaaagagtcttattagcgtgtgaatgtacgattcatagctcataactcaatgcacacaacatctcaatgcacatgtaatacaagtcaatacatacttctattatcacatacatattgtctcaatca

SEQ ID NO: 72109 - DNA, 449 bp, Glycine max
  unsure (1)..(449): unsure at all n locations
catgtgtgatacctatntgaatctcctatgctgtctctacatacataanacagncccaccatcccaattttgcaaaaccatattcatacatcattggggcatttcaccgagcacttgtggggcgcacgtctggacataaattgcaagagaatgggggcaatgtggcatgccccattgcttaagaacacaacgtaggcctaaggccttctcatttcaatcctcaactcaagacatcgagcataaaaaacaacccagaactgccccacatatataagcacgttctcacaatttagagcaccaatagatgaagaanatactccaatgggaagcaaaaacactcaaggattgagtacttacttgatggagtgagtagaaacaccaataaggaaagcaaaatgcaaccaaaagtggcttatgggagcacanaccgcaagccttcgtgagttctc

SEQ ID NO: 72110 - DNA, 420 bp, Glycine max
agaaactcagctcgagtgctctatagaacttgaactcatcacctctagaatgttatctattctactacttcatttttggtggacaaatgattatgttttctagaatctttaattcattctagatttggaacattttgttatatgtttaattcattattggatcctgtgattgtaccaatctggtttacatgtgaattattgtgaactgagctttgttgctgtaacaatgtcataatagctttatattgttgagagagcaatctcatttcaccattatgtgtatcttgactttattctagaacaacactatctccttcttccatcgacacattcatgttgttgatgcttgcgccttgaggcttatagagcttatgtctaggagggtaaccatgtctagcaatgctttgagagtgagggtct

SEQ ID NO: 72111 - DNA, 495 bp, Glycine max
  unsure (1)..(495): unsure at all n locations
agcttctcctaagatagccaatgcatctttcgtttgccctggntccccccatcctataagagaaggtaggcccaaatacttggcttgagatcccactccctttacacccaacaacataatttgctcattacatatngttgtcaaaacattntggctaaaggaaatctcaaatntttcaaggttaatcttctggcttgaagcttccttatacacttggaaagatagcaatggggagcttcttcacagttgatggggagaagaggatcccatgaagtaacctaagcaaagattatgttatcatcaacaaagagatgagagattggngcagcttggttatagatcttgctacaatgaagattatgattttccaaggatcaagtaagcaaagccaaaagggcttcaatgcacagaatgaggagatgggtggagagcagatcctctgtctcagacacccctagaagggttaaaatctctagtagtgaagacacatttcat

SEQ ID NO: 72112 - DNA, 248 bp, Glycine max
  unsure (1)..(248): unsure at all n locations
ctcctatctataaaagaacatgtgtacacttgttgtaactttgatgaatgaagatcttatgagatacacttcaaantccacttctctgccttctctattccttcaatttcgtgctcccgaccttctctcttatctttactacattacagcatacttttcaagcttcttatccaaggcaactctttgtggngaagctccttcttccttggcttattacctagtagatgagtgcctctctcttctcttct

SEQ ID NO: 72113 - DNA, 435 bp, Glycine max
  unsure (1)..(435): unsure at all n locations
atcctcagagtcacctgaggctgcagcttagaaaatggctcacaacttttattcctataangaaattcaatanataggcttcctatcttaatagagagggctaccactattggaacatccaaatgcatatcttcattgaggcaatagacttaaacatttgggaagccatagaagtaggaccttatgtacccaccatggtggctggaaatgcaacaatagaanaacctagagaagagtggactgaagatgaaagaagaatagtgcagtaccaattacaggctaaaaacatcattacttctgccctaagaatggatgaaatatttagggtttcacattgcaagagtgctaaggatatgtacgacactttacaagtcacacatgaaggacaaactgatgtctaaccatctaagatatatactcttactcatgagcatg

SEQ ID NO: 72114 - DNA, 422 bp, Glycine max
gttcctggcgcggagatgatggtacagcgggtgaaccaagagcggcagtttctcttggtgaggaagccatggaacaacagagcgcttggaatgatttcgtacatctcagataactattgggaaatgctggagaaaacacgaatgccgtgcagatatgaattttaatgaacaatgtagaagggcgtgtgaagcaacggtcttatttgctttgttgtgagcgtgctaataatgtctagtgattcccttgggcacgttcatattgcagtacctgctataattgctctatcggacaaatgcccaacttgcccctcattctatcaaactgatatgatccaaagactttgtgaacatatctgctatgtgttcctcagcgcaacatgcttagtgtgatcactttatctcaaccagatctctgatataat

SEQ ID NO: 72115 - DNA, 218 bp, Glycine max
  unsure (1)..(218): unsure at all n locations
tctgtccctgagaaactggttccagaagacaacgggagtgaagattgtctgataccctatccttgcaacangttctagggaagtagacacggagatggacaagaatatccgcggtattgtgagtagcattctgaaagatgcttctgtggctgatgctgagaaagatggtccaacatctttcaccccagatgtttctgtgcctgatgtcaataaagatg

SEQ ID NO: 72116 - DNA, 386 bp, Glycine max
ccactgttattctaatccctaattatatgcttatatattcacttaagtcacatactctttaatgtgaatgacggattaaaatggtggttcactcacaaaaacagttaaactgtaatacaagggatttctcttttaaactaaacttgtgattataaaaaatgcatgtacaatgatctcagctttatatcaagacaattaaaactgttacagcccctggtacaagtgtatctatctatctaaagacagaggatgaatatcattataaacaaatgatgagaaacctcatcttgtgaagcggatgaagatctgaagcgcttgttgggaggagcatgctcttcttgtagcggatcctccatctacaacctcaacggcaccggtttactgac

SEQ ID NO: 72117 - DNA, 411 bp, Glycine max
  unsure (1)..(411): unsure at all n locations
cttcaaacaatacatattacaatatttgattgtcaagggaatttatgcaagtgatgctataattaacgcatggtaaacttttggcaccatggtcttcctggattggatgagtggcctctataattaacacnaggtgggtggagggttagaggttgtgataactgataaagtttatcatctttggcaacaagtngactattatgggccagtttgtttaacttatttgctgaaataagtgttatnttaataaaataagcaactttatgttctttactggttgttaaactgcctctgcttaaaaaaacagctctctcgtattttaagaagatatctatctattcttaaataactgctatatagaagaactatttaaagttgtttttagtttaacaacttagctattatatatct

SEQ ID NO: 72118 - DNA, 479 bp, Glycine max
  unsure (1)..(479): unsure at all n locations
agctntgactntgagtcatcaagagattataaatatgttatcatggcatgaatntaaagatatgaaaaaaatctaagaatctatctttcaatcttctctctcaacatcattcaatatctttcaactccttctacaaaattntctaattcatttctcttcatctttctaaagagttttgttcaaacaatttttttccaagaaaagttctttgtttaaaaacttgtgctattcatctgtttcattctcttcttcctttgccaaaagaacgaangactaaccacctgaatntctttgtgtttctcttctcccttacaaaaaattcaaaggacttaccgcctgagatttcatttgattctttcctttcccttaagcaaaatatttcaaaggactaaccgcctaagatatcttttgtttcccttttacaaagattcanaggactaaccgcctgagaattctttgtcccaacacattggagggta

SEQ ID NO: 72119 - DNA, 413 bp, Glycine max
  unsure (1)..(413): unsure at all n locations
ctcaagcttctntgagatnacttacttgagaagctagagctcatctacacacacccatctaattactaatctcacctcattgagaagcttccttgagatgctagagcttatctacacacacccatctaagaactaagctcaccttcttgacaaaatacatgaaaatacaaaaaaaagtccctactacaaagactactcaaaatgccgggaaatacaaggctaaaaccctatactaatagaatggccaaaatacaatgccgcaaagaaggaataacctattctaatatttacaaagaagagtggatccaaccttaacgcatgggctaanaaatctaccctaacgttcatgagaaccctagggccttctttagtagctctagcccaagcctcttgaagtcttctattcaataccc

SEQ ID NO: 72120 - DNA, 230 bp, Glycine max
  unsure (1)..(230): unsure at all n locations
agcttgntgatcttgttgagatgagtactgattctcattctactttttgttaacactgcagacaaaaattaatcgatcatagacgatagcaatagaaggtagtatacaacagaaaacacacagttgaaattgatgaatatgtacagcatgttcgaacttataatggaaactagtaggattataacgcataactataacaactgaattatttttttccaactgcagctttc

SEQ ID NO: 72121 - DNA, 86 bp, Glycine max
agctgtaaatggagcagttaaactctttaatgaacgtgttttattttatccccgactattcacttgattattggccctctaaacat

SEQ ID NO: 72122 - DNA, 524 bp, Glycine max
  unsure (1)..(524): unsure at all n locations
atctcagagtcacctgcggcatgcaagcttcgactcgatggtccatcctggaaaatgcggtaagtgtaatcctttctgttggcattcactggtacctctctcgactatccggcaggtcggaccagttcatacgaaccaatgaatagtataataatganacagtaattatgaatcaatggggtggaaaagagagctttattataatgagaaaagggaaaacagtacagaatttatgaatcacaaacccctaggatttgccaagagctangctcattcaatagagaggacagtactctctatcctantttgcactaaaagccaaatgccaagatccccctaaaattcctttctgactccttataactaggaatgaaaaagccatgatgctctctcccttcaacacgtcatatcaacaataacaatntcagccactaattccctttgtgcgcttccttctagaatagacgtataagatcctgcgaccacctgtggtgtgatgaattaattgttctggtgtcctatct

SEQ ID NO: 72123 - DNA, 425 bp, Glycine max
catatatacgtacaggcgtctcggaattgatatatacagacattcgtggaccatctcatacgcacttctggaatggtcaacagtatttcttctcactcatagacaatgacgctagatatgcgtacttgtttcttatacatcgaaagactcaatctctggatgtgttcaaaacattctaagttcgaagtgtacataactgcgctaaagactaagtgcgtaaatctgactgtggcgggaatacttcgagatatgacggttgcgtgaacaacttcgaagcgtttgccattacctaaagaatgggaatcgtccacatacaccatgcagggcacctacatgatggcgggctgtagatgaactaactttaagatattggaaagttgatttgtatctacttacaagcacttgggagagcctaaactgactac

SEQ ID NO: 72124 - DNA, 402 bp, Glycine max
  unsure (1)..(402): unsure at all n locations
ttaatctcagctgtggtcccacatacagccttaagcatctggccttcattgcatggaagtcgaatccccgatcctggaattggtggataggcattttcaaccatgatgacttttctgaaaaatggactttgatgatggagacgaaatctctatttactatcgatattatgacataattcgcgatattgttattagaagccaagaggattgggacgattgtgacaccgattaaactggctttcgtagtctgggatttaaaataataattcttactgatgtaatttcaaccaacaattaccagactctattctgtngcatgtgagcttaactcttgttgctattcttaatgctcgtcactctattgattgtgatcacattacaactgctacaaacactctgttg

SEQ ID NO: 72125 - DNA, 414 bp, Glycine max
acatgttgaaacattccataacagaaacatcttgagcaagcttcttgagtgacaaatttgcatatattgcttaaccctctttgtgagagtgacccacttattgtagtgcttacaaacttgttatattctttagatagaagtaagagttactttatgagtggaaatcccttcttttgatggtgaagaatattcatttggtggaacaaatcacagagtcttttttctattgtaagtccaacagtgtatggacaagctaaaatttgatggtgttgctggtctaattgaggcttgtatagaagtccaagttgtgaacatgacaccttgttgacatcaagtggttcttgggtcaattgtgactaattgtggtagcgaaatctcatcttgaatgatgacgactcgatgtatccccacgtt

SEQ ID NO: 72126 - DNA, 513 bp, Glycine max
  unsure (1)..(513): unsure at all n locations
ctcaagcttatagcatgagaagcctaaaatgtaatgaantgatatatatatgattgtctaccttggtcttaattcttacctaagatggagataaggaaaaccattcttctaagttgttgaagaaaccatagaacgactttcaatgggatgaggagtgtgaaagaatgtttacagatgttaagaaatttttggcaattccacccatgttaacctgacctacttcaagtgcccaaatcctactctacttattcattatgccagaggatgataagagacaaatgttgatctactatactagtaaaatactacatgggactaaacaaataaaccagatgatttgaaaactagcactatcattggtgaaccatggntgcatccatanttccaaagtcatcatatcagagtcaaaaccaatcattcaatcatacaagtacttagaataccgtggttgcatgggctgtggagttatctgaatgtgagtngaacgttgaccttgaaacacatcaatctcat

SEQ ID NO: 72127 - DNA, 427 bp, Glycine max
agctattatgtgttgatgattataacacatatatatgtatatgaatcgttcaaataaattacgaattaatagctcacataataaaattacactgaaggatattaatatatttagattcaacgattaatactctcaatgcattttcagttcaattatttatcaactctttttaattggaaataatatagctcaatttaatatatacgtgttgagtggtatgtaaatattaatattgcgtgatgcttatataattcatgagtagtgataacatgtcgcgctgcgattatcacattgtgaatgagattgggtgtaaattgagtatgtgtcgaattgaagacacatgtgtattgagacttcatacgcatcgagttgtgagccatgaactgtcacctcacacaactgtacgacccttaatggggatgagcta

SEQ ID NO: 72128 - DNA, 428 bp, Glycine max
  unsure (1)..(428): unsure at all n locations
taactcgcctatgcgagtgtacgtctgaagtaaaaataaaaagagggggatgaaatcagatttcacccncaccttcatatcatacttcttcttccttcttcacgtaaacctcaacccccttttctcccaaaaccccccgaatcagaccattttgagcaacaccaagccatctaagtgcatcctttcttcaaaattntctgcattccattcatttcatccaagtaagaatcatctttagcttaaaatttcgtacttccctttntgtgttttgatgatntgagctttccttttgaacgaaaatgcaacttanatctcagctgatcggctgattntaattgtgtacaagtgtgttggttcgaatcatagtacgcaattctttgctgtctactatnntgcattttattatgcacaaaacctcattttacatc

SEQ ID NO: 72129 - DNA, 446 bp, Glycine max
  unsure (1)..(446): unsure at all n locations
tttctcttctctttcaccaatattaagtgaaataggcttactcaagggtttatgacttttacggaagcattacaaaagcctcggaagctctggaaaccatttttcaacaaaacgtggaggatcctgataagttcacccccctttgataaactcacttctttntatttacacatcccgttntgctaatgcactcccattttcgtgttttttaccggtttcttcccgaacgttacagaactttatggaatatgtaacgacacctatttccttccggaatgttgcgaaactttacgaattacgcaacaaggctcttcttgagttccgaaatgtcgcgaaacttcacgggttgcctaacgatgggtgttaagtacctcgaagcggtcaaacgaatgttgcatncactatacaaatgatccccggacacaaatatggtatgacacgtacta

SEQ ID NO: 72130 - DNA, 256 bp, Glycine max
  unsure (1)..(256): unsure at all n locations
agatcttagagttgaccttagcagatgtattcatagaagccattgcatcactcacccaatactacgaccagcctttgagatgcttcacattcggagacttccaactagtaccaaccattgaagaatttgaggaaattctatgatgtcctctcgggggaagaaaaccatatctttcgtgcgggtgtctcccctctttgagcagaattgcaatagtggtcaaggattcagcaagagggttggaccgncataaacagac

SEQ ID NO: 72131 - DNA, 425 bp, Glycine max
  unsure (1)..(425): unsure at all n locations
agatcgacgcaaccaaggggagcacagtaagtaacanagattgcatgaaganatccatttcaagccacacagnttctatgcttgctagaaggtattctagaaatgttgattgttgaacactctatataaagaagtcaccgagccaatccacatttctctctctctccagctgatatcatagntgtgccttgaataataattaatgacggcccttgacccaacatattataatggcacttggacatagaaaaatagaaatatgcatatactttatgatatgagttgtgataaaaacataatagatggtcgatatatgagtatccatatgtggatccatgttctattgaaanatgagacaaggttgatagaataaataactggttgattgtgatatggctctatcttcattggtagatgtcattgca

SEQ ID NO: 72132 - DNA, 486 bp, Glycine max
  unsure (1)..(486): unsure at all n locations
agcttaacttcanagcctccacaatcatacatagtatgatgcgctcattgcaagtctgaagctaggaagagaagtcgaagtcaagaggctacgatgctacacaaactcgcagctngtccaaggataggttgcaaacacataccaaaccaaggaaacaatgttgctcaagtactatcacataatgaagtctttcattgacaatttcgaatgtttcaaagtgtactacatccccaaggaaaataatacatgagcgaacttattctccaagctggctagcactaagaaggccaagcacctcaagaccataatctagaagatgctctaaactcccaccatggatgctgaggaaattatggtcgacgaagaggaggaaggaaactagatgacccccatagaagaatttcctaattcagggggtcctgctaccaaacaaggacgaagcctaacgcctcaaatggaaagccaaccactacatcatccatgatg

SEQ ID NO: 72133 - DNA, 365 bp, Glycine max
  unsure (1)..(365): unsure at all n locations
agatgatgaccaaggtgatgaacaangagctcanaagaaccaagaacaactcaagtgaatcacagaatatctcatgtgaatcaagaacatgtcgagagttcaagaatcgagacgaattcttgactcatgaagaacgtctacaataaagaatcaagattcaagattcaagatctcaagaatcatgatccagatcaagactcaagattcaagagtgaacaacagactcaatcacgataagtattacatagttctttcaaaactttgaatagcacatgagtttgtgacaaaacctttaccanagagtgtttactctctggtaatcgattaccatatacgtgtaatcgattaccagtcagcaaatgagt

SEQ ID NO: 72134 - DNA, 466 bp, Glycine max
  unsure (1)..(466): unsure at all n locations
agcttctccttctnttccctataaataagggaaggaggtaagaacataaatgttcaaccctcctagtatttaagattcacttaanattagtgagaaaaattgttttcgtgaagaanatccaagccgagacgcttccataacgcttccgagacgtttccgtgggttatttctcgaagattttccactgttcttcgtcgttcttcggtcttcaaccggtaagttcctgaaaattgaacttttcaattcattctatgtaccattagtggtcctcatttgtttcgcgtgcttttatttntatttcatttactttccgtacccccttttgacgtgctttagtcatttatttaagtcattttctcgcctaatcaaaaataaaataaatttccaccgatcatttatattgtaacatcttttaatttttgtaaaaatgaaatccaaccgttcggtcatgccgcaaccacgttta

SEQ ID NO: 72135 - DNA, 383 bp, Glycine max
  unsure (1)..(383): unsure at all n locations
ttgatctaccaccaccaccgncaccatcatcttaantttcaattatgtttaatattattagnaccttgatttctagccgtgtaattggctatattattatgacattcgaacaatttagtatttcttttatttgcataatatgactgaacaattatgaattatgttatatgactatgtggttattatatattggaactattcatgtttcttgcttcatgaatggtttaaatnctccaatgaatgtcttgcgagtgattagntatttatgtatgttctatatttggtacgcactttggctttttgttgatgccaaagagggagagaaatagggattaaatcaagaactcacataattaattaacttaattcaagtgaagcttaac

SEQ ID NO: 72136 - DNA, 470 bp, Glycine max
  unsure (1)..(470): unsure at all n locations
atctctaagcaccgcngctgcagctgctatcttgggtagtaggtggcaacctcatttggtggtgcaacatatctctttggcctaatangaactccattgtttttgcagcttctaatgttatgattgggttggccacaccttccacatgtaaagttaggcaatttcctctttagcctatgtcctatgacattgtctttatctacaaatctccttctatttgtcttacgccttcctctatggacctttatatgtggtggaataggttgtgcatactgtgtctgggcccaatattgtggtccttcgaatggttcattaaatggtggtatgtcttattataagcctctattgacagccactcatgacacatgtcctcaggctggcctccctagtgagttattgttgcaatggcatgtcagcatgacatccctacaatcagagtgttaaatcagagacatgtatgttatgaatga

SEQ ID NO: 72137 - DNA, 445 bp, Glycine max
  unsure (1)..(445): unsure at all n locations
caagacanacanataaaattttgttagtcgtcatataaacaagttaattgaaaggaaagtttcaaccaacttaatttaaaagataatggttttgatgttacattcttcatgatttaagtgcttagatctttaaagatggaagtcagaatttttctttttggttaatcttcttgagagatgttctcatcgctctcatagtccttggatagaanggtgatcttcttctccgaccatcagatgagtcattgtcatcctaagcaatatacgctttcttggatcttctttcttcatagcttttcttctcattcttttctggcccatgatcattcgtgggtgatgtgcattattctctctattcatagccccttttgcaccatttaatactgattacccttaatgcaattaatatgcagttatcatttggctactgactaatttggtttta

SEQ ID NO: 72138 - DNA, 451 bp, Glycine max
  unsure (1)..(451): unsure at all n locations
ctatgttgctcctcctatctctaacaatctccncccttttggttntgatgatgccaaacatgaatacaactttgagtgcatatggagagtctggagattggattggagacttgatccttagtattatctttgaaaaatcttaacacttaagaagagattaattcatcatcatcgtctatgtcaatatataacaatctttatacaatatagtgttcaacatgctatgcaatgcatcaatatgcaatatgcaatagcggtagtgtatatcttctttctccccttttggcattaacaaggcctanaagttgattatgcacanaacaacacatgtgtaaacatagaaataaagccatatttcattaagcataaagcattacatgatcataagacanagacaaacaaacttaatcattattttanactaagacagacagagcttgccataacagac

SEQ ID NO: 72139 - DNA, 452 bp, Glycine max
  unsure (1)..(452): unsure at all n locations
agtcattnttcaataaagacaaacattaaagaaacttcctctcttagacaacctccacatcttctcctttgaaaaagacacttgntagcattgccacacctattgggcttgaggttattcctcaagtaaaggagttattggacgaaggtttggtttgtaagagcttaaatcattgtgctctgctggtgcccaanatatgtattattacgcaccaaatccctaanatagatgatatgatgaatggtgtgagtggtgcaaccctctnttgtaaatcattatgcacccaacatctttatgattcgtgtacatagggactcattaagtaggttngttcttatttttggtncaatacaaacctangtgctcatatgggacaccttanngttgtcgtactttntaaatagtgatcaatgggtctcacggaccctaagagaataaaagtcattctgagt

SEQ ID NO: 72140 - DNA, 137 bp, Glycine max
ccacacgctgactatctagctttgcgagtgatattcagcccccggcatcatattaatatgggagacgagcgcctcactgctcgacctcgattttctcacgcgctttattcgaggatgataacatgtgaatgtcacta

SEQ ID NO: 72141 - DNA, 271 bp, Glycine max
  unsure (1)..(271): unsure at all n locations
tcattttgtcttcttgtcgtgaaaggagagttccagactatggaaagtaaatcctctattggatcttcccttgacgtacgagatgtaaatatagttctatctatgtaatgatggtctgagtgtctctgtgctatctccttgctattcatgtatgcctttaccctgatcacgtagatgcatgctttgttanggtcatncaacagtgaaaactggttcgattctaaagtccttgatagtacggngctaagttgttgtactgtcacaaggaatc

SEQ ID NO: 72142 - DNA, 462 bp, Glycine max
  unsure (1)..(462): unsure at all n locations
acatgcatgtgcacaccatatntactatactttgatctactgatacaatctatttgattgaaaagataatttatactactcttctaatgtagtggacaactaagattaatataatataatagaaaatactgcttaagccattcaaatcaagtcattctgaatctcaccattagtatcatgcatgtcaaagataaggaaaatcaggcattgtaatgcataacacaacaaaacattaaaagaaaacatgcttcctaaagccaaccaaggtacaaatgtattcatatttcgtgaacttgttcaaaattataagacacatataaccatatataaaaacacggtggaacaatctcaccacatgcacaacacagaccacacattatttcagaaaattagtggtaaggaaaaataataaagcactgttaataaaaccgtatgtgcactaagataacaagggtgtcatga

SEQ ID NO: 72143 - DNA, 252 bp, Glycine max
  unsure (1)..(252): unsure at all n locations
atcgtgctaggtttctggtttagttactccatattgtttacaattaactngngtttctacctttgtgatcatttaagttaatgtgctaagttgtttcaagtttggtctttggcaagtgtgtacaaagttagtacctatcactttctatattntttggtgctcagacctcactatgaagactaaaagtttcaagtctttaatatgttagttattaaatattcttggaggtagatagtgaaggtacttacgtct

SEQ ID NO: 72144 - DNA, 456 bp, Glycine max
  unsure (1)..(456): unsure at all n locations
cgacaataactctntactcttatgtctgattgagtcctgtaatatatcgagacgctcgaaatggaataccgaagctctgagcaaatttaaacgacaataacctttttactcggatgtctgatagaggcccgctatatatcgagatgcttgaacatgatatgtgaagcttgtatcnaattcaaacgacaataactttttactcggatgtccgatggagtctcgtgatatatcgaaacgctcgaaatggaatatggaagctttgagccaaatcaacaataataactttttatctggatgtccgattgagtcccgtaatatatcggaacgctcgaaattgaatgttgaagctctgagcanattacaacgacattattgtttactctgatgtttgaagagaccgtagatatcgagagctacaattgatgttgagcgctgaccattcaacgacataacatt

SEQ ID NO: 72145 - DNA, 486 bp, Glycine max
  unsure (1)..(486): unsure at all n locations
cactaagcttctacattcatntcgagctnttcgatatattacgggactcaatcggactttctattaanaagctatcgtagctcgaatttgctcatggcttcggtattccatttcgagcgtctcgatatattacgggactcaatcggacatcagagtaaaaagttattggtgtttgaatttgctcagagcttcggtattccatttcgagcatctcgatatattacgggactcaatcagacatccgagtaaaaagttattgtagtttcaatttgcttagagctttccgtattccatttcgagcgcctcgatgtattactggactcaatcagacatccgagtaaaaagttattgccgcttgaatttgctcagagcttctacattcaatttcgagcttttcgatatattacgggactcaatcagacatccgagtcnatattattgtcgttgaattgctcagacttcacaatccattagagcgttcgatat

SEQ ID NO: 72146 - DNA, 412 bp, Glycine max
  unsure (1)..(412): unsure at all n locations
tatcttcttacttgtttactctctgagcgacattngtattaattatcgcatcttactctctatctatccatatgtacatcatgcatcatcatgtatagataggacgatggtctctaaacattagaaactttcttcatcatttctctcgttagtcttgtgctttgtgcaatgatcgtgtagtttttcttaaggatgggatgtaatctctgacccttattatccctttaatattatatatggactaactctttggtactccttatgtggaaatttcattcaactcataatgcttgattctatttgaccactagcgtcacgacatnggatgttaagtgagatcggaaagtaatctacaaatttgaactgaatgattctactctntacgttacgatgctacgaatagagcataaca

SEQ ID NO: 72147 - DNA, 486 bp, Glycine max
  unsure (1)..(486): unsure at all n locations
agcttgaagacatggntacaaacttacacactttcatttcatattcttttgaaaaagctttctataaattattgtaaagttcgacaaatctctcacaacaccttgagagaaaagacttaagattgtatattcgtttgtaagacgattacgagttagtcattgtgcaacaaacaacaattttgtttgaatttgtatagagatagtagtggcttggtaaaacacagaatattgggttgtgacaagcattacgtagacctagagttgtagagacacaagtggtagtgattaatacttgtaacttattgaagttggttgaacttgatggttagccaatagctggacatagtatcagtgatcaagacaaaccagtataaatctctatgtcttatatggtttcatcttccttctgctttaaactgacctanggattgaatgtgatttttattttgaaactctgtttgctgtgcaaatctgatttcattgtct

SEQ ID NO: 72148 - DNA, 412 bp, Glycine max
  unsure (1)..(412): unsure at all n locations
tcattttggacagcatgcttactaccttgattttcaggtgatantttgctccaagcattatataattaatggaagagttgctaactcacntgtctgacattttttcctatacactctctagtattggttgaaatntatgtgaatctcactaatacggtaatgggctcaccaattctgaaatgagatccacatatttagtgagacccatatggattttatccaatacaagaatgtgttggaaaaagggtgcaaagagtgtgtactagcacttatatacagtattagcagagtcgtgtcaatagataattaatatgactgagactctttgtatcttccaaaccgcccctgatattataatgtcatggaaactgttcctggatgcatgagttaacttgacaacaggcttaataac

SEQ ID NO: 72149 - DNA, 276 bp, Glycine max
  unsure (1)..(276): unsure at all n locations
atagcacagaaagagccctatcattctangcttctagcctatgtatcgagagctaacacatctaacctagcttggtattcttctgattaattctattttcttggaaccctctactctatgcctatcacttgctgatgctgggcattctatgcacctatatgcttcattaggatgaatctcggctaacagatgcttctgcttgctcagtgaccttttgttgctttcatactgtcctctnttttatataagttacaagaggcccatatcttgggactg

SEQ ID NO: 72150 - DNA, 470 bp, Glycine max
  unsure (1)..(470): unsure at all n locations
atgctgcttgtggagcttctatggaagctggatctttgatcttttatgangtccttcaatggtgatttctcaccatggagatgcaccggaagacaaatgagaagacgtgaaatgatgctccatccattaaggaataagccatggaaaaatagagcttcaccaccaatatgagccttggataagacgcttggaaggatgcttcaatggacgaaaagaaagagggagagacagagagatgcgggagctcgatattgtatgactaaaaacggagagaagctgaactttaagttgtgcctcacaagactctcattcatcaaagttacaacaagtgctacacatgcttctatttatagactaggtagcttccttgagaagcttttttgaaataacttgcttgagaagcttctttgagaaaactctcttgataagcttgaactgagctacacacaccccactcataactaagctca

SEQ ID NO: 72151 - DNA, 420 bp, Glycine max
tcaatcaagaatcatcaatcatctttgaatcatctatctttcaatcttgtttcatcatcatccttcaacaatctttcaatatcttctttcatctctttcaacactttcaatagaactttctaattcatttctcttcatctttctaagagtttgtgatcaacactttctcttccacgaaattctttgttcaaatacttggggattaatcttattattctcttctcctttgtcaacgaacgaaggacaaccgcctgaaacttttgatcttcccttccctaagcaaagattcaaggactaccgctgagatatctttgttcccttacaagatcaaggactacgctgaaatcttgcccaccatggaggcatcttgggacagagaggtctctcttggatgtatactggacaaagtgtgatagtcag

SEQ ID NO: 72152 - DNA, 428 bp, Glycine max
  unsure (1)..(428): unsure at all n locations
gaacactttgcaagaacattcattttggcctacaatgaaacatgacgctatcaagttctgatctaatcgcattgtgtgtcataaggcaaagcccacaatcatgcatcatggattgtattcttcattgccaattcctacctccccttggatcgacattaccatggatcttgtgcttgttctttcatgtatntgagtcatctatggaaaacattatggagaaaactggaacccaactcttttctccaccacttgcatcctcaaatgacggcaaaccgaggaggaatcaacactctaacaactcctaggtgttcataaaggtaattgaaacatggaagagtggtacctcatgttgatttgcctatatatggaaccactctacacttttttttctctttgatgtgttatggattaatctcatctttgataat

SEQ ID NO: 72153 - DNA, 372 bp, Glycine max
  unsure (1)..(372): unsure at all n locations
gctcacaagncaagaacacttcatgttaacaaagatgatgacttcaagaatcaccgaatgaggtcaagaatgaatcaagaacacttcaaggttcacaaggaaattcgatttcaagaatcaagtttcaagattcacgttccaagaatcaagactctagactcacgattcacgaatccagagaagactcactcaagataagtattaaaaagttttgtcagaaactgagtacacatgaattttctcaaacctttaccgagagttttactctctggaattgatccagatattgaatcattctagagcaaatggtttcaaaactttaactgattacacgtccatgattcaaatgtgtatcgatacaatgattggtat

SEQ ID NO: 72154 - DNA, 364 bp, Glycine max
ctttttccttgaactgagtcatttgctaccccataactcgcgaaattggtcggcatactttcttgcaaccctttggtctttggtcaaggctcttgccggaaatgcattctctttccgtgacccagcgcactcctttcgaacgtgtgtagcaggccaatttgaacttcttctttggcgaaagtttgcctttcctaactcgctcttgagagcttggacttcttcgtactcttacggtgcttcaaaattctcttcggtgacgacttttaacttggcgagcccatctaaaccttcgatgcgaactttcaaccattcgtggtacccaccgatgatgccattacgaatgcctctaagctcttgatctttc

SEQ ID NO: 72155 - DNA, 419 bp, Glycine max
ttagaagtcatataataaccaagactagaactatgtaaggagacataataaccaatgatacataaatcagaaatttcactatacaattatctacaaattgtgacattcttggcaaaaagatttttataaataagacaaacataatagattcgcaacttgctaaataacaaatgatcctaggaacttgatttatcacacatgataatagatcaattactattggcaaagataatttattaatctctacaaactcacatatatcaccaataataaatgaactcacattagagttatgaacaaagcgcggtgatacccctaccaaccctacacctaccttgaattcccaatgtccttgtgacataccttgaaagtgtaagataaaagactcacaaaatatcggagtatgatgtatctatagt

SEQ ID NO: 72156 - DNA, 486 bp, Glycine max
  unsure (1)..(486): unsure at all n locations
agcttgttcgcacatcgttcgcgtgtatgatatccactctcacaaggttgaagtagaggagagcttcaaccctataacgcaacgtggcggacaaaagtgggcagcaaacttgaatggtcgtcattggcaatgcggagggtattctgcgcttcactatccatgttcacacattattgcagcttgtggttacgtgagcatgaactactaccaatatatagatgttgnttacacaaacgaacacatcttaaaagctaactccgcacattggtggccttttgggaatgaagcggctattccttcttctaatgacgcatggacacttatccctgacccaactacaattcgtgcgaaaggtcggccaaaatcaacaaggataaggaatgagatggattgngtcgaaccatctgagcaccgacataaatgtagtagatgtggagccgaagggcataacaggcgtcgcttgccaatgcaatctgagcatgggag

SEQ ID NO: 72157 - DNA, 316 bp, Glycine max
  unsure (1)..(316): unsure at all n locations
agaatgatttcaagattgatntcatgagaagccatcaagaagattcaaagatcaagagaaggttgatttccagattcaaagagaatatgaattcaaaattcaagagaagaaatcaagaagacttcacaagggaaatattgaaaagattcttcataaaacaaacatagcatagttgtggttttcacaagaggttttctcaanattttctaaggtaccagagtttttactctctggtagtcgattaccagtttcatgtaatcgattaccagtggcaaagtttgatttcaaaagcttttaactgaatctacaacgtttc

SEQ ID NO: 72158 - DNA, 504 bp, Glycine max
  unsure (1)..(504): unsure at all n locations
agcttcttagtttcagatgatgcagatgggttngtagctacctcatgcactcctctaatgactatggcatcatttctggcactaaactgctgggagttggaggccatcttctcaattaaatttctggcttcagtaggagtcatgtctccaagggctccaccactggcagcatctatcatacttctctccatattactgagtccttcataaaagtattggagaagaagttgttctgaaatctgatggtgggggcaactagcacatagtttcttaaatctctcccagtactcatacaggctctctccactgagttgtctaatacctgagatatccttcctgatggttgtggtcctggaagcagggaaaattttttctaagaatactctcttaaggtcatcccagctcgtgatggaccttggagcaaggtaatacagccagtcctttgccactccctctaatgagtgaggaagagccttcagaaatatgtgatcctcttggacatct

SEQ ID NO: 72159 - DNA, 174 bp, Glycine max
tcaagtgagtactttgctgcatcaaacaagtcaaatgagatcttctgatcatctattcccatttctagaatatatttcaccatgtacaccacataattggcaattaacatgaagggacaacccaaaatcagtgggatttcaacatcctcttcaatgtccatgatcacgaagtca

SEQ ID NO: 72160 - DNA, 422 bp, Glycine max
  unsure (1)..(422): unsure at all n locations
accacacacctgattgccaattttcttatgggtatattggtttggactctgttatgtcacgcctttcatatggagtcgatgatcagtctcttaaggatgtattatctgactttggagatatggctgagagtaaattaggctcactttcattgctgttacatggagttctattataaccacccggcagcctcactttaacatatgtgacatcagctccctttgtggccattataattcttccatgggcatataaaaacagcnagcggtgcaatcttatgtcgttcctaaataactataattgattctgcgctggtgtatcaatggaaaatatctcggctttctcatttatattgtcgctatattaagtgcttcatattatgaaccaacctcaatttgacactctgtttattgccggtatttca

SEQ ID NO: 72161 - DNA, 229 bp, Glycine max
  unsure (1)..(229): unsure at all n locations
caatgtcattattcagccaataaccaaccttctgcttacccacccgccagntatccacaaaggccatccctagaacaaccacaaagtctgactaccgcacttccaatgacaaacaccaaccaagaaatgaatgttgcagcgagaaagccttagaattcaccccaattccagtgtcctatgctgacttgctcccatatctatttgataattcaatggtagccataacccc

SEQ ID NO: 72162 - DNA, 450 bp, Glycine max
  unsure (1)..(450): unsure at all n locations
attaacaaaatgtanttntcctctggttntctcaggtatgtntgggcgactcttntgtgaatagtagtgggaagccagaagatatactggtaaaactaaatgaaatggccggatatgatcctgatcaagatatagacatgtttgaggttagtccatctgcatctcatgtacaattatngtccatgtttgcatatcaataaagtgcaataatgcctacattctgttatgcacgctcaggagatcaagtgtgtgcctaatgtcatgtgtgaacgggttgacaagacatccacattccgtgagagtcacgtatacattatgagtgtctatcattatattggttttccattgctatcaagtatgtttctagtactctatatttcttattccgacttcatgcacttacattgttttaagtttataataataaatatactatcccacctatggttg

SEQ ID NO: 72163 - DNA, 379 bp, Glycine max
  unsure (1)..(379): unsure at all n locations
ttatgggggtgtctttcattcaaatgagcattatgccctgatatatctacggaagatgaanaaaagagatcatgaagagcgagattaatcgacgaaaagacaaagaaaggggagaagaatggtgattaatgaagatcctctctttcaatgttagaagattggggaatgaaattaaatgaaaatcaataaggaatattctagagaaggaaggagtccaacttctatgtcttcaagaaactaaaaaagagtttcataggagctatgctatgctctgtggggaaatcatgttcaactgctggatgggcttgcatggattactctatgcttgngggatactaagtagtattccctatcttctagnttttctggcattggatat

SEQ ID NO: 72164 - DNA, 518 bp, Glycine max
  unsure (1)..(518): unsure at all n locations
cttgagtcacctgcngcatgccaagcttgatgtgttctanaagttggttatggaattcagtttatgcatganaaattctgaatgcttatgtgatactttatgaattgcttatatctttaaaacttataacttgttatttattattctataattattatttataggttctagatcaattgaagaatcaacttttactgatgagatngaatccgacaatgaacgtatatttactnttagttgttctaaaaaaactntactatcattattcatatctaatttttcaaaaatttacaatataggtggatctttggtcagtaacattactcactanttgcaagattagtagacattatcgttgatcaataaagtaataattatacttatttactaatgtgatgtatgattttatgaattgaaacaacatctaaaatatgatgtttgattctataaataccactttgaggaagatatgttgatgacatctttgatgaagttggtggttattctgatgatggaca

SEQ ID NO: 72165 - DNA, 313 bp, Glycine max
  unsure (1)..(313): unsure at all n locations
ctagtttaatttcaacggaaattggatagctttggttaatggattcttcagagcataaaatccaattatctaatcagcaagattattattggtattgctatgccaaaatgttattgggtccaattattnttataagttattttatatagattaagaaaaattaattaaaataaactataatacaattataatactaatgtaatcattattaattgatttnttgttnttataacacatataattagatttattaaaaaatataagtcgagaaacataacttaatgttatcttanaaagattaaatgataattat

SEQ ID NO: 72166 - DNA, 448 bp, Glycine max
  unsure (1)..(448): unsure at all n locations
aataatggactcacacggtttctgtgtatctataccagcagcacaaatacagtttaaccatgaaacccaaccatcatctgctggtgacccttcgtgcgtatatttctaagtgtaaagcaaataagcaagctatacagaaaagccaacccataccaactccttcaacattcacgtaagtgctgtatcatcatattaatcgatctcctttncttcacaaagagatcgaaacaatcataacgttaaacaatncaaacaagccctgggattcatcttccattcacaataagagaatattcttcctttccctttcgcattaatcaatgcccaagctctatgttntggcagatcccatgcggccacacaacacaacttcccaattgccattggcccctctaanaataacattggttggttgggagggtacctgcagccccatccaatagtaaca

SEQ ID NO: 72167 - DNA, 395 bp, Glycine max
  unsure (1)..(395): unsure at all n locations
ctaagctgagcttagtgcctattctgngtaggctcaattgttacaacagattttattagttgaatntaataagttcactaactctggttnttatgaactggtaggtggtggagatatattttatgctggcttgaatatcatttttctgtacatatgtcaacttcctattgatcagatgtgtggcacatatgtcaactcctgttatatgttctgtaacagacattttcagcttattaaaaattgntggcaggccatacgatcatgagatggtggacttgtagcttgagtgaactgtctttctgaaaatggagtatctacttcgaataatcttgctttgatactctatntatttgcttataattatgctaatggaggatttatnttcaactcttttc

SEQ ID NO: 72168 - DNA, 298 bp, Glycine max
  unsure (1)..(298): unsure at all n locations
aaaaaaaagctggggcatattaacagggtgacgatgaaggagaagcccgtgctgtgactgcccttcctatactgccaatgttgccaccagaccatcaatgtcattatgtcatccataaccaacctttttcttacccaccgnccatgtatccacatagggcatccctaaaactaccacatagactgtcttctgcacttccaatgacaaacaccaaccaagaaatgaactctgcagcgagatagccttagaattcaccccattgcagtgttctatgctgacttgctacatatctatttga

SEQ ID NO: 72169 - DNA, 255 bp, Glycine max
tgggcctatatgtatatgtgtctgacttccaaaaggacaagagagaattttctaagagaacttaattacccaatgctctctaaacaactattggccaaacacttgcaaatctattgagaaattcttctatgaacttcaatttgtatcatctactctaaaggagagatatattttgtgcatctcataaactcagttgtaatcaagagaccatttgtctcttggcttgtgagaatcttgaacacaatggtgagggat

SEQ ID NO: 72170 - DNA, 358 bp, Glycine max
  unsure (1)..(358): unsure at all n locations
atgccccacattatttccatgacacaaatgcanaaatgatgatctggaaactttatgcaaaactggtcatgcatgcacctatgtggacactcaagtgtcaaatatttatggtcatgtgatgctagggctcatgattcattccctctatattagtcaacccaatgtttccaaaatatgttcttttatccatttgtgcattcatacgagtccattntgggcgtccggngaaatatcacagcgttcacccttctggtgtacacacattnttttcaaaaaccagctatgatcggtgaatttaccacagaagagtcggaagtcatctcatttcaaaagcatgtcggtatatcagctaaacaac

SEQ ID NO: 72171 - DNA, 396 bp, Glycine max
  unsure (1)..(396): unsure at all n locations
agctntctngagaaaacttccttgagaagcttctttgatatatacttcttgagaagctagagcttagctacacacacccctctcataactaagctcacctccttgagaagcttccttaagaagattcctaaagaagcaagagcttagctacacacacctctctaatagctaagctcacccccatgacaaaaaaacatgataatacaaaataaatgtccttgtgacaaagactacttcaaatgcctcgaatacatagctaaaccctatacactagaatggccaaaaacaaggccagacgaagaaaacctatttaatattacaagataaggggctatacttaccatggctcaaatctaccctaagtcatgaaacctaggccttctttgatctctaccc

SEQ ID NO: 72172 - DNA, 230 bp, Glycine max
  unsure (1)..(230): unsure at all n locations
cctaccctatgactactgctgaacaagtacaaagcatacgcggatcagcccaatgcatacgcacatcaactaccctaagcactacacataaacaccacaatggatacgcaaacgacatcgagggagaagagtgcatacctcgacaattntgacacgctgaagaagaagaagaagaacaaatcaactggccaataagcggtgagaaaacgacgctgcaaacagagctgggt

SEQ ID NO: 72173 - DNA, 462 bp, Glycine max
  unsure (1)..(462): unsure at all n locations
agcttctcggctcatgctgngaacgcctctagttatactttcgtgcagcctaaggcacccacccagagggaagctccccaagttccaactccgaacacgactcgaccggtcggttattccaacacgacatggaacttccctccgaggccattgccggaattcaccccgctcccaatgacgtacgaagatcttctaccatccctcatcgccaatcatttggccgtggaactcccggaagggcctcgaacccctcttctctgagttggtatgaccctagcgcaacctgcatgtaccatggtggtgtcccggtgcattccgtcgagaaatgcttggcccttaaatacaaggtccaacatttaatggatgccggatggctgactttccaagaggatcgtgccaatgtgagaaccaacccgctcgccaatcatggagggggagcagataatgcagtngagtctgata

SEQ ID NO: 72174 - DNA, 413 bp, Glycine max
  unsure (1)..(413): unsure at all n locations
acacttnaaaactcaagcttcttggcaatcctcattccagcgatcagaatggatttgcgtatgatctntgtcaacagctcacaaatggcgacgagctgcgatatgaatctggcaatataattctagcgtgccaggaaacctcggacttgcctctctgtactgagttctggcatctcaaagatagccttcaccttatccgagtctacctctatccctttctggctaacaatgaaacccagcaatttccctgatttgaccccaaaggtacacttagcngggttcaaccttatattgatattgttaagccttctancaacttccgcaggttgacaaggtgttctccctcggaattagatgtaccaattatgtccgccacgtagacctcgatctcttgatgcatcatatcatggaac

SEQ ID NO: 72175 - DNA, 174 bp, Glycine max
agcctgaaaaaacacacaaacgttaactcgagcttatctttcctgtataatcgagacgcgcgcaattgagaacggaagcattaagacaagtcaaacgaccacaaccattcactcggatgtctgagcgagccctataatataacgagacgcgcaacatcgaaaacggaaactcta

SEQ ID NO: 72176 - DNA, 351 bp, Glycine max
  unsure (1)..(351): unsure at all n locations
agcttgagccaattcatacggcgataactgtatactcgtatgtctgatngagccccgaagtatatcgagacgctcgaaattgaatgtttaagctntgagccaattctaacgacaatgagctcttactcggatgtctgatcgagtctcgtgatatgtcgacacgctacgaatcgaatgttgaagctatgagccgattctaacaacgatgactttatattcggatgtccgattcagtgacgtaatatatcgtgacgctcgaaattgaaggtggaacctttaacccaactcagacgacaataacattttactcggatgtctgactgagtccggaaatatatcgagacgctcaaa

SEQ ID NO: 72177 - DNA, 376 bp, Glycine max
  unsure (1)..(376): unsure at all n locations
atctcttttatcttagagagagtgactctcctaaagtcttgagtgaatcaagaacaccttggctgtatcataggactttcacaacctttgtgtgttgccctcgctggaaagagtgattctgtccttactttcatcatcaccctcgttctttcanaccacaattccagagaatccacctctgcccagaattatctcgnggccattactcccattttacgcactcaaatgaagtgattcttgagcctaaaatcgaattcaaaacgagacctttcacctcgttttggaatcacctcatatggagccctgtagcttcagttattgccatttctatatntctgtncagccaccacttaacctacgtttaccatcccattca

SEQ ID NO: 72178 - DNA, 505 bp, Glycine max
  unsure (1)..(505): unsure at all n locations
agctngagagaagaatatntcacacaacaagataatttataagcttgagaggatcaagtataaattttagttcaattcatccgactatgattgaatactaatttcaataacaaaagccaactcaatagtgtgatttgattgtatgacaagttgagagcttacaatgcataaagcatatatatatatttttaaaaattcttatatattttatctgctcgaaaaaaaataattatttgttatgcagtccactatacttcatgctattataaagaaggatcatataactctatttgagtgatacgtttttgcatgaaggaaaagtttatacaatgaagaactttatggtagacagtccatacaaagttgagagttactaatcaaagttaaattttatttcaactatcacagtatataatggagtaatagaagccaggtgtaaaagcattacaattaactcttatgaatttgttgngatattttaataggaaatggtacatttgaattt

SEQ ID NO: 72179 - DNA, 376 bp, Glycine max
  unsure (1)..(376): unsure at all n locations
taattgttcttacatagccagtcaaggtcttgctnttatagagtcttcatatctggtcaagaaaaccattacaagagttataacctttagacaaatctgacaaccattggaagagtacatcttttgaactntattcacaacttatcactggtaatcgattaccaaatcccttgtatctattacacaaatcatttcttgcgaaaggatatgattctctaccattgaatttgaattcaacgttcaacatactcgtagtcgattaccaaatcattcgaatcgattacacccatttgaaatcaattggaacgctgtaaatcactgcaagctctttgatacaatctcgctactgtaatcgataccatagagtaaatctttt

SEQ ID NO: 72180 - DNA, 441 bp, Glycine max
  unsure (1)..(441): unsure at all n locations
ctccctcgcccagtattatgatcagccgttgaggtgcttcactcttggggacttncagctatcacccatggtggaagaattcgaagaaatcctatgatgtcctctatggggaaggaaaccatacctcttctcanggttctatccctcattagctagaatgtctaatataatccatatctccgcgcaggaattagaccgcccaaacaaatagaaaatggtgtggtcgggataccgagaaaatgtttggaggcaaaagcaagaatcttggacgtagaagcgaatgggccccgttcatatacgttctcgcactattgatctttggacgagtcctccttccgaatgtggatgggttggtgaacctggcagcgatcgacgcttttctcgcctatcataaccacaaggaaagcccggttgtcgctatgcttaccgacctatatgaca

SEQ ID NO: 72181 - DNA, 381 bp, Glycine max
  unsure (1)..(381): unsure at all n locations
tgccaaaacacaagcgaactatatagaaatgtttctcacaacatgaggagtaaaacccctcaaacaatcatatcaaaatcataggttcaaaaacatgaaaacaccaagagcactcaatgttatcaaccatttcgcattagggcatcaattgacttgtcatatataacaatcttgtgattataatcataaaggcaaaattaccatacagtaaacatcccacaatataccctgatatgatcctctaaagatccctacacatgttcattctgaccccaatggtgataaactcattccttacctttaagcgggctcccgtgtgtagttcgatagcgattacgacatctctagcagntctctaagattcttcaattttttcctcta

SEQ ID NO: 72182 - DNA, 505 bp, Glycine max
  unsure (1)..(505): unsure at all n locations
gcttgtacgaatataagaaacatcttcttcgaccttggtgattctngactccatctcattgaagcgcatgtccacttgtaactccaaagtatcaaacctttcaccaacaaaggtttgaagaccatggaacctatccaaaatcttttgaagaagagaggaatcttctctaccatgtccttcttcattaacaggtcgagcaccctttttcacccaagagccatcatgctctttttgataaccaaaggatgcaatgatagtcgcgcctattagaaaggatctcttgattggaacataaggttcagaatcaagagggatgttgaagtgttgaaggaagagcgtgactaggtgtggatatnggcaatggagcattaatcgcaatgccttatgcatgcgatatcggactaagtgtgcccaatcaatttgtcggcctttatgaanagcccacataacaataagatcttcttcagaaacctatgcangggttgaagatcttagaaagcagata

SEQ ID NO: 72183 - DNA, 404 bp, Glycine max
  unsure (1)..(404): unsure at all n locations
ataagcgcgggttcnggagacanaggtcaagcgttcgcgatatgcataatgattttccgagtactttggaattggtacgaccatgccctcctgatttccagctgggaaattggcgagtggagggacgccccggcatttacgcaacaagcataatgtaaacctttacgggtctaaaagctctatagttgggcctacgctntagagtttttccttttgttaaggctttgtgtcttttgttttaaattataatacaagatctttctcatctgttcctgtctctacccatctcattatttgatgttacttcttttctgaacggcaatcgagacagtcncgaagactatactggaccgctatgcttgacagaatgatanacgaataagaagagatgggattcccaacta

SEQ ID NO: 72184 - DNA, 427 bp, Glycine max
  unsure (1)..(427): unsure at all n locations
caagctanacattcaatttcgagcgtctcgatatattacttgacttttcagacatccgagtaataatatattgccgtttgaatctgctcatacgttgaacattcaatttcgagcgtctcgatatattacaggactctatcagacatccggacacaaatatagagtcgtatgagttggctcatatgctgaacattcaatttctagcatctggatatattacgggactcaatcagacatcctagtaaacagctatcgtctgtttgaattggctcaaagaataaacattcatttaccagcagttcgattattacgggactcaatcacacattcgataataagttattgtcgttcgaacgtctcataagttaacattcatatttgagcgctctgatgtattaccggactccatcagacattcgagtaaaaa

SEQ ID NO: 72185 - DNA, 168 bp, Glycine max
actcgcatggctgggtgttttcgtattatatcaaggcgcactcaattgaatgttgaagctgagagcaaattcgaacgaccataccgcttcactcggacgtctgagtgagttccgttatatagcgccacgctcgaaagtgactgtgggacggagagccaattcgcacga

SEQ ID NO: 72186 - DNA, 469 bp, Glycine max
  unsure (1)..(469): unsure at all n locations
cgagcgtctcgttatattacttatctcttcagacatccgatgtaaaagttattgtcgtatgaattggcttaaagcttaaacattcaatctcgagcgtcttgatatattaccggactcaatcagacatccgagtaaaaagttattgtcgattgaattggctcagaggttcaacaatcaatctcgaacgtctcgatatattactggactcaatcacacattcgagtaaaaagctattgactttgaatttggctcaaaggtccaacattcaatttcgagcgttcggatatattacgtcactgaatcggacatccgatgtaacagttattgtcgtttgaatatgtactaacctcaacattcaatctcgagcgtctcgatatattacgggactcaatcagacatccgagaacaaagttattgtcgnttgaatcggatcagaggttcaacattcaatttcgagcgtctcgatata

SEQ ID NO: 72187 - DNA, 451 bp, Glycine max
ctaagctttgagcacattctaacgataataactctctactcggatgtccgagtgttttctgttatatatcgacacgctcgaaattgaatggtggagctctaagccagatcgaacaacaatcaccttttactcggatgattgattgagtcccagtatataacgagacgctccaaatcgaatgtcgaatctctgagccaattcagaccacaataactttttactcggatgtgtgattgaatcccgtaatatatcgagacgctcgaaatcgattgtgaacctcgaaccaattcaacgacaataacttttactcagtgtctgacgaatcacgtatatatcggacgctcaaagtgatgttgaacttaagctatcatacaaaaacgtttactcgatgccgatagtgcgaatattcggaccttgaattgatgtgaactctgaccactaacgaaatact

SEQ ID NO: 72188 - DNA, 526 bp, Glycine max
  unsure (1)..(526): unsure at all n locations
cttagcactgagctgcagcttgcacagttaatcaaattaatcatgtgggttattttatatcatgaatttcagagacaagacagcaaggggaaaaaaagagatatgtacttactaagtgacaatttgtgctaacgaaaagtcaatttcgatcaaactaaaaaacgtaatacatttaatgggtgcttaactttctgtaatggagaaatttccctataattattagtagggaataaataattgttttgctgaacaaacaaagcctgccccataagtcacatgagtaacacttacgcctcacatantttttaggataaaaggcacattaattaaactaggaaaatatactaatacatggaacaactgtcaagttgtgacacataggtgtaatgcatattctgatagaactattactcgaaacccttgctggtccatactccatagcatagcaactagagtgatattagtagattacgccaaaacaacaacaacaacaaagggttgtatgggaagacatttagagagtgac

SEQ ID NO: 72189 - DNA, 324 bp, Glycine max
  unsure (1)..(324): unsure at all n locations
ctcgcccaggcgagcaaggttgcttcctccagaagcaattgtcttctggaggaatcttctggagggcccaagtgggcctggttgctatntgcacccncatttttactaagtacatcccctgcctttntntggtgattctttnttcgtaaagttacggaaacttacgaatttcgtaacgatacttggtttctttccgtaatgttacggaaccttgcggattacataatcatcccctttttgacttaccgaatgttacggaacctcactaattgtcaacgatgcttcatttgatttcggtgtgtacggaacctacggattggcatc

SEQ ID NO: 72190 - DNA, 483 bp, Glycine max
  unsure (1)..(483): unsure at all n locations
aagaacatgtgattgatttatgactgaanatgttagtcagtttatcagattgatngtgaaggaatgcattgatcgtatcccggtgagagtgtgatctcttatatttgggagaaacaactatcatttagtactgatntttgcatgaatctctaaagtatggactaaatgcatgaattgaggatgatgaaggccgtgtttgattgtgatagccacttagccaaaaagctgaccatgttgcttgaataaattatcctttgcacccagtttgagctgaatgaattattgattgattgaaccttgagcccatacagggttatcttatgctaccttgtcttaggttgtaggagagcatcatccacaggaagcttggttcgaagtagattcgtcccaacattgggggagtaattatcaaggaacacttgttccatatctggggaaaatactgggtaagaattgaagtggtcaaagtanacagcatacaca

SEQ ID NO: 72191 - DNA, 505 bp, Glycine max
  unsure (1)..(505): unsure at all n locations
acacgatactcagctcgtacctctctgtcttgacactgacaatgacctttaatttttgtgttttattatgccttaggaggatccagcgcgccttttaattggatacacattggctaagtatggttaagagatgaaaacaatttattttgttgcaatgccataggtgcaagttttctgttcatcatgctttgcctgagagtagcctattctgatgttgctactctggtggtgctggtgagccacttgattggatcccaccttcctctgcacctagactgaccactgctttgacaacattggattagaggagtcttaccaaattaataggagctttgttttaccctcttggctcgngtctttagtactttttgcttccattttttatgataactgatgcttgacttcaaattttgactataaggtttaccttctgcttgcctcggaataccactgggactacaaaatgtactgatctgtaatcacttgcacagtgtctgcatgactt

SEQ ID NO: 72192 - DNA, 473 bp, Glycine max
  unsure (1)..(473): unsure at all n locations
ttaagtcaccgcngctgcagctgtgacttggcatttctttaaactagtctcttattatgttgtgactcntgaaagaatcttcagaaacaagtcacttgaagaatagcgacttttggaaatgtattttatgaaatcagtcactggtaatcgattaccattaaggtataattgattacacatcaatagatgtgacttttcattgtgaattttgaaaattaaaacatttagaaacacttgtaatcgattacaagtattgtgtgatcgattacacaagtttaaaatgattgaaaactgttgaaattgaaatctaacattnaaaacactggtaatcgattactaccttctggaatcgattccaaagagtaaactctttggaatgatttgcgaaacttctgtgctactaatgtttggaaaacttttagtactatcttgatgagtttctctgatcttaatctgagtctgagcttgaatct

SEQ ID NO: 72193 - DNA, 169 bp, Glycine max
cacccacttttcctagtgatactctataaatctccccttgatttgaattataatatctacaataagttgatactatgtgaatcttgattaatccatttttcccctttgcatcacaatagccaagtgctatcaacaatttaatttaacatcatacatatcatgaaaaatt

SEQ ID NO: 72194 - DNA, 420 bp, Glycine max
  unsure (1)..(420): unsure at all n locations
tacccatacttntcgcaaatgctatataacataagataagctcaatttgtatattagatgaaagcatcaacattaagaagccagcagatgaaaacgaacggtaccgaatgatgccgagtggaatgtcgtcatgccatctatcacattctgtttccctgtgatgacagctttgcccttcccgccacctatgacatcacattcgtttttgtttcccaccttcaatttatattctcatacctcgaaaatccatcatatccaaaagtcagcccacatgtcatagctattatcaactggaatcatgcatcaccataaaatacgaataatttttaaatacacatcggtgaaaaaggaatcacatataccaatctcaacagcaccagcagcataattaatcgaacatgttctcctcctctactagtc

SEQ ID NO: 72195 - DNA, 393 bp, Glycine max
  unsure (1)..(393): unsure at all n locations
acatatctccaggtaccactctgtggtcaacaataaaagcaggaaagttcacccttcaacacttcctcatctcaagcttgtaggattatggggtacccatcacatgtggtactaggtggcggtcgggcgatggtgcacaacaagttnttccacatccacaatgcgcgcataaacccaccatcccctggtgcccacctccaactgagctcacgtacttccacgtagcccatatcctcgtttcttcaacaccggttccccatcaatcctnnccaagcttcacaacatccaagcaaaacataattcacacagcacgagctatcacnagccaagcaaacaaagcaaaggcagatactctgctcaacacatcaaccaaaatcacagcttttctcacgt

SEQ ID NO: 72196 - DNA, 500 bp, Glycine max
  unsure (1)..(500): unsure at all n locations
agctngcttctacaagaagtatgatactgagaaagctgttactaataagtatgctgntagccgctacctcaagtatcaaatgactgatgataaatcagtagagtctcaatcccatgagatacaaaaaattgctcatgatatcatatcagagggtatggctttggatgaagcaattcaggttgctgtcatcatagacaagctgcctcctggctggaaggatttcaaaaaccttctcagacacaagaccaaagaattctctttggagtctctgatcacacgtctgcgcattgaggaagaggcacacagacaagatcagaaagatgaattgttggttgtgtctcacaacaacactataaggaagaacacaggtgcagttctgaagcctacagacaaaaactttaagaatcagaaccacaatgtgaacaatacctncaaccgcaacaagaaccacccacgggtccaacatgctagacaacatccacctgccaagaataatcctg

SEQ ID NO: 72197 - DNA, 430 bp, Glycine max
  unsure (1)..(430): unsure at all n locations
tgcccagagagggagtccacggaggaaatgcttaccacctcataagacttgatagcggnttctaaagactcctctgcggcctccacataaggcatagaggacgggcagctcaccaagatgtcttcttcgcctgatacgatgaccagatgcccttccactacgaatttcaacttttggtggagtgtagagggaacaacccccactgagtggatccatgggcgccccaacagataagtgtagggggggttgatatccattattttgaaaagtgacttgacaggtgtgaaggcctatctgtactgggagatcgatctcttccctaacctctcggtgggtgccgtcgaaggcacgaaccaccattgaccttggctttaagtaggaagcattgaatggtaattctccaaagtgctcttaggcatacattcaactg

SEQ ID NO: 72198 - DNA, 436 bp, Glycine max
  unsure (1)..(436): unsure at all n locations
agctcgagctatcagaagacttgcttattcatctattgtcttattatctaccttgacagtttagtcagtttaagatctcttataattgtaaaaaggagatgtctattaatgagctcatttcatactgtgtgcaagaagagcaaagcaaaggctgaagcaagacaggactaaaagtgctcatgttgtaagtacctctaaagacaagagccaaagaaaaaaaaagaacttagagcccaagaatgaagctggctatggttcaacacaaaagaaacaaaattcatgtgacaactgtttcttttgcagtaagcctagacatgtaaaaaagaaatgtaccaaatatcatgcttggcatgcaaagaaaggtatgtttcttagttnggtctgttctaagggcaatttagcttcagtccctagacacacttggtggttagattat

SEQ ID NO: 72199 - DNA, 448 bp, Glycine max
  unsure (1)..(448): unsure at all n locations
agctnngtggatggttgtgaacggagtgaatgctgtctatttgtgacgaagtttaacatataccagctggccaacttcatattgaacatcgcgacgcatcttatccgcgaaatgtttcatggtgtcttgtgccttgaggagtttacgtctgagggttgcgtaagtatcttcccttgtgttaagtatggtatcaattgcctcattgcgggaggagccactgagatagctgggaacggaaggaggaggcttttcatatgttactttaataaggggtgagcccggtattcgaatgttgaaggtattatatgaccattctgcgggctgatgatgaacgaatgatcggagatacgtctcaagcgtgcgatataagacctctgtctgatcatccgtttgtggatggtaggcaatgctcattctgagagtagtaccactcatcttgaataactcc

SEQ ID NO: 72200 - DNA, 251 bp, Glycine max
  unsure (1)..(251): unsure at all n locations
atgaagagatctacatggatcaactagaagggttccaggagactataaaggagaacatggtttcgaaattgaagaagagtctgtatggattgaagcccactccaaggccatggtataccaaatctgactcattcatgacgaatcatggatatatcaggactaattcacgatattctgtatatgtcataatatttccacgaacanacttatcatcctcttgttatatgtagatgatatgctgatagtgggac

SEQ ID NO: 72201 - DNA, 509 bp, Glycine max
  unsure (1)..(509): unsure at all n locations
agcttgtaggaatatggngtacccatcacatgtggtactatgtggcggncgggcgatggtgcacaacaagttntccacatccacaatgcgcgcataaacccaccatcccctgttgcccacctncaactgagctcacgtactcccacgtagcccatatcctcgtttctctcaacaccgggtccccatcaatcctctcaagcttccacaacatccaagcaaaacaacattcaaacagcataagctatcacagccaagcaaaagcagagcaaaggcagataactctgctcaaacaccaaccaaaatcacagcttttctcacttaaagaccacagtaacaattccttcgatccaattcgttaaccgttggatcgactccaaaattttactggaagtctatagtgcataagcctacattgtgaccgttgggatctactagcaaagatcaagaactcattctgtactactctntccacagccaaccacacacaagcattttctgcaccaaagcta

SEQ ID NO: 72202 - DNA, 394 bp, Glycine max
  unsure (1)..(394): unsure at all n locations
caaccagaatcagcccagctattgtgcaagcaantaatggggcaaaacacaccaaatgaatattatgatggatggctcaaattctaaccaacgcaaactcatcactttcaaattgagctttcaaaactatcatgacatgtataggaagatccatgatttcaaatcacaaaatttcaagaaacttttatttntcaaataattacccaattcttgaacatatcctataattcaaagaaaacatgcaaagtcgtacacgcacacagaattgacccagaatattaaactataaacccaacgaaactaacaactttaaccaattaacacaactaacaaattaacaaaacccggcaaactagcagaaccaaaaacactctcccccatacttaacaacaca

SEQ ID NO: 72203 - DNA, 412 bp, Glycine max
agtctcacaattgtcacgtgctcatgctatactagttagccatggctatacgagacatcttgccaaacaaagtcaggttaacgataactcgcctgtgcttattcttccatgctatagttagcaaagtcattgatccagtcatgtttgatgagttggaaaatgaggccgcaattatactgtgccagttggagatgtatcttccccctgctctctttgacatcatgattcacttgattgtgccattgaacgagaattcaaatgttgtggtcctgtttatctacggaggatgtactcggctgagcgatacatgaagatcttaagagggtatacaaagaatctatatcgtccataagcatctattgttgagaggtacatcgcagaagaagccattgaattttgttcagaatactta

SEQ ID NO: 72204 - DNA, 448 bp, Glycine max
  unsure (1)..(448): unsure at all n locations
actagctggatacttccctgcaaagcagatattgtacggaagttgtgngttctagtctttggacgaagcaacaacttgaagactttggagtagaccttgatcacattcctctaacatgtgacaacacaagtgcgatcaatctaactaaaaatccggcatgcattcttggactaagcatagaaataaggcatcattttcatagagatcatgttntaaaaggtgattggtgaattgagttcatagatagtgagcatcaactagcatacatattcactanactactttctagagataggttcttcttcaatagaaatgaactacgcatcttaggtgcttctagaatagaatgacattnntgttagtggatattatctatggcatatggcaatccatatctattgatttctctggataagatctagctnggtgatgtgtgtgttactcatta

SEQ ID NO: 72205 - DNA, 496 bp, Glycine max
  unsure (1)..(496): unsure at all n locations
agcttcgttgaagccagtggttggaggagaaggctgaatggtgaagttgattngnggagtgcataatcatgaattggccaagtcattagttggacatccacatgcgaggcgattgactaaagctaacaaaacacttattgctgatatgacgaagtccatggtgaacctaagaaacattcttctaactctgaaggaacacaatgccaatagctatacgaccattaaatagatatacaatgcaagaagtgtattttcgtctttcataagaggaagcgatcttgaaatgcaacatctgatgaagcttcttgaatgtgattagtatattcattggcacagaataaaggatgaagacgtggtttgtggtatcttgtggtgtcaccctgatgcagtgaagttagtcaacacatgtaatttggtgttatgatagaaacacctcaaaactaccggacagactccactgttcgatttgtgggtgacccactggatgacatcttat

SEQ ID NO: 72206 - DNA, 469 bp, Glycine max
  unsure (1)..(469): unsure at all n locations
ccttggtaaggttctaacaatctcatcatgagtttgatttgtatataacctatactgactgactcgtaaagagtattgttccccatcagaacattaccactagacttctgctcatatgttatgaaccagcttctatgtggacacatatgataaaaacaacctgagtctaatatccattgtttagaatgtntgtgtgggtgttcatcaacaaccagaaccaaatcatttttttggtgagaaatcattttgaaccacaacaacaacattatctttatttgctttctttggacaatctttcttctaatgactaggtgttatgtggatcaaccttgctcttcttactaccttnttctttcttcttcttctaccttntagtagaaccagccaccaataatctagatgcaaggctttacaccattctagacacttagtaaagctctctggatagagatagacgtgagtcttcact

SEQ ID NO: 72207 - DNA, 218 bp, Glycine max
  unsure (1)..(218): unsure at all n locations
tttttacaaacaatggaatttctaaattttactggagntcacaatactgttctttctttgtccacaggcatatttgttctaagcacccgctaatactaaatccactaatgagcgctaagcgggtcataattgcactaaatgtgccagcacgaacaaagccacctatttaagcctgcaatcatattttggagagggagatggggccattttttgaaact

SEQ ID NO: 72208 - DNA, 230 bp, Glycine max
actaataaaaaaaaaaaatctacctcttctcatcctctgaaagtggcttcttctttggtgcaaattcatgggcagcatcttcatttgcagccatagccactgacagtaagccgaataactgaatatcccgaacagggtttcagcccgcaaaaccctataaactataaacctcaaccaattaggcccaaaattcagtctttggcaaaccccaatttccaaaagggtactct

SEQ ID NO: 72209 - DNA, 438 bp, Glycine max
  unsure (1)..(438): unsure at all n locations
catgtcttgtcanaatgggcttataacgagaatctccagtgacaaaacagcatcattctagtacaaatatgctcttagcttataagttaaaataaattaatgtaccccttttcgttcaccctgcaatgcatatttgtagtgtgaccagattggctaagtcttctaagctagcatgcggaaaaatngagctaagaagatcgatgcacatcatattatcctggtaattatcattacaagcttttctcctcaatttagaattctcttgccttatctttgtccatacctcctcttctttccatgcactcagcgcggaaagtgcgcgaatatgccttcttcattagtctctacggtaattattatatatcggttttatatcttaacgtaaaactttaaatatttattataaaaatacgaatgttattataattttctcataca

SEQ ID NO: 72210 - DNA, 439 bp, Glycine max
  unsure (1)..(439): unsure at all n locations
taattacaaatcatatggcatcgattttccttcatgcccaatagaaagaattactaatggacanacgtctattgacctaattggtaacaatttactttggtcttgcaaatatattgtattaaaactagactattgtattctttacgttactattacatcttgcatatgtggtaacaatttgtttggtctggcaaatatattntgtattaaaattacactatcggtattggntctttaactattacattctgcatacgtggagacaattccttttggtttgtaaaatatatnttgtataanaataatactattggattgtgtacttttcactatacatcttgcatatgtggcaatagtttctcttggttacacaatatatnttgtatcaaaattagactattgtatttgtactntcactnatatatctctgcatatgtcg

SEQ ID NO: 72211 - DNA, 494 bp, Glycine max
  unsure (1)..(494): unsure at all n locations
agcttcgctggttgttttgtcctanaaccaaagataggttgattttaataattaatctaactggtgtggcttcataggacttgtttgcggaagaatactagaagatcacgaaagacacaggtataagcaacgtcattatttcaggctttctttttcaattgtcttagaaatctaaagaaaatatgtaattatttatttaaaataagttaatataaggtgtctatattttcaagaaaacaatattgaattatggagaatacaacaacactaaaagtgtgttcaacaagataaataagtcctttggctagctctttataaatttttttagtggagctgtatataagttaaacaagttaaattctaactcattggaccaacttaaaaatttgtttgactaaaatggagttatttggtaaaagaaaattattcctttatgttgtaacgttctactttataaactcctaacaagtttaggtnttcttactatatatata

SEQ ID NO: 72212 - DNA, 332 bp, Glycine max
  unsure (1)..(332): unsure at all n locations
actttacgatatgtaatggtgtatccgaactcttgtcttaccaatgcgatgaatgtagaaatgggtagttgcctcgtttcttcaaccatcgcaaggatatttttgcctacaagtttcaaatccatcttattgtgatcttgtgaaatgggtggcagacgcatgtgtgaggcccttctattattctaattntccanactttttagattttttctttncgacacnttctagttccactaacacccttcagctggcaacatanaacccatgtatccttcgcacacctcttggatttgaaaagtacatggtcttaatgtgtcacatttttaccacgt

SEQ ID NO: 72213 - DNA, 492 bp, Glycine max
  unsure (1)..(492): unsure at all n locations
agcttctatatagttgaacccatttatcaataatcacattgttgagtttatgcagaanattagagtttatctctnttatcttagtgagagtgattctcctaaattcttgagtgattcaagaacaccctggttgtatcaaaggactttcacaacctttgtgcattgccctcgccgganagagtgattctttccttcctttcatcttcaaccttgttctttcaaaccacaatntcagaaaatccattactggccagaattgtctcgtggccataactcccatnttacgcattcaaattaagtgattcttaagcctaaattgaatttcaaaatgagatatttcacctcattttggaatcacctcatttggagccctgtagcttgagttattgccatttctatatntatgtccagccacaacttaacctacgttttatcatgtcattcttccttctttttttnttttttgccaagaaacaccttattaagacccac

SEQ ID NO: 72214 - DNA, 351 bp, Glycine max
  unsure (1)..(351): unsure at all n locations
attattggnggtaccacctgggccgncagatccctccaccttttgggcgtgttctttgaaagatccgccccctntttgcacatgttccgtagttgcatcctatccggaaccatatcaaaattggactgatactggctaacaaaggcaaccattatgtccttccaaagaatggactcggaaggggtccagttagtggaccaggtaacagctaccccagtaagactttcttggaaggaatgtatcagcaattcctcatctttcgcgtattcccccatcttctgacaatacatctttagatggttcttgagacaagtagtccccttgtacttgtcaaagtccagcaccttgaac

SEQ ID NO: 72215 - DNA, 294 bp, Glycine max
ctcgctctccatgtgcagccgtgagcataacgtctcgttggaggactacttgagaggccggtggagtcgctcatcaagctttgattaagcaaactactatcaaattgctagaagaataagaacgattgtgttttttgaaatctaaatccttctgtagataatattgccgtgttgcatgtgctgtgaatggttttatagatggggttaggattgagagggttgttgtgtgtgccctcctccttcccttgattgcaaggaaactatgccttggaatttgaacgctagatatccttt

SEQ ID NO: 72216 - DNA, 461 bp, Glycine max
  unsure (1)..(461): unsure at all n locations
agcttccagaatgggataccatgctacagctgctccggtctagctgtcttgaaagaaatggaccaacaatttctcgtccgtagaagacgcccccatctttcggcaatacatccgaagatgccccttcggacatgtcgtacctttgtatttatcaaagtccggtactgtgaacttgggagggatgacgatgttgggcacgagacataaatccgctaaatccgagaatggctaattgccgaggccctcgactgctctcaacctttcttcaagcacctcaatctttcccttatcttccgcagagggaatagattcttttanggtgtgggtgaggccggngtatgacggactatgtttggttggggtagttcatgcggagacggatcttngaggtggagcangnggccaagatgggtatctncttcctcatcgtcttgcccgggatactcttcatatggtgggag

SEQ ID NO: 72217 - DNA, 503 bp, Glycine max
  unsure (1)..(503): unsure at all n locations
agctntgtatagaacanaggataaactctctanagctcatttgttttatctacaatngctgggtgtttttcttttttcttgatccatgactatttgcttttcaatgcttggtcatcaaaattctatgaattcttgatgccctttntatacataaagactcgtaattgtggagagtatcttcagtgttgaataatatgacctttgttgatcttgatattgttttctagaataaatagatattgtgcatctttgttgtgatacaagaccagacctntccataactgtcatacatacatcaacatagtcattaaacatgtaaaaggaaatgtaagataaattcacatatatgctccttttaaataatcatataaaatgacataaagtgatatattcaaataaacatgcatattcgaattagagtttggatggaacggacaagtacttcctacttncagtagatgaggtatccattcatgaataagtcttacctgatggttcttcta

SEQ ID NO: 72218 - DNA, 376 bp, Glycine max
  unsure (1)..(376): unsure at all n locations
atcagaaatggcatccctaaagtgatgttgcaattccaaccatcctttttcaagaattgtttattaagcccacaagattttcactcgtggtggactaattactattctaagagacctattnttgtcatgacttgcttaaagaaactaatcaaatctcgtggttctatatcggacaccagcaaaagtagtataggtaaacatgaatcatcagtcaaaattactcgcttctanaaattctatcatatctattctcatctaagtggccccttaactacttttcaagaaagctgtgtttcccctagagaanaaaatagagaanaacatagcagatagtagagtcattaactcagagaggaaacactaaattntctcgata

SEQ ID NO: 72219 - DNA, 502 bp, Glycine max
gcaagctgcttgtggagcttctatggaggctgtatcttttatcttcaatgaggtcctttaatggtggttttccaccatggagatgcagcggaagacacaggagaagaggggagaggacgcgccatccactacggaataagccatggaagaaggagcttcaccaccaagatgagccttggataacaagcttggaaggatgcttcaatggaggaaaagatcgagggagagaaagagagaggggtgagcacgaaattgattgaatacaaaaagggagagaagtcgaactttgagttgtgtctcacaagactctcattcatcgaagttacaacaagtgttacacatgcttttatttatagactatgtagcttccttgagatgctgtcttgagaaaacttccttgagaagcttctttgagaatactttcttgagaagctagagcttagctacacacacccctctcataactaagctcacaccttgagaagcttcttaagaaaatcct

SEQ ID NO: 72220 - DNA, 373 bp, Glycine max
  unsure (1)..(373): unsure at all n locations
tacgaaaactcttggntaaagctcgccatnggaatgctcttgcaataagcatcantaaaataatttttgaattattttgcaaaggttttnttggtattttgaaacccaacaccttatgctgggttttaaatntgttatttgcatctattgaaaataacaattagttcttgacatgcactatgaagaattttttatcaagctaactatcaaatcttcgaacggttttatgttcttgcaatgctcatgtnttccagcagttgaagtttgaaacattagcatttgggagattntatgaatttcactaaattctgttattctcatgcttttttgtataattgcaggcagggaaagctgacaactattaacatccttt

SEQ ID NO: 72221 - DNA, 247 bp, Glycine max
  unsure (1)..(247): unsure at all n locations
attttggctatgatatttagggtatcattctctgcactttatttatcctttggtatttggaccttagtcctttatgattagattttatgttggtttgaattatgattggttggataatatttgctatgaccttttatgatttngcttatgttggtacccacttatgatgatctttntnctatattatctgatattgatttccatgaaacttggctttttgatgttgccaaaggggagagaaatgggg

SEQ ID NO: 72222 - DNA, 443 bp, Glycine max
  unsure (1)..(443): unsure at all n locations
ctgcagctatgccatattcctcaacgtcactngacattacattctattactaagaaanatgcacccatatacaatcaaggtagcttcattacctagagtatttacatgtactctcaaagtgtatttgttatttacatcatacacgccatcttgtcaaaatttacacacatgcatactcagagcatntcggggtaccaanaattgcacatgcgctcatcttggtatttctaatatctatacatatacaaacttcatgatgaatctngactaactacgcagtaaagtgctacatntcatgctctctttnntttttcaagtttttgctacctaaagccatatgcaaatacaagcatatcttcctttgctgactaaaatccgattcaaaatagacggatatatttnttgaatatgtttcttcacatacatgcacacatcttatatat

SEQ ID NO: 72223 - DNA, 186 bp, Glycine max
atatttactcttataagctatatgaaatattatttattattaaactaaaaattacgcgaatggtaatactaaaatgtggtatttcttatttccatagaagttgtaaaatcccccctccgcccttgatgagatatccttagtctgtccttgcaatcagaccaagctcagtgtctggagtatatgaac

SEQ ID NO: 72224 - DNA, 420 bp, Glycine max
  unsure (1)..(420): unsure at all n locations
acctgaggcatgcaagcttgcatncaacgtctcttgtgtgataaaatattatcttattgatttttatgcacttctttattgactttggtgtgccatgaatgtgacctacacgctgccactctatggatgatagattcaatcctaaatagactagtttccatataactcagaattttctcgcaagctggtgtgtatttataggagatgctccgttctttctgaagattaaaaaagcacgtgacagatgatatccattcgtaaacgagttcatatcaataatgataaaacaacatgtgattcaaggtggtgaaagaatcttatccagttgatcctgcctataatcaagtctacaatttattttcatatcaagcgtttgcaattccaatactagagctgttttagagggataacatactgaaa

SEQ ID NO: 72225 - DNA, 234 bp, Glycine max
tcgagacgctcgaaatgaatgtgaagctcttgaccaatcaaacgaacatacttttactccgagtctgattgacgctcgcacacatcgagacgctcgataatgaatgttgagctctgagccaatcaaacaacataacttttactcggacgtctgatgagtcctgcatatatcgagacctcgaaatgaatggtgagcgtggagcaaattaaacgacaatacttttactcgatgtct

SEQ ID NO: 72226 - DNA, 301 bp, Glycine max
  unsure (1)..(301): unsure at all n locations
caagaatctgagaatctggggtgactgtcacaatgccattaagtacattttcaaagtnggtggtgtgtcaatcatcgttagagactccttgaggtttcatcacttcagaaatggaaattgntcttgccatgacttgangtgattattngaaccatgttactggcattaagtggtgacaaacattctatccgagtgcgtgcttttcaaatntcagtaaacttataaatacaattgtaaagcacaattcatgtgtttgttgtgagatgggagacagtaactatgacactgntttatgatcttt

SEQ ID NO: 72227 - DNA, 193 bp, Glycine max
catacagattatgtaatctgtaagttccaatataacttacagattacataatttgtaaaagtatgaatacaagttttgatgatgccaaagtattatcaaacaagattgcttcaagaaacattcaagggtaagaaaacggagattgcttaaagattaattcaaggtcaagcaaacaagattaaaaaaatctcat

SEQ ID NO: 72228 - DNA, 380 bp, Glycine max
  unsure (1)..(380): unsure at all n locations
catcaaattntcctaagttgtcttttccattgtttaatacaaagcatttgccaccaaaaacatgttgatgtgagatgtctggttntctaccattgaacaattcatatggagttctcttcaagataggtctgattacagccctattcatgatataacatgcagtattaacggcttcagcccaaaaatattttggaagaggggtatcattcaataaggttctagcaatttcttcccaaagacctatttttcctttcaacaactccattttgttgaggggttctaggtgcagaanaattatgttcaatgccattcttttcacanaataaatcatattctttattttcagaatcacccccatgatcacttctaatagatataat

SEQ ID NO: 72229 - DNA, 196 bp, Glycine max
cttctatgctttatataagactacctggggagcttgactgggagactgtcgtgaagaaaggaaagcttgtcgtgtactagagaggatcaccgagggacgctaagggtcggcctacccccttggtcgggaaacctaagggctgtaattgactggtgcttatttttaaaccactaggtctaaagttctttgtaatgct

SEQ ID NO: 72230 - DNA, 241 bp, Glycine max
  unsure (1)..(241): unsure at all n locations
atcttaagcacgagctgcactttcaatattccgggcgtaagttttttgtgtcctttactcttggactatctttgacatattgaatttatattcattatgcttatttntcaagttaatgtttacaacaaataacccttttgtttgattatttccttctctgaaatgttctattattgggaaatatttaattttgtctaaaattacactggagttcttgtgcatatttgcattttaaccctta

SEQ ID NO: 72231 - DNA, 141 bp, Glycine max
  unsure (1)..(141): unsure at all n locations
cacacaaaaactggcatgtgtgttctagctaagttttaaaagatagtagttgcctttattttctaaccttcgcagatttattcattntanaatacgtcgtgggtaaaatatgtttgcatgtaatgaactaaacgtgaagtt

SEQ ID NO: 72232 - DNA, 396 bp, Glycine max
  unsure (1)..(396): unsure at all n locations
gcttggagtttccaagtgccaattcgncttcttctttattccagtcttcttctggcttcaattcattagtgggctttccttctgtgtccagcatcttgngatgttcccagcctttgatgacagctttccaggttctgctattccagtgattgaggaaggccaccattcttgctttccagtattcatagttggttccatcaagaatgggtggtctgttcactgagcctccttctttctccatgttcattagaatntatctccctagatctcactctgtgattccgagtgttggctctgataccaattgaaattctgatactgggggacagatgtcgtaccggatgtcacgacatcacgcttcagaacatgcagattatatgtgtccgtatgaacaga

SEQ ID NO: 72233 - DNA, 358 bp, Glycine max
  unsure (1)..(358): unsure at all n locations
acctgcggcatgcaagcttgcttgtggngcttctatggagactggatcttngagtcttaatggngtcctttaatggngatttccaccatggagatgtagcggaagacaaaggaaaagaggtgagaggaggcgccatccattaatgaataagtcatggaagaaggagcttggagaggatgcttcaatggaggaaaagaatgagggagagaaagagagatgggggagcacggaatctgaagaagaataagggagagaagttgaactttgagttgtgtctcacaagactctcatttatcaaaggtacaacaagttgtacacatgtttttatttatagactangtagcttccttgagaagct

SEQ ID NO: 72234 - DNA, 466 bp, Glycine max
  unsure (1)..(466): unsure at all n locations
attgacattcttataatgtattccatgacatttcctttaccttgatatttcatggaaatcaagttctgatggagaagtacttgttccgtcttattgctntttgcaaagtgctcttcaatctcagtaaggaaactcttggcactagttatatcatctaaaaaggccacgcttaatgatcataagacttatgcgatttgagtgatctcagttctcatgaagtttccttttgttagagaggtgctggaatccgtatgatgaaggtggttctcaatccttaatgccaggtctagatccatgcagccaagaacaatttgcatggttttcccgtccctataaattgtaccattaagaaccaanatcgaattcatattagtagatatagaagcacaactgacaagataaaaacanataatacataagctcatgtagcagcatcaatgcatttagaagtatggatattccatct

SEQ ID NO: 72235 - DNA, 262 bp, Glycine max
  unsure (1)..(262): unsure at all n locations
aagcacctgaggctgcagcttcacaatcaacgacatactntttactcagttgttgatgagtcccgaatatatcgagacgatcaaaattgatatttgaggttccgagctaattcaaacgataataactntttactcagacgtttgattgagtcccgtaatatatctagacgctcgaaaatcaattctgaacctcagagcatattgaaacgagaataagtnttactcggatgtctgattgagtcccgtaatatatcgagacgct

SEQ ID NO: 72236 - DNA, 332 bp, Glycine max
  unsure (1)..(332): unsure at all n locations
gctanacattcaacttcgagcgtctcgatatattacgtgtctcaatcagacatcccgagaaaaaggtatggtcgtttgaattggctcagagcttcaacattcaatntcgagcgtctcgatatatttcgggactcaatcacacatccgagtaanaagatgtggtcgtttgaattcactcagaggttcaacattcaattttgagcgtctcgatatatgacgggactcaatcagacattcgagtaaaaagatattgttcgttggatttgctcagaggttctacatttcaattcgacccgtctcgtatattacaggactcattcgacatccgagta

SEQ ID NO: 72237 - DNA, 362 bp, Glycine max
  unsure (1)..(362): unsure at all n locations
aactctgtcacgcttaatggcatgattgctggctgacatattctcaattagctcagttgcctcttcaggggttntcaactttattctccctctgctgaagcatctaacagttgcttgtattgtggactcagcccatctatgaacatattcaattgaattggctcagagaacccatgggtgggagtctttctcaataaacatctaaacctctccaatgcttcactcaaggactcgtcagggaactgatgaaatgaagagaattgcagctttccttccgtagtctctgactctgggaaatatttctttagaaacttgtcaacaacttcttcccaggttttcagactggtacccttaaatgagta

SEQ ID NO: 72238 - DNA, 471 bp, Glycine max
  unsure (1)..(471): unsure at all n locations
tgcagcttctcctatttgctataataggggaagatttgattaataaaagggttcagccccttaggcacttctctctctctcggaatagctgaggaaaattagttccgtgaagaatatccaagccgaggcgctttcgtaacgtttccgtgagtaattacgcacagattctcgaccgttcttcaagattcatcggtcgttcttcgttttcttcaatcttcaacgggtaagtacctcanaccaagctnttcaattcattatatgtacccgtagtgatccacattttgttcatgtatttcattcccgtttcatttactttttatacccctttgacggcttagccattattaagcattttcgttaactanaaaaaaaaatttaccgacgttgaatgatcatcgtaatttgtaaagaatcgacgtcggcggccgaccgtgaataaaagagtaatatattatataaaatttttataag

SEQ ID NO: 72239 - DNA, 401 bp, Glycine max
  unsure (1)..(401): unsure at all n locations
ctctaagcaccgaggcatgcagcttccaacatctaagcaaacaacattcaactgtatcatctatctcagccaagcaaaacagagcatatgctgaagactttgtcaaaacaccgaccagatcacagtttctcttacttgaagaccgcagatacaattccttcgttctggtatattaaccgttggatcgactctaaatatttactggacagctctaatactctatcctacatttcgaccggtgggatctactagcaagcatacagaactcattctgcattagctcttgcacagncaaccaacacacaagctacttttctgcacaatgccaagattctgctgcacctattctgacaacaaaattctgtataagtgcagatatacaaaatcacacttcctctcat

SEQ ID NO: 72240 - DNA, 416 bp, Glycine max
  unsure (1)..(416): unsure at all n locations
ctgcagcttgcaactcttacaacanagatcgatcattttttataattcacttagtatatataattngggcacgttggtgttgttggtggtgtgcaatttgtccttcgngcaatcttcattatgatgtttcacatcagattctaaaactcaactttcaacaaaaaaaaagcatctccaaatgttntcaacttcattcgtgtaacgaaccctcagtaattgtgattcatatggaagatgagatgttccttatgtacaaattgaactacaactccagcaagtattctgatgtagtttctgtacaacttcattctgatctggctnttcatagtaggctctaatgcttcctcttagagagaccttcttaatgtctttgatacttttccaaaaagaaaaattgggggagtcgccactaacat

SEQ ID NO: 72241 - DNA, 299 bp, Glycine max
gtcgatctagtaaggtctgagagaccatacaagtttcctaacgatatctaattatgtgggccattaagtctatcatatgctgacaatagccgagaagcccatgaatctcttctgaggcggagtaggtgtctgccatcgccttggccttggcttacaagcggggaagttcttgactcctcgtcaaggtaagagcaaaccgatccatccacatggttgcctcttggtgtaaagagtccatcacccttcctctagcctcttataccgcgtatactagagcatactcgtccgcgattctatgc

SEQ ID NO: 72242 - DNA, 374 bp, Glycine max
  unsure (1)..(374): unsure at all n locations
agcttctatatangctgaaccattntatcattatacacaagttgtagtttattcagaanaatagagtttatctcttttatcttagtgagagtgattctcctacattcttgagtgattcaagaacaccctgtctgtatcaaaggactttcacaacctttgtgttgtgccctcgctggaaagagtgattctttccttcctttcatcttcacccttgttctttcaaaccacaattccagaanatccacctctgcccagaattatctcgtggccataacttcccgtntacgcactcaatataagtgattcttgagcctaaatngaatttcaaaacgagaccttttcacctcgttaggaatcacctcatttggagccct

SEQ ID NO: 72243 - DNA, 243 bp, Glycine max
caagcacctatatctgttatgaatgattgatcaattatgtaattagacaatcttttgtgagtagtcaagttgaacaaacattggttatcaagagattaaacaatgaaatggttattgtgcatatatagtgtgatgatatatactttggtgctactaatgaaaccttgtgtaaggaattttccacgtctatacagaaagaatttgagatgtctatgatgggagagttgaacttcttccttggac

SEQ ID NO: 72244 - DNA, 478 bp, Glycine max
  unsure (1)..(478): unsure at all n locations
atcttaagtcacctgcggcatgcaagctngagatgaggaagtgtagaagggtgaaacttccttcttttattctttgactacagagtggtaccaggagatatgtcgcgagggtcaggagaccttggngacgtcaggtggngtgctattgcccaaaaccaagcttgaccaatcccgacccaacccgggcatagtcagtcagtgagacctgtgatgtacctaaacaggcgagctcctggcagtcaacagataataggaacaaacaccacatagcaaggaggcttgtgtggtggctggcagctgtgaactttgttgatatatgggatatgggctctggtaatcgataccaaggtgtcgaacctacccttcgcgggagggcgaacgagactcgcggatgcgtgtccacgaatggatacgcgcgagtcgcaacaacgttatttaggaaacgtcaaaaaccagaaagagcgactacaactttaag

SEQ ID NO: 72245 - DNA, 354 bp, Glycine max
  unsure (1)..(354): unsure at all n locations
acagggcaaaggcaaaaaactctgcccaaaactcanacaaaaatcacaactttttctcacttaaagactccagtaacatttccttcgttccaattcgttaaccggtggatcgnactcgaaaatttactggaagtctctagtacataagtctacanttttgaccgtgggatctactagcaaccatccagcactaattctgtactactctttctacaacccgcanatacatagcnatttttctgcacttatgcaaaattctgctgcacatttcacagcaaaattctgcataaagtgcagattcgaaaccactcttccctcatcaattttcccaattgaatctacaagtccaatcat

SEQ ID NO: 72246 - DNA, 318 bp, Glycine max
  unsure (1)..(318): unsure at all n locations
ttattgcgggctgtagcaccggntccgcttccctagctgtattggaggcggtcgccgaggcattatcctctatagttttcttaagctttagcatggcctccgtgatagaagccattngatcttttaagagccgataggtcgggcttcatctgttcttgcactcccttcttattattcattnttctggatcgagtgttatangggtgcctctgcgctctcttagctatnggtaggttccctacagaaacaaacaatggtgagtaggccaccaaaacatgaatatgctaatgaatgatcggagcacttggatccacctca

SEQ ID NO: 72247 - DNA, 443 bp, Glycine max
  unsure (1)..(443): unsure at all n locations
ctatggaggctggatctttgttcttaatgaggttctntgatggtgatattccaccatggagatgcagctgaagacaaaggagaagaggagagaggaggcgccatccactatggaataagccttggaagaaggagcttcaccaccaagataagccttggataagaagcttggagaggatgcttcaatggaggaaaagaaagagggagagaaagagagaggggggagcacgacattgaaggaagaataagggagagaagttgaactttgtgttgtgtttcacaagactctcattcctcanagttacaacaagtggtacacatgcatctatttatagactaggtagcttccatgagaagctntcttgaganaacttncttgagaagcttctntgagaanacttncttgagaagctagagcttagctacacacacccctctcataac

SEQ ID NO: 72248 - DNA, 360 bp, Glycine max
  unsure (1)..(360): unsure at all n locations
agcttatgcanaacgctctntcttactcccntccccgccgttctagggagctctcctcacgtcactttccgaggcgagttccgccgccgaatctctttgtcccggcgcttctccgccggctccacctcccgagaagtggaatatgaattgggctttggaggaggagtggatgaaaagtatgatgtgaatggtagtggaggagggcacgcanggtgcgaagccgctcttgcctctgcacgtttgggagcangggactcttctttttactctcacatttaccgaaatgcgtggcagcncttgcaatccagctgttggtgggcccgcanagtcccaacttgttcatgaagtggatgcacttgg

SEQ ID NO: 72249 - DNA, 216 bp, Glycine max
ttctggcgcataatatatcgagacgctcgaaattgaacaacggaagcattagagaaattcaaatggtcataacttttcacacggaggtcagattcatgcgcataatatatagagacgcttataattgaacaacggaagccttcgtgaaattcaaatggtcataacttttcactcggatgtcagattcacgcgcataatatatcgagacgctcgaaa

SEQ ID NO: 72250 - DNA, 413 bp, Glycine max
gcttcgcacttgatagtggaggacacatgaacattctctttcaataacattcatgtggctccggaaaaggatgagaatggaggattgccttgagggtcctctcttatgcaatcatggaacacagctccaaactcgaaaatggaggacacatgaatgacaacgcaattcattcatggggctccagaaaaggatgagaatggaggatttccttgagggtcctctcttatgcaatcatggaacacagctccaaactcgaaagtggaggacacatgaactgccctaagcaataacattcatgtggctccggaaaaggatgagaatggaggattgccttgagggtcctctcttaggcaatcatggaacacagctccaaacttcgaaatggaggacacatgaatgacaatgcaatttat

SEQ ID NO: 72251 - DNA, 362 bp, Glycine max
tttatgcaccttttcccagatctcttggccctctttgatgtcgagacatctagttcgacatcatcatcagaatcagatgaggaaatttctttcctctccttggaaggaattgcgactatgcttcttctggatgacgtaggagtgattggagtgctcttcttctgtgccatagtcttgattcgtccagacctcttaagtggggggtttcctttctgctttgagactttccgcatgccaggtgccaacttgttgcaattgttttctcatcagattctacatcttttaggtcaatgaggtcacctggagcaagttctggtgcctttggtgcaagggtctcttctgtggcttgatcatcttcttct

SEQ ID NO: 72252 - DNA, 485 bp, Glycine max
  unsure (1)..(485): unsure at all n locations
tatgtggtnttcgtctttgtatgtcagatctatatatactcttgatgctgggattttttaatttattcttgaaagctggaagtttctctttaaaatattttgtcttggattctatttttggaattatccctgccagttctaagtcttcattttgaattcctatgttaaatgttcgtaacanaaatgttacttttgctaatttatgatgatgttatcacgtgtgacaccaataacaaaatgatatcattatgatgtgtgtcacactatattgtatnacattcaacattataatatttcacaaatatttggttaaatttaatatggaaataagaaaaatagttgacagataaaaattataaaaatatatgaactaaaggaaaaaaagtacacatttgtcgcatgaaaaataattaacttatatcatatataattacttaaattattataaattaaatcttaataaaattaaatcttatataaacccc

SEQ ID NO: 72253 - DNA, 526 bp, Glycine max
  unsure (1)..(526): unsure at all n locations
ccacagcaacacanaatctaggtatccaaatctctcttttttaatgtgatttcaaggttcgagaagtgaaattgagaatgaggtataattgaagcaaactctcacctcacacaagtccataacatcaatttaaacttgttcaaactggatttacacctaaaanttcatcgaatcatagattgactcctcaacccccaaatttaccctagaaatggctctttgttcactttggtcattngtttctctctctagcacagcccaaactttctcataaggtcctaaatggcatntcaagctaggagtaactcactataacctccaaataccactaaatccagaattgggccttccaactctcaaaatctcactctnttttccactcacaacaccatactcccaccttctaaccctagggtaattctacccttcatctctaatagttgtccataagtaaattcagcacataaacatcacaagcatcatcatataaaccctatnacagaatgggtttgttaactcatccaac

SEQ ID NO: 72254 - DNA, 418 bp, Glycine max
  unsure (1)..(418): unsure at all n locations
agcaccgcagctgcagcttaagtttanttacagcctaaagttctatanaattctataatcntatctattgaggctaaacaaagcananattatgggaaaaatagataatcgatgtgttaaatgaagttcaaaagtacttatgcacacaagatatcaaactcccccaaatttaaactatgtttgccctcaagcaatatagaaactaaactatattgactaaaagttgcacaaccctaactatgttagatagatggcgagaacaaagaatatgaccaacatttacttcaagacacaagcattgcttcaaaacacaactagtcacacaatctcacgatcacacttgtctaagtaccaatgatgaaatcatacaagaattgcactcagagctcangcagtcaacaagcatgacacaatttaa

SEQ ID NO: 72255 - DNA, 284 bp, Glycine max
  unsure (1)..(284): unsure at all n locations
gccacctgcngcatgcaagctggcaatgcgtgcgaagcgagctgggcaattcttccatcttatcttcaatgctctttttcccaagttnttggatcaattttacctccaaagcacttgaaatcatcttcttttgaattctaccaatcaagaattgaaaagatggtaatctcttcttcatttcctttaaacataatanagtaaagaaatacactcatttatagccaaattgactataaattagctatattttgccttatcaactccccaaataaacatttgttttc

SEQ ID NO: 72256 - DNA, 370 bp, Glycine max
  unsure (1)..(370): unsure at all n locations
tccactcatatcatataattgctcattcaaatcattctcaaacactcatttcatgcaaaacaatccactacatatcantttcaatcaattcattgttcaaacacgcctttggtacaaacaaacaactcanagtgctgaaatttatataattgaaatntaanaaaattgaaatataaaatctgaaattaaaatgactgaacataaatcataatataattgtaataaactaaaatgttcgagatgcacaaaaattanatgtccttgctcctgtggttgctcctatgcatgctcattaagggccaacacctgagcagctggtgcagatggtgtggcataatcaagtatgggtgctagggatggctttgggatc

SEQ ID NO: 72257 - DNA, 360 bp, Glycine max
  unsure (1)..(360): unsure at all n locations
gcaagcttgaccctatgcccacagggaatcaacatcgcatgatgtgtcaaccatatggggtgaaaagaggtggaagccgatgccaacacagtggagttaaagaaaaaggaggcggcatcatatgagcactcatggtcaccacaccgacactcagcaaggatgtagcgacggtgaacgaaggagacacaatangactagccaaagcagctggcgcatcaacttcagtagtaggagtggcctcctgaacaagcacaacagaagaggtganggagttgantaacatcaacaacaacagcgaaagcaaaagcctcaacggatcttgcanacttgaagggtgacctgaatcaagcgtcaacccta

SEQ ID NO: 72258 - DNA, 431 bp, Glycine max
  unsure (1)..(431): unsure at all n locations
agctttgtaccgngcattactntccatgaatcctgatattatatgtgatctctgntgccacttatantttangttgaagtatctggattgattagtcattctcangtgtntnttttctctgatgntgttatttttttttttggcacctttcttggttctctaataaaatgttctattcataanagttccattttaattattcattgtgtntcaaatggtgagattgagatgaacgcatgtattctatggtattatttcataaaaaaaattaccgaatatgttttggcgatgttttaaaaatcagacctgcattaaacttcctattctgctgttatataaacttattaaccttatatgaatgtcatgtttttgatatgttatgccctcaaggcagcatgaatgttcatgtataagttgtcttggggatgtcg

SEQ ID NO: 72259 - DNA, 317 bp, Glycine max
  unsure (1)..(317): unsure at all n locations
agctagtgaaatggttctganggttatttccagcattcttctcttctatgtacactntcaacataatctcagtattcttatcacaccattctgctctctttcttttcacaggaactggattgagagacatttcacaagcttaatgaaacaaacaaaagcataaccctaatccataacaatattgagaagaaatagaaattaatgaagaacctgtgatgctaacaaaggaagaagaanaaatggcgaaggatgatcggaagagatgaccaaggatgatctgaagagatgacgaatgagattggagcatgggagaaaat

SEQ ID NO: 72260 - DNA, 488 bp, Glycine max
  unsure (1)..(488): unsure at all n locations
gcagcttattattaaagctgaaaaaattctaatgtcttgataaataaagaggatctttcttataatattctgaacacacctattcacccctccctttcagagtgtagccattgtatccaacacaaaacaccattgtccactgtcactggaaaattttcaataacctttcctggctggaatcatcacaaaagactaacttaaggcatcaatgctcaagcttagttatttaggatgatatcacatttcttctgttttataacaccattgtaacttaatagtgaggtttagtatcctatctctacaacacacttttttcttatataaaagtttggaatctagtgaacaagagatatccctttggtattgatctctagttcaaataaaaanaaaaagaaggtataatacatataaaccaccattcaatgtaaaatatactaatgtctatatgaaaccatataatcactactttaccggatgttacaacataa

SEQ ID NO: 72261 - DNA, 420 bp, Glycine max
  unsure (1)..(420): unsure at all n locations
agctngcctgtctgatgcagcagtaatgatggcccgagttatattgtggaatggttacgaacccggaatgggtttatgcaaagacaacggcggcataactagcctgataaatgccaaaggaaatcgtgggaagcatgggttaggctataagcccactcaggcagatataaagagaagcatcgtaggaaggaagggcagtagtcaaagctcgcggttgagacaagaaggtgaaggaagcccacccttgcacataagtaggagctnntataagcgcggtctggnggacgaaggtcaagtggtcgcgatatacgaagatgatgttccgagtacattggatntggtacgaccatgccctcctgatttccagctgggaaattggcgagtggaagaacgcccccgcatttacgcgacgagcataat

SEQ ID NO: 72262 - DNA, 361 bp, Glycine max
  unsure (1)..(361): unsure at all n locations
aacggaaaacacgtagaaatttaagaaacagacacgacaaatcgcataagtagcattaacaaaatttaattctggtatattatcaatgaaactatattactgacattgcttaaagtaaaatctttattattatatttaaantngatatacaataaaatgtccatatagaatttgtgacatatacaataaagcatttgatgattaaatatctcattgcacaaattattattaattactgctggaaaagaatacaatgtagtaaatttgtactaaattatgttataattattatttatacgattgttatcaaaaaagtcttaataattcttagacactccgagaaagtgctttgaaacttttc

SEQ ID NO: 72263 - DNA, 221 bp, Glycine max
  unsure (1)..(221): unsure at all n locations
acctgcggctgcagctttatttngactagggttgatgctataaattcttttttttgtgaggggtatatggctacacctttgagcatgatgtatgtattttttaacttggcgtacttattagcttactattgtagcagattatgttgatcttgactgatgcccctcttgcaccttatgaattcatgaattataattgtcacaacctacctcactacaggatg

SEQ ID NO: 72264 - DNA, 161 bp, Glycine max
  unsure (1)..(161): unsure at all n locations
tatcaaacttgcaagatgacaatattattatggctggtgaatcctttaaaacggcataatgtgcacagattcaagaattgtcaatgaattcgctgatagaacgtctaatatatgacttttcttatttntttatagagatgtgttgaatattactggaatga

SEQ ID NO: 72265 - DNA, 470 bp, Glycine max
  unsure (1)..(470): unsure at all n locations
gtgggtggaattcctagagcaattctcttatgttatcaaacatataaagggaaaaggttatattgtagccgatgctctttctcggcgtcatgcattactntctatgcttgaaacaaaactgattggtcttgaatgtttgaacagcatgtatganaatgatgaaacttttggagaaattctaaaacattgtgaaaattgttcagaaaatggtttctttagacatgaaggctntcttttanagaaaacannatgtgtgtgcctaatgtctactanaaattgcttgtngtgaacacatgaggaggttaatgggcattttgggtccaaagacttagaacatacaagacattttattggctcattgagaaggatggccgaatttgtaacattgcttgttgtaaaaggcaagctaggtaagcctatggatgatactcatgccattccgagatcctggatgatatcatgatttgttg

SEQ ID NO: 72266 - DNA, 396 bp, Glycine max
  unsure (1)..(396): unsure at all n locations
agctngagatgaggaagtatagaggggtgaaactttctgcttttattcgttgaccacagagtggtacctggagatatgtctgcggggtcaagagaccttggggacgtcaggtggtgtgctattgcccaaaaccaagcttgaccaatcccgacccaaccctggcatagtcggtcagtgagaacctgtgatgtacctaaacaggcgagctcctggcagtcaacagataaaaggaataaagatcacanagcaaggaggcttgtggtggctggtcagctgtgaaacgtgattgatatatgggatatggactctggtaatcgattaccaagggtgggtaatcgattacaaggcttanaaatgaagacatgacgctaagatggtctttggtaatcgattacc

SEQ ID NO: 72267 - DNA, 351 bp, Glycine max
  unsure (1)..(351): unsure at all n locations
gctgagggttggatattccctctatgccattttttatctgtgtatagaatcctgtncctatgttggctaatcgggcaaggaacatatnttcttggcaacgatgtcgtgaagaagtttggtagtagacggaaaaacgaanaagtntggaaaaccacgccatccaataagattcatacaaaatatattcgtgggccttggtgattaccgattatgcaaaatcttcaatcatacaaaaaaacagcaccctgcaagagagaatgcttatattaaaataatatgtagcacgacaataaaaaatcagagtggcgcagcggaagcgtggtgggcccataacccacaggtccctggatc

SEQ ID NO: 72268 - DNA, 395 bp, Glycine max
  unsure (1)..(395): unsure at all n locations
cttcatcttattctccatgtatatcctccattntctttgtgggtggtgcgtgttagagtagattcaaaaaaaaaataaaccgattaaatcttagatctatacttgttcttgcatttctatggnntcaaatntgtagatctactcttgaatcatgtttttgngttgaatttagttctatcatttttcattcataaattatctgtgctgaaccttagatctaanatttcttcccaaatatttgatagaaaaaaaacacaaatctaagtgtaaatcacttaatccatgttgtcttagagtcatgtntaatcatagtaatttgcacatttatgttctaagttgtgtgaaatttatattgtgattgattctagaacattngtcatgcttcttgcattctt

SEQ ID NO: 72269 - DNA, 203 bp, Glycine max
  unsure (1)..(203): unsure at all n locations
ctgcagctttactcaatattataaccccacgagacaaactttgtgggcagngttctatttctgaatggcttgcgccttnttccgcacatcctgcanaaataaaacaataatctttcanattggtagaatgaattataacaatttaatgtttgttgaaaaacaacttaaatggccaggtacatactcttcaagaatggtctttg

SEQ ID NO: 72270 - DNA, 400 bp, Glycine max
  unsure (1)..(400): unsure at all n locations
cctctgggtgatcaacacagtactgcatctgctctcttaacttangtctatagagcaacaaatatttcacaataattaatgtcattatagtaaattaacaatacagagttgcagcacatatacatacccaaactctctgttgaggctctgagcagccgctgatgctgcttttcctccagcatatttcttggtaaaatcctccttgattcgttcaaggaaagcaattggaatctgccgtccagcagactcaacggcaaccacacaataaagctgcaatattcagcacgcacttaattagttccaactaacagtaattattaattcagtcgatgaaacataaacaaaagtatcaccagcagaaagcagtcatgtcaaaaaacacagtcatgctactagcaat

SEQ ID NO: 72271 - DNA, 475 bp, Glycine max
  unsure (1)..(475): unsure at all n locations
agctnttaagctggcatgattctcaatttttaattggattatccaatgctcatctttagactatgagagtctntaagtttatgagtaaatggcaagaaactcttcaatggacttagtatagaccaagtcaatataatntatcctaaatgacctgngtactatgaccttttatatattgatacatgtgtgaatcacacaaaaggaatccataggtagagttttttctaactatgttaatccaaggaatctagtcatacctagcagatgttttctactcattnttttcatttaatacttaataattaataactccccttaaagtattataaaatacacaaccttatgatattcatcttttgaattaacacanagccacttnttgagtaagttgcaacaacacataaatgaattagcaaccaaaagcctggtggacataatgaattagcaaactatagtacctattatttttaacatg

SEQ ID NO: 72272 - DNA, 315 bp, Glycine max
  unsure (1)..(315): unsure at all n locations
agcttgatgatgtggtcttcaccgatgaaaggatcaaagtatgtctaanaagaagcaaatctgatcatcatgctttgatacatgcnncaaaaaactatggcaaatgaagagggtgagaatganggagaagcccatgctgtggctgccattcctatacagccatgtttcccaccaacccaacaatgtcattactcagccaataacaaaccttctccttacccaccgcctatgtatccacagaggtcattcctaaatcaaccacanagtctgtctaccgcactttctaatgacgaacaccacctttagcacaaacct

SEQ ID NO: 72273 - DNA, 377 bp, Glycine max
  unsure (1)..(377): unsure at all n locations
acctatcactntcttcattcttaacctcattgtctctcacagtctttagaattgggagccaatccaatccttgtgtccggactctcagccacttatgatagccgccgatgatcccattactgcttcccctaagctctctgtcctttcttcacgccgcatgccatgccttgcgaactccttggagtaccctcgcgttgtggtcactgaaaccccgcgcgatgaagggcgtgatgccttcgtctgattgcacttctcttatggggtagcccatgctgtcttatggcgaggacgggtatataattaatacaaccccttgttcctatcaagggaacattggacatcctcgcatgaaatagaatctgatcttccttctttag

SEQ ID NO: 72274 - DNA, 518 bp, Glycine max
  unsure (1)..(518): unsure at all n locations
ctgagtcacctgcggcatgaagcttattcggaagcagcatccaccttcaatgganaacttatcatctatgtaagtatgtnctactcataaggctattgctaaggctatgcgttacattgtatctttaaatctatgaacgagtagtattagatctagagtttcatttttaattcatcttctctggttaaattttttacaagattatttattgccatatcattgtaaatagctagttngagtaatgccntttttttatggacaaatattaatacgtaattaagtaattaatatttgttagtaggaggaattcattccaattcaatccgccttctttttttcttttctttttcttaaccattcactaacttatatttcttagttgagaaatgcaacaagcgagtgtgagagagggactataaatcataatatctaatgtgntgatggagggaaaaaaagttttacaaagaaaaatgtaaagtatattttcctttttttactttctttacaaataaagaaaa

SEQ ID NO: 72275 - DNA, 284 bp, Glycine max
acgagctgcacttaccaatctgctacctaacctgacttgttttatgcatctacctggaacaaaagagaatgaaatttcatcaagaaaagaaagaaatcccataagaaagcaaaaagagaaagaaattcatcaagaaaaagagcaggaattccatcagagtggaaagaaaagaagaagatattccacgagatggaaagtaaaggaggaaaagttctgtaaaacaaaaagtcaaaagcttgacaacatttgacatcaaatgcccaatacaaaaagaagaacccact

SEQ ID NO: 72276 - DNA, 179 bp, Glycine max
aaaatggctcacaaacctattcctttgttatttatcatagacctcaatcttaatggagagggtaccactactggaaaacccgaatgcaaatttttattgatgcaatagatctaaatatctgggaagccatataaatagggccttatataccaaccacagtagaaagaagttcaatagat

SEQ ID NO: 72277 - DNA, 377 bp, Glycine max
actttgagttaacagaaataatatttcttttctcaatcgagaatgacaggaatctattggaccattgtttaagttcaaatacctacatcatactatcttggttttctttcatacttttgacatggacataattcgtgtactatgataccgataggataaagtatggcaccatctcaatttgatgtcccacacaagtatgtgacattaaagtaagtagtatgcagcactgataaaaaatatatattgattatgtacacatacaatatgatgctattctatctcaccagaatactaatatcttctgatcggaaaagataacaaaattagtgactgataactgattatcgtgtaatgaaagaacacttgcaaattattca

SEQ ID NO: 72278 - DNA, 448 bp, Glycine max
  unsure (1)..(448): unsure at all n locations
tgcgcatatttccttacaatcgttctcttgtacatgacattctanttatccgaaaaatgcacccatatacaatcaaggaagcttcgttacctataatatntacacgtacttccaaggtgtatntgntacttacatcccacacatctccttggctaaattcacatacatgcatactccaagcantttggggtaccaaaaattgcacatgtgcacatcttggtatttctaatacctatacatacacaaacttcatgatgaatcttgactatctacacaatanggtgccacatttcatgcctnntttttcaagtttttgctacctaaagccgcatgcaaattcaagcataatttccttggctgactaannatgtattcaaattagaagggatacattntttggtaatgtantttctttacataacatgcaacatatttatgtataatattt

SEQ ID NO: 72279 - DNA, 335 bp, Glycine max
  unsure (1)..(335): unsure at all n locations
gactcaagaatagttgagaaaatactggtgactatccctgaaagaattgagactactattacatccttggagaatactaaagatctgtcaaaacataccttggtagaacttgtaaatgctttaccagcccaggaacaaagaagaaaaatgaatgttgagggttctgtggaaggagcattacaagctaaattgcatactaaccaaggagagaanaacaagtggangaaatacaagatgatatatttcaacaccccagaagcagtagttaacattagcaacaataatggaaacaacagaggatntccttcttaccagcactgtggcataatgggtca

SEQ ID NO: 72280 - DNA, 350 bp, Glycine max
agtaaagattatgcatgttgctgcatgctaagtgagggttggtggcaagtgtgcacccacacaatcggtatatggtggaagggatgggtatgctctcttttgtttttagtggcaagtattaagcctctcaacttgtctcttatacaaaaaaaaactgtcgcagcgcaataacttacacgttataggtgactgctgattcatcagttcgcgtatcagtcaaaataataagccgttcatgcataaaaaaaatatttaagtggtatcactaatctgaaaatacacatatatatgtatgcatattaaacaatgaacggtaaaaacttacatatcccctctaaaagaaaaaacat

SEQ ID NO: 72281 - DNA, 349 bp, Glycine max
  unsure (1)..(349): unsure at all n locations
gaatcaagatcgagattcaagaatcatgatattacttaatcaagataagtctgagaaggttttttcaaaaactgagtagcacatggatttttctcacaacatgtntaccaaagagttgttactctctggtgatcgattaccaacatatggtaatcgattaccagtagcaaagatgttcttcagatactttgcaactgaatttacaacattccaattgatgtcaaaacagtgtaatcgactacaatgtgttggtaatcgaatacccagagtcttggaacgttgaaattcaaattcacatgtgaagagccacatcctgttacataaaagctttgtgtaatcgactacactg

SEQ ID NO: 72282 - DNA, 198 bp, Glycine max
  unsure (1)..(198): unsure at all n locations
aatacaagttgagggtgtaaagtctccatggagtcaagtctatctttgttgccaatgactaatccactggtgatgatgatgtntgatggctgaatcatgatgttgatgattgcttgactaatgatgatgatgagggttggcgattgaattcttatgcgattgtctctgaatcaatgttattatgagatgttctatttt

SEQ ID NO: 72283 - DNA, 422 bp, Glycine max
  unsure (1)..(422): unsure at all n locations
agcttctaaactntgtacaagaatgaagctctgataccacttgntagacaagtggcctcagatatcttaagaaggggggttgaattaagatattccaaacttttctcctaattaaaaatctatcttactttntacttaaggtatgaattcccttaatgacaatcttcttaaatattaattcanatgaagcaacttgaattatgaatattaagcaataataaataaaggagaataagggaagagaaaatgcaaactcagttttatactggttcggncacaccctttgtgcctacgttcaggcccccaagcaacccgcttgagagttccactaacttgtaaattccttttacaagttctaaacacacaaggacaacctcttctttggtttagagatctntacaacaagaactcacagtctctta

SEQ ID NO: 72284 - DNA, 463 bp, Glycine max
  unsure (1)..(463): unsure at all n locations
gcttctggtgggacatctngactngctgtccaatctgacttataccacagattctgccttcttctattttcagattgggaatgcctctaacagcactttcgtcaaggatgttcttcatgcctcttaagtgcagatgtccaaacctttgatgccatattctgacttcatcttctntggaggatagacatgtggaggagcagctggtttcttggtgtgtccatangtaacaatcgtcctttgatctgctgcccttcattataactgcactcttctcattttgcaccaaccattctgactttgtgaagtttacattgagatcttcattacacatgtgactgatgctgatcaagtttgcagacagtcccttcaccagcagtactttggtcagactaggaagtncatcatgagctaagctttcatttcaatgacctttctttatagcctctccaatgtccataactag

SEQ ID NO: 72285 - DNA, 308 bp, Glycine max
aagcacgagctgcacttcccttcttttaaataaagtttttctatatttaatgcctacaaaaaaatgtattggtctgggttagagacttgatctgcaaaaaggaatttcatacatgatcattaggcgctggaaaactcatctcgcagctagacatgatgctgcattatgctgagtaacagcgctgcatttgtgtgtcaatagggaaacagaaaataagatattagagtcgattagagagcggctactattaaatggataagttttcacggtcaattaaaataacacttttctgatgggaggttcaccct

SEQ ID NO: 72286 - DNA, 398 bp, Glycine max
  unsure (1)..(398): unsure at all n locations
attttcttcttcttccaatttttactcaagtgttcttgagcccttcttccatcacttcattntcttgctctattctcacttgtagtttcaatatcttatttngcactcttgaaggtaggaaacttgaatctaaactccctcattcttccatctaaattttgtggagcctacaagagggtaaggggggcctctccaactctagaaccatgtgctttgtgttgaacttccttgaacatgttgcttttgaaatnttgagcttgcgatccattgtttggatctgtgtactgagttnnttttctttgattttatgccagaatgagttcctgcatttagttcgttcttcgtggtcttcggtcttcaaccgaaattcctgaatcaaactttcattcattctatgt

SEQ ID NO: 72287 - DNA, 382 bp, Glycine max
  unsure (1)..(382): unsure at all n locations
caatagccttggcttaattcttggtcatgcttcctaattcacatgcatatgtggaaatgaattatgcaattttgttcttataagcttctagccaaatggacttaccttgaattaattcctttgatagcccctttgagcctatgttcccctttctttgttttgaagctcattacaagccttaagttgaaaaccatgatatcaccttaccccttanggaattttggagcttntggaattgttttgggaataagctgggaataagtgtggngnggtatgtttcattggaagatatgaattttggccatgcttaatggtttatttcggcatgcttgatgtatttgatattgctagttctgcttaatctcaattcgttctcacaaaa

SEQ ID NO: 72288 - DNA, 408 bp, Glycine max
agcttgccacccagctcgtccaagcgagctcagctcgcccaggcgagctatggtgcttcctccagaaggcaccgccttctggaggaacttcctggaacgcccaagtgggcctggtttctatttgcaccccctggttactaaatacacccctgccctttttagcagatctttttcgtacattacggaacttacgaattcataacgatacttgttttccttccgtaatggtacggaaccttacgggatacgcaatcattccttttcttgactttggaatggtaccaaacctcacgaattgtgtacaatggcttctttaatttccgcatgtacgaaactcacggatcggccacaatgctatctttgactttgcatgtatgaacttacgatcggcacaatggtgcaagtact

SEQ ID NO: 72289 - DNA, 480 bp, Glycine max
  unsure (1)..(480): unsure at all n locations
agctntgcatgcacatacataatccttganatggattaccatgtttcttggatcattatngtctggngcagccatgattaaatgtaaaaaattatattcgacaatattattgctaaaacttcctgtccaaaccaatatttggtttatttgtgataagtggtgagatacatagaaagcatatgattacatttatagagggagatgtagaagacataattatgtacctagattgttatacacaactaattaatataccttttctagtaagcatgtagaanggtggggtttatatttatacattatggactaatgagaataatgttgatgctaatttagtgatattgagccatatnttctttctcactacttgaatatttngcacggtattgtagtgctgtgtacaaaanggaggattgtggtatgtgtacccgactatgtcatctgcttnncactatannatngaaagtcacctactacatg

SEQ ID NO: 72290 - DNA, 420 bp, Glycine max
  unsure (1)..(420): unsure at all n locations
gaagctagagcttagctacacacacccatttaaaagctaagctcacctcattgagaagacttcttgagaagctagagcttaactacacacacccatcttanaacttagctcaccttcttgacaatatacatgacaatacaatatatagagccctactacatagactactcaaaatgcccttgaatacacggctaaaccctatctaatagaatggtcaaaatacaatgtccaaaagatggaaaacctactctaatattacaaagagagtggatcaacttgaccatggctcaaaattacctaagttgatgaaacccttggccttttagtgctcagccagcctttgatctctatcatacctgggggaggatgatcaccattttacacaattgtgatgtgattcctttatgctcacacaggaat

SEQ ID NO: 72291 - DNA, 363 bp, Glycine max
  unsure (1)..(363): unsure at all n locations
agactaaccctataaggctaaganaggaaacacttgatgatattatagattcattagaagacatgcgcattgatgagaaagagcacacaggcaaaggatatggaaattatgaagactttcatagtgatgaanataaaacanatattgatcttccaagaaagtggagaacttcgcgatatcatcatcttgataatatcatcagtgacatcttcagaggaggtacaacttgacactctctaaagatgcatgcaataatatggnntttggttcttaattgaacctcaaaatttatatgacaccataatttatgaacattggatattgctatgcaagaagagtatatcaatttgaaagaaataagtc

SEQ ID NO: 72292 - DNA, 416 bp, Glycine max
gcaagctaatcttcagtgggtacatacttttaatccactgtccctttataaagtgatgtttgatttctatatgtctagcccttgaatgaaatgtgggatttctagatagactaataacaactctgttaccacagtagaatgggatgttactctcatagacattgtagtcatccaattgatttttttatccaaagtacaacaacttggtgcaaggtattctctgcttcaacaatggataaagcaattgtttcttgcaatccaagtgccaaataccacccacaatgatataggttttttctcatcttgcaccaaaataatagcccccatagctatcacctaaatattttcttttaagacataccattatagtctatgagttctaaattcttaccgattagtgactcccttgattttaa

SEQ ID NO: 72293 - DNA, 204 bp, Glycine max
  unsure (1)..(204): unsure at all n locations
tcactcagatcttgactagntataactntntgaataaaatgagtntgtcccatggttttactccaaaagtcagtgcgaatcaaatcattctctgcatttatttctagcatgcattcatatcatgcatcgcataagcatctcttcatggcatcataatgaacatatcgtgcctgcatttgtcccgtatcatattccaacatcaca

SEQ ID NO: 72294 - DNA, 57 bp, Glycine max
acacagtggtacctggagatatgtagcggtgtgtaggagaccttacggacgtcaggt

SEQ ID NO: 72295 - DNA, 472 bp, Glycine max
  unsure (1)..(472): unsure at all n locations
ttctacaatctcccttttttgatgatgacaacttctgaaatcaagatacacacacacacacactttntctagtcaatcactcacataaagttccattctccccctttggtnttgaatntatgcttatcttaaaaataagttgactacgcatgtgagttcttgattaatccctatttctctctccctttggtatcaacaaaaagccaaagtgcttaacaaagttgaagcatacaaatacaactaaacatccatacaacattcatggaaaaatattaacccatttcttgagggcatgaactatgaaggcacaatcataaatagtataattataaaatccacatagtcaaatagcatacttaatatttgttcacacatacaatgcanataaggaaataacanatggttcanatatcataataatatagattatgtggataagtcactgacatctattagctctaattctcttcta

SEQ ID NO: 72296 - DNA, 215 bp, Glycine max
  unsure (1)..(215): unsure at all n locations
actaatcttggtcccttcatgtagtcttagggcatacatccccnccccccccncaactaattacaaacttctccaaccagaacctgtgcttcctccaacattaggtccagccctacctcactcccgtctgaggatatttcttcaaaggactctacatagctccctantgtacaattgcatctaagatagttgtaacacaactcttctacaatcat

SEQ ID NO: 72297 - DNA, 432 bp, Glycine max
  unsure (1)..(432): unsure at all n locations
tcttgaaattcatgacaacactctgatttctgaagnntttgggataaaaatggtcattgaccagtccctttttcatgacttaaccaaattacccagtgacggtgtaccatntgaaggtacactgaatgacgactggannattgatttctcttgccatgatagcccgccagttggttgcaccaacaatgcggatatgaccggacgtcttcttgtcgggtcattggcttttgaaagccgcatccttcactatntaaattgtgcgtatctgctttccacggttttccaaccttgcccaggtttctgaggaagatctaattatcatgtgggcctttcatacagggcatcaacttgattgggcacacttagtcagatatcgcatgcataanggcattgcgataaatgcttcactaccatatccacagcttggtactc

SEQ ID NO: 72298 - DNA, 268 bp, Glycine max
  unsure (1)..(268): unsure at all n locations
agcttcttgcgtagccgctcttggtgctcagaatatccatttacaatccctcttattactagctattntgaattctttagttcctgaatgtacaaccttcanattgtgctcgttcccctctttgttttcttgcaaaaagaaaatcaatatcanagaaaacatggatgaagtcttaagatgccatgacatgtgtatttctgaagatatagtatttatattccatcaagcatacattgactggtgatacatgtatagacttttatacatg

SEQ ID NO: 72299 - DNA, 379 bp, Glycine max
  unsure (1)..(379): unsure at all n locations
gcttcataagtgaaatcaggtgcagccatctttctaatagtcctctcacgagggggaggttgagccatgttctcaatataaaaattagtaatggaatgcttaaaatcagaatattcagaatcaccctcagtagaatgctcagaatgctcaaaatgtacagaatgactaggatgcacactatgcctaacanatctatgaaaggttctatctatttcaggatcaaaagggttgaaatcacctggattgccccttgtcatgcactatatgcagcanatattgtgtntntcaccaaacacctaccaagggggtaaaactactactatacttaaacgatatcaaaataagctgaatatttgttaggaacaccctataatcatga

SEQ ID NO: 72300 - DNA, 417 bp, Glycine max
  unsure (1)..(417): unsure at all n locations
acgcaccatcatctaatccttgatagatgaggaagagagctntcttgtctctctntcttgaatccttaaaagtctatttntgtgcttggggtagtgaagtcactactagaaaataagggtttaaccatggttatntaggactntcaagatcggttattaacaaatgttgaaagtcccgacgttgaaagtattaacgttaaccatcagttttgaaaactgatgttaacgtaaaataaccaccatcagttatttaaataaccaatgttatataataagaaatacaaaaaaaaggtatatatgttcatacccaacgtgacagttaacatcgtatttttcatcaaaaccgatgtaacttccanacgttaacacgttaacatctggtntttaaaaaactgatgtatagtacaaacgtaacat

SEQ ID NO: 72301 - DNA, 488 bp, Glycine max
  unsure (1)..(488): unsure at all n locations
agctnggttcgaggtaccttacccgtgaatatcttataattatgaataacgaatgaagaacgtcgaagaacgatcgaaaccttcgcgaaattccttacggagacgtttcggaagtgcctcagcttatattttcttcacggaaacaattnttccaagcaaattcgaaagagagagaagtgcctaaggggctgaaccctnttccacttcacttcctccccctattatagcaaaataggggagatgcttgccacccaactcgcccaggcgagcagggtttgcttcctcaaacgcaacagccttctggaggaantctctggaggcccaagtgggcctgttgctatttgacccccattttactaatacaccccctgcctttttttgtagatcttttttccaaagtacggaacttacaattcgaacatactttttctttcgaatgtacgaacctgggatactaacatccttttgctacgatgtacgacctccta

SEQ ID NO: 72302 - DNA, 368 bp, Glycine max
  unsure (1)..(368): unsure at all n locations
atgtccgattttgtcttgtttatatcgagaagctcgaaatggaataccgaagctctgagcaaattcaaacgacaataaacttttactcggatgtcttatcgagtcccataaattatcggaacgctcgaaatagaataccgaagctttgagcaaattcaaacgacaataacctctttactcggaagtcggatcgagtccccggatatatccagacagctcgatattgaatgttgaggctttgagcaaattcaaacgacgatatacctttatacctaagatgtccgaatagagtcccgtaatatattgagacgctcgatatggatacctaatctctagcaattcaaacgaantaacattttattggatgt

SEQ ID NO: 72303 - DNA, 357 bp, Glycine max
  unsure (1)..(357): unsure at all n locations
tggaggaatcttctggtgggcccaagtgggcctggttgctatttgcacccncctgtttactaaatgcaccccccatttctatttttttgtaattctttttccgtaacgttacgaaactttacgaatttcgtaacgatacttatttttcttccgcaaggttacgaatccttancggatatgtatgtactctttnttagctttcgaagaagttacgganactcacggattgcgcaaaaacacctcttttcgatttccgccacattacggaatttcacgaatcacgcangcctgcttcctttcgatttctgagacgtctcaggacttcatttattgcatgtcatcaagtaataatccccg

SEQ ID NO: 72304 - DNA, 505 bp, Glycine max
  unsure (1)..(505): unsure at all n locations
agctggcanagaanataagaagaatganaagaaggctatattatcatngaataaatattaacttacatggattagatattataatttatacagttagttacaagtgtaactaactaactaactntaaccaactaagctaactctaactctaggtacatgataacttatgctaatacttccagcaatcctttgtgaatggataagagaaatttgaataattaagaacctaatactatgaaagatagacatatgaataaaanaaggcaaggaaatcaaattacccttccatgtgcattgtaaccaagggcactgctaagaatttcagcgatgtgtctttcttgagaaaattatgcatgctccttttcttgcctattntctcttgcctcgtctntattaactccaaccgttattttttggttcacaatttaatttcatcattattattatttgaagaaagaagaaaataaaatatgaaagagggataacagagaatgattgtaccact

SEQ ID NO: 72305 - DNA, 441 bp, Glycine max
  unsure (1)..(441): unsure at all n locations
agctaactgaatagacctttcaataacaaactccctgnaaccatttctggagacatatccactcgtatnaccattgcaacatctgttattctagcttcaaatgaagtttatggggagattcctgtgagtcttgcaaactataaatttcttaatacccttaaactcgatcagaatcgactcactggtcaaattcctccataatttggtgttctctcacgaatcaagacattttatgtatccgacaatcttttgatgaggccagttccaatctttagcgctggagtttcagaaaattatgcaaataaccaaggcctatgtggaggaaaatcattcgcgcctttgcaggcgaagtcttccaagagtaacttggttgttattgctggagctgcagttggcggggtgactcttgcgacattangaatgtgtattggattgttcttc

SEQ ID NO: 72306 - DNA, 479 bp, Glycine max
  unsure (1)..(479): unsure at all n locations
gcggatntggtcttcgccagtgaaaggatcgaagtggatctgaaaagtatcaatattaatcatccttgctggacgaatgagaaaactggngaaaataaagagggtgacgatgagggagaaacccatgctgtgactgccattcctgtattgccaagtttcccaccaacccaacaatgtcattactcaaccctttctcttacctaccggccattaatccacanaggccatccctaaatcaaccacaaagtctgtctaccgcacttncaatgacaaacaccacctttagtggtaaccanaacaccaaccaaagaaatgaatttgcatcgagaaagccttagaattcaccccaattccagtgtcctatgctgacttgctcccatatctactngataattcaatggtagccataaccctagccaaggttcatcaacctccatttctncgagaatacgactcgaacgcaacgtgtgcttgtcacg

SEQ ID NO: 72307 - DNA, 511 bp, Glycine max
  unsure (1)..(511): unsure at all n locations
gctaacanactctgattntgtagtattccttttgcacgaaaagataagtattatgctactaangaatagtatatataactatgtaaataagcaagcaagaggaatgaaaaattacctttatttgatttctcttctcttatccatggaggccctggtcctcgaaactagtttctaagttggagactcgtatcagtctatcatgcattcatcatgaacttcttgattgatgcaacaattatctaaactagtgaagcaacatcaccgcaccaaccaagatcacatgcacgcaatcaccatgccgtccataacccgcatgctcccattcctctctacatgcaacacaagctcatcttcactctcaacaacccgccttggttcttcttgtgctgaatcatataaatcactcatctctaaattataattgtgtctgtttaaaagttttgtagcctcttgaatgacanacccgcacaagatataacacacaattntntgatacacanatatctcactg

SEQ ID NO: 72308 - DNA, 525 bp, Glycine max
  unsure (1)..(525): unsure at all n locations
tcagagtcacctgcggcatgcaagcttgangaatatggngtacccatcacatgtggttctatgtggcgatcgggcgatggtgcacaacaagttttccacatccacaaatcgcgcataaacccaccatcccctgatgcccacctccaactgagctcacgtactcccacgtagcccatatcctcgttcctctcaacatcaggtccccatcaatcctcccaagcttccccaacatccatgtaaatcaacattcaaacagcacatactatcacagccaagaaaacagggcaaaggcagaaaactctgccaaaacaccaaccaaaatcacaacttttctcacttaaagaccccagtaacgattcctttgttccagttcgttaaccggtggatcgactcgaanattntactggaagtctctagtacataagcctacanattttaccgtgggatctactagcanacatccagaactcattttgaactactctntccacaaccagcaaaacatagcacttntgtgcacttatg

SEQ ID NO: 72309 - DNA, 172 bp, Glycine max
atgctgggtgcacagtacagctccctactctatattgtgcttagcacgaaattttttatctcatctacataaatatcactagttgtacacgcaaatcgtctatatgactttgattggaagggaccctaccttcaattttttacctctgaagatgacacaattctgaatatat

SEQ ID NO: 72310 - DNA, 332 bp, Glycine max
taaatgatattaataattttggaaatgaaaaagcatatagatgaataattaagtcttaaaaaaagatatttacataaattagcaaaaaaaatgatgattggttttttacgatattagcagtgatgaaatttgcgtatatttagcatcatctagacgtttccaaattccaagtatggggagtatctgacaacgtgagtaaagaggatgtaagattagagtacagcatgagtgtgacactacaaacaaagagacacgtgtcctgttatgtggcaaacgggtgtgaggtgtctgtgtgttctcctgtcacgtgttgccgccgatatacatgcatg

SEQ ID NO: 72311 - DNA, 388 bp, Glycine max
  unsure (1)..(388): unsure at all n locations
ctaagcttaagaggaccannnatgaaattctgctgcagcaattgccaaccattcaacccgtctggccaggatcaatgaggctaatactacgtggaaagaaaagactcccttcatcacacaattatttcataaagcaataaacactatcactcaactacatccctttcttgataaaattatggaggcacagctactgcctgaatggaagccgctgaccatcgatcgctacgatggactctattacccaaatgagcacatggacacaattcgcacatacatatgtctggttatgaatgacgacacaattatatgttgagtgttcccaacaagattgaaaggcgcagcacttcactggtatactatcttgtcgagaaactctatttgacta

SEQ ID NO: 72312 - DNA, 425 bp, Glycine max
  unsure (1)..(425): unsure at all n locations
agcttcttcttggttctctctccanaacgaacatttttcttgagcacttcattgagaggtgctgccaatgtactaaaatccttcacaaatcgtctataaaaacttgctaagccatgaaaactcctcaccttggtcacagactntagtgtaggccattcttgaatagccctaaccttctcctcatcaacttgcactccttntgaacttactacaaatccaagaaacacaacatggttagtacaaaagatngcattttcaagaatgacatacaattgttcttctctaagcacacacaagacagattttaaatgatcaatatgtaaatcaagtgaagtgctatagataagaatatcatcaaagtanaccacaaaaaactttcctatgaactctctcaagatatggttcattaatctcatgaaagtgct

SEQ ID NO: 72313 - DNA, 461 bp, Glycine max
  unsure (1)..(461): unsure at all n locations
gacactataatactcaagcttagctattagagaggtatgtgtagctaagctctagcttctttatgtatcttctcaaggaagcttctcaaggaggtgagcttagttattataggggtgtgtgtagctaagctctatcttctcaaggaagttatctcaaagaagcttctcaaggaagttctctcaagaaagcttctcacggaagctacctattctataaatagaagcatgtgtaacacttgttgtaactttgatgaatgagagtcttgtgagacacaactcanagttcaacttctctccctttatcttccttcaatttcgtgctcccgctctctctttctatacctctttcttttcctccattgaagcatcctctccaagcttcttatccaaggctcatcttggtggtgaagctccttcttacatggcttattccctagtggatggcgcctgctctcacctct

SEQ ID NO: 72314 - DNA, 454 bp, Glycine max
  unsure (1)..(454): unsure at all n locations
agcttcngtcttcaatttctatcgtctcgacatatttctatactcaatcagacatctgagtaaaacgntattgtcgttagaatcttctcagagaatcgggataccatttcgagcgtctcgatatattacgggactcaatcagacatccgagtaaaaaagtgattgtcgtttgaatttgttcagagcttccggattcaatttcgaccgactcgatatattacgggactgtatcagacatccgagaaataagtattgcagttgaatttgctcaaagcttcggattccattctagcgtctcgatatattaccggactcaatcaacattctagaaanagttattgcattcgnnnngctcaagcttcgcattcaaatcgagcgatcgaatatacgggatgaatcgacatcgagtaaagtattgtcgtgaattggcagactcggcatcattcgacgttca

SEQ ID NO: 72315 - DNA, 460 bp, Glycine max
  unsure (1)..(460): unsure at all n locations
acactataatactcaagctctgagcaacttcaaacaacaataactntntactcggatgtctgatttatacccgtaatatatccagacgctcgaaattgaataccgaagctcataacaaattcaaacaacaataactttntactcggaagtcagattgagtcccgtaatatattatcgagttgctcaaaatggaataccgaagttctgtgcaaattcaaaccacaataactttctacttggatgtctgattcagtcccgtaatacatcgagacgctcgaaattgaataccgaagctctgagaaaaattcaaacgacaataacttttagctcggctatacgattgagtcttgtataatatcggaacgctcgatattgaatgttgaagctctgagcaaattcaaacgacaataacgtntttactcgggtgtctgatggagtcctgtaatatatcgagacgctc

SEQ ID NO: 72316 - DNA, 200 bp, Glycine max
  unsure (1)..(200): unsure at all n locations
ggagatcaactttattnttttttacttttttttatcagaaattataagaccctaaacaaaagagaaaagtcattcgagaaacaatttcgaagcattggacgtgggttcatactaaccacacataaattaatggtgggtccttttattgaagttgcagttttttaaaactttctttngatgccaaacaattatattcatct

SEQ ID NO: 72317 - DNA, 299 bp, Glycine max
  unsure (1)..(299): unsure at all n locations
tctcaagcangcttccatcgagagtgctaagaataaagtgactnttttaattattatcttcctttgagaacatgaattatgtttgttatatttgtttatttagggaaaaaaagaanaaaaaattaaataaaaaggagaaantttaggtttttttttagttntataggtcgacaagggatttgtccttgttcttatgtattcctaggtgcaatgaaaaaatcaaacttacgtagttctttgtagaaaaagagttgtgtgtnggggtgatttaatttatttatttaattttaaaatatttg

SEQ ID NO: 72318 - DNA, 482 bp, Glycine max
  unsure (1)..(482): unsure at all n locations
agcttcaggaaatacatatttcactgcattcatcaatgctaaattntctactgcattcatcaattctaaaaaaaagccctttgagcttctaaagtgcccaaacaaagttatccttttgttcaacctccatatacacaaaaaggtgtagaaaatttcatttcaatatgagtcacaccaacaacctcaagtaatgatagtatatatctattagttttctaggtattggccatcaagaacactatgttaaatggattaatcattttcatagcatcaagatgtgtccaaaaaatatctcacacaactnttgatgtatcattcattatatgtcaatgaatatacatatctcgttcaagtaagttcatcaaatgctgcatttccgttctaaagcctctnttagacgaacgatacacaatccttgcattatatacttggtttatggtagtcacatttctttcattgtgctctttgaatgtcaacaagat

SEQ ID NO: 72319 - DNA, 478 bp, Glycine max
  unsure (1)..(478): unsure at all n locations
gactatgaaactaagcttagcctccctttatacggtaaacccagtangcctgaataaggatatgatcaagatgcgaacatttatttttttcacatcctanaatatctaaatgaacatttagcaaaaaaaaaaaaaatgatgctaaaccacaaaaattgaggctaaatgaacatttagtaaaaaaaaatggtgcttgagcaaacactaaatagtgtcaactaagttgacttataatatacactattatgagtctatttgttttgtggtatttactagacgacatttattagtgtcaaattagattatgttaattttagtgttgacttaattgttgctactagtgtaggttagaccatgcaagcacaaatctaaaccttgaagcatccccatttttgtgttggcatagctgacacaaataaatttatatgcaatctatagcgattatttgacctgaattaagtcaatgctatgttacaat

SEQ ID NO: 72320 - DNA, 322 bp, Glycine max
  unsure (1)..(322): unsure at all n locations
tcttggtggtgaagctccttcttccatggcttattccctagtggatggcgcctcccttctcctcttctcctttgccttccgctgcatctccatggtgaaaaatcaccattgaaggacctcattgaagctcaaagatccagcctccatagaagctccacaagcaagcttccatcaagtggtaatcaaacaccagaaccttcaataggtgctccctaaacctncactaattntttttctttaccttctcttccatnggtgnttcttcattattctccatgtatctcctcacatgtcttgttctaaatgtntgtaacatgattct

SEQ ID NO: 72321 - DNA, 235 bp, Glycine max
aggggggacaagaagccccaaaaaaaacggaaccccccgaggggccagaaaggcccaaaaaaaacgccggagggagggaaccggccagcaaaagggaagaaaaaaaaacccaagggggccgccggaaacaaattccggggaaaaacaagaaagacagagcccccccaaggggggaaaaagcacgcaaaaaacgggacccaaaaaaaaaaaacccccccggcaggagaaaaaaaaa

SEQ ID NO: 72322 - DNA, 196 bp, Glycine max
ataccaaagctggctcctccaccttttctaatttcccataagagatcttcccccacggcttccctatcaatgatttggacatatgcgtcaactattcttgcatctaggacattgtcaactccaaggccatactttctcatcatggatccatatgcaccttccgtgatgtgccctccaacacctaaaactgtgcaaa

SEQ ID NO: 72323 - DNA, 474 bp, Glycine max
  unsure (1)..(474): unsure at all n locations
gtttattttgagtgtgggatgtggtagaatatcatcctcaccactcaatattcaagtgaaaagaccaagagaaaagaanaaggaggcaaaagaacatttgagcctcttaaattcttcaaataattagacatattgttagtgttgaaggaaaagttgagaattatgtcagcatcaacataggttgaatgcctnctgatactgcatcaaggatacttgacaacagacttagaaccataccacttaagcttcaactgtttccataacatgagttaataatcaagaaggtaaattaagttgagtggtgaaatgatgaaatagatagatacctctactctatcaaacatgtcatcaagtatcanagggtctccactgtaatatgcatcacgtgcctattttaatangcaaattaagagcagctaaagaaataatgaatggtatgggaaacattccaatgatactaccaataaaaaatat

SEQ ID NO: 72324 - DNA, 465 bp, Glycine max
  unsure (1)..(465): unsure at all n locations
gctagtaaattaaattcttagacatgagtgtacactnggtttatatatcactatgcanatatggatagtgtacattcacactatgtagatntactctgtgcatggatgattatgtntactcttgatctgaatattagcaccattgtctaggacaattagctaaagatttacttcttttggtaaaacaaagttatcatttatgtctaatcccactttagcctgctattgttaaaatctacaaagtgaaaccacccaatatgggccaagagttgcacaaccagcccttacactctcttcccattcttcatccttttttttctctcaatcaaagttgcttttgtgacatggagagacttaagaaccaatgggaacttgggacctttgaaccttggggttgtcctagatttgtntaacaccccanatccaacccatatgtgcctaaactactatcattttcatttctac

SEQ ID NO: 72325 - DNA, 504 bp, Glycine max
  unsure (1)..(504): unsure at all n locations
gcttgcttacactnggacgagtgattaatgtgctagttgagtactcangtcatgttccatataggtatgaataactgtaacatttccattcaattctcaatttcatttttcttaattattttcctgggtgattttatcattaagatatatcttattattatattagggatagcaaattaaccagaatgttgagattatgtgagttatcctagttttaaattcattggtatatatttggcaaaaaatttgctttagttatttagagtataatcataccccttaagcatgagttctacttttatatagaagaacatttattggaaaaaatcaattccttaaaaagaatttaatattntaagagattaatctatcacttttgagtgtggatagtctgagttcacaaaaaatatttagttgttaattaaaacagtaaaaaaaatgtagcttatgttanaaagatatataatgttaagaattatggatatcagcatatggtatgagttc

SEQ ID NO: 72326 - DNA, 446 bp, Glycine max
  unsure (1)..(446): unsure at all n locations
actggttatctttaccagagattaaaaactctggtgacttagaaaattnntgagaaaactcttttgaaaaacaaaattgtgctatgtttgtttttttgaaaaatcttttcaatacttcccttgtgaagttttcttgatttcttctcttgaatcttgaattcatcttctcttgaatctttgaatcaaacttctctttgatcttgaatcttcttgatttcttctcatgaatnttgaaattaatcttgatcttgaacttgttgactgaatcttgaaatcattctcttgggccttttttcatcatctntgtcatcatcaaaactacttgaatcaacttgattcatcatcatgaagcttgcttctacacattgatcntccagtacatgacataanagcggtgaaattaattcctcaatagtcaagtatgcactcanagaacaactagaaat

SEQ ID NO: 72327 - DNA, 497 bp, Glycine max
  unsure (1)..(497): unsure at all n locations
gcttcaacattcaaattcgagcgtctcgttatattatatgactcagtcagacattcgagataaaagttattgacgtttgaatntgctcagagcttcaacattcaatttcgagcgtgtcgctatattacgggactatatcagacatccgagtaaaaagttattgtcgtttgaatttgctcagagcttcaacattcaatttcgagcgtgtcgatatattacgggactcaatcagacatccgagtaaaatgttattgtcgtttgaatttgctcagagcttcaacattcaagttcgagcgtctcgttatattatacgactcaattagacatccgagtaaaaagttattgtcatttgaatatgctctgagcttcaacattcaatntcgagcgtgtcgatatattacgggactcaatcagacatccgagtaaaaagttattggtcgttgaatttgctcaaagcttcaacattcaacttcgagcgtctcgttatattataggac

SEQ ID NO: 72328 - DNA, 446 bp, Glycine max
  unsure (1)..(446): unsure at all n locations
acgacaatanntttttacctcgatgtctgattgagtctcgtaatatatcgagacgctcgannatgaatgttgaacctctgagccaattcaaacgacaataactttttactcggatgtctgattgagtcccgcaatatatcgagatgctcggaattgaatgttgaaggcttgagacaattcanacgacaataactntntactcggatgtctgnatgagtcccgtaatatatcgagacgctcaaaattgaatgttgaaggtctgagccaattcaaacgacaataactttttactcggatgtcctattcagtgacgtattatattgggacgctcgaaattgaatgttgagcctctgagcaaattcaaacgacaataactttttactcggatgtctagatgattcccgaaatatatcgagacactcgaaattgaatgttgaacctctgag

SEQ ID NO: 72329 - DNA, 85 bp, Glycine max
gacactataatactcaagctctaagctatatgcactcgattggcatcattctaagcttctttatgcatctatagtgggggaaatg

SEQ ID NO: 72330 - DNA, 201 bp, Glycine max
  unsure (1)..(201): unsure at all n locations
aactaagcttccaagcttttaagttcttcctcagaactatcctaagcatagttttcaaagtcctattaacaacttccgtttgcccatcggtttgtgggtgacaagtggttgaaaataacaatctagtgcccaacttgctccacanagtccttccaaaatggcttatggacttataagccctttccattaccatggctcctt

SEQ ID NO: 72331 - DNA, 485 bp, Glycine max
  unsure (1)..(485): unsure at all n locations
agctngngcgggttccattacaaaatctaaacttattatcaaaattagtcattccttgatctacatgggctntattgggcttgtaatatggtcaggggtaagagggctatgaaagaaaggatcaaatagactcaaagagtgtttgaaggttatattgagtaagaacctttagagtcttgcatgtacgtttgttcctttcaactcttgggttgagctctactcctttngtctttatacattaatatttattgcacttttgtgccttccttgtaaaatcgggagatcttttgtctctctttntcttcacttgcctgtggcggattntatttntcctttttatgttgcccaacttcatgcaattgttgtttgcattgctattcccgccgtctacanaagttctctcanaggcaagtaaagaagtcctcatataatctattacttatttcattccatcttatngcatgagtngtnttagctcctaacta

SEQ ID NO: 72332 - DNA, 473 bp, Glycine max
  unsure (1)..(473): unsure at all n locations
atcctgattgaactctatgtgtccttcttcattataaggtgaagaccaaaagggctccataaaagccattgaccaaacaacataattcaacaaaacgtgatctgtcttattgggagttgttggatcaagtggcctcggaataattcaaaagaggggttgaattaattattagtgaacctttactaattaaaaaaacttatccttcttaatgttactagattcaattaggcttttactacaaagttaagaaagtaaagaacagacatagaaacttaaccaaaagtaaaagcgataattaaagtgcacaacggaaattaaagagtgtatggaagaagaagacaaacacaagaattntatactggttcgtgaacaacctgtgcctacatccagtccccaagcgacctgcggtccttgagatttcttttcaaccttcgtaaatcttttacaagcaaagatccataanggatgtaccc

SEQ ID NO: 72333 - DNA, 400 bp, Glycine max
ggagacactacacgttgaatcgacatggtattggacttctatatatagagctagtagttaagtgagacatagcattatgtaatcccactcggttcggttgatgagaggactatttttcttctctctctggctctctgaggactctttgcggttcgactctatgttctccaaacacaacaacaacacctgaggcagaggctgagagaaacacagagagagaggagtaacaagtaagtgcctgcttggcctctacacttccttcattattcttattctctttctttgggtatacttgtgtcagacctctttggatcacgagctttggtcttcttgggtgctttcatgtgtcattctatgctgcacagatatggatgctgctgcatgctggttctctgccact

SEQ ID NO: 72334 - DNA, 478 bp, Glycine max
  unsure (1)..(478): unsure at all n locations
agctngaggcgagagttatacaatatgcacttttggtcaatatggaactccttcctaagaatcctagagtcatgaaatctcttaactttctccttgtaactcttggagttctcataggcttctaagtagatctcctcaagttcttgcaattgaagcttccttttcatactcgcttcatcaaatgccatgttacaacccttcaccacccaataagcatggtgctcaatctccaccaaaaggtggcatgccttaccaaanaccaccctatatggagacatccccaaacgtgttcggtaagcgggtctatgggcccatagaccatcctaaagtagctggctcaaatccttcatgttgggttgcactacattctgcaacacttgcttaatctctctattaaaaaccttcgctatgggtttaccatcaagcttcttcaacaagtacctcaaagctgcatggtcagtaaagacaantatacgag

SEQ ID NO: 72335 - DNA, 480 bp, Glycine max
  unsure (1)..(480): unsure at all n locations
gatattcaaccttcatgtgcaagttgtagtctaatacatattggatcaaggacaaaattgagcctgaagtgagatgctcagaatggatgtctcaactatgatttcaagtgcttagattccatatccatttgtaagacaattaagagttggacttgtaattntgtgaaaaacccgtcaaaggttcatactcaagggttaaagcccatctacaaaaaaatttgggtcaaggagtttctatttattctaaagttagtgttgaataattagttgatttgaaaagaatttgtgaagacattgaaaacatattaaagaccaaaagtattccacttcctactaacaaaaggactctaatggcaccaacattgccactaaaaagaagaatgggcactatagtgacgatggcaatataaaggatgcatttaatattgatgataggaataaactagagtgagatacaagatggttatttactagctatca

SEQ ID NO: 72336 - DNA, 312 bp, Glycine max
  unsure (1)..(312): unsure at all n locations
tgaaacttcctgctattattgtttaccacagagtggtacctggagatatgtctcggnggtcaggagaccttgtggacgtcatgtggggtgctattgcccaaaaccaagcttgaccaatcccgacccaacccgggcatagtcggtcagtgagaacctgtgatgtacctaagcaggcgagctccttgcagtcaacagatataaggaacaaagaccacataagcaggaggcttgtggtggctggccagctctgaatttgtgtgatatgtggatatggcctctggtaatcgattaccaagggtgggtaatcaatac

SEQ ID NO: 72337 - DNA, 465 bp, Glycine max
  unsure (1)..(465): unsure at all n locations
tctntgtgtgctntatnngaaatatttttttaaaaaaacaaaactttttagtaaatntcttgataaagtttatggcatgaactttcatttaataagaacttattgaataagcacttgcttaggttgtatatctaaatgcatccgttgtctacaaaacttgtaaagactatgttgtgcaccggttttcagaagtggcattctgggaaaaaattattttattgttcttctagtttcttattggttttaattctttattcatgcctacagcatcttaggaggatctttgatcattattggtttgtatgcggntacttgggcgtcttatagagaaagacacgcagctgctggagttgtttcgcatggctctcgggtctctgaatcacttgtccatgacaagagttcttttagggttaacattntctcaggaccccccagcctgtccccaaagccttcggattaacaaaa

SEQ ID NO: 72338 - DNA, 382 bp, Glycine max
  unsure (1)..(382): unsure at all n locations
gctttcacattaagttcgatacttgngtcacctaatccaatcctcacataacatatatatgttttcattgctagcattcttcattntactttatnttttgaaagaaaagttttttttattggcaaatgttaattagttgataatgttgttagaatgttagtgagagggaactcatgacttctccctcccccttatatctttaatcatcaaaccaaacttataactcctttgaaagcaaacttaacaatatataatgacatttaagaatagagagtatgacaattaataaaaaacagagtggaaagtacactagttaagcccaatatctctttatttntggtaaataaagagataacagaacatgtggcttgaattagagtaa

SEQ ID NO: 72339 - DNA, 417 bp, Glycine max
  unsure (1)..(417): unsure at all n locations
gcctaatgctaatcctagattgatcattgtgtatgcttcttcttcaggagtctgatattgagattaaagatatgagtggtgcacanaacttggttgttgatcattttagtaggatcgagggatgtgatagaattatgtagatcatgtgtgatagaattatgccttgtgagtttttatgcttttgtggatggattgcagtattatattcatgctctttcatgtgtgatttcacccttgtgctagattactctaggttttgccctgtctctcttgacattccttgtcgcacatgtattggttgagatgatttaggccttctttcttttagccactagccagataaacctaccttgcattgatattcattgtcactctctttgagcctctaacaccttctttcatattgtagctcattac

SEQ ID NO: 72340 - DNA, 501 bp, Glycine max
  unsure (1)..(501): unsure at all n locations
atccttgagtcacctgcggcatgccaagcttaatcaatatatattttcanatatactctaatctattacatcattgctagtggggtaagtataagaattaagttatttaataaggataaattccataaattatcaaagtaaagttttaattntaattaaaaaccagtataaaaaattatctaataactaaatctaattnttgttcattaccataactatagactcgtgttcctagatctctagactnttagcgcagtaatccaaacattttgtagttctataagtatgattatattctaaagtctagttgtccaagttactntaaaatggcaatctcaaatccctaattagcagagtatacggtacaaaaaacatcattaatcaacaaaatgccagttataacctctgtagaaaatcagctccaacaaaagcttcctatataataactaanaataaaaattctaacctagttacaataatntaaaatanaatagtaaggac

SEQ ID NO: 72341 - DNA, 474 bp, Glycine max
  unsure (1)..(474): unsure at all n locations
cacaagctnggagtgctaattcganacatatntgaggcatatctagccattaatattgtaagtttgctaaaatctacctcatccacatattgtaatacttcttcctttacattgctttgcttaagctgaacttggatccagaggacaatcatattgcaaaaactacaaaaggggctctcccttgtttgagaccgactccaactatgattatgcaccactgtattaataacatcactgcacgttaaagttagacttttgttaagagactgggacaaaggaacgtgtctctaaagaatcaagattaggaaaacgagaaaagtgtactccatcgtattaaattcattatttgaacagaatccaatggcactgcatataatgtcaggatataactgcagacatgatacataagatagaaggtaaggatggttaaattcaagtaagcggaaataatattgagttaagtgtaaattacaa

SEQ ID NO: 72342 - DNA, 516 bp, Glycine max
  unsure (1)..(516): unsure at all n locations
gaccgtatctcatgtcacctgcacgctgcaagcttctcggctcatgctgngaacgcctctagctcatcacccgtgcagcctaatgtacccacccagagggaagctccccaagttccaactccgaacgcaactcgaccggccggtaattccaacacgacaaggaacttccctccgaggccgttgccggaattcaccccgctcccaatgacgtacgaagatcttctaccatccctcatcgccaatcatttggccgtggtaactcccggaagggtcctcgaaccccctttcccgaagtggtatgaccctaatgcaacttgcaagtaccatgggggtgccccggggcattccatcgaanaatgcttggcccttaaatacaaggtccaacatctaatggatgccggatggctgactttccaagaggatcggcccaatgtgaggaccaacccgctcgccaatcatggagggggagcagttaatggcagtgaatccgataggccccacaggtccaaaccttta

SEQ ID NO: 72343 - DNA, 470 bp, Glycine max
  unsure (1)..(470): unsure at all n locations
ctcgcccaggcgagctcagctagcccaggcgagcatgtgtgcttcctccacacgcaacagccttctggaggaatcttctggaggccccaagtgggcctggttgctattttgcacccgcattttactaagtacaccccccttttctatatttttgtaactctttttccgtaacgttacgaaactttacgaacttcgtaacgatacttatnttttctttcgcaggttatgaacccttacgacttatgtatttaactctttttagctntcgaagaagttacggaaacttacggattgcgcaaaaacacctctttttgacttccgccacattacggaatttcacggatcgcacaagcctgcttccttttgatttctgagacgtctcggaacttcatttattgcatgtcatcaagtaataagcccggccgaaatagggtatgacagtgcccctctttcttacctctcatcggaat

SEQ ID NO: 72344 - DNA, 510 bp, Glycine max
  unsure (1)..(510): unsure at all n locations
tctcatagtcacctgcggcatgcaagctntgattaagacacacacaananatatacgcattttgtgtaaatcatacatatacaacggtgatcatgatggtattgatggcaattatgatgctgcattacagagaggggtgtttttcagaaggaatgtttgcacgctcaagttgctctatagaggctctattgtctcttaatgttttcatactgagcccaaatcctcgtcccaaaaaagggggaggtgtatttagttaaatataacataaaagaggagggtatcaactttatggaccaacagtttttggtgaagtagtgtgaagttttgcgccgcctgaagtccaatggacaataataacagtttttgtggggagtngatattggtcatatcagatttgctttagtccccctactaagaattgccaaaagtccaaaataccatttttttctccctttnctctcattattggcacccacccttccaccaacctttcttacttcctgcctttct

SEQ ID NO: 72345 - DNA, 83 bp, Glycine max
aggctacaacctgctcctaccacctgcataattgattgtgaactcccaaccatggtatggcttaccatgagtttccctctgcg

SEQ ID NO: 72346 - DNA, 467 bp, Glycine max
  unsure (1)..(467): unsure at all n locations
gtcacctgcggcatgcaagcttatgctttncttttttttgtcacacnagattcttattcttaatggctgctgctttatcagacactatctatntttcttgatggccttgttactgcatggagcgctatcctaactttctgtgacaataactccttctcgtttaggtgagagtgaggaaagtctctgtctcttatattgattataagtttcatacattcatgtcacagattaagtgcttcgtgtgttggttagaggtggaatctgaacaaaaattggtggacacacccgtttgttggtcacgtttttccatttggaaagacatttttgttatcaaatcattccgttaagtggaaccagagctctcattctctactgtatgttaggaactaaaaagttccatgctttatcgataatgtatgatttacttacttatatatttataattcaagccatttagaattatcctt

SEQ ID NO: 72347 - DNA, 422 bp, Glycine max
  unsure (1)..(422): unsure at all n locations
acactataatactcaagctcgcggcacatgtgcagtacatgcaagaatgtcacaggtatttattttatactcttcagaatgtngcacttgtagtacaaagctagtcatatatgtatggaaactactgggttattacgcaattcataaattaaagcagattactatataggagggcatgaaatattgaacccaactataaaagaaaaatagattattatatgaattggagataaaatgcacaacctgatatatgtactactcttcatcttaaaaataaatgtcattctacagtactttacatatattcaaaaaattcataaatagataaaaaaataatatctattttataaaattaacctagttattaatatcatattgaaaagctataactgtgtcgactatcaacacatttaattaacaat

SEQ ID NO: 72348 - DNA, 487 bp, Glycine max
  unsure (1)..(487): unsure at all n locations
agcttgtacggatgtaagagatatcttcttcgacctttgtgattcttgactccatttcattgaatcacatgtccagttgtaactccaaagtatcaaacctttcaccaacaaaggtttaaagaccatcgaacctatccaaactcttttgaagaagtgaggaatcttaatcttctccaccatgtaaatgtccttcgtcatcaatgggtcgagcaccctttttcacccaagagccattgtcgcaacctacccttcggcgggagggcgatgcgagactcacgggtgcgtcttccaagaaaggaatacgcgcggagtcgccaccaaatgtctatctcatgcatacattntaaaaacacattaaaagcatcaaagagttacatataagaacgtaagagaaataaaagaaaaccgacaaanaaggaagtcatgatattgcacaagattagaaggcctaactctnctaaaacagtccctagtggagtcgccaact

SEQ ID NO: 72349 - DNA, 497 bp, Glycine max
  unsure (1)..(497): unsure at all n locations
ttaatctcagctttagccaatgactacctgaataatccttgatgcccttttgatcctgttcccattccttgtgttgaagctcactacaagccttaagtgaacaaccatgatattaccatatccttaaggatatttggagccttggaatagatatgggaataagtgtggggggttattgtttcattggacaactatgtttgttggctatgcttcatgatgtaatttgggccatacttgatgtacattgtatattggttaaatgttggacatgctgaatgaaatgttgtttctcacaggctaaagagttctaaatctaattaaaatgagaaaaatagagaataatattcgataaaagataaagaaaagcaataaagttgagtgaataagatcttaaatggcacaagaatgatgaaactcttgtgtctactcttcatggttaagtattatctntacttctttttatcttcttacttttntcttaatatgcacatataccc

SEQ ID NO: 72350 - DNA, 465 bp, Glycine max
  unsure (1)..(465): unsure at all n locations
agctntaaccttangggttttaccatgttgctccctctatctctaacagtgttatggcatataataaatttatgtttgaaaaagctattagtgctataaggaaattgagtaaagaacctgctgattggctcttacataaagacataccatagcatacatgggctatgcacacatttgaccctcaatgcaagagtgacaatgtaacaaaaaacttctgcgaagtgtttaatgcttgggttgggacgataggaaatagactgtcctatcaatgttgtaatctataatttgtagattaatgacactttttgacaataggagagacaaggctgcaacttaccaatntactattacccctagggtcaaaagtgtcttggataaaattgtggaagatgggaggtattgtgttgtcacacatggtggcaatgatgagtatcangtaaagaatgagttactaatttgtggaaa

SEQ ID NO: 72351 - DNA, 243 bp, Glycine max
cgtggatatcttcccatatgtatcttcatccaccgattgataaatgagaaagagagctttcttgtctctctttcttgactccttcaacgtctcctttacaccttggcttagcgaggcttcatcttgctcctcgaagccattctctacgatatcccacacatcttgagctcctattagcgccttcatcctgatacctccattatcataagtgttctttgtgagcatcggcatttggaaaggaaa

SEQ ID NO: 72352 - DNA, 458 bp, Glycine max
  unsure (1)..(458): unsure at all n locations
taactttttactcggatgtcngattgactctcgtcacatatcgagacactcgaaattgaatgttgaagctctgagccaattcaaacgacaataactttttactcggatgtctgattgaagcccgtcatatatcgaaatgctcgaaattgaatgttgaagctcctagcaaattcaaacgccaataactttttactcggatgtctgaatgacgcccgaatatatcgagacgctcgaaattgaatgttgaacctctgagcgaattcaaacgacaataactttttactcagatgtctgatataggctcgtaatatatcgagacgctccaaattgaatgttgaagctctgagctaattcaaacgacaacaactttttacacggatgtctgattgagtcctgtcatatatcgagacgctcgaaattgaatgttgaagctctgagccaattcaggcgacaatatc

SEQ ID NO: 72353 - DNA, 414 bp, Glycine max
  unsure (1)..(414): unsure at all n locations
atactcagcttaacattcaatttcgagcgtctcgatatatgacaggactcaatcttacatccgagaaaaagntaatgtcgtgtgaatttgctcagagttcaacattcaatntcgagcgtctcgtatataaaggactcaatcagacatccgagtaaaaagatattgcacctgaattggctcagagcttcaacattcaatatcgagcgtctcgatatatgacgggactcaatcagacatccgagtaaaaagttattgtcgtttgaatttgctcagagcttcaacattcaattttgagcgtctcgatgtatgacgggactcaatcagacatccgagtaaaaagttattgtcgtttgaatttgctcagagcttcaacattcaatttcgagcgtctcgatatatgacgagactctatca

SEQ ID NO: 72354 - DNA, 474 bp, Glycine max
  unsure (1)..(474): unsure at all n locations
agcttcatgataatgaatcaagttgattcatgttgttttgatgatgacaaagatgatgacaaaaagcccaaagaatgatttcaagattgagtcaacaagttcaaaatcaagattaatttcaagtttcatgagaagattcaagaatccagagaagtttaatttcaagattcaagggaagatgaattctagattcaagagaagaaatcaagaagacttccaagggaagtattgaaaagatttttcacaaaacaaacatagcaccaatttgtttttcaaaagagtttttctcanaattntctaagttaccagagtttttactctctggtaatcgattaccagtttcctggtatcgattaccagtgacttcaaaagcttttaacctgaattgcaacgttccaattggtttttaaatgatgtaatcgattaccaatgtatctgaacgttgaatttcaatcacttgtaagagcacatctt

SEQ ID NO: 72355 - DNA, 455 bp, Glycine max
  unsure (1)..(455): unsure at all n locations
atgagggtgttccatatgttctcaagactggactaatacatttgctgcccaagtttcatggtcttgcaggtgaagatccttataagcatcttaaggaattccatattgtttgttccaccatgaagccccctgatgtccaagaagatcatatctttctaaaggcttttcctcattctctggaggggatggcaaaagattggctctactacctngctctcaggtcccatttcagctgggatgaccttaagagggtgttcttggagaaattcttccctgcatctaggaccaatgccatcagaaaagacatttcaggcatcangaaacttagtggagagagcttgtatgagtactgagaaagaatcaagaaatngtgtgcaagttgtcctcaccaccagaattctgagcaactccttcttcaatatttctatganggacttagcaacatggagaggagt

SEQ ID NO: 72356 - DNA, 81 bp, Glycine max
gacttagcactgcgctcactatctgaactttatgaccctctttcttacccaccacgataatggactttccacataatacat

SEQ ID NO: 72357 - DNA, 425 bp, Glycine max
  unsure (1)..(425): unsure at all n locations
gccggagatgctgatgatagataaagtactatcgnngattgtatttttatgggtgattgtgtttntacatggagttctaagaagccaggcattgtgacactttctacttgtgaagccgagtatgtagctgcaacttcttgcacatgtcatgccatttggctaagaagattgttggaggaactntagttgttgcaaaaggaaagcacaaagatctatgttgataataaatatgcacaagagcttgccaagaatccggtgttccatgaacgaagtaagcatatagatacaaggtatcatttcattagagagtgcattatcaagaanaaagtagaattgactcatgtgaaaaatcaagatcaagttgcggatattttcaccaagcctctcanatntaagatttcgaagattggagcatgacttggtgt

SEQ ID NO: 72358 - DNA, 445 bp, Glycine max
  unsure (1)..(445): unsure at all n locations
gctgcagcttagctgttataaaatccctggtttgttctgttatttntataactntaacttttnttatctnntcgttggttgagtgtcatttgtgtttctttatgaatggcacagtatttgtggttgtgcagatgtttctcaacgtggaagggaaaatgtgaaatttgactctagtgctagagtttctcataaagtcactcccaagaaattaggggctntgggttccagtgaaagagctgcttccacatctgggattgcatcacagacagcttcaggtgtactgtctggttcaggtgttctaaatgctagaccaggtagtgctacttcgtctggactactttcccacatggtttcatcgctgaatgcagaagttgcagagagtatctggagaaagtggcagatcttcttcttgagttgcacaggcagacaccactgtgaaatctta

SEQ ID NO: 72359 - DNA, 507 bp, Glycine max
  unsure (1)..(507): unsure at all n locations
gcttctaagtctttggagcanactaattatntaaattcttatacaagtttttaatatgtctcatcatcttcatcttcaaggtctgccatctctccctcagtctttctttcaccactattcttgtagacctcttcctcttctttagtttcttcatccccacattcttcttcttgcattttgggcccgtttgttttagcttttttaaatagcactttttaaataaaataaacagttttctgctatttttaagaagcanatcctctgcttcttaaaaaaacacttnttgaaaaccacttttttttcaaaacttntttcaagtntaaacaagctggcccttcatttctttttcccttagagctttgaggcctagaactagaagcagttacagttattttctttggtcttctctgttaccttgnngtatttaaagactcacnttgcatagcanaactattanagttaaggtatcatcatcaaacaccaattcatctnntagcatgtattcac

SEQ ID NO: 72360 - DNA, 439 bp, Glycine max
  unsure (1)..(439): unsure at all n locations
ncgcnagctngagaacaccttgacgtgatgcacgcangtctttatttcataccacagaggcctcttgtctacaatcaaatatctagaagggcaagtatgccaccttgcanaacaactcacanagaagtcccaataaaattgtgtgcctaacatggagcctaatcctaagcggtgcttacaaggagtttgagaaaggatagccctgttaatgatgggattgtanaggatgtagtggaggttgcaagtgataaggatgatgttgtatgtgagaatgacgggggaaagaataaagagaaaattacgagtatcgaaaatgttgaataaaatgagagaaatgatgaacaagaataaaaatagtctcaaggaaggtggtgatgaggtcttaagtcacaagaccacaagtcaagtagtgagaaaaatagagaaatgtgtaagtagt

SEQ ID NO: 72361 - DNA, 447 bp, Glycine max
  unsure (1)..(447): unsure at all n locations
ctgttaggatgtatagatgatggaaagtattaagatttttaaatgcaaaacaaagccttgctcttatagactcttcatgtctggtcaagacaatcattagaagagttatgacttttataaaaacttaataaccaatttgaaaaagtcaaaaactatttgaagagttacatcttttgattttatttagaaacaatcactggtaatcgattaccaaattagtgtaattgattacacaaagcttttatgtgaaaggatgtgactcttcactcttgaatatgaatntcaatgttcaaaggcactggtaatcgattaccaaaacattgtaatcgattacaactntttaaaattaattggaacgttgtaaattcagtttgaaaactatttcataacaaatttgctactggtaatcgattgaccaatctgtaatcgataccaagagtaaaactt

SEQ ID NO: 72362 - DNA, 437 bp, Glycine max
  unsure (1)..(437): unsure at all n locations
gcttgttcgcacatcgttcacgtgtatgatatccactctacaaggtttgaagtttatgagaccttcaatcctataacgcaacgtggcggacaaaagtgggcagttaacttgaatgaccattattgtcaatgcggaagggaatttgcgcttcactatccatgttcacacattattgcagcttgtggttatgtgagcataaactactaccaatatattgntggatcgagtggcctcagaataattaagaaggggggttgaattaattattcctaaacatttaccaattaaaaaattactctgttaaggctnnttactaaattttaagagaatgaggagtagaagagaatcttaacagaaagtaaaagcggatattaaatgcacaacgganagtaaaagagtagggaagaaggaaacaaacacacaagagtttttatact

SEQ ID NO: 72363 - DNA, 482 bp, Glycine max
  unsure (1)..(482): unsure at all n locations
caagctgccacagattctcctgcctgcacttcaaaccttctggtgggtcatatagatgtcttcctctaaatccccatgcaagaatgcagttataacatttaactgctcatagtgaagattctctacagctgctatactcagaataactctgatggtagtcatctttacaactggagagaagatcnttgtgaaatcaattccttgtttctgctgtaaacccttcaccacaagtctctccttgtatcttcttctaccgtcagattcttcctttagcctatagacccacctattctgtaacgctntctttccttctggaaatttagttaaagaccaccgtttattcttctgaagggatgtcatctcatctttcatcgctagctcccacttaatagtgtcattcccctgtgtagcctcactgaaacattctggctcaccagcatcagttaacaacanataatgcaatgaaggggaatacctatctg

SEQ ID NO: 72364 - DNA, 525 bp, Glycine max
  unsure (1)..(525): unsure at all n locations
gatcttaagtcacctgcggcatgcaagctntatttcatcaaatattatatggatagattcttcaataactaaggttcttgagttgtacactctaaatgcctttgatctttcagagtattcaaggaatgttccacaatcactttttgagtcaaaatttcccagactatcctttgtgttaagaatagaacacttgcacccgaaagaatgaaaatatgatatgttgggtttccgtcccttccacaattcatagggagcatttttcaagatggatcttatatataatatgttctgaagaaagcacgcaatattcactattttaacctagaagtgcttanggattgagttatcatttagcataggtctagccatctcttggagagatatgttctttatttcaactactccattttgttgaggagttcttggtgttgaanaattgtgaagaattccattttcctcacaataggtggaacctttcattntcaaacccgcccctatggtcacttctgattaaagaatgcatac

SEQ ID NO: 72365 - DNA, 209 bp, Glycine max
  unsure (1)..(209): unsure at all n locations
ggacccgtgttagagaaacaggatatggctacgtggagtacgtagctagttggagtggcacagggatgggggttatcgcgctttggatgtgaaactgtngtgaccatgccaccgcacctataccaatgtgatggtcccatatccacagttgagataggaatgtgaaggtaaacttctgtttattcttgacacaagtggtacctgaatat

SEQ ID NO: 72366 - DNA, 445 bp, Glycine max
  unsure (1)..(445): unsure at all n locations
atccttaagcacctgcagctgcaacngtttgaaaatattgctgtacangagatttaataacagcctcagccatggtattgcagtctcctttggaggaaggattcgacaatgtgacacaattcctagtcagtgaaattaaagataagagctatcctgtattgaagagctggatggtccagaagataagtctgctggtcatgtgatgtttaaagcattagaatacagtacaccaatggaacagccctaagtagatatgaagacccttccatcacattgaagtacgtatttttggaggacaatgaggctaaacctataataattagcagctccttgcagaagaaagaaaaggatcaactggttcagattctgataagttgcacagccgctattggttgacacatctctgatttaagagggatcacgtcattatattgcatgcacaaaa

SEQ ID NO: 72367 - DNA, 409 bp, Glycine max
acactataatactcaagcgtgtctgagtgattatgcgagacagagaccaacatgatatctctttgtcagcatgtaccaagaagaattaaatgtagtcgcggcccacgagcacaaagtggcggacgagtatgcctatatgcacgcggataatgaggctagaggaaaggcgaacgacgtgttacatcaataggcaacaatgtgaatggaccgatttgctcttaccttgaacaagagtcaagaacattctcgattgctatccaaggacaaagcaatggtggacaccgactacgccctcgatgagatccacggacttctcagctattgtcatcatatgatagacataatggcccatataatcttaaaccgctagcatgttaggattgtcactcagatcttgactagttataac

SEQ ID NO: 72368 - DNA, 435 bp, Glycine max
  unsure (1)..(435): unsure at all n locations
tataggagaatatacttatatatatcatttggcccaatcttctattattttatcaattgccgcaactcgggatgataaacacaccatatatcccagtttcaattttttctgagttatttcttcgagttntcaactcagtggattaaaaaaaaccctttcaacttaactagccttctttatttttctgctctaagttttgcctagaatggcctttcatggttccagtctggctagcttttattttgtgctctaattttttcttagatcgctcttttggcttttcaaatctgcattattttaaaaatatcaaatggaaacaaacaaaggcataaaataagactaagaattntgagaagagaaaagaacggaaatatttattggaacattcaaaatgcattgttattgatgatatattggaaggaaacatgagccctt

SEQ ID NO: 72369 - DNA, 433 bp, Glycine max
  unsure (1)..(433): unsure at all n locations
agctntcagccaattcactatacaataactntntactctgatgtctgattgagtcccgtaatataacgagacgctcgaaattgaatgttgaagctctgagccaattcatacgacaataactttttagtcggatgtctgattgagtcccataatataacgagacgnctcgaaatgaatgtngaatctctgagccaattcaaacgacaataaccttntactcggatgtctgattgagtcccgtaatataacgagacgctcgaaattgaatgttgaatctctgagccaattcagacaacaataactttttactcggatggctgattgagtcccataatatatcgagacgctcgaaattgaatgttgaatctctgaactaattcaaacgacaataactctttactcggatgtctgattgagtctcgcaatatatcga

SEQ ID NO: 72370 - DNA, 437 bp, Glycine max
  unsure (1)..(437): unsure at all n locations
cacttatactcagcttcacattcaatgtcaagcgtctcgatatattatgggactcaatcatacatccgagtaanaagttattgtcgtttgaattggctcggagcttcaacattcaatttcgagggtctcgagggtctcgacatattactggactcaatccgacatccgagaaaaaaattattgtncgttgaattggctcacaggtacaacattcaattttgagcgtctcgatatgttacnggactcaatcagacatccgagttaaaagctattgtcatttgaattagctcacagatacaacattcaatttcgaggttctcgatatattacgggactcaatcagacatccgagtatatagttattgtcgtgtgaattggctcatatgttcaacattcaatatcgagcgtctcgttatattactggactcaatcagaca

SEQ ID NO: 72371 - DNA, 477 bp, Glycine max
  unsure (1)..(477): unsure at all n locations
agcttgctgtcttaccatattatgaatcatcttggattgatatcaccttaggaaatngatggatgttatgtttagaactgcatgttttgaatctgcatcgatgaattccatggtaaaatttgaatccgaatgaaagaaatgctgattggttatattggtatcaataagaatcctgaagcaagaaagtgaagattactgaatggatctcttaggcgacagagagtggcacctgctggtaaaatgccaaatttacaaattaattctttcaatatttttatgacaattagtatatccaaaataacaagcacccctaatataatgttatctatcaaatacgttcaccaatatatgtaagcttgacgtttcctctaatggtgaaaatgggtggtgtgacaaaatcgttacacattttgacaattgagggcataattctattctttataattagagatccactgttttgattacaattcaaaa

SEQ ID NO: 72372 - DNA, 428 bp, Glycine max
cgtataacatttgatgaataacataattagctgtctcttgataaataacaatattctcaagagtgtttaatctttaattaaagaaaaagttagttgctgagaggcccaagcctcttggtcattggtccttcctcccctatctatctttattcttacacgcttattttttagtttattttaagaaaagttaagaaaggatccacggtgggacctgaatgaaaagaaggaccgaatcttcgttaaagcgtatatacagataagccttgtggggttgacgcgttcatcacgggaccacctctatccatttattattttataaaactaaaataatgcagttaataaattaaatcaatttctatacatcatttaataaataaataaattactctagataataattaaaattatgaaaactaaaatcacacata

SEQ ID NO: 72373 - DNA, 494 bp, Glycine max
  unsure (1)..(494): unsure at all n locations
agcttgagggagggtgttgagattataactagttagttgtagtcttgtttagtagtagcttgtatctgagaatataaatactttgtaacacacactttacaaatcaatcataatatttttttcttctttcatcttcattctctatttttctctcctctgtaactgaatcctaaccaactcaacaggattgtttctggttgataggattgagtggattactttgatgcatggctatatacaatagatccttggtactgtcgactgcgttntaaaaggtcatggagctttttgaacttactttctaatgaatgaatgcatgacaagaaggatcaagggtgctaatctgaatatgtaacttcaccaaatatcaattgacatgtattnttcttatanaactagtctgactttttcagcatttcctgtacttccgtttacatattcaacacattngcttaatggctacagtgtatttgtattatggcatgtctactaca

SEQ ID NO: 72374 - DNA, 477 bp, Glycine max
  unsure (1)..(477): unsure at all n locations
gctgcgctngagtctcatcactgacagggtaaatcagtttggtaaagttggatacaattacagcgtgtntggttcgtttcagatatatataaatatataacttttcacgtttacccagaaattaatagttataactttcgtcttttcagacatgatttcttaattctcaatggtttcaaacaagttaattgttgtgtggctttgattcaatcttctctatcccatttcccaaactgttctttctttcttggatacatggttgcttagttgaaaaaagggaaaaatggaattggcttttgctttttaaagattgcaacttgaaaataaaagttagattggaagaaatacatgctaattaaacaaaatagggaaaaactgcagatattttttcttttaaaatttttcttctttctcacttgttttctcaagtagttactgtatataagaaagaaaaaaccaacaatggcaaaagaactt

SEQ ID NO: 72375 - DNA, 254 bp, Glycine max
aaagcgtgaacagtggagtgttgggtgtacaggctttatattataagagaaggacatcttctcccattcactcaagatgctgagtgcgccaacaataaagctgggtgcacctagcaacaccccataaactaatggatagacctatacaagccttaagtgtaaactgggggcgtcaaataatccaagctaacaaacctgtggagaattacatgtcatttgaaaggtgggggatatatatagctggcttatggcca

SEQ ID NO: 72376 - DNA, 420 bp, Glycine max
  unsure (1)..(420): unsure at all n locations
ctcgcttctcatgcagttccggctcgaggtatactatccgattttaatgatgccgacattgtatgcagactatataaaattcgcgccgaagaaggtcttgaatctgaacaggatgctttggacttcattgctgcagaatcctgtggttctgttatggatgcagaaatgatgcttgatcagatgagcttgcttggtaaaatgatcaatatttgttctaactatgagctggtagnctacgtgctttgttccatacatgtatttactccaaactacagatttctccttggtaagtctggcataccactatgntgttctgcacactgggatacgatcggacgatgagttgcttgatttgctggagctggcttcgtcatctgacacttactatacagttataagagcatcggagctcatgagatc

SEQ ID NO: 72377 - DNA, 490 bp, Glycine max
  unsure (1)..(490): unsure at all n locations
actggattgtgaagaantgcnaaaaggaagtanatgcatgatctatatgattgtgttcaaaatgcaaatgaatgcaaagagggagatagatgctttgctagagtgaaatggtaactgcccaaggcaattgtgccttattaattttagtcagttcttatgactcgcttagctcacagtcgcgcttagcgagctcatatgacgattgagttttaaaggcccatacgcttagcgcgtctgctcgctaagcctaattcaaaatataaacactctagagaagtttttgggattagtgcgaagatatgcgactaacgcattctgtagctctgattggtcctataactctctcttagcgagccgaggcgttcatagcgaatagaatgctccttaattgcagtgatggtcgcgcttagcgcgaataggctcgcgtagcgtaatacgaacaattaaatccatagaggttttgcgcttacctaatccaaatataattata

SEQ ID NO: 72378 - DNA, 237 bp, Glycine max
  unsure (1)..(237): unsure at all n locations
gatgaacccttttcttcttcacttcctccctattatagcaaatatgggaggtggttgccgccagctcgccaggcgagccggttgcttccncagaagcaacagccttctgaggaatatttggagggccaagtggcctggtgcttttgcaccccattttactaatacaccccctctacttttttggtgattcttttcgtaagtacggaactacgaatttgtacgatcttgtttctttcg

SEQ ID NO: 72379 - DNA, 515 bp, Glycine max
  unsure (1)..(515): unsure at all n locations
tacaagcttaacctagaggagacggaccattccaagtgttggagaagatcaactacaatgcctacatgaatgacttgcctagtgagtataatgtaagtgccactttcaatgtgtctgatctatctctttttgatgcagatggaggagccttggatttgaggacaaatccttttcaagaaggagggagtgatgaggacataaccaaggaccatgaagcacttgaaggttccatgaccagaggcagacttatacaagcccaacacgtcatagagacaaggctggtcatttgtatagctgccattgatgatgaatgaaggcccaagtgcagaaagatgaatgcccagaggcagaggcactaccaagactactaattgttgctgaatgcccaaactaacttgaagggaccaagttaaataagttttagttataatttaattttattgaantntggcccaaactggttagaaggcccatgtctatttttatctnttagttcagctacactataagtattg

SEQ ID NO: 72380 - DNA, 428 bp, Glycine max
  unsure (1)..(428): unsure at all n locations
taattttaaattatattttacatantaatatatgttagtctatgaaatgataataaaaccatgtatttcctttatcttttctttcactanttgactatacatatttaattaaattgaatcattgaatttaatcaactcaatccgaaaccgacctacatgcctncttataaaaatatacaaataagcttgtaggtgtttggtttatttttttaatctttcccgataaacaaccttttaaagaanaccaaanactcattgaatacttgtgacatagtggaggaccaattttaaatcgagttttaactcaacaaaaaagaaacttctaacaaaacactcgataggctacatgacttttctgaaattgtgaaatgtcccataatngagaggagacancgaggagctggaattatatcaacattggaattcat

SEQ ID NO: 72381 - DNA, 478 bp, Glycine max
  unsure (1)..(478): unsure at all n locations
tcttttgtgttaccctgaatctgacatggactctgtttattattatggagtgttgttgcagattaatgttctgaaattggaactgtccaaaccgtatccggttagtgattaagtagatggcatttttgctgtgtttccatttatgtgtcatattgttttagtaaataatatgtttcatgtcatgatccactctcanggttttcttgaaggcctgcccgtgtttgatatgtggggcagctggaaattcgaattcctcacaggagtggagcggcgctcgatcatcatgtttctctactaagttcattcccttcagtacgcgtgcttaagattaaggtacgcacgtaaagaatngtgtangttgatcatatgcatgcattccgtgcatgcacagtgactgagtcgaatttaaaataaaatttaagagatgtntcttagaatgaanaacgtatatgttgaactctttttatcaatatatgtg

SEQ ID NO: 72382 - DNA, 490 bp, Glycine max
  unsure (1)..(490): unsure at all n locations
agctttgtgtgaaaggatgtgactcttcacatttgatattgaattntcaaccttcaaaggcactggtaatcgattaccaaaacattgtaatcggttacagctttttgaanataattggatcgttgtaaattcaatttgaaaactttntcaaaacaattntgctactggtaatcgattacaacaatctggtaatcgattaccagagagtaaaatctctttggtaaaaggttttgtcaaaaactcttgtgctattcaaaagtttgaaaaactttntaatacttatcttgattgagtcttctcttcattcttgaatcttgatcttgattcttgagaatcttgaaccttgaatcttgattcttgtctctagactttcttcttgagtcttgaattcttcttgattcttatcttgaactctcgaatngntctttattcactttgagtattctttgattgatctttgagctntntgtcatcacctttgtcatcatct

SEQ ID NO: 72383 - DNA, 441 bp, Glycine max
atgtgagcaaaatgcagatgaatgcaaagagtgagaaagatgctttgtatgagtgaaatggtaactgcccaaggcaattgtgccttattatttttagcagtttcttatgactcgcttagctcacagtcgcgcttagcgagttcatatgacgtttgagttttaaaggcccatacgcttagcgcgtgtgctcgctaagcctaattctaaataaaaacaatctagagaatgttttgggattagtgcgaagatatgcgcttagcgcattctgtagctctgattggtgctataactctctcttagcgagccgagggcgttctagcgaatagaatgctccttaattgcagtgatggtcgcgcttagcgcgaataggctcgcgtagcgtaattcgataaaattaaattccagagaggcttttgcgcttacgctcaatccaaaataaat

SEQ ID NO: 72384 - DNA, 508 bp, Glycine max
  unsure (1)..(508): unsure at all n locations
gcttgttccatataanagttaattcanacanaatataattgatatagttgtgattacttctanggtgaaaaagtntatcaaatgatctatgagtgaagcaccattattaatccttagatttattattaaaatatttcgatggttcaaattaaaattaaataattgtaaacaaacaaataaataaataactgtatttctatctttttcattctcaccccacccccaacatctcaaagatgttccacaggaatctgggaaatcttaaaaaataaaaattgttcatacatganaaattgataaaacattaaatacattttgtccataaagaaatgctctcatgtgtgtgccttgtaatcattttcatcacgagaataacaaaataatctaagtaaactgaacatataccaatattcattattnttttcatctgaaaatttccctatcatanactgaacataaatngccgtcgagagcacccaatgctagcccatcacccagaacatataca

SEQ ID NO: 72385 - DNA, 256 bp, Glycine max
tgtatgtatacatgactttgatgatgtccaaagaagactcaaacaaggcctcatttgcttcaagattaatacaagaattgttctacaaacaaagccttgattcaagaattcttcaagatcaagcctgcctcacaatgaaagggttcaagtcattcaacgcacatgtaattgattacaatacatgtaatcgattaccaatggtgtgaaagtgtgtaatcgaatacacatcatatgtaattgattaccagagactctg

SEQ ID NO: 72386 - DNA, 503 bp, Glycine max
tcacctgcggcatgcagcttgacatgagttggagataggtggcttggatgatatcatgattattctttatggagcacatctatgttgatgtacctgtgagtgaaaagaaagaaattgatagattaaatgtgttttaactattggaattactctatgcctatgtaaatgaatgtggttgtcataaacattgaagggtatcttttagcaagggaagagtagtaacctttttggtccccaaagaatgaccaaagattaaatgtttacagtacaaaattttaagacataacatcctctttgacaaaggaaggatatccatctcatttggtctttaaagagtgatgttggtttataaaatatattattaattattaattatttattattaattagtaataaagagtttaaacttaaccatgtgatgaactcaattggctgttaataataaaaaatcatttacctaaagataagcatttgatgatatcaagctacatgatgcctatagt

SEQ ID NO: 72387 - DNA, 304 bp, Glycine max
cttggtctagtgatgttgcgggccctgataactaccgagacaattatcgttaggtgtatatatgcagagccgtctattgactattgcttgtcctttcgctccttctggacgcaaatggtagaatcgtatattggtggggctgaaacatgaaactgtggtatgggttgtacaattttgacattgtgccgcgaggaacacacctttcacaaatacaatcacaatgttgatgtgaagaattcattattggtgagcaacatatacataggtcttaacacattttaaacttggtgggatctacaggata

SEQ ID NO: 72388 - DNA, 523 bp, Glycine max
  unsure (1)..(523): unsure at all n locations
acactataatactcaagcttatgatgaaccaagaatggatcaaagagtttcgatgatatcttttatgatgacaaaaggctcagaagtcaagaacacttcatgataacaaagatgatgatctcaagaatcatagaatgagttcaagattgaatcaagaacacttcaaggttcaagaggatacttgatttcaagaatcaagaatcaagtttcaagattcaagttccaagaatcaagatcacgattccagactatagattcatgagtcaagacaagtttttttacaaactgagtagcacatgaagttttctcagaaacactttaccaaagagtgtttactctctggtaatcgattaccagattattgtaatcgattaccagtaataaaatggttatcaaaaagccctcacctgacattacaacgttccaattgatttcaaaatgttgtaatcgantacaatgatctggtaatcgattaccagcgtgtttgaacgtttggattcatattaattgtgaagagtcacat

SEQ ID NO: 72389 - DNA, 355 bp, Glycine max
  unsure (1)..(355): unsure at all n locations
ttaagcaccgcggctgcagcttacacattacttttctanactaagtnttataataccaattactaagtcctttntaactagacaattgaagtggtgcatgtttacatgtgcatccctacgaagcaatagtcaaaaatcatcaatcttattttccaagcaactaagctcatgaaatgatgcatgttcaatattaagcatgtagatattacctattnttctacctatgtgaacaacctcactatgttttgcttcacaaatgagacaacatttcttgttgaatgcaattttgaagcctttgtcacatagatgacttatgctcanaagattgtgcttaagttcatcaacatataaaaca

SEQ ID NO: 72390 - DNA, 440 bp, Glycine max
  unsure (1)..(440): unsure at all n locations
cactccattagaataagaattggtctttgctcatgatcagagcaggaaaccccagggccctattggacttcttcgggtccactatgtgtctaggagatgtgatccctgcaaatngatatatagcgtttgagattagatgggctacattgacactcacctacgtcaggatggcatagaccacgtggcacttcggcagggggagggtggaattaatgtcgctgtggagaatgttgctgagcatcaacgtcatccaaatctatgtgagggtggtcttgctagtgcgcatgatccacacccatctccctgccacgctccaggcaaagtcctgccctagaacacacagtatttggctgatggccttcttgtcgaacctcgaggcctggctcctactctggctaaactcacaacactggcccttcttcaagaccaatggatgccct

SEQ ID NO: 72391 - DNA, 458 bp, Glycine max
  unsure (1)..(458): unsure at all n locations
agcttctcattngatctctcttaggaggagcatactttctatttcactcaagtcacacccacggaatttaagcacaagagacttgatcattgccatcttgaaagaatgcttaacatgaataaaaggaaatatgctaaagagaatttgaagaagtttcaaatggaggaatgcaaatctgctagcacactaatgaatcaaaaggagaagttccgaaaagaagaaggtgttgataacattgatgaaggatattatgggagcttgattggatgtctaatgtatctcactacaacaaggccaaacattctatttgctcaaaagaacaatactgggaattttattgataatcaagtagccattgctattgcaaacaatctcgtgtgtcatgggaagactaaacatttcaacattctagtttattatttgattaagatgacacaaagtggcgaagtgaacttaat

SEQ ID NO: 72392 - DNA, 401 bp, Glycine max
  unsure (1)..(401): unsure at all n locations
atggactcacacggcttctctgtgtctataccagcagcacaaatacatgttaaccatgaaacccaaccatcatgtgctggtcacccttcgtgcgtatatntttaagtgtaaagcatattagcacgctatacaaaaaagccaacccttaccaactccttcaacattcacgtaagtcctgtatcatcatatgaaacgagctcctttccttcacaaagagatcgaaacaatcataacgttaaacaattcaaacaagccctgggattcatcttccattcacaataagagaattttcttcctttccctttcgcattaatccatgcccaagctctatgttttgccagatcccatgcgggcacacaacacagcttaccaattcccattggccgctctataaataacaa

SEQ ID NO: 72393 - DNA, 489 bp, Glycine max
  unsure (1)..(489): unsure at all n locations
agctngccgccacagagttttacgactatgctcttgtgtggtggaacaagctacaaaaggagagagcaagagatgaagagccaatggttgatacatggacggagatgacaaagatcatgacgaagcggtatgttccggctagttactcaagggacttgaaattcaagctccataaactaacccaatgcaacaagggggttgaggagtatttcaaggaaatggatgtgctcatgattcaagcaaatattgaagaagatgaggaggtaactatggctcgatttcttaatgcgttgactaatgatatccgtgatattgtngagctgcaggagttctgtgaaatggatgattngcttcacanagcaatccaagtggagcaacaacttataaggaagggagtggctaagaagagttttaccaactttggttcttctagttggaaagacaaaggtaagaaagatggggctgctacttctagtagttcctcaccta

SEQ ID NO: 72394 - DNA, 87 bp, Glycine max
atagaatggccgaacgcattgggaaaagatgactgcatttctgagagcttcgagtcattcggcgctaaaatatgcccgaaggacatc

SEQ ID NO: 72395 - DNA, 224 bp, Glycine max
  unsure (1)..(224): unsure at all n locations
cgtaccggatctctaagtcacctgcagctgcagcttgagcccttcacacaagtccttcccgtatgcattcgtctcttaaatcaattgattntaagagtttatggaatgttgtccaatcaaggttntgggcaatgttgacagactgcggtgcaaaaaaaaatggcatgttagctcgcctgggcgagcaacccctgcaccaaaatataaaaagaanaaacgagggg

SEQ ID NO: 72396 - DNA, 474 bp, Glycine max
  unsure (1)..(474): unsure at all n locations
tactcaagcttactgccatgagtgtctcgtctgggaattcttctttgatctcctttttctttcttggtgacttcttcattaaccaatcttgatagatgattggctactagctagtcacaccctcttctgtctcagatctctagatcaaactgttgtattagaaagacccatctagttaatcttgtcttggaatccgctctggtgagtagatattntatagctgaatggttggtgtgcacaatgatcttttgatcctacaagatttgatcaaaaaatttcaagggcagaaaccactacttgcttctccttcttcgtggttgcatgttgatttgggctctatttagcaccttgttggcattgtagatagtatgaattctttcattcctcttttgtcctaatattggtcccaccatatagtcactagcatcatacattaattngaattcttgcccccaatngggagccactataatt

SEQ ID NO: 72397 - DNA, 434 bp, Glycine max
  unsure (1)..(434): unsure at all n locations
agcttctaagaccactacacgacagagtgcttggttctctgactctattatagggtaaatttgtggttttaaatatgttacgttcgattatgatttanacattgttttatgttatgttaacctcttttttttgtagtgctggatctatgagcactttcctagtgtgcatcagtgcgtcacagatgatgcataccatgagacgtccccatgtgtttcccggtggctgacgtcgaaggtacatatgaagggaatcacaggagcaccataccgggcacgttgtgatgctatgaccgtcatagatatgtcttggttaccttacactgagcatcagggggttagggcctatgagctagattcatcattctaaggtcaagtgagatgggtcctatggtggtcatagctcggccggagagggtgctactacagtctgggta

SEQ ID NO: 72398 - DNA, 469 bp, Glycine max
  unsure (1)..(469): unsure at all n locations
gactatgaaactaagcttgacagacagtacacactgctgtttctactttttgatanaatatggaaatctactctaaagatacatctaataatacccataattataacatgtgccttattaaccgccaagcgaataccgntatcttgctaggaattctaatcttccataattccttacaccattcctcttgccgacctcctgtaatagtttccaaaatcagattatatgcgctgcttgtcgaatatttcctgaatgatcacctaaccactcccattgatctgatccttgctgctgaatgttcatgccttcgatctcccttangaaattgatggctgactcgatttcattatcaaacagcgatcttctccacataaaatgccactcccaccctgaatgtagatgatgtcccatctgtctaatggtatggttctgctgtgatgatattagatacagtctatgatatctctct

SEQ ID NO: 72399 - DNA, 453 bp, Glycine max
  unsure (1)..(453): unsure at all n locations
agctntgcctgttgatgcagcagtaatgatggccctagttatgtnngggaacggttacgaacccggaatgggtttaggcaaagacaacggcggcataactagcctgataaatgccaaaggaaatcatgggaagtatggtttatgctataagcccactcaggcagatgtaaagagaagcatcgcgggaaggaagggcggtggtcaaagctcgcggttgagacaagaaagtgaaggaagcccgccctgccacataagtagaagctttataagcgcgggtctgggagacgaaggtcaagtggtcgcaatatacgaagatgatgttccgagtacattggatntggtatgaccttgccctcctgatttccagctggggaattggcgagtggaggaacgccccggcatttacgcagcgagcataatgtanacctttacnggttaaaaagctctatagtt

SEQ ID NO: 72400 - DNA, 506 bp, Glycine max
actatcaaactcagcttttatccaggcaattcttggtggtgaagctccttctttcttggcttattccctagtggatggtgcctaccctgtcctcttctcctttgccttccgctgcatctccatggtgaaaaatcaccattgaaggacctcattgaagctcatagatccagcctccatagaagctccacaagcaagcttccatcagaaaagaaaaaggaaaagagagggtagaaataaatcaagatgagagagaacaaataagagaggaagaaagaagaaaaataatgaaagaaatgagaagagaaaaacatgcctcctatagtagtcatgactcttgcaagagtttaagtgaagaacttagcaactattatagaaggctccatagttcacatactaaacatcattcccaaagaagaagaaaggatacaaggcctctagaggttaacattagcctcccatatttccatggaaaagataatggtgaggcctacatagactagaaaatg

SEQ ID NO: 72401 - DNA, 354 bp, Glycine max
  unsure (1)..(354): unsure at all n locations
ttgatagtcatggataatatgattgactttgtcaatggcttgtgctgatttgctgatagtaacttgatgcttgcttgacctcttgaagaaagttgagaaagtcgaaactttgattccgacatgtttagctatattctaagttntcaaactttattntcatttcctgttatgatgatgtcttcaacactttccagcttgcgggtattagaaataaaantagtntagttagttatcagtctagttagttacaacataacttagttagttacaaattagttatatgttaactatatagactcgattacttatatagaattgatttgtcatttgacattatcaaataaattcatcttc

SEQ ID NO: 72402 - DNA, 500 bp, Glycine max
  unsure (1)..(500): unsure at all n locations
caagctggagataaatcaatcctaaaaaggttgagataacaattatattactatagggaggttcaaataaaaaaacttagcgtaacctggcctattttcacataggcatatagtaaactcatcaaaactataatcattntgtatgtctatgctcaactaggaaattgaatctcctactatttaatccataattgctcaggatgtaatcaaataattatccatcaatcaatggtatttaagttttataattgtaccttcacgaggatacctaggtaattttctccttcattccttctagtagctctcgatcaatatatttcacctttgatattatgttactactggtaggaaatatttgaaaaaagattgcattcagatactcaagtcagtaggatgcaatgtaaggtaaaaagaatatntnttttaatgagaaataattgtacgttatcttgagaatctaaccctatatatggnggtaaanaacattcatagacattatc

SEQ ID NO: 72403 - DNA, 438 bp, Glycine max
  unsure (1)..(438): unsure at all n locations
atatcatttaagtcttcatgaattacattctcccccttttggatgatgacaaccaccttgaggttatgagcaacaacaaaaaanaaatatctatttgcatatagtttactcccccttggttttgcaatgaatgcttatatgagacagttgaagattcatatttttcacatgtaaacaaattgtctcataaataatagataattnttcatactaatttatcttttatctttctctcccgctttgtcaacatcaaaaacaaatcatgaatagagagggagaaaatgttaccttcttgttgtaatgtatgagaatcaagtgatacccaaaaagcataaaccaatcattcaatattgatcaagcaaaaacaagtatagttacacattcaataaaaacacanntcaacacaatcaatcaaatatacaatctagagcaatcaac

SEQ ID NO: 72404 - DNA, 468 bp, Glycine max
  unsure (1)..(468): unsure at all n locations
tctctcctaaaatatggggagggntgctctcttgtcttgtgtagcttctaaatctgaagaggacatcntttgtaatacaatgcttcacttgttcttgaaataactgggagaaaaaaacaacaaggcttagaacgaattattgcacaacgaatatttttgcgacatacattaatattgttgatgggtgttaagaaattagtaagtgtgaaagaaaatattattgcaatacctaaaaccggtaagaataatagcataaaatcagggcaaaagaagctcagtcatctctaacaatggtgatatcaataaaatgagctntatgcttaatgttccttgtaaactatatgttagcaaaacatgaaagtatattttatgtagactaaatagtatgttggaattgtataaaaatcgaattatagtaatgcaaacatccactgaaactgcggtcacaaaatggaagatatgtattat

SEQ ID NO: 72405 - DNA, 493 bp, Glycine max
  unsure (1)..(493): unsure at all n locations
ataatctctatttaagctatatctttattctctatgtgatgtaagactataccaccaccctggatgctgcaattaaggcatcctcccatgagaccgtaactactacaccttttcaatagaaagaaaagtaatagagatcagtcttggattttggagtagaaattggtaggtagagtccatgtctcttatatacatggggagatagggagagaatcatacttntgtataattctatttattgatccggatctttctcgatattgatcagagggcattaattgcaatactgttcttatatctgttgtcgatagagctaaataataaatactagattcttttgcttcacttatcctccttcagtattgttattctaccaaataaggcctaccagaaacatgaatatcatgaaggagtgaggcatgagatttctattaaatagcatacacgcaaaacacatgaagaataaactaacgagatatatttgactactatt

SEQ ID NO: 72406 - DNA, 423 bp, Glycine max
  unsure (1)..(423): unsure at all n locations
gcgcaacactcatgggctaagcgcgaggaagactttggaagaagatgagttgtcaggttcgcttagcgcaccgcttcatctcacttatcgcaccgcttcagtccatccgctaagcgagaaaggcacgcgctaagccaaaattcactaatgtgcgctaagtgatccatatttgcgttaagcgcacgagcacaaacaaggccacctatttaagccaaaaatcatattttgtgaaggggagttgggctgngattcaaagctttgcatgtctagatattctagagagagaaaggtccacagtccagagagttttgagagattttgttgtgtgaagatctgcagagactagagctttgagcangagccggcttgagagcttgagatgagtctgtgagtgatngtgagatcctagaggtgaatgagaca

SEQ ID NO: 72407 - DNA, 495 bp, Glycine max
  unsure (1)..(495): unsure at all n locations
gacgcgaacagaggcagaangaactngattataccctttaattaattcttctctagatttgaatattacctcgtcaccattagaatggacagtgtcattatgctaaagatcctcatcatctaaacttgcatctacagctggttctgctttactggtggacgcattagtcatcagacacaggttggcttcttcctcattgtcctcattaaacaatgaatcatctaagtcctcccaagtgcttatgaggctctttttttttgacttgaagaatttcttctccttatccttagacttttcaaggccagaacattctgactcgaagtgtcctagcttcttgcactcataacatatgactgaacttctctccttcttgtggaaggatctcttaaatgaattattgaacctgaatgagtcttgcttgtcccatctttctttattttctggtgaatagacttaactcatcatttgctcaccaaagtatcatagtcagattct

SEQ ID NO: 72408 - DNA, 441 bp, Glycine max
  unsure (1)..(441): unsure at all n locations
taagctgtctctgtaatagtgatttgtgtatgtaactgataattaatttcattgtaattgtctatgtcggaatacaagcgtgagataacatcacatcatataaaactgagcatgttgaacaccatgttagtgaggatagaatcttaagtcttaagagtttgggttaaaatattctgtcaagttcacttatatgattatttatgggtcaattgtggtaaatcttccttgtttaaccctcatcgatntcacaacgtaacccgatgtgagacttcgcctcacactttgatttcaacaatctcttcttcaagtgtgagtcttttatacatgataatctccccattgatgggaagccattatcattcgcaagtattcaatgatgacctgagagcttaatgagaacgttggatatcatataagtgagaaaacgatccatanacatga

SEQ ID NO: 72409 - DNA, 513 bp, Glycine max
  unsure (1)..(513): unsure at all n locations
tctcatgtcacctgcggcatgcaagctntgtgaagctcctgtttagctnntacccgatttactcataccattgaagttgaatgtgatgctagtggagttggcattggggctgttttgatacaaaacanaaggcctatagcttatttctcggagaaattgggaggagccagattgaactattgcacctatgacaaagagttctatgccattgtgagagctcttgatcattggaatcattatttgcgttctaatcactttatatngcattcagatcatgagtcattgaagtatatcaatgggcagcagaagttgagtccaaggcatgctaaatgggttgaatttcttcaatcttttaatttctcttcaaaatacaaggatggtaagagtaatgtggtggctgatgcactttcgaggaggtatgctctaatttcaattcttgagactcgtttacttggtttcgagactttgaaagaatattataaagaagatgtggattctggtgaaatatactct

SEQ ID NO: 72410 - DNA, 127 bp, Glycine max
  unsure (1)..(127): unsure at all n locations
tggactcgggaaggttccaagttagtgtgccaggtaacagctaccccagttagactttcttggaggaatgatcatcagctctcatctttgcgtattccccatcttctgcaatacatcntagatggtt

SEQ ID NO: 72411 - DNA, 483 bp, Glycine max
  unsure (1)..(483): unsure at all n locations
agcttcaactnttattattccagttatcgttaattctgttatntgattagtacgctctatttcctagtaattgatgacatgtgtgatagtggtaaatattaaaccgtgtttcttactcacaaagtatcagaatacgcatctaaagcatcattaggcaaacaaaatcaatacgtgatatttattggcaaaattctaggatagatagattcattatgcttgtcagcacacaagatactcaaaacactcctctattatgttatctctttgccattaacaaacaatgcatgtatgactatgaagcccaatggtggtgttaagcatgtatcatactaatttagtccttccagccaatagtgttgttcagattggttaatcaggttcaactattcaaatttattatctctctcttaagtgttgacactagcattaggcattgcanatatcatattgctatggtgcatgagtagacttataagaatagat

SEQ ID NO: 72412 - DNA, 331 bp, Glycine max
ctagccctgcaacaagtcctatggaagtagacacggtgatggacaacataatccgcggtattgtgagtagcattctgaaggatgcttctgtgcctgatgctgagaaagatgttccaacatcttacaccccagatgtttctgtgcctgatgtcaataaagatgttcccaccattctccgctccatatgctgaagccctcccttcacccagtgaagaggaatcatcagaagaagaggatcaagcctcagaggagacccctgcaccaagggcaccagaacctgctccaggtaacctcattgacttggaagaagtcgaatctgatgaagaaccca

SEQ ID NO: 72413 - DNA, 439 bp, Glycine max
  unsure (1)..(439): unsure at all n locations
agcttaagagagganatatatttgttagacacaacttatacttgtatgaaggtggcctatatatgctagaagaattgaagatatgaagagcaatntgaagagctcattatttcattctttgtgttaaaaactctatgtgtaaatgattggtaagtttagtaaagctcttaaaacactttgttcatcttgagagaaaagactaagtggtgaaattggttatccgtcaatcaaatgataaactgttagtcattgtgcaatcaaaccaacatantttcatatntgtgttagagccagtagtggcttggtaggacaaagaatacttgattgtacaagcttggactaaagcttgagttaatgagccanaagtgacaatgataaatacttataacttgttgaagtaagtgaaacttggtgggttttcaagaattggacatagtct

SEQ ID NO: 72414 - DNA, 485 bp, Glycine max
  unsure (1)..(485): unsure at all n locations
gctcgatatgaggaagcgtggaagagtcagtcttactactattgtntgttgaccataaagtggtacctggagatatgtcgcggtggtcacgagaccttgtggacgtcaggtggtgcgccattgcccataaccaagcttgactaatccctacccaacccgggcatagtcagtcagtgagaacctgtgacgtacctaagcaggcgagctcctgacagtcaaccaattaaagaacaatatccactaaacaaggaggcttgtgtggcggctggccagctatgtatcttgngtggtatctgaaaattaccctctggtaatcgattaccattcgtgggtaatcgattacagggtttaaaaatggagacatgatgttaagtagcttctggtaatcggttaccaattgtgtgtaatcaattacacagtatgatagggcactggtaaatcgataccagttgtgtgtaatcgattacatagtgctacctgctact

SEQ ID NO: 72415 - DNA, 485 bp, Glycine max
  unsure (1)..(485): unsure at all n locations
agcttatacttttttgactatgtatntacagggaattaggctttgagttcagcaagtcattcgtaaattgatgatgatgatgataacttacacgagtttcttgaggggatgttttcgtgatcctagctaatttgattgcggtaacaaaaggattcatcaatagagttaagaacaactcctattgagttcttgtatttgagatactctaaaattgaactaagctaaaataaacatgtagtatttaacttaaacttatcatatgttttatattaaattctcaaattaagtaatgccacatgatatcttttttacatttacaacaacaagttgatatgagatctatatagaacaagttgcagaatttcaagataacatttacaaacatatatatttgatatgagatcttactgacaagaataaaagaaactaatttaagtaagaattgcaacatgaacatattcctcatngaatttaacgataatctt

SEQ ID NO: 72416 - DNA, 495 bp, Glycine max
  unsure (1)..(495): unsure at all n locations
tgacgacgttatcatatatgtacgagaagccgtcagcatccatcaaagtatacttgatgcgtcgattgttctgttggatcaagtggcctcggaataattaagaaggngggttgaattaattatgaacgtgtcttgactaattaaaaatttatccttcttaatgttactagattcaattaggctttactactaagttatgagatagtaaagaacagaaacaataacttatacaaaagtgaagcgganataatagtacacagcggaaagataaagagtgtatgaaagaagaagacaaacacaagatttatactatttcggcaacaacccgtgcctacattcagtccccaagcaaccaccggttcttgagatttccaataaccttgtaaaatcctttacaagcaaagatccacaagggatgtaccctcccttgttctctttgaacaaccaagtggatgtacactccacttgaattgatccacaagagatgtaccctct

SEQ ID NO: 72417 - DNA, 382 bp, Glycine max
  unsure (1)..(382): unsure at all n locations
agcttgcctcanagagatccatgaangataaagcggttgaaggaaccacttccactcccgaatatgatagtcatcgttntaggagcgctgagcaccagcagcgctttgaggccatcaagggatggtcatttctccgggagcgacgtgtccagctcatggacgacaagtataccaatttctaggaggagatagttcgccggtggtgggcatcgctgtgtacccccatggccaagttcgacccagacatagtcctcgagttttatgccaatgcctggcctatagaggagggtgtgcgagatatgcgatcctgggtgaggggtcagtggatcccatttgatgcggatgcccttcaccagttcctgngataccctctagtgctgga

SEQ ID NO: 72418 - DNA, 461 bp, Glycine max
  unsure (1)..(461): unsure at all n locations
atactcaagcgttgcggatatggtcttcgacagtgaaaggatngatgtgggtccgattagatgcaaattgatcatcctactangacgactgagaaaacttgtgcaaatgaatagggtgagatagagggagaaacccatgctgtgactgccattcctatactgtcaagttgtccaccacccagttatccacaaaggtcatccctaaatcaaccacaaagcctgtgtaccgcacttccaatgacgaagaccacctttagcacacaccanaaacaccaacaaatagggaatttgcagcataaagcctgtatggttcaccccacgttccgttgtcatatgctaaacttgatcccatatccactcgataattcaatggtagccataacccctaaccaaggttcctcaacctccacttntctgaggatacgactcgaacgcaacgtgtgcttatcatggaggagccc

SEQ ID NO: 72419 - DNA, 489 bp, Glycine max
  unsure (1)..(489): unsure at all n locations
agcttccattntcaattactagcgtgtagatatattactggacacaatcgaacatacgagtaaatagttattgtcgtttgaatatacttcgagcttctgttttcaataacgagcgtctctatatactacgagacacaatcggacatccaagtaaaaatttattcctgtttgaatttgctacacgcttccatattcaatttcaagcgtctagatatattacgggacacaatcggacatctgagtaaaaagttattgtcgtttgaatttgctcagagcatctgttttcaatttcgagcatctcgatatataacgggactcaatccgacatccgagataaaagttattgtcgttggaatttgcccagagcttctattntcaatttcgagcgtctcgaaatattggagcactcaatcggacatcttagttaaaagatattgtccgtcgaatatgctacgagcttctgtttcaattacgagcgtctcgatatac

SEQ ID NO: 72420 - DNA, 242 bp, Glycine max
  unsure (1)..(242): unsure at all n locations
actcggatgtccgattgtgtctcgtagtatatcgagcgctcgttatgaaaacagatgctcatagaanattcaaacaacaataaatttttattcaaatggtcgattgtgtcccgtaatatatcgagatgctcaaaatngaaaacgaaagctcgtagcaaatgcaaaccagaataacttttaactcggatttccgatttagtcccgtaatatatcgtgacgctcgaaattgaaaacataagctc

SEQ ID NO: 72421 - DNA, 484 bp, Glycine max
  unsure (1)..(484): unsure at all n locations
caagcttctttggaatttgaacaagcaattaactcctctttcagaaccatgctatgtgctcgcgactggtccctgtcttcccttcgcaacttgagttcactattgctaccccatagagctccgcaaaatttattccggccatactcttccttgcgagccctcttggtctcttgttcaagggctcttacggtaatcggattctcttcccgtaacccggcacactccttccgaacgtgtgtagcggccaactngaacttctccttggcaagtttcgcctttcctaactcgcttatgagagcttggacttcttcgtcctcttccggtgcttcaaaactctcttcgctgacgacttttaacttggggagccaatctatacctcgtatatgaaccttcagccattcgtggtacccaccaatgatgccattacgaatgcctctaagttcttgatctatncttaatgnggtctcccatgcctttatggatc

SEQ ID NO: 72422 - DNA, 438 bp, Glycine max
tgcttcagaatgttgcacataagggataaggtctatgtggtggttggtagaggagcataaaccacagagtctggcgacaggtgtagattattgattcatggccagttgggttaccaggttaaccaaggcatctagtttaccttcaagcttcttagtctcagctgatgaagatgaatttgtggctacttcatgcactcctctaatgacaatagcatcacttctggcactaaattgctgggagtttgaagccatcttcttcaattaaattttggcttcagcaggggtcatgtctccaagggctccaccactggcaacatctatcatacttctctctatgttgttgagtccttcataaaaatattacaggagaagctgcttataaatctggtggtgagggaaactggcacataattttttaaatctctcccagtattcata

SEQ ID NO: 72423 - DNA, 481 bp, Glycine max
  unsure (1)..(481): unsure at all n locations
agcttcttttggaccttgaacaagcaatcaactcctctttcagaaccatgctatgtgctcgcgactggtccctatcttcccttcgcaacttgagttcattattgctaccccatagagctccgcgaaatatgtccggccatactcttccttgcgagccctcttggtctcttgttcaagggctcttgcggtaattgcattctcttcccgtaacccggcacactccttccgaacgtgtgtagcagccaactagaacttctccttggcgagtattgcctttcctaactcgctnttgagagcttggatttcttcgtcctcttccggtgcttcaaaattctctacgctgacgactttgtacttggcgagccaatctatacctcgtatgcgaactttcagccattcgttggacccaccaatgatgccattacgaatgcctctaagctctagatctttccttaacggagtttcccatgccttatggatt

SEQ ID NO: 72424 - DNA, 408 bp, Glycine max
  unsure (1)..(408): unsure at all n locations
tctcagcttcagaaatcgatggtataacttttacacagatgtccgattctatgacataactcatgtagacgctcgaaattgaacaacggaagctctcgagaaaatcgaatggtcataacttttcacacggatgttcgattcgggaacataatatatcgagatgctcgaaattgaacaacggaagctctcgagaaattcgaatgatcataacatttcactcggatgttcgattccgggacataatatattgagacgctcgaaattgaacaacggaagctgtcgacaaatttgaatgctcataacttttcacacgaatgatcgattcggggacataactcatctagacgctcgaaattgaacaacggaacctctcgagaaattctaatggtcataagttntcacacggat

SEQ ID NO: 72425 - DNA, 376 bp, Glycine max
  unsure (1)..(376): unsure at all n locations
tacacatgccctaaaatgaattaggacaccttgctttggttaattaaattacaaaatttggtattattaaaattaatggattgaagctagttggtgaaggacgacaaacctcaacaagaaggctatttgacatctacatatgagaaagtgtggaagaaatatattgaagtctataatcgtacgagcaaattagtttagagtaatttcttcttcattnttgcttaaagaatacacaatatatgataagaaagaactaacccaaaacaaanacaaactcatctccattgaattganactaatcaaagtgacactcanacttctcgatgtgtccttaatgtgatataaatgcttcttggtgtggatacccaaagacatg

SEQ ID NO: 72426 - DNA, 491 bp, Glycine max
  unsure (1)..(491): unsure at all n locations
actgggagaaagagttcttggggtcaagacatgttatgcaatcaagtataatgttacttccttcactaaagcggtgatctatctccacacatatnttatcaatagcaacataaaaaatctttgcacggtaatgatgaagattagtgatagtcctcccttctgctcttgaacgaccccgaaccggtatttcgtcatccatatttggtaccggaatacttttagctacacaaaatccttggacatcggcaaaaaaattattccagccactctctctcattgtgcccaaccgagctttgacaacatcaactaattccatggcattcacaatattaagatcttttctttgcaatacatttgaaagctcgtttgtgataccaaacaactttaacattaacctcaaaataaaagcaaatntaaagctctccattttttctatcaaacctgctgcttgagatggtccacgtccatcttcatcaaccatactaagcacc

SEQ ID NO: 72427 - DNA, 486 bp, Glycine max
  unsure (1)..(486): unsure at all n locations
cacatatcaatgaagtacccatagtatatcgatatacgagaaacatattgaattatggatgcttcataagtttgggtacactactatatatcttatctaactttaaccaactttgtattggttaatacttaataaaaaatattatcacaagtcttttgatcaaattcnaaaaatgttgttaaattataaataaatgttactgatatttttttaatattttatcaaatattatatataatctgttactaaacattanaaatatcaaacaaaatttaacaacataagatatatgaaacatttcataaatatcacaaaaatatattaataacatttattcatcaatttgtaaaaaaaattaaatgtcgtcaaaagcttttagtaacatttntatttagtgggtgataaaaaatattactgnatatcatatgtttagtagtaatacttcaacaatatctatatatacgtaaagtatccaattaagagtat

SEQ ID NO: 72428 - DNA, 424 bp, Glycine max
  unsure (1)..(424): unsure at all n locations
tgtaatacaaatatatctntgctattcatatgattatccctttatttatatgtggattaatcgctatccatctggattgcataagagtattagtacaaccagaggctatccatgttgctttctttgagatatagacacaagaagagaacaatgatttaaaatgcanaacccattggtacatgccaggaagagagagagatattggcgccaaagtttgttagggagaatggacacatgttaatggatgcggaaataagggagaccggcaaagcatgcgaattaagaggccgaatgtgctatataaggattntcgtaagaagtgagggacgacatatagaatggaaaccttctctttatatctctgcttttctctgattcccttactggcgctctatacttctaattctaattcttttcttagtta

SEQ ID NO: 72429 - DNA, 494 bp, Glycine max
  unsure (1)..(494): unsure at all n locations
ccgtgatcctctatgtcacctgcggcatgcaagcntttgcatatggatctgnttggtccttctagatctatgagaattggtggaaattattatgctcttgtcatagtagatgattattctaggtttacatggactctatttcttgctcacaaaagagatgcatttcatgcttttaagaaacttgccaaaatcattcaaaataagataaaccttaacattgcatccattagaagtgatcatggagggggaattgagaataaatactttgaattatttagcgatgaaaatgggatagaacataatttttctgcacctagaacccctcaacaaaatagagctgttgagaggaataatatatcattagaagaattagcccgaatcatgcttaatgatacaaatattcttaaatatctttggcccgggctatttatatgcctgtatataatgaatagagcattattagacctatttatagaagacaccatatgaactat

SEQ ID NO: 72430 - DNA, 447 bp, Glycine max
  unsure (1)..(447): unsure at all n locations
attacctaaaccacctttcctcatgtcagaccatacctgccggaacactttgatgatgagatcatgatactcatctgcattcaaagtcagataacatgccaaaagatcatccatctgctttgaaacattctcatcattcagcagcttgccttcttctccaagaccaatattatccttcacctttaacttcagtgtgccttctcctttaacttcatatgtgttgaggtaccttttattaggttgcttagactttggccttgccttggtctttcagttgacattatatggataggttctgtgacagctttaaaaatacaacacctgctcaattaccagagaacgttccagagtgttgaataaataacaatcttctgagtattngagtataagatntgcatacatctatgcaatattttccagcttgctaatcatgtgtcagaaatatct

SEQ ID NO: 72431 - DNA, 503 bp, Glycine max
  unsure (1)..(503): unsure at all n locations
gcttccttaagaagattccttaagaagctagagcttatctacacatacctctattatagctaagctcacctccttgagatgagaagctagagcttagctacacacccnctataatagctaagctcacccccatgactaanaacatgaaaataacaaaaaaaagtccttattacaaagacaactcaaaatgccccgaaatacaagactaaaaccctatactactagaatggccaaaataaaaggcctagacgaaggaataacctattctaatatttacaaagataagcgggctcatacttagcccatgggctcgaaatctaccctaaggctcatgagaaccctanggcctttccttggatctctagcccaatctacttggagttttctagccaatgcccttgcgggataggattgcatcatacttacccgttgaagactgaagaanacgaagaacgaacgatgaatgttgaagaacggtcgcgaatcttcgcgtaagtactcac

SEQ ID NO: 72432 - DNA, 444 bp, Glycine max
gtggaagtttgtcccctatcaagcttagtttaacataaggatcagaagttcccagcaaatccatgtttaaaagcttttgtgcacgaacctcattcgcatgttatatcctcacaagcttctttattgccaccctataaaagatgtgaacaaagcatcagacatcttcatagagcaaacattgttatttaaacttaaactttgtcaattcatagtaaatttttaacaatagtgaagttatgttttaaataataatatagttctagtaagatatgggtgtttgcgtgtgtcggtaagtgtaccgattcgcacaagtagtatataacggtaagaccgactatcgtatcttcagagaatttgtttcacctagaccatgtacattcgatatgtcaagcacttatacggataaaataaggcaaatagtgagttctgtactagaaaatctat

SEQ ID NO: 72433 - DNA, 483 bp, Glycine max
gctcactacacttcttatttctagacggaaattcaatatataggcctcctattcttaatggagaggagtaccagtactggaaaacactaatgcctactgtcattgaggcattacacttatacatttgcgaagacatataaggtggaccttatgtacccaccatggtggctggaaatgcaacaattgagaaacctatagaagagtggactgaagatggaagaagattagtgcagtacaatttaaaggctataaacatcattacttctgccctaggaatggatgatatatttagggtttcaaaatgtaagagtgctaatgatatgtgggacactctacaagttacacatgagggaacaactgatgtcaaacgatctatgataaatactttatctcatgagtatgaattatttatgatgaagacaaatgagagtttatcagatatgcagataagaatcacacatatagttaatcatcttgcatcat

SEQ ID NO: 72434 - DNA, 52 bp, Glycine max
ttatgcttttgaaacccagtcctttccagtaggtgaattcctctagcaggta

SEQ ID NO: 72435 - DNA, 331 bp, Glycine max
  unsure (1)..(331): unsure at all n locations
tttgaagaattgatgtacactctctccttgcgcaagattgtatttgttctgtgtcaaacaaatctcgtctaggtctgccacagcaacgtattataaatgtataggatggttatctaactgatnttaaatgatgataaccttacatatgaatataagtctgttacaagtgcttgtccatctgctcacctaattatggaacaaatgggaagagaaaaacaccacatccgaaattcttggtcacatttatatcttttgcatgcacttatttctgtgtttaaaactatctgataatcgtatcatgtatacttatgctattctcactgcgagaatg

SEQ ID NO: 72436 - DNA, 436 bp, Glycine max
  unsure (1)..(436): unsure at all n locations
atccctagagtcacctgccgcatgcaagcttcttcaggtgtcactcctatcagtctctnggttgtgctattgtaagtatatagactgttgttgcagctgcttcactccatatgaaatgatgctgcttcttattctcaacatgcttctcaccatattcaggatagtcatattgcttctttcatcatcaccattgtgttgtgtgtattatgtggagggaactcatgagtgatgcctgcctcatcacaagactcagcagtattcttggaagtgtgttcaccacctacgcaagttctatgtgattgtatacagtgggcactacaatttcttctgaggcttaatattttttaaaatcatcgaacctattcttcttcatgatatatattcccagtcattttttaagtcatcttgaatgtatcaagacttgttcctccttgga

SEQ ID NO: 72437 - DNA, 495 bp, Glycine max
  unsure (1)..(495): unsure at all n locations
ttatactaagcttagcntttgtggttatggccatgcataaatcaaatattctttttttgtgtgataaatttagcttgcaattgatgacaggtgctgcccaatcgctcatacgatactttngaatnttaatgctacaatttataaccaacgtttgattttaagatttcaaaagtatataatttggacccttaacttcacgcatacgctgcatgaagaaaactggctagcagactggcttttcccatcatgctagcagtatgagttctgtgcataatatttttagtatcccacgataaggtattagcgcatattataagaagaatgtatggttatctctgctattagcattcctttagcgtaattatggctttatgcctccagttaagggaagagaagaaaacttacaaccacgttgatttaagattcaaaagtcataaatttaaattcgaatatatcacatattaatctatttaactactttatgggttgtacaca

SEQ ID NO: 72438 - DNA, 398 bp, Glycine max
agtctgccacccatctcgtttatgtgagcagggttgttttcttcagaagcaacagccttctagaggaatcttctggagggcccaagtgggcctggttgctatatgcaccctcattattactaagtacacccactgcctatttttggtgatatctttttcgtaaagatacagatacttactaatatcgtaacgatacttgttttctatccgtaatgctacagaaccttgtggattacataatcattcacttcttgacctaccgaatatacaggaactcactaattggcaaagatgcttcatatgattacggtgtgtaatgaaccctacatattgtgcatcaatatttcttttgtttcccgcatgctccgtaatttacaaattggctaatgattggtgca

SEQ ID NO: 72439 - DNA, 505 bp, Glycine max
  unsure (1)..(505): unsure at all n locations
gacactataatactcaagcttatcgagaccgtgacacctcaccaccttaccttgtacatgttntgttactctntcttgtctttaacatgttgtattgaataccatgggtgagattggggaactcgtgttcactgcaaggatctttgtttgtttgtcttgcaaggatatggtntgtggaacttgtgttcgctgcaaggatttggtttgtggaagtcgtggtcactgctaggtctgtatggggtgctcacattgcagtctgtatggggtgctcagtcgtgctcgcagggtctcattttgagtaaggtgattcagattgctagttgtcctttgaatgcttaatggataggtagctaggtgtctattgtaatacgtatagcaccatggcaaatgtaacaatgttctgggtnttcttttattgatgtgtgttttgagctatgaggagtcactgtctcacacgaatttttaaaacaaggtaatagaaattagaatagtactcacattggta

SEQ ID NO: 72440 - DNA, 140 bp, Glycine max
cgatctcattcaggttagttatcttcatcactctgtgtacacagtcaattaatattaagcgcggatgtttgaatcatagagagattgtcgaatgatatctttatttttttctgcacagttggtgtagcaagacatgatct

SEQ ID NO: 72441 - DNA, 490 bp, Glycine max
  unsure (1)..(490): unsure at all n locations
acactataatactcaagcctttcctctagttgttctattaagggtttctaagcgttagagagaagtttaatgtgatagagcctcaatttcactatctccgagcgagggacatttctctctctatttgggtgtatttggaaaaaaatatggttttgggagaggaagaaaaggagaatgaattgggtggaaaagagagtgtaaaaatactctgatcctattatntactctatttttntggtttattattntataanaaatggaatttattttactcttttattaaataaataaccaattaaaacatcattttattttctaaaatatcattttactctatttattttctaatactatgagacccttanttaattaacanaaactatttcctctcatgtattntaattataaaaactttattaagttttaaataaaactctttctatttattttacgaanaatgaggtgttatatcaatggagtggagtggagt

SEQ ID NO: 72442 - DNA, 449 bp, Glycine max
  unsure (1)..(449): unsure at all n locations
aagcnnttaaattgaattataacgttcaatatctgctggtaatcgattaccatatatgtgtaattgattacatagtgcanattttgaattcaaaatttaatggctggtgtaaatcatttttggccactggtaatcgattaccagagagtaaatctctcgaaaagactntntaacttatatttcttagcaaaaccttttgctacttcaattangaattcccttcctatntaatatacctttcctaagactctagagactgtcttgatcatccatcttgaatatctttaatttctttgtcttgaataaagctntgagaaacatgtgatcctttggcatcatcaaaacattcagctngatcctttgtctacattttatactagttcgacaacaactcgtgactacatccagtccncaagcgacctacggtacttgagaattcttttcatctt

SEQ ID NO: 72443 - DNA, 462 bp, Glycine max
  unsure (1)..(462): unsure at all n locations
tctgcatgtntagagagttctagagagagaaaggtccatgttcgatagagttngagagatnttgttgtgtgaagatctgagagcttgaagaggaagccgctctgagagcttgagatgagtttatgagtgattgtgaggtcttagaggaggaggagacatccccactacttgtatttctgcaatctctcatctttctcttctcttttttgtaaaggaatctttccagttatggaaagctaaatcctctgttggatcttccttgtaggtacttgatgtaaatatctttntatctatctaatgatgttttgtgtgttctctgtgctatcagtatttcattctagtatgcttttaccttgatcacataaatgcatngtttgttagcatcattcaacagtggaaactagtctgattcttagaacangataggatatggctagtntgtcgtactatcacgagggatcg

SEQ ID NO: 72444 - DNA, 482 bp, Glycine max
  unsure (1)..(482): unsure at all n locations
agcttatcaggtattaactatataaaancgtaaggaataactctgtataagaatgaactgaaaataaataaattctggtggataaaaatcgtaacatattgtgaaatcgttaactcaatgaacaaagagggactaacagtaacttttcgaacatttgagggactaataaaaataattttttttgagaactaaaaaatacttaccgaaatttgaaagattaaaaatatatttaagccttaaatcaatcttataaaatcagcttgtaagatgaaagatgtcccacacttatatacactaatttgactatatctctagacaatgtgatctcgaacacaacctctcatgtcaaagataggatatctctggcgtgaagttagcaggatnggaagtttatgggtagtgtgatagatgtccggtagagggtggcacaataggcctaacaatagatggctaggatacactttgatatcaatcttaaatgt

SEQ ID NO: 72445 - DNA, 442 bp, Glycine max
  unsure (1)..(442): unsure at all n locations
gtgcctgtagggcttgtacctcatcactntcttccaaagctttaacctcattgtctctcacagtctttagatatgggagccaatccaatccttgtgtccggactctcagccacttatgatagtcgccgatgatcccattactgcttcccctaagctctctgtcctttcttcacgccgcatcccatgccttgcgaactccttggagtaccctcgcgttgtggtcactgaaacccacgtgcgatgaaaggcgtgatgctttcgtctaatggcactcctctcatggggtagccaagctgtcttatggcgaggacgggattataattaatacaaccccatgttcccatcaagggaacattnggacatccttcgcatgaagatagaatcctgagtcttccttccttctagcgagggaaccaattaacagacgcccctccatgctagc

SEQ ID NO: 72446 - DNA, 473 bp, Glycine max
agcttgtggcaaaagtatactgaaatgaatcatctatttcaattcatatggtgatatgaatcagctaatattcagtgagcaatgtcgatatgcttatgatgatgcaagtgctgttgacacggaattccccttttttctttttttttatccatctaaactagtgtacatcttaatgcctctgaattgaaatttgcagatttgaatgtgtgatctactactgatatgtccatccctgcgaggtctattatagccttattaatttgttaaacgcgcataaagcaacagtgatttatatcatttgtcagattagcaatgacaaagatgccatatatagttgaaactctggctattctctttatcattcatacaagttagtgatcgtgtatttcaaggagatgcttgtatattatcttgaacattcatcagaagattaagagcgaaaaaaaagtgaccacttagcattttacgttgat

SEQ ID NO: 72447 - DNA, 474 bp, Glycine max
  unsure (1)..(474): unsure at all n locations
gtttctctcttntcatgagtgtttggctactttcttctatgtctatgaatngacctcttcccacacatcatgagtgttntgttctctcagaatgatccaactatnttgtttgcttgcctcatattactcaactactggaagattactgctaatggacctctgctgtgttgccacatctgagttactgaaatctgatataacctacagtgtcacatctgagctacttccgccattgtcaagtctcacatcagaaaaataaagatctggatataacctacagtgtcaccacctgaaaccaattagcagagttatttgccaagtcacatagagggccttgggttgattntactgataccaagcttaggacatacgatatatatgctctatgcttgaaaggaatngtagacttactgatctangtatatagcatgtgtatatatatatatatatatatgggtgcctgtagtaccatca

SEQ ID NO: 72448 - DNA, 527 bp, Glycine max
  unsure (1)..(527): unsure at all n locations
atcctcttagtcacctgccgcatgcaagctnggtgttgttgttgtggacccctatttgaaaaacctccataagaagtgtaagaatgacttccatanaagtgatagaaggacctacaaaagaagtgttagtggaaccagaatnttgtggtctccagccataaggctgatttgaacctgagccacctttatagccttggtagcttccttgaaagttttggtgaggtctggcttggttctgcagataatgggcctcctcttcttgttgtccatcaccaggtgctgaatagtggccattttgatgcttacctccacagaaatcacatctcataaattgttgaacttggtgagctngatgtgntttctgtggtccaccttgctgatattgctgaggaagttggcttatctactttgttaagggctcaatttgttcatcaagaattattntgagctagaatggcatttgagtgccaactncattataccttntctttgagttggagctctatcttgatgactntgataatcac

SEQ ID NO: 72449 - DNA, 493 bp, Glycine max
  unsure (1)..(493): unsure at all n locations
gctcgtagataacactgcggctgcagcattcaatgctgaccttntccatcctctcttacccttgttgcccaaattcctttgatctctaagtacatcagcccatacacgttccatttccaaattccatgtaaaataacttcttgtttcctcattattgtttcctaaaacttttcttttgtccgtcattttttcattagacgactccattgaagttaatgtcacttaattaacctgcacataacaaatagtagatatgacctacttcattcatttgactaattcactgcacaatcatggaaaatatttcaagcaaagttnttatgcaatagcaaagtacataaaagtctatcttcaataganaagtacaatagttacaaagcacacaaagtttgtcagcaatagcaaattacatttaaaaagaactatccataagcaaagnttctcctaacttgatagttagcaaacatattcatagctaatgtatctcgaaatc

SEQ ID NO: 72450 - DNA, 520 bp, Glycine max
  unsure (1)..(520): unsure at all n locations
accgttatctcttgtcacctgcggcatgcaagctnggcagcttgctgcttgtgtcaatgatgtgctcgagaganacttggaatcttcgagtaccacgagtcatgacccacgaggtccatgacgagcttgagagaagccgcaagtccaggtgagaattatagtaaatttgatggtgttatctgccaattggttagcttagtgctctaagtcttctttctggtgttgtgatgcatctgctttantggcttttcctaaagctnggataacaaacttgtctttgtactcgtcagctagaatattgaaacaacacacactgaaggacatgatatatttggtctggtcagagatcacccaactaatatatattgagatgatgaatgatctagattttcgatttctttacattggtggaagtaacatttaactgttaatcactattgtatatctattttagaagagagaaactatttaccattactgttccaagcatttgatgctgaccaaagttagatactcactt

SEQ ID NO: 72451 - DNA, 317 bp, Glycine max
  unsure (1)..(317): unsure at all n locations
gtctaccaatgataaaagagaagcataaatgataagcgcatgatgggaattatggtggagtttgttagagaggagcctatcggaatggacaggggacaacaaatcattggtgaaaaaggagtgtggaaagtattgggagtggagggaatattatgtaaggagggaaggagtgctaccagaatagacataaaatgtgtaaggggatatanagagggtttggattatggcagagtatcattacttctctgattatatacttgtttttccattactctttgttattcatcttgtttctgttactggatatatagagcact

SEQ ID NO: 72452 - DNA, 356 bp, Glycine max
  unsure (1)..(356): unsure at all n locations
tctctaagcactgagctgcaacttaaatgagttagactgcaacacttctgttatgtttangcatgtattatctcanatgatagctgtagtactatgaggaaagctgcttcttgagaacattagactgacaactatttattctgtcctaaagctgaagactctcagtactatgatttatggcatctacagtggcatcgggaacagggggagcctgtcattgtcagcaatgtgcttgaatgtaccatctggattaagctgggaaccgcttgtcatgtggcgtgcattatgtcatgtaactaataccaagcatggccaacatttggcggagacaacaatagagtgctttcatagcactg

SEQ ID NO: 72453 - DNA, 387 bp, Glycine max
tagatataaataccactctaatactcctaattttttatgcatacatgtatataaacggaatttaaagaaaaatattatttagcacaactatatgtgaaatacatgagttccgtgattagaattatcactattggcaaactataaagttattatggcggaaggcgtggaagcgggggtaacaaacagcctcattatgcctcacttcattgatacatagtataataaagaatcaaaacatgttatctagaaacgaattattctatagaacagataaataatcactttcacttcactacaagacatatgtaattaaaagcgtgggatacagagctatggtattatatatataagaaagcttgcgttcctcccagtatcttgcaactccca

SEQ ID NO: 72454 - DNA, 479 bp, Glycine max
  unsure (1)..(479): unsure at all n locations
gtggagctgacccatcaactgccctatctctttagactggtggtttcttgctcttgaccttgacttgatagaacctctttntaagtgaaggcatttgacttgatcccatgttatactaaagtgaacattctggaaagcccaagtgggcctggttgctatttgcaccaccatttttactaaatacatcccccttgccctgtttttgctgattctttttctggaacgttacagaaacttacgaatttcgtaacgatacttattgtctttccgtaatattaccgaaccttatggattacgtaatcatcccttttttgccttccggaatgctacggaactttacgaattgtgcatttacacttccttttgacttccggcatgtcacggagattcacgggttgtgcaacaatgctttctnttgacttccggcacgtcacgaaacttcacgaattacctaacgatgtgtgccaagtacctcgaag

SEQ ID NO: 72455 - DNA, 505 bp, Glycine max
  unsure (1)..(505): unsure at all n locations
gcttagcaccactaggcgcttagtctaacttaaccactggaactaattggctttcgagcangctcgcctagccttattcaaatatagagaagagattgtgcttagcgacaacgactcgcttagtgcatgaataaaaattcataacaacttaattgccttgggcttagcagactaactcgtttagcccaggcttattcaaacatcagaggcatggtggctaacgagtgtggctcgcttatccgcaaccagaataccaaaatcctcatagacacaaacctaactaaactaactcgcttagcgcggcatgctggcttatcaagttcatacgaactcaganattaaaattgggaatgtaaatgctcgctaagccgaagtgcagtggcttancangttcatacatataagaaaaaattcaaacagatatgatgaacacacttagcgggacagggtcagcttatcgagttcatcaaaanacccagaaattcatccanaattgatgaactca

SEQ ID NO: 72456 - DNA, 413 bp, Glycine max
  unsure (1)..(413): unsure at all n locations
agcnttggaggcattatctttatggatctaaatttgatgtgtttagtgaccataagagccttatatatttgtttgatcagagagagcttaacatgaggcagaggagatggntagagttccttaaggattacacattttgagcttatctatcacccacgtaaagccaatgtagtaggtgatgccttgagtangaaatcccttcagatgtccactctgatggttagagagttagacctcttaaagcactttagagacatgacttttgcatgtgagatcacctctgatagcattaagttgggtaagttgagagtcactagtgaactctggagcgagatccataagggtcaaaagtctgacccacttcttgtagcccagttagagtccatagctgtagggagaaagagtagtgtacc

SEQ ID NO: 72457 - DNA, 320 bp, Glycine max
  unsure (1)..(320): unsure at all n locations
tctcccgatttgctataaatagggggagaagtgaagattaatatgtgttagccncttatgcacttctctttctctcgaaattgctgaggaaaattatttccgtgaagaatatccaagctgaggcgcttacgtaacgtttccgtgagtaattacgcgaagattctcgaccgttcttcaagattcatcgatcgttcttcgttttcttcagtcttcaacgggtaagtacctcaaaccgagcttttcaattcattctttgtgcccgtggtggccacatttggttccatgaatttatatcctgggttacattaactttttatacc

SEQ ID NO: 72458 - DNA, 469 bp, Glycine max
  unsure (1)..(469): unsure at all n locations
atccttaagtcacctgcgggcatgcagcttcgtaatcttccctgtcgccttatcaatcgctataacatcgccgctgctcaccttctacttgccaacgcctcgatcatcttatcgccgaggtcgtaaaccgtattcatctcggtcgtcttgagcgtcagcttcccggtcttcgcagcggcgccagacaccgcagggcggtcgatctggacctcgaccacttccccttcaatgacttcggcttctatcttgatgcggacgccgatggccttgcagaaagcctgagtgaaggcttctgttttggacatttccaatgagaagatttcgctggcagcgatcatggcanagggggtttcgaggccgatggactaggccatgctcatggcgatggcggtcttgccggtgcccggcttggccgcgaggaggaccgcgcggccggcgatcttgccatctttattcatctggaggatca

SEQ ID NO: 72459 - DNA, 422 bp, Glycine max
atactcagctttatatccagcgccagctattttctgcggaccttctcttctattcgtgaccgcaatatagtataaccaccaagttcgggatggaatggtgtggatcctctatgcctatgacactagaatattgaaccatgaaccgaagaaaggcctgagataaaagcaaatatattggctattcattgtgaggccctaattctctactggaggggacaccacgaggcctctgccccttccatcccttgaataaatagagaggaggggcagagtttttggttttttcatgttgtcaaagagttgaacaatgaatatggatgactagtgcttgatcgacttgattggatcatgtaggaacaaggttcaagtctactggaggatgcctcagctgcatacatcactacacttccacttgacaccta

SEQ ID NO: 72460 - DNA, 391 bp, Glycine max
  unsure (1)..(391): unsure at all n locations
agctagtggattatggggcacccgtcatatgtggtactatgtggcgatcgggcgatggcgcaaatcaactctcccactttcacaaatcaaacatgaacccacccaactgagctcacgtactcctacgtagcccttatcctcgttcctctcagcaccgggtccccatcaacccctccaagcttccacaatatccaagaaattcaattccaactatcatgaactaccctaaaccaagaaaacaaggcagaggcagaaaactctgcccaaaacacattccaataccacaactttccttactcaaataccccagtaacattctcttcgttctgattcgttaaccggtggatcgactagaatattttactggaggtttncagtacataaatctaca

SEQ ID NO: 72461 - DNA, 434 bp, Glycine max
  unsure (1)..(434): unsure at all n locations
gatctaacangtgcgagagctaaaaggccctctctttaagcgcatccaactctagtttgttgaaaaggagtctatgaatgccctaaccacatggatcgaagcctttaatgaacttaagcgtagtcattgtattctatctactaaatcttcatcctttgtggattcttgaacaatgttttattattttcttttgatattttacaattcatgtaaactccttttgaacaaattgcactctaaatttctacattatgcaaattgttagtttagttatcattggtctatgtgtttttaagtactttccatttatcgaaccaatataattgttcgtatttacttctcaaatcgcatcagcatttctccgaaaagaaccttttcgataacatatggtccatcccaatttggtgaccatttaccaagaactgtccaatttt

SEQ ID NO: 72462 - DNA, 410 bp, Glycine max
agcttgaagacaagactatacgaggtatcttcctcgtgtatagcaatatctctaagggctactgtgtctacaacttggcaactaagaaactcgtcatcagtcgagatgatgaagttgatgagtacgcttcttggaattgggatgaagaataagtggagaagaacgttcttatacccgctcactacctcagaagagcctgggaagaagacccatgtgaaccacctttcccttcaccacaacaacgagatcaagaactatcatcaccagagtctactccaagatgagtaagatctttggtggacatatatgaaacctgtaacttatccatacttgtacctggaagctttgaagaagcgtcaaagcatgaaatatgggtcaaggccatggaagatgagatacagatgatcgag

SEQ ID NO: 72463 - DNA, 374 bp, Glycine max
cgaagaattcttattgcgggctttagatgaggagaggtaggagcctccgtaaagcgacacacaactcccaccgcatatagaatatcgggccttgtattggttagataccttaaactccccacaagactcttgaagatcgtggagtctaccttctctccttcatcagactgtgataacttcaagccaccttccataggtgtgttcacgggattgcaatcaagcatattaaatttcttcaacacttcttgtgtgtagctttcttgtgagacaaagatatcattctacattggcttcacttccattcccaagtaatatgacatgagtcccatatctgtcatatcaaattcacgagacatggactccttgtagtcttc

SEQ ID NO: 72464 - DNA, 449 bp, Glycine max
  unsure (1)..(449): unsure at all n locations
ttaagcaccgcggctgcagcttgagccaaatcctactaccataacctttattctggtgagaatgtcaattcttaccctcggaagcaaaaaaaaaggggagagggaaaatttccaatcaaagaggaagcaaaaaaggagagaaggaaaatttccaatcaaaggaaaaaaagagaggaaagggaattcccaatcaaagagtgggagaaagcaaaaagaaaagaaagaaaattcccaatcaaagaatgggagaaagaaaaaagagaagaagaaagggaagaaagttcccgatcaaaaaaaaataatatgcagaaaggtctttggaccggacaatatctgaacaatacagaattgtcaccaaatgaataanaagaaggaaagggaaccatgacctanaatggtcttccncctttagttgccaggcaaaatcttgtgcgctatgcaaccttttt

SEQ ID NO: 72465 - DNA, 411 bp, Glycine max
  unsure (1)..(411): unsure at all n locations
ctcattttattntcaaaagatagtcgtatctagtcaagatctgagagaccatacaagtttcctaacgatttctaattatgtgggccattaagtctatcatatgctgacaatagccgagaagcccatgaatctcttcgaaggcggagtatgtgtccgacatctgcttggacttggctaacaagcggggaagttcttgactcccgttcaaggtgagagcaaaccgatccatccacatggttgcctcttggtgtaaagagtcgatcacccttcctctagcctcttttttcgcgtatacttgagcatactcgtccacgatcctatgctcgtgggccatggctagacctaactcttcttggtacttggcgatgatagctagcatgttggtctccgtctcgcataaatgctgagaca

SEQ ID NO: 72466 - DNA, 486 bp, Glycine max
  unsure (1)..(486): unsure at all n locations
atgcttgaatcccagtccanacctcccttctataatcttgatttaggcttanataggtggccttgttcgtgctcgttcgcttagcacacttatggaccgcttagcgcacattagtgaattctagcttagcgtgtgcctttctcgctttgcggatgaactgaagcggtgcgcttagcgaacctatacaggtcatcttcttccagagtcttcctcgtgcttaacccatgagtgttgcgcttagcggacgctcgctaagccagtagattggcttagcgagaaggtgaaaaacaacactttccaaagcttgcctaattaacttgaaattgagtgaagatgattattaaacacacaaaatggaagtactaagtatttattacctatacttaatagaanatacttataacactacaaaataaccatanattaggagagttggatataattatacaagttttacaccaaagtagtcatttcaccgactacagt

SEQ ID NO: 72467 - DNA, 465 bp, Glycine max
  unsure (1)..(465): unsure at all n locations
gtccaacaactgctattcgagttggataatttattggcactanggtttggaaaagtctaaaagaaatgctcttgggtcatggctggaatagaactttgagaaagaaatatgtctgagcttagtcctaacaaattagagtcattaattgtagttattattcaattgataccattgttaggaacaacatagtgttaggaacaacatagtgttaggatgcagagatggcaatgctggtggttggctctaacttggtccacttggaagcttatgaacaacatagtgttctctaatgcaacctttaatgctaacaaactggttgaagatgcaatattcactctatggacgtggctcaggcactttgagaaaaatttactatccatntaatcaatggtcaagtgcattagacacngttttgcatagtaaggatacatatttgactatagatgtcattactgtcccatatct

SEQ ID NO: 72468 - DNA, 464 bp, Glycine max
  unsure (1)..(464): unsure at all n locations
ctcagctggagaaagcttggaaatatttgtcttttacatgcccaactcctttgagtgacattngtattagttgttatattgaatgttgcatcttagcccacatcatatcttttatgcatcatgcatcatcatgagtaagtgagaagaaagtttctaaagttagaaaatttcttcagaagacaaaactctctgttttaatcaactacagccttatcgtaatcgattacacaagttgtcttaagcttgcagagttatgtctcgtattagtttaatcgattacagccttatcgtaattgattacacagttnttgtgagataatgactaatttattcaggagtctctgctttaatcgattaccatgtgatataatcgagtacttctctntctataagtgtttcaaaagtgaacaagaacacattaatctattactttgagtatctaattgattacattggtcttaagc

SEQ ID NO: 72469 - DNA, 343 bp, Glycine max
  unsure (1)..(343): unsure at all n locations
agtatgacacccaccgctttaggagtgctgaacaccaccagcgcttcgaggccatcangggttggtcatttctccgggagcgacgcgtccagctcatggacgatgagtatgccgatttccaggaggagatagttcgccggcggtgggcatcactggttacccccatggccaaattcgacccagacatagtcctcgaattatatgccaatgcttggcctacggaggagggcgtgcgagatatgacatcctggttgaggggtcaatggatcccgttcgatgcggatgttatcagccagtttctacgatatcctttantgctggaagacggtcaagagtgcgaata

SEQ ID NO: 72470 - DNA, 468 bp, Glycine max
  unsure (1)..(468): unsure at all n locations
atgctcaagaaaatngatccattcttgnggacaagacttgcgaacaagctntcttagccttcaagaagaccattaccactccgctagcctaaacaaccccgttgaaatcgaggaattgtcgacaaggagactgctattttggcaaaaacaaaatgaagaaaacatgagggttgaactcaagacaagaaacgaagtctaagaaatggttaggatcagagaagaagcttgtcgcaacctgcccttcggcaagagggcgatgcgtgactcacgggtgcgtgttccaagataggaatacgcgcggagtcgccaccaacgtttatttgaggaaagtgtcgganaaaccgganaagacgtgatctacgaattctttgtgaaaggttcgagagttgtatttacgcacagggaaagtattagcaccccacgcgtccgtcacaagagacgacaacctttaatcaaatgtgcaaatat

SEQ ID NO: 72471 - DNA, 280 bp, Glycine max
  unsure (1)..(280): unsure at all n locations
gctgcnacataatcccgatgtngacaatcttcgagtcttggtggctatgtctttaacttgttcagagagtctgccttggagaaaggcattgttgacattcaattgatgcatttgccagcagttgttcaaggctagtgttagtataacttttacagtttgcggtttcacacatggtgaaaaggtctctttgaaatctacaccaaggcattgagtgaatgttaactcattgacaagtataccacattgtcaccagtatactaaacacgaagatcgattggtg

SEQ ID NO: 72472 - DNA, 320 bp, Glycine max
  unsure (1)..(320): unsure at all n locations
gctatngattatctcctaataccttgtntagattctaggagagcatatggttcaaggcanatttactctataattgtgggagaaaagttgaaaagaatgaaaagaanaaggttaagcatcaacacacacaacaaataagttgtatgttaaaaaaaagagaatataagttgtgctgttacaataaaggtcaaaagcaacttaagaaaagggaatagtgagaaggctatttgtacaaaacaagaaaagatcattgggattagtctangacttgtgctctcttataatctaaacctttcaatcctaggaaaaaccaatgaatt

SEQ ID NO: 72473 - DNA, 353 bp, Glycine max
  unsure (1)..(353): unsure at all n locations
ctgagccaattcaaacgacaataactctttactcggatatctgatttagtcccgtanaataacgagacgctcgatattgaatgttgaacctcagagcgaattcaaaccacaataactttttactcggatgtgtgattgagtcccgtaatatatcgagacgctcgacattgaatgtttaagctctcagccaattcacacgacaataactntntactcggatgtctggatgagtcccgtaatataacgagacgctcgcaattgactgttgaagctctgaactaattcaaacgacaataactttttactctgatgtctaagttgagtccggaatatatcgagacgctcgaaattga

SEQ ID NO: 72474 - DNA, 254 bp, Glycine max
  unsure (1)..(254): unsure at all n locations
gacatgatngctcatgtgggtaaggctcaagctgccgtggaaaagctgaganaagttcttgtgactgattcattagaagaagtgaacaggaaactggacaagttttacatggtccttatcctgagaagcttacactcagactttgatcatgttcgtgatcaagtactcgctggggatcaagttccatccatggattctctcatcactaagcttctncgtgtgcctcacttatcgaanggatgaaatcctactga

SEQ ID NO: 72475 - DNA, 233 bp, Glycine max
  unsure (1)..(233): unsure at all n locations
cctcagcttgcaaagctgccgtggagcgacatcactgcctaacttttaactggtgatcctagctcttgacttgcttgataaactcttntaaggaggctttgacttgatcctgttactaagtgaacaaatctagtgcaataaaactcaacattatatgggggatggataatgatgaaaaatgctatatcagatgcattatgatacggacccagaaatgtctctcttaatacacg

SEQ ID NO: 72476 - DNA, 313 bp, Glycine max
  unsure (1)..(313): unsure at all n locations
gcgcgggtctgggagacaaaggtcaagtggtcgcgatatgcttaaatgatgttccgagtgcatnggaattggtatgactatgccctcctgatttccagctgggaaattggcgagtggaggaacgcctcggcatttacgctacgagcataatgtaaacctttacggtgtttataaactctatagttgggcctaggctctagagtattctcttctgttaacgctttgtgtcttttgcttttgaattataatacaacgagtcttcttcatctggtcctacggctctacccatctcattcatatgcatggttacttc

SEQ ID NO: 72477 - DNA, 339 bp, Glycine max
  unsure (1)..(339): unsure at all n locations
ctactaatgtaatggatcattttcaaggtccaacgccttaaaatgatcaccttttataaataaaaagaatcacttgataagaaagaactacgtaagtctgatttcctcatcacaaattgaggaatacgtatgagcaaagggaaacacccttgtcgaccactaaaaaggaaaaatattaaaagggtattaaggatataaggacatattanggaacatataaaccaaagtcacgtttgcacattcgattaaaagctgccgtcccttgggacagacgtatggggtgctaataccttctccgtgcgtaaatacaactcccgaaccttttacttaaaaagtcgt

SEQ ID NO: 72478 - DNA, 424 bp, Glycine max
  unsure (1)..(424): unsure at all n locations
catgcttgtttctccaaagccataaagaataacacgtatttgcccaaatctcatcccaagtntaattcaattatttaaaagaaacaattacttggttttatttttcaattggtcatttacttttcaaggtggagaatgcgctgaggaagaatttcaagtcttacggcgtgtggcatcattgaaaatgggtaatcagcaattgggcattcattcatggacaacataatgcatcttctgaatgttttaaaaggaagatcctctaaatttcatgcctggattatgcaatttgatagaaatttttgttgaccttgtttgttnttatagttaaaaaatcaatcttgcatgaaataaagagaaataggcttcacttaatagtttacgtgtatctactacactcatgcttatgaaatatttaaagtatcca

SEQ ID NO: 72479 - DNA, 446 bp, Glycine max
  unsure (1)..(446): unsure at all n locations
nganatgagggaatgtggaagggtgagacttcctacttttattcgttgaccacaaagtggtacctggagatatgtcgcgggggtcaagagaccatggagacgtcaggtggggtgctattgcccagaaccaagcttgaccaatcccgacccaacccgggcatagtcagtcagtgagaacctgtgatgtacctaaacaggcgagctcctgacagtcaacagatgaaatgaacaaagaccacatatcactgacgcttgtgtggtggctggccanctgtgaactctgattgatatatgggatatggcctctggtgatcgaataccaagggtgggtaaatgattaccacgcttacaaatgaagacaagagactaagatggtctcttgctatcgataccacaggagtgtatcgattaccagcttgaaaccatgtctgaaactagaggcttct

SEQ ID NO: 72480 - DNA, 481 bp, Glycine max
  unsure (1)..(481): unsure at all n locations
tctatagaaggttcgntcctaatttctctacaattgcatcacctcttaatgagttggtgaagaagaatgtggcatttacctgttggtgaaaacaagagcaagccgttgctgtgctcacataatagcttactaaggcacctgttctagctcttcctggcttttctaaaacttttgagctataatgtgacgcctctggagtgggagtttgacctgtattgntacaatgtgggcaccctattgcttattttattgaaaaacttcatagtgccacccttaactaccccacctatgataaagagcttattccttaataagaccctctaaactgggaacataccttgtttcaaggaatttgcattatagtgatcataatcactatgacattaaaggcaagcagttaacaaaggcatccaatgagttagtactatagcattcctatgtttcaatacaataggagaacaatgtggtgctgatgcttcta

SEQ ID NO: 72481 - DNA, 288 bp, Glycine max
  unsure (1)..(288): unsure at all n locations
ttaatggcgattctccaccatggagatgcagcggaagacaaatgatatgatgtgagaggatgcgccatccattaaagaataagccatggaaaaaaaatagcttcaccaccaagatgagcctcggataagaagcttggaaggaatgcttaatggangaacagaaagagggagagaaagagagagtggggagcacgattattatggaagatacagggagagaagtttaactttgagttgtgtctcacacgactctcattcatcaaagttacaacaagtggtacacatgct

SEQ ID NO: 72482 - DNA, 274 bp, Glycine max
acacaatacgttactcgagctgaggagcccgcattacgagatcgccgaaatgaacggtgaagctccgagctaatttaaacgactataacattttactcggaggtctgattgagtcccgcatatatcgagaccctccgaattgaaaggtgaagctctgagccaattcaaacgacaacaactttttactcggatgtctgactgagtcctcgtatataacgagacgctcgaaattgatgttgaactctgatcaattcaacgacaataccttttactc

SEQ ID NO: 72483 - DNA, 332 bp, Glycine max
aatggtaaaaatgtgtttaaagagattaagatatgaaagtcaggttaccaagggtttaggatcatccagcatttcctgagtaagttgaagagtccaaatgtgctttctggatgaatgcctctgcctaccgcaagtttgccgctccagtggtggtatgaaatgtatgtcaaaaacagagtgatggtcacatgccaaaaaagtgattgtggttgactcgtagattttcaaatcttctctgaagttttggagtccatatgctaaatacactctgtctttgtgttgtctgactcgtatttcatagatggctccattgtatctgagatgaacaaact

SEQ ID NO: 72484 - DNA, 166 bp, Glycine max
  unsure (1)..(166): unsure at all n locations
acttctgctttattcgttaccacagagtgtgtcctggagatatgtcgcgggggtcaagagaccttgtggacgtcaagtggggtgctattgcccaaaaccaagcctgaccatatccgacccaacccgggcatagtcagtcagtgagaacctgngatgtacctaaaca

SEQ ID NO: 72485 - DNA, 274 bp, Glycine max
tgttgacaatcttcgagtcttggtggctatgtcataaaacttgttcatagagtctgtcttggagaaaggcattgttgacattcaattgatgcattcgccagcaattgtttcaagctaatgttagtataactattacagtgtgcggtttcacaattggtgaaaaagtctctctgaaatctacaccatggcattgagtgaattgtaactcatagacaagtataccaatttgtcacagtaatactaaacagaaagatcgattgttactccacattga

SEQ ID NO: 72486 - DNA, 372 bp, Glycine max
  unsure (1)..(372): unsure at all n locations
gatcttatagtngaccatagcagaggtgtccatagaagctattgcttcacttacncaatactacgaccagcccttgagatgcttcacattcggtgacttccaattagtaccaaccattgaagaaattgaggaaattctatgatgtcctctctgcggaaggaaaccatatctttcctccgggtgtctcccctctttgagcagaattgcaactgtggtcaaggattcagccagaagtttggaccgcataaaacagactcggaacggcatatcgggcctcgcacagaagtacctataagacaaggcgaggggtatggccaatcaaggagactgcgtcccgttatggatgtgtagctttgctaatttttgggccat

SEQ ID NO: 72487 - DNA, 481 bp, Glycine max
actaagctcctctataatctacagtctaggctgcatgtttttatacatatctttctttagtcggcttatttatatagttagtttaaaattatttcatttaagatcctatattgatcaatgagcttatctttaaatagacttattaacttatgagcttgtgtgtatctaagtggagaaaaataaatgtattggttaatgtcataccacatacagtctaatatatatactcttaacccatcacactgaagacagtctaaaccacccaaaaaattacattatttaatcgttaaaataatctcaagtctgttgataataaacaacagacaagtcaaaacataatattaggagttaatgaaatgctcagtgcatcaattaaaatatattatatacttaactattaataaaaaactatatgcaaatatcataattattacatataaatatttacatatcttattgtctactttctattagtgatata

SEQ ID NO: 72488 - DNA, 284 bp, Glycine max
  unsure (1)..(284): unsure at all n locations
cctgatgtgttcaatgagtttagaaatttaggtgtcactaattcgaaagtaagattgagtagttcatcttatntatcaatgttatcagtgctaccatactccttttcgtcattgggtatcaatgataagacaataatttattttgtcaacaatatcgtctttataggcaagaacaactctnttttgcaggaatctgcgttgtatagctatgtgtcaagttgggatatgttgcatcaacaattgccttgataggatcagtatagtcctttataaggaactcatct

SEQ ID NO: 72489 - DNA, 380 bp, Glycine max
  unsure (1)..(380): unsure at all n locations
ccttataaactcaacttagaactgacaacatcggttgagggtttaacaatctcatcatactttntgattgttatagaacctataccaactgacttgcatggagcattgttacctattacaacattaccactagacctcttctcatatgttacaaaccagcttctatgtggaaacatatgataagaacaacctgagtccaatatccactggttataatgttgttgtgggtgttcaccaccagcctacaccaacatcgttttagatgaagagtcattatgaataatggcaccaccacatatttctgtgtcttctttggacaatctttcttccttgactagactatttgacgtattacagacgtcatatggatcaaccttact

SEQ ID NO: 72490 - DNA, 233 bp, Glycine max
cacgagtaagaggatttgagcttaccgccattatgagctgagcctggctgaagacaaccgctgctgcttagcgcactgatctcacacttagcgcgcagccttgatattgatgctatgccagattcttctgtcacactgaagttgtgcttagcgatggatgcacgcttagctcaactgatgagctgagcttaactgccacttttaacacttcatgacttaacctttttgttacc

SEQ ID NO: 72491 - DNA, 226 bp, Glycine max
  unsure (1)..(226): unsure at all n locations
ccgagtagtcgaagagaagttcaagntcatatccatcaaagtctgataagagtatgatgaactaagggacgttaatatggtcaccgctgaagccttggaatgagaaaccaagaaggccctgaaggaagaacacgtgccagcatagttttgatgggctttatagggcagctatagcaaactcaagctcctaataggtgaaaggaatcatcacatgtcataggcatga

SEQ ID NO: 72492 - DNA, 292 bp, Glycine max
  unsure (1)..(292): unsure at all n locations
gagcttgaagatcccgagtagtcgaagagaagttcaagtccatagccatcaaagtctgaaaagagtatgatgaactaagggacgtcaatatggccaccgctgatgccttggaacgagaaaccaagaaggcccanaaggaaggacacgtgccagcaaagttttgaggggctttatatggcagcaatagtaagctcaagctccgaagaagtgaaaggaatcatcacgggtcanaggcatgatcttgaangacgagctanangcttaccttangtcgaaaagaaatttgtcccaa

SEQ ID NO: 72493 - DNA, 216 bp, Glycine max
gatcgaagaacgatgaagaacttttgatgaacgtctaagaacgggtgaaacctctgcgagattcctcacggaatacgttacggaaacgtttcggaagcgcctcggcttatattttcttcacggaaacaatttttccaagcaaattctaaagagagagaagtgccaaaggggctgaacccctttcttcttcacttcctctcctatttatagcaaaat

SEQ ID NO: 72494 - DNA, 344 bp, Glycine max
agaaagacagaatgggggagtatgatattgattgttatatagagggagagaagttgtaaattgagttgtgtctcacaagactctcattcatcaatttataatagtgtacacatgcttctatttattgactaggtagctttcttgagaaagcttcttgagacaacttccttgagaagcttctttgagaaaacttccttcagaagctagagcttagctacatatacccctctcataactcagtgcacctcgttgagaagcttccttaagaagattcctataaaagcttaagcttaactacacacacctctctaatagctaagatcacctccttgagatgagaagct

SEQ ID NO: 72495 - DNA, 404 bp, Glycine max
  unsure (1)..(404): unsure at all n locations
actaagcttgaccaaccccgacccaacccgggcatagtcggtcattgagaacatgttacgttctctaacangcgagctcctggcagtctacagataaaaggaaaacaagaccacagagcaaggaggcttgtggtggctggccagctgtgaattntgtgtaatatgtggattgtggcctctggtaatcgattaccaagggtgggtaatctattacaaggcttaaaattgaagacagggggctaagatggtctctggtaatcgattaccaaggggtgtaatcgattaccangcttgaaaacgaggtcatgaagctagggaagcctctggtaatcgattaccaaagggtgtaatcgataccaggcttaaaagggaaatggagatggtgaagcctctggtaatcatac

SEQ ID NO: 72496 - DNA, 341 bp, Glycine max
  unsure (1)..(341): unsure at all n locations
ccgacacnttggactgaacatattctctatcgaaatgtagatccatgtcaatgtgcatagatcgctcatgatgagcaagatctgatacaacacttatatctacaattaatatcacaaaataacatcacagagggcacatcaacttctaagtgaagaagtaacctgcggtaccaaacaaatttcactagtaacaagaagacaagtacacgatattcaacttcagtggatgatttagaaacatgtgtgttgtttcttacaacgccaagaaagaatgtagtttccaaaaagacacatagccagaagtggatcttctattatcaacacaactggccacatcagca

SEQ ID NO: 72497 - DNA, 312 bp, Glycine max
aacctccatgggagacagaaagctgggtctcataaacatttacgaatctccacacgaatacgtggctctggataccatattatagaaactgcgatagagagaatttcagagagtggagttctgtattttattaactcacacgcacagagagtactgtttacgtattcaataaagctgttacagaagttaacagctgctattaactatcaacagtaatcttgtatcacactacctataactaaatgtgaattctcacattatacgaatattatcctctatacgatcgaatcctcagccttctttgagtggatg

SEQ ID NO: 72498 - DNA, 389 bp, Glycine max
  unsure (1)..(389): unsure at all n locations
ccatgaagaaggttcgatagtggaacatatagacactaaccatggtttatagttattaaacaaactatagttctttcacacagcgacatccttgtctgtcgctctatgataataacgggacaaacataacaagaggacaaagaaagggtcttatctagttctcttattaccgctctctttcttttgtggtgtggttttcgtacttattatcgcagaaatagagtcaaaacacacatgagagagacacaanagaggcttcaatgcccgctctctctgctgtttacctctcatgagtacttgctgacaacaactcatttttacacatcatgtgcttatcgacttgcgcccgctatatcagaacaatgaaagctttcctaatatcttatcat

SEQ ID NO: 72499 - DNA, 299 bp, Glycine max
aagaacttgagaagatccgcttaatagcctatgagaactctcaaaatttcaaggagaatgtgaagaggtttcatgactctatgattcttacgaaggagttccatattggccaaaagtgctcttgtttaactctcacctcaagcttatttcaggtaaacttcgatctataggggatggaccttttgttattactaatgcttttccccatggtgcagttgggaatgaaaatggagttactgacaaagtcttcacagtgaacggtcaccaactcaagattcttcatgagagctctcaagtat

SEQ ID NO: 72500 - DNA, 374 bp, Glycine max
tcgatataatcattcatttattgccctcaagtgagacatatccttgttcctgtagttcctattcttcatagcctcttcttcattcttcttccaaacaatggcgctagaagcttgtgaaaggattcttattagagatattggaggagatgcaaatgaaattactcatttctgtgctgctctgtattctctaatttagagcacaactccgtcaaatctttaatgctttattactgcagtatattctatatcttaacattatgaaatgctttgataaatgttagcaactgtctagtgaaaatgttcctctttttgttatacagaattcatggcctcaaatctggatactgtaagtgacaatgtccactttatatatg

SEQ ID NO: 72501 - DNA, 206 bp, Glycine max
ccttggatcttcttcatcaatggagtcattcgattcttgtatatcaatggctatttaatggagaacgacgataggtgattggaaacgccactctaaggagaagatgagtctcgaacaagctcaccatcatatgaagtcatggataagagtctgaaggtacgagacaatgagtggatggatacagagagggggtgggggggaactaa

SEQ ID NO: 72502 - DNA, 288 bp, Glycine max
ttcgtatgccattacaattgaatacactggctggcgagactcctcttgggcttcttcgctatcatcacaatcgtggtcggcattttcattaccttatttctgaactaatacatgagtgtttaaccttttcagtgctgttactttgacagagacaaggcatttcattgctgttggcctctcaaatgaaactcttgaaaaaatacatcactttacaagaaggttatcaatcagacatttttattgatgattgttacgagctgacctaattatattccatttttttgcgca

SEQ ID NO: 72503 - DNA, 301 bp, Glycine max
ctctcattaatgtttctctaacactatctctcaccatgggaacggacttatataacatgatataatcatttgagtgtacacacctcccggacttattttaccattgacctcttatggatccaatacaaggtgggttcatccattttgtttccatggataagactcatcctctaagctttaattcaaatcctcttaacgatctgacaacagatctgctaagatccctctgactcaaatattcatggaaaggttcatcttcaagctactgcttaaccacattatgtgtctcatgtatatgtct

SEQ ID NO: 72504 - DNA, 224 bp, Glycine max
tacctacggagtataacaaaaaaaacttactggccgagtgtaactgaaaatgcgccactcaaagtcacccccaacagccaacaaggtagcctccattaggtctctcataaggctgatgcctacagatgccacattgccgccttaatacaacttgaactaaacctaactaaagcacctctaattgaatgacccaaaacatatctttggtcaacccactctaccag

SEQ ID NO: 72505 - DNA, 252 bp, Glycine max
  unsure (1)..(252): unsure at all n locations
agctcatatggctntagaaagacattaatgtatccgnttgaatgtgttatctttacatcggcgtcgcacacctatgatntaacaaacaccaatgatcttgtaaacccttatggctgcttaatcgacatgactaaaaggtggattagatagctgtatcacagtacgcaaagatataagcttgataagctcttgtcttatctaacgtatcatacgtgccatataacatagcacgtcagaatatagagtgatact

SEQ ID NO: 72506 - DNA, 420 bp, Glycine max
  unsure (1)..(420): unsure at all n locations
tacgtagtatgaatatacgcaagtngtctttgggttgggtttgaaaaaccataactcaactctaccacatttgaacatgttgataattaaaactcaaaccaaacaaatctaatattgcaaatgaggtgaattggatctaattgggtgaacgagtcacaacatttaaatttatatgctattttttaaagattaatattttatataagttaaattcttattaaatggaatactaaatatatgatttataattgtcacatgtgatcaaatagtggaagagcagatgaggaatcatattatcattatcatcaaacataccccacaatataatatactataaaacaaaactattaaaacataattngaagattcaaatattctcatatagtcaaataaataatacagtngagacttgaatatatc

SEQ ID NO: 72507 - DNA, 341 bp, Glycine max
  unsure (1)..(341): unsure at all n locations
tccttgtgcactttgttattatnntgcttcctttctctcttcaagtgagtgccatctccattcaattgtacctttatcttgtggtatcttggtgctttatttgttatgttctttgcaatgattgtgagataaattgtttatgaatccatgacttgaatgcttgattatgggctgctaacgatggccctaggcctatccttgatcctattgtagattggcatgtcatgttgatctccattccttattattacatgcttatacatgcgcccaccaactgttcgataaatgcctcatgaccatttatgtattgtttcgaatttactgtgaatgatttatgctgt

SEQ ID NO: 72508 - DNA, 376 bp, Glycine max
  unsure (1)..(376): unsure at all n locations
cctcgatcgtcatctttcctggccgacgccgactgttatatttcgatcaatttctgtgaatgacaattatctgccgaggagggctaatgcttcnctggctgaataaatgagaacatgctcatttcggccgaaacgaaacatcggatgagctcgcacgaaaaaacctagccgacctacattgttagtgtattatgctacaccgacacatgaaaacttcccctgccgtaagaaaaataattatgggccagccagcgcttttataatataaaatatcgcgcaatgtcggctgaaaaatatcagttccggccatttcactaccgatgtcngctattgagtcttctattcaatccctgaatgaaattgcatgacgtcgatt

SEQ ID NO: 72509 - DNA, 221 bp, Glycine max
  unsure (1)..(221): unsure at all n locations
cctcttcaactacaggttgtcaatcacagctataatcattataattgtcaactcgattttgtcctaaagagagttattgactcactagttngaaaacaaagtggataagagaaacctcttcacacacctactcatacctagaaatagtgacaggagaagacttatcctttctactctacttaactctttgtcttccttcaagaggatttcatttggttcta

SEQ ID NO: 72510 - DNA, 189 bp, Glycine max
  unsure (1)..(189): unsure at all n locations
tagtggtacctggagatatgtcgcgggggtcaggagaccttgtggacgtcacgtgtggtgctattgcccataaccaagcttgaccaatcccgacccaacccgggcatagttggtcagtgagaacctgngatgtacctaaacaggcgagctcctggagttaacagattataggaacatagaccacaaagc

SEQ ID NO: 72511 - DNA, 380 bp, Glycine max
atatctcccacactttttggagtgttttattcttggatagccttgattttctcatggtccacttgtactccattattaccaactactaaacctaagagaactatattatctactcaaaatgtacacttctctatatttgcatagagggttgtttttctaaagattgaaagatcttgcctgagatgtcctaagagatcatctaagctcctacttgacactataatatcatcaagattaacaactacaattatacctatgaagacccttaagacatgatgcataaacctcataaagtgcttggtgcatagtgagtcaaaatgatcacttccatcataaaaccaacttggtttacagcggtttcactcataacttttcatctt

SEQ ID NO: 72512 - DNA, 261 bp, Glycine max
  unsure (1)..(261): unsure at all n locations
caattccgncgcatatgctatactagatcccatatctacttgataatncaatggtagccataaccctagccaaggttcatcaacctccatttcttcgagaatacgactcgaacacaacgtgtgcttgtcacgaagaaaccccagggcgttccattgatcattgaacggctctgtattgtaaggagcgaagtctaactgatgctggctgaaatatgacgagaaacatgtgtaaataccgacattgacaacaatatgccacac

SEQ ID NO: 72513 - DNA, 466 bp, Glycine max
  unsure (1)..(466): unsure at all n locations
tggctagacatgatacatgtcatggtttggtttggntcaatgataataaggatgccccacattatttccatgacacaaatgcaaaaatgatgatttggaaactttatgctaaactggtcatgcatgcacctatgtggacactcaagtgtcaaattattatggtcatgtgatgctaaggctcangattcatattctctattttaaatcaacccaatgtttccaaaatatgttctgttacaatttgtgcattcacccgagtccatttcgggcgtccgggaaaatttcacagcgtcacccttccgtgacacattttttaaaactagtttgatcatgaatattttgttcaagaaaagttgaagtatctcttcaaaagcatgtggtttcactagacaactatttcttatcctttttacttcctctattngtatactttctgccgtttgtttttttcctcttttatgagatt

SEQ ID NO: 72514 - DNA, 381 bp, Glycine max
  unsure (1)..(381): unsure at all n locations
agtgcctgtatatngatgcgcctgaatcggacatccgagtgaaaagttatgaccatttgaatttctcgagagcttcctatgtttaattttgagcgtctcgatatattatacgcctgaatcgaacctcagtgtgaaaagttatgaccatttgaatttctgtagagcatccgttgatcattntcgagcgtctctatatgtgatgcaccttaatcggacctccgtgtgaaaagttatgaccatttgaatttctcgagagcttccgttgttcaatttcgagcgtctcgacatattatgcgcccgaatccgacatccatgggaaaagctatgactatttgaatntctcgagaagcttccgtgtcaattcgagcgtctgacatatat

SEQ ID NO: 72515 - DNA, 228 bp, Glycine max
  unsure (1)..(228): unsure at all n locations
tcaattaagaatgagaaatcccaaagagaaaanatgtccgattgattctctcgctcttattttactaaaaggtattctttgattattatattattattttacctcttcttttgatttccaacgtggttacggcacgaccgaacggtcggaattcatnttaaccaaaattaacggatgatacaattcatacgatcggtggacatttattttatttttagattaagcgag

SEQ ID NO: 72516 - DNA, 383 bp, Glycine max
  unsure (1)..(383): unsure at all n locations
ctcagctngcagtttcttgcacgcanagcagcctcaccttgaggaatttcaatgctctcttcctctggaaaattcatattaagcatgggatccaccaattntaatagatcattagatngatacgctgcccacgcctgaaatagaaaaatcatgttcatgctcaaacttctaacacacaaacacacgtttcttcaatttgaccaaatcacaacagacaaaanagcaattttaattattccccngttgggttaaacnctttatctcgtttctaattgatttaattggatccccagcagtgagctgaatctatagctgatagtacataattaaatgttgacttaattcatacctctcactatgaacgtcaatgtctgatagcatca

SEQ ID NO: 72517 - DNA, 408 bp, Glycine max
  unsure (1)..(408): unsure at all n locations
tgcatcacacacttaatgagtattgctttntaccaaatgtaggcttttttatcttaacttgtataaagcctacatgcatcacatggaatacagcctacataacacaatactattcatgggttagatgtttcaagaggcgtgcaatattcgtctttagctaacttgattggacctcacacacttaatgatttcagttcgcgtgatggcaaattgacatgcatttgagttaatggtgaacttagtacaaccatcaaaattttcaactagctaagaattggactttttgaacacgtagccttggtgtcttaaacttattcacgagctgtaaacatgtatcagactttcaacaagctatttttctaccattcttcacaagtattatacttcatttcatgtaagctaccctct

SEQ ID NO: 72518 - DNA, 335 bp, Glycine max
  unsure (1)..(335): unsure at all n locations
acactgatttggtatcaataccagcgatgttctgaataatttttatgatgtaactcttcaaatggttnttgactttttcaaattggttttaagtttttctaaaagttataactcttctaaatgggtgtctagaccacacatgaagagtctataaaagcaaggctttgttttgcatttcaataatcttgaatacttttccaatcaatctcttacgatcctttacaagccttgaatctctttgaacttcttcttcttctttgaccanaaagcttctaaagttttatggtttctaaaccttganaatngtgctattcatctnttcattcacttctccc

SEQ ID NO: 72519 - DNA, 315 bp, Glycine max
  unsure (1)..(315): unsure at all n locations
cctactatcactttctcgatctgttctanatatatactaagataaagntaattcanaactctggcttagcatacacatatagactaataaactggtggcaactattactagtacgtagaaatggccaagtatatatgcaacagacaaagagtcagtgctttaatttagctaatgaaagatacattctaccttgaacatggaaaacaaaggattatggaattcttatttggaaaaaaaaaggacgaaatttcatttgaaggaaagatacttgcaacactacgaaattatggttccccacatagataataattatga

SEQ ID NO: 72520 - DNA, 313 bp, Glycine max
  unsure (1)..(313): unsure at all n locations
tctaagcttgttcatacanacttacaaagagtatacctatctgatttgttagcaacattggaatntacgatgagcatctgaggatgatgtttggacatggtagagtatcgaatgacctctactaccttgaagaatcaaatctgtctactatggttaagaacagtttaccacatacattcatgtctgattctatgttatccaacaaaaagaattttctctatcattggtgtgtagagcatccttcttttcttgtgaagagcactggacaattattcaataaaagtactaaccattgaagcaatggtagatggtg

SEQ ID NO: 72521 - DNA, 439 bp, Glycine max
  unsure (1)..(439): unsure at all n locations
actcactggatggctttaagtgagtatatatgtgcaatatatagttctaaattagntgctgcgggtttatctgggttaaccatgatgagcaaaggaatgatcaatggagtgtttatgctggtagtgaaagaaccttttaagcaaanaatgctgaggtaatggttaataattatactttagttttggcttccaagaattaaagacaagattatacgttagacttagatccttctattcatgtctgtattatagaaagaattctctccngtccatttgctcgaaatgtgatgtctttcagtccaagtgaaaagatcatggngaacaaagtgtccaatatgtgagtaggcatagcaacgtaattctgtgatgaatgatattttcttgactcattgggggaaagactgattaattgtcgtaacgttgtgatgtgtttattgca

SEQ ID NO: 72522 - DNA, 233 bp, Glycine max
  unsure (1)..(233): unsure at all n locations
gttataaagacacanaacttttcgagatctgacatttatcctattcttatctattaaatttatattcgaatacgtattatgaattttgaattcaagcttagttaaagtaattaaaatgtgttctaagtatattcctattggcttgaacacatgtgcatgcatattttgacaataaggataaaggtgtaatctggatttcaattaaatttgtaatgacgagaaatgagttctta

SEQ ID NO: 72523 - DNA, 341 bp, Glycine max
  unsure (1)..(341): unsure at all n locations
ctaagcttcatgagagagtcanagatcagatcgcgaggaagaatataagctattcttatcaagccaacacagggagaaagtatgttgtcttcgaacccggagattgagtttgggtgcacatgagaacagataggtttgcggaacaaaggaaatcaaagcttcatctcacgggagatggaccatttcaagtgcttgaaagaatcaatgactatgcttacatagttgagctgcccggtgagtataatgttagttccaccttcaatgtctctgatgtatctctttnagatgcatatggagaatccgatttgatgacaaatccttctcaatacggagagaatgat

SEQ ID NO: 72524 - DNA, 429 bp, Glycine max
  unsure (1)..(429): unsure at all n locations
ntacctacgaatatatntntacctacagtcaaattcaactatcactatatgtaacacctactatttcaaatgtgtaggtaaaagatattaatgtatatctataatctctaattatagggtaaagtcaatatacttgtacctacggtcttctgtaggtaaatgtcatgtaataataataaaactagttcctaattacactatatgctgattataatttttaattaaatatacttgagcttattattatgctgtacaaagttagagatctgctgcaacatggcctttgaaaagttacaacaacatgctacacacaattaaatttttagtagcctgaattgtgattattgtaactagaatnngtgtgcttttaacatattgcagccctcgatccattgtcattgtgaaatgatctagcatcagtagtgctat

SEQ ID NO: 72525 - DNA, 313 bp, Glycine max
  unsure (1)..(313): unsure at all n locations
tactcagcttaagctaggccagactctcgtgcatgcanagggcttcttcaagaataatgccaaactcccttngcanatctgatttcagtcttaaataagtggccttgttcgtgctcgtgcgcttagcgcagatttggattgctttgcgcgcataagtggattttggcttatcgcgcttgattcgcttaacggatgagctgaagtggtgcgcttgatgacctggagcggtgcacttagcgaacttgacagctcatcttcttctcaattcttccttgcgcttagccactgagtgttgcgcttagcggatgctcac

SEQ ID NO: 72526 - DNA, 302 bp, Glycine max
  unsure (1)..(302): unsure at all n locations
gctgtaaattagcattggtcatcagttgtagcttaacagtcaaaagaatacatgttatatacgtttnttggtattntcaaacttagtgcaatgaagaaaatatccattactttacaaggcaaggagaatggactttcaccttaatggattgaaccacaggtatgttgtaatccctgtatttatggaaattttaaataactatcatgtgtaacaaanaatgaccaaacttaattgggtattttcatattgcatgtanagtcatgtaccaacgcggagcctatgagtgtggatattatgtgatg

SEQ ID NO: 72527 - DNA, 456 bp, Glycine max
  unsure (1)..(456): unsure at all n locations
tctagccatggcttaactggtgctagaacttgngctntcagtgatggttgttatagagctcttcaggtttctcctggntcctacgacgagaaagtattcanggtacgtactgcatcttcaattaataatattctttttaatacaatcatgtcaaagttntttttttcttaaatataaactcaatatggttattgagataagttataaactaacgatactctgtaccaatgttacatgaataaaaaaacccttcatggttactggttttctangaaaattattacataattaaatattatatatcatgatgttattaaatctctacatgatacataattngaatttattatatttttaatatacattnaacaaaatattatgtatcacgtnaagatcagtcataatcaaccgcatttaaaactgtaaaagtcttagtattgaacatttatcgtattg

SEQ ID NO: 72528 - DNA, 269 bp, Glycine max
aacactggattacctcttgcctcaaccacttgatccattgaagttattcttgcatatagaatactcaacaacaaagagattattatccttaaacaaattatactcaatggtattctcatttatgaccaatgaagttattcttctttacacttatattaacattaacaatatctttgaagggattacctacgaatattgggatgttagcaatcttctctacctttaacaccaagatatcatgtgcgataaatatattgaagtaaacaaat

SEQ ID NO: 72529 - DNA, 278 bp, Glycine max
  unsure (1)..(278): unsure at all n locations
gagaggttccatcaaccgccctaattccttgatgctggtggtatctangcctttaaccttgactnggagaaacctctcgccgggttgattagtccccatgcttactaaagtgagacagaaagctggtgcaaatcaaaactctcatatcttatgggtgggatggatgaatgcatgaaggaatgcttattacacacctgttttttaagaatgcggtggcccggcacattgtctctcttatacacaccacgcatatgggtagcaaagtgccccaatgtatg

SEQ ID NO: 72530 - DNA, 326 bp, Glycine max
  unsure (1)..(326): unsure at all n locations
cagctgattaaccnacatgacctcacaattaaagcatatgtctagccctggaagactattaaaatatccgacaatctctatatcaaccaagaatactacaattataataatgtttaaccaacaatatcaatattatggatagagaaccatagtacaaagaaacctcatgataattggattgttcaagatgaaaatgaattataactatattaaataaaaatcgcaaaaaatctttacttacaagtttgctaagccacttaccaaattatagcccactgtgtttaatatcacttatacaacctcactattatgaaaatactaagcca

SEQ ID NO: 72531 - DNA, 399 bp, Glycine max
ctaagctggttcctcataagccatttatctgtgagactgatccagttgctcatgtagatttctcaactcaggagcctacttcttcaggtcatatctcttcagcacccattcctgaggattcccagccatcatcaccagccatggagccagagcagcccattcttcatgatgtaccagcttctccagtgctaaatttaaatgaagattagccatagaatgagtaggacgtttaattttttcttttgttaaatctctgaaaatttgacaatgaggtatagctattattagcttaaatttctcattaaatctagtatttatgtgattgctgacaaaacttgttgacatgatgatgaacagttctggttagttgaataaatgatgtgtaatactgatgacaat

SEQ ID NO: 72532 - DNA, 292 bp, Glycine max
  unsure (1)..(292): unsure at all n locations
tgactcaccataatccttaccctcggaagcaattataatagaagggagatntccaatcaaagaanaagagaaggaaaatttccaatgaaagcaaataaagaaaagaaggaaaattccccaatcaaagagtgggagaaagcaaaaagaaaagaaaggaaattcccaatcaaagaatgggagataagtaaaaaggaagaagaagaagganagaaagctcctgatcagggatcgaaggaaaaacagaagaaatgtgcagaaaggtctttggacccgacaatatctgaacaataca

SEQ ID NO: 72533 - DNA, 472 bp, Glycine max
  unsure (1)..(472): unsure at all n locations
actcttgacatgacacttaactcgtgaaagatttaataatttgtaaaatcaaaaaaatgtcttgataggaattaaactcatgaaatgaaatgttatacaatgataaaacaatagatcattatactacttgctntgatnntgacatatggtgctgacatgaatgttatatagatggttgacataacacttatgtagcaagaagttaaacaaaataaaaaataaataatagtggtttggtatgaaattaaactcatgaaatgtatacaatgacacaacaataaaccaactatactacttgtcttggttggacatatnggtgtngatatgaagcttatataaactggtgacataatacttatgtggcaangcattaaataaagtaaaaaaataanaagtgtctgataaaattgacgcatacatatatacaatgacangacataatcactcactacttgcttgatataagtaattt

SEQ ID NO: 72534 - DNA, 495 bp, Glycine max
  unsure (1)..(495): unsure at all n locations
cagcttcanaggcttcgacaagggagtatgagtgttgaagattattgtctcaaatagaaactnttatggaggttggatctttgagcttctataaggtccttcaatgatgaatttcagtcatggagatgcagcggaagataaagaagtgagaagagatactatccactagagaataagccatgagaagagaaatttcaccaccaagagagtgtcttggataagaagcttatagatgatagtttaatggagaaagagaatgagagaaagagagagagagagtgtggcgtggattttgaaggagaatagagagagaagttgaactttgaagtgtgtctcacaagtttctctttcatttaagttgtgacaaatattacacttgtttctatttacagcctaggtcactaacttaatgaaatttcacttggaaatataatttcatttctgtgaatctanaggaatattcaagaattgttaaagcatttatatattccttta

SEQ ID NO: 72535 - DNA, 369 bp, Glycine max
gatccctaagcacctgcacgctgcaagctgctagtgagctttatggggctgcatcttgatctttatgatgtccttcatggtgacttacaccatggagatgcagcggaagacaaacgataagaagtgagaggagacgccatccactctggagtaacccatggaagaaggagcttcaccaccaacatgagccttgtgtaagaagcttggagaggatgctattatcggggagaagacagatggagacaaagagagacgggggagcaccatattggaggaagatgaacgatgagataacttgaactctgagttgtgtctcacaagactctcattcatcaaaggtccaacaagagatacacatgcttctattta

SEQ ID NO: 72536 - DNA, 439 bp, Glycine max
gcactgagctgcgcttctgggcctttctgcaagcaaacattgttatgtattttaccaagaaatgctattcttaaaacgaaaatggcatacgacctcccccaataacacaaacatcaatgtaaatttagagcgaactcatgcgcatacttcctttcgaacattcactcgcaccagatattcttctaactaagaaaaatgcacccaggcacaatcaaggcaccttcgttacctagatcacttatatgtacttccaaggtgtatttgctacctacatcacatgcacttccctttgctaaattacatacatgcatactcaaagcatttcggctaccaagaatagcatacgtgcacattctggtatttctaatacctatacatatacaaactctgtgatgaatcttggctacctacacaataaggtgctacatctcatgcttta

SEQ ID NO: 72537 - DNA, 500 bp, Glycine max
  unsure (1)..(500): unsure at all n locations
aagcaccgagctcagctggtcgagactaccgttgagatcgaaaattatgatttctaatgacgaacgtcgaagaacggncgaaaccttcgcgaaattcctcatggaaacgttaatggaaacgtttcggaagcgcctcggcttagatcttcttcacggaaacaatctttccaagcaaatttgaaagagagagaagtgcctaaggggctgaacccttttccacttcacttcctcccctatttatagcaaaataggggagatgcttgccgcccagctcgcccaggcaagcagggttgcttcctccagaagcaacagccttctggaggaatcttctggagggcccaagtgggcctggttgctataagcacccccatttttgctaagtacaccaccttgcctcttttatggtgattgcttttctgtgaagttacagatacttacgaatctcgtaacgatactagtgttctttccgtaatgttaccgaaccttgtggattacataac

SEQ ID NO: 72538 - DNA, 485 bp, Glycine max
  unsure (1)..(485): unsure at all n locations
taagcaccgcggctgcaagctggattcctttgtanggaatctatccttcctaatatggttctcttcccagtcaccctcattaagaactagctcttttcttcctctattgcctttagttgaatacacctttgtttggttctctatttggttcttaaccctctcatgcatcttctttacaaattctgacctagattccccttctttatgtataaaagaagtgtccagtgggaggggaatgaggtctaacggtgttaggggattaaacccatagacaacctcaaaaggggactgcttggtggttctatgaacccncctgttgtangcaaattctacatgaggaagatactcatcccaagacttatggttgcctttcagaagagcccttaanagggtggataaagacctattcactatctctgtttgcccatcagtttgtggatgacaagtggtagagaaaagaagtttagttcctaacttagcccata

SEQ ID NO: 72539 - DNA, 346 bp, Glycine max
  unsure (1)..(346): unsure at all n locations
atagacgaattatagttcgctatcaacggatcataggtgattgtgtaatggtattttgttgcttcagatctgctgttcagaggggttaatctctgatcattaaacatgtgtggagcgatggcaaagaacaacaatccgctggtgttatggatgtgtccataaatggagatcctgttgaaaagatggttgttgaggtactttnatttatctttatgcatttgtccgttctaatgatgaatgaagtaatgtttgcagtatttgatctcatctaattcttggtcgtttttccctctcagcttttctatgatattgctccacagactgcagagaatttccgtgcactatg

SEQ ID NO: 72540 - DNA, 486 bp, Glycine max
  unsure (1)..(486): unsure at all n locations
agcttgtgcattcaatatcttgatgaggatgntccatatgttctcatgactggactaatacatacgctgcctaagtttcatggtcttgcaagtgaagatccttataagcatcttaaggagttccatattgtctattccaccatgaagccccctgatgtccaggaagatcatatctttctaaaggcttttcctcattctctgaagggagtggcaaaagataggctctactaccttgctctcaggtccaattccagctgggatgaccttaagaggatattcttggagaaattcttccctgcatctatgaccactgccatcagaaaagacatttcaggcatcangcaacttantgttgagagcttgtatgagtgttgggaaagatttaagaaattgtgtgcaagctgtcctcaccaccagatatctgagcaactccttttgcaatatttctataagggacttanncacctggagaggagtatgattgat

SEQ ID NO: 72541 - DNA, 495 bp, Glycine max
  unsure (1)..(495): unsure at all n locations
agcttcaagaaaaagatggcctcagcaaattccttattctatataggaattctatcaatagacctccaatctttaatggagagggttaccactactggaaaacccgaatgcaaatttttattgaggcaatagatctaaatatttgggaagccatagaaatagggccttatatacccaccacagtagaaagagtttcaatagatggtagttcatctagtgaaagcataactatagaaaaacctacagatagatggtcagaagaggatagaanatgagtacaatacaacttataagccaaaaacataataacatctgccctgngaatggatgaatatttcanggtttcaaattgtaagagtgctaatgaaatgtggaacactcttcgattaacacatgaaggaactacaaatgttaaaagatctanngataatgcactaactcatgagtatgaatttatctagaatgaatgcaattgaaatattcatagcatgcaaa

SEQ ID NO: 72542 - DNA, 493 bp, Glycine max
  unsure (1)..(493): unsure at all n locations
agctntaaagttgagcataactctctatnnntgctctttttctatttggcttncgggacgccgcttagctcagcatcatatggaatgtagtttccattatctacagcaacctatagatcaatgtgtatggattcaaaatatgctatcatcctttccttccaataatcgcactagacttctttgaacaatggtggatagctggtagcatatccttcttctatttcattattggactgtattgttaaatactcaacctgagagaccaagctctaatgtcgaatgaaataacagatatcatactatacggnggatgaatagtgtgttagataaatatggaaacttgttcgcaatgaaaagttttcccaagaagatatgcttataaacaagtaattgaccgctgtctcactgatatgggcattgccacacatcatgttcttatggaagagaaagaantaagtacaaacaactgcctgtgctcctatctttgtaccct

SEQ ID NO: 72543 - DNA, 510 bp, Glycine max
  unsure (1)..(510): unsure at all n locations
atcctcagagtcacctgccgctgcagcttgangactatggngtatccatcacatgttgtacttggtggtggtcgggcgatggtgcaaaacaagttctccacatccacaaatcacgtacaaacccaccatcccctgttgcccacctccaactgagctcacgtactcccacgtagcccttatcctcgttcctctcaacgccgggtccccatcaatccttccaagcttccacaacatccaagtaattcaacatccactcatcacaaactaacaaaaccaagcaaaacagggcagaggcagaaaactctgcccataactcacaccaaaaatcacagctttttctcacttaaagacgccagtaacatttccttcgttccaattcgttcaccgttggatcgacttgaaaantttactggaagtccctagtacataagtctacattttgacgcgtgggatctgctagtaaatatacagaaccccatatgtactacccttttcacaaccagccataca

SEQ ID NO: 72544 - DNA, 475 bp, Glycine max
  unsure (1)..(475): unsure at all n locations
caagctttcactcggagatctgatgcaggctcataatatatttatacgctcngaaangaacaacgaaagctctcgagaaattccaatgctcattatctttaactcggaggtctgatttaggcgcataatatatcaagacgctcgaaattgaacaacggaagctctctataaattgaaatggtcataacttttcactccgaggttcgattcaagtgcatgatatatccagacgctcgaaattgaacaatagaagctctcgagaaattcaaatggtcataacctttaactcggaggtgcgatttaggcgcataatatatcgagacgctctaaatgtaacaatggaagctcttgtgcaatttcaatggacataacttttatctctgaggaacgattcgagtgaaaaatatatcgagacgatcgaaattgaacaatggatgctctcgagaaaatcaaatggtcataacttttcacttgg

SEQ ID NO: 72545 - DNA, 431 bp, Glycine max
  unsure (1)..(431): unsure at all n locations
agangcactcgcaagtcaatgcttcattctaactagtaataggactagtagaaatatcaatttgtaaaattgacactcgttaaaaatgatatgatgactgcaccatactagaattcacggtgaaggaattcattcattgattcatacataacataactaccaacatcgccctttattacagcgctatttgatattctcctatctttctttctttctgatttttttatctaagccatacaagaaaaatgataaaagaccgagatgcagactcctcttgtgttgagtggaagggttggtcatgcatctaattgtatatatatatatacacacacacacgatacaaacatgtcgttggtggatcaagtatcattcaccgctaaatagtgaggaaaatggagttgtaactgaacactcattgtgttcttcttttc

SEQ ID NO: 72546 - DNA, 461 bp, Glycine max
  unsure (1)..(461): unsure at all n locations
agctggcagttccacctttgctntctctaaagcactngcttgtgctatctatttgcttgaangagaagacgattctgaggactgtgtattatgagagcgaattacgaagcacacggttttgtttgaacaaaaacatgatggcggatgcatattctgatgatagagaggggcatcttatacacaaatcacgcttggctatgtcctctacttcgtctctcgntaattctactcgtgcagatcatccaggaggaacggaaacagtgatcaacttggatcaagaagtgcaacctatgattaaagggtcttcttctctatttgatatcttttgatcatgccgaaatgtctgcattaacgttgcctaaggtagctaatttaaatgttgtatgtgtgagcgacagcacttttttaagattttttgctattcactaataccctttgagattcctttgatctcacataca

SEQ ID NO: 72547 - DNA, 355 bp, Glycine max
  unsure (1)..(355): unsure at all n locations
atgcaagcttgcatgccttactatggagtcattgaagagagttgttatgtttattacggtgaatgtagagcacctctcttcaagatgtaagtgggtcaatggaaacacaggtttgcgtaaagactaaatggtactcactttactggaccttatataagatggatacaaggacgacccattcataatggcaacgcaagctcgacaggtgttntatagaaaagaaccatgcgactctaaatgggcagtggttttgcaagggagaacaatttgtatcgtcaccatgttgatggatcaacacttgatgtcactgacatgccatctttctccaaagatatgccttcaagtactattgaac

SEQ ID NO: 72548 - DNA, 394 bp, Glycine max
  unsure (1)..(394): unsure at all n locations
gcacctgaggcatgcaagcttgtgccacccacatagcatanngttttcatgggtgatcaacctatgttgttggttacaaattgagaatctctcccataaccaaatatgaaccaagtagtaaaaaggtgaccaaagagttaccttttatcatcagccaaactaactattgttttcttcaacagacctcaaatcatttatatgttggcttaaaatattggtcgcaaagctgattatctaatcaaggaaaacaaacttgctcaccaagccattgtgagagaaatcaatctctactaaccaagttgcaaggaattgttcatgctacctttcctttccactatcgatgaatatgcgtgctttgtcatgtataagcctaatccttattattccgtgctaa

SEQ ID NO: 72549 - DNA, 450 bp, Glycine max
  unsure (1)..(450): unsure at all n locations
acctgaggcatgcaagctngccgccacggagttntccgactatgctctagtgtgttggttttatctgtaaaaggagagagcaagaaatgaagagccaatggttgatacatgggcggagatgaaaaagatcatgaggaagaggtatgtgctggctagttactcaagggacttgaaattcaagctccaaaaactaacccaagacaacaagggggttgaggagtatttcaaggaaacggatgtgcttatgattcaagcaaagattgaagaagatggngaggtaactatggctcgatttcttaatggtttgactaatgatatccgcgatattgttgagttgcaagagtttgttgaaatggatgaattgattcacaaagcaatccaagtagagcaacaattaataaggagaagagtgaacaaaagaagagtgaaacactttgaatgagggagagc

SEQ ID NO: 72550 - DNA, 419 bp, Glycine max
  unsure (1)..(419): unsure at all n locations
acactactaacaaccgngtgaagggtgtgcacctcagatacaagggcttctttgaatcactttgtaatttctcataaaaaggtgcatgtgcttgctgaaaacactctatacaatctctgatgtctacatcaatcggctcagtgtgagacactattgacatgtctggcaattcaccatatcgtatccattntgtataattcagaatgatcctgtcacatataagatgtgatcttatgtcattcagtgactagcatctcccattcccacatttaacacatgggcagaanaattttccacccataaatgatgcattacgctcaacaaatntaaagaattgtcaacctcattctcatactcgccattgatgcgtgatgctttcatccaacttcgatccactgtttctctattctcatactcat

SEQ ID NO: 72551 - DNA, 460 bp, Glycine max
  unsure (1)..(460): unsure at all n locations
agcttaacatcagacccttcagaggctggttctcttatatggacttgatggggcctatgcaagttgaaagccttggaggaaagaggtatgcctatgttgttgtggatgatttctccagatttacctgngtcaactntatcagagagaaatcagacacctttgaagtattcaaagagttgagtctaagacttcaaagagaaaaagactgtgtcatcaagagaattacgagtgaccatggcagagagattgaaaacagcaagtttactgaattctgcacatctgaaggcatcactcatgagttctctgcagccattacaccacaacaaaatggcatagttgaaaggaaaaacaggactttgcaagaagctgctanggtcatgcttcatgccaaagaacttccctataatctctgggctgaagccatgaacacagcatgctatatccacaacagagtcacact

SEQ ID NO: 72552 - DNA, 443 bp, Glycine max
  unsure (1)..(443): unsure at all n locations
tcgttgaccacagagtggtaccgggagatatgtcgcatgggtcaggagaccttgtggacgtcaggtggggtgctattgcccataaccaagcttgaccaatcccgacccaacccgggcatggtcggtcagtgagaacctgtgatgtacctaaacaggcgagctcctggcagtcaacagataaaaggaacaaagaccacaaagcaaggaggcttgtggtggctggccagctgtgaactatgattgatatgtgagattaggcctctggtaatcgattaccaagggtgggtgatcgattacaaggcttaaaaatgaagataggaggctaagatggtctctggtaatcgattaccanaggggtgtaatcgattaccacgcttgaaaatgaaagcagcaggttgtggaggcctctggtaatcgattaccagtttgtgtaatcgatacac

SEQ ID NO: 72553 - DNA, 498 bp, Glycine max
  unsure (1)..(498): unsure at all n locations
agcttaataatatggtaggcactacaacatttattatntattatcatagcacataataatagcaattgtgcataggtttgatcacacatgacacactatagaatattattcgccatagttaccacacaattctataagctatagcatcgtggtactttaagatgacatatatagttttaggtttatcaaagaatgtgccatacctaatcgaggactatattccaatcatgcanatagtacaagagcaagcaatcaatatactttagcatctcacacccatactccatatcaagcatgatattttttcatatttagacataacttggcttaggttctaagccaatattgggactttatttataccagcttattggacaaatggtgaagcataataactctggatgggagcggtattctaattggaaaagaccgntgttcgacagcgaaattggaatggctatcacttttctttctgaaggtgacgctaagcctattcac

SEQ ID NO: 72554 - DNA, 482 bp, Glycine max
  unsure (1)..(482): unsure at all n locations
agctngaatcggacctccgtgtgaaaagntatgtatctnttgtatttcttgagaggatgcgctgtttaatttcgagcgtctcgatatctgatgtgcctgaatcggacatccgagtgaaaatttatgaccatttaaatttctcgaaagctttcgttgttcaatttcgaccatctcaatatattatgcgcttgaatcggacatccgagtgaaaagtgatgaccatttgaatttctccagatcttccgtggttcaatttcgggactctccatatatgatgtgcttgaatcggacctcattgtgaaaagctttaaccatttgaatttctcgagaggttccgttgttaaatttcgagcgtctcgatatctgatgtgcctgaatcgggcatccgagtcacaagttatgacaatattaatttctcgagagtttccactgttcaatttaagcatctcatatatgatgccctgaatggaatccgagtgaaa

SEQ ID NO: 72555 - DNA, 435 bp, Glycine max
  unsure (1)..(435): unsure at all n locations
agcttacccttatggctggcctccggacttcactctccgttccgctccggaagatgtgagccaagcccctaccttcgaggggcaacttcctccttatgtcgattaccccctgcaagaagacgacgaagaagatacccatctaggcccgctgcttcccctcaaggatccatccccccatgaattacctcaaccaaacatagtccgccatgtcccatcttcacccgcacccgtatctgttcccttcatagaagattanggaaagaatgatgcgcttgaagagaggctaatagcagtagagggcctcggcaattccccgttctcggatatagcggacctatgtctcgtgcctaacatcgtcatccctcccaagttcaaagtaccggatttcaataagtacaaagggacgacatgtctgacagggcatcttcngatgta

SEQ ID NO: 72556 - DNA, 419 bp, Glycine max
  unsure (1)..(419): unsure at all n locations
agctngacgagagttacacgccaagcanagtttctattcgtgccagtgatggttntcacaacttgaaggtaaatntttattntattggtttgggtttgattgagatgattatggttaattatttggtgttgactctgggaacatctttaggagattaagaccgtggaactcgtgaagccaactgggtgggtgtatctatccttgtctggagctgatcctatgtaagtacaatgttctttctattttgccatctgagaatatgtttattgactgttctgctatcgcgtgatattggtctcttttgctcaattatgctgtgtctgtagttgattgtggattgtgtttgttntttatgggaganactacagtaacaatgggttattttatatggaatgtgggaaacaaatcctgtactatat

SEQ ID NO: 72557 - DNA, 473 bp, Glycine max
  unsure (1)..(473): unsure at all n locations
ctgacgcatgcaagctnggtggtgaccanaaggatctaatcttccaaggtgattcctcttctattaacaatgtcttacaactcacaaagttagataataaaggagacccagtgagtgtgcagtgtgggcagagtcttatactctgccccattgcgcctttatgaaagctccacggttgtttcaagctttgaaaccacctttacctttgccatctcagcaattgacactactccagctgctggaatttccttcttcattgcatgattctacaatccctccacattatggtgggaggctccttggactctttcctgactcagatgctctcaaaaactcttcttcctctaataatgaaaccgctattgatgtcaaagcttcatcagacaaagttgttgctgtngaatgtgacacataccataattgggatagttgggatccatattataaacacattggaatcgatgtcaactcta

SEQ ID NO: 72558 - DNA, 499 bp, Glycine max
  unsure (1)..(499): unsure at all n locations
agcttatcccatgcttctttggccgtcgttgcgttggaatcttctatttgtatcttcatccaccgattgataaatgagaaagagagctttcttgtctctctgtcttgactccttcaacgtctcctttacaccttggcttagcgagacttcattntgctcctcgaagccattctctacgatatcccacacatcttgagctcctagtagcgcctttatcttgatactccaattatcatagttgttctttgtgagcatcggtatttggaaatgaaaacctccattcgcccatctttgaggatgttgaagctctgataccaatttggtggaaataaggccttttatgtttaggaaaaatgtttacgaatattggagactttgaatagaaacttgataggaaggagaattctttatggaggagagaactttatattntggcttgatacanatgtgtaggattacatctctatntatactattctaaggagaactctagacacac

SEQ ID NO: 72559 - DNA, 494 bp, Glycine max
  unsure (1)..(494): unsure at all n locations
tgcaagcttctatggtttctagaataatcaattatcaaatgttgttatcgttttatttgaaacacagagagctcctaagtttccaaatgcaatctaatcaattacaatatgttgtagttggttatttcaagatacaaagatcctctctttntaaaattgggttgggtaattgattacaaaacttggtaattagttaatgtgataaaaattgtcaatacttccagagaagattctttttcttgttctaacactttgtaattgattacttacacttggtaatctattacacagtgtttaacttattgcttcttagaaactctgaaatcaatacatatatcttctcatgtttgatggccactaagcatgggtaaagaaaactaagtctaaaacactcaacatgcctagtctaagaacatccaatgtaaatgccacgtcttcagaaatntatntggcattgcaaaactattaaaactaanagatcctaagactatttt

SEQ ID NO: 72560 - DNA, 477 bp, Glycine max
  unsure (1)..(477): unsure at all n locations
cctgaggcatgcaagcttgaatttaattaanataatggtttattgcattatgtgaatatctatttanaaaatctntaaaaaaatgttctacaactttttttttttcagtaaactcctttataattgataaaatattgagttccgttccggttattgatttttctaagataaatcacaaatttgcaacagaaaatgatgcacacatatgacataccaacatgcctagtctgagttccgttccggttattatttgcctctcagctcccaatcactattgcagacaagttggacagctagacaacaaactcatgatctagcaaaaagaaagtcttgcaagcggtgagctacgttagccactgagcatacattgggaacttgggcaatnggctttgcaatcaaatacgttatnntggttaatttataacaaataccctctttcactgactatataagtaaagcaattctgtacaaccctct

SEQ ID NO: 72561 - DNA, 512 bp, Glycine max
  unsure (1)..(512): unsure at all n locations
acctgaggcatgcaagcttgttagagtagagacatgcgaccaactcattntatttcaaaatagaagtcatatctagtcaaggtctgagagaccatacaagtttcctaacgatttctaattatgtgggccattaaatctatcatatgctgacaatagccgagaagcccatgaatctcttcgggggtggagtaggtgtctgccatcacctcggccttggctaataagcggtgaagatcttgactcctgttcaaggtaagagcaaaccggtccatccacatggatgcctcttggtgtaaagagacgatcacccttcctctaacctctgtttccgcgtatacatgagcatactcggccgcgattatatgctcgtgggccatggctagacccaactcttcttggtacttaacgatgatagctaacatgttggtctccgtntggataaacgctgcacaaagctttttaggactcgaacaagcaataacatctctttcagaacatgctatgtgctcgcg

SEQ ID NO: 72562 - DNA, 350 bp, Glycine max
aatatgacatacgcatcgtcaaagtgagaagcaccattgtatctcttcgccaacctaagccctgagacatgatgagcaaaacctattcactatattgctagagttgctcaatgcatggttcctaagcaacaaccacagatttgatttcattgaagatgattggaatatacctttaggaccctctgctcttggtgcctactagtaacatctatacatacaccatttccctaacaaatgatggcgtctcccatatacaacttgaaaggaagaggcactcatagaagcaagttgccatgtggaaactcattgcaccaatattcgtccaaactgcaatgtaaaatatccaccta

SEQ ID NO: 72563 - DNA, 493 bp, Glycine max
  unsure (1)..(493): unsure at all n locations
agctnggttacctccttcttcactacatcaggattcactgtgttgagtcttctttgcggctggcttactggtttagcctcatcctctaaattaatctgatgcatacatgtggatgggctaataccacgattgtccgccagggtccagcttatagccttcttatgcttcttgagaactgataacagcttctcctcttgctcatcagcaagggaggcagatataattactggaaaacttttgctatcatccaagtaagcatattntatatntgatggcagaggcttcaattctggtgtgggcggctggataatggtagaaagagatggtttctcatcctgtacctcataaagaagatcagaggtacgtgtacttcctaaaacatggttagttctatctgactctaganaatcaatctcaagaggtataacatcaccagacatgtaattaatatcaatttcatattcactctcagcatcaaattcagacatatgat

SEQ ID NO: 72564 - DNA, 499 bp, Glycine max
  unsure (1)..(499): unsure at all n locations
agctngaagctntagtcttcatgttgttcatgttgctccttctatctctaacacaatccatcaattacacattgtttatcaatttccaacaccacaagttcccttatgttataaattcaccatttacctaatcctgataattaagagcacatctaactattattataaacctagtgaggcattcaacattatgaacccttacccttacaacatccatgattctctgtaagtgtaaatttcataactattactcacaaaccaatactataaatatttgaaattagtttggagaccacttaagccataaccatcatcgcttaagccacactgctcctagtaatcaccctacccacaactntgaccttgcttaagccataacatttcttgttaaagctaccaatcattgcttaaatgctagtgtagacacaggccatttcagactttntcacctacatcacttaagccataatcgtcatcgcctaagctaccagtcatcact

SEQ ID NO: 72565 - DNA, 444 bp, Glycine max
  unsure (1)..(444): unsure at all n locations
aagtcacctgcacgctgcagcttgaaaaagtttactagcctcctttattcttgtttcttttgtgcatgctatngangaaaggcttgaaaatgcntttttttaccatgcanatcttgtggacaagttgtgtaattgtccacactactttntgccttctataaatagagggctttgcagatgaangaaagcatctagaagaagatcataaganaaacaaagcttctgggtagttgtgagaggttattgagaggaaacatatactgttgagtaaatcctaagagtgtggaagaaatgcaccaaggtgagtatcaactctaactctntggtnctacaaaatataatattngaataggagtgattctcaccggaaacactatatctgatctcatgtgtgtgaaagagagtggagagaatattgaaatattctctaatatgttggaatat

SEQ ID NO: 72566 - DNA, 472 bp, Glycine max
  unsure (1)..(472): unsure at all n locations
agcttatngcataacccacatattntacacattgttatattgttatagacacatgttaatatcaggaagatagccattattgtaattagggattcgatttgtatttaagattgaccccctttttactctaatatattactatatatagtactcttgtatagtacacatgtgcatacctctgagacgcacaacattaagttatagttcttctctatagaaacaataaagaagcactaaagcaaccagtaactgaaaatactagtcaacaagtaaaagtaacaaggaaagtacaagtggtagcattataccagatcattgagtagatttggttgttcctcanataaatcaggcaagtgcttcctcatntacttttccaaggctgcagcatggcttccaggtactccataccatacttttgggtcaccccagtgcaaatagtttagtgaatagaggtgatggtcctcaacatgct

SEQ ID NO: 72567 - DNA, 363 bp, Glycine max
  unsure (1)..(363): unsure at all n locations
agcttaattaataattattcatgtnatcttctagtgtttgttgctgaactacatttgggcaaacctgacctcgcactgtcagtctcatgctccaagccttctgttcttctgctctattacatgcatacctgtctgtgtatatttcctccccaatgtaatgattcttagtatatgcctctcgagaagtattgcattctcgcctctggtggaaaatacatataggcggtgatatttgttgttcattctttcagaattacctatgcatgcagaccattgctattntctttacactccaggcgctgcttaaatgaacataacctgttatcttgccttggattatgtacaacattcgtagattgagag

SEQ ID NO: 72568 - DNA, 506 bp, Glycine max
catgcaagcttgaagacaagacaatacgaggtatcttcctggggtatagcattatctctaagggctaccgcgtcagcaacttgcagactaagaaactcgtcattagtcgagatgttgtagttgatgagtacgcttcttggaattgggataaagaataagtggagaagaacgttcttatacctgctcaactacctcaagaagaaactgaggaagaagacccaggtgaaccaccttcaccttcacctccaccacaacaacaagatcaagaactatcatcaccagagtctactccaagacgagtaagatctttggtggacatatattaaacttgtaatttggccatacttgaacctaaaagcattgaagaagcgtcaaagcaagaagtatgggtcaaggcaatggaagaagagatacaaatgatcgagaaaaacaacatatgggagttagtaaatcgtccccctggacaagatatcattggggttaagtgggtctataagacacagctc

SEQ ID NO: 72569 - DNA, 516 bp, Glycine max
  unsure (1)..(516): unsure at all n locations
acctgangcatgcaagctttatgctagctncttaatcttattctatctcgatcttgttatttttcttattccagaaaaaaaaaaatacattatttgaaagagaaagattcctacaaacaccaactaaaatataaaatatgctgcttaacttgctctacttttaacctgctgatgtctttgaagatagaaaaaagaatgaatattcacgactcaaatgaagtaaagaaaaagaaaacagaatataatggatataacattatatattttgtacgtgcacgtaaatggggcgaattaacacaaaattgaagaaagtatcaagagaggggcgggtggtgcacaatctaaatcttgaagaggacaaatacattatattcgtgcatatgcttagtagatagggggggatactgcttctgttttatatgcggctacgtacctgctttcgatcttctatatccaagagcgaagcataacccattgcttattgaatgacggaatattcacactgatagaatcatg

SEQ ID NO: 72570 - DNA, 462 bp, Glycine max
  unsure (1)..(462): unsure at all n locations
actgcagctgcagcttatggtgtatccancaatacgtacctctagtacattggcttggttttcttagcaaagtttccgacgacgactgtgagcaaccttaaatgcaaaatgagctatgcgatctatctggtatacaaattatcattgatcagacgatcatagatgcagagataatacagaaatttgttgaagagactgctccagaagaaaactacaagtcccttcagagggaaagaataaggtgaaatctgcatctgcatatagtacattcctagtgtgtgtggattacaagtgagaagtgattctagaccatacaatcatggtgacaccatgaataagcttacgttagtatttggtgcttcattttaacacgtgagtgtttaatcaattatgcctaaagtgaatgtaaaccacacacactacatccttcctcatagacaatgtgttacgaagctagactat

SEQ ID NO: 72571 - DNA, 385 bp, Glycine max
  unsure (1)..(385): unsure at all n locations
gctccggagtatgacagtcaccgctttatgagcgctgtacaccagcagcgcttcgaggccatcaagggatggtcgtttctccgggagcgacgcgtccagctcagggacgacgagtatactgatttccacgaggaaatatggcgccggcggtgggcatcactggttactcccatggccaagtttgatccagaaatagtccttgagttntatgccaatgcttggccaacagaggagggcgtgcgttacatgagatcctgtgtaaggggtcagtggatcccgtttgatgccgacgctatcggccaactcctatgatatccgttggtgttggaagagggccaagaatgtgagtatggtcagaggaggaaccggtctgatgggttcgatg

SEQ ID NO: 72572 - DNA, 492 bp, Glycine max
  unsure (1)..(492): unsure at all n locations
tcttaagcaccgcagctgcagctgctagtgagattgagatataaatatatcccatagcatanaattatgccgtttgagctccctccctcntaaaatttannccaaaaacccctaactccttctccttcaccaccattacttgccgtcagacctncgcacaaagaggaacgctntaatcggatcaaaatcctcagagttcacctcaaggattntgtggagaacgagctcccaatcctttctttcatagcttctctgaggtaatcttaacttctatgccttttctcctagntagtttgaacttctctaagtgtctcttgtgttgtgggtaccgtaataagaattttaacacttccttcanaaaccccttgaaaataagacgttgtaaaagctatctttttataaaactgatgatgttntcgtgaccttcacgtgatcagaatatcaaaatgacgtctctttgtagtagaaaatgaaacaccccttagccccttt

SEQ ID NO: 72573 - DNA, 386 bp, Glycine max
  unsure (1)..(386): unsure at all n locations
ctcacgagtngaccatggctttcatgaattgactatggccctcacaattttgagcatgcccgctgttggattttgacgttgttctggagggttgntatcactttattgtggtagtgctgattaccacaactgtggtcaatgtaccacagccatgaataaaattagagtcttcaaatcttcataaatcagtattaattttaactctctcactcaattgaaaaatttacttctgcaacacaaaacctgtgttcaaacatgagttctgccaagataatgcatgtaaaatgacacaaaataccacttggatagtgtgttatctacattcttcctatagatgttttcgtaatgaactcatggagttcaatggccaatgctttatgccttta

SEQ ID NO: 72574 - DNA, 407 bp, Glycine max
  unsure (1)..(407): unsure at all n locations
cactgatgtgaaattggacctgttcatttcagtgaattgtgaacatgcattgcataataaaattcacataagtgttgtgagacataaaatacatgtcatacatatgatttattcagataacaatcaatgtatattgatgttctcctttgggtgatacaccaacacacaacatacaaacatgatgatgctaataaaattcttaacattatntggcaatgaaatatgcaccagttagtagtatctatttgctttgggcatataaataaaactgatgatacacaaaaatcgcctacaattatattcgttaattataagaacaactaatcaaccttcgngcgatccatanatgcctcataacaatgaatttcaattactcataaaccaataatcatataatttagcatcca

SEQ ID NO: 72575 - DNA, 469 bp, Glycine max
  unsure (1)..(469): unsure at all n locations
agctngcctcanagaggtccaggaaggacaaggcagccgtatgaactagttccgctccggagtatgacagtcaccgctttatgagcgctgtacaccagcagcgcttcgaggccatcaagggatggtcgtttctccgggagcgacgcgtccagctcagggacgacgagtatactgatttccaggaggaaatanggcgccgacggtgggcatcactggttactcccatggccaagtttgatccagaaatagtccttgagttttatgccaatgctnggccaacagaggagggcgtgcgtgacatgagatcctgngtaaggggtcagtggatcccgtttgatgccgacgctatcggccaactcctgggatatccgttggtgttggaagagggccaggaatgtgagtatggccagaggaggaaccggtctgatgggttcgatgaggaggccatcgcccagctgctatgtatacc

SEQ ID NO: 72576 - DNA, 453 bp, Glycine max
  unsure (1)..(453): unsure at all n locations
agctntctcacgatactggggaaaaagattatattcctattcacacgtcatgtttataacatgacatgccactttacaccgcacctggtcaaattggggttgttgcatacacatgtaatccctacttgcactagcaactcttgggttgtaaaatcaccacatgaatatgactatcatgtgggttgaacttctggcatggctccccaaagaaacaatcctactagcataaaactaatttattgtacgaaatgaatatgaagttactgagcatgagtgtatgaaagaatgtaacattaatcacctgagtggaatgaacatacactgcattccgcgaatatttacagtgaaacattcaactatgtgcaacagtcctcatatagagatgtaccaataatgagatagtaaaacctatacaccctgactcagtctacaaaaaaaagaaagaaacataag

SEQ ID NO: 72577 - DNA, 501 bp, Glycine max
  unsure (1)..(501): unsure at all n locations
atccttaagtcacctgaggcagcaagcttgcatgattacatctcccctttctcaagcaaattcttcttgatatcatcaaaatcttcatgatttacattctcccnctttttgatgatgacaaccacctgtaggttaggagcaacaacacagaaaaaatatctattcgcatatagtttactcccccttggttntgcaatgattgcttatatgagacagttgaagatttcatatttttcatatgtaaacaaattgtctcataaacaaaagataatttntcttactaatttatcctttatctttctctccccctttgtcaacatcaaaaacaaatcatcaaaatcttcatgatttacacccnctccccctttttaacccccttcgtgcaggggttgcttgcccaggcgagcttagctcgcccaggtgagctaacctgcattctttttggggtatcaaataagttcggcttcctacgggtcgacattcgcttacttgaacccactc

SEQ ID NO: 72578 - DNA, 483 bp, Glycine max
  unsure (1)..(483): unsure at all n locations
aagcacctgagctgcagctggacttctgtgtttgngaacctctccttcctcttgtgtactcaaacccaatcacctggttcaagcatgactttctttctggctttgttggcttgccttgcatagctcgcatttttcttttcaatttgggccttcacttgctcatgcaacttcttcacatactcagctttagcctgtgcatccttatgcttaaacatagcaatgttaggcataggcaacaaatcaagaggagtcaaaggattaaatccatacactatctcanatggtgaacaattagttgtgctatggacagcccgattataagcaaactcaacatgaggcaaacaggcttcccaagatttaagatttttctttataacagtcctaagcagtgtgcctaaagtcctattgactacctcagtttgaccatcagtttgtgggtgacaagtagtagaaaacaacaatntagtactaatcttaccccac

SEQ ID NO: 72579 - DNA, 439 bp, Glycine max
  unsure (1)..(439): unsure at all n locations
agctngccttgccccatgatatatttgagggacttatgatctctatgaatgacaaattccttgggataaaggtagtgttgccatgttttcaaagcccgtactaaggcatacaactcctaatcataagttgaatagttaagggtaggaccacttagcttttcactaaaataagcaattggatggccttcttgcatcaacacagccccaatcccaacattngaagcatcacactcaatttcaaaagatntttgaaagtttggcaacgcgagtatggnggcattagttagcttttgcttaagaacattgaaagcttcttcttgtttctctccccatttgaaaccaacattnttcttgagcacttcattgagaggtgctgccaatgtgctaaaatccttcacaaatcgtctataaaaactngctaagccatgtgtcgcaacct

SEQ ID NO: 72580 - DNA, 420 bp, Glycine max
  unsure (1)..(420): unsure at all n locations
gcttctacttatgtggcagggcgggcttccttcactttcttgtcttattgcaagcntcgaccactgctgttccttcccgcgatgcttgtgctcatatccgcctgagtgggcttatagcctaaaccatacttcccactattgcctttggcgtttatcatgctagttatgccgtcgatgtccttgcctaaacacatttcgggttcgtaatcggtatctaacataactcgggccatcattactgctgcatcgaacacacaaagctgcccacagaaggagtccacggaggacatgctgaccacctcataagactggagagcgggttctaacgattcttctgcggctccacataacgcatagaggatgggcagatcaccaagatgtctttctcgcttgatacgatgaccaaatgccactccacta

SEQ ID NO: 72581 - DNA, 462 bp, Glycine max
  unsure (1)..(462): unsure at all n locations
tgacgctgcagctttagagagttctacactactctagagttctctattacttttaaaaaattctatacttttccagacagttctagaattttctagaacttctccaattaagaagggattccaacaattttaatgtatcaaaccgacatgtaatttaaatataaaaagtataatctaccatacatattaatacagtaatattccttctataatagaatggttatatatatatatatatatatatatatatatatatatatatataatccgctataattgttatatcttattgacttaaaatatactattatattctttgaatgaatacgatattcagtttgctcttataacacactttngtagtcatagtgtccatacattctaaattatttctcttatataacacaaattgtaacatatnttgagaatggcgagtatgacatattaataatacaacacatg

SEQ ID NO: 72582 - DNA, 471 bp, Glycine max
  unsure (1)..(471): unsure at all n locations
agcttccatcaactggtatcagagcttcaatgattaacctcaatattngaggtcaaatcctttccaaggtggagggaatgatgcaatcctaccccacaaggtcattggatagaagactccaagtagattgcgtcagagatccaagggaaggccctagggttctcatgagccttacggtagattttgagcccataggctaagtatgagccctcttatgtttgaaaatactagaatatgtttttccttcatttgggccttgtactttggccattcaagtagtatagggttgtagccttgtatttcggcgaatcttgagtagtctttgtagtagggattttatttgtattttcatgtattatgccatggaggtgagcttagctattatagggggtgtgtagctaagctctatcttcaatcttaacgaggtgagcttagctattagagaggtatgtgtagctaagctctagcttc

SEQ ID NO: 72583 - DNA, 211 bp, Glycine max
  unsure (1)..(211): unsure at all n locations
gacgctcatggcgctcatgttgttctttctatctataacacaaaccatcagctacacatagttcatcaattnccgacagcacgagctccattatgttgtaaattcaccatttacctaatcgtgatagaaaagagcacatgttgctattactatagagcatagtgtggcatgcatcattatgaacccttcctgttagaacatccaagattct

SEQ ID NO: 72584 - DNA, 298 bp, Glycine max
agcttctagccaaatggacttaccttgaattaattcctttgatatctccttttgagccttgattccctttccttggtttgaagctcactacaagccttaagtgaaaaaccatgatatcaccatattcttaaggaattttggagctttggaattgttttgggaataagtgtggcggtggttatgcttcattggataacttgtttagtcggctatacttcatgatgtattttgcgccatacttgatgtacattgtatattggttaaatgttggacatgctgaatgaaatgctgtttctca

SEQ ID NO: 72585 - DNA, 416 bp, Glycine max
  unsure (1)..(416): unsure at all n locations
agactttaaccttgacttggtagaacctcttgtctgttttatttgttcccatgcttgctaaagggagacaaaagctggtgcaaatcaaaactccgatatctatgggtggaatggatgaatgcatgaaggaatgcatataacacacatgcaatctangaatgcggcgatccggggaattcatccccttcttagacacaacgtctacgggtagcagattgccccaacgtacgttnttaagaaggcgacacggaccctttcgttggtttgttacacaagggatcaagacagaacccatatgcgatgcctatgcataagacacaatgcgggaatgtacacagtatgacaatattcactgaacataagcaaaagggtatatgatacttatgcatggcagtgtgaaaaatggcacgcagagt

SEQ ID NO: 72586 - DNA, 318 bp, Glycine max
agtcccgtccacgtcgtcccgaataatactgtgcccacactgatccgaaatgagaaggaggagctgattcctactcgggtgcagaacagttggagagattgcattgactatatgaggctgaaccaggttaccaaaaaggaccatattcccctgccattcattgaccagatgctcgaacgcctggcaggtaaatcccactatcgttgccttgagggttttattgggtatatgcaaactactattgctcctgaggatcaagaggagaccacattcacctgccccttcgcactattgtttatagaggatgccttgggcctg

SEQ ID NO: 72587 - DNA, 442 bp, Glycine max
  unsure (1)..(442): unsure at all n locations
agctntgcctttagcgctngcacctcatctctttcttccttagctntaacctcattgtctctcacagtctttagatttgggagccaatccaatccttgtgtccggactctcagacacttatgatagccaccgatgatcccattactgcttcccctaagctctctgtcctttcttcatgccgcatcccatgccttgcgaactccttggagtacctttgcattgnggtcactgaaaccccgtgtaatgaaaggcgtgatgctntcgtctaatggcgctcctctcatggngtagccaagctgtcttatggcgaggacaggaatataattaatacaaccncatgttcccatccagggaacatttggacatccttcgcatgaagatacaatcctgattcttccttccttttagcgagggaaccaattaacagacgcccctccatgct

SEQ ID NO: 72588 - DNA, 520 bp, Glycine max
  unsure (1)..(520): unsure at all n locations
atcctcttagtcacctgccgcatgcaagctntnntacggaaaagaatacgaagaacatngngatgattgtgattccaaaaaggtgtaaaacgganaagcagcacagtaaatntaaagaaaacaacatagggacaaaatcgtcattaaatatgcattaaatattattntatttctagttattattataaaatgaaatctatttttacttcacgttgttataaaattaaaattatttttttattatatattaagttttgtaatacaaattaaatgttatcacaattggtgtctgataggtgactcataataatgtgcaaaagctcaagatcgcataggaggtaaaatggtgacggaagctgaatatactgatttttctgatatgcttgagcagattggtctggctgaaatggatagtcaaggagactattttacttggtcaaataagcatgtagaaggcaccatttactcgagaatngatagagttctggcanatgtttcgtggtttcagaacaatcttgat

SEQ ID NO: 72589 - DNA, 508 bp, Glycine max
  unsure (1)..(508): unsure at all n locations
agtcacctgccgcatgcaagcttcatgatgatgaatcaagttgattcaagtagttttgatgatgtcttatagcccaaagaatgatttcaagattcagtcaacaagatcaagatcaagataaatttcaagtttcatgagaagaaatcaagaagattcaagaatcaagagaagtttgatttcaagattcaagagaagaaattaagaagacttcacaagggaagtattgaaaagatttttcaaaaaacaaacatagcacagttttgtttttcaaaagagcttttctcanaattttctaagttaccagagtttttactctctggtaatcgattaccagttccctgtaatcgattaccagtggaaaagtttgatttcaaaagcttttaactaaatttgcaacgtacaaattgttttttaaatggtgtaatcgattacaatatattggtaatcgattaccagtgtatctgaacgtgaaaattcaaattcaattgtgaagagtcacatcttctca

SEQ ID NO: 72590 - DNA, 449 bp, Glycine max
  unsure (1)..(449): unsure at all n locations
tttagaaagcaatctcattaagactctctgaaaccctattaactcttgcattctattcctttatnggattaattgtatagtttggtttatggaacagttggaagttcagtacttgcatgactacgttggaataaacaccagtgttaggttgactgcaaactcaattgtcaacttctctggtgttataggaactaatattcttgctcttcgtgctgatctttctaaagctatnggagtcattagacatgctgcaaataaatttgctatatgtaggataagagaatgttgctaagaatagtattctgttttaaatgaaataggaattcaccgcgtntattattagtgttcttatctctcgcaacattgaaatcttcttttggactcatgttaagaataccctatatagnatatatatatatatatatatatatatatatatataaagaaca

SEQ ID NO: 72591 - DNA, 471 bp, Glycine max
  unsure (1)..(471): unsure at all n locations
taagtcacctgaggcatgcaagctnganacattggaacccttggcttcagccactatcttccgaatcttcctacttagagtgacccagggaaacttcatgaagaagcagaaactaataaattagttntaataatatagattttgaattaagatactgtttctgtaaagacattaacttaatggtattgagttgactggtgcagctattttgtactcaaaagaagccaaatagaagtcatcaacttttttgtttggtatgataaactaggcataacacttttggcaaatagtggttgattttagttgcttgttagcatataatggattcatagcagctggtaaaatagacacccaaattaaagccatgacaactaaagtttagcgcaattctcgttggacttaatatacagtgatttgcatgtcatgctcctgtgaattatcattgtcaatntagctattatatgtcatttg

SEQ ID NO: 72592 - DNA, 429 bp, Glycine max
  unsure (1)..(429): unsure at all n locations
agcttcttggatgcctaagtgtggaccctctaaggctattctccattctctactntnttcggagccccatgaatgtcattgcctagcactgttcatgtgtcctccaccttcgagtctggagccccgcgaatgtcatcgcctagcactgttcgccaattctccattccccactttcattcggagccccatgaatgtcattgcctaccgctgagcatgtgtcctccaccttcaagtttggagctatgcttcatgattgcctaagtgtggaccctcaagtgcaatgcttcattctccactcttttgcgagccccatgaatgtcattgcctagcgctattcatgtgtcctccaccttcgagtcgggagccccacgaatgtcattgcctagcactgttcgccaattctccatatctcacttttattctgagccc

SEQ ID NO: 72593 - DNA, 462 bp, Glycine max
  unsure (1)..(462): unsure at all n locations
gctgtgacttgagtcatcaagagattataaatatgtgtctatgacatgaatnncaataactatcaataatttatctttcaatcttctctcaacatcatttaatatctttcaactatttctatagaattttttgattcattattctcttcatctttctaaaagttattgttcaaaactttctcttccaagaaaagatctttgttcaaaaacttgtgctattcattttcttcattcacttctccctttgccaaaagaatagaaggactaatcgcctgaattcttttgtgtctcttttctctctttccaaaagattcaaaggactaaccgcctgaaattttttttgattcttcccttccccttaagcacaagatttcaaaggactaaccgctcgagatatcttttgtttccccttacaaagaatcaaacgactaactcgctgagaattctttgtccccacacatt

SEQ ID NO: 72594 - DNA, 445 bp, Glycine max
atccttatagtcacctgcggcatgcaagcttcaacattcaattacgagcgtctcgatatataacggtatctattcagacatccgagtaaaaagtaattgtcgtttgaattagctaagagcttcggtattcaatctggagtgtctcgatatattactggactcaatcaagcatccgagtaaaaagatattgtcgtttgaatttgttcagagattcaacattcaatttcgagcgtctctatatattacgggactcaatcacacatccgtgtaaaaagtcattgttctttgaatttgctcagagattcggtattcaactttgagcatcttgatatattacctgactcaatccgacattcgagtaaaaagatattgtcgttcgactatgctcagaacttcaacattcaatgtcgagcgtctgtatatattgctggactctatcagacat

SEQ ID NO: 72595 - DNA, 482 bp, Glycine max
  unsure (1)..(482): unsure at all n locations
agcttctgtgagtattccttanagcttattaatgtcanatctttgcacaatntaatcttgatctacttttcaaatcactagaccacaatccatagtgttgtgtgaaaacttaagttctgcattggacgacaggtttaagaacttgttttggttgcaaaatgacttccattgcgaaaatatttataattttatctaacatactatttaactcccccctttctagtgtgatttattatatttcaagaacttgggggcttgcataccggataggtattctactagggtagtaactattagaaagaatggatataacatcgttacgttaacatcaattttttagagaaccaatgttaacaaaaacgcggcggcatatctgtaaataaagtaatttggttaacatcaattttttgaanaatcgatgttaacgaactaatgttaagcatcggttttccaaaatcaatgtaaccaactgatgttacatc

SEQ ID NO: 72596 - DNA, 495 bp, Glycine max
  unsure (1)..(495): unsure at all n locations
agcttcaatccacgaacctttatcttggaaactatcatgtttcttctcttgttggaacananaaatacaagcctttntcttttcttatttatggttggtttgcgtcatttcacgtgaccttatgcatccaagttccaactataacattccaacagaaggtcaatctctacccgtcaaagtntaatgatntgtaaaataattaaagaaatatgtgaatataaacacgcataatttcattaaagaaatgttatctgtacaaatttaattgtaataaatgatatggaatataaattgtatatcatacatctcaaatatattgtatatatttaaaaacatctttattacaaattntaattataatataatntatatatctaaaactacatatgtattataatataattatatatgtaaaattatctatttattactaaatttaattaaataaaataaacctttatcatatgcatctgcagtaaaatatactaaaatact

SEQ ID NO: 72597 - DNA, 484 bp, Glycine max
  unsure (1)..(484): unsure at all n locations
agctngtangattatggagtacccatcacatgtggtactatgtggcggtcgggcgatggtgcacaacaagttntccaaatccacaaagcgcgcataaacccaccatcccctgttgcccacctccatctgagctcacgtactcccacgtagcccatatactcgtttctctcagcatcgggtccccatcaatgctcccaagcttgcataacattcaagcaaaacaacattcaaacagcacaagctaccacagccaagaaaacagagcataggcagaaaactctgccaaaacaccaaccaaaatcacagctnttctgacttaaagaccacagtaacaattccttcgttccaattcgttaaccggtggatcgactcgaaaattntactggaaatctctagtacttaagcctacattgtgaccgttgggatctactagcaaacatccagaactcattctgtactgctctttccacagccaaccacacaa

SEQ ID NO: 72598 - DNA, 480 bp, Glycine max
  unsure (1)..(480): unsure at all n locations
tgcaagcttctacttatgtggcagggcgggctttcttatctttctggtctccaacgcgagctntgaccaccgttcttccttcccgcgatgcttctctttatatccgcctaagtgggcttatagcctaaaccatacttcccacgatttcctttggcatttatcaagctagttatgccgccgttgtctttgcctaaacccattccgggttcgtaaccgttccccaacataactcaggccatcattactgctgcatcggacaggcaaggctgcccaaagaatgagtccacggaggaaatgctgaccacctcacaagactggaaagcggtttctaacgattcttctgcggcttccatataaggcatagaggatgggcagctcaccaagatgtcttcctcgcctgacacgatgaccaagtgcccctccactacgaatttcaacttttggtggagtgtagaaggcacnaactccactgagtggatc

SEQ ID NO: 72599 - DNA, 455 bp, Glycine max
  unsure (1)..(455): unsure at all n locations
tcttagtcacctgccgcatgcaagcttagactggattagaggtttaaggagtcaaaatggagttacatagtctcgatcttgcacatggaaatttcagctttacatttttgggcctagttntgtgtgtattgacccaatagtgnttttaattgcggagctactattagaacaaacaccttttctattcacattaccaatatgtgctttatttttttttctttcttgaaaatacatttttcacgaaaacatgattacgctgacaaaatacataatagaattatgtttccattgtttaaaaaggggtgctaaaaaaatgcacaaaacaaacattgacaaaatacataatagaattatgtttctgttgtgcaatgtgaattggatctatatgggatgagtggcacgacgcgatggtttgtggtggtgcgagtgcaacatgactngaatctatatggggt

SEQ ID NO: 72600 - DNA, 449 bp, Glycine max
  unsure (1)..(449): unsure at all n locations
tagcacctgccgcatgcaagcttctcatagtagaatgtaggcaacgtatntaccatattctgtatcatttccctttcagtcataggtgggacgacttgngctgctaggtctctccacctttaagcatattctttaatggactcatgttcccgcttggtcatgctctgaagttggttccaatcaggagccatatccgtgttgtattggtactgcctaatgaaagcagttgccaagtctttccatgaccggatctgagaagcttccagattggtgtaccatgccatagctactccggctaagttgtcttgaaagaagtgcattaacagcttttcgtccgtagaatatgcccccatccttcggcaatacatccgaagatgaccttttggacacatcgtccctttgtatttatcaaaatctggtactttaaacttgggagggatgatgatgtc

SEQ ID NO: 72601 - DNA, 475 bp, Glycine max
  unsure (1)..(475): unsure at all n locations
agcttaagaaaagagcctngagggtaatgttctcaacaatattngaattctctaaactgtttattaatatatctccattctgatttataatttattgattcagttctcttgactttcatgtgaacaggtgattgcagagtatttgtccttagaagaagctgctggaataaaagagggattccagctgatggatacaagcaataaaggcaagattagcgtcgatgagctgcgtgtagggttgcataaactatgtcaccaaattcctgatggggatatccaaatacttatggatgctgtgagtatttntcactctatctggaaactnttcttttctgtttgttctacaattgatgtgtgaagaaataagtagtttggtctcttgtttctcaaaattntatgttcattgtaatatatcacactaattaattgcaaacttggtaggagttattagtttataaatgctaacacacactgg

SEQ ID NO: 72602 - DNA, 504 bp, Glycine max
  unsure (1)..(504): unsure at all n locations
agtcacctgcggcatgcaagcttctattgttgctcctcctccttcttctntgcccactctagatgtttttgtctctcctcctactatggttactgtgccagtccttttagccaccactatcatcgctccacctttccccattgttggctcccttttgagcatgctagtgtgacgaccatgaatgctctaaaaatcctgactcctttttcttcagcttcactagattctccctcagctgttttggcatcattgttgccttcctcctcttctcatcccagtgtctccttagatcacgtttacacttctcatgatatttgattgatgtagagcatgggatataggtcagagaagggaactctagttggctttgtgtcttctntngacaagaaccacattcagttagttggggtccaaaatgcaactgattctgtgaagggtcttccccagagaagtcttgagatttcggaggagaatggaaaaatgccttatgaagctctaagcacc

SEQ ID NO: 72603 - DNA, 345 bp, Glycine max
  unsure (1)..(345): unsure at all n locations
agtctcacgattgtcacgtgctcattctacattgtatccgtggctatacgagacatcttgccaaacaaagtcaggttcacgagaactcgcctgtgcttttacttccatgctatatgtagcaaagttattgatccaataatgctcgatgagtnggaaaataaggccgcaattatactctgccacttggagatgtattttccccctgctttctttgacatcatgactcacttgattgtgcatttggtcagacaaatcaaatgctgtggtcctatctatctacggaggatgtacccgtgtgagcgatacatgaagatcttagaagggtctacaaagaatctatatcgt

SEQ ID NO: 72604 - DNA, 440 bp, Glycine max
  unsure (1)..(440): unsure at all n locations
aagaatggaatatgaatttatcaaagaccacanaacanatngtgatgattggattctgaaagtgtacatgtattgctcgattgtggaatgtttataaaaagaaagatgagcaacatccaatgtgattggaaatggtgttgctggatgaaaaggtaaccattttcttttacattttacatatcattcaattttttcatattagtaatttctaaattctatattttctgctctatagatatatctaagaataaatatgttgattaaacaaagatgaaatctatttatcttttacataaacatgtaaaagaaaatatttcccatcaactgtaactattacaaacataattgtatttactctctccaatattacatatcacaaaatgcacaataattgtctacattaaattaatttaaacaaatatcatgtggatgaactttat

SEQ ID NO: 72605 - DNA, 475 bp, Glycine max
  unsure (1)..(475): unsure at all n locations
agcttagagctntgttcagatatgtagcattgtgtatctttgttaccgacaacagcaacgaagacaacaaatagtgtccgacatgaaaagaacaggtttgtgatgtatttcatttctccttttgattcctgngttctgtcggtacaaaagattgaatttttttgtgttcttcagtcttatttgaccgtggttgagtattcttcttcttttgcaagacaaaagccacagatcatagtatgttggatagcttacaggtttgttttccctccccgtctccttctgcgttntcattttacctctctttgcatttgtatgctattttatatctcggctttttttttcactgcatgttcattgtttcttctaaaactgcgattgtttctccaaaaaactttgacttttgggttatgataatgcagaatattgaattnttttttctcggcctcactacaaganaaatgacctatacctacag

SEQ ID NO: 72606 - DNA, 488 bp, Glycine max
  unsure (1)..(488): unsure at all n locations
agcttcgggctgctcaatagctccaggttgctgtatagaatggcataggtctgtatggnggtcagcaaaggagcacaaaccacagacccttgcaacaggtacagatttctggttcaaggccagctgggttaccaagttaaccaatgcatccagttngccttcaagcttcttaatttcagatgatgcagctgagtttgtagctacctcatgcactcctctaatgactatagcatcatttctggagctaaattgctgggagttggaagccatcttctcaattanaattctggcttcagcaggagtcatgtctccaagggctccaccactggcagcatgtatcatacttcactccatattgctgagtccttcatanaaattttggagaagcaactgctctgaaatctgatggtgagggcaactggcacatagntttttaaatctctcccagtattcataaaagctctctncactgagttgtctaatacctg

SEQ ID NO: 72607 - DNA, 498 bp, Glycine max
  unsure (1)..(498): unsure at all n locations
agcttgatagcacgcagagactaacgtcctcttctgcgttctatcgtaatcgcggccgacaagcccgctgacacgcggagatntacatcatcttccgcgctcacaagatctgtcatactgacatttgagtcacgctgacgggcggaaatacccgagtggttattcgtataaacattcctttttgctgtctgtaagaagaaaagcatgatagcatgcagagactaacgtcgtcttctgcgaccttcgtcaatcgtggcggacaaacccgtcgacatgcggagatttacgtcatcttccgcgctcacaagatctgtcatacagacatttgagtcatcctaacaggcggaaatacccgagtggttatacgtataaactatattttgctgtntataagacgaaaagcctgatatgacgcagagacaaacctcgtcttctgcacccatcgtcaatcgtggactacaagcttggtgacacgcggagatttatgtcatcttccgc

SEQ ID NO: 72608 - DNA, 453 bp, Glycine max
  unsure (1)..(453): unsure at all n locations
agcttcntttggaccttgaacaagcaactttacttctctgtcataaccatgctatgngctcgcgactggtccctctcttgccttctcagctcgagttcactattgctaccccatagagctccgcgaaatttattccgaccatactcttccttgcgagccctcttggtctcttgttcaagggctcttgcggtaattgcattctcttcccgtaacccggcacactccttccgaatgtgtgtagcggccaacttgaacttcttcttggcgagtttcgcctttactaactcgcttttgagagcttggacttcttcgtgctcttccagtgcttcaaaactctcttcgctgacgactattaacttggcgagccaatctaaacctcgtatatgaactttcagccattcgtggtacccaccaatgatgccaatacgaatgcccctgagctcttgagtctta

SEQ ID NO: 72609 - DNA, 482 bp, Glycine max
  unsure (1)..(482): unsure at all n locations
gtcttctatggatgctggcttgttgaagtttctattatgatgaganggattctatacaatctaaccagacatggcatttagtagacttgcctcctggttgcaaaccaattgtgtgtaaatggatcttgaaaaagaaactaacacctgatggtactgcgtataaatacaatgctcgccttgtagccaatggttttatgcaaagagagaatgcggatgtcttcaacaccttttcaccagtcactagaataacatctattcgggtgctcatatctcttgcttctattcacagtctagtggtacaccaaatggatgttaaaactgctttcttatatggtgaattggaataggaaatctacatggaacaaccttaaaggtttgtgattcatggacaagaagataaagtctgcaagttatagtaaatcttgtatggtctagaacaagcacctacacagtggtatgaaaagcttgataacttaatactc

SEQ ID NO: 72610 - DNA, 447 bp, Glycine max
  unsure (1)..(447): unsure at all n locations
agcttatgcgcctatntccttacaaacgttctctttactttacatttaaccgaaaaaatgcacccatatacaatcaaggcagtttcgttacctagattatttacacgtacctccaaggtgtatntgttacttacatcacacacatctccttggctaaattcacatacatgcatactcaaagcagtttggggcaccaaanattgcacctgtgcacatcttggcatttctaatacctatacatacgcanacttcatgatgaatcttgactatctacacaataaagtgctacatttcatgctcttttatcaagtatttgctacctatagccgcatgcacattcaagcatattttcctttgctgactaanatagtattcaaattaaaagggtatatattttttgtaatatgtcttcttcacataacatgcaacatatttatatatattttt

SEQ ID NO: 72611 - DNA, 432 bp, Glycine max
  unsure (1)..(432): unsure at all n locations
aagcttaaggctnagtcttcatggtggctcccctatctcttacaacgctcaacaccgaatttcatgctcaggaccaaatggttgaattttcctaaagagatgagtttgctaatcgtgatctatagattataaatacgttcttcagcgtgaaatacacgacttttcacttttcttcttttcaaatgactacccaaacactaacccctttttcttcaccacccatgaccactagtggccaccacatgctgtcgttgattaccactggacccctacacacagaggcaggttttaatcagagtggaatcctaagaatccacctcaaggattcgatagagaaacaacctcatagtcctctctttcatagtttctcgaaaggaaccttgacttctatgtctttcttctagttagntggagcttctcttagtatctctt

SEQ ID NO: 72612 - DNA, 505 bp, Glycine max
  unsure (1)..(505): unsure at all n locations
agtcacctgcacgcatgcaagcttccatcaagtggtatcagagcacaagagcttcaagtttgtgcttcttaaacctctanttaattttagctgtaccttatccttcattggtgcttcttcattattctccatgttctcctcacatttcttgtgctaaattttgttaacataattctttagaatnttcaccgattaaacttgctatagaagctagatttgattttctatggttcaaatttcttattcttgtttttgaaccatgaatcatgttgagtttaagttcctttgacgttttgtttgctattttntatagctaaaacctataccataaaattcttacaaaaacattaaagtagaagaagaactccanaatctagagtgacttgttcacctattgtagttctgtcatagaaatcatggttaatcatgaaacttgtcacataagaattcctatattgtgctgaagtttattnttcttgtttctctgctaactcacttgtcatga

SEQ ID NO: 72613 - DNA, 488 bp, Glycine max
  unsure (1)..(488): unsure at all n locations
agcttcactgttnntgagtagttgtatcaaagaacttatatttttagttgatggttctttntaagtttagtataatctttggacagtttcttaaattcttttcacaagtttttgtaagcttttgaaagaatagatgagcttttgaaagtagttcatgataagcttngtttaaggatttagggtcatcgaagtctacctttttgtcttgatctaatattgattcttctattccagtatcaaccattagacataggttgacttcctcttcatcctcttcatcaaaggtggtgtcgtccaagtccttccaagtgcatatgagacttttcttatccttcgacttatgcttctttttgtatttggacttctcctattctgggcattctgacttgaagtgtctaagctttttttcacttgtagcatattattgaacttttctcttttctttccttgaaaaccttcttggatgagttctttcatctggactcatt

SEQ ID NO: 72614 - DNA, 497 bp, Glycine max
  unsure (1)..(497): unsure at all n locations
agcttgngaggatngatggngacccggtgttgagagaaactatgatatgggctacgtgggagtacgtgagctcagttggaggtgggcaacaggggatggtgggtttatgcgcgcattgtggatgtggaaaacttgttgtgcaccatcgcccgaccgccacctagtaccacatgtgatgggtaccccataatcctacaagcttgagatgaggaagtgttgaagggtgaaacttcctgcttttattattgaccatagagtggtacctggagatatgtcgcggnggtcaggagaccttgtggacgtcaggtggggtgctattgcccanaaccaagcttgaccaatcccgacccaacccgggcatagtcggtcagtgagaacctgcgatgtacctaagcaggcgagctcctggtagtcaacagataataggaaaacaagaccacaaagcaaggaggcttgtggtggctggcagctgtgaatttgtgtgatatgtggagtat

SEQ ID NO: 72615 - DNA, 480 bp, Glycine max
  unsure (1)..(480): unsure at all n locations
atcctcttagtcacctgcggcatgcaagctntantaaatcactgataatctaatcttagagattgtcttgttattgcanatcanaaccctcctacatcttcagctcatatagcttctacttcataaacaacttgttagtcaaggacttgggcatatattaactctcaaatttcgtccatacctcccccctgaggcgttgggtccataacatggtacaaaacctcgtatgccaatcataaacatatggtcattccaactctctccttcaactcctcccaatgtagatcatacattccaagacgtttaatagcgtgcaatgcctttagagaaccttgttgtaacaacaaatacttaaccatcttctgctacaatatgaaactggaatatcatcaaactttcccacttttaaaattgcactgagggtaagcaccatatcataccaagtggtgaaaataacaacccaattctaaatatatagag

SEQ ID NO: 72616 - DNA, 197 bp, Glycine max
  unsure (1)..(197): unsure at all n locations
tattactccatctgatgacgcaggagcactgatgcatgacccatctacagatcangctagatgtcgggctctatctacaatgataacagatgatatgagtgaggatacaaccatctgagctctgatcataatgcaatgaatgcggagacactaggcattatatacttcgctgcccagagcactattagcgagcgaat

SEQ ID NO: 72617 - DNA, 481 bp, Glycine max
  unsure (1)..(481): unsure at all n locations
atcctcttagtcacctgacgcatgcaagcttanagttgcctgcanatagaatatattatttttaattattntataggataaanagtcatttatttaaacagaattcaataacatcaaattacattaaaatgtatttgatgaatatattgttataattgagaattcaaaaattagaccacaaattaaaatgttaagaaaattctgaaatataaattaaatttaaagaaaaatataaatagtttaaaatatcaaaaaattatacaatcatacatttgcggtatatgtatatatataataataataatatatataataataataattataataataataataacattgtctggtatagctaacaaggaaacaaggtacttgaatgatgaaactcctcaaattgatattttctcgtccatgagaagccagtgtcaaactgtgacaatgagaaaacaaagaaacaaggtagtgacaatttgaatct

SEQ ID NO: 72618 - DNA, 437 bp, Glycine max
  unsure (1)..(437): unsure at all n locations
agcttatcaaggatgaaagtcanaatgaggattatagtatttctgaatctaggaggcatttatccncagtgcttacagaagcttgttgtatcacaggatccttgttgcggcactattacatagtcattacgacggtcttaagaaaggattatatgttcaatgatttgaattgtttttgatttaatttagttaatagctagcaaaaattgttacatatacatacatgtattgtaattaatggtccaatattttcacacttgtcatatgtacataaatgattttataaatattcaaaatcatgatgatgcttntggttggcataatgtgcgtcttatttaatttataggtaccagagaccaacgtaaaataaatgcatcataaaaaaaattagacatactaagacggttccaataaccatctgtaaatgaaaacacata

SEQ ID NO: 72619 - DNA, 483 bp, Glycine max
  unsure (1)..(483): unsure at all n locations
agctngtctaagtccttcgataattaggatgatataaagagtttatgcatggatgcatgtatgcatgattatgccacagtatggagaaaacatggtgaagttaactccaaaatgttggagttaagggtaaacacgccatttggtaaggactatggtttcatatgtacctgtatcacgggttctaccaagttcccaaagtcattgaccacttccggatattgtcggattacaggactactctcggtccaacaacgtccataggaaagcctcgtttgagtgtagtatcgcgtatcaaccaattcaagactactcttgattagccaccgcactacgtcctanaaggctaagattgggtaaaggtaactaaaggtcctcaacttcatacgttgcttggaaatatcaatgctgaacacgactactcatgccaacatagtaatattcccaagatcccttcatttgagcggcgttatcacatgtgccaca

SEQ ID NO: 72620 - DNA, 405 bp, Glycine max
  unsure (1)..(405): unsure at all n locations
agctntangtttctcattgactctagattgctatttagttgtacaaagattgtatggggatctgcagaagaacatataccacagaatcttgcaacaggtgcagatttctgattcatggcaagctgagttactatgctgaccaaggcatcaagttttccctcaagctttntattttcagtagatgaagatgaatccgtggccacctcatggactcctctaaggacaatagcatcatttcttgcactgaattgttgggagttagaagccattntctcaatcaaattcctagcctcagcaggggtcatatcaccaagagctccaccactggcagcattaatcatactcctctccatgttgctcagtccctcatagaaatattgaagaaagaagtgctcacaaatttgg

SEQ ID NO: 72621 - DNA, 489 bp, Glycine max
  unsure (1)..(489): unsure at all n locations
agcttcaacaactntaacacgtacctgctatctgtatttgttctgtagtgttgaatacaggtattaatacatggtttagacatatacatgtatatataaaaagtagtgacaatgtgctntacctgtacttgatataatgaaacagcttccacaagaacaccaatggacaaaccaacttcaactacaacaaagtaattcaccttcacctggagttcatataatgagtaatggcattagaagaagtcaaagccaaaccaacttcaagtacaacaaactaattcagctttttctcaaccaaactatgtcaaactatttgttgtctattaaaagtgttagttattcatgtgacagacatactattctagtntctattcatcattaagattcacaaagcacatatagtggtctcatagcaataccacacacagacaggggtgcagatagcagtcacatgcccacaatcagaccagctattgcttgctattatct

SEQ ID NO: 72622 - DNA, 482 bp, Glycine max
tagcttataataagaaagtgtagccgaaacttctatgtttgttatgtacgctggaaggatatcctgcccatggatataaggatcgagctttcggcacatggtccccaaattgtgaaggacgcggtaaaataattcagatctattcgaatggtgcttatgaattagaggaggtaacctctcagaaacgtactttgtgaataaatggtagatatttgaagaaatatggaccaacatggctcgaagctagataagcatataatagacaagattggtggaaacataataatggcgattacagaattattgccactaacgggcatatgtcaatcttacatgaagagtagaatccaaatcacaattcgaaatatagatatataagttctactaatgcatgactaagtactcatatagtttcttagcggtggccatctctatgcttaagaccttgtcagcactctacatagctcttgcctcatctgcta

SEQ ID NO: 72623 - DNA, 208 bp, Glycine max
ccccaccaagaaaaaaggaaacgccccaaaaagcccccacaccccaccaaaaccacagggcccacccccaaaaacgggaccccccaaacccccgaaaacccggcaacaatgaaaaaacccaaaacaacttacgccccccccaaaacacccccccggaacacccaaaaacccaaacacactactccccccccccaacaacccccccccc

SEQ ID NO: 72624 - DNA, 350 bp, Glycine max
  unsure (1)..(350): unsure at all n locations
tcccctttctttggtttgaagctcattacaagccttaagtgaaaaaccatgatatcaacttacccttaaggaattntggagcttttgaattgttttgggaataagctgggaataagtgtgggggggtatgtttcattggaagatattgattttggccatgcttaatgttntattttcgccatgcttcatgtatatatatatngcctagttctttctttaatcttcaatttcgtactgttcaatanaaaanaatgaanaattgaaaanaataaataaaataaaaaaaattcagttgctgcaaattctgcaatttcgtactcttcaaaaaaaaaagaagaaaagaagtgaag

SEQ ID NO: 72625 - DNA, 266 bp, Glycine max
  unsure (1)..(266): unsure at all n locations
ttacctgactaaaaagggaggaattctcaagaccaaagaaagaaatcattaggaaaaaagaaggatccatcaatggaaacaaagaaaaagaaatccatcaagatggagaagaanaagagagaagaagggagaaagttccgatcaaaaaaaatatatgcagaaagttttggaccgacatactgacatcaaatgtcacaatgatanaagaagaagggaccatgactaaatgtctccccttattgcagcaaatctgtcctacacctttt

SEQ ID NO: 72626 - DNA, 459 bp, Glycine max
  unsure (1)..(459): unsure at all n locations
agcttgnttgtctggagaataattgnctgttcgtctgttggaatgataatctcttatagtctgcatcaacctggacactttagaagatcaataacatggttatgtagtgtgaaagtgaattactatggcatgcacatttgataagctacattgtggttcagttattcgctaaagtgtgtgaatcttcacaacttgttntattatcatatctatatctatgaatntatatagacttaattgcaaatttacaactcaattttattattgtcaaatttattatcgaagtttatttctgcaatttttcactaggtttcaattttgaaatttaccaccattgacaaagaagatgattttgactttgcatcgttgaattataccatgtaaaaggacttttcatatttgtagtggataaaatgccaaagtaaaaattaatataattatggatgtgaagtgatataa

SEQ ID NO: 72627 - DNA, 164 bp, Glycine max
aaaaattttccccccccgcgggggggggcggaaaaaaacccccccaaaaaaaatcccccccccccccccagggaaagaagggggagagcaagcccccccaccagggggggggggggggggggggaagaaaaaaaaaaaaaaaaaaccccaccccgccccaaaga

SEQ ID NO: 72628 - DNA, 419 bp, Glycine max
  unsure (1)..(419): unsure at all n locations
tttacatgcccaattcccttgagtggcatttctattgggtgttatcttggntgntacatcttactacatttgatttttgtgttgcatcatgcatcatcatggttagtgtgaagaaaagtttttaaattagaaatttttcttcaaaggcaaaaactctattttaatcgattatagcctcatcataatcgattaaaacaagttgtctgcagcttgtagagttgagtctcatatcggtttaatcgattacagctgtcttataatcgattacacagttatttgagacaatgacttatttatttangagactctgctntaatagattaccaactagaataaatgattacttctctntcgtttagttgttcaaaggtgaacaagaacactctaattgattactagagcatctaattgattacatt

SEQ ID NO: 72629 - DNA, 332 bp, Glycine max
  unsure (1)..(332): unsure at all n locations
atcctcttagtcacctgcggcatgcaagcttctntataagttgaaccgatttatcaatatacttttgttgagttntattcagaaaaattggagtttatctcttttatcttagtgagaatgattctcctaagtttttgagtgattcaagaacaccctggctgtatcaaaggtctttcacatcctttgtgtgttgtcctcgctggaaagagtgattctttccttccaccatttcatcttcaacctttgttctttcaacccccatatccagaattatctcgtgaccataactctcgtnttactcgttcaaattaagtgattcttgagcctaaatt

SEQ ID NO: 72630 - DNA, 300 bp, Glycine max
  unsure (1)..(300): unsure at all n locations
aaaccatcttctcaatcaaattcctagcctcaacaggaatcatatcaccaagggcttcaccactggcaacatcaatcatactcctctccatgttgctaagtccttcatagaaatactatagaaagagttgctcacaaatctggtggtgaagatagctcgcacacaatttcttgaaactttcctagtactcatacaagctctctccactaagttacctgatgcctgaaatgtcttttctgatggcagtggtcctagatgcanggaagaatntctccaagaacactctcttaangtcatcct

SEQ ID NO: 72631 - DNA, 473 bp, Glycine max
  unsure (1)..(473): unsure at all n locations
agcttctacttatgtggcacggcgggctttctcattttcttgtctccaacgcgagctttgaccaccgctcttccttcccacgatgcttctcttcatatccgcctgagtgggcttatatcctaaaccatacttcccacaatttccttnggcatttatcaggctagttatgccgccgttgtctttgcctaaacccattccgggttcgtaaccgttccccaacataactcaggccatcattactgctgcatcggacaggcaaggctgcccagagaaggagtccacggaggaaatgctgaccacctcanaagactggaaagcggtttctaacgattcttctgcggcttccacataatgcatataggatgggcagctcaccaagatgtcttcctcacctgacacaatgaccaaataccccttcactacgaaatttaacttttggtggagtgtagagggcacaacttccactgagtgga

SEQ ID NO: 72632 - DNA, 469 bp, Glycine max
  unsure (1)..(469): unsure at all n locations
ntatgagataccatagaaactattgtagttcctaaacaaaaatcattgatgaaacttcgccaagaatgcccatcgaagaacctttattcaaacctttcaaagttagtgagaaggcttatagaaaaattagggaacttagaaaaactaaatccttaattgaaggcgtaggtgacaaccatagtgaattactaaacaagattggtagtttacttaaagtcattcccgataccccccaagcctcggaaaatacttccaaaatggtaacaagaagtacctccaaattaatcaatgttattaatgaagatagtgaccaaaactcagataacacaactgagataggatcagtgtcagaaaagaatataaatccaattaattccaaacactggaagacaccctccannatatattatcaacgtccaactggccctgaccttctattagaagaaagaagtgaaaacaattttaagag

SEQ ID NO: 72633 - DNA, 297 bp, Glycine max
  unsure (1)..(297): unsure at all n locations
taaattttctttccatcataccttggatgcaactgtgatcttatacccatatcagctagatctcgacgggtattcaagccatactttcgctagccttgaatgttaaggagcgcnccaatcacactgtcacaaacatttttctccacatgcataacatcaatacaatgtctaacttcaagatcacaccagtacggaagatcaaagacaatggacctctgcttccatatgcaactctgacctttatacttcttttgggtcttccaaatacagggttcatgtgtngaacccgctgatata

SEQ ID NO: 72634 - DNA, 437 bp, Glycine max
  unsure (1)..(437): unsure at all n locations
agcttatctnntgaaatacagggtatcattgccttatataagtagaggacaaaacagaaaanaaaaataacagaataaacttccatatggattttggtcatagcccaacaattcaccatcttgaaccaacatccatataaaacacaaactgcaccatccaaccacacatgattttaaccccaacaatcaacattgagcaagcttaagcagtgatcaaacttgctctttggaactgactttgtgaacatatcaagaggattgtgcagagtgctgatcttatgaactttgattcttctttctgaccgaatgaagtgatatctaacatctatatgcttggttctatcatgatgaacctgatccttggccaagcatatagcactaaggctatcacagtagatgttagcatattcttgagaataattccgagatcatttatc

SEQ ID NO: 72635 - DNA, 356 bp, Glycine max
cccccgagagagagatgaactaacatcttttggttgaccccaacgatgaactctatgcatcgcctgtagatccaatgctggattccaatcactctcgtaaaatatgactgtgtcagcagcttgcaagttgatacccaatccaccagctcttgtactcagtatgaacacacaaatatcactcctgaaacaaagatataaagaaacaagtcatcttcagtagtctcaccaaagtagacacattaaagcatgacaacaaagacattacctgtgctggaagtctctaaccatgtctctgcgatcctgaatagtggatgacccatcaagtctaaaatatctatattttctatagttcatat

SEQ ID NO: 72636 - DNA, 451 bp, Glycine max
  unsure (1)..(451): unsure at all n locations
acccagctagcctttaatcagaaatctgtacctgtttcaagagtctgtggtttatgctcctctgccggccaccacacagacctttgcccttccatgcagcaacctggaataattgagcagcctgaagcttatgctgcaaacatttacaatagacctcctcaacctcagcagcaaaatcaaccacagcagaacaattatgacctctccagcaacagatacaatcccggatggaggaatcaccctaatctcagatggtctagccctcaacaacaacaacaacaacctgctccttcctttcaaaatgctgctggcccaagcagaccatacattcctccaccaatccaacaacaacaacaaccccagaaacagcaaacagttgaggctcatcctcaaccttcccttgaagaactngtgagggaaatgactatgcaaaacattgcagttcaacatg

SEQ ID NO: 72637 - DNA, 451 bp, Glycine max
  unsure (1)..(451): unsure at all n locations
ctgcaagctgtgagaatatcatgatttctcttgttttgattgttgcacttacccaacttattaatgtgaaattatcattactataccctttagaactttctttgaacctatttgggggctatccaatcctaattgcaagaatgagtaatatcaaggcacttatttagttattaatgtgaaattctcaattactataccccaattttaaaatttgatgcttcttagtgccttatggnatatattgtggaaactttgtgttatgtntgaggtactctatatagttgtgaagtttggataaatataagaaaagaaaaaaaaagttgaaagagaaaggaaagaaaagaaagatgaaaggtggtgaaaaaagattgaatagtcataaaagaagaaaagaagcataagggaaagtaagataanatatacccttgttaagttgtntacttaatgtata

SEQ ID NO: 72638 - DNA, 235 bp, Glycine max
  unsure (1)..(235): unsure at all n locations
atacatatatgtttcaaacaatccaaaccttcactatgcatcaagcacacaanaagtagaaaatagccactgacccttttgcagccaagtcaacaatgtacactggttggtacatgaactgttcataccacgccttcctgcacgaccattacatacatcacactaaccaagcttaatggacccgcgaatgtttcacactcaccaacttacctaagtaataatagtgatcacgtcc

SEQ ID NO: 72639 - DNA, 428 bp, Glycine max
  unsure (1)..(428): unsure at all n locations
gtgcataataaggagtcaaagttaataacttcatatttcaagagttggggtattgaaccacttttcagccagtaaaaatggtgccttgatttgttgtaagtgttttatgataccaaattgaaaaataatatttttttatatgaaatttattacttcttttttatcagcatttctcaaaggaattgcttctacccacttggtaaaataatccactgcaactaaaatatacctaggtcctttcaaggaaggtggatgaatntgacctatcaaatctaaagcccatcctcaaaaaggtcaaggttttgttactaaatgtaactcacatgctgaaactttgtgatgggaccatgtttctgatgaatttgcataattaatacaatccttcaaaatagttggccaataatagccttgtcanaataacatccact

SEQ ID NO: 72640 - DNA, 342 bp, Glycine max
  unsure (1)..(342): unsure at all n locations
aattaaacaggccccaccatgaatattctcttctaccattcaagaagcttgggcaggggaattaagtgggcttgcattangaggatcaacatgaaacataaggtggaccttgcctatattcaagagacaaaaaaggattcttttgataagaatatttgtcaatccatgtggggggactcctttgtatcttgggattttgttccatcaacccaagcatcangtggcttgctgtgcatgtggaataattctgatttccacgtggagaggacggtcaaaggtaggcatttcctaatgttggtaggcaagtggataaaggaaaatcagtggctgcatattgtcaat

SEQ ID NO: 72641 - DNA, 330 bp, Glycine max
  unsure (1)..(330): unsure at all n locations
tactatatgttgacttgaaccacgcctgtattggaatggtgcgacaatctttcaacaccttattcacacattctaataagggtggtgtcatgtgaccatatcgtcgtccagatgtatcgtaagccatgctccatttttccttttgaatgccatcaatcccatctgctatggctggactcaattgacgaaaattttctaagttttgatcaaagacatgcttgcaaggagtgtacgctacatcaaatnntgtatcatcaaaagttgtatgtagacatgaaactcaaattanattaatgtataaataaaccctacccaattcttgaacatctc

SEQ ID NO: 72642 - DNA, 478 bp, Glycine max
  unsure (1)..(478): unsure at all n locations
agctntntggagtagaaacctgngaccaactctatttatttcataaaggaagtcatatctagtcaaggtctgagagaccatacaagtttcctaacgatttctaattatgtgggccattaagtctatcatatgctgacaatagccgagaagcccgtgaatctcttcgggggtggagtaggtgtctgccatcgccttggccttggctaacaatcggggaagttcttgactcccgttcaaggtaagagcaaaccgctccatccacatggttgcctcttggtgtaaagagtcgatcacccttcctctagcctctttntccgcatatacttgagcatactcatccgcgattctatgctcgtgggccgtggctagacctaactcttcttcgtacttggcgatgatagctaacatgttggtctctgtctcgcatagacgctgagacaagcttcttttggaccttgaacaagcatctaactctctt

SEQ ID NO: 72643 - DNA, 419 bp, Glycine max
  unsure (1)..(419): unsure at all n locations
agctngcctgtccgatgcccagtaatgatggtccgtatgatgtttgggagnggntacaagcccgaaatgggtttaggcaaagacaacggcagcaaaactaacctgataaacgccaaaggaaatcgtgggaagtatgggttaggctataaacccactcaggcagatgtaaagagaagcattgcggaaaggaaaagcggaagtcaaggttcgcgaatgagacaagaaggcgaaggaagcccaccctaccacataagtaggagctntataagcgcgggcctaggggacgaaggtcaagtcgttgcaatatacaaagatgatgttccgagagcattgaatttggtacgaccgtgccctccttgattccgactangaaattggcaagtggaggagcgcccggacatttacgcaacaagcataat

SEQ ID NO: 72644 - DNA, 380 bp, Glycine max
  unsure (1)..(380): unsure at all n locations
tccactccagttcacattcgagtacttaacgggtgtgaatttctatctgttaaaaccagaatacacaatacccttaagctaactgacaagccaattttggatgaaatttactaccggcagtctttcacgtatgcaggtaatcaatttcgggttcaatgtatgcaactaanagatgatgctgatgttaacacaatgttaatgtgtaatcatgaattnntcatttttggtccgattgagttattatgtagcattgctagaatcccagatgggtatttaaacttacttgaagctactatgacccctactcatgatgccctgctatattacaataggaggtgaaacatcgtcacgccaaatgagtntgttggttactcgttcac

SEQ ID NO: 72645 - DNA, 463 bp, Glycine max
  unsure (1)..(463): unsure at all n locations
agcttggagccattagtgagactcaagagttatatactttatataatgtatgtgtgagtaagaatggggagagtttacaagttttaagaatttaatatattatttttattattctaatcttttttataaaaaaaaaactctcttatttcataaatatatacaaataaatattntcataaaaaaatgattagttgagatccaacaaactataatttatgacataaattagacttaanatatatgtatnttttacaaaaaaataactatgttggagtaagggattttataaccaacaaaacactcccttcaaatctatagcttttgagaatacggaggagtgtactaatntggagacatgcaattaaatttccacatacttcacatttgtttactaactataataattattctggtaaacattattcatggacaagggatctatgcatgctttggttcttcatct

SEQ ID NO: 72646 - DNA, 457 bp, Glycine max
  unsure (1)..(457): unsure at all n locations
ggtcccaagatgaaagtggactttttctttcaagcctctgcatggattatcggtatcatcctttgatagnggacatttttcattcttctgagttaagaatgtaccgcacaatgtaaaatatactggttcttcctctttgcagaatttatttgtataacactcttcaacttgaaaaagggcctttaaaatctttttctgggtgccgaattgaatcantttttggtaaggtaagcattgcacctgcattccaaactattttgcattcagtttctttcctaattcctgacttctntgtctgatgtgtgcaatttcagtctgcaattagccctgatgcatcgaacatagtcagtggttctagtgatggaaatgcctatgtttggaaagcacatttcttactttaacgagatatgtgagttgatacttcagttcagagggatataattcactaatttcaaat

SEQ ID NO: 72647 - DNA, 223 bp, Glycine max
acacaccaaccaacattgattgatgcttctaattgtctctcactagccacaagaatagatactgaatctcaaattcctaatctatataaagcttgtgagtgttgtttatttttgaattattagcacgaatgttgccatagaattttctcctattcggcatccctgatgatttatgcgacaaggctctctaataccctaatttttcaatattgtggttgaaaac

SEQ ID NO: 72648 - DNA, 392 bp, Glycine max
  unsure (1)..(392): unsure at all n locations
agcttggagaaccaagccaatcttaatgctagactttatatatatgggaatagaggtaacaatggcggtaatgacggaccgaggcagaaccgggttgagggagtaaagctcaatgttcctcccttcaaaggtagaagtgatccaaatgcctacctggactgggaaatgaagactgagcacgtatttgcctgcaatgactacactgatgcgcagaaagtcaagctagcagcagctgaattctccgactatgcccttgtttggtggcataaataccaaagagaaatgttgagagaggaacggcgagaggtagatacatggactgagatgaanagggtgatgagaaaaaggtatgtgcccactatctataacagaaccatgcgacagaaactcca

SEQ ID NO: 72649 - DNA, 53 bp, Glycine max
  unsure (1)..(53): unsure at all n locations
cttgtcccggatctctaancaccgccgctgcagctgtctagcgttatgcagac

SEQ ID NO: 72650 - DNA, 369 bp, Glycine max
  unsure (1)..(369): unsure at all n locations
ctttccttgttttgaagctcactacaagccttaaatgaaaaaaccatgatatcaccatatccttaaggaattntggagctttggaaatgttttgggaataagtgtggggggttttntgttcattggataacttgttttgtggctatgcttcatgatggatttgggcgatacctgatggatattggatattggtaaatgttggacatgctgaatcaaatgttgtttctcaaaggctatagagctaaaaaaaaaaaatcgaaaaaagaaaaagaacagccatatagtttagtgaataagatcttaaatggcacaataatgatgaaactcttggttctactctttatgtttaagtttatctctacttctttt

SEQ ID NO: 72651 - DNA, 414 bp, Glycine max
  unsure (1)..(414): unsure at all n locations
atctctgcctggattttatacttggncaacatagaaggaaagggcttttcaccttcttcaacaagaactgcatgcacacacgctgacaacacatttaccaaagtaacttcatctggtgttacaccagcttttgtcatcctaatcaactcctccagagctccggtagctatttcattccttgcacaagcaccaattattgaattccatgacaccaaattcttattcngaatggactcaaaaacacgaaatgctgcatccatatccccgcattntgcatacatatncacaagcgaggtcaatgagatgacatcctctggtatgccagacttgataacgcacaggtgcacctgcattcctgtcaaaagggatgaacatccagcacattgcgttcacacacttgagaacgtgaaatga

SEQ ID NO: 72652 - DNA, 480 bp, Glycine max
  unsure (1)..(480): unsure at all n locations
agctngttagaccatacatcaacaggggtcttaaagtctatatcaatggatggtgagcgattcatatgataacatgttataccgactgtctcacgagataacatgtggccatgacgcatatgccatagggaattatcattggacatatggctactagattgtgaaacattagagacaaaacctatcacactggacccatgatggatgntacaaatttcttgtttggttccttgcattaccacatacttctctttccctctnaattgataactccaccttcaacctagcaagaaaaaccttttgaatccatgacatccacatatacaagaatttnttaaagctttggaatgtgatgaaacttcagtaaggttctaacaacaccatcatgcattctgatntgtacaaaacctataccgacatacttagtaggaacatcgttacccatgaggacatntgtgacactctctaccccgacataca

SEQ ID NO: 72653 - DNA, 484 bp, Glycine max
  unsure (1)..(484): unsure at all n locations
aagatagaaacaaacatagagttgattcattgcttattattctttgcagtgatcaagtatttttatgaaccaatctatccacaagcataaattgaaaatnggtcccacattctaaaaatggtcatctcagtgcttcagaaaaatttcccaaaagaaatagaaagtacaaaatcatacattaaagcttataagccaagtttgaggggtttatcttacttttgatatcctgtgtccacacctttgctggggatgaaccaatttcttcatctccctgagttttattccaattggcactttctttcttcaaattttctggggatgaaccaatttcttcaagctcgctcaacaaatattcagcattgacgtaatggcattccctccgagtcttcagaanaggagtccacaaacaagaaggggtgctttttcattgtctttagcatctttctgaccaaacaagtcagaaaatcaactatacctgcatagt

SEQ ID NO: 72654 - DNA, 506 bp, Glycine max
  unsure (1)..(506): unsure at all n locations
gtcacctgcggcatgcagctanagtatgcccgagtcattcatccctatgagatgttgttgaagtattggcgatcagaattgccattccttggattataaggttgaaccaagctcatgcttttacaaaaaggttcatcaagtcaagttgaaatatggaagtaaccgtcttgcaaaattggggcaaaagatgaatcgagtcacatcacttgttcgtctactgccaaacatanttaggggatgtgatgtcctttgtacttccagtttcaccttgacaaaatggatcatgttgaaaatctaaattgattcaaccccatatcctgcgtaaaaattcgcaatacttcaactgtacatcattcgcatgcatccatgcttttcattggttgcattgctcattgcattctttcctttgaaaataaaataaaatgaacttaaatcattgttatcaaaaagaaaaggacacgctntacggcacccttactgaactcgtgctanagctagagtaatgg

SEQ ID NO: 72655 - DNA, 509 bp, Glycine max
  unsure (1)..(509): unsure at all n locations
ttaagcaccgcggctgcaagctggcaataaanatcgaacctgttagtacctgttttcttcaccctgattntccccaacttggagaagcgggtttgagttagggtttaggtatgtcacttcgccccatatgtgtcccactaaaatccaatgaggataggatttggtttcatttttccactcatgttttgtaaatctgaatccaccttgttgtcattcctaccccctacggatatcataacataatgtctgannaagttaatatgaatgaagacaatgaanagaacctggtgtgtttgaagaagttaacatgtcttcaatacttctcaggtattaatataattgtgtatattgttaaagtaagtaaatgaatgttcctcgaaaactaaacatgtattatctctttcgtagggtgttgttacccatgatgacgttttgcattggactcgttttattgtgtatgatatnggttttctggtgatgataataaggtcaaacacaaatactggaaa

SEQ ID NO: 72656 - DNA, 419 bp, Glycine max
  unsure (1)..(419): unsure at all n locations
aaactctgctcaacacaccaaccaaaatcacagcttttctcacttatagaccccaagaaccattccttcgatccaattcggtaaccggtggatcaactcaaacattttactagaagtctatagtacatnaagcctacatttttgaccggtggggatctactagcaaacatccagaactcattctacattactctttccacaaccagcaaatacatnagcattttctgcacttgtgcaaaatcctgctgcacaatttcacagcaaaaatctgcacaaagtgcagatttcgaaaatcacacttcctctcatccaatcttgcccagatcaattgctacaatttcacatctttggttttctctctagcacagtccaagctttctcataagtnctaaatgacatttcaagctaggattaactca

SEQ ID NO: 72657 - DNA, 278 bp, Glycine max
  unsure (1)..(278): unsure at all n locations
agaaaatcaaggaagaaaactaanatacctgaatatccctccatatcaaatccttctgagaagcagagacttccttccaggtctcgtatgtcacatcgatcttatcacgaacgacaattcccaaatatgttcttaatttcttcttcttgggacccgttgccttgctggtcgcaagatcgacgtggaccactggtttctctgccccaagtggtctagtggccaaagatcgtagccgtgtcactttgcgtgtctgcttcaaggtggatggacacgttgat

SEQ ID NO: 72658 - DNA, 382 bp, Glycine max
tctctctttaacaatggcaaaagtgctctcttgggtatcttggtagtatatggagacgatattctactttgtggcccaagtgttgcatgtgttcattctgttcaggccaaacctcaagctctgttcaaactaaggatccctggtcccttaaaagactttctgggactagaaacactactacaataagcagttgtaacatcggcttattaacatcggttgtggacaaaatcgatgttaagttaaatgcggcggcatatttgtaataaagtatccttcttaacatcgattttcaaacaaaccgatgttaactaatgatgtaacatctgtttacaaacaaccgatgttatgcatacacgtaacatctgattttccaaaccgatgt

SEQ ID NO: 72659 - DNA, 477 bp, Glycine max
  unsure (1)..(477): unsure at all n locations
agctnnggtgctttgctgtggactctgatcttttaatttcaatcagaagcataccaagttaggaggagccatgcgcatgaacaggcttgctgcttttgctatggactctgacatctcaatgtcaaagcaaaggcatggcaagttaggaagaggcatgcacatgaacatgaacatgcttggtgattttgctatggactctgagatgttaatgtcaaagcagaagcatggcaagttatgaggaagctccggcaataatatttttcaagaaggcatgcacagtgaccatggctttggacgtggctatgcacatcatgggggtggcaaagagttaccttttgctgccaatagtagtaactctcatcatttttcgaagggtggtggcaagttcaattctggtgggcaccatgagtatttctcggaggacagcgaggagtacgaggaggcttataccgatgagcatgttggtgcaatcacagc

SEQ ID NO: 72660 - DNA, 430 bp, Glycine max
  unsure (1)..(430): unsure at all n locations
agcttatctataatatatgattgatgggaattcttatttactctttgtcaggttgcttctcaagctgtttattccttgcataagacttcaacaagagatgtaagtcgtttttattttaaattctaaattctaattattagattgagtaattgagatctgcaagactgatcaaattgtttttgacttattatctcctgtatcatatttattttattattntttctttgttcacagaagatatatctggccattagttaataaggttcccattccacaaggatgccattagtgttattttcttcaaccttttcactagtgtggcagtcgtctattaaacctattctattcttcctcccagntattggtttgcatctagcttgcacttcaagtttagacataacatcaatgatatgtnttagactaaaacaag

SEQ ID NO: 72661 - DNA, 314 bp, Glycine max
  unsure (1)..(314): unsure at all n locations
agaatgtgtatntggctttaccacaccttagctnttcttgattgtatatgntgattattacaactgaatgctattcttttaaggtggttgaggatttgcaaatccatcaaagttttcaattcattcaaatggtataatttgaagtgtttcaagtaatggtttgaagaaatgaatcatgaattatggtcctttgggatgactacaaaagtagaatcctaggtctngattatgatgtgtacttaccaaaatctagagctgggacacgtcacggtgggcattggacaagtgggctcctagactnttcacattgtact

SEQ ID NO: 72662 - DNA, 467 bp, Glycine max
  unsure (1)..(467): unsure at all n locations
agctngaacaacaagtaactaaattngntnttttacttattgaagtaactaactaactaactaacttccactaatatatagagtgactactcagaaagaagggatgagccttgattaggtccatctattctacctaattaaactaattacacaaaacaaagcccaaactcatagcctaatgattcaagtgcaaaggttatgatttccaagctgaaattgaccctcanaatggcataaatgccccaagcttatatgtgacaaaattgaatnttttttcttatctttctagggactactcacatgcttcatttggagttttgtagtgttcttataggtcctgcacaaggcagataggtcaagtaagcacaaaaatccaaaaataagccacaagtatcaattaagctcaattatttgcctaagaccataactaagttaatataagaaaatannggtcaaagagatgtcaa

SEQ ID NO: 72663 - DNA, 423 bp, Glycine max
  unsure (1)..(423): unsure at all n locations
tgtaacccaccattgttttatagtagaacaccggtctcgtgtctactatcattgtgataatctctttctctgttttgggggtgctacttgagttgccaagcctctccatctttgggcgtgttctttgaaaagatccgccccccttttgcacatgttctgtaattgcatcctatccgaagacattatactgacactgnctaacgaaggccaccactaggttctttcaagaatggactcgggaagggtcccagttagtgtaccangtaacagctacccagtaagactttcttggaatgaatgtatcagtaattccttatcttttgcgcatgcncccatcttccgatatacatctttaagtggtcttggggcaagtntccctttgtacttgtcaagtccacaccctgaacttggaatgaccatgtt

SEQ ID NO: 72664 - DNA, 430 bp, Glycine max
  unsure (1)..(430): unsure at all n locations
ttaattatttatcttttcttaagaacatgaattatatttgntatatttttttaagaaaaaagaagcaaatttttagttttagaaacaaaaatggattttattattttttagtttttttaggtcgacaagcgggtttaccctcgctcctatgtatccccaagtgcaatgaggaaatcagactcacgtggttctttgggtaaaaaacatcttgtgtgttgggttgattttatttcttcaaaatatttgtttttattgcgtgaaaaatgagtcattaaggtgttggaccttgaactacattggattntaagaaaaaaaatggagaanatcggttaaggcattggacattgaagtgatctcgagtaatgtctaattcttgtgaagactanaggagaattgagtgatcatttgtttaagtatttttacattttta

SEQ ID NO: 72665 - DNA, 470 bp, Glycine max
  unsure (1)..(470): unsure at all n locations
agctnggtgtgatntaaacaaggttatntcttaagtcttgtcaattgaacttacctcttcatctcttttatgttaaagttgttgacattgtgcatggcacaataaacaaggaaataactgctgcctgctcgtacaaagatgctgcttccaaggattctgcagacgaatttgtgatgtccccaacacacactgctagacatgaatttntagcatgctaacaattgtcctaccccaccccagcaactgcaagatttaagttctatcggaacagtatatacagggctgaaaactgtaaataagactgataaacttgcgcaccctatgaagatattagtatctaacattctgttcaatactaaatttcatattaccagaagtanggttgactaatctttctggattctatatggtgaggatgaccaagtaacttgtaaatcaatcagcaagcaactccatgatgtggtgtggac

SEQ ID NO: 72666 - DNA, 345 bp, Glycine max
ttctcacctggttatacgagttgtacatatcattgagcaattttcatgatggctctaatggcagtctggtgattagaacgaagatatttggcgatgtctacatagttcacttaagaacataggtgacatgagagaactcacagaatcacatttagacaacttggtttttttatcatgtctatataaccctacacttaacagtgtttttacagtgatatgtgtaatcttaaatgtgtattctctaaattaccacaaaatgcatatttttgtgttgacctgtataaccttggggcatcccaagaaaataagtttatactcattttttatttagtaacatgatgctgt

SEQ ID NO: 72667 - DNA, 330 bp, Glycine max
  unsure (1)..(330): unsure at all n locations
aaaaatcaaccccaacaacccacaaatcaaccaccattttgtcttccaaaaaggtgattcctaaggttgccattgggcccttattacaactngaactaaacctaactaaagccctttaaatgataacccaaaacatattttggtcagcaactttacaggaatgggcattatttagacaactaaacacttaaaattgaacaaaggggtcattaagtcttctcatttgggcatgaacaactacaanctggacttactcttgaaattggctgtttcaatatatgacaactgtgaaacttcttggttttgtctacctgttagtctcaatctcag

SEQ ID NO: 72668 - DNA, 333 bp, Glycine max
  unsure (1)..(333): unsure at all n locations
gctcatgcctttaccaaaagggtcatcaagtccaagtgaaatatggaagtaacccgcttgccaaattggggccaaagatgaatcgagtcacatcactggttcatctacttgccaacatatttaggattattgatgtccctgntacttccagttcaccttgacaaagatgtcatggaccatgttgaaaatctaaattgattcaaccccatatcttgcgtaaaaattcgcaatacttcaattgtacatcattcgcatgcatccatgcttttcattggttgcattagctcgtgcattctttcctttgaaaataanatanaatgaacttaatcattg

SEQ ID NO: 72669 - DNA, 488 bp, Glycine max
  unsure (1)..(488): unsure at all n locations
agcttcatgataaatcaaaggtaattcaaaggtgtnttgatgataacaatgatgataacaaaagataatgacaaaggtgatgacaaaaagctcaaagatcaatcaaagaacaactcaagtgaatcaaagatcaatcaaagaacaactcaagtgaatcaagaacaattcaagagttcaagataagaatcaagaagaattcaagactcaagaagaaattttagagtcaagaatcaagattcaaggttcaagactcaagaatcaagatcaagattcaagactcaagattcaagaatcaagagaaggcttaatcaagataagtatganaagtttttctcanaaattgagtagcacatgattnttctcanaacatgtntaccgaagagnttttactctctggtaatcgaataccagaatggtgtaatcgattaccagtagtaaaattggtttgaaaaagtttcaaattgaattacaancgtccaattaatttc

SEQ ID NO: 72670 - DNA, 437 bp, Glycine max
  unsure (1)..(437): unsure at all n locations
tctttgactctaagaaatatttcttagaaacttttaacaacttcttcccaggtttttagactgttacccttaaatgaatggagccaccttttggcttctcctaccaaggaaaatgaaaatagactaagtctaatggcttcatctggcacacctgcaatctttatagtgttacggatttcaatgaatgttgccaaatgtgcataggggtctgttagtcgctctatacgactaactttggtatagaaatcattttccaaagtttgtatagttccccaatttatggttattttgtagtgatttttgtaaataaatcttgttttatggtttatggtgactctagaacatttccatcgcatttaatgatngaaattatgcattttcacgtgaaaaaagaagctaagtntataattgtcaaatgtagcaattgggcttagctc

SEQ ID NO: 72671 - DNA, 460 bp, Glycine max
  unsure (1)..(460): unsure at all n locations
agcttctagcacactccagatattntctcanagatcctctctgtttaatcatggtaaagtgtcttgtgaagttgcaaaccaaatttcgagaagatccaacggttaacgaaggctgggcagcgtttctaccgaggcagctccatgtagttttctcaagaagcttcattaagaggcttcctccagaagattcattaagaggcttctagcacactccagatatcttctcaaagatcccaacggtcagataatgaaaaatngtcttgtggagtcgcagaaccaaattggagaagatccaacggttaacaaacgctgggcattgtttttaccgaggcagctccatgtagctttctctagaagcttcattaagaggcttcctccagaagcttcctcgtggcttctttgagaagctttctcaacaagcttctttgagaagctagatccttatctatccacactcctc

SEQ ID NO: 72672 - DNA, 156 bp, Glycine max
  unsure (1)..(156): unsure at all n locations
tatctttcgtaggactcaaagtcctcacctatatctttcataggacttaaagtccttgcctttatctttcataggactcanagtccttgctttatctttcacaggactcatagtccttgctttatctttcataagactcaaagtcctcacttttat

SEQ ID NO: 72673 - DNA, 476 bp, Glycine max
  unsure (1)..(476): unsure at all n locations
agcttcaacaagagaaaanananagtgttctacaagtatttatttaaattcctgaccgttatctttatttaagagatttgattattaattaaactctctcaatgcgatatacttattaacgattggtatggtgtgattattctaaaagacaactcttttattataatattattttttgaaaaacaaactgattatattaaaacacaagaattatgtgaaacgaagcaccagatgtgcctaaccccataccctcaaaattacaagaaaagcacactgtctcaacaccagcaatatactgaggcagtactaattaaagacggagctataatagaattattggtttcatgaattttattntttattatcaacttctacaaaagaaaatactccttctccttccaaataatgaatgagactatntcattatatgcttgcctgantttgatgtatcagatgtgacattcttaataaaaatc

SEQ ID NO: 72674 - DNA, 416 bp, Glycine max
  unsure (1)..(416): unsure at all n locations
catcatattcacatttatgcatttcattntaaaattcagagattgataccaaaatcatagctctatgctagtcgttctctcaacaattaaattcacactctcatcgggttatggttcaagcttttctttttcaatcaatctatccactgactaacatttctaatcgggatcctactttcttgttctttctcatctacatacatgctcattcaaaactcatgacttcaacacatgcttcaccctttcatgcaatcaattcacaacaccaatttcacaacaaaaataatcttgtttgcactgcatactcagataatcaagtcaaactgttcagtatgcttcaagacatgcatactactatccataatcaaaagtgatgtatcatanatataaacccatatcactaaaaacaagtgtac

SEQ ID NO: 72675 - DNA, 80 bp, Glycine max
tctcccccccggcggaggagaatcccccccccccccccccctaaacaaataaataagacaaggcggtggaaaaaaaaaaa

SEQ ID NO: 72676 - DNA, 260 bp, Glycine max
acaccttttatgagatagacttttcaaataccatcttatctctacctcaagaaaactacatgcagtgactaccccactggtggcaaactcaccagacagtaacatctctccaccataggtgaacttcaagcaaagagcctccaatgggaatatcttacaattgaataacttaagattatgtatcacttttacaacacacatctactctcatgacatttgttctgccataaatcatctatatccacgctttttctacacat

SEQ ID NO: 72677 - DNA, 492 bp, Glycine max
  unsure (1)..(492): unsure at all n locations
agcttagcctactgagcaaatattntttaatatatgtgttgcaatattctntntaacacttgttctgtaattggttntaatttgatggaaatcactaattntggtggtgttcatttttaaatcaaagagaaaattattaatgagaagtgagcattaaaattggtattttcaacaaattttaactaatcctataacaagtgttagaaagagagtgtcaaatagaatatttctaacaatcttcaattttttaagaggcatcgagcaaatattaagagtgtgtttgataaaacattntatctaatttttaaatnttttattagttgaaaagtttgttttactgtttagtaaataaactttntagtaacctctatttatttttaaaacattacttcaagtaatgttntataaaatggtggctntttagtttttatatttattnccattttatcccttgaacattattatgtttctttacccctttttttacctatg

SEQ ID NO: 72678 - DNA, 399 bp, Glycine max
  unsure (1)..(399): unsure at all n locations
cttataaatgaatataaagtaaaatctccaacttaacatgtatattattggttcagaagctactttttgtagaagcaaatgactntgatgttttgatgatgatcgtgatgatttgatgcaaatgtgcttctcaagtttaattcaagacaatgattcaagaatacaagatacaacatcaaaaggatcactagtattttagtaagggaattcctaattgaaatagcaaaaggtttggccaagaaatttaacttaaaaagtctttttcaagagatttaatctttggtaatcgattaccagagagtattttaggaatggaattcctaattgaaatagcanaaggtttggccaagaaattaacttaanaagtctttttcaagagattactctctggaatcgata

SEQ ID NO: 72679 - DNA, 473 bp, Glycine max
  unsure (1)..(473): unsure at all n locations
agcttgctnggagcttcaatgganaatgaataagaatataatggcaacgtgagggagagagagagctgtctgaanagctttttggtcttaaataaaagggttttctctttttctattattttatttaagcaatgccacatgtctccatttgagtggagcaaaaagggcccactttccctttttgactgtgacccatactcagccacaaaagtgaggaaaaatctgatctttgaaacgctaaaatcctgcctcggtttgcgtgccatttctctggttccagttcctcgcgtttctctgcgtccgtcggggccagttttcgaaagtaagcaatatatatatcaaaatgctcagaataaaaccccgagcgtggttcagaggttggtttcgttaaaatttaagttgcacgcaaaacgatgattttttaactaataataagaataaccctaacctccagtatggattctcttcttaat

SEQ ID NO: 72680 - DNA, 463 bp, Glycine max
  unsure (1)..(463): unsure at all n locations
acctccttcttcactacatcattaatcaccgggttgagtcttctctgtggctgtcctactggtttagctctatcttcaaaatttattcgaggcatacatgtggatgggctaataccaagaatgtccgccacggtccagcctatagccttcttatgcttcttgagaattgataacagcttctcctcttgctcattggcaagggaggcagatataattattggaaaacttttgctatcatccaagtaagaatattttaaatttgatggcagaggcttcaattctggtatgggcggctggatagtggtagaaagagatggtttctcagcctgtacctcataaagaaagtcagaggtatgtgtacttactgaaacatggntagttatatcttgactctattaaatcaatctcaagaggtcgaacatcaccagacatgtatcaatatcacatcagattactctcacat

SEQ ID NO: 72681 - DNA, 484 bp, Glycine max
  unsure (1)..(484): unsure at all n locations
agctntgatggtgtcgagaagaaatcacatgtttgttttcatatattaggggagaatgtgaatgtatgtatacatgattttgatgatgtcaaagaagaatctaacaaggctgcttcaaatgataagcatttgcttcaagaataattcaagattgcttcaacaaacaaagccttgtttcaagattcactaaagaccaagccttgccttataacaaagtgcttttcagacatgcaatgctctggtaatcgattaccangaagtgtaatcgattaccagaagacagggttgagaaatagctgttgaaaaatgttttgaatttgaattntcaacatgtaatcgattaccatatgtctgtaatcgattaccagcaacgaaactttggaaattcanattcaaaagtcataacccttcaattataattgtgaatcgatacccaacattgtatcgataccagtggaagtttcagaaatctgccacagcacat

SEQ ID NO: 72682 - DNA, 267 bp, Glycine max
tgggtggacttctttcttccttgattttcgtgggtatggggctttgggagatatgatgggtagttctgtcaattttctgcttcatgatacttatttgtgaagactcttgtttgaagcttgttgaaatgccatgtcttgatgaataaacatacccattctgtttagggctttgtgatgatgttgcgatgttatatgctgacatgctcatggaaactgcttacatgaaaggtaagttacctacggtgggaagtgtaatgtggtgtatga

SEQ ID NO: 72683 - DNA, 436 bp, Glycine max
  unsure (1)..(436): unsure at all n locations
agcttgtaccacagtgtttccatataagttcctctatattccacatgccagctactagcaaccaactgcataaaagatggatccttactgatacagttgataaatctaaacaagtaaactcttctaggcttttgaatctgcaggccaattttgataggagagtggtctgaaatattatgatctaaaacttcataagaggcatcttgatacttctgaaaccaatcaacattaccaataactctgtcaatccgagagtaaatcacatcaacaacatgcttattcgaccaagtgtaatggttccctttcatatcagcttcaaacaatcccatatttgacatcatggttntaagggccctaactttggtctcaacaacattattaccaccaattctgtcctgactatccagaacattattaaaatcaccaatcacaatcc

SEQ ID NO: 72684 - DNA, 364 bp, Glycine max
  unsure (1)..(364): unsure at all n locations
ctagctgttgtctttttgcctatttttttggtttggttcttcttanggcttggttcttctacaagttcttcggatcttgtgatccacagggactagatcttctttaaaaactctaccccacatacgtggaacaagtacataagaaatgtagcaaagtcctcagagtatcagaaaagaattaaaagcaagaattgagactatgaatcttgctagaatatgaatagcataagttgctaatacgagaaaaagccctgcaacgaaccagaaactattactcttgacaatgtccagtagtgtgtatttcatagtagtaaaaacggctcctaagactgttgactaacttttggtaactacactaacatgg

SEQ ID NO: 72685 - DNA, 184 bp, Glycine max
  unsure (1)..(184): unsure at all n locations
agctntgangaaattcanatgacaataactnttgactcatatgtacgctngagtcccgtaatatatcgagacgctcgtaaactttcgttgccgatgtcggctangattnttttccatcagtatccgtgaatataatttttttccacggtgggcaaatgttttccttgccgagtaaatgaaaaca

SEQ ID NO: 72686 - DNA, 456 bp, Glycine max
  unsure (1)..(456): unsure at all n locations
tcgttaatacacgttcattattcggactatcgttctcatgaattaatttcctaattgctcagacctcagtttcaattaggagccgctcgatgtattacgggtctccatccgacatcccaattaaaaaatattgtcgtttgaattttctcaaaagctttcgttttcaattaccgaacgtctccgaaatcctaccggacaccattggacatccgagtgaaaattattgtcgttgaatctgtttagaacttatgttttcaattacgagcgtcttgatatcccacgggacacaatcggaaatccgagttaaaagttattgtcgtatgaatttgtcatagcttccgntatcaattatcagcgtctcgatatcctacaggacacaatcgaacatccgaagccacaagtattgtcatttgaaattgctcagagcttctgttttaatacgagcgttcgatatat

SEQ ID NO: 72687 - DNA, 466 bp, Glycine max
  unsure (1)..(466): unsure at all n locations
agcttgtgtaggctccatctatccatgnngnctctccctaatctcatgcattngtattcaagtggctgtagaatgtagagagattgaaatccttaatgttcattcaaaatgtttgtgacccataccatagtagaattctgagtctacactggaagagagggtctgggcacttcatgtttcttcttcatctgttgctcctctataacaattttttcctcctcctttntgtgatgggcaggctttttggtttggacctttcccttctgctccctaagggatcctttaacctttatagcaaggccaaaagtttccaaagccttgtctttattagcaatagccttggccagtttcttctgcctctnttactgaatgtcatcctagttcactagaggaataagtatgttcctcttgatgtcaaccttcattaacctcacggttacaacactgaagtggtgtatctagtgat

SEQ ID NO: 72688 - DNA, 441 bp, Glycine max
  unsure (1)..(441): unsure at all n locations
ctaattatatgggccatctaatctatcatgtgatgacagtaattgattagcccatgaatcttctcaagggcagtacacacttctggcatggcttttgctttggcttacagacgcgggaggtcttgacttccattcaaggtcaaggcgaacctatccattcacatagtcgcttcttgatgcaacgcatcaatcaccctccctcttgcttctttttcggcatacacttgtgcaaaatcctccactagcttttgtcatgggccatggactggttcaattcttccttgtattgccctatgatggctaagcatgcttgctccctggcttccaagtgttgagccaaactccttttggacctcctcaagtaactaattcttcttttaagatcatgccatgcacncgtgaccgatctctctcctctattcngagcttgagcctcattgt

SEQ ID NO: 72689 - DNA, 473 bp, Glycine max
  unsure (1)..(473): unsure at all n locations
caagcttggagacactnttaatccatgaacaatttgtatatagtttcatactgtccataatgccaaggaattctttagaatttttacagtatagttttttaatcaatattgctatttaagttcaagtctcgaactcctctcactaactgccacactcttcacttcgcaaacattggattgtctctcagaaaatttcaagataccctcaggtccacttttatcaccagtgatgttgtacaagctgatattatgcttccacaaaacaatgcaaggctcactgtntaaaaaaacaacatatttgtccatatattttacctagcctgtccagagtgcaagctgcanactttgaagacactctaacccaagacatgacaactgtgtacaaactctacccattgcattatatgtaggtttatatggtgaacaagaacaaggaactctacagatatggcaaccaagatatatattgaatc

SEQ ID NO: 72690 - DNA, 373 bp, Glycine max
  unsure (1)..(373): unsure at all n locations
tatgaatatgattaatccttttagatgacacgttaaaagttttcaatttatgaaaaaagataaataacactttatattatggtaagattaacgagaactaactatgataattctataccattctctaaagggaggcanggacattgatgtgatgacacggatcaaattggttggaacatgtatcattantttgcaccttttcatggtatgctagtcatatccgaatcacatacataaaataaaataatcataanaatatctgccctttccctcatattacagcttgagggggagatcatgcttgacaacattgacgtgaaatgtaaacctgccacgctnttctcgtgtgtgatgtgattcaataacctcactt

SEQ ID NO: 72691 - DNA, 365 bp, Glycine max
  unsure (1)..(365): unsure at all n locations
agcttctgtcttcaatttcgagcgtctcgacatatttttatattctatcagacatctgagtaaaacgttattgtcgtttgtaatttctcagagattcggtataccatntcgagtgtcacgatatattacgggactcaatcagacatccgagtaaaacagtgactgtcgtttgaatttgttcagagcttctgtattcaatntcgagcgtctcgatatattaccggactgaatcagacatccgagtaaaaagttattgtcgtttgaatgtgctcagagcttcggtattccattttgagcgtctcgatatatnaccggactcaatcagacatccgagtaaanagttattgtcgtctgaatatgctcaa

SEQ ID NO: 72692 - DNA, 355 bp, Glycine max
  unsure (1)..(355): unsure at all n locations
gtaatatatcgagactctcgaactggaataccgaagctctgagataattcaaacgacaataactttttactctgatgtctgattcagtcccgtaatatatcgaaacgctcgatattgaatggtgaagctctgagcaacttcaaactacaataactgtntactcggatgtttgattcaggcccgtaatatatcgaaacgctcgatattgaatgtcgaagctttgagcaaattcaaacgacaantaacttttactcggatgtctgattgagtcccgtaatatatcgagacgctcgaactggaataccgaagctctgagataattcaaacgacaataactttttactctgatgtctga

SEQ ID NO: 72693 - DNA, 308 bp, Glycine max
acataccggagcctcctatccttcttccattcccacctagagcaattccgaacaaaaagctggaagaagcggaaaaggagatcttggagaccttctggaaagtagaggtgaccatacctcttatagatgccattaagaagattccaagatatgccaagtttctaaaggagttatgcacccataaaaggaagctcacacgcaatgaaaggataagcatgggcagaaatgtgtcagcattgatagggtaaatctgtccttatattcctgagatatgtatgacccaagtactttctgtataccttgcatta

SEQ ID NO: 72694 - DNA, 301 bp, Glycine max
  unsure (1)..(301): unsure at all n locations
gcattttcttgaataaagcatacacttctttgtcttttaatccataccaataagaatcaacatatcaacatattcaacaacattggtgaaattgatcaatatattgtttgggtaatggtatccatccatccccttatgataaatatttgttcataaagttgtcttctatgttccttaagagatggtgacttattgaaacaccggtgctntggttacctggtggtactataataaatatcatttgctgatgtatacttatgttnttgagttctttgactgcctgtcctttttcatataattt

SEQ ID NO: 72695 - DNA, 425 bp, Glycine max
  unsure (1)..(425): unsure at all n locations
agcttcatggtcattcaatttctaattattaatgcattcctattttcttagggatcaaagagtaacaagaagcggatcctctaaattgcggtaccatttccacaccttgtatacttttgttcttcaagatcatgtttacaagagacacttcaagtgacctccttgcactatattagcttatctgttggtctcttcattactagatcctcatgttttagaattctacttctttgttgctgttgtgagttactactcatctgtttgctagtaatttctttggctttctttgcaggcggaggtatactgaaatgcaaaattctcaaacaaaaccaggaatggaatctatgagcatggcccctcagcatggtgtggacactacanaacaagaaaatgcacantttaattgttgtggtacattactatga

SEQ ID NO: 72696 - DNA, 410 bp, Glycine max
  unsure (1)..(410): unsure at all n locations
gagatgaatgtgagcacttgctggcaaatctatcgaggattggcctcaggaaaattccatttaagaatctgaatttcaattntaactaatatcaatgccttcataccaactccatgatgagctaaaagtaagctctgatatttgttatacctctgctgaaaaatgaagcattttcaccgttgattttaatttcacgatcttatctataacaaaaaaaaaaacacgtttttatttggttaaacaaaatatttgtccaaggagttccaaatatatgatttaatattattagaaaaatcaagttattgattataaactggttttggtgattccagatggttacatacgcgcatagaataaatttgatatatttaatntaagctntgatttgtgtgtgatcgtttaatggttat

SEQ ID NO: 72697 - DNA, 448 bp, Glycine max
  unsure (1)..(448): unsure at all n locations
agctntatatagactccagagctntcaattgttgagttatcccatctagttgntgccttaacagcttggacgctttacacgtggcatgttacaatgcagagagagagtgtgaggaccacaaacatcttctacaacttatcttcagagaaatacatcttgtcagtgtcgccttgtgctcggagctgacttttagtgtacaattcaaatacaacgttaatagcacaagacanaaggaataaagaatgtcaagacaagacaattcaaaacttccctcctgtgcaatatggcatgtattgcttactgaaccatgaatattactttctaatgataactctcaattcttgaggattgagtaacagtttcattgcctttggactatgagccaagtgctaaagcacttgccttcttgggatggacgttgaggcaacattgtctaatgactgatact

SEQ ID NO: 72698 - DNA, 390 bp, Glycine max
  unsure (1)..(390): unsure at all n locations
ttgaatcatcatanagtctatgattagtgtaccagctgaagaatttaatattccaatagatgcacattactttgagcaaatntagaaactaaagatgaggacaaaaaaccatttntatatcaattcatcaagcaaagtgattatataccaccaactgaattatattgatccaacaaaaatgtaaaccattgtttcctggccgaaatctgaaattaaatacactattttacctaaaatgaattgaaacatgcactaaagccaatagtttagcaccctatcagctaatagcataagatggacattataaatagtagggtctaacatagtctaataaacaacattgaagaagcatttaatccaacaaatcacttattttccattctcatccat

SEQ ID NO: 72699 - DNA, 485 bp, Glycine max
  unsure (1)..(485): unsure at all n locations
agctntacgaaaagctggccgctggagctgatccatcttctgccctaactcttttagactggtgatccctaggctcttgaccttgacttgatagaacctctttttaagcgaaggcatttgacttgatcccatgttttactagagtgaacaaaatcggtgcgaatcaaaactctgacatctatcatgggtggaatggatgaatgcatgaagaaatgcatatgacacgggatgcaattatgaatacaggagcccgagaaattgtctccttcttagatacaacatcttgnggtagcatagtgcccgacgcatgtatttaagaaggtgacatggaccctccgttggtttgccaaagagaggggatcaagacagaacccgtgcatgatgcatatgcaaaaggcacaacacggaggtgtacatagtacgacaatattcacaaacaaatataatcaaaggggtacacgacatttgactacatgcatggaagt

SEQ ID NO: 72700 - DNA, 422 bp, Glycine max
  unsure (1)..(422): unsure at all n locations
taagctgcaagttgcccgagtcatncatatgagatgttgctgaagtattggtgatcagaattgccatttcttggattataggggtgaaccaagctcatgcttttataaaaagggtcatcaagtcaagttgaaatatggaagtaaccgtcttgcaaaattggggcaaaagatgaatcgagtcacatcactgcttcgtctactgccaaacatatttaggattattgatgtccttggtactttccagttcaccttgacaaagatgtcatggaccatgttgaaaatctaaattgattcaaccccatatcttgcgtaaaaattcgcaatacttcaactgtacatcattcgcatgcatccatgcttttcattggttgcattgctcattgcattctttccttgaaaataaaataaaataaatgaactta

SEQ ID NO: 72701 - DNA, 426 bp, Glycine max
  unsure (1)..(426): unsure at all n locations
tcagtgagaacctgttacgtacctaagcaagcgagctcctggcagtcaaccaataaaagaacaaaagccacaaagcaagaaggcttgtgttgcggctggccagctatctatcttgtgttttatctgaaaagttccctctggtaatcgattaccattcatgtgtaatcgattacagggtttaaaaattgaaacaggacgttcagtagcttctggtaatcaattaccaattgcgtttaatcgattatagtgttatatgctactggtaatcaattaccaattgtgtgtaatcgattacacagtgttatatgctactggtaatcgattaccatttatgtgtaatcaattacacagtgtaactnttaaggttcaatgtngcaaggctatcgtaattctgttnttggcactagtaatcgattacatactttg

SEQ ID NO: 72702 - DNA, 444 bp, Glycine max
  unsure (1)..(444): unsure at all n locations
agctntctcntttgtgcaactatctcatctctttttctagtgtangtgctgctactggtggaggcactttgaattggttgccagacctcaaggtgatgacactcacatttttcggattctgcacagtttgtgaaggcaatttttcagaattttgggactgagcttggttcatctgagtagccatctgccccatttgatttgtcagactctgaatggaggctcttgtcacttgctaaaattgcatattctggatggtcatttacctcactaactcttctaagaaaggttgaggaggagcctcagttgctggttgtctttgtngagacctgctgctgttgtgctgcattggaggaggaacatatgacttgctcggaccagcaacattctgaaaggaagggacatngctgttgtgttgtggaggacttgtccatctcaaatntggat

SEQ ID NO: 72703 - DNA, 303 bp, Glycine max
tttatctcacatcatttgacggtcgtatatacggactcatcaacctccaaaaaaagtatggcggtggatggctcaaagatcaacatcaatttcgagcgtctcgatatatgaacggggctcaaaccaaacatccgtgcaaaaagttatagtcgttagaattggctcagagcattaacattcaatttcgagcggctcgatatatgacaggactcaatcagacatccgagtagaaaggaattgtgcgttgaatttgctcacagcttccacatttaattttgagcgtcttgatttattaccggactc

SEQ ID NO: 72704 - DNA, 402 bp, Glycine max
  unsure (1)..(402): unsure at all n locations
agctngtagaagcaaaaggccagctatggtgttcaatgtggattntgaaaaggcctatgactcagtctcatgggtttttttagattatatgctgcaaagaatgggtttttgccacaaatggagacactggatgtctacctgtctcaagtcagcaagcatttctattcttatcaatggcagtcctacaaagggaattgctcctactagaggtttgaggcaaggggatccttttacccccttactctttaatatagttggagaaggcatcacaggattgatgagggaagcagttcagaagaacttatatagaagctatatggctggaaagaaaaaggaacccattaatatttngcagtatgtggatgacacnagttttgtgggtgaggctgagtgggagaatgt

SEQ ID NO: 72705 - DNA, 307 bp, Glycine max
  unsure (1)..(307): unsure at all n locations
tcatatcatgcatcgcataagcatctcttcataacatcataatggacatatcctgcatttgtccggtcatggcatcatcatgcatatgcgttcaacaaactttttggtctgcaaaatggcataccatttgttttcatggttgctcatcctttgcgtttcctctacaaaacaaaaaaacaaaaaagggggggagcgtgaacttcacactacattcttangttcatgtgttaggcaccacgagccaaccatgttgggatcataaacccgtntcacttataaacaaaataattgaacatggtacctaatg

SEQ ID NO: 72706 - DNA, 504 bp, Glycine max
  unsure (1)..(504): unsure at all n locations
agcttgtangattatggngtacccatcacatgtggtactatgtggcggtcgggcgatggtgcacaacaagttttccacatccacaatgcgcgcataaacccaccatcccctgttgcccacctccatctgagctcacgtactcccacgtagcacatatcctcgtttctctcaacaccgggtccccatcaatcctcccaagcttccacaacatccaagcaaaacaacattcaaacagcacaagctatcacagccaagcaaaacagggcaaagccagaaaactctgctcaacacaccaaccaaaatcatagcttttctcacttaaagaccccagtaacaattccttcgatccaattcgttaaccgttggatcgaactccaaaatttactgganatctatagtacataagcctacattgtgaccgttgggatctactagcaaacatccagaactcattctgcactagactntccacagccaaccacacacaagcatttttctgcacaa

SEQ ID NO: 72707 - DNA, 394 bp, Glycine max
  unsure (1)..(394): unsure at all n locations
ttggaatgaaactaatcttgcttggaaagctgtgtcaaaatattggcttatttttgtgaagttgtgcttggaagcctctactttcttccttcattgggtgtgtgtactcctttctttcatgctctangttttggttccatgcttcatatcctatagncttttgggatagtgcctgctcaagttgtttggcctattgttcacaacttcagcagcttctattgctgattgcttagattccctaacaccgttgagcttctttctcagttcctgaagtgtcactttggccttatcaagctcagaaagagtnttggattttgtgttctcagcactttgtagctggttctttatgtngttcaattctgtttgggccaagagaagttgagtctccttttct

SEQ ID NO: 72708 - DNA, 456 bp, Glycine max
  unsure (1)..(456): unsure at all n locations
gcccactccatcatagtgtattttacctgacatctcanacaaacaaatcaaacgtaacaagacaattatagttgctgtttgaatacctcacccactcaagtgtatcacacaattatggctnttctctaatgaaacactcttgccttttaccactctaattccccttgagttcttaggcaattcaagagattatggccacaacaaagaacaattcaccaatatgtgtaaggtaaggctagagagacaaggaaaaggttaaccaagaaaaaggctaacaatggttttatgcacaaatgaaggaaataaaattcagaatttaggaattcaagtaacaatccttcatgcaaccaatatattaccttaaagagattttntaaaagttcttcaagcatgaaccattcagcccaatttttttatttttttttttaatttgcttatatgaaattctgcttcttc

SEQ ID NO: 72709 - DNA, 351 bp, Glycine max
gtcctggatccagattttttcaactcctctccatccaaacttctgaccgatcaatcttaggagattatatttggatattatacccgatattatatctagtatttaacaaattatttctctattcatcagatattgattgatgcctgaatcaatatcaaaccactatcgactgttagatgaatctgacacctgataaattaaaaaccaacgataactgagaacccagagcaaagtgtggacctgtcactgttcgattagcatgattctgatgatgtagatgaggtgtccatgattcctatattgctcggcatatggtgatgggagcaactaggacccattctcctccaacat

SEQ ID NO: 72710 - DNA, 165 bp, Glycine max
cggcatgtcagtcaggaaaactggattcctaacagcagctctggcgtcacagataaagacaagacccaacaggagctgtggggtggcactggaacttgatgatgtaatatgcttggtatcataccagggggatcatcaagttaaataaacgagctaaggcttgta

SEQ ID NO: 72711 - DNA, 368 bp, Glycine max
  unsure (1)..(368): unsure at all n locations
tataaaaaatagtgttattaactggctaaattcattcttccatgtgctccctttatgaattatggctagaggaaatttcaaaaatcaaatgagtctaagacagaacttaaagttgagactgtaagtgctcaaatgtcagcttcaatatgtggaagtggaaggataggacaagatacaacttgtcagtcatgggcctcaagcctcgataagtagttcaagaccacctagtttctatgcttcatatctacgtgcgacatgtattcaagtgtttcaatttaccataaagaattaataatatntaactatatgtaatgtaaagattaatgaagacataatcgttcagagctacttaataatgtctcactatt

SEQ ID NO: 72712 - DNA, 291 bp, Glycine max
  unsure (1)..(291): unsure at all n locations
agctatncttatggcctgcctnncgacttcacccctcttgccatcccggaagaattaagccaagcccctactttcgaggggcaactcctaccttatgaagactatcccgggcaagacgatggggaaggagatacccatcttggccccctgctccacctcaaagatccgtccccgcatgaactaccctaaccgaacatagtccgtcataccccggcctcacccacacccgtaaaagaatctgttccctttgcggaagataagggaaagattgaggcgcttgaagagaggttg

SEQ ID NO: 72713 - DNA, 279 bp, Glycine max
cttggagtggttctctcagcaagggtttaacttccccaatctgctcgaagcacaggctctatccaacttgtgtagatgaaaagaaccttttatccggagctggtgaaagtcttctacacatgttctcatgtcaatttagaaaagtaatctcttttctacagttaatggagtagaaatgattatcgatgttgaagtttggaaggcagtatccaaactggacatgagtagagtccaaaagtttgaagaatctactaatatgtacaacaagatgcaaacttt

SEQ ID NO: 72714 - DNA, 441 bp, Glycine max
  unsure (1)..(441): unsure at all n locations
agctnggggtagaactntcaagtgtaagaactatatgttacagtgaacaatacttataactttgataagttaatgaaaattgatagttaaatagaagtgttcccaacacttacaacagaaaattatgatcttttttgcattcaaaatatacaacaataataaataaagaaaaatagatttatgtacccaaatgtgggttcttgaagcaacaaaaattttcttcaatagtgtgaagatnttacttgtatccataacgagaccaaactctgttatcaactcatcaactctntgatgagtggaactctaaagaaaaaaatcttctttctacttttcaggtctaanactaggctngaacttttctagtntgtgtatggtgtactttgcctgagtatatacttctattcataatgttaagagaatatggattgagccttttttcaa

SEQ ID NO: 72715 - DNA, 466 bp, Glycine max
  unsure (1)..(466): unsure at all n locations
agcttatctgtngatgagataaaggctaagaaagaattacttctcttttgtgggaggcctcaacagcttatgagtctttattaaggcagaaatctagagataaatggctaaaagaaggggacaacaactcagcttatttccataaagtcatcaatttcagaagacattataacggtcttcaaggaattctcattcaaggagagtggattcanaaccctattgatgttaagaaggacgctgttaattttttccttaatagattctctgaacagcagtcttgtagacccactcttgatggagtgcaattctcctcattaaatcangagcagagagagttnttggtggttcctttntcggaattggagatcaaagaggcagtgtggagctgtgatggggacaagtgtccttgtcctgatggcttcaacttcanattcattataagaattntgggatatatttcaaactg

SEQ ID NO: 72716 - DNA, 407 bp, Glycine max
  unsure (1)..(407): unsure at all n locations
cttctagtttcagatgatgcagatgggttagtagctacctcatgctcttctctaatgactatggcatcatttctggcactaaactgctgggaagtggaggccatcttctcaattaaatttctggcttcagtaggagtcatgtctccaagggctccaccactggcagcatctatcatacttctctccatattactgagtccttcataaaagtattggagaagaagttgntctgaaatctgatggtgggggcaactagcacatnagttcttaaatctctcccagtactcatacaggctctctccactgagttgtctaatacctgagatatccttcctgatggttgtggtcctggaagcacggaaaaatttttctataaatactctcttaanagtcatccacctcgtgat

SEQ ID NO: 72717 - DNA, 439 bp, Glycine max
  unsure (1)..(439): unsure at all n locations
acttaagtcacctgccgcatgcaagcttgttcgcacatcattcgcgtgtatgatattcactctacaatgtttgaagtagaggagaccttcaatcctataacgcaatgtggcgaacaaaagtgggcagttaacttgaatgaccattattgtcaatgaggaaggtattttgcgcttcactatccatgttcacacattattgtagcttgtggttacatgagcatgaactactaccaatatataaatgttgtttacactaatgagcacatcttaaaagcatactccgcanagtggtggcctcttangaatgaagcggcaattcctccttctgatgaggcatggacactaatccctgacccaactacaattcgtgcgaaaggtcggccaaaatcaacaaggataatgaatgagatggattgtgtcgaaccatctgaccaccgac

SEQ ID NO: 72718 - DNA, 324 bp, Glycine max
attttatcatggtcctcatgctcaccacagacgtgctatatgtactactggcattggcaactgacagagtctttcaaatctcgacggaaaaagtgcaaatttccattatcttcacttaattgagtggatatgcttgtacacgacacaactagaacccatacttgagtctgccaagacaatgcatgtaaatggcacaaaaactcacacaaaatatcactgcagaagtgttatcataatccactcaatggggtcatcgttggtaaaggaaggaagctacaagcatttcctgaatatacgatgatcatcttaaacaaatgaaccatt

SEQ ID NO: 72719 - DNA, 445 bp, Glycine max
  unsure (1)..(445): unsure at all n locations
agctnntataagcgcgggttgngagacgaatgtcatgtggtcgcgatatacgaagatgatgttccgagtacattggatttggtacgaccatgccctcctgatttccagctgggaaattggcgagtggaggaacgccccggcatttacgcaacgagcataatgtaaacctttacggttttaaaagctctatagttgggcctatgctntagagtttttcttttggtaaggctttgtgtcttttgtttttgaatttataatacaaggatctttcttcatctgttcctacgtctctacctattctcatccatttgcatgtttacttctntatttctgaaacggcagatccgatgacgagtcccccgaagtactaatacctgggacccgtctatcaacttcgaacaagaaatgaatcanacggaagatgaaggaaacgaggatgtgggac

SEQ ID NO: 72720 - DNA, 324 bp, Glycine max
  unsure (1)..(324): unsure at all n locations
ttatgttgtgtttacatttaatattatgcctcatgatgatgaagtccctacattatatgcatttatcatacatttgttggatcattctgattttcaatcaatttcactctattagctttcttaattctatatgttctcttgngcgcaaagacaatgaaaaaaagctagtaataagatattgaaattcaaaaacagctacataatggtggaagtctgtgaaactcaacgacttgcacgcctgtgcanagccttgtagagttatttcactttgatattaggggcagtggtagtttggggttgattttggtcatgttgtggagcata

SEQ ID NO: 72721 - DNA, 351 bp, Glycine max
  unsure (1)..(351): unsure at all n locations
caagcttgaaaaacactttntattntanatcacttggctcaactttngctatttcaattaggaattcccttcctaatattctagtgatcatcttgatgttgtgacttgtaatctngaagtattgtcttgaattttaatcttgaaaagcccatttgcatcaattgcaacacatcatcatgatcatcatctaaacatcaaagccaattgcatctacaatctcctcctttttgatgatgacaatacaatacctgaaatcaagattccagcgagcaacanacaattgtatatagatgaaatgtgcatccgttctctccccctatatttcggaatacatgatcacttgatttctaa

SEQ ID NO: 72722 - DNA, 370 bp, Glycine max
  unsure (1)..(370): unsure at all n locations
tcgatgccttacaggtggaaaataccattaaagactcttgagctcaagaatccgctcataaaacccacagcagcttcatcactgatacagcagtctttatcctagtacgaggatttatccanacccagtcaaccacttaatcaaccctaaattaaattactaagccaaaaataacataaggcttgcattatgtgattaagcaacacctacaccaattaatcatgaacgaaactgatcattaagcatgaacgtaaattaagcgcagagacaattaatcaagcactaagcatgcatggattaatagcaacaaatacagagtaattggtgaagaggaanaactgatcagtattcaatagtaataacaaaatct

SEQ ID NO: 72723 - DNA, 369 bp, Glycine max
  unsure (1)..(369): unsure at all n locations
taagcaccgcagctgcagctgatagcacgcgagactacatcgcttctgtttctttgtgaatcgtggccgacaagccccgtgacacgcggagatatacgtcatcttccgcgctcacaagacctgtcatactgacatttgagtcacgctgactggcagaaatacccgagttgttatccgtataaacattcttntttgctgtctgtaagacgaatagcctgatagcacgcaaagactaacgtcgtcttctgtgccaatcgttagtcgcggccgacaagcacgttgacacgcggagatttacgtcattttccacgctgacaagatctgtcatactgacatttgagtcacgctgacgggcggaaatacccgagt

SEQ ID NO: 72724 - DNA, 406 bp, Glycine max
  unsure (1)..(406): unsure at all n locations
attttgaattggtttcttgcctgaataaagtggattggggggttggattaaatgggcctaaggctattatgcattttggaacaataggacatgccacattggccccgttctcttgctattgatgcctaaacgcgccgcccaccaagtgttccgtgaaatgcctcaatggcattagcgtgtgacttttgtaaggagacaacccatggggtattttggttggtgcatattttctattnntttggaatatgtattcattctccgaaaaggctagagtaattgccccacatatatcctagtcctagaaactgaaattttatgcaaaagagcacaaaaagaagtcatattgggtaagttacccttttggccacaatcaactgtggcccactacaatatttcctatgctaat

SEQ ID NO: 72725 - DNA, 502 bp, Glycine max
  unsure (1)..(502): unsure at all n locations
ctgcagcttttatccaggcacgttcttggtcgtgaagctccttcttccatggtttattccctagtggatggggcctcccatctcctcttctccttttccttctgctgcatctccatggtggaaaatcaccattgaaggacctcattgaagctcanagatccagcctccatagaagctccacaagcaagcttgcattacaagcatttcaaacaagatggatgcctaccctngtagtggtactttntagttagttgtgggggtgatgtcgttgtttgctaccattgatggtggtcaaagaaaaaaatttccctcaccccactgtggacgccaaatgttctttctggatttggcaagatcttctcatagtggtgttcctttataagctcctccacgaattgtggtaagtggtaccatactntgcaagacactntgacattcaagttaaaggtgcagaggtatgcaagcatcaatatgtaggttgaaatcacaatgaattacctga

SEQ ID NO: 72726 - DNA, 342 bp, Glycine max
  unsure (1)..(342): unsure at all n locations
accacttgcatttttgccatctttcatcttggtctgctctttggtgataagaaggcttcttggtatggagctaaatcctcttgtggatcttccctgtaggtacctgatggtaatatatttctatctatttaatgatgttttgtgtgttctctgtgctatctgcttttcattctagtatgcctttaccttgatcacatagatgcatgctttgttaaggtcactcaacagtggaaactggtctgactctaaagtccttgatagtgcangggctgagttgtcatgctttcacgaggaatcggggtttgataagttattgagaatgtgtgtcttaatgcggtcctg

SEQ ID NO: 72727 - DNA, 333 bp, Glycine max
cataatgatacctaggtgctatgccggctgatcacagattgcggcctcatgacgattcatttggaacctgactgccactgatatacgaataggactcgcgaacatatgtattaaaaagttttcttcaaaaactgagtagcacatgaatttttctcacaaaccttttaccaaagagtttctactctctggtaatcgatgaccagattattgtaatcgattaccagtagaaaaatggttatcaaaaactgtcacactgaattacaacgttccaattattgcaaaatgatgaatcgatacaagtattggtatcgataccagtgtgatgaacgttga

SEQ ID NO: 72728 - DNA, 272 bp, Glycine max
  unsure (1)..(272): unsure at all n locations
agcttcctctgccgtanaaaagatattatcggccagtgtttgttataatattgcgcaatgtcggctgaaaaatatccgtcggggctatttaactaccgatgtcggctattggtttttctattccacccctgaattatatttggatgatgcctattaggaaatgttcggtcgggtcatccggcatgcttctttttgaggctcgatctgtcgtcttcctagcccggcgacgtcgctagcatttttttcatcatatctgtggaatcatgtttttt

SEQ ID NO: 72729 - DNA, 220 bp, Glycine max
attcaagctccaaaaactaacccaaggccacaagggggttgaggagtatttcaggaaatggatgtgctcatgattcaagcaaatattgaagaagatgaggaggtaactatggctcgatttcttaatggtttgactaatgatatccgtgatattgttgagctgcaagagtttgttgaaatggatgatgtgcttcacaaagcaatccaagtggagcaacaat

SEQ ID NO: 72730 - DNA, 252 bp, Glycine max
tatatcgagatcctcgatattgaacaaccgaagccttcgagaaattctgatggagctcaatttgcacacagatgttcggatccgggacataatacatcgagacgctcacaattgaacaactgatgctctagagaaattccaatggtcataacagttcactccgatgtccgattccgggtcataacttagctagacgctctacattgtacaactgaagctctcgacaaattttagtggtcatgaattttcaca

SEQ ID NO: 72731 - DNA, 452 bp, Glycine max
  unsure (1)..(452): unsure at all n locations
atcctctgagtcacctgcggcattgcaagcttgagccanaatcctgactcaccatanaccttttcctcagtgtgagaatgtcaatccttaccctcggaagcaaaaaaaagaagggaaggaaaatttccaatcaaaggaaaaaagagaggaaaggatattcccaatcaaagaatgggagaaagcaaaaagagaggaaaggaaattcccaatcaaagaatgggagaaagcaaaaagaanagaaagaaaattcccaatcaaagaatgggagaaagaaaatnagagagaaggagaagaaggaaagaaagctcctgatcaaagatcgaaagaaaacagaagaaatgtgcagagaggtctttggaccagacaatatctgaacaatacggaattgtcaccaaatgaacaaaagaaagaaaaggaaaccataaccttaaagtggtcttcttcctttgatt

SEQ ID NO: 72732 - DNA, 429 bp, Glycine max
  unsure (1)..(429): unsure at all n locations
tatgcatgtgaattatgacgcatcaacaagaatcaagccaaggatattgtgcaagcaatcaatggggcaaaacacaccaaatgattatgatgatggatggctgaaattctcacaaaggtaaactcatcactttcaaattgagctttcaaaactatcatgacatgtagagaagaacattagtaacataaggaaaaacattagttacaacaaaaggaccaatccacttagatctcaacttaccactcatgagtccaagcctagaattatacaataacactttttgcccaaccacgaagtctttttaactatcatgctatcatggaacttcttagtcttttctttgtagaacttggcattctcgtaggcttctaggcngatntcatctaacacactcagttgcaactttctttcctcaccagcttgatccat

SEQ ID NO: 72733 - DNA, 466 bp, Glycine max
  unsure (1)..(466): unsure at all n locations
agcttgtgcatngaagcctanngtttgtcatttgtgttatattattgagtagagagaaagtgtgagatgttgagaagaggaggaggaatcccccttcttgtgtatgaaactatcattctctgcttttaatctcatttattgttagggtttctttgtaatggttggctaaacaccctagttggggatttctaatgaacagctaatgtaaatacctaatatctaattgaatatgttttctgtgttcaatgcttccttcaatgctngatgtttgtatgcttttggtctgatcacccacttgtgtgcacagttaggtgactttagcattaggaaatgtactgtngcctgagaacttgattgaagtangatcaaaacttaatcttacatgaaggacctgcgggttaagtttttgtttaattatgttgttgcaataatgttgttagttaggcctagtttacatgaaggatct

SEQ ID NO: 72734 - DNA, 498 bp, Glycine max
  unsure (1)..(498): unsure at all n locations
agcttctatataagctgaaccatttatcaatttactcttgttgttgtttattcagaaaattagagtttatctcttttatcttagtgagagtgattctcctaaattcttgagtgattcaagaacaccctggctgtatcaaaggacattcacaacctttgcgtgttgccctcgctggaaagagtgattctttccttcctttcatcttcacccttgttctttcaaaccacaattccagaaaatccacctctgcccagaattatctcgtggccataactcccattttacgcactcaaattaagtgattcttgagcctaaattgaatntcaaaacgagtcctttcacctcgttgtggaatcacctcatttggagccctttagcttcagttatttccatgtctatatttctgtccagccaccacttaacctacgctttaccatcccattcatgccatttatgccaagaaccaccttaataagacccacgagagtaaccacctta

SEQ ID NO: 72735 - DNA, 439 bp, Glycine max
  unsure (1)..(439): unsure at all n locations
caacggaagctctctagaaaatcgagtggtcataaattttcacacagatgtcctattcggggaaataatatatcgagacgcacgaaattgaacaacggaagctctcgagaaatttgaatggtcataacatttcactcggatgttcgatccggggacataatttatcgagacgctcgaaattgaacaaccgaagctctcgacanattagaatggtcgtaacttttcacgcgaatgttcgattctgggacataactcatctagacgctcgaaattgaacaacggaagctctcgagaaattcgaatggtcataagatttcacacggatgtccgattcnggaacataatatatcaagacaatcgaaattgaacaacggaagctctcgagaaaatcgaatggtcataacgtntcacacagatgtccgattcgggacataactca

SEQ ID NO: 72736 - DNA, 412 bp, Glycine max
  unsure (1)..(412): unsure at all n locations
agctntattatgcccctctccctttgtgtgttatntcttcttctgcaaaggcgagatagttgttggcagtgatattattgaccagccctccgaaaccttctatcgagatgtcttgggccacgtgggcctcgttcagaacctttactagcagagcccgatgaggctcggaactcatgagtaactccaacaacgagaccctatccggagttttgttgagctggtcgataaccttgaattcgctttgctgaattatacggaggaactcactggcttcctctagcgacaccttctttntgccatcccttntcttcggaagacctttcgctggaatatctttattcgaagcgaggggtgcttcgtcatcttggtcctccaccactnttcctctccccttgacgttcgcgggtggact

SEQ ID NO: 72737 - DNA, 352 bp, Glycine max
  unsure (1)..(352): unsure at all n locations
agctngacaggttngaaatatatctctgatgtcttatatgtgcctgacattgatcaaaatctacttagtgttgctcagcttgtagagaaaggattcaaagttatatttgaagaaaattggtgcttgatcaaagatgcaaatggaaaagacgtattcagggtgaaaatgagggctaaaagctatgctctaaatctaatggaggagaagcaaatagctttttcaagcatgaccaccaatgttgaactatggcacanaagtctcggacacttccatcttgctggacttttatacatgcaaaaacatgcttggtgaaaggtgtgtcaatgcttgaagacaagttagccgattgtgt

SEQ ID NO: 72738 - DNA, 399 bp, Glycine max
  unsure (1)..(399): unsure at all n locations
aaaagattatttatactactcttctaatgtagtggaccacttaaattaaaataatataatagaaaatactggttaagccattcaaatccagtcattttggatctcaccattagtatcatgcatgtcaaagataaggagaatcatgcatcgtattgcataacacaaccaaacatttaaagaaaacatgcttgctaaagccaaccaaggtaaaaatgtattcatatctcatgaagtttntcaacatcatacgacacatattaccatatgtgagaacatggcagaacaatctcaccccatgaacaacatagaccacacatttcagaagatgagtggtaggaaaaatcaataagcactgtttataatacccgagatacaccaacataacaagggtgtcatgac

SEQ ID NO: 72739 - DNA, 301 bp, Glycine max
agccccttatgcacttctctctctctcgaaattgctgaggaaaattagttccgtgaagaaaatccaagccgaggcacttccgtaacgtttccgtgagtaattacgcacagattctcgaccgttcttcaagattcaacgttcgttcttcgcttgcttcggtcttcaacgggtaagtacttcacaccaagcttttcaattcattctatgtacccgtggtggtccacattttgttacatgtagttttattctccgtatcatctgctttatatacaccgcttttgacgtgcttaagccatttatt

SEQ ID NO: 72740 - DNA, 224 bp, Glycine max
  unsure (1)..(224): unsure at all n locations
aagctctataagtgggcctaggctttagagttttcnttttgttaaagctttgtgtcttttgttttgaatntataatacaaggatctttcttcatctgttcctggtctctacccattctcattcatttgcatggttacttctntttctgaaacggcagattcgatgacgagtcccccgaggtactaatacctgngacncgtctatcaacttcgagccagaaatga

SEQ ID NO: 72741 - DNA, 214 bp, Glycine max
  unsure (1)..(214): unsure at all n locations
ggctccacacttggaagccacggagcaaagcatgctaactatcatagggcagtacaaggaagaattaaaccagtatgtgacccatgaacaaaagctagtagaggatntcacacaagtgtacgccgaaaaggaagcaagaggagggtgattgacgcattgcatcaagaagcgactatgtggatggatagggtcgccttgaccttgaatggaagtc

SEQ ID NO: 72742 - DNA, 393 bp, Glycine max
  unsure (1)..(393): unsure at all n locations
ttattggtgaccacagagggtacctggagatatgtcgccggggtcatgagaccttggggacgtcaagtggggtgctattgcccaaaaccaagcttgaccaatcccgacccaacccgggcatagtcggtcagtgagaacctgtgatgtacctaagcaggcgagcntcctgcagtcaacagattaaagggataaacaagaccacaaacaaggaggcttgtggtggctggccagctgtgaaacttgattgatatgtgagatatggtctctggtaatcgattaccaagggtgggtaatcgattacaaggcttataaatgaagacagggggctaagatggtctctgggtaatcgataccangggatgtaatcgattaccatgcttgaaaacggagtca

SEQ ID NO: 72743 - DNA, 499 bp, Glycine max
  unsure (1)..(499): unsure at all n locations
cctgcggcatgcaagcttaagaatatctatgtgtcagagtcgctaaccaatcttttttgttaaagatggagtngtatcaactcaaaatggagatgggaggagatctccatgaccacatcaacaagttcattcaactagtaagtcaattgttgaatgcaaatgataaactactctcttatgagagcaggcactgatgcgcttgggatgctggcctcactaccaaggtcctttgtaagcttttgttcgaacattgcttatggaaagatcaactntgaatttggatgacgtgactcgctcttagagaaaatgagagaataatgagaactaacaatgttgatgatgaacacaatgcaatagatgtggtggagtctgagcgagggatcgagcaatcattcaaggagacatgatgggccaagaggaagatcacaatcgcaatcgcattcgtaatgagatattanntacatacgatgttactattgtgggtgagaatatcatgtgc

SEQ ID NO: 72744 - DNA, 357 bp, Glycine max
  unsure (1)..(357): unsure at all n locations
ctttaccgcttttgccagaactacataaggctgagttcctattgcattgaagatacgtaggagcaaaacctcgctttttgtgaccacccccaagagatgttaatgtccaacgccttaacgtttctctcctttcaaatcaaaagatcatttaatgggccaacgccttaaatgacctttttgtcagttaaaatatatattgcgaaaaaagatcacaacaacttataccaacgttagttctaaagaactacgtaggtctgatttcctcatcgcaattgaggatacgtaggagcgaagganacaccctttgtcgaccacaaaaagataaatatacaaaatggccacaaaagcacaaaacat

SEQ ID NO: 72745 - DNA, 498 bp, Glycine max
  unsure (1)..(498): unsure at all n locations
atccttaagtcacctgcggcatgcaagctngcttgngagaatggatcgcannaaagaagattttcatttacttctacctcggagaatagatccttgccctctgatcgctggcatgagagccgtggttctggccatgactctagaagggagaataagtggtcatcaagatggggtcctgaagataaagagaaggattctcgtagtgagaaaagacatgatgttgagaatgaagatggtcacacttgaaaaccttctcctggagttgggaatcgcatggngcctgatcgtgacactgattctcgtgataaatggaggccgcgacatcgattggaagctcaagctgctggtgtggccacataccgtgctgcacctggatttgggctggagaaaggacgtaccgaaggctccaatgtgcgatnntcaccaggaagaggaagggcaaatattaacggaaacctacanattgtaanggcctctattggttctggttctggatct

SEQ ID NO: 72746 - DNA, 470 bp, Glycine max
  unsure (1)..(470): unsure at all n locations
cacttagcctatatcgggtcaatcaatcttatctacatatagntctcatgttttatatcagtaagggtttcactaatcaatgattgattacaacaagtattcttacctggaacttctagctgtacaagtattctctaagtcactattagcacaacccttagatttcccgtgaatcttaaaacactcaagtattgttctgtcactaagccactcttggctttcacaaaccaatagtttgaagaatcacaaattgtaacactcgaagagtgcgtntacaataaatttagactcagttcaaaaaatttgctaagaaaaggatagaacttatcaacattgtgtntcactcaatggtatttctctttgaatctatcttgcttctgcttaatgtatgaatggttgtcatcaaccttgagtgttgtttggcacgccttctaaggagataatgatcaatcaatgtgtatctatgcatc

SEQ ID NO: 72747 - DNA, 460 bp, Glycine max
  unsure (1)..(460): unsure at all n locations
gcttcagttgtcttcttattccaatggctagttctatctgttttgaatggccagtatcagacttaaatgctcatcttactttggggctaagatattccaacaacctttttcttataaatgacttcaaccactttctattattagtttaacatcagctgggtcgaacattggaaatgtgttcgtgaagggaagaanatcacgtcaaatgaactcatgatgcaaaagctattagttatagcttccatttattggtcaaatcttggaatgacattaggaaaggaacacangaatatctgaacttatctggctntgcatattatggtctatggacacatangaactggatttccttaaatgcatatcaagtgaatcaaacggaggtggtggaattgattaaagttagaagctagctgtggataanagccaaactngaaaagcatcaatgtcttactatgactct

SEQ ID NO: 72748 - DNA, 401 bp, Glycine max
  unsure (1)..(401): unsure at all n locations
tgatttaacttttttataatattaagcaaaatgttactcactaccttgcatagacagaataccacagccattgagagctgtgtccaattgaaacccaatccccangaagctgtgcagctgtttgctctcctcctagaagagcaaattgacctaaatgcttgtaccttgaggaacaatcaaccatgtagtaatgagaaattatgaaaacattgaccaaccaatgaaaaacatagaaccattgatcatttcatcatcatgtgaaagtaaagagcacatanaagcaaagctagtaaattaatatgatcatgttacctaaagggtttgaagcgatggcgcccttctcccctgaacctgatgggaccctctgtggttttctcacactcttccatccgattaaagca

SEQ ID NO: 72749 - DNA, 407 bp, Glycine max
  unsure (1)..(407): unsure at all n locations
agcttataaacaatatactggccttcgtttaattgtctttgggctcggngaacacgaacaacaaagtactttcggcacctactatatgttgacttgaccaacgctgttattggaatgttgtgacaatctttcaacaccttattcacacattctgataggttggttgtcatgtgaccatatcttcgtccagatgtatcgtaagccatgctacatatttcctttgaaatgccatcaatccaccttgctatggctggactcaattgacgaaaattttctaagttttgatcaaacacatgcttgcaaggagtgtacgctgcatcaaatttgttaccatcaaaagttgtaggtagatatgaaactcanattaacttaatgtataaaataaaccttccccaattctgaacatc

SEQ ID NO: 72750 - DNA, 449 bp, Glycine max
attcttggtggtgtatctccttcttccttggcttatttcctagtggatggagcctcccctctcctcttctcctttgccttccgctgcatctccatggtgaaaaatcaccattgaaggacctcattgaagctcaaagatccagcctccatataagctccacaagcaagcttccatcaattattctctagtcttataagagaagagaaaatgattccacgagactggtggtcagctagaattaaaccttacaaatgaaatgaaattaccaacgataaaggggagaaggcgaatacatacataatatctgagagaacccataacggtacatggattaaattcaacttttacgacaagaaaagaaaaggaagaagaactaaccggctgttgcacagggtacaaggctagcatgagaagagacgtacggaatgatccttggttgcaattcagta

SEQ ID NO: 72751 - DNA, 134 bp, Glycine max
  unsure (1)..(134): unsure at all n locations
agctngcctgtccgatgcagtagtaatgatggtccgtgttatgtggggaacggctaccaacccgaaatgggtttatgcaaagacaacggcggcataactatccttgataatgccaaaagaaatcgtgggaagta

SEQ ID NO: 72752 - DNA, 413 bp, Glycine max
  unsure (1)..(413): unsure at all n locations
ttatagttntgctggtcctcaagccaagaaagaacaattcacttgtcctcaagtgacaaagatagtggccaatccaaacaaaatggtgtttgattcatcaaggacattgtcgcaacctacccttcatcgggagggcgacgcanggctcatgggtgtgtcttctcaaggggaggaagggcgcgcgaagtcgccacccacgtttatttgatgcaaacatcggaaaaatcggaaaggtgtggtctacaaactttaatcgtgaaaggttcgagagtntgttttacacatggggaaagtattagcacctcacgcgtccatcacatnggatgacagcctttaatcaagtgtgcanatatgacttcanaatggtntattntcccttttntatgtcnnttttgggttttatgcctttttat

SEQ ID NO: 72753 - DNA, 404 bp, Glycine max
  unsure (1)..(404): unsure at all n locations
tagtggatgacgccttctctcacattttcttctttatctttcgctgcatcttcatggtggaaaatcaccattgaaggacctcattgaagttcaaagatctagcctccatagaagctccacaagtaagcttccatcaaaaaggaacaagctaggtttcctcacacccnagtatgaactatttactatagaggaaggagaagacatacaatgtatgtctagtagcttccaaaccatattaaacaagctaagatctctaggttgaaattttgataattatgatcatattgataaaatcttgagaangttgtctagaaaatggagacccgcatgtacagctttaagagccctataaaatcatgacaccatgtccctttgaagagctncttggaactcttaagttcatg

SEQ ID NO: 72754 - DNA, 434 bp, Glycine max
  unsure (1)..(434): unsure at all n locations
agcttgtgatcacctcttattcacagactgtcgcttgatctatcagtgaagtagatatgcagaggaacactagtaacatatagaggatgacaganaaaagaanaaaggaaaacagaaaggcattgcaattacaaagaatgggatggagggggaggtggctgtgttggaggaaagagagagaaggtttaaaaaataaacccctagttctcagaatctaagcatcattctgataggaacaatagtactaataaaagatattatggaccatcgactagtgtttaaaaaaagcaaaggagcctattcaattattggaagtttatatgtggtaatccggttgttggttatatttgctcctaaatagccatgtaaatctatcccctgtacctcatatcaagaaaagtcctgtactgcatacttgtatgcatacaacatac

SEQ ID NO: 72755 - DNA, 445 bp, Glycine max
  unsure (1)..(445): unsure at all n locations
tacgtattcaactcaagccgagctcaagccttaataaacttggtttatacttgactcatttgcatccctactcctactaatacatattaacatgaaggttttatggatttttaaagagcaatagttgaagagattagaagaanagacgtgtatttaacggagtagcaatatttatctttaggcttaatttggttcaatgtattctattntaaatgtgtaactngggataatgataaatttcctttatacaatgaagatctttgaccatgagtatgacttgcacagttgcacgtataaaaaactctagtcaaaacaataacattatgtaatttacaaagtgatagttcgattatttttcccttccaaaaaaaagtttgattnttgttctttcgtgcactcaaaagtaagggcaaaatacatttgggaaccgaataaagaaacatat

SEQ ID NO: 72756 - DNA, 439 bp, Glycine max
  unsure (1)..(439): unsure at all n locations
agcttcgatgttaatgtcacattagataatgtcaaatattatatcaaattatggagatcgtggtatggtattgtaagtgacatccttggccagagtgtgattgattgggatggaactaagcacatgatcacagttgagaatgaaaatgcttggaataaatattgcactgtaagtattctttaatatgttgctatntgttattcaaagtagattggatttgactttttcttttgtttcagtcgcataaatcggctaaaccgtttcgattcaaggtgcttcaaacttgggatgatatagtggatttgtgtgctaaagatagagtcaccggtcatggagctgctatggatgctgatgaagcgatgagtaaagaaacaaatgaagtggaattcatggggttaggtgctactgccatagaattagaagaaccaagctctaatac

SEQ ID NO: 72757 - DNA, 395 bp, Glycine max
  unsure (1)..(395): unsure at all n locations
tcgaatactggacttaagtacgcaacacaaagaatagttacactagaatcataaagtatggtcaaaagagtattctatatgaaatatatctcgatacgagtcctcgaactatagagtatcaacattgcttagaacaagaaatcatgaacaaccatactatctatgccattaaggcaaaacaccatactactaacatacccagaattataaaggtcttataataagtatacatcgtacatataagaagtaagaatttaatagttaataaggatgtattaaagaatcacaaacttcaactactacattcatgactacacacaaaggtaagtgagttaagtagtcatgcgtntacacatcaagaaagacatactcatnncagacatatatatgggtca

SEQ ID NO: 72758 - DNA, 441 bp, Glycine max
  unsure (1)..(441): unsure at all n locations
tccatgcaagatctcaatctgtcttgctgatataagtactcgcatgtatatgtgttgttgcgttgtgctacaattttcgttgatgaatatagtgatgtcaatgaaaatgaagatgaacccttattttttccattatgtttaaaatttgtgcttattgnggtttgtttccttattttacataattntattctagtgtattgatgggaaagttggaccttttgttgtgtatgtatctcaaataagaagtgtttcataaagggagttctgtgtgcctcttttcatcacagaggggtttcagagttagagtattgtatttacccagtcaaacatttcacttattgctgtcataaatggtttgcaacagcaattgtggatgcaatngtcaagatttttgggtagcagtaactgcattgcgaccacaatggtgcccacattagctgc

SEQ ID NO: 72759 - DNA, 391 bp, Glycine max
  unsure (1)..(391): unsure at all n locations
atgaaatgcaccacagaatgtgaactattggactgagagaaatatgattctcttgtcatattatatggcgtcaggaccagaatgctatgtagaacaccagagattcttgtcctaactcatcgataattagngaataacatttgtcagtgttatgcttatacacatgaataacagaggtaaagaattgtgaatactgtattgatttaatacatcaaagtatctgagtaaagtattcagcagggcaatattctccttgtgaaggtctcaaactaagaatatactctccaatttgggaggaaaagagagactataacagtgaaagaccaatgtggcatgaagaacgtgccactatcaattattgcatgtagagatcaatttgaacaatagacat

SEQ ID NO: 72760 - DNA, 432 bp, Glycine max
  unsure (1)..(432): unsure at all n locations
agcttaagctccttcaactgcacaaggctcttaatattttaagagtatccttctggaaccttcacccgacgaagacactgacaaaaacttatcttcttcttcttggacaaagtatggcaggctgggggcaagtaaattttcttcccatcaaaccttggatgcaactgtgctcttatacccatatcagctagatcttgacgagtattcaagccatccttcgtcttgccttgaatgttaaggagcgtcccaatcacactgtcacaaacatntttctccacatgcataacatcaatacaatgtctaacgtcaagatcacaccagtacggaagatcaaagaaaatggacctcttcttccatatgcaactctgacttttatccttcttttgggtcttcccaaatacagtgttcaggtgttgaacccgctgatatatc

SEQ ID NO: 72761 - DNA, 345 bp, Glycine max
  unsure (1)..(345): unsure at all n locations
attcatacatgcacatgcatatgcatatcttatgatagcaaggagcagaatcatctcaggccataatcaaaagtcaagacaagtcaatggcagaaatcgaccaaggtnagacgatgaccggtcacgattggtcgcatatcatttggctcttacttgcaggtacttanggatggaagcgaatgaaggatangatcatgatcgaccaagcgccaccccttcccggcgctaaacaagcagagaacgtcgctgcaaggcagcccagtatcatttccgttcgcagtttcttttactattngtttgtttaaataagtaatcgacacctaattctagtctaagtagggtcaa

SEQ ID NO: 72762 - DNA, 295 bp, Glycine max
gaagaagaagaagatcgaagaagaagaggcagcgcgaagaagaagaagaagaccgaagaagatgcagaatgaagcagaagaatgaagaactagaatgaagcataagaagcagaagaaggagaaacgtccgacgaaggaagaagaagaatcccgcgcgggagagagagagagagagagagacgagagttttttttctaaaaaaaaattctgaagggcttttacgtcttttcccataaattgctgggtgcaccagcaaaactgctgggtgcacctagcagcactctaacatgcatac

SEQ ID NO: 72763 - DNA, 460 bp, Glycine max
  unsure (1)..(460): unsure at all n locations
gcttgtgtcatgggctttgttattagaagttatctagatgttatgggtctcgaacccctcgaatatttgtattttcatgagaggtgaaccccttgaatatatgtcaggggaaaaaaattcacttgcgttgatataaagacaagcttaatcttattaatcttttaagagaaacttttttgtcaacatattgtaacgctcaagattctttaaattaagcaacttatgtaatcatgtatgactttcagtacttacacttagatcaacttttcttaaagtctatgagactctgacattgcctttctagctagaataatttgaaaactctagttcttgaaaatttcanatccacagaaaaagaaaagccatggagtcagtcagggaacattaccaaaaggagaatttttttttaatttatcacaatgaaagtaaattttcaattatacttaaatagagataaatc

SEQ ID NO: 72764 - DNA, 64 bp, Glycine max
  unsure (1)..(64): unsure at all n locations
ttatttgacgtcggacttgattgattcanagttcgtcctgttcaaaatacacacaggggtatcg

SEQ ID NO: 72765 - DNA, 453 bp, Glycine max
  unsure (1)..(453): unsure at all n locations
agcttatcaggatatgggatgtcagtctgcanatgtttgttaatggaagcttgaatggagaagacacctttttgaatggagaagccagtttctgtgtgtgtgtgtgtgcggaagcttgaatcaagaatctgtctaagtttaatgcagcatccctaggttgcattaaatctcattacaggagcatcactacatccaacagatgggaagtcacaaagacaatgggtgggagtggagctntatttggagaaggccattgttttgacaatgaaattgatacggctggtgtttttctcaatgaggttcaggatatggccattcatcaacatggacctgatgtgtgggaatggactgctgaccctacatgtcagtatatagccaacaatgcatantaggtaataatgtgaggagcaacaacaataacccaggaggaatgttntgtcaattatggagcat

SEQ ID NO: 72766 - DNA, 58 bp, Glycine max
gataatgggtctgcgatggccgacaccaacattactggcaataccatatttaaaaaat

SEQ ID NO: 72767 - DNA, 472 bp, Glycine max
  unsure (1)..(472): unsure at all n locations
agcttanagctntagtctccatgttattcatgttgctccctctatctctaacacatacagcccacaccttttgcatatgagatgcaaaccctcatactccacatgaaagtagtgacctcaaaaccacatcataccaaccgtaggttgattaagatctatttacacacaaaccctagcaaacttgccacttgatgcatccattgttctaatatccactttgatgggactccctacgattgatgccaatgcaagaagtaaactttcatcaaaatactccattcccaaggatggaaatcctatccaaactaatgttcttttaatctttgttttggatgcaatgaaatcatgcatccatggtcttatagccaggtagtgatcaaacaccatccacaaatctccattaaccatattctctttatcttaagggaggccaaaattaaccatataaaacccanacccaacatccattata

SEQ ID NO: 72768 - DNA, 103 bp, Glycine max
  unsure (1)..(103): unsure at all n locations
gatggtgttgnaagtgacatccctggccagaagtggattgatngggatggcactaagcacatgatcacagttaagaatgaggatgctnggaatgaatattgca

SEQ ID NO: 72769 - DNA, 276 bp, Glycine max
  unsure (1)..(276): unsure at all n locations
agcttcttcttcttctccgtcttctccgcgatttgtcttctaggttagtctccctaactctccattgcttttactatccagtattgattcagcagtggaaccttaggatagtaaccttagggtagtaaccttatggtagaagacgagaggggagaagattagagtatgccgganaaaatggggaaatggctgacgacggagtcttccggaagacccgttaggggttcttccggaagttccggaagaaccttttccggaaagtttccggaagaagtg

SEQ ID NO: 72770 - DNA, 388 bp, Glycine max
  unsure (1)..(388): unsure at all n locations
accttaagtcgacgcggctgcagcttgagcnattcaacgacatacttttactcgttgtctgattgagtcccgtaatatatcgagacgctcganatggaataccgaagctctgagcaaattcaaacgacnaataacttttactcggatgtcagattgagtcccgtaatatatcgagacgctcgaaatggaataccgaagctctgaacaaattcaaacgacaataaatntttactcggatgtctgattgagtcccgtaatatatcgagacgctcgaaattgaataccgaagccctgagcaaattcaaacgagaatcacattttactcggatgtctgattgaatcccgtaatatatcgagacgctcgaaatggaatatctgagcgctgagc

SEQ ID NO: 72771 - DNA, 461 bp, Glycine max
  unsure (1)..(461): unsure at all n locations
agcntgcctggaacaagggaagcagagaaatctctcccaagtaactntggagtacttgtcagtaagctctttaccatctcgcacaagagcctccaacttatctatctcctctgtggagctatccaggttcctgttcaactgtttaatcttttgtactcgagaagataaagagtcgaaggtttctctgcttctttcgagggtgggtcggaactcgtaaccgctgcgaatgatttcaagagcccctttcaacaactctcccgcagcagctccagcgaacggctctgccatcactactcacacacacccgtggaatgaaatgaaagcaaacgaataatatgtactactcacaagacacaccanacccgcgttntttccgttgacgatgactacgctattttcttntagctcgcataatcaaaacantaaaaagttactttattctcttcgatatacactaatat

SEQ ID NO: 72772 - DNA, 121 bp, Glycine max
  unsure (1)..(121): unsure at all n locations
taatatataatatatacanaatacatatgtaagataagaacgtgttttcatntaaccaaccatagaaatatatagagcattcgctcanaaataaaaaatgtatagaacacaagtattttat

SEQ ID NO: 72773 - DNA, 483 bp, Glycine max
  unsure (1)..(483): unsure at all n locations
agctnttaccacacgtatgcaactattgtcaatctcatatctttcaattggaaaagatttgacaaagtggattggaggtaaaagttgacaggttgatgtctacggaaacaagagaaaagtaaaagagcaaaacacaggcgtattttgataagtttgagttattagtaaggccacaaaagagatacgtcaggataatttttaaaggaatttccaagccaagaggacaatgccttgatgcaccaaagaagttatgcataaaagaagaccatagagggattaaatgaatgaccaaagcctcaaggataaatagatagagcataatatcatcattcaaaatattacacggtaatattaagggtttcaaaaggaccatcaaattcacatgataatctaacacaataaagaaaaanaataanaaactatactatctttaagtggttcaatttgcctgtgcacatgaactagtggtacttcttgacaaac

SEQ ID NO: 72774 - DNA, 142 bp, Glycine max
  unsure (1)..(142): unsure at all n locations
tagatcttgacannaaaataacagtttgaagtgtgttaatatatataccagtttactaatgttatatcttgggttttaatatgagtacgttaacaaattatacctagatattggtnttaaaataaaccaataatataacttt

SEQ ID NO: 72775 - DNA, 152 bp, Glycine max
taccttgagatttagaaccttcaaactctgatgttcaaaatgaattatgaattcccttggccacaaatagtgttgccatgtctgcaaagctcttaccagagcatacaagctgtgtagcgcacgcggaataattcaatggtgccccatgaagc

SEQ ID NO: 72776 - DNA, 369 bp, Glycine max
  unsure (1)..(369): unsure at all n locations
atcttaagcaccgcagctgcaactatgcttctgaactgtacctatccatattatgttccataagataaagtcaaagaaccatgctacacaaacaacacagaggcctataaccagtttcatgacagattataaacaacaaatatatacttaaaaaaaataaaaaagcaaaaagaagggtggcagatgttcaatcaatggcgttaaatgaatccccctgctgatttcaacaaacagcagtcaagtcaactctgataagaaaagtggaacagagatttaagagaaagagaccatactacaaccaataaataatttggaacttttttttttcatgtaacatctcttcatatatntttctcatatggtatactt

SEQ ID NO: 72777 - DNA, 478 bp, Glycine max
  unsure (1)..(478): unsure at all n locations
agcttgagcttcagctgctatntatctaatttaatgtatatcttgtaagaataatatgatatatgtcacagcttacaaacattgatgtaacattaaaaaataaatcaagtaactagaatatgtgaacagttctagataagggaatatcagcacaacaacaacaaacataacaaaaaggataaaaaacatatgaaaagaaagaggaggaaagaagagaataacagttgactactacaatatccttataggtattaaaaatatttgcaataacatgacaaaggaattgcttctcttaacattgtctaaaaaaaactaacatgataccatggagtaacaaagttcagatagaggtttcttcatttaatacagctcacttcaaaatagactttntatttcatntactttccgtgtagtctaaggangggacanggagagtgacatactgctangaaatattcagttttacaaaaaaaaatta

SEQ ID NO: 72778 - DNA, 132 bp, Glycine max
  unsure (1)..(132): unsure at all n locations
ctcactttntctttgataacctggatgactcatatgcattcaatctcataacctgcgctcaagagtggtacttgagtacgttaacaaattatgcctataagagtatcttaagaataaaccaataatataact

SEQ ID NO: 72779 - DNA, 438 bp, Glycine max
  unsure (1)..(438): unsure at all n locations
atccttaagtcactgcggctgcagctttagccaatgactacctgaataattcctttgtagcccctntgagcctattctcccctttctttgtnttgaagctcattacaagccttaagtgaaaaaccatgatatcaacttacccttaaggaattttggagctttggaattgttttgggaataagctgggaataagtgtgggggggtatgtttcattggaagatactgattttggccatgcttaatgttctattatcgccatgcttcatgtatatatatattgcctagttctttctttaatcttcaatttcgtactgttcaataaaataaaatganaaatganaaaaaataanaaaaataataaaaattcagttgctgcaaattctgcaatttcgtactcttcaaaaaaaaaaagaagaanagaagtgaagttgaataaat

SEQ ID NO: 72780 - DNA, 470 bp, Glycine max
  unsure (1)..(470): unsure at all n locations
agcttgttagaactatcatcanataatgctntattggcacttattaagttgctntctaagcaacttgagattttaacagaaacactnggtaagttgccaactaaactatctattggtcaacctacacattcttctattttgcagattacaggttgtaccacttgtggtgaggctcatgaaatatgccaatgtattcccattgaagaaaaaactcaagacattcattatatgggaaatcaacagcgacaagggtatactcaaggaggattttcaggcttccagcagggtccttataatcaacaaggatagtggaggtcacaccctggcaatcagtttaacaaagagcagggtataccttcaaacaggccaatccaacaagggcctaacatctttcagaggactactaagttggaggagactntgactcagtttatgcaggtaacaacgtcaaattataaaagaactgagtc

SEQ ID NO: 72781 - DNA, 441 bp, Glycine max
  unsure (1)..(441): unsure at all n locations
agcttgtcttggcttagaatatgattatacatgattttgtatttgangatccaatttgggaaaaattggatgagggcaagagtgatttcgaaatctgcccaatttgtgcagcaaagagctgtcatattttgtgcagcagaaaattgtgtttgtgcaaaaaatgttgtgtattgctggttgtggaaagggtactacatattgggttctggatgttttctaacagatcccaacggtcaaaatgtagacttatgtactagggacctccagtaaaattttcaagtcgatccaacggtgaaagaattggaacaaagagaatgttactagggtatttgagtaaggaaagttgtggtattggtttgtgttttgggcagagctttctccctctgccctattctattgttttgatagtgcatgatgtntggatgttgaattgcttggatg

SEQ ID NO: 72782 - DNA, 397 bp, Glycine max
agcttgcatcgacttcacacgacaataactgtttactctgttgtgtgattgagaccgctaatttatcgaaacgcttaacttgatccgtagtacctcccgaccacactcggacactacatctactcagtcggatgattgatccactgcgtaagggtcaacccgcgagacactgaatgactcacctgacccgtctatattacgaacatatcgatattctctgacgtgtgaacgagtctccttatacatatagacggtcgatatagtctgacttatctcatttcgacaactgccgactgacattttaatcatataaaggcgagtgtgtaacagctactatccagacacactacattgcagttgatacgaccttcattgacgtatctaatggcctattatg

SEQ ID NO: 72783 - DNA, 461 bp, Glycine max
  unsure (1)..(461): unsure at all n locations
agctntctcataagtcctaaatgacatttcaagctatgattaactcactntaacctccatttaccacagaattcagacttaaccttccaactctcaaagcctcactctttttccactcataacttcacattctcactntctaaccctaggttaactctaccattcatctctaacagttttccataagaaatttcagcatataaacatcataaacatcatcacaaaaaccctaaaacagaatgggtatgtctaactcatccaaacatggcaatttcaacaagctttcaacaaatgtcttcacaaataatcatcacacagcagaaacctagcaagactacccatcatatctccccaaaccccatacccacgaaaattaaaggagaaagaagtccacccaaacctgaaatntcgaagtcccactcgtagccacgcacttcacgactccggaaatgctctccttt

SEQ ID NO: 72784 - DNA, 58 bp, Glycine max
gctgtcaaacagaaaacaccacttggaatgcagcctttatgtgctgacgaggctgctg

SEQ ID NO: 72785 - DNA, 421 bp, Glycine max
  unsure (1)..(421): unsure at all n locations
agctntntggctaagtggctactntcaattaatacatggacttcatcatcttcaaacttatgcattcattccatattcaaagattcatgcaaaaaccattacttactgctagttgttctctcacaattaaagatcacactctcatcgggaaataggcaagttcggcgctgtaatagatggctcaggctcaggctgaggagatggctctggtactgcaacatccttctgaacaataactcgatcagtctcaaaaataaaaggctcagttggagtgggctctgctactgcaacatcctcttgtacaataactgaatcattctaaaaaatgaaaggcttaagtggagtgggctctgagacctctagaatgtcatccttctggtcttattaaggctcttgggctgtagaggcctcactcctcttg

SEQ ID NO: 72786 - DNA, 92 bp, Glycine max
atattgtcatggctacaagttattctgcttgcacgcttggggaaagttccccatattaaaactttcctttccaaaaccaaaattcttccaat

SEQ ID NO: 72787 - DNA, 447 bp, Glycine max
  unsure (1)..(447): unsure at all n locations
agcttcttatccaggcacattcttggtggtgaatctctttcttccatgtcttattcccttatggatagtgcctcccctctcttcttctcctttgccttccgctgcatctccatggtggaaaatcatcattgaaacttaaagatccagcctccatagaagcttcacaagtaagcttccatcaagtggtatcagataccctgagaaaatcaaggccatccaagaatggcccatcccaaaaagtgtgggagatattaggagcttccatgggttagcaagcttctatagaaggtttgttcctaatttctctacaattgcctcacctctcaatgagctggtaaagaagcatgtggcatttacctggggtgaaaaacaagagcaatcctttgctttgctcanagaaaagctaactaaggcacctgttctagctcttcctgacttttctaaaac

SEQ ID NO: 72788 - DNA, 125 bp, Glycine max
  unsure (1)..(125): unsure at all n locations
gagtagaaacatgggaccaactcattntattttataaagatagtcgtatctagtcaaggtctgagagagcatacaagttttctanatatggctaaaagatgtggagccattaaaagtttatgaat

SEQ ID NO: 72789 - DNA, 424 bp, Glycine max
agcttggctctaccttgtcaagttcagttgagtcttgttggacttggtgacagtcttctcaaactcattagcccaaaaatctacaattctccaagtccttacttggaagttagcaatggaatccattgatgcttgttgatcggcttccctcaacatctcacaatctgactagctaagcattgaagactagataaaggcatgtgggttgaagtcctaatcccaaagagttaaccctatccttcatagaaagaaaggcgggtgactcttgatggaggaaggagtagcaattggaacaagttccaccctttgccttgttgctgcaacatcttgttgatgagaatgacttggatgggccctcttcgcggcactaggtttgatgaaagaaggagggggcacccatttttcttccacctcatcatgcttc

SEQ ID NO: 72790 - DNA, 160 bp, Glycine max
  unsure (1)..(160): unsure at all n locations
actcagctttcttgtggttaatgggttctgtcgcacagaatggcgtgatcatctggctaacatattctcaattagctcagttgcttcttccggngtcttcagctntaattttccccctgcaaaagcatctagtagttgctnggtttgtggtctcaaccca

SEQ ID NO: 72791 - DNA, 467 bp, Glycine max
  unsure (1)..(467): unsure at all n locations
agcttatgtcatagattcatgacacttactatttttttttntgcctgcattctatgcaccanaagaagcaagcttgtcagggggctgaaagatatgtaaaatgctaaaactaaactttttagttggatctatacaattcacccaacggttgtaaagagtccagggggctgaaagacgatgattatataatgcagaattctgagaatattgttgtatgattgtgctaatcctaattgtattgagaatattgctacatgattntgctgatcttaattgattctatttgtgttaattctgattgtatgtattaattcttattgtattttaattctattttgtatcttgatctcttgattattgcgatcacttcattttaggatagatagttgtatcatatatgtcaggacaagctataggagaaatcttagntaggtgggtggatgaccttgtatatatatctatcgatt

SEQ ID NO: 72792 - DNA, 73 bp, Glycine max
gcctatgaaactcagctgtgaaaattggcattggagatgttcgctgggatgaaatgatccgagaaagcctgga

SEQ ID NO: 72793 - DNA, 416 bp, Glycine max
  unsure (1)..(416): unsure at all n locations
ttaaagaaaggacaaattttgcttatagttaaaaattatgggactaaaatcacggatttaaaaataaggaaaccaaaattacatattaaatattataagtagcctanaagtgcgatttaaccaaaatgttaagtaggtaaaagaaaaatcatatttatctcaatagaaaaaagtcataaattaattatatagacgaagaggtaaaaaataaaaggtaaaattatattnttggtctctcttttatttaagtttttcaatttggtctctctatctttaaaatgttcaatttgattttctaattattaaagaattgttatattgtccttccctccaaatntacattaacaacattaatgaaaattaaagaaatggcaaatattacacattttctgaaaattaaaatactaaagtgaaca

SEQ ID NO: 72794 - DNA, 71 bp, Glycine max
actcagccgaatgggctgacaacaagaatcaggtttctagattctagctagactagagagcttcgccgcgg

SEQ ID NO: 72795 - DNA, 456 bp, Glycine max
  unsure (1)..(456): unsure at all n locations
ctaccctaaaccaagaaaacatggtagaggcagaaaactctgcccaaaacacattcaaataccacaactttccttactcatataccccagtaacattctcctcgtttcgattcgttaaccgttggatcgccttgaaattttactggaggttcctagtacataaatctacatttcgaccgttgggatcggctagaaaatgcctggaactcaaaatgtactactcttcccatgactggcaatgcacaagcatttttctgcacatttggtcaagtttggtgcacaatatgacagcattnttctgcataatagggcagatttcgaaatccaactntcccacatccaattnttctcanattggatcctacangtcctaaatcatgtataaatcatatntaaaccaaaaacaagcttcagatcaaggtaaatcanaatctaggtatccanaacccatcaatt

SEQ ID NO: 72796 - DNA, 484 bp, Glycine max
  unsure (1)..(484): unsure at all n locations
gttgtgtactgtgcgatggaaatgaatctcttgttataaaaccttgctntagatacgaaatgtntctagaaatgggagacaatataaatctttntggtagttttgttccaaattatttgatttcctatccgtaggacgatatggaattcgatgttgtacttcaaacgttttaatttactacagttattcgctattgttccatttaggtctgtttaagttttatatttaaaaaacattttttaataaaataatcaattttatttttttaatgtgtttgtctaattattttttttttaaagaaacagttttttttaagaattaattcttatttattntttaaaatgatttcttttaagttaaacaaaatagcccttaatcggtcatggaagggcccggttcagtcctatctcgtgtggaatccgtgtgagaataaatgctatggactatggaatctcgtgtctaattggttcttattcttctttta

SEQ ID NO: 72797 - DNA, 63 bp, Glycine max
gtgaacatgtatatccaaggttttgattttgtttaccaaaatattttttttaaaataaaatac

SEQ ID NO: 72798 - DNA, 428 bp, Glycine max
  unsure (1)..(428): unsure at all n locations
atccttaagcaccgcggctgcagcttggaaccttaatcatgacaatttgtattttttcatactgtccataatgccaaggaattctttagaatttttacagtatagttttttaatcaatattgctatttaagttcaagtctcgaactcctctcactaactgccacactcttcacttcgcaaacattggattgtctctcagaaaatttcaagataccctcaggtccacttttatcaccagtgatgttgtacaagctgatattatgcttccacaaaacaatgcaaggctcactgtttaaaaaaacaacatnattgtccatatantttacctagcctgtccagagtgcaagctgcanactntgaagacactctaacccaagacatgacaactgtgtacaaactntacccattgcttatatgtnggttatatg

SEQ ID NO: 72799 - DNA, 371 bp, Glycine max
  unsure (1)..(371): unsure at all n locations
agcttccgttgctctatntagagcgtctcgatatattatgttctcgtatcggacattcgggcgaggacttatgaccattcgaatctctcgagaggtttcgttgatcaagctcgagcatctagatgagttatgtccctgaatcgaaagtccgagtgaaaagttatgaccattcgaattgctcgagagcttacgcagtgaaatctcgagcgtctctataatttacgtccccgaatccgaaatctgtgtgataacttatgaccattcagtattgctcacagcttctgtagccaatatcgagcgttttgatttatctagcccccgcatagggcatgcgggtgacaactgatgacctctaccccatgacgtgagct

SEQ ID NO: 72800 - DNA, 467 bp, Glycine max
  unsure (1)..(467): unsure at all n locations
agctnntaattttnntggaatcaaataaaaataaataatagtctcatattgtaaaaattgttcaaatcgtgtctcaatagaattaattgattgatctaatatgtataaaaaatactcaatacgaaaagattcttcatgtaaatgtgtgatctcattactaatattttcatcaaaatgaggttttctatgaattttacatttctcacgaaattttgactctatatccattttgatagtcattttttctgtggattctaaagccaatgcaacacccgtttctctataattttntaaataagtgataagatcttttaaatgatctatagcaacatttatatgcatatcattgtattgtggaatcttgctaacataattgacaacaaacaaaatatcataccaaatattcattcctaataaaaattcaaaatcttcaagttcatgagttgctaaagacatagcaccacatt

SEQ ID NO: 72801 - DNA, 409 bp, Glycine max
  unsure (1)..(409): unsure at all n locations
aagcttgatatcattaatatgattgatagcttttttaattcanacatggctctctgatactccatgctcaattctagtttgcctttacccatatctactatgcagttggtcatggacagaaaagggcggaccaatattatggggatgtcacgatcttcctttatatccataaccacaaaatctgtaggaaaaacaagttgattgacctgaattaacacatcctcaatcactccatatagccgtgtaatggagcggtctgctaactggagggtcatgcgtgtatgcattatctctatctctccaagatgacggcacatggatagaggcattaaattgatactctctgccaagtctatgagagctntgcctacaaccacctcaccaatagaacacgatatcatgacaactc

SEQ ID NO: 72802 - DNA, 436 bp, Glycine max
  unsure (1)..(436): unsure at all n locations
agcttcagcaaccacattgaacanaaaaggagctatatggtctccttgtctaagacccctttggggtatgaattccgatgtggggctaccgtttatcaagactgaaattgaagcagatttcaagcatccctccatccaacttatccatttagaattaaatcctgatctgttcagcatataaaacagaaaatcccatgacaccgaatcataagccttctcaaagtcgactttgaagatgcagcagcttttggtgctccttttagcttcatcaatcacttcgtttgctataagtacactttgtagtaagtgtcttccttcaatgaacgcggattgcgattcattgatgatagtaggtagcactttcttcaatctcttagccaaatagcttgccacgatcttatacatacaacctataagagatataggtctgtagtca

SEQ ID NO: 72803 - DNA, 94 bp, Glycine max
acaaaacaacaacaaacgcttcgactcattttcataaccatcccgagccgaagggtttacttcttttcccttttcctcactctttctcacacac

SEQ ID NO: 72804 - DNA, 484 bp, Glycine max
  unsure (1)..(484): unsure at all n locations
agcttgatgcaacacaacaaatatatatatcatggtgtatacacacgacaacgtagttgggcttatattggccatctcttccactgttttcatcggttctagctntataattaaaaaaatgggtcttaaaaaagctgccgaccacggcaacagagcaggttcaacacctctcatatatatcatctgggttattcacgtattaaacttttttttattttattttaacatatataacaatttttcattgatttgatcagccacgggagggcattcgtatctgtatgagccgtggtggtgggctggaatgatttcaagtgagtgattttcaattntctaattctaatttatatattaacgtagtggtttctgcatcaatcaacgtatgctatatatatatntatatatatatatatatatatctttctggtttctctacgccttaattntcatagtgcagaataattcacacatacagctcatagaa

SEQ ID NO: 72805 - DNA, 87 bp, Glycine max
  unsure (1)..(87): unsure at all n locations
cggttcatatcacacatatgctccaactngaggtgtgagtgtgagattatgtttcgatagtattcctgatatctatntcctattaat

SEQ ID NO: 72806 - DNA, 476 bp, Glycine max
  unsure (1)..(476): unsure at all n locations
agcttttctttntaatttcttctcctattagtgtttatttattagctcggcattgttggtgtttggaggagtatgagcagttcttggaaaaactccggtgacaaggtcttgtcgtaaggttctggttggaggttgcatggctatggccataacatttggcctcaccaaattgattggctctgctgatctttgaatgtcattgtttactagtcatttaagtacaatcccatattagtagtaatgtttttttttggggtcgtgctatgagtaatcacggtagctagtattactctttgatagatcaaacaacagaattctaatatttcttaagcatactagctagtattactctttgatagatcaaacaacggaattctaatattactagttacctactattaataatgtacgtgtataacagtttactttgaagaattttaattatttttttaaagtaacgaagaactaaatatgga

SEQ ID NO: 72807 - DNA, 141 bp, Glycine max
  unsure (1)..(141): unsure at all n locations
cagcagccaaagcagccagcttgtgatagctntcaagttcagcactcctttgaagtgtgtctcagtgaggttcttcttaccttgagaatattccatgagggtgttgaagagcttcgtgatggggtcaacaatggaagggtg

SEQ ID NO: 72808 - DNA, 406 bp, Glycine max
  unsure (1)..(406): unsure at all n locations
agcntttgctgacatgccatagttatacctagtgcctgatgtcatcatccctccaaagttcaaggtgtcggagttcgataagtacaacgggactacttgccccaagaatcacctaaaaatgtactattagaagatgggggcaaacacaaaagatgaaaaattgcttatgcatttcttccatgaaagccttactggggcagctgttgttagttgatgaatacgactaacttttgtgtataaaacctgtgtaaattgtatcaaactcctccaatttatggttatnttgtagtgttgtaattactttttgttaaagataggtaataaatacttagtactcccattttgtgtgtttaataatcatttcccctcattttcaggttaattagacaagtttgtgaagtgctga

SEQ ID NO: 72809 - DNA, 146 bp, Glycine max
  unsure (1)..(146): unsure at all n locations
cgcggactataccttcgaccgaacacggccgtgtttctgtctatgtccggattcaaggcgggctgcagcaccggctccgcttccctaacggtactggagggcggtgcggtggctntatcctctatggttntctggagttttaacat

SEQ ID NO: 72810 - DNA, 461 bp, Glycine max
  unsure (1)..(461): unsure at all n locations
agcttgtagaattatggggtacccatcacatgtggttctatgtggcggtcgggcgatggtgcacaacaagctttccacatccacaatgcgcgcataaacccaccatcccctgttgcccacctccaactgagctcacgtactcccacgtagcccatctcctcgtttctctcaacaccgggtccccatcaatcctctcaagcttccacaacatccaagcaaaacaacgttcaaacagcacaagctatcacagccaagcaaaacagagcaaaggcagaaaactctgctcaacacatcaaccaaaatcacagcttttctcacgtaaagaccacagtaacaattccttcgatccaattcgttaaccgttggatcgactccaaaattttactggaagtctatagtgtataagcctgcattttgacgcgtgggatatactagcanacatncagaactcattctgcact

SEQ ID NO: 72811 - DNA, 89 bp, Glycine max
  unsure (1)..(89): unsure at all n locations
tcaccttgtctctatgtgtgctgaaaacagcttattcatctnncactccaagtaggcctccggatcattctttcctttaaatggggaat

SEQ ID NO: 72812 - DNA, 432 bp, Glycine max
  unsure (1)..(432): unsure at all n locations
agcttcttagtttcagatgatgcagatgggtttgtttctacctcatgcactcctctaatgactatggcatcatttntggcgctaaactgctgggagttggaggccatcttctcaattaaatttatggcttcagcaggagtcatgtctccaagggctccaccactggcagcatctatcatacttctctccatattactgagtccttcataaaaatattggagaagaagctgttctgaaatctgatggtgggggcaactgacacatagtttcttaaatctctcccagtactcatacaggctctctccactgagttgtctaatacctgagatatccttcctgatggctgtggtcctggaagcagggaaaattttttctaagaatactctcttaaggtcatcccagctcgtgatggaaccttggagcaggtaatac

SEQ ID NO: 72813 - DNA, 122 bp, Glycine max
  unsure (1)..(122): unsure at all n locations
gacactattatactcagcttgttcttttataaatgagaagtctgaactcatcatgtatctanaaaccttgggtggatccagtgcaccgacttcattgcatatcatgttttgnggcatactca

SEQ ID NO: 72814 - DNA, 495 bp, Glycine max
  unsure (1)..(495): unsure at all n locations
agctngcattngagaagacacaataagcactaggtgtttatgttcctatcctattactaaganacttatgaaagagatttgtttctcataaataagaattaacagccttgtcctgtatttcatccattgtagcagtggtgcttattgttctatatatatagtgaggggtttgaacttggtgctcatttggcagcttgaccataactatcatcttgaggacaaagtgtttttcgatggcataggggatgttaggaagggaataatggctcgacaagatactacaagaataggcacgaatgagaggcccaaaaggaagatcaatccaccaaggcatctaaaagatttcatttaacaaatccagttattggtagttgagctagcttgatagcattggttagctagaagaatgttgctacctatntctcgcattntcctttctattatnntttgcattatgttattggagcatcttgcacacaacatcctagttatatg

SEQ ID NO: 72815 - DNA, 401 bp, Glycine max
gcatgatggtattttctttcctccggtattggtcaaaaagaataaacaaatatgtatgaacccctactacactgcgctaaatccatgctccctctgccctctcctctggaacacgccaaagcaaaaacatcaggcccactggcagaatcagtgcaaccagggcatgtgtatcccaccaccagcgaaatcttttggttggtaaccgctttttcgttccgccagtacaagagcccctccagagtaagttacaaagagatcgtctgatgacaaaaatttctataccgcggaaccctttaaataatagaccccctcatggaaattgtttgaaaagaaactcttatttgccgagaaacttctcattctccttcttcttctgctacccatggcttcgtcttcttctg

SEQ ID NO: 72816 - DNA, 481 bp, Glycine max
  unsure (1)..(481): unsure at all n locations
agcttaaggatggaatacttactttgtggtgacgaattanagcgcttaacggaatcaaaaaatgtgaaaaatgatgaccctagggctgcaaactcgtaaatcccgtgagtattgcttttgaaatgaggggggaagcagtttttgaatgcaaaaacgttcccctccctcgtttttatatttttggtgcaggggttgctcgcccaagcgagctaacctgctatattttattttttttaggggaaacattaccatggccccctctctctacaggttaacgtttgcctattcgaacttacttaagttagaattaggcattgattacttattttaaaacaaacaatagtaataatcactgtgaattcaaaggatattgtgctgcctcgcagcgacgttctctgcttgtccagcgccgggaagggacgacgatcgggcagtcgtgaccctatcctccatttgcgtcccgtcctaagtacctacaagt

SEQ ID NO: 72817 - DNA, 466 bp, Glycine max
  unsure (1)..(466): unsure at all n locations
agcttataagaacaanaatgcctcaatcatttccaaatatgcatgtgaattangaagcatcaacaagaatcaagccaaggttattgtgcaagcaatcaatggggcaaaacacaccaaatgattatgatgatggatggctcaaattctcacaaaggtaaactcatcactctcaaattgagctttcaaaactatcatgacatgtagaggaaaatcaaggatttcaaatcacaaaatgtcaagagactcttattttcaaaacaattacccatttcttgaacatatcctataattcaaagaanaacatgcaaagtcatacacgcacacaagaatggcccaaaatattaaactagaaacccaacaaaactaacaaaattaacacaactaacaaatttaacaaaaccgacaaaactagcaaaaccaaaccaaagaacacttccncnccncccctccatacttaaacaacaca

SEQ ID NO: 72818 - DNA, 111 bp, Glycine max
  unsure (1)..(111): unsure at all n locations
tacccatcacatgtggtactangtggcgggtcggcgattgtgcataacgattctcacatcacaatatgtataaccacatctctgttgccactctcaacagatctaaagctc

SEQ ID NO: 72819 - DNA, 431 bp, Glycine max
  unsure (1)..(431): unsure at all n locations
agctngtctntggcttagatatgatttatacatgatttatgacttgtaggatccaatttgggaaaaattggatgagggcaagagtgatttcgaaatctgcccaatttgtgcagcaaatagctgtcaaattttgtgcagcaaaaaattgtgtttgtgcagaaaatgttgtgtattgctggttgtggaaagggtagtacatattgggttctggatgttttctaacagatcccaacggtcaaaatgtagacttatgtactatggacctccagtaaaattttcaagtcgatccaacggtgaaagaattggaacaaagagaatgttactagggtatttgagtaaggaaagttgtggtattggtttgtgttttgggcaaagttttctccctctgccctattntatatgttttgatagcgcatgatgtttggatgttg

SEQ ID NO: 72820 - DNA, 166 bp, Glycine max
  unsure (1)..(166): unsure at all n locations
tatcatctcaagctctatccaggcactnntctcgtggcanagctcccttcttcatgtgcttattcctagtggatgacgcctcctctcacattntctcctttatctttcgctgcatctccatggtggaaaatcaccatngaaggacctcattgaagttcaaagatct

SEQ ID NO: 72821 - DNA, 476 bp, Glycine max
  unsure (1)..(476): unsure at all n locations
agcttgttcatcttgtgcgactgtgagccctattcttctttttcttcatgaagcatctgtgttattgaaacctgacccctatccctaaccactgctcttcttccaacgtctgagccaggcaccaccaagcatcactgtttgaagttctattctctgtgccggccaccatttattctatgttctctattatgttcttctggtggttaagttttatgccttgtaagttgtaacttgtcaaaacttgatgtgctgtgtacttctgttttggaactgttaagttttctactatactantttatgggttaagacttatgaatatgatgcatgacattatggaatatggattatgaatatgatctatgaatacagattgttgtgtacatgtgttttggagttgtaagttttaactaccatgcatgatatgaatttatagcatattagacatgatatgaattatatgctattctacatgatat

SEQ ID NO: 72822 - DNA, 110 bp, Glycine max
  unsure (1)..(110): unsure at all n locations
acacttaaactcgcttgatgatacctatagaattataatattgagtttataagacagagatngctttgtcatgaaggtattccaatccttttgctgccccaccacttttt

SEQ ID NO: 72823 - DNA, 481 bp, Glycine max
agcttctcgatatattatgcgcctgaatcggacttctgtgtgtcatgttatgaaccattgaatttcttgagtgcttctggttttcaattcagagcatctcgataagtgatgcgccagaatcgaagttccgtgtgataagttatggccattggaatttctcgagagcttccgatgttcaatttcgagcttctggatatattatgtacctgaatcagatatccgtgtgacaagttatgactcattgaatttctcgaaagcattcgtagttcaattttgagcgtctcgatatattatgcgcctaaatcggacttccgtgtgacaagttatgaccattggaatttctcgagagcctccgatgctcaatttcgagctactggatatattatgtgcctgaatccgacatccgtgtgacaagttagtgaccattgaattcctcgagagcattcgatattcaattcagagcatttcgatatgtgatgcg

SEQ ID NO: 72824 - DNA, 101 bp, Glycine max
aaactcagctccaatatagcccgcaactcgttaaagttgacctatgatctccctgattccgtgtgacaagttatgaccatttgaatttctcgatagcattc

SEQ ID NO: 72825 - DNA, 478 bp, Glycine max
  unsure (1)..(478): unsure at all n locations
agcttatccttatggcctgcctccggacttcatccttcgtgccaccccggaagatataagccaagcccctactttcgaggggcaactcccaccttatgaagactatcccgggcaagacgagggggaaggagatacccatcttagccccctgctccacggcgtattctgcagacgaaaaattgttggtccatttctttcaagacagcttggccggngcagctgtagcatggtataccaatctggaagcttcccagatccgatcatggaaggacttggcaactgccttcattcggcagtaccagtacaatacggacatggctcccgatcggaaccagcttcatggtatgactaaacgagagcatgagtccattaaggaatatgcccaaagatggagagatctcgcagcccaagtcgtaccgcccatgacggagagggagatgatcacaattatggtagatacgttacccacattctacta

SEQ ID NO: 72826 - DNA, 148 bp, Glycine max
  unsure (1)..(148): unsure at all n locations
ctaacttacagagagtagttcaggcttagcacaactatgcgcactatttgcgcacttccaagaaattcanaagcagtaagagattggcacttagcgctttcagccccactaagcccagctcgaaagctcaaattccagaatggatcta

SEQ ID NO: 72827 - DNA, 502 bp, Glycine max
  unsure (1)..(502): unsure at all n locations
ttaagtcgacgcggctgcagctaacacctaataatgataagtatcaaagttatctcatcaacaataaatcactctagacaaaagctgaaccagaagtccaatgattaaccaccatataaggcagaaattaaaactattaaagtcaacaagcaaaacttaaccactaaacaaaagccaaatggagatccagaatttaaataactaaaaaaggaatgatagatctttgatggtgtggacagtttcaccaaaaagaatccaagtgaaattccacgggacctgcatcccccaatacataccttcatgaaaactaaagaaaattaagagtgaagtagtaacataatgaaactacttcaaaaaatgccaagtagatctattacaaaaatatgtgcccttacatacttttcaataattagaaagttcgtgaataacaattaanaaattaatntgtatataatgaaaaattgatgtagtataataaatctaacgcgacacaatgatatta

SEQ ID NO: 72828 - DNA, 155 bp, Glycine max
  unsure (1)..(155): unsure at all n locations
catcttacctatctatctcccagatgtctntgcttatattcaatttataaaaaacatgaagttctaattcaagatgttnntctttgtgcatgggcatgatgcaatcactctatgtctagcaatgattntattaagatgtccctacctttgagttc

SEQ ID NO: 72829 - DNA, 484 bp, Glycine max
  unsure (1)..(484): unsure at all n locations
agcttgagcanaatcaaatgacaatcactntntacttggatgtccgaatgaatcccgtaatatatcgagacgctcgtatntganaacgaagctcatagcaatttcaaacgacaataactttttactctaatgtccgattgtgtcccgtagtatatccagacgctcgaaattcagaacagaagctctgagcaaaatcaaatgactataactntttactcggatgtccgaatgaatcccgtaatatatcgagacgctcgaatntgagaacggaagctcatagcaatatcaaacgacaataactttttactcggacgtctgattgtgtcccgtagtatatcgagatgctcgaaattcagaatagaagctgtgagcaatatcaaacgataataactttttactcggatgtccgattgtgtcccgtagtatattgagacgctcgaaatcagaacagngctctgaaaaatcaatgaaataacttttaccc

SEQ ID NO: 72830 - DNA, 498 bp, Glycine max
  unsure (1)..(498): unsure at all n locations
agctntgaaagttcaccatcgctcanggatgaactagtcttctagtttcaccctcttcacgtcttctacattgggtgatgttggaatcataacaatcacattctttntgggtgcctttgttcacaaagattcaaccttttggaagaaaatatgagatttttgtgaaagaattctcagatgcaagcaaaagtacaaatgttatctgagagttcaagatttcaaaagagtcttttgaatgttcacctttgccttttataggcttcttaaaaatatgaatagtaatggttcaaatgacatttaatattnttttaaaaccattttttgatcgtggctaanagggcggcacatatctttcaaaatggaaactgaanagttatctttgtaagcacacttccccttctatttgtacaatngaacacacattagtccaaatagattaatgaaatactataagactatgccattatttgagaccatataannatcatcatcaatatg

SEQ ID NO: 72831 - DNA, 487 bp, Glycine max
  unsure (1)..(487): unsure at all n locations
agctngcaacttgaggctgntctctttactgcaagggacaatgactatgctgagccgttntctacctgtaatgtgctgaatactttgatacttgatggttgttcattgcataaagatgcaaaattcctctctatatcaaattctagcctctctagtttgaccataagtggtagctntgaaggaggagcttacaaaattgcgctttctactccaaaccttagttctctcacagtcacgggtcataataatcacacaatctcctccgcatgcaatctttctttccttgaagaagtaaccattgacacccttggttatacactntttccgaatacagacttactcatcataagctggctgcaagttctcaccaatgtaaggatactgaggctctattcgggtacccttctgacaatactacgggttagttactatgctttctcctctntacatnctttattttttcataatgctcataagatggggtgtc

SEQ ID NO: 72832 - DNA, 416 bp, Glycine max
  unsure (1)..(416): unsure at all n locations
gaacaccgatatataatcacggcgctgattctacatagataacaaaacagtcatagatatatttatctattgaacagaactgtcaaaaatactagtcactatataatgatctgaactacatctcacctganagtcaatgaagtaagcatgctgtataaaagtgaaacataattacaaagtcagcgaatttattatcaatgaaatgaaataatagttttaacagtctcaaatccactataacacaaagtaaacttgattagtacctcccagacatcaatggtaaggagtggctgcaagagataaaaatgaaatctcgtcagacattntaaccatgattgctcagccttatcctagcagtcatgtntcaaaacataaaatgaagtatggatantatgtaatccttactacctacataa

SEQ ID NO: 72833 - DNA, 494 bp, Glycine max
  unsure (1)..(494): unsure at all n locations
aagcttgaggattatggngtacccatcacatgtggtactatgtggcggtcgggcgatggtgcacaacaagttntccacatccacaatgcgcgcataaacccaccatcccctgttgcccacctccaactgagctcacgtactcccacgtagcccatatcctcgtttctctcaacaccgggtccccatcaatcctcccaagcttccacaacatccaagcaaaacaacattcacacagcacaagctatcacagccaagcaaaacaaagaagaggcagaatactctgccaaaacaccaaccaaaaatcacagcttttcccactcaaagaccccagtaacaattccttcgatccaatttgttaaccgttggatcgactccaaaatttttctggaagtctatagtgcataagcctacattttgaccggtgggatctactagcanacatccagaactcattntacattactctntccacaaccagcanaaatacatgggat

SEQ ID NO: 72834 - DNA, 73 bp, Glycine max
  unsure (1)..(73): unsure at all n locations
tgtggccgcttaagacagatatgctctngtatactacttatgagtgcacaaggatgtggttatactattgtga

SEQ ID NO: 72835 - DNA, 434 bp, Glycine max
aagtcaccgcggctgcagctgacattgatcctggatctgcaagcgtgttagattattgatcatagataaatcctgagaggcagagataaggacgaagaatccctcttcttgtgcgtgacactatcattctgtgctataactctggtgcatagtgagggatccttcgtaaaggatgggtaatcaccctactggccgatttctaatgaacaaaccaggcgaacccctagaatataagtgattatgaacgctaagctcaatgcttccttcaatgcgtgatgattgtatgctgttggactgatcacccacttgtgtgcacagttatgcgactataacattaagaaatgtactgtcgcctgagaacttgatggcactaagatcagaacttaatcttacatgaacgacctgccggttaaggttatgctttaattatgttg

SEQ ID NO: 72836 - DNA, 384 bp, Glycine max
  unsure (1)..(384): unsure at all n locations
tggagaacacggagcctgaagccgcacacattcttgnagatattgcacgaaaattcctagagtctgtgagtatctccattttgcttattatgatcactgggctgatgggattgtacactatttgcatgtcgacaaaacttatcttttatcgtgcgttgatatatactcgtttctgtaaacacagctgttcttactatctcatttattattccgaaccctgagctactgtatttaatgattcctcagcataacatcttggtttcaatatacctccctaatttgcgtaatgcccttctgtctcgttataatatgcttctttgtcaccgcgcttctcagtggatctgaagtgagaactatattgcaggtttctctgcctcctctgat

SEQ ID NO: 72837 - DNA, 470 bp, Glycine max
  unsure (1)..(470): unsure at all n locations
agcttatagagggcctttggatctcgtgcctcgcacatatttataggcatgttcatgaanacctgtcaatactattccgctatcaaatatcatatagagaatagaccaactgatacaaatgatagaaatgcctaatggtgctttgcctcaataaaatttgcatcaggtaacatggcacggcaagtgtctcgatctcttctgtaaggagatatcagactatcaacacatattaaaccagcatcagcgaagagttttgccacttctcctgaattaaataatttccagatcagtaaaaccaagttggaagacaaatctgcatcagatttttttaacatacagcagctagacttacaactgatacaaccaaagtacagctgactcagcanatgacatctatgatctatttgtaccatatatgtagatccctaagatcagaatcatgtagtatgtaaacataaattcatacatat

SEQ ID NO: 72838 - DNA, 136 bp, Glycine max
  unsure (1)..(136): unsure at all n locations
ccaaaaactaagcttgaatccatccagaagccagagccacttattntcctgttggggctgctagtgcactcgtaaactctcccttgacttnactagaaaaagaattaacacagatantnttcaatctttttaagcc

SEQ ID NO: 72839 - DNA, 485 bp, Glycine max
  unsure (1)..(485): unsure at all n locations
agcttgtaggattatggngtacccatcacatgtggtttttgtggcggtcaggcgatggtgcacaacaagttttccacatccacaaagcgcgcataaacccaccatcccatgttgcccacctccaactgagctcacgtactcccacgtagcccatatcctcgtttctctcaacaccgggtccccatcaatcctcccaagcttccccaacattcaagtaattcaacaatcaaacaacataaactatcacagccaagaaaacagggcaaaggcagaaaactctgcccaaaacaccaaccaaaatcacagcttttctcacttaaagaccccagtaacaattccttcgttccaattcgttaaccggtggatcgactccaaaatattactggaagtctctagtacataagcctacattntgaccgtngggatctactagaaaacatctagaactcattctacatntactctttcacaaccagcaaatacat

SEQ ID NO: 72840 - DNA, 125 bp, Glycine max
  unsure (1)..(125): unsure at all n locations
ntagganatgacactgtgaggaagtggtttcaactgtggaatcgttcgagttggcagtagaacgaacctccgatgctagcacgagtttggcaatgtcgtccatgtggacaataaaagatgattgc

SEQ ID NO: 72841 - DNA, 479 bp, Glycine max
  unsure (1)..(479): unsure at all n locations
agcttgttgtaaatcttctacactnggagtgataacttgctgtcctcttgaacccttacctctcactctttcatcatgccgagactcgagaagcccaacaggttttgctttctcaatgtactatgaataaaattccgtcgcttcttctgcaatgtacatttccacaataaatgcttccagacggtgtagattttgggtataccattttaagatcttcatgtatcgctcaaccggatacatccaccacaaagaaacaaaaccacaacatttgatttctctgaccctagggccttctttagcagctctagcctaatcccctcggagtcttctatccattacccttagggggtaggatngcatcaccccctccctcttgaaaaggattggacctcaaatcaagaggttcttgaaactctgggcttcttcgctcaacactcgtataaagaatgaganaatatatattagtggtgtgtgtatat

SEQ ID NO: 72842 - DNA, 146 bp, Glycine max
acacttaactactcagctgtcttggttagattgattatacatgattatgacttgattatccattttgcaaaatggatgagggaagaggattcgaatctgccaattatgcagcagaacctgcaaatttgtgcgcagaaaatgtgctt

SEQ ID NO: 72843 - DNA, 492 bp, Glycine max
  unsure (1)..(492): unsure at all n locations
agcttaaacaaaacagagtaagtgtttatgtatggtctacacaaatttaanaattttcatctttctttcattggtaccaaaggagggaagttggtatacttttctattcttcatatttccagcacagttgaccgctgccaaaaagaggctgtcttgtatccaatttgatattatccaatttgcacagctgcggcggtgtgtgctgcagtggcgctggtggcgcgccaccacatgagaagctccggaaagtggggtcgcgtggtggctattatgaaagagtttgaggagcagtgtgggacctcaattgcgaagctgagacatgttgctgatgccatgaacgttgagatgcatgtangccttgcttctgaaggtgacaacaagctcgagatgttgatcacttatngttgataatctccttctgggtttngtcaatcaatcaccttntcccttagaattgctttttctggtntaatttcactccgcataactggg

SEQ ID NO: 72844 - DNA, 488 bp, Glycine max
  unsure (1)..(488): unsure at all n locations
agcttcaagaaaaggccaaactccnctataaaatttgtatttaggcttaaataggtggctntgttcgtgctcgtgcgcttagagcaattntgaaccgcttagcatccattagtgaatttcggcttagcgtggcttttctcgctcaacggatggactaaagcggtgcgcttagcaggatgacccttcgctcagtgaatatgcacagttcatcctccttccagattctttctcgcgctcagccgagaagtgttgcgctctgtagatggctcgctaagcccgaagattggcttagcgagaaggtgaaaatcagtacttcaaaacttgcctaattaacctgaaattgagagaaaaatgattattaaacacacaanatggaagtactatagtattattacctacttttaacaaaaacactataaaatacccataaattggaggaagttgatacaatntagacaagtnttatacacaaaagttagtcgtattca

SEQ ID NO: 72845 - DNA, 481 bp, Glycine max
  unsure (1)..(481): unsure at all n locations
agctnggtggtactatagctgcactaaattgttgttgtggtaatcaaatgcagatgcaatgcagtagaagggggtaaagacaatatattactacaattatatgaaattgagtaggtaatactaagaatagaatattagtagcatgaccgaaaataaaatagccgatgtgtcaaataacataacaattgtctcaaatacagggaaaaaaaatactccaacgccatcattagccattttgacttattgctgtctttaaaaaaaatgttgcccatttctttcgaattgtggtgatgatgccgatgtccaacggtgtgtcattagcaaaccactgcaagtattcataattgtaagttagtactgcaaatataataaattcaattccaattgtacttgaagttatgcataccatggaccaatcactctttatgtcgctggctntgatgttccagatccaatgcattatgtaatatccacattcata

SEQ ID NO: 72846 - DNA, 147 bp, Glycine max
  unsure (1)..(147): unsure at all n locations
ctccctcttacaacanatacccctcagccaaatagaatccatcttgttgccttttcccacaactnntggtaatgggagagaaatgttcatctatagcatacgacctnccctatattatcaaatnctaanatttgagctcctagggag

SEQ ID NO: 72847 - DNA, 436 bp, Glycine max
  unsure (1)..(436): unsure at all n locations
agcttagatacataacttcacacanaagcttagatacataatttcacacaattctaatctaaggttgttgtccttngggacaaacgtgagaggtgctaataccttcctcaaacgtaaagataactcccgaatctggaatattcttcatgaccggtttcctttggttnttctaacgttttcctttcaataaacgttggtggcgactccgcgcattttcctcctttggaagacacacccgtgagcctcgccttgctcgcccgcaaaagcgtaggttgcgacagttggcgactccactgnggattgttttgtgagttaggcctatttttaggaaagtgtggaattatgaaactttgtgtgtgtgtgttttcttgaactgtgtaaaaataataaatgctgtcttttccacattnttacactgcattctaagcacccacag

SEQ ID NO: 72848 - DNA, 454 bp, Glycine max
  unsure (1)..(454): unsure at all n locations
agcttcggagagaggaaagagaccagtcacgggtgcatggcatgatcttaaaagaagagttagctgcttgcgcaagatccaagaggagtttggctcaacacttggaagccacggagcanagcatgctagctatcatagggcagtacaaggaagagttaaaccagtatgtgacccatgaacaaaagctagtagaggatttcacacaagtgtacgccgaanaggaagcaagagggagggtgattgacgcattgcatcaagaagcgactatgtggatggataggttcgccttgaccttgaatggaagtcaagacctnccgcgactactagccaaagcaaaagccatcgccgaagtgtgtacagccnccgagggaaatcatgggctaatcaattactggtcacacatgatagatttgatgcccatataattagaaaccgtatggtctatggtaacact

SEQ ID NO: 72849 - DNA, 423 bp, Glycine max
acctgaggcatgcaagctataaagtgctatgtcaaagacaacatgccatgttatgttatattgatgttgcattaaagaaaggacaacattttcttaattttaaaaattatgggactaaaatcactgatttaaaaataatgaaaccaaaattacatattaaatattataagtagcctataagtgcgatttaaccaaaatgttaagtaggtaaaagaaaaatcaaatttatctcaatagagaacagtcatatattaattatatatacgacaaggtgaaaaataaaatgtaaaattatatttttggtctctcttgtatataagtttttcaatttggtctctttattattaagaatgtcaatttgatttttaatatttaaagaatttttatagtgtccttccctccaatttacattaacaacattta

SEQ ID NO: 72850 - DNA, 404 bp, Glycine max
tcagagtcacctgcggcatgcaagcttgcatttggaattgcgatagccccactccatcattattattttacctgacatctcaaacaaacaaatcaaacgtaacaagacaattatagttgctggttgaatacctcacccactcaagtgtatcacacaattatggcttttctctaatgaaacactcttgccttttaccactctaattccccttgagttcttatgcaattcaagagattatggccacaacaaagaacaattcaccaatatgtgtaaggtaggctagagagacaagggaaatgttaaccaagaaaaaggctaacaatgtttttatgcacaaatgattgaaataataattagaatttaggaattcaagtaacaatcctttatgcaaccaatatattacc

SEQ ID NO: 72851 - DNA, 494 bp, Glycine max
  unsure (1)..(494): unsure at all n locations
agcttgtaggattatggggtacccatcacatgtggtactaggtggcagtcgggcgatggtgcacaacaagttttccacatccacaaagcgcgcataaacccaccatccnctgttacccacctccatctgagctcacgtactcccacgtagcccatatcctcgtttctctcaacaccgggtccccatcaatcctctcaagcttccacaacatccaagcaaaacaacattcaaaccgcacaagctatcacagccaagcaaaacagagcataggcagaaaactctgccaaaacaccaaccaaatcacaatttttctcacttaaagaccccagtaacaattccttcgttccggttcattaaccgttggatcgaatcgaanatttactggaagtctctaatacttaagcctacatattgaccgtggggatctactagcacacatncagaactcattctgcactactctttccacagctaaccacacacaagcatttttc

SEQ ID NO: 72852 - DNA, 491 bp, Glycine max
  unsure (1)..(491): unsure at all n locations
agcttcatagttgatatgggaaagaaaaagctggagctgtgttttgaagatcagaanattgantttgatttgtttgttgaagacaagcctgctccagaacacaatgtttgcttacaagtaatggaaggaggtcaagaggttntgaaagtaagaaccaaaacataagatcacccagtgaggtaaaagcgtcaagataatgacgttaaagaagtgcttcctaggaggcaacccagttttaatttctgttatctttgttttcaatgcatttaatcattcggaacttgttgtatgatctgtacataggagtatttcaacttatctttgaatgtttaacataagggtttcaatttctcggaaaaaggactgaataataacttacaaaacttttttctganaaatagtcctttcgctaagcgcaagcctcgcgctaagcgcatctcttgtcatgcgcttagccacgagtctcgagcgcttaatgcccaacccttgca

SEQ ID NO: 72853 - DNA, 114 bp, Glycine max
cacaaaaaccgctactaatgtttaaagaaacaaccattgtacattacactatttacacctcggggcataaaacctggggacccactttcaacctaataagtactaattaaaccg

SEQ ID NO: 72854 - DNA, 444 bp, Glycine max
  unsure (1)..(444): unsure at all n locations
agctntctcttttgtgcaactatctcatccttttttttgtgtangtgctgctactggtggaggcacttgaatttggttgccagacctcaaggtgatgacactcacatttttcggattctgcacagtttgtgaaggcaatttttcagaattntgggactgagcttggttcatctgagtagccatctgccccatttgatttgtcagactctgaatggaggctcttgtcacttgctaaaattgcatattctggatggtcatttacctcactaactcttctaagaaaggttgaggaggagcctcagttgctggttgtctntgttgtgactgctgctgttgttgctgcattggaggaggaacatatgacttgctcggaccagcaacattctgaaaggaagggacatgctgttgttgttgtggaggacttgtccatctcanatttggatg

SEQ ID NO: 72855 - DNA, 149 bp, Glycine max
  unsure (1)..(149): unsure at all n locations
ngcttgtggngcttctatggaggctggatctntgttcttcaatgangtcttttaatggtgattntccccatggagatgcagcggaaacaaaggagaagaagtgagaggatgctctctncactannngaataaccatggaagaaggagct

SEQ ID NO: 72856 - DNA, 448 bp, Glycine max
  unsure (1)..(448): unsure at all n locations
agcttgtctacgcagttaatgttntattcatcgttagtatattaatttgttaacaattttcataatattttgtgtgtaacctaaaacttcattcaaattatataaattctcacaagtggatcaacccagcaatatgacttgttttttcaaattctcactactagaaaaagcagatttaacattggcgcattaacattgattttctacaaaaccgatgttaacataaatgcggtgacataattgtaaataatgtgtatccgttaacatcagttttgaagaagaaaaccgatgttaacgtatgatcagctaacatcggtttgttgaataaaatcgatgttaacgttcacatcaatttgttaacatcgggtttttattgaaaaccgatgttgaacttacattttaaattatatttgacgcgaacctatttgctcatgctctcttcttctcc

SEQ ID NO: 72857 - DNA, 151 bp, Glycine max
  unsure (1)..(151): unsure at all n locations
taagctccttcaactgcacaaggctcttaatattttaagagtattcttgtggaactcttcacccgacaaagacactgaaaaaaacttatcttctccttttggacaaagtatgagaagctggnggcaagtaaattntcttcccatcagacct

SEQ ID NO: 72858 - DNA, 358 bp, Glycine max
  unsure (1)..(358): unsure at all n locations
agcttatacccaaatattctctgcgctttgtcctattatgttgcttatatgtgtgtgtgtgtgtgtgtgtggttgcttatgcaggatttggttttggaggaagctcatcctctagctgtcaaattatcatttgccatcagtttgggtcttctacctgttactttgtctttgaaaactgtcagctgtggaattagaaactctggacttcctgaagaggaagctggagaccttgaaagtagtagtaagaattctaatccactaccaactggactactagtttagaattntattntgtgttgcgcttgttttcttagggttaatggcatcatggtatattcactatagaaaatccacaaac

SEQ ID NO: 72859 - DNA, 148 bp, Glycine max
gacacgataatgcacagaatactaccagatcgttgaatagtgattggattatatacaattgtacaatcttctgtctccataacgacgctttctcacaactagcaggagtgggtgttaacaatgccacatgttgaaacatatgtctgta

SEQ ID NO: 72860 - DNA, 420 bp, Glycine max
  unsure (1)..(420): unsure at all n locations
agctggcctaattaacctanaattgagaganaatgattattaaacacacaaaatggaagtactaagtatttattacctatatttaacaganaatacttataacactacaaaataaccataaattggaagagtttgatacaatttacacaagttttatacacaaaagttagtcgtactcaccgactaacaatttgtttgaaacaaaaaaaaaactaaacataaaaaacttttgcatggtttctttttttcacggaccctttgttcctttgataagtgtagtctcgggttataactttgcctaggattttcaaactttttctaaaaactaacatgcattttgaaaaaagaaagaaacaatcactagttntcttcanaaaagtttgtggatcanaacacanaagggttttttgaaaaagaaat

SEQ ID NO: 72861 - DNA, 61 bp, Glycine max
atactcagctaacataactgcctctttatgcttggcttgttgcccgccaatacataccttt

SEQ ID NO: 72862 - DNA, 445 bp, Glycine max
  unsure (1)..(445): unsure at all n locations
agctntataagcgcgggtctgggagacaaaggtcatgtggtcgcaatatgcgaagatgatgttccgagtacattggatttggtacgaccatgccctcctgatttccagctgggaaattggcgagtggaggaacgccccggcatttacgcaacgagcataatgtaaacctttacggttttaaaagctctatagttgggcctaggctntagagtttttccttttgttaaggctttgtgtcttttgtttttgaatttataatacaaggatctttcttcatctgttccgacgtctctacccattctcattcatttgcatgtttacttctttttctgaaacggcagatccgatgacgagtcccccgaaggtactaatacctgngactcgcctatcgacttcgagcaagaaatgagtcaaacagaagatganggaaacgatgatgtgggac

SEQ ID NO: 72863 - DNA, 145 bp, Glycine max
  unsure (1)..(145): unsure at all n locations
tcttagtttcagatgatacagatgggtnntgtagctacctcatgctcttcctctaatgactatggcatcatttctggcgctatactgctgngagtnggaggccatctaatcagttaaatatctggcttcatcaggagtcatgtct

SEQ ID NO: 72864 - DNA, 488 bp, Glycine max
  unsure (1)..(488): unsure at all n locations
agcttnctcgggccattcctgcgaagcaaacatttggaaagttatttttagtgggacattactcttaaagcanaaatggcatataacctcctcccataaatacaaacatcaatgtaaatttagagcaagcttatgcgcctatttccttacaaacgttctcttgcacaagacatttaaccgaaaaaatgcacccatatacaatcaaggcagcttcgttacctagattatttacacgtacctccaaggcgtatttgttacttacatcacacacatctccttggctaaactcacatacatgcatactcaagcattttggggcaccaaaaattgcacatgtgcacatcttggcatttctaatacctacatacgcaaacttcatgatgaatctngactatctacacaataaggtgctacatttcatgctcttnttttttcaagtntttgctacctaaagccgcatggcaaatcaagcatattttccttttgtg

SEQ ID NO: 72865 - DNA, 457 bp, Glycine max
  unsure (1)..(457): unsure at all n locations
gcttggagtttccaagtgccaattcgncttcttcttttgttcattcttcttctggctttaattcatcagtgggctttccttctgtgtctagcatcttgggatgttcccagcctttgatgacagctttccaggttctgctatccagtgatttgaggaaggccaccattcttgctttccagtattcatagttggttccatcaagaattggtggtctgttcactggtcctccttctttctccatgttcatcagaatttatctccctagatctcactcagtgatntcgagtgcctgctctgataccaatngaaattctgatactggggacagatgtcgtacaggatgtcacgacatcacgcttcagaacatgcagattgtctttgactgtntgaacagattaaacaangtaataacacaagagaattgtaacccagttcggtgcacctccctacatctggg

SEQ ID NO: 72866 - DNA, 434 bp, Glycine max
  unsure (1)..(434): unsure at all n locations
agctntacaattataaatntatgatttacttgatttctgatgttattcatttaatcttgnttccaggggaagccaatggacaggagcctatgtcatggaatttcgagatctaattaatttgcctcatatgggagttggaaaccacgaagaagaagaagcacgattttcattcttgaagggtggatacgttgaagattntgaaaatcaaggtagtttctactttctattccttgcttctatgcttgcaactgaatgattactttaattagggatgttaaaaaaataattatattcgtaattctgagataatagaataattagtgaagatgttattgtcaatgacattggacaatctgcataaaaggaaagttcccttgaagagattctgttcaattgtaattccaccatattagaacatctaaactggcatgaga

SEQ ID NO: 72867 - DNA, 91 bp, Glycine max
cttcatctcgctgactgagaataatttcagccatcacacatgcttgctcgggctaatgataatgagttacacctctatgcatactatgtca

SEQ ID NO: 72868 - DNA, 511 bp, Glycine max
  unsure (1)..(511): unsure at all n locations
ctcagagtcacctgcggcatgcaagcttgtgcanatcaagtcactcccgcattntatctctagtatgcattgtatgtcacgggaagccggaaggtccatatcaccttcttaattgtacacatggggcactgcgcccccaaatgcgcaagtaagaagagataattttccgggctctcgtgtccgtaaaatgcattcatatcatgcatcgcataagcatctcttcataacatcataatggacatatcctgcatttgtccgttatcatattccggcctcacattttgcatgagtcatggcatcatcatgcatatgcgttcaacaaactttttgatctgcaaaattgcataccatntgttttcatgtttgctcatccttgcgttttcctctacaaaacaaaaacaaaaaagggggaagcgtgaaacttcacgctacattcttaatttcatgtgttaggagccanaccatgtgggatcataatacccgttcacttaaaaacaaataatngaacatg

SEQ ID NO: 72869 - DNA, 451 bp, Glycine max
  unsure (1)..(451): unsure at all n locations
atacagtagagctgancgcatgcaagcttatctataatatatgattgatgggaattctaatattttcttttgcaggttgcttctcaagctgtttattccttgcataagacttcaacaagagatgtaagtcgtttttattttaaattctaaattctaattattagattgagtaattgagatctgcaagactgatcaaattgtttttgacttattatctcctgtatcatatttattntattattttttcttttttcacagaagatatatctggccattagttaataaggttcccattccacaaggatgccattagtgttattttcttcaaccttttcactagtgtggcatcgttctattaaacctattctattcttcctcccagttattgttttgcatctagcttgcacttcaagtttagacataacatcaatgatatgttttatactaaaac

SEQ ID NO: 72870 - DNA, 427 bp, Glycine max
  unsure (1)..(427): unsure at all n locations
agcttatctataaatatatgaatgatgggaattcttatattacctttgcaggttgcttctcaagctgtttattccttgcataagacttcaacaagagatgtaagtcgtttttattttaaattctaaattctaattattagattgagtaattgagatctgcaagactgatcaaattgtttttgacttattatctcctgtatcatatttattttattattttttcttttttcacagaagatatatctggccattagttaataaggttcccattccacaaggatgccattagtgttattntcttcaaccttttcactagtgtggcatcgntctattaaacctattctattcttcctcccagttattgttttgcatctagcttgcacttcaagtttagacataacatcaatgatatggtttagactaaaac

SEQ ID NO: 72871 - DNA, 121 bp, Glycine max
  unsure (1)..(121): unsure at all n locations
actcgctggtaatggattgcttcccacctatcttctgatgatatgtgattatacactgaagctatntctttaaggtgttgaggatatgcaaaatccatcaaagtttttcaattcatttccg

SEQ ID NO: 72872 - DNA, 493 bp, Glycine max
  unsure (1)..(493): unsure at all n locations
agcttattgaaataagctggaaacaacttatggacatatcatatactattntcataagttctcccaaacacttatacaagtgcttatgtcacatcatattgataagctcttctaaacacatcctcatgcctatgagaaatagaattggattgcccagagagagaaaaaaaatccatgcatataaaaaatgaaattggaccaaaaaacatgctattttgttcaaaaaaattaaatatcgtataacaggcatatgagtcaaaaggtcattagctcttatgtctaatgtggactcaaagtaaaaagccatctagctttagaaatcaagcatatgcccagaaattacaaatataacacaaaaaanaaatactaaattactagtggtcatacaacttacgaagaacaccaagtagttcttctggggaaatccgtgtctttacatattcctcggtaattacaaagttcctagcanacattaaaaagtgtggcatgtata

SEQ ID NO: 72873 - DNA, 70 bp, Glycine max
ctattgttggttggagatcgaacgagagaatctgaacttgcagaactgaagtatcaaaattcccttactt

SEQ ID NO: 72874 - DNA, 423 bp, Glycine max
  unsure (1)..(423): unsure at all n locations
agcttaaatttcattaanattaanaccaatgtaatatttctattntaatacaataaaaacaaactaatagttctggggggaaatgttaaaaaataatattgcatatgaatctgattcttagcattatttaaattttctatatgaagaaatgaagttgatgttgtgttcaagaaataaaaaataaatacaatcttaaaaacaaaactaatttttaatctcaatatgatntttgcattatttaaaatttgtgaattanaaattataattccgtgttcaaatataataaaaattttgaaaaaaaaaatctttaggttgggggtcaaaaaattatttcattcagattaagtgatagtaagagttaatattttgtattggaaatataatagttaaaataaataaaatatggaaacaaattattaaaga

SEQ ID NO: 72875 - DNA, 151 bp, Glycine max
  unsure (1)..(151): unsure at all n locations
ntngtcggatgcgcctaagaaaatatctctcttaatttgtttcacttgttataaaacttaaaatagaaaattctttgcttaattaattgatagcaaaacttgaaatccattgtatcctctatgattcgaanatngaaattcattanaaact

SEQ ID NO: 72876 - DNA, 368 bp, Glycine max
agcttcaatgcctacattactaagaccgaagctattttgcttattctatggaccttaacgggtctttaaaatacgtggagcaatgacatctcatttgcaaataccaggcactgatgtaattcacccacatggtcacgttcccctattgttacttgcgttatgagaacgtccaactgatgtgcacttgccaaagggactccataatgaataacagcggatgtaatccatacaatatataggaacaataatgatgggttcatcaagaacacatataccataggtaattgtgtacaaaggactacatgcctaatgagcgacttgtgagggcagaacaaatgtgatggagtacctctctgctttcaaacttg

SEQ ID NO: 72877 - DNA, 404 bp, Glycine max
  unsure (1)..(404): unsure at all n locations
agctntgaagcatatcccttggaagaaagttattttttttatctagtaagacatctctgtgaagtcaacaattactcatacagacctgtagatccaaatctgccaagttcatctcacaggccaaaggatagttatcctactgataggataatactccagaatactgatgatggtcaaatccgaacagagatttatgttccaaaacccgagtttcaaaaagtggaagatttggttgatgatcattctgcattagaacaagactgggaagactataatgctcaattgatggaagaattgttacacaaaaagagatatccttatcaccacccagtgtacggaagtctcgccagatcaaaagtacaacattacaacttgtcattatccaccagaatagactacaggtc

SEQ ID NO: 72878 - DNA, 120 bp, Glycine max
  unsure (1)..(120): unsure at all n locations
tcacatcagaccacttncanngtgctggaactacttcacatggtcttgatggggcctatgcaagttganaaccttggaggaaagaggtatgcctatgttgttgtggatgatatctccaga

SEQ ID NO: 72879 - DNA, 468 bp, Glycine max
  unsure (1)..(468): unsure at all n locations
agctaatcaacacccaatattctntgtcataccttgtgttcctattggctctaaacacattagaaaagattctggttgaaattttcttagagactaaatctagaatcttcttacaaacggatatacatatcagngcttagtttttttctctcaaaatgttcaaggtattttgagagctttttctaacttttcaagagtatatataaagcttgttcaataaagagagatgaaagctgttgagcgagatatgctatttcagtcttcacagcttcaggttaatatgtggctcatcttcaagtattcgttgtctcacaataggtaaatcttcacttgatcttcgtttgaaaaaaaagttcgttgggacatttaatgcacatcctctccttatgcagatagtcctctcttcaacacttagcttgtaagagaactgcaacaggtagtcacatctttgtgcanaacacgtcttat

SEQ ID NO: 72880 - DNA, 484 bp, Glycine max
  unsure (1)..(484): unsure at all n locations
agcttcaaaacacagcaacacaaaatctaggtgtccattacccctcaatntaatggattntctaggtttgagaagtgaaattgagaatggtgataatttgaagcaaactctcacctcacacaagtctataacatcaatttaaacatgttcaaactggatttacgcctaaaatttcaccgaatcaaaatttgactcttcaacacccaaatttaccctagaaatggctctttgttcactttggtcatttgttttcctctctagcacatcccaagctttctcataagtcctaaaagacatttcaagctaggattaactcactctaacctccaaataccactaaatccagatttgaccttccaactctcanagactcactctttntccactcacaacaacatattctcaccttccaaccctaggttaactctacccttcacctctaacagntttccataagtaatntcagcacataaacatcacaagc

SEQ ID NO: 72881 - DNA, 117 bp, Glycine max
taagcctttttagtggctgtagcacatatacatacctctcgaggcatgacgggtctggggaataactctgcaagagacaacaagatgacaaatataacatcaatggtgaaatagacc

SEQ ID NO: 72882 - DNA, 416 bp, Glycine max
  unsure (1)..(416): unsure at all n locations
gactcattcaatcatattcaagcttgatatgggtgcaagggtttaatcattcatgaacaaggtaaggttgtttggctaagtgtctaaatcagatcaatcatggccttcatcatttccaaatcatgcattcatttagtattcagagattcatgcaaaaatcggtactttatgctagtcgatctctcacaatttagattcacacatctcaccggcttatagcaaatgattaccttcgctatttacctgtcaaacaaactaacattntcactcacacccctaatttcatgttctttctcttctaactactgcatacttatccaaggcatgtgatctagtatcgcanatcactcaattcatgccatcaatccaattcaaactaatcaacanacaccagaaattaaaccaaaagatgtttc

SEQ ID NO: 72883 - DNA, 421 bp, Glycine max
  unsure (1)..(421): unsure at all n locations
agctngccatacagaactcacttaagtgagcacaatatcatataaattcctccaggggagcacactcgagaaaacacaataggtgatgtttaagcaagcctaatactgctctaacgcctacagggactaactagattaagcttgacgactatggcatgcttaagctagtttagaatcttcaaaattcttcaagatcctttcattgcaatggtgggtcttcaaagtccctccaaagtgccctccaaacatagattcctacgttttttttaaaataacaactaatgaagaccatatgggagcaacatttaaattaaatttgctaaaacaccaagcgaatcatacaaacatcagtatacaactctccgctcttgttgcattacatattcatgagattcatacatataacatggtaggcattatg

SEQ ID NO: 72884 - DNA, 455 bp, Glycine max
tgcaagcttcgtgagtgcaggtataagacacgaaagacatgtcattttttatgcgatgaggactccccgaggaggtctgaattggaacagtcatgccctcccagcttccagcaagggaattggtaggtggaggaatgcccggacgtttacacaacaagcataacgtacctcttttagctacaaaccctacaggagggcctagacattagggtactcttttgataatgcactatgatctttcgtcttaaaagtaataatataaacatctatcctcatctgttcttgtgccatccaccattctcattaatttgcatgcttcatttcctgtacaacttaacgatgccaatcgacgacgagtacttcaaagtctaatccctagactctgctgctatttcaacatattcaagtacacaacgaatagatacaatatcttgcttccctaagccaaaggatat

SEQ ID NO: 72885 - DNA, 479 bp, Glycine max
  unsure (1)..(479): unsure at all n locations
agctngcctaattaacctganattgggagaaaatgattattatacacacaaaatgaaaatactaagtatctattacctatatttaatagaaaatacttataaccttacaaaataaccatatattgggagagtttgatacaatttatacaagttttatacacaaaagttagtcattttcatcgactaacaactcccccaaatttacagttttgcttgtcctcaagcaaaaagagaacaactcacttgtcctcaagtgacaatgacatgcagtgactatgtacaaaggtgtatgctacaaagtgactgattgcatgataagagaatggagtaaaatgcccttatcacttgtctntcacaaggtatgcagttatccaaagagaagagcataatataacctgaacaaatagatagagttaggcataagacaaatatcaaggaaagtagcttataccatagtctactctttcactcaagcacaa

SEQ ID NO: 72886 - DNA, 411 bp, Glycine max
  unsure (1)..(411): unsure at all n locations
agctcggatgctttgctgtggactctgatctttattgtcaaaacagaagcataccaagttaggaggagccatgcgcatgaacaggcttgctgctnttgctatggactctgacatctcaatgtcaaagcaaaggcatggcaagttatgaagaggcatgcacatgaacatgaacatgcttggtgattatgctatggactctgagatgtaatgtcaaagcagaagcatggcaagttaggaggaagcttctgcaataatatttttcaagatggcatgcacagtgaccatggctttggacgtggctatgcacatcatgggggtggcaaaaagttaccttttgctgccaatagtagtaactctcatcatttatctaagggtggtggcaaggtctattctgggggcaccatgagtatt

SEQ ID NO: 72887 - DNA, 149 bp, Glycine max
  unsure (1)..(149): unsure at all n locations
ctcagcttttattacacaccanattcgtatatgattattgaattgggttcttatgacagtaaaattcatatgcaactgtgcaaggaataatgtgaaacatgtcttctgcctgacatgcacactcatgtgatttagctgtttgttgcact

SEQ ID NO: 72888 - DNA, 492 bp, Glycine max
  unsure (1)..(492): unsure at all n locations
agcttatgcgcctatntccttacaaacgttctcttgcacaagacatttaaccgaanaaatgcacccatatacaatcaaggcagcttcgttacctagattatttacacgtacctccaaggcgtatttgttacttacatcacacacatctccttggctaaactcacatacatgcatactcaagcattttggggcaccaaaaattgcacatgtgcacatcttggcatttctaatacctacatacgcaaacttcatgatgaatcttgactatctacacaataaggtgctacatttcatgctctttntttttcaagtttttgctacctaaagccgcatgcaaattcaagcatattntcctttgctgactaanattgcattcaaatttaaaaggtatattttttgtaataatgtttcttcacatcaacatgcacatanttatatatatatttttttgtgagacatttttgactaccaaaaattatatatacatacatt

SEQ ID NO: 72889 - DNA, 128 bp, Glycine max
tcccgtatccgtacttggaagatctgataccgctcttctaatgtagtatcagtacaattctgatatggctccggaccgtactcaactgcataatatgttcaaaaaaagaagggtgaaaacctttaaag

SEQ ID NO: 72890 - DNA, 443 bp, Glycine max
  unsure (1)..(443): unsure at all n locations
agcttgctctggtctaataaattgtaggatggaatctgtntttatnnttttgttctgaaacttaagaaattagcttttgggtcttttcttgtcttataacattggtggtataaaatatgtttgggtnttttctatctgaaaccagttacttatggatattntgagtcaattatattggtgagtccttcagcatgtttattagattatgattagataagaatactaacttgtaatttgtagtcacgtataaaatttcatcgaataaaattttgattacataagaatactaagttgtattaatttcccttcatatgcgtggagaattgacttataaataataagcactgaggttgcgaaaaaatctcanatccaataaacatatatagcaacataagataggatgataaaatatattgaccacagttagtgtcaaattgtcaata

SEQ ID NO: 72891 - DNA, 138 bp, Glycine max
  unsure (1)..(138): unsure at all n locations
cgtgantaaactcatcgagtccccacagtggttcctatcacaattctcatcatgtattaactcatcgccttaaaggtcttatagtcatgtgattgtacaattcatagatcacaaactcaaagcccataacatctcaat

SEQ ID NO: 72892 - DNA, 490 bp, Glycine max
  unsure (1)..(490): unsure at all n locations
atccttaagcaccgcggctgcagctgctgtaaaactacaactgaaagttggcgatttgacagagcttgacataaacctagcccccacaaaatgatgaatttggcctaatgcgatggtttgctatatgcaaggcattgcatagcaacttgttccttgggcaaacatttctaaagtatagcatggattgtctccccggtagagatgaactcagcgacaacttcaacctgtgacaatccaagaggataactggaaagagagggaagaggtttaccatagatgacctcaaatgggtaagactcatgcttgattggattgaagtgttgtatgaccatttggctaatgtaatgaactcggcccaatgcgatggtttggaatgcacaaaggaacacaagtactattccaacactaaattcaacacctctatttgtccatcaaactcanggtggtacgatgtactcatgcaatgtttggtgcacaaacatgaaacaac

SEQ ID NO: 72893 - DNA, 149 bp, Glycine max
tctctgggaccttgagcaagcagctaactcctcctttaagactattctatgtgcttgtgattggtctctctcttcccttcgaagcttgagctcactggtgctgccccacatagctccacggaattagtctcggccatgttcttccttgc

SEQ ID NO: 72894 - DNA, 461 bp, Glycine max
agcttcatttgaaaatttgtgtgtatagctggctatggaatgcaattaaagagaaaagacctagtccatgcttttaggtacaagatctccactgtgtcttaatcccctaaacgacgtgtcgaggagatcataagtaattgagcagtctatatgaagaaaatgaagagcatgattttgttttttgagtcatttttataaataaaatattaatatgagtgtctttcagataatttactactataattcatttttaatcattaatctatcgaaattaattatttgactaatatatttaaaaaaacatgacatgtgacatatttgtttgacagtattatgtgatctcttaacttattaattaaatgtcatttttgatgatcaatcattaaaagagacatatattggataaatatgttagaacacattcatatcgtattgttgttactaaaataatccatatgact

SEQ ID NO: 72895 - DNA, 114 bp, Glycine max
  unsure (1)..(114): unsure at all n locations
ttatattttnnnttttttgttgaanataagattgggatgatatgatacaagaggaaataacagacaacatatgatgaaattactnttataagcaacattttntgtttagaaatg

SEQ ID NO: 72896 - DNA, 394 bp, Glycine max
  unsure (1)..(394): unsure at all n locations
agctnttaaacattcaagaccaatcaatttttttttatgcatagaaagtaatgcacgacgccgagaaagagcatcaactacaatattaccttttccctttttatgtttgataacataagggaattgctctagaaattccacccacttcacatgccttttgttaagcttgccttgccccttgatatatttgagggactcatggtcgctatgaatgacaaattccttgggataaaggtagtgttgccatgttttcaaagcccgtactaaggcatacaactccttatcataagttgaatagttaagggtaggaccacttaacttttcactaaaataagcaattggatggtcttcttgcaacaacacagccccaatcccgacatttgaagcatcacac

SEQ ID NO: 72897 - DNA, 473 bp, Glycine max
  unsure (1)..(473): unsure at all n locations
agctntacaaatgggtaaaaggctcacattcactttcttctacatcatattcaaacttgtccaaataaataataaagtcatctcgactcaaagaaagtcatataagtctcatacaattaatatagaacctatatcctaatgtcacatcctatcagagcgtggtgttcccgtgtcctctagcatgaggttcttcatagtcatccacctattcatctgctcccccgaacacaaagttcaaatcatcacaggatcgaaacacaaacagcaaaccgggagtgagttatcacattgcttactactagagagaaacaacacaacatatagtaaccaaatacaatttacttagcatatctcacattatttcatcactttgtcattcatcaatcacactnttcatccattaatcacacctttcaatcatcaatcattatacacaggaatcacacactccgatccagacataataacacatc

SEQ ID NO: 72898 - DNA, 439 bp, Glycine max
  unsure (1)..(439): unsure at all n locations
agctctcaattgaatgtacaacgttccaattgatatcataaagttgtaatcgattacaatgttgtggtaatcgattactagtgtgcttgaacgttgaaattttcaaatgtgaagagtcacattctttcacaaaaaagctttgtgtaatcgattacactgatttggtaatcgattaccagtgattgtttctgaataaatcaaaagatgtaactcttcaaatgggttttgactttttcaaattggttttaagtttttctaaaagtcataactcttctaaatggttctcttgaccagacatgaagagtctataaaagcaaggctttgttttgcattnttacatctatccaatctattaatctacacatctatcttttccaattcanttcttttcacaagcaattttccacattaatttctgagtctctntgaacttcttctt

SEQ ID NO: 72899 - DNA, 103 bp, Glycine max
  unsure (1)..(103): unsure at all n locations
ttggnataactgcacggcttatcgttattggtattaaacaataaagcatttctcattgtctaagaaataaacaaccttatatcgcggttgaattccattatat

SEQ ID NO: 72900 - DNA, 294 bp, Glycine max
  unsure (1)..(294): unsure at all n locations
agcttatatggagaagttttgtgaccaacccagtttgtgtatagaaggggatttgaacttgatttggaagcttcatatcccacctcgggtaaaagctatttctctggaagctgtgctgtgaatgtcttcatacaaagactaacctttgatctaaaggagtggagtgctctatatatgttgtgttcacttagcgaaacaaaaataaaaatgcatttcacatgttngcaacttggcaggtgaatgaaggtngttgggaaaaacttaaccacaagccgcgtgttgatgattttgcgc

SEQ ID NO: 72901 - DNA, 314 bp, Glycine max
  unsure (1)..(314): unsure at all n locations
ctaagcttctgttattagtgccagctccttcagaattagcatatcttggtaattgctntattgcatccagcagaggtatgcttacctctacttttctaaatgtttccaatatctccttctctgtctcttccaattatttggtggaaatttctcttggagggaacggaagagggatatgctacttctgtaaatcagaattaccacggatatgttgcttctctctagaatcacctgcatagcaaattgtacgtaacttactctttaagatcttcgccggaggctttctggatataagtgaatttggccgttcattt

SEQ ID NO: 72902 - DNA, 472 bp, Glycine max
  unsure (1)..(472): unsure at all n locations
agcttgtttgaacagtgaaatgaatgaatcatgtnttattggtttgtttgatatgaaatgagtgtntgtgaatgatatgaatgagaaaatgtatgaattgagtggactggaatgattagatgtttgttttaattaagcttgcagccattagaagataaagaacatgtgattagaagtatgactgaaaatgttagtcagtttgtcagattgattgtgaaggaatgcattgaccgtatcccggtgagagtgtgatccttaaattttgagagaaacaactatcatttagtactgatttttgcatgaatctctgaagtatggcctgaatgcatgaattgaggatgatgaacgccatgttttgattgtgatagttacttatctcaaaagctgaccacgtgcttaaaggatttatccctagcacccagtttgagctgaatgaattattgattgattgaaccttgagcctatacagtgt

SEQ ID NO: 72903 - DNA, 457 bp, Glycine max
  unsure (1)..(457): unsure at all n locations
cacattggttgttagtgtgcagttagtctcaattgtcactattataaaatacatcttctacatcggttatttaggactttctacatcgngttttaaccaatgttgatagtattattgttaacatcagttttccaagaccgatgttgacataaaattgacaacgtcggttatctaaataaccgatgttatataataagaattacaccataaatagtgtatgaatgttgatagttgacatcgtgttttccacacaacccattntaacttatagattaacatcttttttgtataaaaatcgatgttacttatatattatcatcagctctttataataacttgatgttaatggttataggttaacatcatgttttaaacaaaaactgatgttaatctataagttaacatcggttcttatacaaagccgatgttatcgtttgaattttacatcatgttttat

SEQ ID NO: 72904 - DNA, 467 bp, Glycine max
agctcctgattgcatgcacaccgttctcacaggagactatatggatgagatcccgtgcttaagggtggagcgctcccggtgcttgctcttttcattttctaggcttattatcaattgatatcaatctggattcttgagattttttttctcgatgaaagaataaattcataaagaccgaatgaaatcaaatacggtaaaaatatttctaggatcatctaattgtgtatttctagataaccttacttaaaattaagccttggttgtttataagtaaaaatatatttctaggatcatctaacgaaataatttaattgtttataattataattatataatgagagcaaaatatacatgaattgtgtaattataatatgatattatagagatcaattagcataagggtaagaagccaaataggttgcttaaatcttatccattgaagatgctcttaaaacagtctaaacgag

SEQ ID NO: 72905 - DNA, 498 bp, Glycine max
  unsure (1)..(498): unsure at all n locations
tctcattgatccagcagaggaggagcatacaatctatttcactcaattcacacccacgaaattcaagcacaagagacttggtcattgccatcttgaaagaatgctaaacatganaaaaaggaaatatgcacaagaaaatttgaagaagtttcaaatggaggactgcaaatctgttagcacaccaatgaatcaaaaggagaagttcagcaaggaagaagatgttgataacattgatgaaggatattgtgggagcttgattgaatgtctaagnnncnncctacaacaaggcccaactttctattttcttaaaagaacaaaactgatatttttgttgacatcaagtattcatcgctattgcatacaatgctgtgtgtcatgggacgactatacatatcaacatcaatggttattatttgatataattcaacaacggaagaaggaacttatttactgatgctaaaataactgctatctgtttcatagtcctcctataacaac

SEQ ID NO: 72906 - DNA, 431 bp, Glycine max
  unsure (1)..(431): unsure at all n locations
tgatcaatagttaaaaaaatgcacacacatgacctctatttatagcctaagtgtcacacaaaattggagggaaattcaaatttcacttgaatttgatattaaatttgtggagcaaaactttggagccaaaatttcactaattatgattagtggattttagttatcgttcagcccactaatccaagatcaattccaagaatctccactaagtgtgcttaggtgtcatgaagcatgaaaagcatgaaggacatgcacaatgtgtgactaaatgatgtggcaatggggtgtagtaagcaaatgctcacctacccatctaanatttaattggattgggcttctaccaattcaattaaatntattcccaaccacacacatcanatattcacttagtgcatgtgaaattacaaaactacccctaatacaaaaactag

SEQ ID NO: 72907 - DNA, 319 bp, Glycine max
  unsure (1)..(319): unsure at all n locations
tcttagtttcagatgatgcagatgggttngtagctacctcatgcactcctctaatgactatggcatcatttctggcgctaaactgctgggagttggaggccatcttctcaattaaatttctggcttcagcaggagtcatgtctccaagggctccaccactggcagcatctatcatacttctctccatattactgagtccttcataaaaatattggagaagaagctgttctgaaatctgatggtggnggcaactggcacatagtttcttanncncncccangtactatacaggctctctccactgagttgtctaatacct

SEQ ID NO: 72908 - DNA, 412 bp, Glycine max
  unsure (1)..(412): unsure at all n locations
ccattctaaggttatcacttcataccgccacggagattcctctattcctcttagcgtagcaaatataacttctatttggaatcgaaattaatactcactccggtattaactgagttgcaaaaatatcaatagatttgcatatttcttttatttttttgggccagaaaatcatttaacaatttacctaatattggaataattctactgcttatcgctatttgttataaacaaataaaagcatttctccattgtctaggaattaatacaattatatatcgnntttggaatttcatttatattttgagattgttttggttnttntatgtttcaaaattgaagaaatgtgtgtngctatttctcgcagatgacaattattacaagtcttccgatgtaataaggtgtaaagatggat

SEQ ID NO: 72909 - DNA, 301 bp, Glycine max
  unsure (1)..(301): unsure at all n locations
tcctgaccaagaggtgatctggtcgttgcgatatatccattgatactatcataaggcaggtccgtcaagatagaatgaagctacctgtacgagttcctttttcgagatgttgtgataatcaaagaattgattgattctaagaatccacaacatggcatcaattccactgaagtgagggacgtcaagcttcatatggtgtggagcttgccgtggagagtgacctaaagaagcgctctagatggaagtgaggtgagagacgactggtcntgtttggagtggagggagctctggttggtggtga

SEQ ID NO: 72910 - DNA, 440 bp, Glycine max
gcttctagcccaatagacttaccttgaattaattctttttatagccctcttgagccctggttccctttccgtgttttgaagctcactacaagccttaagtgaaaaaccatgatatcaccatatccttaaggaattttggagctttggaattggtttgggaataagtatggggggtttttgtttcattggacaacttgttttggtggctatgcttcatgatgtattttgggccatacttgatgtacattgtatatcggttaaaatttggacatgctgaatgaaatgttgtttctcaaaggccatagagtaaaaaaaaaaaaatattcgaaataaaaaaaatcgaacacagaaaaagaaatcaataaagttgagtgaataagatcttatatggcacaagaatgatgaaactctctggtctactctccatgttacattttatc

SEQ ID NO: 72911 - DNA, 453 bp, Glycine max
  unsure (1)..(453): unsure at all n locations
agcttaagctccttctactgcacaaggatcttatatatttgaagagtatccttgtggaaccttcacccgatgaagacactgacaaaaacttatctttttcttcttggacaaagtatggcatgctgagggcaagtaaattntctttccatcagaccttggatgcaactgtgatcatatacccatatcagctagatcttgacgggtattcaagccatccttcgtcttgccttgaatgttaaggagcgtcccaaccacactgtcacaaacattcttctccacatgcataacatcaatacaatgtctaacgtcaagatcacaccagtacggaagatcaaagaaaatggacctcttcttccatatgcaactctgacttttatccttcttttgggtcttcccaaatacagtattcaggtgttgaactcgctgatatacctgctcaccagtcaatggtat

SEQ ID NO: 72912 - DNA, 415 bp, Glycine max
  unsure (1)..(415): unsure at all n locations
cgttcctaatttctctacaattgcatcacctttctatgagctagtgaagaagaatgtggcatctacctgnggtgaataacaagagcaagcctctgctttgctcaaagaanagcttactaaggcacctgttctagctcttcctgacttttctaacactattgagctataatgtgatgcctctgaagtgggagttggagttgttttgttgcaaggtgggcaccctattgcttatattagcgaaacacttcaaggggcccccttaactacctcacctttgataaagagctttaatgccttaataagaacactccttaccttgggaatattacctttgttccaaggaatattccattcatagtgatcatcaaccacttaagttcttatagggccatcttgctaacctaacgcatgctat

SEQ ID NO: 72913 - DNA, 344 bp, Glycine max
  unsure (1)..(344): unsure at all n locations
ctcgaatggatctctgctatcatcaatagctttaatcatatcanaacttcgagacatctcctacgactaatctctaatgaacaatatgatcacaaaatgctcacttaaacacaacaacaataacataccttcttcattcaatgagtcacttcaaacacaacaatactagcataccttctttattcgacatgtcatatggatcatgaaataacaacaaattcatttaacaatcatgttacactatacattacataacaacaagagcaacctaaatccgcnnnngttnccatatatccattttgaaatatctataccaatcaccagaatatctcccatataggaat

SEQ ID NO: 72914 - DNA, 444 bp, Glycine max
  unsure (1)..(444): unsure at all n locations
gcaagcttctgcctgtnttcctctataataggcagaggatttgtagaacaaaaacgtttctccctnctggtatctgaggatcacttgaaattagtgaaaaaaatcgtttctgtgaagaaaatccaagccgaggcgcttgcgtaactcgtccgagacgtttccataagcaaatccatgaagattttttgccatccttcgntcgttcttccgtggtctttggtcttccacccgggtagttccgaaatcgaacttttcaattcattctatgtacccttggtgggccccacttgtttcccgtacttttattttcatttcatttaccttccgcacccccttttgacgtgctttagtcatttatataagtcattgtctcgcctaataagaaaataaaataaattctcaccgatcatttgaattgccacatctggtaatttctgggtaaat

SEQ ID NO: 72915 - DNA, 189 bp, Glycine max
ttacacaatcctctatttcttagcatgggagcttgaaaacctcgtaagcttagcgccactagtgctctacgccaatgcatgagaaacaaaacggtcaatgcggcttatcactacttgacacgcttaacttatgctcttatacacaaaatacctatagactatgaacacatgaaagaactcgctaagcgc

SEQ ID NO: 72916 - DNA, 199 bp, Glycine max
  unsure (1)..(199): unsure at all n locations
agcttgttaacttgataatattcaatttcatagtatattagagtaattgagaatattttaacctttcactttnttcttgttattacatcgtatctagtagttttcaagtacattaatttatacttgtgatgtttcttttgctcatgaacagtatggcttgcacaagacaatgttgctaaaaaatcatatgttataaacc

SEQ ID NO: 72917 - DNA, 383 bp, Glycine max
  unsure (1)..(383): unsure at all n locations
catcctatcatagcgttgtgttcccgtgtcctctagcatgaggttcttcatagtcatccacctattcatctgctccctcgaacacaagttcaagatcatcacaggatccaaacacaacaaaacgcacggagtgagttatcacattcctagctaatagagaaacaagacaattaaatatacatattatataaatgagataccacatgcttaaacatagctcacgtaacttcaccacttcgggagcnaattcacttgttattattaatacattcacatgaatccacacttcatcaagaataataaccatcattaccagcattgcatagtatgctagactcacctattgcatgtgtacatgccttgaaacaccttgggccttgatt

SEQ ID NO: 72918 - DNA, 375 bp, Glycine max
gaagtactttgattcacaaatcccaccacaactcaacaccacgactcaacttcttcataggcatcatgtaggaaacttaaaaaaccaaaaaaaaaaagttcaaaaaccagactacttctaaaaattgatttaaaatatgttatgaactaaataacatgcatgaattagactcaaaattcaaaagataggcttagaatgacaagaatacatgaaccaatgtatctagaattcaatcaacaaaataaaaattcaacacaaacttagaatataatgtgacaattattatgactaaacatgactcttagacaacatgtgatgtaagctccattggtaggccctggatcttcttcatcaatggattcctttgcttcttgg

SEQ ID NO: 72919 - DNA, 394 bp, Glycine max
  unsure (1)..(394): unsure at all n locations
ataagaacannaatcgccttaatcattccaaatatgcatgtgaattatgactcatcaacaagaatcaagccaaggctattgtgcaagcaatcaatggtgcaaaacacgccaaatgattataatgatggatggctcanattctcacataggtaaaatcatcactttcaaattgagctttcaaaactatcatgacatgtagagaagaatcaaggatctcaagtcacaaaatgtcaagaactnttattttcaaaacaattactcantttcttgaacatatgcgatattcanagaagaacatgcaaagtcttacgtcacacataattgacccataatattaactaaaaatccgacgaaactacatcatatcatatttacacaactgacatataacata

SEQ ID NO: 72920 - DNA, 472 bp, Glycine max
  unsure (1)..(472): unsure at all n locations
gcttcttgagaagattcctagagaagctatagcttttcttcacacacctctcttattgctaatctcacctncttgagatgagaagctagagcttacctacacaccccctattatagcttagctcacccccatgccaaaatacatgaaaatataaaaaaagtccttactacaagactactcaaaatgccctggaatacaagggctaaaccctatactactaaaatgggcaaaatacaaggcccaaaagaagaaaaaacttattctaatatttacaaagaagagtggacccaaccttggcccatgggctcagaaatctaccttgaggttcgtgagaaccccaaggccttctttagcagctctagcccaatcctcttggagtcttctattcaatacctttagggggtaggatggcatcatcccctccaccttggaaaggatttgacctcaaatcttgaagttcttcatactctcg

SEQ ID NO: 72921 - DNA, 407 bp, Glycine max
  unsure (1)..(407): unsure at all n locations
actaagctcgaagaaaatataactacaccttactcnctcaatgatgaactcgttaatatggaggaatgatgggttcaacttatttattctctaaatgaacaagataatgtggtggaagcttcaagatgataagctcaaaatgacactagaatgacccccctagctagccatttcaacatgaccagccatgactcaattgggtggttntaatttttgcaaaactaccaataatggaacgataagactttgccgaaatgaagtatttcacttttataccaaagccccaactctattttgatcgtctagttattgtactatctttcttatgaatacggtactcagagtgaatctcacatagagttaaattacactaccgctcagtgtgcgatgcattatgctacatatga

SEQ ID NO: 72922 - DNA, 459 bp, Glycine max
  unsure (1)..(459): unsure at all n locations
ctgcagctagcagctgcaatangtactttgttacatcttctacttattgcaaaggcattacaattaaattgcgaagctaacacagagtaaaaacctggatacacaacgagcaagggttttctggcttcattctgtagagtggaccattcaaccctatcaatagatggagacttctccaaataatttttcatcaaacagagatagagacacctcttagcataatatctgtaattcaaatagtccttctcatggaagcattcctaacaaagcatgaaaacaggtaactaaagaccgttaaaagatcgaaacacagcctcacattgantaaataaattaaattaaacattaactgatatgtaagtttggtgatcgttcttctttttttttttctgatgatagtacctttggcaacctgataataagatccacattaacttcatgtgtcgcaatactttgtat

SEQ ID NO: 72923 - DNA, 213 bp, Glycine max
ctgttagttgtttgtgatcaatgactcctgataaatcaatctaagtactgatatctcctttatcccctatattccatatctgttggatggacaaccggctatcttttgtgcccaacacatgtcccatatatagcattgtctcttaataattaatctgacttatgttactatgcaagcattgcttatcagaatgataccctcacgcactatata

SEQ ID NO: 72924 - DNA, 401 bp, Glycine max
  unsure (1)..(401): unsure at all n locations
gagatcagccaagtcagaacaaagtgttaatctatcaaaggaaatatgccaaagaaatttagaagaagtttcaatggaggaatgccaatctggtagcacaccaatgaatcaaaaggagaagttcaacatgaaagatggtgctgataaaatttatgaaagatattataggagcttgataggatgtctaatgtatctcactgcaacaaggccagacattctactttgtgtaagtctcttgtctcattttatgcaatgtgcaagtgaaatgtatttaanagcagcaaagagaatattaaggtatgttaagggcactgttgattatggtatcaaatctgagaagtgtcaagaattcaagttgtatggattatntgatagtgattgggttggatccgctgatgaca

SEQ ID NO: 72925 - DNA, 395 bp, Glycine max
  unsure (1)..(395): unsure at all n locations
ctcttaagaagattcctaaagaagctagagctnggctacacatacctctctaatagctaagctcacctccttgagatgagaagctagaacttagctacacacccactataatagcttagctcacccgcctgacaaaaaacatgaaaatacaaaataagtccttactacaaagactactcaaaatattccgaaacacaatgctaaaaccctatactactagaatggccaatatacaacgcccaaatgaaggaaaaacctgatcaaatatctacggttatantgggctaatactgagcccatgggcttgaaatctactctaatgctcatgagaaccctatcgccttcccttggatctatagccctatctacttaggaatgcctataagcgtcttata

SEQ ID NO: 72926 - DNA, 453 bp, Glycine max
  unsure (1)..(453): unsure at all n locations
ttaagcaccgcggctgcagcttaggacacaacttcagcgagtagcatatggagctcatactcgttcagaactattatgagcanatcaaaatttagcttgaaataagtatgtattgagctattatatgcgctattaaacaatgcgagttaatttgcaaacatggagcagctgaaacaaattaattcacattaatgtataggaaataaaaaagatcnattggtggagggtctatgctagcaagcctaaataatgaaataatgaaaagctaagctgtgacatgagacttagatgggagctgcacaggtggttctaaagtgacctggttgattgcaacgactacaatgcacaacccgttttacacggccacggtcttctgcacgaacccgcttctttctatgtcgacccggtggcctgagtgatttaggaggattaatagcaatttgaagttgaagt

SEQ ID NO: 72927 - DNA, 431 bp, Glycine max
  unsure (1)..(431): unsure at all n locations
agcttatgacaattngaaattctcgagagctttcgattattaattttgagcgtctcgatatattataagactgaatcggacctacgtgtgaaaagttatgaccatttgaattttgtgagagattccgctgttcaatttcgagcgtctcgatatattatgcgcctgaatttgacttgcctgtgaaaggttatgaccatttgaatttctcaagagcattcgttattcaatttcgagcttttctatatgtgatgcgcctaaatcagacatccgggttaaaagttatgaccatttgaatttctcaaaagcttcggtagttcaatttcgagcatctcgatatattatgcgcctgaatctgacattcgtgtaaaaagttatgaccattntaggttatcgggagctttcgctttcaatttctagcggctctatatgtg

SEQ ID NO: 72928 - DNA, 227 bp, Glycine max
gcttgtgcgaatcacatcactcctgcattttatctctagcatgctttctttctttctttacccactcctcacgtgtggtttttagggaaaaacaccataactaaacgcgccacatggcattcctatcgcaccagatccaaatctataacgatgggtgatcaagaggagacacaggaacagatgaaagccgacatgtctgctctgatagaacagatggcttccatgat

SEQ ID NO: 72929 - DNA, 452 bp, Glycine max
  unsure (1)..(452): unsure at all n locations
agcttggtatgcttgttatccttaacaagaattcttttgttttagtctttcctatttaaccttcattcgtcaatgtttgtttctattacttctatatatattacatgtcttctccttattctcatatcctagtattttttatatttactttccaagtcccctttctcatattgttatatcctcttttgcaaagttcttttctgctataagtttgttgtttcatatattgttatatcctctggtagtttggttcataacgaagaaacatacttaggtttgtactctaggaattcttttagaataaaagtaaaaaagtattctgcatcaaccaaatgttttggattcaaagggaatgtgtgaacaactgtataactgacatttagaanaatacatgtggtaggattgttgtatggtatgaatttttattctctcgcgctttattcactntctat

SEQ ID NO: 72930 - DNA, 398 bp, Glycine max
  unsure (1)..(398): unsure at all n locations
ctcagcttgctattggaattgcgaaagcaccactccatcattatgattagtacttaacatctcaaacatacacatcaaacgttactagacaattatagttgttgtctgaatacctcacccactcaagtgtatcacagaattatggcttttctctaatgaaaacactcttgccttttaccactctaatttcccttgagttcttaggcaattcaagagattatggtcacaacaaagaacaattcaccaatatgtgtaatgtaaggctagagaggagccggnnnnggtcaccattaatatggctcccataggtttatgccatcgatcgaaacaatatccatctagtattcggtaatatacttctacacctaatttacttaatcaactttttttaaatcctt

SEQ ID NO: 72931 - DNA, 472 bp, Glycine max
  unsure (1)..(472): unsure at all n locations
gatcttaagcacctgcagctgcaactggattcctttattatggaatctattctttttaagatggagccaaacctagtcaccctcattaagaactagctcttttcttcctctattgcctttagttgaatacacctttgtttgtttctctatatggttctttaccctctcatgcaacttctttacaaattctgaccttgactccccttctttatgtataaaagaagtgtccaatgggaggggaatgaggtctaacggtgtttggggattgaacccatagaaaacctcaaaaggggactgcttggtggttctatgaacccccctgttgtaggaaaattctacatgaggaagatactcatcccaagacttatggttacctttcagaagagcccttataaggatggataaagacctatttactacctatgtttgcccatcnagttgtggatgacaagtggtagagaaatgaagttta

SEQ ID NO: 72932 - DNA, 359 bp, Glycine max
  unsure (1)..(359): unsure at all n locations
cgcctgtccgatgcagcagtaatgatggcctgagttatgatcgggaacgggtacgaacccggaatgggtntaggcaaagacaacggcggcataactggcctgataaatgccacaggatatcgtgggaagtatgggttaggctataagcccactcaggtagatataaagagaagcatcgcgggaaggaagaacggtagtcaaagctcgcggttgagacaagaaggtgaaggaagcccgccctgccacataagtagaagctntataagcgcntntctntgggactaatgtcatgtggtcgcgatataccatgatgatgtctcgagtacataggatttggtacgaccatgcccttctgattt

SEQ ID NO: 72933 - DNA, 465 bp, Glycine max
  unsure (1)..(465): unsure at all n locations
tggcagtgcattcttggtgaaatccgttatagatctcttatattattctacatgtccaagaaaagaacgaacttccagcacataagcggtgtaaggaggagaattaataacatcaatcttggccttatcgacctcaatacctctactagagaccaaattccccaagactataccctcacgtaccataaaatgacatctctcaaagttaagagcaagggtagtctcanaagaggaaccataaatagtgaaatcatccataaacacctccatgcaactctcgaataaataaaaaaatatgctcaccatgcacctttgaaaggtgccaaaagtgtngtataggccaaagggcatcctagtgtaggcaaatgtgccaaatatgttntggcattatcatcaatattggcattagcatttgttggctttggaagctctctaccattcctcaagggtataacactgacattc

SEQ ID NO: 72934 - DNA, 299 bp, Glycine max
  unsure (1)..(299): unsure at all n locations
caatctaattctctcgttattctattaaatcttgtccaagacacaaacgaattatgtagaaatgtttctcacagcatggggaacaaaacccctcaaatcattttacataatcatatcaaaatcaaaggaatcaaaatcatatgttcaaaaacaagaaaacaccaagagtacttaattntatcaatgtagtcggtgctgtacaagacctgatattgcttatgtagtcggtgttgtgagttaatcccnnctnattttaggaagcacatttggctttcttaaaatatatactccaatatctt

SEQ ID NO: 72935 - DNA, 473 bp, Glycine max
  unsure (1)..(473): unsure at all n locations
agcttggagaggatgcttcaatagaggaaaagaaagattgagagaaagagagatgggggagcacgaaatngaaagaagaanaagggagagaagttgaactttgagttgtgtctcacaagactctcattcatcaaagttacaacaagtgttacacatgtttctatttatagactaggtagcttccttgagaagctttcttgagaaaacttccttgagaagcttctttgagaaaactttcttgagaagctagagcttagctacacacacccctctaataactaagctcacctccttgagaagcttccttgaaaagattcctaaagaagctagagcttagctacacacacctctctaatagctaagctcacctccttgagatgagaagctataacttagctacacacccncctataatagctaagctcacccccatgacaaaatacatganaatacaaaananaaagtccctacta

SEQ ID NO: 72936 - DNA, 281 bp, Glycine max
actaagctggcactctctcgccaggcgagcatggttgcttactccaaaagctttagtcttctggatgaatcttctggagggcccaagtgggcctggttgcttattgtaccaccattattactaagtacaccccctgcctttgttggtgattcttttttcgtaaagttacggaaacttacgaatttcgtaacgatacttgttttcattccgtaatgttacggaacctcgtggattacataatcatactcttttgacttacggaatgtaaccgaacctcacta

SEQ ID NO: 72937 - DNA, 448 bp, Glycine max
  unsure (1)..(448): unsure at all n locations
agcttcttgagatgcctttcggttatctcattagaggtctttggtaagtctactatctcgttagaaacatcgatagttaagtaatgaatgaatctaaaagctaagatagcatatggaaattcataatccactagacgaaggcttttcaacataatatctttaattagaagtacccagctcatttgaatacctaatttcgacccatatatgatctacaagtcgtcgtcagtaacttgagcatgattgctggaccttggtgctagaaatgttgtaatgatatatactaacattcctctatatgtctgcattntgctgtagccatccattgattcttcacaattgcggattccacccatgtctatccctacaactacattccaaaattcagcgtcaatgaccatatctacacccattacaatagagtatagattcccttccatgtcaacac

SEQ ID NO: 72938 - DNA, 455 bp, Glycine max
  unsure (1)..(455): unsure at all n locations
gtctggcttgatatatgcaaaagccaaagccctaaacactctcanatttgagttatctactggttntccactccaaagtttcattgtggctatataacctaatgcagaaaaaggacatctattgattaggttggaagtagttgtaacagcttctcccttaaaagttattggtaaacccacacttagtaacatgcattngaccctntctaggatggttatgttcaccctttctgccaagccattcttgtgaggggtgttagccactattttatgccggtaactcctaatatcctacaaaacttcattaatttgctctgaaacatacttcaggtccatgttagttctcaatacgataaccttggtttccatatgagctagtactatattaaccatctctaatttttacaaaagtactattattataatgataagatctacttcttacgattacactt

SEQ ID NO: 72939 - DNA, 410 bp, Glycine max
  unsure (1)..(410): unsure at all n locations
atccttaagtcacctgcgggcatgcaagctttactctctggtaatcgattaccagaggatgttatcgattaccagtggccaaatacgttttataacagctataaaaatttgaattcgaaattttaaaagcttgaatcgattacacaattggggtaatcgattaccagcagttagtaaacgttttaattcaaattttaaaagctgtaatcgattacacaattgctgtaatcgattaccagacaggaatttcagaanaataatttcaggagtcacaacttttcaaaggctntactcatgaccaccaatggtctatatatatgtgacttaaacacgaaattgctaagagagattttcagaacaacaaagtgtttatcctctcaaaaagcaatttcattttatcctcttaaaga

SEQ ID NO: 72940 - DNA, 337 bp, Glycine max
tggtacctggagatatgtcgcgcgggtcaagagacctttgggacgtcaggtggcgtgctattgcccaaaaccaagcttgaccaattcttgacccacccgaacatagtcggtcagtgagaacctgtgatgtacctaaacaggcgagctgctggcagtcaacagattaaaggaacaaagaccaccaatgcaggaggcttgtggaggctggcagctgtggccttgattgatatgtgagaattaggctcttgtaatctattacagtctgtgtattcgatacacagaagattgggtcactggtaataattaccaattaagtgtatccattacacagtgcata

SEQ ID NO: 72941 - DNA, 458 bp, Glycine max
  unsure (1)..(458): unsure at all n locations
agcttctatataagctgaactattntatcaataaactcttagttgagtttattcagaaaattagaagttatctcttttatcttagtgagagtgattctcctaaattcttgagtgattcaagaacaccctggctgtatcaaaggactttcacaacctttgtgtgttgccctcgctggaaagagtgattctttccttcctatcatctccacccttggtctttcaaaccacaattccagaaaatccacctctgcccaaaattatctcgtgaccataactcccatttcacacactcaaattaagtgattcttgagcctaaattgaatntcaaaacgagacctttcacctcgttttggaatcacctcanttggagccctgtagcttccgttattgccatttctatatttctgtccagccaccacttaacctacgttttaccatcccattcatccattttatgc

SEQ ID NO: 72942 - DNA, 450 bp, Glycine max
  unsure (1)..(450): unsure at all n locations
ctgagccntaatcctaactcaccataatccttaccctcggtagcatttaataagagaagaaaaattttcaatcaaagataaatagaggaaggatatttccaatagggccctgtgatttcccgcgctgatcacaggactctaccagtcgtttggagtctccgttgcacctaccaaggtgattcggccgcccatcacccgggcttttattgagaagtactgcacctagagacaggctcatggtgatgctccacaggccgtatgcgcgccaccacncctcatcttgctggcccggtttggtcttttgacatgagcacatttactgtatttggttcgccagcaggcatgcatccatccggcacatgtacagacccatgattgatcttaccatctgagcctcaacatgcagagccagggcttngcttacttttcatgcgctatctcataccatat

SEQ ID NO: 72943 - DNA, 458 bp, Glycine max
  unsure (1)..(458): unsure at all n locations
agcttgtgcatccaataccctgatgaggatgtcccatatgttcttaaaactggactgattcattcgcttccaaagtatcatggccttgcaggtgaagacccgcacaaacatttgaaagaatttcacattgtctgctccaccatgaaacccccagatgtccaagaggatcacatatttctgaaggcttttcctcattcattaaagggagtggcaaacgactggctgtattaccttgcttcaaggtccatcacgagctgggatgaccttaagagagtattcttagaaaaaatnttccctgcttccaggaccacaaccatcaggaaggatatctcacgtattagacaactcagtggagagagcctgtatgagtactgtgagagatttaagaaactatgtgccagttgcccccaccatcagatttcagaatagcttcttctccatacttttatgaaggactc

SEQ ID NO: 72944 - DNA, 308 bp, Glycine max
  unsure (1)..(308): unsure at all n locations
tctgaagaaagtgatgaggtgcaagcgctaaagggcaagcttgaaatatcccgggtagtcaaagagaagttcaagtccatagccatcatagtctgaagagagtatgatgaactaagggacgttaatatggccaccgctgatgccttggaacgagataccaagaaggcccaaaaggaagaacacgtgccagcaaagttttgaggggctntatatggcagcaatagtaagctcaagctccgaagaggtgaaacgaattatcacggttcataggnnnnncttgaaggacaagctttatgcttaccttatgt

SEQ ID NO: 72945 - DNA, 500 bp, Glycine max
  unsure (1)..(500): unsure at all n locations
cttatctagctggtcaaaccttctgatggcttngacaaccccgttttggacttgtntaggatatgggttgngttgggttaaagttttctgtgtgtcttccaaattagataaagataaagaatagttaatgcaagcggtgagtacgttactagttctagaaggggaactctctgctataaacaatagaacaataccattgtttntttccttcacactataccatgtcactcatgccaaaatttcatgttactggtttggtttaataaacttaatacgtatctttttctttttgatcataaatgcttacggtcattctttactcgctctataaggggaacgctttgctatatactaaaaaagatattgtccatttttttgtgacactatgctaatgttgcccatgtaataattctctaccttgttgtattatgatctcatattatagttctccttgatttgttctttctcatttatatatatatcttattttattcattata

SEQ ID NO: 72946 - DNA, 395 bp, Glycine max
aatgagtgaacgtaatatatcatgcatatacattgcttgtatctcgatttcaggaattaaattgtcatcatcacaaaggggatattgtataagccaagactttgccttcgatgtttcgatgatgccctatgatcgtgacgatttgatgtcttatgaacagtgctcttctcaagtgtgattgaagactaccatccgggactacaagatacaacatcaagatgatctctagtattttaggaagggaattccacattgagatagcaaacggtttggccacgaaatttatgttaaaaagtcttattcaagagatttactctctcattatcgatcaccagaggatgtaatcactttacatgtatatttagatagtctattcgaatcatctattacaaatt

SEQ ID NO: 72947 - DNA, 255 bp, Glycine max
  unsure (1)..(255): unsure at all n locations
ctcagcttgctaagattctatcgcattcttcatcctaaccttctcttatcccatgattgactcctcatcaagcattctccaccatcatgctaggagccattcgaaatgatngtttagtgcaattttacatacatatccactgtttcgatgcaaataattgctatttcgtcatgaggacatcaccttcgagtttcggatctatgcgctgagatatgttagcgcataccttcactctcagctttatacatgaacaca

SEQ ID NO: 72948 - DNA, 463 bp, Glycine max
  unsure (1)..(463): unsure at all n locations
agctcgtctgcaagctatggacaanatggatgtgtttgagagacgntcatcatatgctaattcaagagtttcatgggtgtttatatttagctcttcatcttatcagagtctgattcttctgatgtcgtgtctgccatcggataaaggttggcttcttcttcctcttttgtcttcacatcgaacgatgtgtcatcaagtttttcccttatgctcattagtaatttcttgtccttttgtttgaagtacttttcttgtgatttgacctatcaagatctggacattntaacttgaagtgtcctggcttcttanactcatagcatatgatgaagcctctatccatgtgctttctttctctatgtggtttcttggatcctttctaatctgatccactcattttcttccatatgttccttatcttccttgagatgaaagcaaactgatcattttatcttaagcttcatta

SEQ ID NO: 72949 - DNA, 392 bp, Glycine max
  unsure (1)..(392): unsure at all n locations
tgggctgaatatggcttcacccctcccttttttaatatttcttgtcagacacgctcgcccaggcgagctaatttcatattgtgtttctgcaaanaatcctttgcagaattgtgttgttcattgctatattttctctctaaaaatcctataatggcatataaacttaggcaaattcaggatataattcaagaaaatgaacaactatgaaacattatattaaaaagcacaagtagagatacactgctgcctttangagtgcttctntaacatcttcaactggatgcagggatgatgatcgatcgatcattggcctatcacttgtttgtacctgccactaagcttggacacagaaagtggcttctgcaacaaaagtgaaacaatactaccagaat

SEQ ID NO: 72950 - DNA, 426 bp, Glycine max
agcttagtcaaaggtattgttatcttagaaaaaccttctatgaatctactgtagtatcctgctaaaccaaagaaactcctaatctcaaacactgacttatgactctcccaactcatcaccgcctctaccttggaaggatctactgctatccctccattggatataaagtgccctaagaagctcacctcttctaaccaaaaatcacacttggacaacttagcatacaatctattgtctttgagggtttgcaacacatccctcagatgttcctcatgttcctctctagtcttagaatacactaagatatcatctatgaagaccactacaaaactatctatgtaggggtgaaagatcctattcatataatccatgaacacaacctgggcgttggtcacaccaaaaggcatagccaagtactcataatgg

SEQ ID NO: 72951 - DNA, 361 bp, Glycine max
  unsure (1)..(361): unsure at all n locations
atcacatgtggtactatgtggcggtcttgcgatggtgcacaacatgctttccacattcacaatgcgcgcataaacccaccatcctctggtgcccacctccaactgagctcacgtactcccacgtagcccatatcctcgtttctctcaacaccgggtccccatcaatcctctcaagctttcacaacatccaagcaagacaacattcagacagcacaagctatcacagccaagcaaaatagagcaaagcnntnatacttgnttaacacttataccaaatcacagcttttctcacgtatagaccacagtaactattccttctatcctattctgttacccgtggatcgactcgcaaatctcactg

SEQ ID NO: 72952 - DNA, 449 bp, Glycine max
  unsure (1)..(449): unsure at all n locations
agctggcttgtggggcttctatagaggctggatctttgagcttcaatgaggtcctttaatggtgattttccaccatggagatgcagcggaagacaaaggagaagaggtgagagaaggcgccatccactagggaataagccatggaagaacgagcttcaccaccaagatgagccttggataaaaagcttggaaggatacttcaatggaggaaaagaaagagggagagaaagagagaggggggagcacgaaattgaaggaataaaagagggagagaagtggaactttgaagtatgtctcacaagactctcattcatcaaagttacaacaagtgttacacatgcttctatttatagactaggtagcttccttgagaagctntcttaagaaaacttccttgagaagcttctttgagaaaacttccttgagaagctagagcttagctacacaca

SEQ ID NO: 72953 - DNA, 386 bp, Glycine max
tgggttggtcggtgctcacgcacttatcgcatatttgtatcacttagcgcgcataagtgtgatttggcttaacgcgcttctgtcgcttattgaatgagctgaagcggtgcgcttgatgaccagtagcggtgcgctaagcaaacttgacagctcatcttcttttggatacttcctcgagcctagccactgagtgtcgtgcttagagaatgctcgctaagccagaagattggcttagcaagaaggtgaaaccaacactggctccaatttgtctaaataacctgatattgagagaaattgatactaaacacactaaacacaaggctaatctatctattacctatatttaagaagaaggacttataatattactaaacgacttataattg

SEQ ID NO: 72954 - DNA, 430 bp, Glycine max
  unsure (1)..(430): unsure at all n locations
agtcttgtgtgtgcatttatttgaactgtgtaaaatgtttataatngntgnnctatttgcattttttttacactgcattctaagcacccacgggtttgagttaaaaaggggccctatacccgggttcatgggaatctaaggagtagaggtgaatctataatcatgctaggtctccgacttgcttgataatagtgaaacctcgtctagagctttctctctttataatggtgttgcgctggtattccataccgccacaatattattatcttgagtgatgatacctctagaaaacagccgtgtgagttatgaattgttggggagtagttattagagacccctagatattgtcctataggttcccaaatagggacaaagagcaaacacgctccgcgccattcgttctcatggtatttttggtaaatagcactag

SEQ ID NO: 72955 - DNA, 231 bp, Glycine max
agctatacaattcgtctgtattatcattctttccagcctctacaatgtttacaataccattttctttgaggctcactctctatacaaataaagacttctccaatggtttccttatcactgctaaatctgtcagatagcatcataagcgttcatgcatacacgaatatgctggagattggatcggctcatggcatcctcttgatcatgataatatgcggatccacgtatact

SEQ ID NO: 72956 - DNA, 430 bp, Glycine max
  unsure (1)..(430): unsure at all n locations
cagccttctggaggaaggatctggaaggccctagtgggccagattgctatttgtacccccatttttactaaatgcactccccttctttttttttggtaattctttttccgttacgttacgaaacttcacgaatttcgtaaagatacttagttttcttcagcaaggttacgaatccttacggattatgtatttactcttntttagctttcgaagaagttacggaaacttacggattgcgcaaaaacaccttttttcgattttcgccacattacggaatttcacggattgcgcaagcctgcttccttttgatttttgacacgtctcgggacttcattcattgtgcaatcaaggacgccaagtgtctcgaagcagccaatcaaagggttgtatatcatcaaataataatccccggacgaaattaggggatgac

SEQ ID NO: 72957 - DNA, 337 bp, Glycine max
  unsure (1)..(337): unsure at all n locations
tgcatgtgaattatgaatcatcaacaagaatcaagccaaggctattgtgccagcaatcaatggggcaaaacacaccaaaagattatgatgacggatagctcaaattctcacaaaggtaaacttatcactttcaaattgagctttcaaaactatcatgatatgtagaggaaaaatcaggatttcaaatcacaaaatgtcaagagacatttattttcagaataattactcatttcttgaacatacctntnnttcgaagaataatttgctatgttgccatgctaacagaatcgacctataatattaaactatatactcatcacaactatcaatgcttact

SEQ ID NO: 72958 - DNA, 460 bp, Glycine max
  unsure (1)..(460): unsure at all n locations
agctngggcacccactttatatgcttggtttttacactcgaaataaatgatgatcaatggctntcattccacccattccaatcttttccaatcaagaataagaaataaaaggaagaaattttgtgcctctacctatgctagaggaagaatgtcttaagatttggtgttctcaagtacttttgccttttactatgaacaattcctcttatgcctttcttggttcctttaaactagatcttacccttgaatgttggacccttatctaccctctactggtgaagatcacttccttatgcatcttcgtgagattaagactaatttatctgtaaagactatgcagatatcttcagagcaactcctaataacgatgggtagcaaattactacttggatgaatagggttgagttgacttatggagacttatggagaaactatggatgttttattttatgcaactatg

SEQ ID NO: 72959 - DNA, 366 bp, Glycine max
  unsure (1)..(366): unsure at all n locations
atcttttatagtagaatactggtaatgtgtctactattattgtcatcattttctttctccgtcattgaggtgccacttgagctgccaggtctctccacctttgggcgtattcttttgaaggattcgtgcccactttatgcacatgtttcgtagttgcatcctatccgaagccattatactgacactgcctaacgaaggcaaccattatgtccttccaagaatggacttgggaagggtccaagttagtgtaccaagccgaactaccccagtaagactttnttggaaggatatgtatcaacattccttattttttgcgtatgcccccatcttccgataatacatatttatgaggttcttgggtgcagt

SEQ ID NO: 72960 - DNA, 470 bp, Glycine max
  unsure (1)..(470): unsure at all n locations
tcacctgcggcatgcaagcttgtaatatattggtaaanaaatatgtttaattctaagactagcanaggatatttgcaaaacataaactttcactctntcaatcagaagattacccccgtaggaaattaatataatttcgaaacggacgttgaggaaatgtgaattgcatcaatcaaataaaattaaaattagtaaatatcatagaaggatgagaagaataatccaccttcccttttaaaaaagcaacattaattcattgttcaataacagaaaccagtgacctttctttgtttccacggatgtcattcgctacaaaatatatctccaaatttataggaattgatattttttaggatgtcaaccgctacacgttttaaaactgtttaagaaaacgttggtaagtataatccatgctcatcgatggtgtctgaaatcaaatagtttcattccattaatcttgcacaccaatc

SEQ ID NO: 72961 - DNA, 417 bp, Glycine max
agcttatgatcaaagtctaaggatagtctttgccttatatcgacacttcaattatcatattaatttaagtcaaaaggtaaaagtcccctggttaccgaaaccaacacggtatttatagcttccttcggataattacttcaattaggcacactacagttattgctgaaatcaccattgactgggtcagaaactgtgacgttgaaagcttatgatggtgtggaatgactacgaccatcatggtgtggaatacgactatagtgaattcacaacgaccatcgtcgaaagactaacactataagggagggagccatcatattaccatgaccatgttgaatgtaccatgaatgtggcccagtgacaaagtcttcaaatctttagataaaaatgcaagaatcaactcttttcactcaattgagc

SEQ ID NO: 72962 - DNA, 414 bp, Glycine max
ctttatctcccttctacttttacaacataaattctcaactgtctcccctttttttttctaatctccttcctctatttcctctccttcttcccaagaagaaaaacaaatcttcaactctcttttccctctttctctccctttttcctctaataacccccataaccgttctctttttccttctctctttccctctctcgtcttttttctcttcttctccttctccccctcccccctctctctctctaaaatatattatctctctctttctctatctcctttctgttctttctctattctttcttctttcttcattctcctctcttcctctctctccccttttcttttcttccctcctctttctttccttcttccttttcattctttcccctcctctcttctcttcctatccctctt

SEQ ID NO: 72963 - DNA, 444 bp, Glycine max
  unsure (1)..(444): unsure at all n locations
gctttgatctaccaccacctacgtcaccatcatcttatattattattaatattattaggactttgatttctagccgtgtatttggctatattattatgacatttgaacaatttagtatgtcttctaatatttgcttaatatgactgaattgctatgaattatgttatatgactatgggatttatatttggtctattcatgttttttgcttcatgattggtttagatttttcaaatgaatgacttgtgtatgattagtcatttgtgaatgtttatattttttatgcactntggctttttgtgatgccaaatggggaaagaaaacaaggattaaatcaagaaactcacataataaaataacttaatttccagtgaagcttaagctcaaaaacaaagtgatgcaagctccattggagcttgtatgcctaggatcttcttcatcaatg

SEQ ID NO: 72964 - DNA, 408 bp, Glycine max
agcttgagatgaggaagtgttgaatggtgaaactttctacttttattgttgaccacagagtggtacctggagatatgtcgcgggggtcatgagaccttggggacgtcatgtggggtgctattgcctaaaaccaagcttgaccaatcccgacccaacccgagcatagttggtcagtgagaacctgtgatgtacctaagcaggcgagctcctggaagtcaacagataaaaggaacatagaccacaaagcaaggtggcttgtggtggctggccagctgtgaattttgtgtgatatatgattatggcctctggtaatcgaataccaaaggtgggttatcgattacaacgcttaaaattgaagacaggaagctaatatggtctctgcttctgggtaccgtcttctatcctttg

SEQ ID NO: 72965 - DNA, 201 bp, Glycine max
aaatctgagacacttgacttctctatttgacgtgaacattctaccttcgtgagctcattccacctccacacttgtgtgttcttctgacagaccagactctttggcattatactaaatggcatgatgcgggacctatctcctacaatctccccttgcgtacagaccatcagattggaatccagcctgattaattcttatgag

SEQ ID NO: 72966 - DNA, 383 bp, Glycine max
  unsure (1)..(383): unsure at all n locations
tctatataagctgaaccatnttatcaatatacacaatgtgagttntattcanaanattagagtctatctctcttatcttagtgagagtgattctcctaaattcttgagtgattcaagaacacccaggctgtatcaaaggactatcacaacctttgtgtgttgccctcgctggaaagagtgattctttccttcctttcatattcacccttgttctttcaaaccacaattccagaaaattcacctctgcccagaattatctcgtggccatacaccgcattttatgcactcatattaagtgattcttgactcataattgaattctaaacgagaactttcacctcgtttagaatcacctcatttggacgcctgtagcttcagatatt

SEQ ID NO: 72967 - DNA, 411 bp, Glycine max
  unsure (1)..(411): unsure at all n locations
agcttctagccaaatggacttaccttaanattaattcctttgatagcccctctgagcctatgttcccctttctttgtnttgaagctcattacaagccttaagtaaaaaaccatgatatcaccttacccttaaggaatnttggagctttggaattgttctgggaataagtatgggcggcgggtatgtttcattggaagatatgatttttggccatgcttaatgttctatnttggccatgcttgatgtatatgtatattgcctagttcttgctttaatcttcaatttcgtactgttcaatctaaaaaaaaatcagtttctgcaaattcttcaatttcgtactgttcaatcaaaaaaaaagaagaagagnagaagtgaagttgaataaatgaggtcttgttatgaggacttgat

SEQ ID NO: 72968 - DNA, 361 bp, Glycine max
tcatccgtaaacttgattatattcaaattgtcccaaatgcttcggatttttttttcggatcaaactcaacctaatttgattattaagggttaggtaataaattttaatttttaaatatgttgacctactcattgatttgcttattattattattattactgatgaagacaattttatggaattcttttaagtattaaagatgagaattattcatgtcacgcgtgatgttgcaaatccttttactgattatttatgtttctggctatattattatgtgcttattggattttaggcgttaaaagcaatataatgtgacttgtactgtgcacataataaagttagtttatttactttttcaatt

SEQ ID NO: 72969 - DNA, 434 bp, Glycine max
  unsure (1)..(434): unsure at all n locations
gatcctcttagtcacctgcggcatgcaagcttggttcgaggtacttacccgttgaagatcgaattattatgaagaacgaatgaagaacgtcgaagaacggttgaaacctttgcgagattcctcacggaaaacgttacggaaacgtttcggaagcgcctcggcttaaattttcttcacggaaacaattttcccaagcaaattcgaaagagagagaagtgcctaaggggctgaacccttttcttcttcacttcctcccctanttatagcaaaataggggaggtggttgtcgcccagctcgcccaggcgagcagggttgcttcctccagaagcaaccgccttctggaggaatattccggagggcccaagtgggcctgggtgctatttcaccccattttactacatcactcccctggccgtatttgggattcactttt

SEQ ID NO: 72970 - DNA, 437 bp, Glycine max
  unsure (1)..(437): unsure at all n locations
agctngaagaggaagccatcttgcagagctttggattagattatgagagattgtgaggtttctagaggtggaggagacatccccactacttgtatttcttctatctttcatcttctcttctcattggtgtaaaggaagcttccctactatggagagctaaatcctcagttggttcttcctatggggtacttgatgtaaatactttcatatctatttaatgatgttttatgtgttcactatgctatcagtacttaattctagtgtgcctttgccttgatcatgcacttgcatgcttagttagggtcactcaacattgggaaattgtttgatccttataacctgatatgacaaggctagcttatcgtattttcacgagacatttgggtacggtagcctagcttttgtatgttatgtcttaatgcggttctggttaagtt

SEQ ID NO: 72971 - DNA, 256 bp, Glycine max
tccattgttctatttcgagcgcctcgatatattatgcgcctgaatctgtacttcgagtgaacagttatgaccaatggaatttctcgagagctttcgttgttgaatatggagcgtctatatttattatgtgccgaaatcggacataccagttaaaagatatgaccagttgaagttcttattagctctcgctgatcaatttttaccatctctatttatatgctcctgaatctgacattcctaggtaaagttataccat

SEQ ID NO: 72972 - DNA, 446 bp, Glycine max
  unsure (1)..(446): unsure at all n locations
agcttcacacaatntactttntctcaaactaagttttataataccaattactaagtcctttttaactagacaattgaggtggtgcatgtttacatgtgcatccctacgaagcaatagtcaaaaatcatcaatcttattttccaagcaactaagctcatgaaatgatgcatgttcaatattaagcatgtagatattacctatttttctacctatgtgaacaacctcactagtttttgcttcacaaatgagacaacaattcttgttgaatgccaatttgaagcctttgtcacatagttgacttatgctcaaaagattgtgcttaagtntcatcaacatataaaacatttttttatttgagtattgtgctaatttccaatatttccttctcccacaattctntccttatntgtgtctccaaaagtgacatatccaccttcccttaacac

SEQ ID NO: 72973 - DNA, 245 bp, Glycine max
ttagacaacttgtgcaatcgattatgataagggtgttatcgattaatatagagagtgttgccttctgaagaaacttttctaacttacaaaattttcttttcacttactcatgatgatgcatgatgcataaaagatatgatatggactaaaatgcgacatacaatataacgaccaatacaaattccatttaagagagttgtgcatgtaagagacaaagcatcttcaagcttttctccgagcttcaa

SEQ ID NO: 72974 - DNA, 457 bp, Glycine max
  unsure (1)..(457): unsure at all n locations
agcttcttatcctaagcactctcttggtggagaagcttctccttccatggcttattttctagtggatggtgcctcctttcacctcttctcttttatctttcgctggaactccatggctaaaaatcaccattgaaggaccttattgaagctcaaagatctctccttcatagtagcttctcaagcaagcttagatcatgtcaagtggggcttgggtctctgttacaaaaaatgtgtggttgagtatgtcaaattcgttaacaatttccataattgattcctactaaccgatattcattgccttggataggactttggaatactgcaagttggagttgatcattatctgggtttggcaacctttaatagcaaaaaattttgtggtcttgaagtacatctcctcaaccaacaatgacacaagcaaatacattatacttttgaacatggaatntaccaactt

SEQ ID NO: 72975 - DNA, 411 bp, Glycine max
  unsure (1)..(411): unsure at all n locations
gctcacaacagattntagtaatgacccactaacttagaattaaaataacttaatgccattaatctagggaattaaaaaaacttaatggctgagtgtaactgaaattgtggcaaccaaaagtcaccctcaacagccaacaagtcagccaccatatggtctcccaaaaggctgatgcctaggttgccaattgggcccttattacaacttgaactatacctactaaagcccttttagttgattaacccaaaacatacttttggtcagtcaactttacaagggtgncctcttatttatacaaactaatcactctaaattgagacaaagtggtgccatttagtcctcatacatataggccatgatacaactcactaccttggatctttcttcttgcaactcgactctgattcaaat

SEQ ID NO: 72976 - DNA, 472 bp, Glycine max
  unsure (1)..(472): unsure at all n locations
agctngaaggtgtgtaacccaccatttccatagtagaatactggtaatgtgtctaccatcacgattatcatctccctttccatcattgggggtgccacttgggctgccagatccctccacgtttgggtgtattctttgaaagattcatgcccttttttgcacatgttctatagttgcatcctatccggagccatatcagaattgtactgatactgcctaacgaagggcaccattatgtccttccaagaatggactcgggaaggttccaagttagtgtactaggtagcaactaccctcgtaagactttcttggaagaaatgtatcaatagttcctcatcttttgtgtatgcccccatcttccgacaatacatctttggatcgttcttggggtaagtagtccccttgtacttgtcaaagtccagcaccttcaacttgggaggggtgatgatattgggtactaagaacaaccctt

SEQ ID NO: 72977 - DNA, 408 bp, Glycine max
  unsure (1)..(408): unsure at all n locations
tctacttatgtggcagggcggccttccttcactttcttgtctccaactcgagtcttgaccactgctcttccttcccgcgatgcttcttttcatatccgcctgagtaggcttatagcctanaccatacttcccacgatttcctttggcatttatcaggctagttatgccgtcgttgtccttgcctaaacccattccgggttcgtaaccattccctaacataactcgggccatcattatgctgcatcggacagacatggctgcccagagaatgagtcnctnnttnaatgctgaccacctnanaagactggaaagctggttctaacgattcttctgcggctttcacataaggcatagaggatggtgcagttcaccagatgtctttctcgtctgacacaatgaccaagtgcc

SEQ ID NO: 72978 - DNA, 463 bp, Glycine max
  unsure (1)..(463): unsure at all n locations
agcttctccggggcttcttcagtcaagatggngtcttcagtcattnttgtctcatcaacagaattagtgtcttctcttcctaaggtcaaaaccacatccattgctgcttcctaataaaataaactacctaatacaatacatgcaaagcaaagacacaacaaggattagcaaactgctggggaaagaaacaaaaattgaaggaaaatcaaatcaagattttgaatggcttccacataacagaaaaatctcttaccaattctctctatgaatgaattctggaaaccacacatgcctgcatgacagagaaaattttactttcacaaaacctcacactaaagaaaaggggaacaaaggtatctctcatcaatttaagaactggcacccattattcacagaaatcgattacttaccaccaaagagtaaaacagacattattnttattattngcaatanaaatataatc

SEQ ID NO: 72979 - DNA, 177 bp, Glycine max
  unsure (1)..(177): unsure at all n locations
tactgagcatggntgattgaaactatggatggatgatgactatttgttgagagtgtgttagactaatgaatgtttgtgtaagcttatgatatttgttaatgttctcttactaattgtggttatttgaattttatattaatntgttatagtaaactcacccctcgcaatttttgtacc

SEQ ID NO: 72980 - DNA, 444 bp, Glycine max
  unsure (1)..(444): unsure at all n locations
agctntgagcaaattgaaatgacaataactntatacactgatgtccggttgagtcccgttatatatcgagacgctcaaaatttagatccgaagctctgagaaaattgaattgacaataactttatacacggatgtccggctgattcccgtaatatatcgagacgctccaaattgaaaacggaaactcttagaaaattcaaacgacaatatctttttactcggatgcccgacagagtgtcgtaatttatcgagggatgctccaaattgaaaacgagagctcggatcatattcaaacgacaataactttttactcggatgtctgagagagtcccgtaatatatcgagacgctcaaattttagatccgaagctctgaaaaattgaaatgacaatacttttacacggatgcctggtgagcctgaatatatcgagacactccaattgaa

SEQ ID NO: 72981 - DNA, 334 bp, Glycine max
actaagcttctcgatatattacgggactcaaccatacatccgtgtatcaagatattgtcattaaatttgctcagagcttctagactcaattgtgagcgtctgatatatacccgatcaatctacattcagtaaaagttattgccgttgaattctctacgagctctcgtctcaatttggagcgtctcgatatataacacggactctattcggtccattccgcgtataatagtgatatgtcaatatctatttttcacatgtgctttctgattctaatattcagagcgtccgctgtatattatgggtattaattattacattcatattcaagttattg

SEQ ID NO: 72982 - DNA, 444 bp, Glycine max
ataactgtcctcacagacacattctttatttacatagtaatccttgtacgatcacaacatggacacatcatctggacctccttcatatggaggtacaatgatcctatccacaagaggactcgcctatacctatagctctacctcctgctgggcctctatgcgtgctgaagtatgcactacagacgcaattaatgtataacacctctctagagcgtcatccccttcatgcgaggttcccttatatgaggggtcacatccaacaatgtatgttgttcgcttcatgcgaaccattaaaagtctgaaataaaactcaaaacattaaattagtaataaaaatatgataatgaaaaggaaaaacatattatactattaataaaaattataaccaaaagaaaaaacatttattaataaaaatagccacaaaaagaaaaacattacactatt

SEQ ID NO: 72983 - DNA, 459 bp, Glycine max
  unsure (1)..(459): unsure at all n locations
tctgcgggcatgcaagcttattaggcttagcgttcttctggcgcttagcctatcacataaaaacaaacatcgacgaacactaaggcttagcgtgtaagtgcgcactaagcttgctgcgtaggagacataccaaaatagaagtacaagagattttgattttattttttgcgcactaagcccaaacttgtgcgctaagcccaaaaatgaaattgcaactctagagatattaatgggcttagcatgccacataaggcttagagagttttgcaagaggaaatttcctgaaaatccgcttagcgagcaccacaggctcaccgggaatgcatgactcgcttatcctgtgcctgcacgctcagcccaattngagatattacaaaacaaagatgtttttaggtttaacgcgacatgcaagcgtagccagctgcccttgcgcgcttaagcccaatacaaaatatttca

SEQ ID NO: 72984 - DNA, 341 bp, Glycine max
  unsure (1)..(341): unsure at all n locations
ctctatagaagggtcgttcctaatttctctactattgcatcatctctttatgagctagtgaagaagaatgtggcatttacctgtggtgataaacaagagcaagcctttgctctgctcacagaaaagcttactaaggcacctgttctagctcttcctgacttttctaaaactattgagcttgaatgtgatgcctctggagtgggagttggagctgttctgtacaaggtgggcacccaattgcttatattagtgaagaacatcatggtgctcacctnnctacccgagtcttgatatagagtatttgccttattatagcactcctaactttggaccttaccttg

SEQ ID NO: 72985 - DNA, 447 bp, Glycine max
  unsure (1)..(447): unsure at all n locations
aacaaccaactcctgatgatcaggcctcangagtgcaatattggaataagcacaaagtgtttccccctcttccacaacaactggggtcttcaaaaatgtgttaagcgtatcctcataaaatttaatcaaatgacctctcaccctcggggtcatagaggttggcatagaattccttcacaatggcaacattaatgttgccgtcaccaaaatcagtcaactcctcatcctagtggcgtctttcgagttcctccttgaactcatcaatctctatataatagaccaccacgtttctctcaggcaaaagcttcttgggcataataacatcagtatatctttcccaagcctcttaagaagtgaatctggatctgtcaaatctgtcttgggtaggtgtagagggtgcctttcttttcctagaagccatctccaaaatataagacacaacacaca

SEQ ID NO: 72986 - DNA, 304 bp, Glycine max
  unsure (1)..(304): unsure at all n locations
atcttgttatatggttaatgctatctccagaacatttccattggatttaatgatgaaatctgggcattttcaggtgaaaaagaggctaagttttgaatttcaaaaagcagtagttgggctaagctcagcagttgggctaagcgcatatccatcgctaagcgcagcttcagcgtgcttagtgcaaaggagaatctggtagagcatcaacatcaaagctgcgcctntncncnntatcagtgtgctaagcgtataatgtgccttcagcccagctatgcgcgagactgtcgcttagcccaatttcact

SEQ ID NO: 72987 - DNA, 419 bp, Glycine max
  unsure (1)..(419): unsure at all n locations
agcntcaccggatgacgccgatcgaacattttctaaccgtctttatgcaaatatcgttcaaggattgaattgaaaactcgttaggcgacatctgtcgcgaagtagcgaccgatatttttcagccgacattgcacaattctttttagaaaagctcgctggtcgataatggtctttatacggcagagaaagttctcttgttttggtgttgcatagaaaaattaccaagtacttcggctaggtttttcgtgcgagttcaaccgacattatgtttcggccaggaatacattagcccacctctgcaaaaaaaatatttgctaaccgtcttcatgcatatatcattcaacgattgaatagaaaactctatagccgacaacggtcgtgaaataatcccgactgatatttttcagccggcattgcgc

SEQ ID NO: 72988 - DNA, 411 bp, Glycine max
ttaatgacccactaacctagaataatataacttaatgccattaacctacggaattaaaaaaaacttaatggctgagtgtaactgatattgtggcaaccaaaagtcacccccaacagccaacaagtcagccaccatttggtctcccaaaaggctgatgcctatgttgccaattgggcccttattacaacttgaactaaacctaactaaagcccttttaattgattaaccctaaacatattcttggtcagcccactccactatttttgggccattatttatacaaactaaacactctaatattagacaaagttgtgtcattaatcctccttcatttggccatgaacaactcacaacttggactttctcctgaaattgacttgtatcaatagtaagacacacttgtgaaacatt

SEQ ID NO: 72989 - DNA, 457 bp, Glycine max
agcttataagaacaaaattgtctcaatcatttccaaatattcatgataattaggaagcatcaacaagaatcaagccaaggctattgtgcaagcaatcaatggggcaaaacacaccaaatgattatgataatggatggctcaaattctcacaaaggtaaactcatcactttcaaattgagctttcaaaactatcatgacatgtacaggagaatcaaggaatttaagtcacaaaatgtcaagaacttttattttcaaaataattacccatttcttgaacatatcctataattcaaagaagaacatgcatagttgtacatgcacacaaaattaacccaaaatattatactataaatccgacgaaactaacaacattaacataataacacaactaacaaaataacaaaactcacacatctagcataccaaagaacactctccccatacttaaacaacacat

SEQ ID NO: 72990 - DNA, 444 bp, Glycine max
  unsure (1)..(444): unsure at all n locations
agcttctagttntcataagctnttatcttcaagtatttattatctcacaatggattaatttcttcacttaagtttttgtctgatgattgtggcctttggagcttttaataattgcattaaatgcatgccctttcttatgcagtgaaccactctgattgttttcgtgtagaacacttcatcaaaaaaccacttccattggtcagagcaggtctgcaaaccaaagcacatcttttgatgaagatggtgactnttaaatcttgaacttcatttattcttcatagatttccacaaatcatagaagaatgtctctacaaaacaaatctcaaacataaagtattaaacgaagtcttaaatgttatattagatcatggttttagcttatcatcatctaatgctacaaactcagacttgcaaaggatgctntgatatcatataagatgcaac

SEQ ID NO: 72991 - DNA, 399 bp, Glycine max
  unsure (1)..(399): unsure at all n locations
ggtttggcctctggctctttcacttatatggacaatattntgtattgtgttatgttntgtggtacaagtttctaactaatgctctcatgaatgaaatatactattattaggtgctctcaaccatgggtattttacggatcatttgatgtatctatatgtntaaggacaccctcccaagaccaactaaaccttgacgtcctataactataccacctagctaactgcattttgatgatgtccatcagtctcacctcaaacacatgtatgctgaagtantaacttgtggatttgtggaattgtgtccccaggaatatacctctccagaggagcatttccaaacatataacttggtctggaaaaagcactttgctgcaatttaacttcattcttttgaatatc

SEQ ID NO: 72992 - DNA, 426 bp, Glycine max
tctatatatggttcgaaacaagccttctcatcagtggtaccttaagtttcatgggataatttcttcatttggttttgatgaaaatcccttggatcaatgcatataccacaaggtcaatgggagtaaaatatgttttcttgttttatatgtagatggtattttacttgtagccaatgatcggggtttgctacatgaggtgaaacaatttctctctaagaattttgacatgaaggatatgggtgatgcatcttatgttatcggcattaagaatcatagagatagacctcgaggtatcttgggtctatcacaggaaacctatattaacaaaattctagaaagatttcggatgaaagattgtctaccaagtgttgctcccattgtgaatggtgatagctttatgtctaccattgttcgaataatgacctt

SEQ ID NO: 72993 - DNA, 221 bp, Glycine max
actttctacttttatggtgaccacagagtggtacctggagatatgtcgcggtggtcaggagactctgaggacgtcatgtgcggtgctattgcccaaaaccaagcttgaccaatcccgaaccaacccggtcatagtcggtcagtgagaacctgtgatgtacctaagcaggcgagctcctggcagtctacatattaaaggaatacgataccacatcgcatgga

SEQ ID NO: 72994 - DNA, 423 bp, Glycine max
  unsure (1)..(423): unsure at all n locations
agctttactcaagtattatattataaaattgtctctatgtcttaaatccaaagtatcaactgctacttaactcacacaacacttcaatgtgcttactcacaaccttcaaaagcagtaatacccttatttctcttttggttctctatccataatgggttgttttttatgacaaatacctaatacaacttttgttgtgggttgtttctatgaatacaattgatccctgcttctttcttacctagaacaacttccacacaatttaaattcaaaattatggtcattggtgcttgttattattagtggctcatgacttcttctttctttagcatactgatgagtttcactactttagaaaaatgtgtcttctgtaggtaagtgttcttccttcttcaaatagttgtaattttgtcaagacgtnttttt

SEQ ID NO: 72995 - DNA, 340 bp, Glycine max
  unsure (1)..(340): unsure at all n locations
ttcaagactcaagattcaagaatgaatataagacttaatcaagataagtatgaacaagttctttcacaaactgagtagcacatagatctttctgaaaaccttcttaccaaagagnttttactctctggtaatcgattaccagattattgtaatcgattaccagattattgtaatagattaccagtagcaaaatggttttcaaaaagctttcaactgaatttacaacgtttcaatttgatttcaaaatgttgtaatcgatccnntnttttggtntctattaccagtgtgcttgaacgttgaaattcanattctaatgtgaagagtcacattctttcacata

SEQ ID NO: 72996 - DNA, 475 bp, Glycine max
  unsure (1)..(475): unsure at all n locations
tgcaagctgaaggtgtgncagctcaccatttntcatagtataataccggtaatgtgtcttctatcattgtcatcatttttttttccgtcattgaggtgccacttgagctgccaggtttctccacctttgggcgtattcttttgaaagatttgtgccccctttttgcacatgttctgtagttgcatcctatccgaagacattatactgacactgcctaacgaaggcaatcactaggtccttccaagaattggctcgggaaggttccaagttagtgtaccaggtaacagctaccctagtaagactttcttggaaggaatgtattagcaattcctcatcttttgtgtatgcctccatcttccgataatacatctttagatggttcttggggcaagtagtccccttgtacttgtcaaagtccagcaccttgaacttgggaggggtgatgatattgggtacaaagaacaactctcctatg

SEQ ID NO: 72997 - DNA, 336 bp, Glycine max
  unsure (1)..(336): unsure at all n locations
acccatcacatgtggtactangtggcggtcgtgcgatggtgcacagcaaagtttacacattcagaatgcgcgcataaacccaccatcctctggtgcccacctncaactgagctcacgtactctcacgtagcccataatcctcgtttctctcaataccgggtccccatcaatcctcccaagctccacaacatccaagcaaaacaacatactaacagcacaagctatcacagccaagcaaaacagaagcaggcagagaactcccgcaacacaccaactaaaatcacagcttttctcactaaagaccccagtaacaaatctcttcatccaaatcactaa

SEQ ID NO: 72998 - DNA, 351 bp, Glycine max
  unsure (1)..(351): unsure at all n locations
caagctagagacgaggaagtgttgaaaggtgatacttcctgctattattgntgacttcatagtggcacctggagatatgtcgtgggggtcaggacaccttgtggacgtcatgtggggtgctatcgcccaaaaccaagcttgaccaatcccgacccaacccgggcatagtcggtcagtgagaacctgtgatgtacctaaacaggcgagctcctggctgttacagataaaaggacaaagaccacaagcaaggtggcttgtggggctggcagctggaatttgcgtatatgggtgatggacttggaaattataccacgggtgggtatcgttgcaatgctcaaattgatacaggat

SEQ ID NO: 72999 - DNA, 444 bp, Glycine max
  unsure (1)..(444): unsure at all n locations
cgcgggtctgggagacataggtcaagtggtcgcgatatgttatatgatgttccgagtacattggatttggtacgaccatgcccttctgatttccagctgggaaattggcgagtggaggaacgccctggcatttacgcaatgagcataatgtaaacctttacggttnttaatagctctatagttgggcctatgctttagagattntccttttgttaaggctttgtgtctttcggttgtgaaattctaatacgaagacctgnccacagccctcctttcattatttaacaattctcattcattcgcatgttcacttatttttttgaaacggcagattctatgacaagtctcccgaagtacaatacctgtgaccctcttacacttctaccttatcatattatactaatataatgaaatacattttgataaccctcaatatactaattc

SEQ ID NO: 73000 - DNA, 467 bp, Glycine max
  unsure (1)..(467): unsure at all n locations
cgctcganaatnaacatcataaactctcgatatattcntatggtcataactcttcacacggatgtgcgattctggcgcataatatctcgaggggctcgaaattgatcaacggtagctcttgagagattcatatggtcatagctgttcacacggatgttcgattcaagctaatcacatatcgagacgctcagaattgaacaacggaaggtcctgtgaaattcaaatgattctaaccattcactcgaatgtccaattcaggccgccacatatagtgacattctgaaatgaacatctgaagctctcgagatattgaatgtgtcaaacttgcacattgaggccgattccgcttaaatatacgtatgctcgaaactaacttggagctcttaaaatcaatggcataattacacagatttcatcccgccctatattgaaggccatatgacacaatctttggatcaaaggctact

SEQ ID NO: 73001 - DNA, 451 bp, Glycine max
  unsure (1)..(451): unsure at all n locations
ctggacttctgtgtctgggaacctctccttctttatgtgtacccaaacccaatcacctggntcaggcacgactttctttctgcttttgttggcttgccttgcatagctcgcatttttcttttcaatttgagccttcacttgctcatgcagcttcttcacatacttagctttagtctatacgtccttatgcttaaacataacaatgttaggcataggcaacatatcaagaggagtcaaaggattaaatccatacactatctcaaatggtgaacaattagttgtgctatggacaacccgattataagcaaactcaacatgaggcaaacatgcttcccaagatttaagatttttctttaaaacaatcctaagtagtgtgcctaaagtcctattgactacctcagtttgaccatcagtttgtgggtgacaggtagtagaaaacaacaatttagta

SEQ ID NO: 73002 - DNA, 485 bp, Glycine max
  unsure (1)..(485): unsure at all n locations
cgnatccattataatataatgagcatgtgatcggaagtattactgatatatgtacttagctcgtcagattgactatgaaggaacgcattaactgtatcctggtgagagcgtgatccctacatcttgagagaaacgactatcatttagtactgacatctgcatgaatctttgaactatggactgaatgcatgaaattgatgatgatgaaggccatgtttgactgtgatagccacttagccaatatggtgaccatgtgctagaatgaattaagcctgttcctatttgaggtgaatgcttattgattgattgacacctatcctatacgtcgtatcttatacatcctgacttcgatgtacagaactatcttctccgaagcttggcctacgacacttctcttcatcgtggcgaatattctaggacctgtcccctatgtgcagcccgctctacacttacgtctcttacatcacaccctcatcactctttcc

SEQ ID NO: 73003 - DNA, 403 bp, Glycine max
  unsure (1)..(403): unsure at all n locations
ttctcatgtatctacctacgctataaatagaagcatgtgtaacacttggtgtaacatcgatgaatgagagtcttgtgagacacacttcaaagntccatttctcttcctcttttttctccttcaatttcatgcccccgccctccttctctctctaattctttntggccattgaacttcctctctaaacttcttattcaaggcactctcttggtggtgaaactcctccttccatggtttattccctagtggatggtgcctcctctcaccccttctcctttatcttccgctgcatatccatggttgaaaatatcattgaaggacctcattgaagctcaaagatccagcctncatagaagctcctcaagcaagctttcatcaagtggtatcagagtaccaaagcttc

SEQ ID NO: 73004 - DNA, 374 bp, Glycine max
  unsure (1)..(374): unsure at all n locations
ctcagcttctggtggacatcttgacttgctntccaatctgacattcaccacatattttgccttcttctattatcagaatgggaatgcctctaacagcacctctgtcaatgattttcttcatgcctcttaagtgcagatgtccaaatctttgatgccatattctgacttcatcttctatggaggatagacatgtggaggagtaactggtttcttgaggtgtccataggtaacaggtgtcctttgatctgctgccctcattagaatttactttggtgttttctcaagcatattgactttggaagttacattgatcctcatcacacactgctgagctgtcaagctgcgacagttccttacagctgtcttgttaacta

SEQ ID NO: 73005 - DNA, 418 bp, Glycine max
  unsure (1)..(418): unsure at all n locations
caatcataactaaggtcatctacaaactcaaaaaaagaaagaaagaaagaaaaaaaaattgtctacaaactggcacacaaaaaacacaacatgcaaatcaacgtaggttaaatataatgcacacaaacaaccatatatacaatagataaaggaacttagctgtaccaaatagagaagcaggaaatctatagtcggtatttgacccgcattactgtttgtgcaattgcaatcagcagcacgactggttatcatctgccaaataaaaaatagcaacttagtaaggttgacaaaataacaaatcatatgcatgatttgtttataaagagactntaatattaattgataaaaccatctaacatactangaaatactcaactacaatcaatccctagatcgataatcatgtttatattaacat

SEQ ID NO: 73006 - DNA, 442 bp, Glycine max
agcttatttaagaaaactttcttgagaagcttctgttttattcttccttgagaagctcaagcttacctacacacactcatctaaaaactaagctcacctgcttgactaaatacatgaaaataccaagaaaagatcctactacaaagactactccacatgccctgaaatacaaggctaaaactctatactactagaatggcccctactacaaagcccaaacgaaggaaaatcctattctaatatttactaagataagcgggctgatacttagcccatgggctcgaaatctaccctaacgctcatgagaaccctacggacttccctaggatctctgacccaatctacttggagtcttgtatctaatgcccttgcggagtaggatagcatcaagaatactccttcttgtgtagaaactataattctctgtttataatcacattta

SEQ ID NO: 73007 - DNA, 330 bp, Glycine max
  unsure (1)..(330): unsure at all n locations
ttcttctttctttaagccctcttcctacgactactcattttttcttttggaccgcttctgggatttgtctgattgtccagtggcacccttgcgatttagtgaaaactcatggcctcctcacnccccnagttgatcctacttatgcctatagagccctgcaactgtgaaatacaccgctccaggaatttgtattacagagtcatcatcacttagggcgcggcgaaaaaataataataaatgatcatatgggttagccttaagaaaattcattgttgcaatttcaataggaaacaatgtggtcttacgccactatgagaccattgttactct

SEQ ID NO: 73008 - DNA, 450 bp, Glycine max
  unsure (1)..(450): unsure at all n locations
tgcatgctatacacaacagaataatctaaaaatgtcaaatatttatgtgttgaaaaagcataacaagactttctgtgattggtttaaagatacaatctttgcagatgaaaatgcttcagaaacattaagaaagcttgcagatgggcctaaaagaaatgttataacttggcaaggataggacataaacaagtattcattttacataaaagcacaagacgacaaaagtgcaatgcagaacagcggggtcagcctaagggctgaatctcaacactttgcaagtgtgcatgacgccaatccttgtgtagcttccatcccttactttgggttcattgatgaaatttgggagcttaacttatgtgaaattactgtttgtgtttcaaatgtaaatgggttgacagcaacatcggtgttcgcaccgatgatatatgatntacgttggtagaccctaag

SEQ ID NO: 73009 - DNA, 458 bp, Glycine max
  unsure (1)..(458): unsure at all n locations
agcttgtaggattattgtgtacccatcacatgtggttctatgtggcggtcgggcgatggtgcacaacaagttttccacatccacaatgcgcgcataaacccaccatcccctgttgcccacctccatctgagctcacgtactcccacgtagcccatatcctcgtttctctcaacaccgggtccccatcaatcctcccaagcttccacaaaatccaagcaaaacaacattcaaacagcacaagctatcacagccaagcaaaatagggcaaaggcagaaaactctgccaaaacaccaaccaaatcacagcttttctcacttaaagaccccagtaacaattccttcgatccaattcgttaaccgttggatcaactccaaaattttactggaagtctatagtacataatcctacattgtgaaccgtgggatctactagcanacatccagaactcattntacat

SEQ ID NO: 73010 - DNA, 458 bp, Glycine max
  unsure (1)..(458): unsure at all n locations
ggcttctacagaagaaaaagaccaagagtgagctgtctacagaaaatagaaaggaggcaagtccaagcaaaagggaggaggtgccatatccattggtacctagaaagaaagacaaggaacgacatctggctcgtttccttcatatcttcaagaaattggagaatactatgccctttggagaagctcttcaacaaatgtcgttgtactctatagttttaaaagatatgctcacacggaagaataagtacatctccaatgaaaacatcacgttcaannnaaactgcnntgttgtattcataggattcttccacctatgcacaaagatcctacgagtgtgactattccatgttcaattgggcaaggctcttatttgattgggagccagtattaatttgatgttgtttccaagtgccggaagcttggagagatggagaatatgttgacttggatgactctac

SEQ ID NO: 73011 - DNA, 455 bp, Glycine max
  unsure (1)..(455): unsure at all n locations
gcttgctgatttagttntcgccgatgaaaggatcgatttgggtctaaaaagtattttatctgatcatcatgctttgataaatacaaaaaaactagggcaaatgaagatggtgagaataagggagaaacccatgttgtgactgccattcctatacagccaagtttcccaccaacccaacaatgtcattactcagccaataacaaaccttctccttacccaccacccagttatccataaaggccattcctaaatcaaccacaaagcctgtctaccgcactttcaatgacgaacaccacctttagcacaaaccaaaacaccaaccaagaaatgaattttgcagcgaaaaagcctgtagaattcaccgcaattccggtgtcctatgctgacttgctcccatatctacttgataattcaatggtagccataaccccagccaaggttcatcatacctcatt

SEQ ID NO: 73012 - DNA, 323 bp, Glycine max
  unsure (1)..(323): unsure at all n locations
gagatccaggaaagacaatgcggttgaaggaaccagttctactcccatatatgacagccatcattataggagcgctgagcaccaacagcgcttcgaggccatcanaggatggtcattccttcgggagagacgtgtccagctcagggacgacgagtatactgacttccaggaagagatagttcgccggcggtgggcatcgctggttacccccatggccaagttcgacctatacgtagtccttcgagtttatgccaatgctcggcctacagtttntttttgctatatatgcnatcttgggtgaggtgtcattggatccctttcta

SEQ ID NO: 73013 - DNA, 470 bp, Glycine max
  unsure (1)..(470): unsure at all n locations
gctnntcttgcttntcttatcttgaaggttntcctgtcatgtttttccattcttttcttgaaactagggcaattaactctcagatgttcaggttgattacattcatagcactttggaacagaagatgaatcttctcctcttttctttgaattgaagtttattcttctttgatttcctttgttccttagaaacttattgaatctgtttacaaagaaattgaaaccatcatcttcttttatttcattcaagtcctctttgtcactttcttcttgaatagaagatgaggctttaagtgcaattcctttatttttcttgtcattntattcatgttnggttagtctcataagttccatttcatgttcctgaagcgttccaaaaagagttgcaagagacatgtttacaaagaaactaaaatcatcatcttcttttatttcattcaagtcctctttgtcactttcttcttggataga

SEQ ID NO: 73014 - DNA, 359 bp, Glycine max
  unsure (1)..(359): unsure at all n locations
gcttctacttatgtggcagggcaggcttccttcactttcttgtctccaattctagctntgaccactgttcttccttcccacgatgcttcttttcatgtccgcctgagtgggcttatagcctaaaccatacttcccacgatttccttgggtatatatcaggctagttatgccgccgttgtctntgcctaaacccatcccgggttcataaccgttccccaacataactcgggccatcattaccgctgcatcggacagactaggctgcacaaagagggagtctctttntatatgctgaccaccttaaaagactggaaagcaagttctaacgattcttctgcggcttccacataaagcatgga

SEQ ID NO: 73015 - DNA, 473 bp, Glycine max
agcttcaacattcaatgttgagcgtctcgtaatattatgggactcaatcagacttttctttaaaaatgtattggcgtttggactggctcatagattcaacattcaatttcgagcgtctcaatatattacgggactcattcacacatccgagtaaaaagttattgtcgctcgaattagcttagagcttcaacaatcaatgtcaagcgtctcgctatatcacgggactcaatcagacatccgagtgaaaagatatcgtcgtttgaattggcttagagcttcaacattcaatttcgagcgtgtcgatatatgacaggactcaatcagacatccgagaaaaaagctaatgtcgtttgaatttgctcagaggttcaacattcaatttcgagcgtctcgttatattacaggactcaatcagacatccgagtaaaaagatattggcatctgaattggctcaacagctcaacattcaattt

SEQ ID NO: 73016 - DNA, 414 bp, Glycine max
  unsure (1)..(414): unsure at all n locations
ctcagcttgagccattanacgacataacttttacatggatgtctgantgtttctgtcatatatcgagacgctcgaaattgaatgttgaatctctgagccaatccaaacgacaataactttttactcggatgtctgattgtgtcccgtaatataacgagactctcanaattgaatggtgaacctctgagctaattcaaacgacaantaactttaactcggatgtctgattgagtcctgtcatacatcgagacgctcgaaattgaatgttgaagctccgcccnaatcanacgaacatactttttacttggatgtctgattgactctcgtcacatatcgagacgctcganattgaatgttgaagctctgagccaattcaaacgacaatatcattttactccgatgtctgattgagtc

SEQ ID NO: 73017 - DNA, 329 bp, Glycine max
  unsure (1)..(329): unsure at all n locations
gcttctagccaaatggacttaccttgaattaatttctttgatagcccttttgtgctcttgtttccctttccttgttttgaagctcactacaagccttaagtgaaaaaccatgatattaccatatccttaaggaattntggagctttggaattgttttgggaataagtgtggggggtttttgttcattggacacttgttttgtggctatgctcatgatgttttgggcctacttgatgtccttgagggtgggtaatgtcgtcttgtttctgacatttgtattattttggtatatgggtttgaaatatgtatctattttcatgtttcttctc

SEQ ID NO: 73018 - DNA, 404 bp, Glycine max
  unsure (1)..(404): unsure at all n locations
ctcctgcatttatctctagcatgcattctttctatctttacccactcctcacgtttggttgtttatggaaaaacaccataactaaacgcgccacaaggcatccctatcgcaccagatccatatctagaacgatgggtgatcaagaggagacacaggaacagatggcttccatgatggaggccatgttaggaatgaggcagctcatggagaaaaacgtggccaccgctgccgctgtcagttcggctgccgaagcagagcccctctctnggaaactgcgcaccattcttcctcatacatattaggacggtgaacggacacactgtggcacgatggcaaccctcatctgggatacaaccgagcggtttacccttatggattgccgtccaactactcaccacccttct

SEQ ID NO: 73019 - DNA, 490 bp, Glycine max
  unsure (1)..(490): unsure at all n locations
agtcacctgacgcatgcaagcttgtctcagcgtttatgcgagacagagaccaacatgttagccatcgtcagctagtaccaagaagaattaaatctagccacggcccacaagcacaaagtggcagacgagtatgcccgagtgtacgcggaanaggaggctaaaggaagggtgatcgactcgttacatcaagaggcaacaatgtggatggactgatttgctcttactttgaactggagtcaagaacttcaccgattgctagccaaggccaaggcaatggcgaacacctactccgtcctcaaggagatccaggaacttcttagctattgtcagcatatgataaacttaatggcccatataattagagaccctaggaagtttgtattgtcactcaaatcttgactagttataactttctgaataaaatgagtttatcccacgtttttactccaataatcagtgtgaatcacatcactccctcaatttatctcta

SEQ ID NO: 73020 - DNA, 455 bp, Glycine max
  unsure (1)..(455): unsure at all n locations
cttgtgtaatcgattacaataaggctgtaatcgatgtaaacacaatttgtgtaatcgattacgataaggctgtaattgatctaaacaaagagctctttcttctgaagacactnttctaacttagaaatatttcttctaacttactcatgataatgcatgatgcacaaaagatatgatatggactaagatgcaaaattcagtataataatcaatacaaatgccactcaatggagttgggcatgtataagacaaaacatctctcagatctctccaaacttcaagctttagtctttattttgttcatgttgctcactctatctaacaatcttcaccttttttgccttgatgatgcctacactgtatatgacattgagtgcatttggacggtccgagtcttgagataaagactagttcttattctatctaataattcttaacacttaagaaggataatt

SEQ ID NO: 73021 - DNA, 412 bp, Glycine max
  unsure (1)..(412): unsure at all n locations
cagcatttgtgtcattatcatggccaattctcaaccatgcattccccatccatacatgtgattaaagaagcgcaccagtgatgttggggaatgattattgattgattccttcaatgggaattctgtttcaacaaattttacatctcgtgaaacaaagaagacctctctctctaaatcatatatttccatcccctttgacctatggatagccaacaaaaatgcacttacgacttctactatcaaatttgtctccctttctatcttgattgtgtgcatagcanagcgaaccaaacacgcgcaagtggtcataggaaggagaggttccatggacgagttcatatggagtttttccatcaacgatgggcgatggtgtcaaattaatcaagtaacctgcggtataatgcactcaccc

SEQ ID NO: 73022 - DNA, 415 bp, Glycine max
tttattcgttgaccacagagtggtacctggagatatttcgcggcggtcacgagaccttggggacgtcaggtggggtgctattgcccaaaaccaagcttgaccaatcccgacccaacccgagaatagtcagtcagtgagaacctgtgatgtacctaaacaggcgagctcctggcagtcaacagataaaaggaactaagaccacaaagcatggaggcttgtgtggtggctggccagctgtgaactttgattgatatatgggatatggcctttggtaatcgattaccaagggtgggtaatcgattacaaggcttaaaaatgaagacaggaggctaagatggtctctggtaatcgattaccaaggggtgtaatcgattaccagacttgaaaacgaggtcatgatatatgggagcttctg

SEQ ID NO: 73023 - DNA, 391 bp, Glycine max
  unsure (1)..(391): unsure at all n locations
ctttcacaatcatctatctactgactaacaattctaattgcatgttcacattcttgatctttctttgtctaacatacacacttgctcaaactcatgaaaagaaacacaaactccatcaaaatcatgcactcactcataataaaagcatacacccatttttcacaataagataaaagtgttccactaccatgtcataaaaaactgttcaaaatgcttcaggatgagaaaactatctacccacaaataaaaatagcatacaggaattactgtctttatcaataattataatattataccatatagcanaaagtgtcattatgaatcacaattcctgtggctggacctgagtgtgctgtgtctgaccattctcctcattagcagctgaaacatt

SEQ ID NO: 73024 - DNA, 280 bp, Glycine max
acagagtggtacctggagatatgtcgcgggggtcaagagaccttggggacgttaggtggggtgctattgcccaaaaccaagcttgaccaatcccgacccaacccgggcatagtcggtcagtgagaacctgtgatgtacctaaacaggcgagctcctggcagtcaacagataaaatgaacatagaccacaaagcaaggaggcttgtggtggctggccacctgtgaatttttgtgtgatatatgggttgtggcctctggtaatccattaccaagggtgggta

SEQ ID NO: 73025 - DNA, 442 bp, Glycine max
ctctaaacactgcagctgcaacttggatgaccctgcttgtgtagtttccatgttatacaaatcacgcactcacaacattggttcggctcaagaagatacaatgcataacttgaaccatcatgtatcaagacatcttatgcatttatcaggttttccactcactactgatctaaggaagtatttaggggatttgtgataacactacgttacccattattcaatctcctcatccccgccccatgaaaacactgtgcggctcatgcaaatgaaccaagtcactgatcacaactattggaacactcgctctctaatcaaacgaacacactacactacactatgctcccgtattctacttttggaactctgcaaaactgagtggtccaagtatggacatccactctaggagaagcgccgcaggtgcttacacttacaataacataag

SEQ ID NO: 73026 - DNA, 258 bp, Glycine max
  unsure (1)..(258): unsure at all n locations
ngtattatagctctgtatgtctgaacatcaagntgctgactttctatctatgtcattgaagcctatcacgntcaacgaatttagagacattgtatgagtgaacgccttgacacatctgaattatcgagggatgttcatgtatgctcgaatatacctagctagtgatttattcatttcgaaatcagatcgacagctatgaatgttgttataactacatgtgcagtgtgtatcacaataataatgatcttgaatgagaaa

SEQ ID NO: 73027 - DNA, 496 bp, Glycine max
  unsure (1)..(496): unsure at all n locations
tcgtccgcagatccctcatttaagactaggctcagtttanacaacttacataagtttagactaatntaacctaagcttcgtccgtagatccctcatttaagactaggctcagcttaaacaacttacataagtttagactaatttaacctaagcttcgtccgtagatccctcatttaagactaggcttagattaaaaagcattatcataacatcatattaagaaaactaaaacttaatccgcagatccctcatttaagacgagagtcaatcctgcttctatcaagttctaaggcaacagtacacttcccaatgctaaagtcacctaactaaacatacaaatgggtgatcaaaccaagagcatgcagaaattaatcattgaaagaagcatcgacatagaaacacaatcattagatattaagtaatacatagctgtccttaaaatccaacaagaggttagctgtcatcagaaaccctacacattggataaagagagata

SEQ ID NO: 73028 - DNA, 408 bp, Glycine max
  unsure (1)..(408): unsure at all n locations
agcttgtacataatgtatcaatattnttgtagtaaatttacaaatacaataatctcattntctttcgatcatcaataatattaatcgtataaaataaaattaaataatgtttgtcaataacatatatatttgtagtaattataataacaatcatatcaaacaaaaaaacatgtccaacaattgttgcaaatctttattatatatttattttcttatatatgagttaacttttgttacattaaatatatatatatatatatatatatatatatataaagctccacgatatggttgaaagtatataaaaaattatgaatgtctaacaaagatacaagggattatataagacaaaaaaaaaacatgtcaattgagaggaaaagaatgaaataaataaagtcccaaaatctc

SEQ ID NO: 73029 - DNA, 426 bp, Glycine max
  unsure (1)..(426): unsure at all n locations
tggtgtcgataagaaatcacatgtttgtcatcatcaataaggtggagaatgtgaatgtatgtatacatgattctgatgatgtcaaaagaagaatcaaacaagactcattttgcttcaagattaatacaagattgtttcaacaaacaaagccttgattcaagatttcttcaagatcaagccttgtctcacaatgaaaggtttcaagtcattcaaggcacatgtaatcgattaccaatacatgtaatcgattaccaatggttcgagttntgttatctataaccatcatattaatcgattccatagactctgatgttggaatcatatctaaatgatggtccaactgtttacaatacaccttgttaccatacactattcttcaccatctcccatagattatctgatatttctaactccatctctctttta

SEQ ID NO: 73030 - DNA, 446 bp, Glycine max
  unsure (1)..(446): unsure at all n locations
agcttcgatcgccacttatttgtaactcgtaacattgcatcaagcacaatggaatcttagaagtccgaccaaaatgacttgaaagtgacataaatatatctgattccaactttaatagaaatacttattttgtttccctttatttgtgaatttaacatcacagaaggtacatccgtgccaagttgccatcaccgtatcatcctcaattatatattccataatatagagagatcttaaagttaccaccgctcaatccgatgacttaattactaacacccttttctgtaagtttcttaaaaatattcctttataatganttntgatacatgcagacacatggcatatcttatatctactaagattttcatcgtatgtttatatgacattgagacaaatccatgtgtattcgtggtaagtaaattatttatttctctgtctgctattat

SEQ ID NO: 73031 - DNA, 417 bp, Glycine max
  unsure (1)..(417): unsure at all n locations
ggcttctacaatctcacactatttgatgatgactacttctgaaatcatgatacacacacacacacacactttnttctattcgatcactcacataaatttccattctccccctttgtttttgaatatatgcttcacttgaaattaagttaattattcatgtgagttcttgatttaatccctatttctctccccctttggcatcaacaaaaagccaaagtgcgtaacatgtatgaaacatacaaatactactaatcattcacacaacctcatggaaaaatataaactaaacatgaagcaagaaacatgactagatcaaatatatagaagaatcacatagtcatataacataattcataattgttcaaacataccatgcaaataaagagatgctaactngctcaaatgtcataataatat

SEQ ID NO: 73032 - DNA, 377 bp, Glycine max
agcttgtttctgtcgttcctattaaagaatcttcgaatttgttgtgcctaatatctctaagacacattaaaattgcagtatctatgcccatgtctatcaaaggtttgatggctacctggacacatcctatatgtaggtatctgtattttcaactgtgtccataaattgaattttttgaaagtaaatgaaattcgtcccctatgtcttgtcctagaggaataatattttctacagttatgattatataatctgtcataccctaatttcctccggggattattacttgatgacatgcaacctttggttatccgctttgaagtatgtggccgcctttgttgcacaataaatgaagtcctgagacgtctcggaaatcaaaa

SEQ ID NO: 73033 - DNA, 361 bp, Glycine max
  unsure (1)..(361): unsure at all n locations
actaagctgtgcttgtttatntaaattcctaggatcatgaacaattaggtgtgttctactatgactggagaaactaaggtgatcaaataacaagcagagatttaaaaggtactaggttgcctcctagtagcgcttctttaacgtcttgagctggacgcatgatgacttgtcggccacggacctagtaccttgcttaaccttggctttggacttggtcgcctattggtcggccatgtgtcgtangcaacgctctaaccttttcgtggatgagttgaggtgaacctanangtggtggcggtgggtctgctgcccgctgccggccgtccccaagctgctgaggtgtttcgacctatgcctgcct

SEQ ID NO: 73034 - DNA, 441 bp, Glycine max
  unsure (1)..(441): unsure at all n locations
agctnttctttctcaatcaacctatctactgactaactattctaatagcaagttcacatttttgttctttctttgtctaacatacatacttgctcaaactcatgaaaagaaacacaaactccattacaatcatgcattcaatcaattcataacaccaattttcacaaaaagataaaagtgtttcactgcaatatcatcaaagtcaagttaaactattccatatgcttcaaaacaagtatactagctaatcacagaaagtataagaatataattataaatggaaaccaaaattactcaaaacaatgtactaaaactaatatagttataatcattatccaaaaagcaaaatcatcaggaatttaaaagtcctaagggaaatcctgagtatcctgagttcgaacatcctcttcatctgtcagatgaagtattgaagtagctgga

SEQ ID NO: 73035 - DNA, 443 bp, Glycine max
actaagcttataagcgcgggtctgggagacgaaggtcaagtggtcgcgatatactaatatgatgttccgagtacattggatttggtacgaccatgccctcctgatttccagctgggaaattggcgagtggaggaacgccccgacatttacgcaacgagcataatgtaaacctttacggttataaaagctctatagttgggcctaggctatagagttcttccttttgttaaggctttgagtcttttggttctgaatatataatacaaggatctctcttcatctctcctacgtctctacccattctcattcatttgcatgtttacttctttatttctgaaacggcagatccgatgacgagtctcccgaatgtactaatacctgtgaccccgttataacttcgagcagaaactaatcaactgaaatgaatggaccaggagtgggac

SEQ ID NO: 73036 - DNA, 125 bp, Glycine max
tttttttctatatttgaaagtataaaaaaatgataggtgacttgaacattaacgcacttaacctctgaaatatatttcagcacgcaaatttaaactttgttaacgagaacaaaaaggccgaacat

SEQ ID NO: 73037 - DNA, 457 bp, Glycine max
  unsure (1)..(457): unsure at all n locations
gcttgtaggatatggggtacccatcacatgtggtactatgtggcggncgggcgatggtgcacaacaagntttccacatccacaatgcgcgcataaacccaccatcccctgtagcccacctccaactgagctcacgtactcccacgtagtccatatcctcgtttctctcaacaccgggtccccatcaatcctcccaagcttccccaacaataaagtaatgcaacattcaaacagcacaaactatcacagccaagagaacagagcaaaggcagaaaactctgccaaaacaccaaccaaaatcacagcttttctcacttaaagaccccagtaacaattccttcgttccaattcgttaaccggtggatcgactccaaatatttactggaagtctctagtacataagcctacgttttgaccgttgggatctactagcaaaaatccagaactcattctgcact

SEQ ID NO: 73038 - DNA, 225 bp, Glycine max
  unsure (1)..(225): unsure at all n locations
atgagcatattcanacgacaatcacttttttactcggatgttcngattgagtctccgctaatatgtcagagcacgcgtcgtaatattgaatgactcgacatctcttgagcaatattcgaatgacaataacttattactcggatgtgtgactgagtcccgtaatatatcaagacgcatgaaatatattatcaaagctctgagcatatcaaacgaaataacttttac

SEQ ID NO: 73039 - DNA, 368 bp, Glycine max
  unsure (1)..(368): unsure at all n locations
atgcttgactntgacaagataaacaatattgtctcttaatgaanatgagaattgattcaaccctatgtctttgctgaaatttctgtgtgggttcaatacttcgacaacttatcattgtcatgcattcatgtttagttcgttgtcacattactcattngcatttgttcttttaccatcgtcgtaatcaaagtaaacacaataaccaaaaagaacaaatgcgctttagacacccccatcagacacgtgccaaaaccaaaatcatantnaaatatatgaagtgtaatagcatatggaggccaacatggaggccataaaggaccaaataacctccatgatggaggccatgttaagtatgagacggatgatgg

SEQ ID NO: 73040 - DNA, 352 bp, Glycine max
gtgaagacttttgccaagaggttggataactgggactgagacgtcatcatgagagagagaagcaatggttgcaattgggatttggtcaattttgaaagcacggatttcatgaatggagtaactgagaggagggccattatacaccacagcaagggagtactcatagctgcttaagctatcttagtttccacagtaacagtatgcacagaagaaggccttaactttctcacaagagaagccatttcatgcagtccaaattgaagccaaaacccaaaataaataccacagtactcaccaactcatcatcttaaaagaatccattttgagggaaaaacccatgatgctaaaaacg

SEQ ID NO: 73041 - DNA, 415 bp, Glycine max
  unsure (1)..(415): unsure at all n locations
cctatgttttatgagcaacanagtcaagcatgattgttatatgctataacttcaagtctagcaacaagaacaaaggtttcagtgaaatcaataccttctttctggttatagccttgagttactaacctaggtttgtttcatatcacctttccttgttcatccaatttatttctaaatacccatcttgtgccaatgatgctcttgcttttagctgtgggaacaagagtccagacgttgtttctagtaaactagcgaacctcttcttccatacaatgatcaagtcatcatctataagagcttctttatggtcttgggtctatttcaacataatagcacatgaagcaatatctntgaatgatgatatgaccttgactccttcagtctgatctccaatgatctaatcttgtggaggatg

SEQ ID NO: 73042 - DNA, 398 bp, Glycine max
agcttgtaggatatggggtacccatcacatgtggtactatgtggcggtcgggcgatggtgcacaacaagttttccacatccacaatgcgcgcataaacccaccatcctctgttgcccacctgcaactgagctcacgcactcccacgtagcccatatcctcggttatctcaacaccgggtccccatcaatcctgccaagctttcacaacatccaagtaaaacaacattcatacagcacaagctatcacagtcaagctaaacagagcaaaggcagataactctgctcaacacatcaaccaaaatcacagcttttctcactcaaagaccacagtaacaattccttcgatccaattcgttaaccgttggatcgactccaaaaatttactggaagtctatagt

SEQ ID NO: 73043 - DNA, 184 bp, Glycine max
  unsure (1)..(184): unsure at all n locations
ctcagcttctaaacntatacaagaatgaagctctgataccacatgttatacaagtggcctcagatatcttaagaaggcggggggggggtgaattattattatccacacgacacttctctgatagatattcactccacttgtatttatatatcgattcgctaaatgacgctctgttatacattat

SEQ ID NO: 73044 - DNA, 395 bp, Glycine max
  unsure (1)..(395): unsure at all n locations
agaagttctggactcatcacgttatctaataaccgtgcggtggatccaagtgctccgaacatccattcgcatactcatgttttggtggcatactcaccgctgtttatttctttaggaatttcatcataactaagacaacaccaaggcacccctataacactcgatccacaaaaatggataatgaagagggcgtgcatgaacagatgaaagccgatctatccgccctaaaagatcacatgctcccccattaanactatcccagaagattaagccaagcccttatttcaggggcaacttcaccttataagacttcccggcaagacatggggaggagatacccatttggcccctgctcacttaaagatctgtcccacttaactaccccaccaacattt

SEQ ID NO: 73045 - DNA, 452 bp, Glycine max
  unsure (1)..(452): unsure at all n locations
agcttctccacttgtaacttgggcctaaattcaaatagcatggctaacacttgttgaagagcttcattggccttctttgttctagcccttgacataggtcctcctagtccttctaaaggctacttgcccgtagtctctgccatgtcctcatcacactctccttcttcaaaaggatttgtcctcaaatcggcttctccatctgcatcaaaaagagttaagtcagaaacattaaatatagtactcatattatactcaccggacaattcaatcttgtatgcattgtcatttatcctttcaagtacttgaaatggaccatcccctcttnggtgatgcttggatttcctttgctcctgaaacctctcctttctgatcacgtgaacccaaacccatatcttgggttggaaaataacctttttacgccctctgtttgcttgtctaacatagctctcatt

SEQ ID NO: 73046 - DNA, 435 bp, Glycine max
  unsure (1)..(435): unsure at all n locations
ctaagctcgctgatttacattctcccctntctcaagataattcttaattcttcttgacatcatcaaaatcttcatgatttacaagcatttccttgtaaattaactttccaaatgttggtcctcgcacgaaatggctccgaaaaaactttctgcgaagaggtctatgagagacgccgcggctgaagggaccagtgccgcccccgagtttgatagccacctgttccggagcgccgagcaccaacaacacttcgaggcaatcacaggatggtccgccacanagagagacgcgtccagctcatggatgatgagtacacnatatttcaggaggagatagctcgcatacattggacgtcgctggttactcccatggctaagtttgaccctgaggtagtcctggattttatgctaatgtctggcccactaacgatggagtgc

SEQ ID NO: 73047 - DNA, 84 bp, Glycine max
tagcgcactcactgacgcatttgaaagaggaaaacctgttgctcgacgcaacattgaaatgaccaacgctaatagctatgggtc

SEQ ID NO: 73048 - DNA, 87 bp, Glycine max
ccttatcactgtctatgcatctagcccggccactcttctccttaaggctatacatcatggcgtgtttcgatgatgctgcaaaccctg

SEQ ID NO: 73049 - DNA, 434 bp, Glycine max
  unsure (1)..(434): unsure at all n locations
caataactttttattctgatgtctaattcagncccgtcacatatcgagatgctcgaaattcaatgttgatgctctgagcaaattcaaacgacaataactatctacttggatgtctgatcgagtcctgtcatatatctatatgctcgaaattgaatgttgaccatctaagtaaattcaaacgacaatatctatttactcggatgtctgattgagtgccgccatatatcgagacgctcgcaattgaatgttgaagctctgatccaattcaaacgacaatcactttttactctgatgtctgattgacgtccgtaatatatctagacgctcgaaattgatgttcatgcactgagcagattctaacgacaataacttcttactctgatgattgatgatgtccgtcccatatgagaagctcgaatcgaatgtagagctct

SEQ ID NO: 73050 - DNA, 486 bp, Glycine max
  unsure (1)..(486): unsure at all n locations
agctngcatgaagagacgttaaatatanaagcacatgttatgttataagggaaaggtacaatgggaatttaaaaaatgtgttgagttatatcaaaactaaaagaggaaaggaagcccattatacgattacaaatagtggggactagagagtttcttttctatttttttataaattacattcttttatttaaaaaattattaaattataacctttttgtttgaaatcatactttattttgaatagattaatatacattacattgaatntaattaaaaatttaatctatctatattntgtttgataaaaaaaaattatccaatccatttattcaactattttaanaataaacattaatatttatatataattgtatacccagatactctcgaatattgattcaaggattccttaatgaacggtgtagtatctaattcaatagattacatattatattaaataattcgttggttatcaaataacaaaat

SEQ ID NO: 73051 - DNA, 288 bp, Glycine max
ctgactatatagcctgcacttagctcgattattaacacattcatgcactataaatgataaagcctcaactaactggtgctttgccaaatttggaataaacaagattgacaattggtctctacaacttatatcagtaaattatttcattgactaacagaaataccattgccactactaaaggcctgtataccataagactcgcttagaaacttcaattagtacaactgcctctatgtgcgcgcgataatcacataatgaacttgaagaaaataagctccagataactgg

SEQ ID NO: 73052 - DNA, 498 bp, Glycine max
  unsure (1)..(498): unsure at all n locations
agcttgtactctngaaattgacttgctacctgtagttagtttttgttctcttgaaatttacatgtagtatatgcctttgattntacaaattatgcattgtctacagaattgtgaaaagatttgatgctctagcatttattcttgatatgtatttactttgtataagatatgttgattagcaaatgcagtggaaactagtctaatcaaatggtcttctagaatggtaacagactcctccactcccctccttcccccaagcacacacacatataaaatgtgtagatgttgatgcaacttgaataaatgatatgattgcctagatgtagccatgtggcagtactaactgatgttcagtacttataatttaattttcactatgaaaatatattatccccatcggttatgctatgaaacatgatctataacccctgattggaggtgacattgagcttctggttcatgaaaattgttggctttgatgttgaatttattattaca

SEQ ID NO: 73053 - DNA, 496 bp, Glycine max
  unsure (1)..(496): unsure at all n locations
actcagctggagcngaatctgttatatttatttactcgctctatatgtttttatatgcatatggttatagntnctaggcaaacattgttctttcatttgctgaacattccactccaaaaggctaacacctaacttacttgccattacaccgnggccttgtgcaattgacaaaagagtgatatcggaattattggaattgacaatgctaaaagcttcagcttttaacatagcattcctttgaataaaataatccactctgnggatattattatgagtattgggcccatatatggtcatagaaatcgttatgcagcaagatcaattactgggaatttgctatatatttagaagcaaagagagtcccgtatatctgagcgggcacgtaagttatcacagataattctatccatcgaacttgatctttggcattatnntgttgaactctnnntataaagacatcagatataaatcctctggtttagaatattttatattc

SEQ ID NO: 73054 - DNA, 476 bp, Glycine max
  unsure (1)..(476): unsure at all n locations
tgctagctatcatcgccaagtaccaagaagagttatgtctagccacggcccacgagcataggatcgcggacgagtatgctcaagtatacgcagaaaaagaggcaagaggaagggtgatcgactctntacaccaagaggcaaccatgtggatggatcggtttgctcttaccttgaacgagagtcaagaacttccccgcttgttagcgaaggccaaggcgatggcggacacctactccgcccccgaagagattcatgggcttctcggctattgtcagcatatgatagacttaatggcccacataattagaaatcattaggaaactngtatggtctctcagaccttgactagatacgaactttctttttaaataaaatgagttggtcccatgtgtctactccanaaagcttgtgcgaatcanatcactcctgcatttcatctctaccatgcatttgtctttctntacccactcctcacg

SEQ ID NO: 73055 - DNA, 281 bp, Glycine max
  unsure (1)..(281): unsure at all n locations
tcacctcttctcctttgtcttccgctgcatctccatggtggaaaatcaccattgaaggacctcattgaagctcaaagatccagccttcatagaagctccataagcaagcttccatcaagtggtaatcagagcataagagcttcaagtaggtgctccttaaaccatcattaatattctgctttaccttctcttccataggtgttcctaatttttctccatgatctctcacatgtcttgtatanatgtattaacatggttcttagagttccaccgattaacat

SEQ ID NO: 73056 - DNA, 346 bp, Glycine max
cgtggggctccggactcaatggtggaagatgcatgaacgaaaatcaattcatggggctgtgaataatatggtggatgatgcacaaacaacattaagcaatcaattcgtgggtctctggactcaatggtggaggatgcatacactacaaacaattcatggagctaccagtaagattaaatgatggaggaagcactaacagtgctaggcagacaatttgtgccgctcttgactcaatgagtgaggatgcatacacgacaatctatctatggagctactcataagatgctggacgatgcacgaacaccactatgcaataacttttctgagctccgtgactaaagaagga

SEQ ID NO: 73057 - DNA, 402 bp, Glycine max
ctcagctattcttcaagctagcatagctctctgggcagcttaactgccccaaaaggtgattttccctataaatagtcatgatgggggtttttataaggggttccaaggttcaggagttgaggaattgagagaaaagaaggaataacatagagaaagagaatagaagaagaagaaagaagaagaaacgaagccgaggcgctaccaaattgtgatcgtgatcattccctacatcgttctctcattctgtgtttcgcatgcaatagttggttacgtttgtctttaagaattaaatgtactctatgtaccacttggggtcccctctattattatgtgcatattcatcttctccatttatcatcaactaatctcgtttaatttgtagagtaatcctaaccgatcact

SEQ ID NO: 73058 - DNA, 442 bp, Glycine max
  unsure (1)..(442): unsure at all n locations
agcttgagcanattcaaacgacaataatcttttactcgggagtccgattgtgtcccgtagtatatcgagacgctcgaaattgaaaacagaagcactgagcaaattcaaacgacaataactttttactcggatgaccgattgagtcccgtaatatatcgagacgctcgtaattgaaaacagaagctctgagcaaattcaaacgacaataacttttaactcgggtgtccgattgagtctcgtaatatatcgacacgctcgtaattgaaaccggaagctctgagaaaaatcaaacgacaataacttttgactcggatgtccgatngagtcctataatatatcgagacgctcgtaattgaaaacagaagctctgagcanattcaaacgacaataactntntactcggatgtccgatngagtcccgtaatatatcaagacgctcgta

SEQ ID NO: 73059 - DNA, 347 bp, Glycine max
  unsure (1)..(347): unsure at all n locations
gcaaattccaaagagagagaagtgcctaaggtgctggaatcccttccttcttcatttcctcccctanttatagcanaataggggaggtggttgccgcccagctcgcccaggcgagctcagctcgcccaggcgagcaaggttgcttcctccagaagcaaccgccttctggatgaatcttctgagggcccaagtggccctgggtgctattcaccccattttactaatacaccccctctgtgtttttgtgatctttttcgaaagtaccgtacttacaattcgaacgatactgtttcttccgaatgtacggaccttcggatacataatcatcncttttacctacgaatgta

SEQ ID NO: 73060 - DNA, 448 bp, Glycine max
  unsure (1)..(448): unsure at all n locations
caagcttgaggannttggtcttgccagtgaaaggatcaatgtgggtctgaagaaaggcaaatttagtcatcctgcttggacgaatgaganaactggggcaaatgaagagggtgagaaagagggagaaacccatgctgtgactgatattcctatacggccaagtttcccaccaacccaaaaatgtcattactcagccaataacaaacctccttacccaccacccagttatccacaaaggccatcccggttaagggaccagtagtttccttttaacggttcctgngccaccctctgatattggaggagggccaactgtgcgagcacaaccagagagggaggctatcacacaactactatgcataccggggcaagatttcacccgtgccgctgcaaagagacgagtgcggatcatgcgcaccaacatgaccactcttacacagatatagat

SEQ ID NO: 73061 - DNA, 329 bp, Glycine max
  unsure (1)..(329): unsure at all n locations
atgcctatangttggacctcccagaatagtatggagtcagcaacacttttaacatttctgatttaattccctttgcaggtggagttgatattaaggaggaggaactaacagatntgaggtcaaatcctcttcaagggggaggggatgatgcaatcctcccttggaagnaccaatcactatagccatgagcaagaggctccaagagaattgngctagaagctgataagaaaggccctanggttctctgaacctcanggtagatntctatgcccacgagccaaggttggatccaattatctttgtacatattagactangatgtcattata

SEQ ID NO: 73062 - DNA, 457 bp, Glycine max
  unsure (1)..(457): unsure at all n locations
agcttctcccccaattntctataaatatttntagaagtgaagtagaaaggagttcagccccttatgcacttctctctttctcgaaataactgaggaaaattagttccgtgaagaaaatccaagccgaggcgcttccgtaacgtttccgtgagtgatttcgcgaaggttgtcgacccttcttcgacgttcttcattcgttcttcatcattcttcagtcttcaacgggtgagtacctcaaaccaagctttttaattcattctatgtacccgtggtggtccacatttggtttcatgtattattattctcgttatcatttactttttataccacctgttgacgcgctgttaccgtttatttaagccgttttctcacctaataaatgataaaatgaatttcaactgatcatttgtcgtgaatctcatttatcactgtaaaatgaaatctaccgatcgtcacc

SEQ ID NO: 73063 - DNA, 264 bp, Glycine max
  unsure (1)..(264): unsure at all n locations
atgagagagatggngggcggnggaattaaaagagattanggagagaagttgaactntgaaatgtgtctcataagtttctcattcatcaaagttgtgacaagtgttacacatgtttctatntatagcctaggccaataactaaatttgtgaatttcattntcatttcttgtgaatctaanagggaatattctagaatatgccaaatgcatcttagcatattctctttagatgccacaagcatggaaggtgtgactctagcacatg

SEQ ID NO: 73064 - DNA, 452 bp, Glycine max
  unsure (1)..(452): unsure at all n locations
agctgggaaggatgcatcaatggatgataagatagagggagagaaagagagaggagggagcacaaaattgaaggaataaaagagggagagaagtggaactttgaagtgtgtctcataagactttcattcatcaaagttacaacaagtgttacacatgcatctatttatagactaggtagcttccttgagaaactntcttgagaaaacttccttgagaagcttctntgagaaaacttccttgagaagctagagcttagctacacacactcctctcctaactaagctcacgtccttaagaatcttccttaagaagattcctaaagaagctagaacttagctacacacacctctctaatagctaagcttaactccttgagataaagaagtagagcttagctacacacccnctataatagctaagctcacccncatgaagcaatacatgaaaatac

SEQ ID NO: 73065 - DNA, 360 bp, Glycine max
  unsure (1)..(360): unsure at all n locations
gtgtacacttgttgtacatngatgaatgagagtcttgtgagacacaactcanagttcaaattctctccctttttcttccttgaatntcgtgctcccaccctctctctttctcttcctctttcttttcctccattgaagcatcctctccaagctctntatccaaggctcatcttggtggtgaagctccttattccatggcttattccctagtggatggcgcctcctctcacctcttctcctttgtcttccgctacatctccatggtgaaaaatcaccattaaaggacctcattgaagctcanagattcagcctncatagaagttccacaagcaagcttccatcaagtggtaatcagagcac

SEQ ID NO: 73066 - DNA, 426 bp, Glycine max
  unsure (1)..(426): unsure at all n locations
agcttcacacaatntactntttctatactaagttgtagaataccaattactaagtcctttgtaactagacaattgaggtggtgcatgtgtacatgtgcatccctacgaagcaatagacaaaaatcatcaatcttatattccaagcaactaagctcatgaaatgatgcatgttcaatattaagcatgtagatattacctatttttctacctatgtgaacaacctcactagtgtttgcttcacaaatgagacaacaattcttgttgaatgcaattgtgaagcctctgtcacatagttgacttatgctcagaagattgtgcttaagttcatcaacatataaaacattatttttatttgagtattgtgctaagttccaatattgtcttctcccacaatacttacttattggtgtctccaaaagtgacata

SEQ ID NO: 73067 - DNA, 294 bp, Glycine max
  unsure (1)..(294): unsure at all n locations
ttctgaagaaactnttctaacttacaaaatnttcttttcacttactcatgatgatgcatgatgcataaaagatatgatatggactaaaatgcaacatacaatataacaaccaatacaaattccatttaagagagttgtgcatgtaaaagacaaagcatcttcaagcttttctccaagcttcaagctttagtcctcatgttagttatgttgcttcccctatctctaacaaagatacattagccacaacatcattcttagccaaatcanatcccgaggagaagctggtcatatacc

SEQ ID NO: 73068 - DNA, 390 bp, Glycine max
cagaaagtagagttatttctgttatcttactgagagtgaatcatctaaattcttgagtgattcaagaacaccctgtctgtatcaaaggactatcacaacctctgtgtgttgccctcgctggaaagagtgattctttcctatctttcatcattacccttgttctttcacaccacaattccagacaatccacgcttgcccagaattatctcgaggccataactcccattctacagcactcagattaatgtgaattctcgagctctacaatgactttcaaaacgagactctttacctcgtttttggatcacctcacttagagccctgtagctacagatattgccatttctatatttctgtccaccaccacttatcctacattttaccattcca

SEQ ID NO: 73069 - DNA, 374 bp, Glycine max
  unsure (1)..(374): unsure at all n locations
gcctctggcacgaccatgagtgccgttctaatgcaacagggtaaacccgttgcgttcttcaacaagcaatttacacctaaacttcaacgtgcttcgaagtatgtgcaagaattgcacgccatgactaccgccatccgcaaatggcgacaatacctcctcggacacaaattcaccattttaacggattatcgcaacttgaaggagttgatgacacnaaatattctaacactagagcagcaatattatttggccaagcttttggggtacaattatacgatccagtttanaagtggccactctaacgtcattgcagactcactttctcacatcgaagtaccctttgagccaacatttcttgttctncttggcccaca

SEQ ID NO: 73070 - DNA, 106 bp, Glycine max
actgagcgagaaggctcgggtcattaatgactacgcatcttttatggcactaagcgaggatcagacaaacgagtccccaattctactgtttttaaaagactgcaac

SEQ ID NO: 73071 - DNA, 516 bp, Glycine max
  unsure (1)..(516): unsure at all n locations
agctngatccncgagcgcatcctngcatctttattggcttcaaatcacatactaagggatatgtagtttatgatttacacttgcataatattactttctcacgaaacattatattttatgaggatcactttctatttcttaatagtacacaaacttcggtacccactcacactgctccagctccgaaatcattttccggcaaccatctcaacccgattcctgagaccacaccaccccatcccatgaaccagacattatccgatcctgattcatcagttcacacttcacacccacagctttaccggtctacacgcacaaggcaagcctcgacatacctccaagactatcaccgtgatctcacttcactcactgccaatgcctntaccactgttcggtatcctcttaactcagtcttggcttattcttgtctttctccctcacatcttcattntgtcatgtctatatcgacaaccaccgaacctacctcttatgctgaagcctctcgtcatgactact

SEQ ID NO: 73072 - DNA, 494 bp, Glycine max
  unsure (1)..(494): unsure at all n locations
agcttgtatggtagaaggtgtagaacacccttatgatggttagagcccggngaagacctcaccttaggatctaaagtggtacaacaaaccaccgagaaggtaaagttgatctaggaaaggatgaggactgcacagagtangcaaaaaagttatcagtataagaggagaaaagacctagaattcgaggttggtgatcatgtattcttganagtcgctccgtggactggggttggtcgagcattgaaatcccaaaaactcacacctcgctttatgtggaagtaatgacttccaagattattttgatgatgccaaagaatcaaaagttaagcaagttccaaagaatcaggagtcaaaaagcttcaagaatcaagtttcaaagaatcaagattcaagaacaataaagtntcaagattcaatcaagttttaagaatcaagattcaagaacaatcaagatcaagattcaagactcaagattcaagagtcaagagaagatt

SEQ ID NO: 73073 - DNA, 368 bp, Glycine max
tggtactgctatttaataatttctctcaacctttctttgtaaactaatattctactttgtgcacatagcccatggcatgtaatttgtgacaaaatttatattcgttgactttataatcacaataaagttatttaaactagttataacatatactttaggtcttttttcaactatatcttatagttcatttacaacatttttttttagaacaatcaaaaatatttatgagactatgtattggtaagatgggtgatgctgacattgcatacttgattatttatcacacaaataatgatttaacataaaagattagaagaaagttgttaatgttaatgacatattataataataatcagggaaactctttc

SEQ ID NO: 73074 - DNA, 514 bp, Glycine max
  unsure (1)..(514): unsure at all n locations
ctcagagtcacctgcggcatgcaagctntctcaagaaagcttctcaaggaagctatctagtctatagatagaagcatgtgtaacacttgttgtaactntgatgaatgaaagtcttatgagacacacttcanagttccacttctctcccccttttattccttcaatttcgtgctccccttttctctctttcttttcctccattaaagcatcctcttcaagcttcttaaccaaggcacattcttggtggtgaagctccttcttccatggcttattccctagtggatggtgcctcccctctcctcttctccttttccttccgctgcatctccatggtggaaaattaccattgaaggacctcattgaaactcanagatccagcgtccatagaagctccacaagcaagcttccatcagatggccagggtgtgatctccactggctntgttgggtataaggaccctggtggaagcttgaanatcatccttgagtatatccttgtctctgtggattcccat

SEQ ID NO: 73075 - DNA, 266 bp, Glycine max
tcatacctctggagtattctcttgagaaagtagcctggcctgaagctcaactttcattggtgagacccaatgaggctgctcctcctgagcccgcaccaacacgggttgaaccaatgccaattgagccacgaactccaatggtgaatccacctccttctcctgagcttgaagtagttcccgcatctccacctctacttctcatcttcgatgcatcattagatgaagctgctgcccctcctgattcaccagctggagaaacagctgac

SEQ ID NO: 73076 - DNA, 444 bp, Glycine max
  unsure (1)..(444): unsure at all n locations
agcttctatataagctgacccatttatcaatttacacaagttgagtttattcagaaaattagagtttatctcttttatcttagtgagagtgattctcctaaattcttgagtgattcaagaacaccctggctgtatcaaaggactttcacaacctttgtgtgttgccctcgctggaaagagtgattctttccttcctttcatcttcacccttgttctttcaaaccacaattccagaaaatccacctctgcccagaattatctcgtggccataactcccattttacgcactcagattaagtgattcttgagcctaaatngactttcaaaacgagaacctttcacctcgtttggaatcacctcatttggagccctgtagcttcagttattgccatttctatatttctgtccagccaccacttaacctacattntaccatcccattca

SEQ ID NO: 73077 - DNA, 178 bp, Glycine max
attacgttcgactgttcctagagctaccgtgttcaatttctagcgtctcgatatattcaagggctcaatcggacatccgagtcaagagatattatcgtgtaacttctcttagagcttcagatttgcatcacgagcgtcttcatatattatggcactcaatcggacatccgagttaaaa

SEQ ID NO: 73078 - DNA, 462 bp, Glycine max
  unsure (1)..(462): unsure at all n locations
agcttcttatccaaggcacattcttggtggtgaagctccttcttccatggcttattccctagtggatggtgtctcccctctcctcttctcctttgcctttcgctgcatctccatggtggaaaatcaccattgaagaacctcattgaagctcaaagatccagcctccatagaagctccacaagcaagcttccatcatagagtctcttccagcttcgtggttcggtcatagagacttggcatctgctgttgtggccttgtagatgaaccaccctggtctctgttgaattggttaccagggtgattntgccactgtctctgctgttgatagtgttgattggtctgaaatcctggaaatacacttgtattgaaatttgccttgggctgattccccatatataattaacttcatgtacaaatttctcttcatttggatacaacatccagattcatgagctctaccac

SEQ ID NO: 73079 - DNA, 348 bp, Glycine max
  unsure (1)..(348): unsure at all n locations
ttatgacctctccagcaacagatacaaccctggatggaggaatcaccctgtcgcaacctacccttcngcgggagggcgacgcgagactcgcgggatgcgtgttccacgaaaggaatacgcgcggagtcgccaccaacgtttattngaggaaaacgtcggaaaaaccgaataagacgcgatctacgaacttttaagtgaaaggttcntggagttgtatntacgcacggngaaggtattagcaccccacacgtccgtcccaagggacgacagcctttaatcgaatgtgcannacatgactnntgattttacgtcccttttatgtccttatatnnncttatacccttttat

SEQ ID NO: 73080 - DNA, 448 bp, Glycine max
  unsure (1)..(448): unsure at all n locations
agcttcanactatgtctggccaatntgttgtacaggtatatgtgaaaataatattaaggatgacatttcctccttatttgaaaaattggttatttgtatagcatggcagtttcaagtcctgtcaattgcattcatattatactttagaggaatcaccaagcactacgtgcttcattntgatcgatttgtaagttgtaacattatttaaccgatgttaggggtcaaatggcccaaatttaatgagtaaattagcagatgaactgttgtgtttgaaattcacgccttgaatactggattgcacgttaataattgcagactctgggatgagatttgtggctaaattgtgcaaggttatnttgcanagcatttttaaggatattntggcactcatcatggttggtgccttggtgagaagagaacaatttattaaaatacactgacactcata

SEQ ID NO: 73081 - DNA, 328 bp, Glycine max
  unsure (1)..(328): unsure at all n locations
gggagatactaggtaagaattgaaatggtcaaagtaaatagcatacacatactatttctgtatatacacatactgtttttgtatatatgtgttntcaaaaaacataaaacaactgtaaatatggattaatctaataagtgtgtatgctgtaattccatgaatgaaagttgagtgcctaaaagaggcaagtattgnngtgagaatgaatgaaaataagtgaaggttatctatggatgaatgctctcctagaacctaagcttttgaatcctagaanaaccatgatntgttggcagcctaaccncattacaagcctagaaagtccttcgga

SEQ ID NO: 73082 - DNA, 427 bp, Glycine max
  unsure (1)..(427): unsure at all n locations
agcttatccgtgacanaatagaatntctttttcttagttntctagggactactcacatgctccatttgnggttctgtagtgtcctatagaccatgcacaagacagataggtcaagtgagcacaaattccaaaaataagctataattctcaattaagctcaatcatttgtctaagaccaaagctgagttaaggtgagaaaataagagtcaaagagaggtcaaataagctaagaagaataaaaaaaatactaaactaaaaatgctcaatcacacaaccaaaacccttatattcttcatcatctatttctgcatttcatcaaatgtttcttttttcttgaccttttcttttaatgttgtattttgttattacaatatatatatatatatatacaaatcattattcgggatgctcactgngaggatcttct

SEQ ID NO: 73083 - DNA, 391 bp, Glycine max
  unsure (1)..(391): unsure at all n locations
cttttcagatttctccattcttttcttgaaaattggacaatcaaccctcagatgtcctggttgattgcattcataacattttggagtagaggatgaatcttttgcccttttctttgatttgaaatatgttcttctttgatttcctctaactcttagaaatttgtngaatcaatttacaaanagactgagatcatcatcttcgtctattttatttgaatcctctttatcacgtccttcttggattgagaatgaagcttagaagcattcctttcttttttaccattctcctcatgctgattcaatctcattaattccatttcatgtcctgaacttccaaaccaagagcaaaaacatgtagaaagaccttgattcatatggcgtaccttggtgc

SEQ ID NO: 73084 - DNA, 514 bp, Glycine max
  unsure (1)..(514): unsure at all n locations
agctnganagatggaaagagtccaaggtatgttacaagacacnaattttaaatttctaaacttttaaggacttcacattggataatgaatcatctccaaagttgataccaatatggaaatcctgtaccaccacagcttctgattgataactcttttcaatctgggtcataaaaccatacagttcaataattagatgagaaaatggacatcggaacattntaagaatctatactgaagaaacctaaagataatatgctactccatttacctttaagaaaacaagcaaacctcacatgccagtgttaaatgtatcacacacaatgtttcctggcctatttccgtgcccaaattttgtttttgatcaataatttgaaaaccttgaagtccaataattgaagttggatatcattttcttcagatatccacgtgtctattaggtgggttgaagcgtgcctacaaaatagaattcaaggaacttaagttattgtanaatataccattgtaagatctatga

SEQ ID NO: 73085 - DNA, 412 bp, Glycine max
  unsure (1)..(412): unsure at all n locations
ttgcttgaccacaacagcgctggaggcggtaagggacaatggtatttcaaataaacctgttgtacatgaacaaacattatatcatgcgctgaccgtgccaaacgaaccagcgaagtcattgcataattgttatactaactatattcaatgtacctgaacaaaatgatttccaaacacgtgaccgacacatatgatgcngtggccagaagaatcangtggtggttgacttctaagagggaaaaatgtcatgctntgttgtcgggacaacgatacaaggattacgttataccgtgaagcaatgacatatcccatgtctgttatatccatccactttgtcacattaacctgaatgaaccanacatacacantgtagtaattanacattgtatttaaaaaaataacctanaacata

SEQ ID NO: 73086 - DNA, 373 bp, Glycine max
  unsure (1)..(373): unsure at all n locations
ctcgaccggatcttaagcaccgcggctgcagctttaaaataaggttaaatatttctaagtgtntagtggccctctctatttccacttcacaatgaatacatataagttatctttattatttttacttgcatgataaatgtgtaaattaattaacaactaagataagaataacaagtgtaattgacaaattaatattattntaaactgtaaaaatgacaaataaatacatttttttcaagaaaaaaaaaagataaagaaacttgacacttgagaagaacagagggaaacaatatgctgtcccctttattccaaagtatccaaaccagcttatgctcaatgatgcatggaatagatatataagccaaatacagag

SEQ ID NO: 73087 - DNA, 324 bp, Glycine max
  unsure (1)..(324): unsure at all n locations
atatttctcaatcaattatcaattactttaggccttaccaccaggtggtacaattgcaagagccatggcattgctttcctccagttccatagcttttggatctatttcattaagaccctacaaaggtggacaaatgcatattgtatcaagccaacgtcgcaaacatgcatacaaaacattgtttataaccaacacataccagcanatcatttgtaccatcatcagttgatatcaaaggaggaggctctacctnctnctccttagggttgtcttcttcctctctcactgactcttnctcattgacttcttcaactatgtcttcat

SEQ ID NO: 73088 - DNA, 442 bp, Glycine max
  unsure (1)..(442): unsure at all n locations
cttttcactcggatgtccgaatcaggtgaataatatatcgagacactcganagtgaacaccggaagctatcgagaaattcanatggtcattagttntcactcaggtatccgattcaggcgcataatatatcgagacgctcgaaattgaacaacagaagctctcgagaaattcaaattgtcctcacttttcacttagatgtccgattcaggcccataacatatcgagacgctcgaaattgaacaacggaagctatcgagaaatccaaatggtcataacttttcacacggatgtcagattccgggacataatatatctagatgctcaaaatngaacaacggaagctctcgagacattcaaatggcataactctcactcagatgtcgatcaggcaatatatatcagatcacaaattgggtacatcctctcaaaatcaatggcata

SEQ ID NO: 73089 - DNA, 464 bp, Glycine max
  unsure (1)..(464): unsure at all n locations
gtcacctgcngcatgcaagcttaaaccacagtctcatggccattggttctctcattcataagtgtgtaagtattcattaataacaactagcaagaggtccaatctttgcacttcatctcatgccataaagtaaaaaatgtataacagaatcagaaggactttcctaagcttgtagtgaggcttggctacaaaaaatcataggtttttttctatgattcaaaggcttagattctaagagagcacaaatcctagacttatctaagtgatctttntaatacaattagcttgctcactagcttttcactttcatttgcttttgaccttattacatcagcacacatttccttngattgctttctttttctttcttctcttcttcttttctctatnttatataacacaacttatgtgttatgtgtgctgatgctttatctctttctttgcatcccaattagttccactcc

SEQ ID NO: 73090 - DNA, 336 bp, Glycine max
  unsure (1)..(336): unsure at all n locations
actcctcaagatgtngctgtatactgtgtgtggaaggtcaaattggaggttntccatcaagtgaaacagtataaacttgtggagattagagaaggttgtcttaaagccagctttgtgaagcacactcttattcagaatgttggctagtatttttgccttcttacacatcaggttgtagatgatagtcttctgatcgctagccttgtcagcattgtctttgtagagagctttagtgacgtgtgagtcatagttcttctcctaaccctcttggtaagtgttgtcctctcgctttagcaatggtgtcattggatagtacgacctttactcccaaaacct

SEQ ID NO: 73091 - DNA, 511 bp, Glycine max
  unsure (1)..(511): unsure at all n locations
agctttatatntataatcttcaccaagaacatattatattatgaagagtcttanaattggttgactctttcatttataaagtttgtatttgatcttaaataagattgtaataagagaaatgttgacagtgttgatgcattggcataaggcggaaatatgcaatgtagcttgatatattttaagaatcaaaacaaatgtatgtaattnttttaaatctcaganaaaatttgtatagatttcagaaaaagagaaaatatgtataattttttaaaatctcaagagagatttatgtgactntaatctttattatacatatcatggagttgaattctgataggagaacaataccaaaaccttaaaagtacttaaagaactgcacctaaattntatccttttctacttttctctcataaactatgcaggacatctcactttcttgagaggcaaataaccaagaccgaaacacattattgtaattgtaacgacgttgatgtcctatttgtttatgctc

SEQ ID NO: 73092 - DNA, 451 bp, Glycine max
  unsure (1)..(451): unsure at all n locations
ctcagctattcttatggcatangtacattattttgatacctttatttggtcctgcataagctctggctttgnntatctttattcatacatatattggtttgttgactacgaatcttgggtattatgtgtggcaccaattatttttttatatatatatatatatatatctcaagtttaaccttttctgatccttggtattattggattgaataactgcnattagtttaaggctgaagagtactcattatgttgtacatcattaaataaaacttggggtgttgaatagttattttgatctggaatgctgcgtcaactgctcaaactttactgaaagtatttgtaaaaaaataagcaaacnaaatgtcttacttaaattgttgctctaaattataatcatattatctaggatgtgttctgtctatactctagatatgctataattactaattaa

SEQ ID NO: 73093 - DNA, 532 bp, Glycine max
  unsure (1)..(532): unsure at all n locations
gtcacctgcggcatgaagcttacataagctcttccaatgacatgatttggttactggtagtttatgttaggaaaaaacccattacctttacttctttatgatttccattttagctacaacatttacaaagatcaagataaaaattatagatactcttcattccaccatttgcaatcttacaataaactcaacttatatgaacaagataatgaggtttgaaattgaactcgacagtgcacagcaatcaaaacactttctaacaagtcccatgatctttattgttatggctccctgaatcacttgttacacataagtttgaaattggccaagttttactaagttgactcaattccaattgcangatgatgcaaaaggccattccaacattcttctttatagattccctaggagtctacgactntttatcaacaaatgttaatcgttagttgggttagttatttgggtagcagagatatcgaacctatgatattntccttctttcttaaccagcaagtcaaccatatatctctga

SEQ ID NO: 73094 - DNA, 436 bp, Glycine max
actcaagcctgacaagagattaattgtgttgcatcgagtgtaagattcctctactctcatatcttataacaatcattcaattagtcatgtcatcctatcaattaaaaatgcattctatatatcaatagagctaggtctaataaatgaggatagtctagatctcctaattacaattaatcacaatgtggtaaactaagacttgaaattttatctattcaggtataactatgttttaaatatgatagtctttgaaagagaatattcgaagaaaactaaaaaaatatgagtttcaataataataatacagacgtgagcagagaacttgagcatgcatattctaatactgatatccaatattaataaacatgtcgcttaatatatatatatatatatatatatatatatatatatatatctagagagagagagagagaga

SEQ ID NO: 73095 - DNA, 464 bp, Glycine max
  unsure (1)..(464): unsure at all n locations
agcttatgctgcaagtatnacaatagaccttctcattctcatcagcaaaatcaaccacagcagaacaattatgacctctccagcaacagatacaaccctggatggaggaatcaccctaacctcagatggtccagccctcagcaacaacaacagcagcctgctccttccttccaaaatgttgttggcccaagcagaccatacattcctccaccaatccaacaacagcaacaaccccagaaacagccaacagttgaggcccctccacaatcttccctcgaagaacttgtgaggcaaatgactatgcagaacatgcagtttcagcaagagaccagagcctccattcagagcttaaccaattagatgggttaatnggctacccaattgaatcaacaacagtcccagaattctgacaagctgccttctcaagctgtccaaaatcccaaatatgtcagtgccatttcatt

SEQ ID NO: 73096 - DNA, 345 bp, Glycine max
  unsure (1)..(345): unsure at all n locations
tgtgaatgtatgtatacatgattntgatgatgtcaaaagaagaatcaaacaaggctcattttgcttcaagaataatacaagattgtttcaacaaacaaagccttgattcaagatttcttcaagatcaagccttgcctcacaatgaaaggtttcaagtcattcaaggcacatgtaatcgattaccaatacatgtaatcgattaccaatggtttgaaagtgtgtaatccattacacatcatatgtaatcgattaccagagactctgaacagtgggaattcaaattttatatgaaagggtacaactggtcaagaaaaacaactgtgtaatcgattacacttattctgt

SEQ ID NO: 73097 - DNA, 396 bp, Glycine max
  unsure (1)..(396): unsure at all n locations
agcnnttgttggagcttcaatggagaattaggtatcatagaaagcaacgtgagggagagggagagaaagagctgtctgaaatttgtgctgagtgaagagagagagagttgctttttagattttaaaggctttttcctcttttattattattttatttaagctatgccgcatgtctccatttgagtggagcaaaaagggcccactttctcttttgattgcgatccatactcagccacaaaaagtgagaaaaatctgaccttagaaacgctaaaatcctgcctcggtttgggtgccgttactctgataccagttcctcgcgtttctctgcgtgcgtcggggccagttntcgaaagtaactaatatatatatcanaacgcttagaataaaaccccgagc

SEQ ID NO: 73098 - DNA, 391 bp, Glycine max
  unsure (1)..(391): unsure at all n locations
attttaaatattctctttcagagccacacttggtgatagatattccatgctatctcattgtagattgaatatccaattattagaacaccattaatcgtgtagtttatagtagccttccacaccaatagacgaatcttatgtacccactgattatttanagatctgacactcatgtagcatcattagctttttcctactatgttcatttgcaggacaccatagaagtgccttttnttttttaccacgaacaatgggcaccggaatatcctgaatnggtccagttcagatgtgatggagcgacgtaccaaatacgagtatgacaacatcagggaatagtcttctgtgctgaaggactaagacaactcacaaaagaagtatgaatctatcacca

SEQ ID NO: 73099 - DNA, 374 bp, Glycine max
  unsure (1)..(374): unsure at all n locations
gtattacagttataattagttaggagtagttacaacattagttagttagctttacaactttgtataaaaactcattttctgtactttgtacaaaccaatctcaatgaatactcttcttaataatatgtgaccttaatgagttggccatcttttgaatgatgtttgatacatgtcatccagcgaagaaatatgtctaatgaatcaatctctggttntcgaacttcttattggtcaaatatgctagctgtactctcataatgtcatgtgaacagaatacgctntatactttaaatataaaataacatccaatattcaaatattgtacacaacacttatactataactattaaaacaataatactatgatattacac

SEQ ID NO: 73100 - DNA, 445 bp, Glycine max
  unsure (1)..(445): unsure at all n locations
agcttatagttattggagggagaataattcatttctaatcaatggtacctttcaagtaacgaagaattctntttgcggctnttagatgaggagaggtaggagcctccataaagcgacacacaactcccaccgcatatagaatatcgggccttgtattggttagataccttaaactccccacaagactcttgaagatcgtggagtctaccttctctccttcatcaaactttgataacttcaagccaccttccataggtgtgttcacgggattgcaatcaagcatattaaatatcttcaacacttcttgtgtgtacctttcttgtgagacaaagataccattctccgtatgcttcacttccattcccaagtaatatgacatgagtcccatatctgtcatatcanattcacgagacatggactccttgaagtcttcanaccaaattgg

SEQ ID NO: 73101 - DNA, 339 bp, Glycine max
  unsure (1)..(339): unsure at all n locations
gcctcttacgcacttctctctctctcgatattgctgatgaaaattatttccgtgaagaatatccaagccgaggcgcttccgtaacgtttccgtgagatattacgcgaagattctcgaccgttcttcaagattcatccttcgttcgttcgtttcgtcagtcttcaacgggtaagtatcctcaaccgagctcntcaagtcattctatgtacccgtggtggccacattttgttcatgtattgtattctcgtatcatttgctgttatatcacctttgacgtcttaagccatttatttagtcatttctcgcttaatctagaaataaaataaagttccaccgata

SEQ ID NO: 73102 - DNA, 456 bp, Glycine max
  unsure (1)..(456): unsure at all n locations
agcttgaaggtgcgtagcccaccattttcatattagatatactggaatgtgtctactatcattgtcatcgntttttcgtcattgaggcgccacttgagctgccaggttctccacctttgggcatattctttgaaagatccgtgcccccttttttgcacatatttggtagttgcatcctatccgaagccattataccgacactgcctaacgaaggcaaccattaggtcctcccaggaatggactcgggaaggttccaagttagtgtaccagataacaactaccccagtaagactntcttggaaggaatgtatcaacaattcctcatcttttgcgtatgcccncatgttccgacaatacatctttagatggttcttggggcaagtaatccccttgtacttgtcaaaatccaacaccttgaacttgggaggggtgatgatattgggttctaggaacaac

SEQ ID NO: 73103 - DNA, 457 bp, Glycine max
  unsure (1)..(457): unsure at all n locations
gtgcacaacaagtnttccacatccacaaagcgcgcataaacccaccatcctctggtgcccacctccaactgagctcacgtactcccacgtagcccataacctcgtttctctcaacaccgggtccccatcaatcctcccaagcttccccaacatcaaagtaaatcaacattcaaacagcacaaattaccacagccaagaaaacagggcaaaggcagaatactctgcccataacaccaaccaaaatcacagctnttctcacttaaagaccccagtaacaattccttcgatccaattcgttaaccggtggatcgactccaaaantttaactggaagtctatagtacataagcctacatttggaccggtnggatctactagcanacatncagaactcattctgactactctntcacagcaaccaccacaagcatttctgacaagccaaatctgtgacctat

SEQ ID NO: 73104 - DNA, 415 bp, Glycine max
  unsure (1)..(415): unsure at all n locations
agctngaaggcaaactggatgcattggttacttgttaacccagctggcctcgaatcagaaatctgctacctgtgcaagggtttgtggtttgtgctcctctgttgaccaccatacagacctttgcccttccatgcagcaacctggagcaattgagcagcctgaagcttattgctgcaaatatttacaatagacctcctcaacctcagcagcaaaatcaaccacagcagaacaattatgacctttccagcaacagatacaaccctggatggaggaatcaccctaacctcagatggtccagccctcagcaacaacaacagcagcctgctccttccttcaaaatgctgctggcccaagcagaccatacattccttcaccaatccaacaacaacaacaaccccagaaaacaaccaacagt

SEQ ID NO: 73105 - DNA, 334 bp, Glycine max
  unsure (1)..(334): unsure at all n locations
ctctgagggggccttgatactcgctaacatggacgacgagaatactgctttgcagtaaactcggatgatcgcaaaagatattatgcctagagcggcactaanatagccatttcattcgcatgtataggttgatagcacttgaccaagaagggcctaataaaatgagtatctgttctttttctccactgatagcgatagtctttgtattcttaaaatgtttacttcttggatcatgggggtgtcacgagcgcgaacttaaggaaataaccaaagtaatgacatgcgcatgcatntgcattctttttatcttgtaggacctacagtaatgttgcat

SEQ ID NO: 73106 - DNA, 257 bp, Glycine max
cgagaactcactcattgacgaacgaataacggatgaagaacggcgatgaatgatcgaaaactctcacggatttgctttctgaaacatcagagaagcgtcaccgaagcacctcatcttggattatcttcacacaaacaattctcttcacctaaagcatgtgaaatacatgcccagggtgctccgggatcctaataacatcccccttgatcctatttataggacaaaagggaggatgttgccgtccaactctcccagac

SEQ ID NO: 73107 - DNA, 387 bp, Glycine max
  unsure (1)..(387): unsure at all n locations
tttaactttgactttcatctcaagttaatcaacacatcaaatgcatgtagggatcactaaggactatcttggcttgtaatgaggcttggctaacaaggaaaattggtttttctagatattcaaaagtaactcataggaaagacaacatttagtctattcattgtatcttcattcacttcctaccaatgcttggacccctaagtttcatctagagcatactntactgtnagataggggagcacatatatcagcttgaaagtttgttttcacatcctaactatgaggcactgattagtgtgattagctatcatcatggacatatcatatcatgtagaagaaatgtgtaacgaaactctaggcatatcttttaacattgactattgaaca

SEQ ID NO: 73108 - DNA, 442 bp, Glycine max
  unsure (1)..(442): unsure at all n locations
ggaccttaagncacctgagctgcagctgcatctactatgggtgnctaaattatgattctagaagagagnccaaaccaaatgtgcccctcgacaattcaagtggggaactaaaccagcagtactacgaacactgtcaacaaaatgagacctaccttcatctttctaagaagaagcaacaagactgattcttaaatataaactcccctaataaacaaagccatgcgtagttagaaacaagaagttgataattgtccattacgtgttgatagacatactaaaaccattaaataagggcatgtctaatcagtgacgtgcatcctaatagaaagtattcacatcagtcaactagttcatggtatacgatgtaacaacaanggtattagcttatgatagaagcaagattcagaacaagatacaaacacactcttccgctctttttctt

SEQ ID NO: 73109 - DNA, 287 bp, Glycine max
  unsure (1)..(287): unsure at all n locations
gcatcaatcattgaaatttagaatgaaatgtatgaatgaggacatgatgaaggccatgattgtatatacaaggcaattgaccaaaaagcttaccttgaatgataattgtatcccttgcaccctttgtgagctaaattacattttcaaaattgaaccctgaacttgaatgaatatctccagataccttgtntagattctatgagagcagatagttcaaggcannattacccanattngtgggaagttgatgngatgtaaagtaaagggtaagcatcaacacacacaac

SEQ ID NO: 73110 - DNA, 492 bp, Glycine max
  unsure (1)..(492): unsure at all n locations
agcttcatacaattaatatagaacctatatcctaatgtcagatcctatcagagcgttgtgttcccgtgtcctctagcatgaggttcttcataatcatccacctattcatctgctcccctgaacacaagttcaagatcatcacaggatccaaacacaacacacagggagtgagttatcacattcctaactaatagagaaacaagacaattaaatatacatattatataaatgagataccacttgcttaaacatagctcacgtaacttcaccactttgtcattcaaaattcacttttcaatcatcaatcacattacacaagaatcccacacttcggtcaagatataataacacatcaattagcaagcatatgcaacagttatgctaagactcaatcctatatgcaatgtggtaccatgtcagtgaaaaaccaccctgcggcgcttatgagtacataacaagacacaccacaccatgggnttgcanggcactctc

SEQ ID NO: 73111 - DNA, 356 bp, Glycine max
  unsure (1)..(356): unsure at all n locations
cttcttctagtaattctgacttaccgcagcctcttatccctcttccattccaaccttgagcaattccaaacaaaataaatggaagaagcagaaaaggagatcttggagaccttcaggatagtagaggtgaacatacctctgctagatgccatcaagcagattccaagatgtgtcaagtntctaaaggagttgtgcacccacaaaaggaagctcataggcaatgaaaggattagcatgggcagaaatgtgtcagcattgataggtaaatatgttccttacattcctgagaaatgtaaggacccatgtactttctgtataccttgcattattgngaacagtanatntgataatacaat

SEQ ID NO: 73112 - DNA, 503 bp, Glycine max
  unsure (1)..(503): unsure at all n locations
agctntagtcaaacagaataatccgaacatgtcattgtattgtgtgttgtaaaagcataacaagactgtctgtgattggtttaaagatacaatctctgcagatgagaatgcttcaaaaacattaagaaagctagcaaatgagcctaaaagaaatgttataacctggcaaggatacgacataaacaggtattcattgtacacaaaagaacaagatgacaaaagtacaatgcagaacagcggggtcaccctaaggtctgaatctcaacactttgcaagtgtgaatgatgccaatccctgtgtagcttccatcccttactttgggttcattgatgaaatatgggagcttaactatgtgaaatttacggtatgtgttttcaaatgtaaatgggttgacagcaacaccggtgtgcgcactgatgatatangacttacgttggtagacctatagaaacttggttaccacaatgaccctttcatcatggcagaacaagctatacaagtat

SEQ ID NO: 73113 - DNA, 394 bp, Glycine max
  unsure (1)..(394): unsure at all n locations
tctaaatcgtggtaatgtgctctatatatggcgcaatttggtttggttcttgctagatctagttgagttagaggtttgtaggggatggccctangcctataatgcattntgatacaatgggacatgctacattgtccccgttcccttgctattgatgccttaacgcgcgcccaccaagtgtcggtgaaatgcctaatggattagcgtgcacttttgtaaggaacaaccatgggtattctggttgacatagttctatcttgaacatgattcattccaaaaagcttagtaatgccactatatcacgctaaactaaatttatcaaacaatcaaggagggctttggtagtaccttttgccacatactatggaacttatatttctatccagtgatagat

SEQ ID NO: 73114 - DNA, 500 bp, Glycine max
  unsure (1)..(500): unsure at all n locations
agctntacagcagaatttagtaatgacccactatcctataattaaaataacttaatgccattaacctaaggaattaaaataacttaatggctgagtgtaactgaaattgtggcaaccaaaagtcacccccaacagccaacaagtcaaccaccatttggtctcccaaaaggctgatgcctaggttgccaattgggcccttattacaacttgaactaaacctaactaaagcccttttagttgattaacccaaaacatatttttggtcagccaactttacaaggattgggccattatttagacaaactaaacactctaaaattgaaacaaagtggtgtcatttagtcctcctccatttgggccatgatacaactcacaaccttggacttttctccttgaaacttgggcttgtattcaaatagtatggacaacacttgttgaagagcttccttggctttccttgctctagcccttgtcgtagggtcctcaagtcttcaagtgga

SEQ ID NO: 73115 - DNA, 497 bp, Glycine max
  unsure (1)..(497): unsure at all n locations
gattcaagatattgtgtgcatgctgccctcaccaccagatntctgagcaacttcttcttcaatatttctatgagggacttagcaacatggagaggagtatgattgatgctgacagtggtggagctcttggtgatatgacccctgctgaggctaggaatttgattgagaagatggcttccaactccctacaattcagtgcatganatgatgttattgtccttagaggagtctatgaggtggccacaaattcatcttcatctacagaaaataaaaagcttgaaggaaaacttgatgccttggtcaacctagtaactcagtttgccatgaatcanaaatctacacctgttgcaagagtctgtggtctatgttcttctgcagatcaccatacagatctttgtccttctttgcagcaatctggagtcaatgagcaacctgaagcttatgttgcaaatatttataatagactccctcagcagcanaacaaacaacagcataat

SEQ ID NO: 73116 - DNA, 212 bp, Glycine max
  unsure (1)..(212): unsure at all n locations
tagtgagtataatgtaagtgccactttcaatgtgtctgatctatctctttntgatgcagatggcggagccttggatttgaggacaaatccttttcaagaaggagggagtgatgaggacataaccaaggaccatgaagcacttgaaggtcccatgaccagaggcagacttaaacaagcccaacacgtcatagagacaaggctggtcatttgta

SEQ ID NO: 73117 - DNA, 521 bp, Glycine max
  unsure (1)..(521): unsure at all n locations
agctngcatcttactatagggttntctataatttatgactcttagatagagagtttcaaaccaaatgtgcccctcgacaatccaagtggggaactaaaccagcagtactacgaacactttcaacaaaatgagacctaccttcatctttctaagaagaagcaacaagactgattttaaaatataaactcccctaanaaacaaagccatgcgttgtttagaaacaagtagttgttcaattgtccaatacggattaaaagacatacaaaaaccatcaaataagggcagttctaatcagtgacgttcatcctaataganagtattcacatcagtcaactagttcatggtataagaattaacaacaaggttntcagcttatgatagaagcaagattcagaacaagagacaaacaccattttccgctctatttctttcagttagtaaggcaactacttcctttcaactatggcntctcttacctatctatctagatagcatagcttcatccaataaagtcataatat

SEQ ID NO: 73118 - DNA, 358 bp, Glycine max
  unsure (1)..(358): unsure at all n locations
atatattactcaccaacagaagtacttcataatgaggctagctcctctgttgatgtcttttgttctctggtgttggtgaaacattatgaagctgtaacaccatacacaatatacgttgtatgtaatggtcttcaagactgatcttgttgagatttctggctcatagactaacaacatatggcaacttggtttgccggatagcattgacttgtcccactacaatntatcagaggagattcctaagctatagctcattgtnagtctaagagcctctacttaccaaagctgtttgacacacataccttctggattctaagtgccagatctgtgcaacttatactttactgacattattgta

SEQ ID NO: 73119 - DNA, 323 bp, Glycine max
  unsure (1)..(323): unsure at all n locations
acagaatccctagttcttatatgcatacattgtagacacatacactgacatatgtaataccaagcaccaacgctcattattaatttattcgcaaccttgtgaaacacgcgagagggtacttgtcttatcacagcgatataataatatatttcaagatagataaaccatcataggctcagaaatanaggagatggggtagatgtaactggatatggagttgcgactcgcaatgacttattattgcttcatgtctaacgacaacaagcttcttgaaacatgtcatagcagcttattgcaagtcgtaattatacaaaagctagtta

SEQ ID NO: 73120 - DNA, 397 bp, Glycine max
cttcaactagctcataatggattaagtttcacatgtatataattgtaatgatgaagtaaataataatttctagtataaccatgtttatactactcattggctttctttgtttaaactatcttttatactttgaataatggtttaaattctttatgataaatgcgtgggaacatgattgggaatagagtagagagctgttatcttggagcaactcatatagtatccaatagataataaactgattgatatttgataaagaatttatataatgattggtttattacatgttattggaaaatgttcaccttatatctatacatgaagtcaatttgctatctattattcagtgtatgtattaaagacttactacttatttgctaaaagtgtcacttttcaa

SEQ ID NO: 73121 - DNA, 500 bp, Glycine max
  unsure (1)..(500): unsure at all n locations
agcttgtcatntatgggacctacctagttttgtttatttcctttntctaggggtctcaagtgtttacatcctttctctctctttcttatcttctctttgtgacatatcataaaggatatttttctctttcatttatatggctctatctttcttattcttctctacgttctcctatgtttccgccgttggagcacgacaatgattctggcaaaacggatccggcaatgtcgttggttataataagatcgaagatcttcagtttttcactaataaaatactaccattagtctccacaatccgcaacgccgttgtcgttatgcaccaaatgatatagaaactacaaagaaacttacaaatgttgaacaagtcatgcagcaagattggcccggcttcctcatttattaaccataccaaacaagcaacatgaagaggatattctaaccgattaatactggtagagtatctattaatctatgcatgagaattctacgttgaattat

SEQ ID NO: 73122 - DNA, 338 bp, Glycine max
  unsure (1)..(338): unsure at all n locations
tggtgaactgtcacattatctacaactatgcacaactgaccaacatgtgtaggatctttgacaaggatcaatggaagaaggtcgcattctacaggaatgccaatgctagtcaagggaaagagaagaagcctgtaactcacagtcatgctaaattgtattatgcccctcctgagaaatatggaaacccttttggnggacagaggactgcaggattctagcccttcagtggaggacttcactccactagtgtgagttctcagccagttaacatgatgtctcagcctattggtagatgtagcggtggtggtggtgctcctgcaactgtntctacatcactc

SEQ ID NO: 73123 - DNA, 484 bp, Glycine max
  unsure (1)..(484): unsure at all n locations
agctnttcattaaaataaaattaatttactattccatcactaggctngcaaggtttgaataatttacatgaggtcttatgttcaaattctattattgttttttttaactgaaaaaagatattattaatcaatataagagaccaaagattagcacaagatgtgattaattgagttaattcactaatttgattgacgaaggggagttaattaatttattatactagttgaattcgacaaaactatgataattgacgagtgngagttaattaatttattatactagttgaattcgacaaaactatgataagaataaagttgtatattcttaaaataaaaaagataagataaaatcatatatttttatatttatattatcttacaataaaaattaatttcaatccaagatacacattnttatctttntaagtgtcagaatacatgtctntatacacttattgtcagagtttcagatacagcattttat

SEQ ID NO: 73124 - DNA, 400 bp, Glycine max
  unsure (1)..(400): unsure at all n locations
caatatagtgggtgctagctcccaagaaagttatttcataaaataatgagtcaaactaaatatgtaccatgcaatatgcatggaacaagtntatatacatgaaatagctaatcattaattntattggattaatgccaattatatacagtgaaattattttggtttatttaattattgattntttgatngatgactanatcattttactggatccggaattcatctttgtacttttgctaaatccaaaccccttttcttttcaacattgttcttttattaagtaagagtgtggataatattcttctcctagtcccacaagaaccggaataataagatggtcccagggaatcaatgcctacaatattagaggcatagacatgatgggaaatgggactataca

SEQ ID NO: 73125 - DNA, 428 bp, Glycine max
  unsure (1)..(428): unsure at all n locations
tctagcttctcaaggaagtnttctcaaagaagcttctcaagggaagtttctcaagaaagcttctcaaggaagctacctagtctataaatagaagcatgtgaacacttgttgaactntgatgaatgagagtcttgngagacacaactcaaagttcaacttctctccctcttttattcctttcaattttgtaacacaaaggcctntcattggaagtaatgttggagcctccgctaggtcaccctacttccatttgtgtgtaataattttacgcaatcttcccttacgatagtgagtgtgttgtgggaacctaanttatgtcatcattgtcaaccgctagatgcattcttgcctctaattctgctacttcatagctattctatacctcattgtcaccgctaatagctgctatacaatagtttacctgcttc

SEQ ID NO: 73126 - DNA, 520 bp, Glycine max
  unsure (1)..(520): unsure at all n locations
agcttangggttcaagtcaatcaatcaattttatctatcatgggtgcaagggataaatcattcatgaacagggtaagctctttggctaagtggttattccaatcaatcatggcctgcatcatcttcaaactcatgcattcattcagtaataagagattcatgcaaaaatcgatacccaatgctagtcgttctcacatagttaaagatcacatactcaccaggttgtggctaatgattaccttcataatttatctgtcaaaccaactaacatttttagtcatatccctaattcatgttctttctcttctaattactgcatactcattcaaagcaagtgatcaacgcatcacaattcactcaatccatgcaatcgatcggttcaaatcattcaacaacacanaattntcanatcanacaaccactgcataatcaatcaaaattgtaaactgttcacaagctatanagtttactaaataattaaataactatactaaatttgaaattaaaactgaatataaat

SEQ ID NO: 73127 - DNA, 387 bp, Glycine max
  unsure (1)..(387): unsure at all n locations
aacacaccaaatgattatgatgatggatggctcannatttcacataggtaaaatcatcactttcaaattgagctttcaaaactatcatgacatgtagagaagaatcaaggatntcaagtcacaaaatgtcaagaacctttattntcataacaattacccattttcttgaacatatcctatattcatagaaaaacatgcatagtcgtacgtgtacacaaaattgacccaaaatattaaactataaatccgacgaaactaacaacattaacatattaacacaactaacatattaaccaaaccaacgaaactatgaaaaccatagaacactcccctcccccatacttagacaacacattgtctctcatgtacacaataaaagattaaaac

SEQ ID NO: 73128 - DNA, 430 bp, Glycine max
  unsure (1)..(430): unsure at all n locations
acctgaggcatgcagcttctcgctatgttganacactcncaataatttattgttgtctgctcaaccataaagggctcccacacaatactcattgcccgtacaatcttgtcctgccgccaactccaatcccagcataagcgccattccgggaaggaatataccagtgaagaagcttgtggaattcacctcgatcccgatgccatatgctgacctactaccgtccttgatcaccaaccagatggcagtggtgaatcctttacaagatctaccagtctcccttgcctcgatggtacaaccccaatgcagctagtacctatcatgagggtgtaccggggcattctatatatcaatgtgtggctatcagacacaatgtttatagtttgatttgtgtgaggcagtcgactattcaagaggacaacctcaatgtcac

SEQ ID NO: 73129 - DNA, 289 bp, Glycine max
tttttgtacgacccacaactttctataaaattgtgtggtgggcggactccaattatgtaaacatctagctttataaatcatccagtctataatattcatattatgttgatcaaccttcacaaatgaacaatctattatgtccatattaaagatcaatatttatcttactacttcatcttatgctcatatattataaatggcaggaatgaaagcgacggtgaatacttgcaatttcttctcctgcagacgcggcgcaagttctgatgatgaacgactatgcgcacctttt

SEQ ID NO: 73130 - DNA, 514 bp, Glycine max
  unsure (1)..(514): unsure at all n locations
agctntatagaaactaaacaaatgttntcaatttcttgaaagagaagatgaggatctcaagaaaattcatcaagctcatttagttgattntatcctggaaaccacttcactgggtgatgtacaagacacctttgtttgtaggaggtcaaggcattactagacgaaaaggtatccagtggacgataaattcttcttaaggattttcaagacttagaagaaaggttgaaatccttaaccatgactcttgaaaattcagaagtagaacacaaggaaccccacagacaaatctagtcatggtttcaaaggcaaaaaggttgtgcatggtgaagaaagttactattgttatttctatggaaaggtgggtcatgagactcataaatgcaaggacttctctaaaagggcaacccatcaaagggttcgttcaatgcttaccaacacccatgagctaacaaggaaaaaggacccanaaagattatgtacctaaaagtaaacaattatgttgagatcttttgta

SEQ ID NO: 73131 - DNA, 177 bp, Glycine max
  unsure (1)..(177): unsure at all n locations
gtggacctggagatatgtncgcggggtcaggagacacttgggacgtcaggtggggtgctattgcccaaaaccaagcttgaccaatcccgacccaacccgggcatagtcggtcagtgagaacctgtgatgtacctaagcaggcgagctcctggcagtcaacagataaaaggaaaacaa

SEQ ID NO: 73132 - DNA, 413 bp, Glycine max
gggcgatggtgcacaacaagttttccacatgcacaaagcgcgcatacacccaccatccgctggtgcccacctccatctgagctcacgtactcccacgtagaccatatcctcgtttctctcaacaccgggtccccatcaatcctctcaagctttcacaacatccaagcaaaacaacattcataccgcacaagctatcacagccgagcaaaacagagcaaaggcagaaaactctgctcaacacatcaaccataatcacagcttttgtcacttaaagaccacagtaacaattccttctatccaattcgttaaccgttggatcgactccagaattttactggaagtctatagtgcataagcctacattttgaccgttgggatctactagcaaacatgcagaactcattctacattac

SEQ ID NO: 73133 - DNA, 356 bp, Glycine max
  unsure (1)..(356): unsure at all n locations
tggggatgagtctactatcatcgncatcgagctctttgttttggcattgatgtgccactatgagctgccaggttctccacctttgggccaataatcctgtcttaagatatctgtggcgttagaactacattgccgtattcatatcacagctcatcattatctgtgagccgctgtttaagctcttacgcaagaaccaatccattcactagaacgaggactgacaatatgcgttctgaacgatcaaacagtgcctcatgaaccctcccgtgcttatgctgccggagcctgagagacctctcatcttgtataagagaatacatgtttagccctagcccctatctgatatcccacatgga

SEQ ID NO: 73134 - DNA, 398 bp, Glycine max
  unsure (1)..(398): unsure at all n locations
ctctctaatagctaagctcacctccttgatatgagaagctagagcttagctacacacccgctataatagctaagctcacccgcatgacaaagaacatgaatatacaacaaaagtccttactacaaagactactcanaatgccccgaaatacaaggctaaaaccctatactactataatggccaaaatacaaagcccagacgaaggaaatacctattctaatatctacaaagataagtgggctcatacttagcccatgggcttgaatctaccctagggctatgagaacctagggcctccctttgactctaccaatctacttggagcttctcccaatgcccttgcgggtaggattgcatacatggattgcctacgatgggtgtaagtacctcgggcggca

SEQ ID NO: 73135 - DNA, 423 bp, Glycine max
  unsure (1)..(423): unsure at all n locations
agctngaagggtaactagaatgcctggttaatatattaacccaactggccatgaattagaaatctgcacctgtcgcaagactctgtggtttatgctcctctactgaccaccatacagacctttgcccttctgtgcagcaatctggagcaattgaacagcctgaagcttatgctgcaaacatcaacaatagacctcctcaacctcaacaacaaaatctgccacaacagaaaaattatgacctctccagcaataggtacaatcccaggtggaggaatcattccaaccttagatggtcgagtcctccacaacaacaacaacaacaacaacaaccttattntcagaatgctgctggccaaagcaggccatatgttcctccaccaatccaacagcaacaacaacaacagcaacagccccagaaatagc

SEQ ID NO: 73136 - DNA, 349 bp, Glycine max
  unsure (1)..(349): unsure at all n locations
tttgctatcagaatgccttccttgattataggtagaaccagctatgctctacaaaaaggtcatcacgtcagttgacatatgaagtaatcgtccttgcaaattggggctaaagaagaatcgagtcatatcactggttccgctactaccaaacatatttaggatngttgatgtctttgtaacttccatttcacctcgacaaagatgcattgaccatgttgataatctaattgatcaacccatatcctggtaaaatcgcatactcactgtcatattccatcttcagctttcatggtgcttgccatgatctttcttgacacaaataaatagataatagactaatcttgtataa

SEQ ID NO: 73137 - DNA, 505 bp, Glycine max
  unsure (1)..(505): unsure at all n locations
agctngattccatagtagtgcttatggaaggattatcttctgccatgtgaatgtaaaacttatcccanaggtttctaacatcagatggttcgcanaaaattaatatagcgacaaacaacctccttaaagcataaggcatttgtagacttgaagcttcaactaagcattcgggaatactattctgagattctagaagaccacaatgctcaaccgctntcttgaatgtgggcaaacatgtgtcgttcaatgaaagtacgtattcccaactggttggacctcttaaatgagataacaaaacacacaagtaaaatttttctcctttcaaaggagatattgtatagatcctaccaacaaatttcctatntgatcttctntggaaccatttcttatacctcttatgccaacaataatgctctagtatctctctatacagataacttctagcatgtggatctttgtgattagagcaaagaattgtgcaacatagtnttggagtatagtcatc

SEQ ID NO: 73138 - DNA, 357 bp, Glycine max
  unsure (1)..(357): unsure at all n locations
cttcaatggttattttccacaatggagatgcagcggaagataaaggagaagaggtgagaggtggcgccatccactatggaataagccatggaagaaggagcttcgccaccatgagagcgccttggataagaagcttagagaagaagcttcaatggatgataaaagaggtggggagcatgatattgaagaataaaaagagggagagaagttgaactttgaagtgtgtctcacaagactctcattcatcanagttataacaagtattacagatgcttctatttatagcctaggtagcttccttgagaagctagagcttagctacacacacccctctaataactaagctcacctccttga

SEQ ID NO: 73139 - DNA, 234 bp, Glycine max
ctcgcaatattatgcgcctgaatctgacctccgcgtgaaaagtcatgaccatatgaatatcatgagagcttccgtcgttctatgtcgagcggttcgatatatttatgcgcccgaatcggaccctcgagcgatacgttatgaccgtttgaattgatcaagagctttcttgataaacttccagcggctcgtatatattgcgcctgactcggacctccgagtaaacagttatgacca

SEQ ID NO: 73140 - DNA, 413 bp, Glycine max
  unsure (1)..(413): unsure at all n locations
agcttgaattcactctatgcacncttaggtgttcctcnttgtgctnttcacatcttcatcttattcctctaccattagtgatcttatttctttgtgtaaagcgatttcaaccaattgtttgtgctgtaatctccccttatcactgtaaaataaaatttcaatcgatcgtttgtgtcgtaatctcggtttatcaatgtaaaataaagtntgaaccgatcatttacttcgcaagtcttcttttaatgagtttgaaagtaaataactaaagccaaagttaaaatcaacacataaacaagctcttattcataaaaatcacttgaatctattcaaaagttgaatgccttaatggtctctcttacttttatcagttaaaatgaacctttcagaaagttataatcaaccctacacgtaac

SEQ ID NO: 73141 - DNA, 419 bp, Glycine max
  unsure (1)..(419): unsure at all n locations
tctctctagttgtatataatgagaatgagataactagccatgactgcggcatgtgcataaagaactgtactgttgttggactacttccattattcttgctttccacagagatcattgttgctccaacacaggattgtacagaggaacacgagtctttgtcttctgatgatgtagttagagtaatcatagatcagtggatntatcttgagtcaacaacacttgatgcttgtcagatgaactacttaagagaaaaatatcagcaacaattttagacaaagtatcctgatatttatatatttttactatcagaatagatcttgtaaccatcttaattcctttctttcaatctgcttggatatagtggttggtttcaagtgacacattcaacagatgttcttcctcatgttctacgggctact

SEQ ID NO: 73142 - DNA, 491 bp, Glycine max
  unsure (1)..(491): unsure at all n locations
agctnganatggaacaactatgcaagtattatttccacttataagggggttntccaacaaagataattgggatacacaactattccttaacccttagaatggatgataacaattaaaacagaaagaaaaaaatgtagtatgcatagtgagaaatagatatgcatactatattgagagattgcaagagnttggtctatgaacaataagctacaatgctacaactgagaaaatataaacacaacaacaacaacaacaacaaaaacaaagtcttatcccactatgcgaggttggctacatggaccgcacaacgccatttggtatgggtaaaaaagaaaatatgaacaaaattaanaaaataattatagggttttcttcataaaaatgattttacttcccaccctccacttagtaatatcaacttcaattcaaaccaaaaagcctcaacatgttctaacattatacaatatacaagatcatgcattatacagtac

SEQ ID NO: 73143 - DNA, 378 bp, Glycine max
  unsure (1)..(378): unsure at all n locations
cgtgtctacaacttgcaaactaagaaactcgtcatcagtcgagatgttgaagttgatgaatatgcttcttggaattgggatgaagaaaaagtggagaagaacgttcttatacctgctcaactacctcaagaagaagatgatgaagaggacccaggtgaaccaccttcacctccaccacaacaacaagatcaagaactatcatcaccagagtctacttcangacgagtaagatctttggtggacatatatganacctgttacttggcatacttgaacctagaagctttgaagaagcgtcaaagcatgaagtatgggtcaaggcaatggatgaagagatacagatgatcgaganaacaacacatgggagttagtatatca

SEQ ID NO: 73144 - DNA, 290 bp, Glycine max
  unsure (1)..(290): unsure at all n locations
tgtgatgctagtgaagttggcattggggctgttntgatacaaaacanaaggcctatagcttatttctcggagaaattgggaggagccagattgaactatngcacctatgacaaagagttctatgccattgtgagagctctngatcattggaatcattatttgcgttctaatcactntatattgcattcagatcatgagtcattgaagtatatcaatgggcagcagaaagtgagtcccacgcatgctaaatgggttgaatttcttcaatcttttaatntctcttcaaaata

SEQ ID NO: 73145 - DNA, 461 bp, Glycine max
  unsure (1)..(461): unsure at all n locations
acaatttaactatatattattattaacgtaattgctatttctactactcttaaaaacaatgtaactatatattattatcaacgtaatttctatttctactactcttaaaaacaatttaactatatatggttataaatcatgtggatacattnttccttgtaccatataaccccagaatttcaacagttggcatgaatttaactatatattgttacaatctanacacggcagtggcatcaatttttccttttcccatataactccagaatgtaacagttggcaacttgaatctcttattatagaggcattntcattcacacaccccacattgttggaaaaataaaataaacaataagcaagagaaacacgcgcgtgcttttctcctaataatcatctcaagcgcaaccagaggaggggatatcctcanaatggctccacaataagaagacatgtgacatttt

SEQ ID NO: 73146 - DNA, 273 bp, Glycine max
  unsure (1)..(273): unsure at all n locations
agtcttgttcccttgtactcttgtcatttgcaaacaaaagaggttgcctntccctgacaacattatagtttcctcccaatatttagacttgtagcacatggatatatggggttcttatgctcatccttcattacttgcgcataaatatgttcttaccattgttgatgacaatcgcatatatacatggattatttttctataattaataccagatagtctcaaacatatcanacactttatatctatggttgaaactcaatattctgtcaaagt

SEQ ID NO: 73147 - DNA, 351 bp, Glycine max
attgtgaccacagagtggtacctgcagatatatcgcgggggtcatgagaccttgtggacgtcaagtggggtgctattgcccaaaaccaagcttgaccaatcccgacccaacccgggcataatcagtcagtgagaacctgtgatgtacctaaacatgcgagctcctggcagtcaacagatcacaggaaccacgaccacatagcaaggaggcttgtggtggctggccatctgtgaaactagattgatatgcgagatatggtctctggtaatcgattaccaagggagggtcatcgattacgaggcttagaaatgaagacaggacgctaagatggtctctggtaatcgattacca

SEQ ID NO: 73148 - DNA, 320 bp, Glycine max
  unsure (1)..(320): unsure at all n locations
gtacattatattcggtacgaccatgccctcctgattccagctgggaaattggcaagtggaggaacgccccggcatttacgcaacgagcataatgtaaacctttacgggtttaaaagctctatagctgggcctaagctttagaagttttccttatgtaaggctttgtgtctattgtcgtaattttataatacaaggatctttcttcatcttgtcctacgtctctacncattctcattcatttgcatgtttacttctttttctgaaacggcagatacgatgacgagtccnccgaaggtactaatacctgtgacccgcctatc

SEQ ID NO: 73149 - DNA, 390 bp, Glycine max
  unsure (1)..(390): unsure at all n locations
tggctgctgaactggctgctatacctataataattatatatgactgtattcattcacagacatcanagataaaattcanttgcttcaatgcctttgttatgtaaagaggaggggttcttacttcttacttcttagagatacaagtgaaaatcttctcacgttaattcgctgattgcataccttanaataagggtatatataatctatatctaacataaaaaccaatggcaagaatttgatntcatttcgaaccagttgagttaatgagctatatatattacaaattaatctgaacatgcatcaacatcatagccgaatcttaattgagttcgagaaatttaatcatgtctccacancggacatgccaagacactctatgatccgtatata

SEQ ID NO: 73150 - DNA, 516 bp, Glycine max
  unsure (1)..(516): unsure at all n locations
agcttagataatccataacatcccacattattttaactacatgttcgttntaaaaacatactctaatctgaatccctgatagatatttatggcagtaattaaataattcaaaactcaagggctgcaattacttccacctcaaagttgaaggcatgattctagtttatacctaagcaaaaatataaaaatagaagcacaagcacaaatggaccacagagaagcgtaaacaattatgcatatacctttattgctggtccagctgctgtgtcctgtagaagagatagtcattttcttggcggcagtaagccattcaattcattcttacataagctatcaatagagtaatgaactaatgacagctagggaatgatacctttgaaaatgagggcttcttctgccttacttcaacagtgtcaacaaacctcttgatggctcttaaactcacccacctatgcanagtataacacatggaatntagcacatttggtaaattcaaaagaaactgacaaaaccagt

SEQ ID NO: 73151 - DNA, 171 bp, Glycine max
  unsure (1)..(171): unsure at all n locations
gttcggataatntcaatatggagttgatccttgaggataagaaatattaacccaaaaagaacctgaccagcatcatggccacaaccccaaagggctccaacagcagcactctccattcgtgttcgaccgattgacaatggagccaaggcagctaggtggtcatgccctgat

SEQ ID NO: 73152 - DNA, 418 bp, Glycine max
  unsure (1)..(418): unsure at all n locations
agcttcccagatgtgacattcgccaagttattatcactctattgatattngggtatcttctagttttatgatataaaatcatctccgagttaattcatgtgctacttttatgatgagcttgctagttgttactaaaagacatgataatgatatcacaccattttactaacactttgcgtgtgactaccaataactactgtatttgaagcacaagctccaccaatgaagcgagtctctctcttgtgttggccaattgaatctatataagcatcaagagtagaattctttgttgtttcttaaagacattaatagataaatagactttctgtagggcatggtgagaatgatgcttgctatattctacatccttgtgaaatgcatcacgtatacacttgtagactgaattatacccttgaca

SEQ ID NO: 73153 - DNA, 368 bp, Glycine max
catactatatatataatacgaatgagtcatatggatcacctcatcctgataactcatatagattacataatccatataactatactgatcaagtgatatgtataactcatacggattatgtaatcctgatgagttatatggctcacctgatctgtatatatcatacgaattacataatcatgttgtcttaaaatattaatacagaattatatttctctactagtaaagtttgttatatataaagattatcttttggtttaaaaagttgtcatgaaaataaaatatatttctttttgttgaaaagtattcatatttaatataaaaaattgatttggcttgatttaaagtctatctgactgaatactaat

SEQ ID NO: 73154 - DNA, 467 bp, Glycine max
  unsure (1)..(467): unsure at all n locations
agctngctctanattacatngatgtttgtatttatggtaggaggttgtatgtcattnttgttttaagaatagtatcccactggtaaaactaactttccaaatgtttgccttcgcaggaaatggccccgaggaagcttgcctcaaagaggtccaggaaggacaaggcagcagaaggaactagttccgctccggagtatgatagtcaccgctttangagcgcggtacaccagcagcgcttcgaagccatcaaggggtggtcgtttctccgggagcgacgcgtccagctcagggacgacgagtatactgattntcangaggaaatatggcgccggcggtgggcaccactggttactcctatggccaagtttgatccagaaatagtccttgagttntatgccaatgcttggccaacagaggaaggcgtgcgtgacatgagatcctgngttangggtcagtggatcccgttc

SEQ ID NO: 73155 - DNA, 411 bp, Glycine max
  unsure (1)..(411): unsure at all n locations
catatctccaggtaccactctgtggtcaacaataaaagcaggaagtttcacccttcaacacttcctcatctcaagcttgtaggattatggngtacccatcacatgtggtactangtggcggtcgggcgatggtgcacaacaagttntccacatccacaatgcgcgcataaacccaccatcccctggtgcccacctncaactgagctcacgtactcccacgtagcccatatcctcgtttctcttcaacaccgggccccatcaatcctcccaagctttcacaacatccaagcaaaacaacattcaaacagcacaagctatcacagccaagcataacagagcagaggcagaanactctgcttaacacaccaaccaagatcacagcttttctcacttaaagaccccagtaacaat

SEQ ID NO: 73156 - DNA, 443 bp, Glycine max
  unsure (1)..(443): unsure at all n locations
agctntctagctnttcatttggtgtatttgatctcctnttggtgctctaaattgtgggaatgtgctcaaatatgtgggggcaatttggtttgttttcttgcttgattaggttgaattgggggtttgtatgggatggccctangcctataatgcattntgaagcaatggggcatgccacattgtccccgttctcttgctattgatgcctaaacgcgtgcccaccaagtgttcggtgaaatgcctcaatggcattagcgcgtgacttttgtaaggaaacaacccatggngcattntggtttgcacatattttctattntttgggacatgcattcattcccgaanaaggctagagtaattgccccacatatgtcctangcctanngaaccaaagttttatgcaaaagaacacaagaggangtgcatgtngggtaaagtaccctttt

SEQ ID NO: 73157 - DNA, 317 bp, Glycine max
  unsure (1)..(317): unsure at all n locations
ccctagccttgcaacaagtcctanggaagtagacacggagatggacaaganaatccgcagtattgtgagtagcattntgaaagacgcctctgttcctgatgctgagaaagatgttccaacatcctccaccccagatgttgttgtccctgaagctgatgaagatgtcccaacatcttccaccccgaatggttctgtgcctgatgttgaganagatgttccaacatcttccggcccaaatgctgaagtactctcttcccccagcaaagagagatcaacagaggaagatgatcaagccacagaggagacccctgcaccac

SEQ ID NO: 73158 - DNA, 183 bp, Glycine max
  unsure (1)..(183): unsure at all n locations
gatcttagcgacctgcggctgcaagctgtgtgaactgctggagatttaaggtctctctcgtcaaagagggtgtagaatatacatccaaanactcatatcaccgagtggagtgagaaacatctgctgttgttcttcaagaagcgagatatgggagcatcctagtgctaatgaatgttatttcgc

SEQ ID NO: 73159 - DNA, 499 bp, Glycine max
  unsure (1)..(499): unsure at all n locations
agtcacctgcngctgcagctaataaacttaatggtgtgttattataatatgataaannatntctttggaatgatatattatttgtataacttaataaaaaatctatataatttaagatataaattgtataattaaaataaaaatatttgataaataaatttatcataataactctcaatatttgtcttacgaaaaatataaacatacattcactttctctntcatctcattgtgcagacatctctctatgtatttttcattagattacttatactctattatttatttaatattgagaattaaatgtgtgaataactcatgtagtaattctatatataatatattattatactatgaaatatatatatcacatagtttagtggcttggataatgaaagcgattttgaataacataagaaaaagtgttgtctatccaatggaagtgggaagacatgacgatgaaagaagaaatttgtatgacaaatatctacatgaaact

SEQ ID NO: 73160 - DNA, 356 bp, Glycine max
  unsure (1)..(356): unsure at all n locations
gtagttctgagcacgaggatattggcgttgacatgttcgttcctatcagcagatctgcaaccctgcatatgttgcaatcggtttacaatgatgatactccacacgttagaaggcgacgagtaagacttcagctaccagacaatcctggtatggatcccgatgttagggaagagctgtaggatttaattcaagccaaagaagcttgcgttgcatatttattgggcactcgtatgtgcatgcaagataatcatcctcattcttgtaaaagcttgtgattgatattcgctactcatctctgcgcaagaattgcatgagtccngctcgagctctgaacattcctcacattagtcttattg

SEQ ID NO: 73161 - DNA, 470 bp, Glycine max
  unsure (1)..(470): unsure at all n locations
agcttcttgctgatctcaaagaggtatggcttgtataaatgacagnggaatctggaatcaaacgtttcttggtataaggagggcacctagactctgactgaacattgaacacaggcaacaatgtgcaaattacaaataaaccaatgataagggaaagaaaaaaaaacaggtcattgcacatcctttattatgttactgaaattcacaagaatgaaaaatacattgcattgtgaataccaaacgtacaagtgttatggatccttcatttgcccttaacaaaacataaactttgtagatggtgagactgaattaaatatctctttatttttgtgcaacaatgagtattcacattgcctcaactctcaagatgactgtaatgatcttccttaacatcaagatgtgcagctttgccacagcttccataacttaaagggtagtttgcagtggcaaggaatatggatgggtcatat

SEQ ID NO: 73162 - DNA, 426 bp, Glycine max
  unsure (1)..(426): unsure at all n locations
tctcagctgtacgaggtnaccccctcacnaagactcgtatataaagattatggggtgaacttaaggattaattgagacataatgaaattgggatgcctatgtacacacacaaaagagaaaagatttagtttaagaaattattagaacgaaattaaagttatagatatttatttgtaaaagaataaagtttgagcatcttttttaacaagtacacttccgtatactgctccttagacaaatcaatacataaggataataattatgagtcatttccgagcactgtgagtattntcgtttatttatattggattaaggggattcacatggtacaaatcagatacgtagtctcttgtagaaacccaacaagttgtcctgtcatctaatatgcatacacttgttattatgttattgttacatggtgaacac

SEQ ID NO: 73163 - DNA, 349 bp, Glycine max
catctgcacgagatgaactctgtatgagcggtatgcgcgcttaacgagttcggatggaaacgcatatctcaatgaattttgatgaactcgcttagcgagttcatcgtgttttccagaaaaaacacagaaagcgcaggtcggttcttccattttgtgagcctcttaaaggcatatcacacatgcaaacctgtctaaactatctacacagaacattcattctcaagatgctaatctattactagtctgaaatcattcagacgctagcaatctaaagcttaatctatggtttttgacattatggtctacaacataatagagaaatagaggaatgaggaacttacttcgattg

SEQ ID NO: 73164 - DNA, 370 bp, Glycine max
  unsure (1)..(370): unsure at all n locations
caacaactaatttatntagtctctgctntaattgattaccatatgatataatcgatcacttctctttctataagtgtttcanaagtgaacaagaacactntaatcgattactttgagtatctaatcaattacattgttcttgagctatttccaagttttaggaaaaacactntaatggattatattgttcttngagttgttcaaggggtntggaaagaaacatttaatcgatcaaaaagataatctaatcaattacttcattgaattaatcgattaccttgtagattaatcaattacaagcgggtataactatttttctctgtaataaccagcttgtgttctcttcaatctaatctcggaaataacaata

SEQ ID NO: 73165 - DNA, 449 bp, Glycine max
tgggaccacttatttatttataaaggaagtcgtatctagtcaaagtctgagagaccatacaagtttcctaacgatttctaattatgtgggccattaagtctatcatatgctgacaatagccgagaagcccatgaatctcttcgggggcggagtaggtgtctgccatcgccttggccttggctaacaatcggggaagttcttgactcccgttcaaggtaagagcaaaccgatccatccacatggttgcctcttggtgtaaagagtcgatcacccttcctctagcctctttttccgcatatacttgggcatactcatccgcgattctatgctcgtgggccgtggctagacctaactcttcttggtacttggcgatgatagctaacatgttggtctccgtctcgcataaacactgagacaagcttcttttggaccttgaacaggcaactaac

SEQ ID NO: 73166 - DNA, 393 bp, Glycine max
  unsure (1)..(393): unsure at all n locations
ggacctgtctatgtggactaggtggggtcgggcgattgtaaaatcaactctcccacatccacaaatcatacatgaacccaccatccncagttgcccaccttcaactgagctcacgtacccncacgtagcccttatcctcgttgctctcagcaccgggtccccatcaacccctccatggcttcacaaatccaagcaattcaatatccaaacatcatgaactaccctataccaagaaaacagggcagaggcagaaaactctgcccaaagcatattccaataccacagctntccctactcaaataccccagtaacattctcttcattccgattcgttaaccgttggatcgactcgaanatattactggatggtcctagtagataaacatacatttt

SEQ ID NO: 73167 - DNA, 457 bp, Glycine max
  unsure (1)..(457): unsure at all n locations
tcaagaatcttgaagaatctaatgctctttagataagagtgaacttagacaattgtcacgataatcaattgcatgtgtagactttattcttgtcatcaatgtctacattgcgaaaccatttccaatgtgtagttgcgccaactgtcatccatgtcgataatatgaattaccaagcagtgaatttcttcactctaaatccaaactttctgtcatagactcataaaccatgtttgtgatgcttgcatgactgtacaactgtgagtaagttaggaaatattcctttgtagaaccccctcaaacctatcatgttcgagggttattctgaatacgatcagccattcccttacttgagcgttgagcctgcattctgacatcaacatgtctatcattttctgatntccatagagagctgagaccgtggatggactatatatataancaactatctatgacacat

SEQ ID NO: 73168 - DNA, 459 bp, Glycine max
  unsure (1)..(459): unsure at all n locations
gtctgctgactctccattcttgtaatcaaattcagattaattcacaactctagtnntttttttcaagttcatgtcctctatatataaattagaacatcaatcctcaacacgggtgatcttaggagtcattctccaagaagaccttgtttgggagtttntcttcaacaatagcatttttaggaagttttcttaacctcttatctctttcaagctatcttttcatcttatttttgaatagaatttcataatttttaagcaatataacaatagttgaaataaccatgatcataatataatattagccaaatctaaatatagttatatgtaaaaacaaaaagtatttattaaactgtgagacatcctttgatgtgcctatctgatagtacatttgtatttgctgtatggacagtaattctgtttatttcaatttataatacatctctanatcatgcatattta

SEQ ID NO: 73169 - DNA, 449 bp, Glycine max
  unsure (1)..(449): unsure at all n locations
ctctgagtcacctgccgcatgcaagctnaggagtttgagttcaagtgctagattcttgtttgttgcaactataggccattttgtgctcatagctctcagtatggaggagtttctttgtcttgctctagtcttttgcttgtttcatggagtttactccatatatatgctgtgtgaagccttgcgtagtgccttttcccattgatctaactctctagctttagttttgctcattattacgtacgtgtggagctgatactgttcttgtgtatatatattttctttcgtgactctttttggaataatgagataatttcctagtgtcatcatatctcttgaataactgataaaaatgtcatttttttctgagatcatctactatgtttaatttatttattatcttgctcttctgaatcaggccacgagagcaaatggctcgaaaaatatatgga

SEQ ID NO: 73170 - DNA, 455 bp, Glycine max
  unsure (1)..(455): unsure at all n locations
ttctaagagagcacanatcctagacttatcccaatggtctntttaatataattggcttgctcactagcttttcactttcacttgctnttgaccttgttacatcaacacacttttccttnttttttaacgcacaacttatgtgatgtgtgtgttgatgctntatctctttctttgcatcccaattagttccactcnncccanatttggggtaaattttccttgaatcatatgctctcctagaatctaaacaagatatctggagataattatttaagttcagggttcanattnttgacaatatcattcagctcatcaaaagggtgcacaagatataattatcattgaanggtaagctttttgtcaaaaggcttgtatatgcacaatcatgggcctcatcatgtattcattttatacattcattctanaattcagagattcatgcanagaatatactc

SEQ ID NO: 73171 - DNA, 525 bp, Glycine max
  unsure (1)..(525): unsure at all n locations
gtcacctgaggcatgcaagcttctactccaatggacttaccttgaattttttcttgatagccctttngagccttgtttccctttccttgttttgaagctcactacaagccttaagtgaaaaaccatgatattaccatatccttaaggaattttggagctttggaattgttttgggaataagtgtggggggtttttgtttcattggacaacttgttttgttggctatgcttcatgatgtattgtgggccataccttatgtacattgtatattggttaaatgttggacatgctgaatgaaatgttgtttctcanaggctaaagagtaaaaaaaaaaaaaaaaaaaattctaaaaataaaaattcgaaaaaaggaaaagaaaagcaataaagttgagtgaataagatcttaaatggcacaagaatgatgaaactcttggttctactcttcatgtctaattnttatctatacttctttgtattttcttaatgttttcttaatatgcacttattcccctttgctcctcta

SEQ ID NO: 73172 - DNA, 454 bp, Glycine max
  unsure (1)..(454): unsure at all n locations
agcttagcgaatcagccttgcttagccatatgtatctcaataggaggatgagtgttcatcttcacaagatgaactcgctntgagcggtaggcgcgcttagcgagttcgtctggaaacgcatatttcaatgaattntgatgaactcgcttagcgagttcatcgtgttttccagaaaaaacacagaaagcgcagttcgttttcttccattttttgagcctctaaaaggcatatcanacatgcaaaccagtcaaaactatctacacagaacaatcattcacaaaatgctaatctttcactaatctaaaatcattcaaaccctagcaatcaaaagctaaatctatggttntctaacttaaggttcaacanaataaaagagaaagagaaggaatgaggaacttacttcgattgttgtgtgctgaagatgcgtagaagatgcaaaaaagaaagcaagaat

SEQ ID NO: 73173 - DNA, 336 bp, Glycine max
  unsure (1)..(336): unsure at all n locations
accaccttctggaggaatcttctggagggcccaagtggngcctggttgctattgcacccnnncattttactaaatacacccctgcctttttttggtgaattcttttttcgtaaagttacggaaatttacgaatttcataatgatacttgttttctttccgtaatgttacggaaccttgcagattacataatcatcccttttttgacttacggaatgttacagaacctcactaattgtgcaacgatgcttcctttngacttcccgtgtgtcacggaaccttacggattgagcatcaatactttcttttgattccggtacgtcacggatcttcacaaa

SEQ ID NO: 73174 - DNA, 436 bp, Glycine max
  unsure (1)..(436): unsure at all n locations
agcttatgcatngctgcttaatanaagattagattgatgtgtaagcctggtacttcgatatcaaatgatatagcaaaaacaaggaatacccgcgggaggcctctggcaatgacaagagaacattgcgaaggttggcggctggcggacggcttcttcctatgtgggaatatcctatacaagaggaaccatgacatggtgctatttcgatgtatggacgtccaagaggctaatcaaatgctggtagaggtgcatgaagggatcattggaacacatgccatgtcccggaaaattctgagagcgaggtattattggctcactatagagagtgattgttgcatccatgtgagaaaatgccataagtgtcaagccttcaccgataatgttgatgctccacccatacctatgaatgtcttggcagcaccttggccattctcta

SEQ ID NO: 73175 - DNA, 454 bp, Glycine max
  unsure (1)..(454): unsure at all n locations
tcatcaatatatccatttanggaaacactctntacatccatttggtacaacttanaattcattattcaagcataagcaagaagtaaccttacaacctctaatctagctaccggtgcatatgtctcatcaaagtctataccatcttgtgggttataacctttggctacaaggtgagccttgaaaacctattntcctaagtataacactatnttcatcaagcttgttcttaaaaaacctattagttcctatgatgttcaagttattagtacttggtatcaattcccatacatcattccttttaaattgatntaactcatcatgcatagacataatccanaactcatcntttaatgcatcatcaaaaattaagggttcaacttaagacacanaagccatatgtttcacaaacanacttanagagtgtctagtagatactctcttctcaatatcacca

SEQ ID NO: 73176 - DNA, 431 bp, Glycine max
  unsure (1)..(431): unsure at all n locations
agctngngaggatngatggngacccggtgtttatatatacgaggatatgggctacgtgagagtacgtgagctcagttggaggtaggcaacaggggatggtgggtttatacgtgatttgtggatgtggaaaacttgttgtgcaccatcgcccgaccgccacctagtaccacatgtgatgggtaccccatattcctacaagcttgagataaggaagtgtagaagggtgaaacttcctacttttattcgttgaccacagagtggtacctggagatatgtcgtgggggtcaagagactttggggacgtcaggtggggtgctatttcccaaaaccaagcttgaccaatcccgacccaacccgggcatagtcagtcagtgagaacctgtgatgtacctaagcaggcgagctcctggcagtcaacagataaaaggaac

SEQ ID NO: 73177 - DNA, 417 bp, Glycine max
  unsure (1)..(417): unsure at all n locations
agcttaatgcctcaagataaatcctaatttatagtcagatactatggcccttaccgggtagttaaaaaagttggagcagtgacatttcatttgctattaccaggcactgctcgaatccacccagtttttcacgtttccctattgaaacttgcagtaggagaacatcaaattgaggcagaattgccaaaggaactacatgatgaagaacaacggatataatcgatacatgttatgggaacaagaatgtttggtccaacaggaacaaaaatcccataagtaatcaagtagaaaggacaacatgctgaaggagcaacttgngagggcagatcaaatatgatgcaatagttccctgctttcaaccttgatgacaaggctcttttctagggggtattgtcaggcaacacgaatcatttactg

SEQ ID NO: 73178 - DNA, 430 bp, Glycine max
  unsure (1)..(430): unsure at all n locations
ttatgaatagctcaattatatntacaacaaatattaaaattatataaattctacactatagagagaggagagagagagagagaaacctaatataaaactacatatattntagaatatcataccacatgtttaacacattcttatttttagattattatatattattaaaatatattgttgcgacacaattattactaaaatattcattgaatactaaatagatgaaagtaaaacaaaatntaagaagtcggtttgaaatgagaaaatagataaattctaaatgagttaaataagtcatactcgagtcatgtatttatttcataagtcaacttacattgtaaatatctttaacttgacccgacttacttatacaccactatcatatgtaatgcatggtgtatattaatgggatactctacatattatatat

SEQ ID NO: 73179 - DNA, 229 bp, Glycine max
cactcgatgcttttatttaacagtaaggcattttctgtttgaaaaacgggcataagaaatagagaccttgggtgctttctgcacttcacctacctatctacatgctttatacacccactccaagatctataaacagcactcacacatgtaacccggcaacaccacagagattccaaaccgtatccatcggcatgtctgtctttctcaataggtgtaccacagtcactct

SEQ ID NO: 73180 - DNA, 349 bp, Glycine max
  unsure (1)..(349): unsure at all n locations
ctcagctgaggatatggggacccatacatgtggactatgtggcggtcgtgcgatggtgcacaacaagttttccacatccacaatgcgcgcataaacccaccatcccctggtgcccacctccatctgagctcacgtactcccacgtagcccatatcctcgtttctctcaacaccgggtccccatcaatcctcccaagcttccaaaacatacaagcaaaacaacattcaaacagcacaagctatcacagccaagcaaaacagagcaanggagaaaactctgctgacacatcaaccanaatcacagctnttctcacttaaagaccacagtaacaattccttcgatccaattc

SEQ ID NO: 73181 - DNA, 391 bp, Glycine max
  unsure (1)..(391): unsure at all n locations
taacatactaaacaatcgaataaaactgggacagagataccatctatatgctgtatctaatacattcatggtgaaaacaattttgaaataggacggtatccgactatatttttcggtgaaaaggaagatattatatttttacaatatatntttatagcaatattttacatataccctnttcttttatctctctattatacgttatttatctcattctgtactttttttcctttatttatttcactcttaattatagaaaaagtataaaaaaaaataaaaataaaacttctctaacagatgtgacattgttttaacggtttggtctaataggttctttgccattagaagataatacgtgtgccaagaatatctgatgatttgacgtgatcat

SEQ ID NO: 73182 - DNA, 454 bp, Glycine max
  unsure (1)..(454): unsure at all n locations
tatctcttagcttctctattctatagttntaattttaggttattttcagtagtatagaagtagcatcctaacgggatgacaacgaggcaagcttgacttttttgcccctatatctctatccctgctaagcattgtgcaagtntaggggatgcatgagaaattgaaatccgattccatctttgttagattgttatgggtaaaggaacctgcccaccttttatcaagacacttaatctatntatatatatatatatattaagtgcacatatatatataanatggtattngaacttacatttccgaacccaaccccgattctacanagtgaggaacacttcatctcgacctcggttaagggcaagttttcaataatacaagaaaaacatanattagcatcaactatttgatatgctgatatgaatttccagcttgtgtcaataataacagacaccac

SEQ ID NO: 73183 - DNA, 377 bp, Glycine max
  unsure (1)..(377): unsure at all n locations
tcggttccttcgccaagtaagtgtatatgtgtatatctattatattcgtttgttctggctgttgttggtattttgttttgcgcagaacggaaatataagaactagagacgagagtcctcatcactgagaggcagggcggatgagatcatcgtcctatctatgctntcctcttatctacgatgagaggtaagtcaagaggggcaactgtcataccttaatttcgtccggngattattacttgatgacatgcaacagatgaagttccgagacgtctcataanataaaatgaagcacgcttgcgcgatccgtgaaattccataatgtggcggaagtctaagagaggtgtgtttgcgcaatctgtgatgttccgtaacttc

SEQ ID NO: 73184 - DNA, 416 bp, Glycine max
  unsure (1)..(416): unsure at all n locations
catgctaagctcacttccaagtatttcanaacagtgaaggagtggcgcttagtgcatcctaacccgctaagcccaagtcatggagtttaattacagaatggatctgtggcttatctcaggacagcgcgcttagcgctgctacaataaatgtttctagagaagaagtggcgcttagcacatcctctccactaagcccactgcttgaagtttacttncagtgaagaatgtgggctagcacgatgatgtgcacttaggtgaactattcagccaactagtcaggggtctaagcgcttagcgtgtgaagacatggtgcttagcacaagggttgcgcttagcagatggacaactgaaatatttgagtcttttttgtctatctcttcacctgggcttannaaaccccttgttcactactaaac

SEQ ID NO: 73185 - DNA, 274 bp, Glycine max
  unsure (1)..(274): unsure at all n locations
gtggtttctaatgactcctctgcggcttccacataaggaatagaggatgggcagctcaccaagatgtcttccttgcctgatacgatgaccagatgcccttccactacgaatttcaactntnggaggagtgttgagggaacaactcctactgagtggatccacgggcgccccaacagacagctgtagggagggttaatatccattatttggaaagaactngacaggtgtgagggcctatctgtactgggagatcgatctctcccctaacctctcg

SEQ ID NO: 73186 - DNA, 515 bp, Glycine max
  unsure (1)..(515): unsure at all n locations
agctnggttcaaccncacaacccanggaatgattattttgatcaccaatacttcaataacatttcatagggaggaaagactcgggaatacgcatgctatgcatggaaaatgtaattatgagattgagatgcctgaagagacatcctttcttagttaaccacgcattaggtaccatgctcaatcattttgtttggttgtttgtgttttttatttattttagaaatgggtttatgatcccaacatggttggctcatggtacctaacacatgcaactaagaatgcatcacgaattttcatgcttccctttttttcttttttcttttgtagaggaaaacacaaggatcaggtatgagcaaacatgtagaacaaaaagtatgttgaacgcatatgcatgatgatgcaacgactcatgcanaatgtgaggctggaatgtgataacggacaaatgcangaacgatatgttcattatgatgctgaagagatgtttatgcgatgcatgatatggatcgtgttac

SEQ ID NO: 73187 - DNA, 300 bp, Glycine max
  unsure (1)..(300): unsure at all n locations
atcatcttcttttccatcattgagggtaccacttgggctgccagatccctccacctttgggtgtattctttgaaggattcatgctcctttatgcacatgttctatagttgcatcctatccgaagtcattatactgacatcgcctaacaaaagcaaccattangtccttccaagaatggactcgggaaggttccaagctagtgtaccaggtaacagctaccccagtaagactttcttggaaggaatgtgttagcaattcctcatcttttgcgtatgcccncatcttccgataatacgtctt

SEQ ID NO: 73188 - DNA, 518 bp, Glycine max
  unsure (1)..(518): unsure at all n locations
gtgcaagcttgactctcacacacgttagaaatcagtattttctttatagngctatctttctcttcgcgaaagccaaatcacgatctctcccatatgggatgggctntaagattaagtttgggcgtgccatgttctaaagcatatgcacatatatagaaattgatcaataaagcaaaacttggggtcatacgttggggatagagagatcaaatagacaactagttcatgaatcgatcgaatgtttcggataagatgttgctctataaatttaaaataaaaaatagttcaacacaatagaaaatcatcaaggatcagagaagaatggttcaagtctaatctctcctctcatgaaggattaaagacatttatataagaaaaagtaaactgtttttgaataatagcaaagatgaatgataagagggaagatagatagaaacaactcagatatattgatagataataattttcctaacagctgaagacagtccttactatcatggctgacttggaattttact

SEQ ID NO: 73189 - DNA, 320 bp, Glycine max
  unsure (1)..(320): unsure at all n locations
tgccccacattatttccatgacacaaatgcaaagatgatgaattggaaattntatgcaaaactggtcatgcatgcacctatgcagacactcaagtgtcaaanttttatggtcatgtgatgctagggcttangattcatttcctctattttaaatcaacccaatgtttcaaaatatggtctttatcaattnggcattcatcctagtccattttgggtactcgggaaaatntcacagcattcacccttcaggtgtacacacattttttcaaaaactagttatgatcagtgaattntntcanagaaaagttggaagtcatctc

SEQ ID NO: 73190 - DNA, 454 bp, Glycine max
  unsure (1)..(454): unsure at all n locations
gtcacctgccgcatgcaagcttaggatggaaacttactgtggtgataatatagcgcanaacggaatcgaagaatgtgaaaagtagagatcctagggctgcaaactcgtaaatattgtgggtatggcttttgaaaggggggaaaagaagtttttgaatgcaaaaacgtcccccctttcgtcacttttatattttggtgcaggggtggctcgcccaggcgagctaacctgcactttttttttttttgtgagaggaacattaaccatgtcccctccttccttatgggttagtgttctgcctatttgagcctactcaagttagaattaggcattaattactaacaacaaacaatggtagtaaaatactgcgaatccaaaggatactgngctgccttgcgcggcgttctctgcgttgttagcgcatataaggtgcaacgatcggtcggatgtgacccca

SEQ ID NO: 73191 - DNA, 266 bp, Glycine max
  unsure (1)..(266): unsure at all n locations
tcggaagcaaaaaaagaaggagaaggataatttccaatcaaagaacaagagaaagaaaatntccaatcaaagaaaaaaaaggggaagcaaagaaattcccaatcaaagagtgggagaaagaaaataaggaaagataggaaattcccaaccaaagaatgggagaaagtaaaaagagatgaaagttctagatcanagaaactagaagaaatatgcagagaggtctttggaccggacaatatctgaacaatacagaattgtcaccaaat

SEQ ID NO: 73192 - DNA, 289 bp, Glycine max
  unsure (1)..(289): unsure at all n locations
gtgatgatagtttgtgaatgttgtatgcctgaanaactcgctcatgcgaaaacttgttataagatgaacatgtagatgttaactctatgtgtgtggaatagtggagaactgtgtatgttatgatgtggaancaagagtgagagctttgagagttggaagggtaagtctgaattctgtggtaaatggaggttaaagagagttaatcctagtttgaaatgtcatttatgacttatgagaaaacatggactgtgctagagagaaagataaatgacccaagtgaacaaagagc

SEQ ID NO: 73193 - DNA, 485 bp, Glycine max
  unsure (1)..(485): unsure at all n locations
tcatcttctatttcttaatcctccgcgtaaactctttttacacaatcccncaattntcaccctgacatcgacctcttctatgatgtccactntntcgttactatgggtgtcttccacacacctttactcctctgaccttcatcaatgttgcaagcccctcacattggtccaccctacatcattatccacatagttntatttacatgcataattatctcacgtactgttccatgtggccactttcacaagtggatngagtgcatgaataacatatgacagtcgaatggaatgatctntgcatccgcttcaagacaaggtgactaaccaatcaacttttggagaaacaatcacttttacctataattnnttttttaaactcaattcttatacttaanaaatgagactcgatatttngactgtagttntaagtcacccgattntctattaactanntgataatatagcatttagaaaaatatattcat

SEQ ID NO: 73194 - DNA, 466 bp, Glycine max
  unsure (1)..(466): unsure at all n locations
agcttcaacatcagaccacttgcagggtgctgttattacttcacatggacttgatggggcctatgcaagttgaaagccttagaggaaagaggtatgcctatgttgttgtggatgattactccagatttacctgggtcaactttatcagagaaaaatcagacacctttgaagtattcaaggagttgagtctaagacttcaaagagaaaaagactgtgtcatcaagagaatcacgagtgaccatggcagagagtttgaaaacagcaggttcactgaattctgcacatctgaaggcatcactcatgagttctctgcagccattacaccacaacagaatggcatagttgagaggaaaaacaggactntgcaagaggctgctagggtcatgcttcatgccaaagaacttccctataatctctgggctgaagccatgaacacagcatgctacatncacaacagagtcacact

SEQ ID NO: 73195 - DNA, 238 bp, Glycine max
  unsure (1)..(238): unsure at all n locations
ctctccctcggcggggatntcttcttcggcgaatgctatgatagttgtggcagtgatattattgaccagcccttcgaaaccttctaccgagatatcttgggccacatgggcctcgttcagaacttttactagcagagcccgatgaggctcggaactcatgagtaactccaacagcgagaccctggccggagttttgttgagctgttcgataaccttgaattcgctctgctgaattata

SEQ ID NO: 73196 - DNA, 510 bp, Glycine max
  unsure (1)..(510): unsure at all n locations
agcttatgcgcacacttctntacgaacgttctcttgcacaagacattcttataactaagaaaaatgcacccatatacaatcaaggcaccttcgttacctagattattcacgtgtacttccaaggtgtatttgttacctacatcacacacatttcctttgctaaattcacatacatgcatactctaagcactttggctatcaaaaattgcatacgtgcacatcttggtatttctaatacctatacatacacaaacttcatgatgaatcttgactatctacacaataaggtgctacatttcatgcttttttcaagggtttttactacctaaagccgcatgcaaattcaagtatattttcttttgcttaactaaaatgtattcaaattaaaagggtattttgtaatgtattttctntacataacatgcaacatatntatagaatcttgtgagacatnttgactaccanannatatatgtacatacatncaagtattttgctaccatacccaaa

SEQ ID NO: 73197 - DNA, 307 bp, Glycine max
  unsure (1)..(307): unsure at all n locations
gtgtctaccatcacgattatcgtctccctttttgcacatgttctgtagttgcatcctatctggaaccatatcagaatagtactgatactgcctaacgaaggcaaccattangtccttccaagtatggactcgggaaggttccaagttagtgtaccaggtaacaactaccccagtaagactttcttggaagaaatgtattagcagttcctcatctttgcgtatgcccttatcttccgacaatacatctttggatggttcttgggcaagtagtccccttgtacttgtcanagtccagcaccttgaactt

SEQ ID NO: 73198 - DNA, 491 bp, Glycine max
  unsure (1)..(491): unsure at all n locations
agctntngaagccaaattcaactatggaagttaatgatnganaagannnatgtttttcacagaatccaactnttcagtgtcctcaaaaatcaaagaaatatactcctaaaatagataaggaccaactatttacttctattagcaaaatctgatattgaacactaaatgaaattaatgtccttatcagtggcatctaaatatatattntcccttttaacatttattacaaatgctcatttcaattaatttatttcaaattaccttttggtaaacttgacttanaaagtaatttccaaatattacataaatgaaatcaatttcacccgcagcacttttgcataaggaacaagcaaacctcaacaccagcaagacaaatagactagcccataaaatggtaggaaagattataggctagaaactgaaaagaanatactctagttgaanaaaaaaaataacctttcaattaatgaaggagcgagaagagctagatg

SEQ ID NO: 73199 - DNA, 329 bp, Glycine max
  unsure (1)..(329): unsure at all n locations
tatcgganttattccactgcgcgctactatgctttccattntctgcaaagcntgtattttctcatagatngaaattcaggtcaagcttgctgatccagacgtagtttctgatccacaggagtaccagaagttagcacaatcagtttcagagcttgatgaggtgctttgattatttcttatattactcatgttcatggaaattaaaccttatatattgacgcaactgtgtattgctaattgtgtggcgtaggctgcgccacgtataggagatttaaagactgtgacaaggttctagaagaaaccaaaggtttgttagactctactagctt

SEQ ID NO: 73200 - DNA, 459 bp, Glycine max
  unsure (1)..(459): unsure at all n locations
agctntagcanacaccctgatcatgaatttcttctctcttctgctcaccagcgtgaaaggtgtgcgtgagtacataattaacatgcgagatatttcatctcaacttaagaaataggagggtgatatgtctgagtctttcttggtgcacttcattttgaacactcttctgcaggaatatgggccgtttaagatttcctacagcgcacataaggacaaatggcttatcaatgaattaatgaccatgtgtgttcaggaagaagaaaggcttgtaatggagatgatatgtctgagtctttcttggtgcacttcattntgaacactcttctgcaggaatatngggccgttaagatttcctacagcgcacataaggacaaatggcttatcaatgaattaatgaccatgtgtgttcaggaagaagaaaggcttgtatggagatgagtgagaagtcattgctgacaa

SEQ ID NO: 73201 - DNA, 359 bp, Glycine max
  unsure (1)..(359): unsure at all n locations
agcctatccgaggacctctcattcacttggtggaatcattngtcaattacttactcattngaactaacaaagctcgttgtgatgtctctagataaaatcttctctctaataaaaaaaatctatttcaatgtgtacggtcaatatatatgagtttatgtttctgcttttatgatagattntgttattctctctttnttggtgtgtgaaggaggatggttntgagtgtgttccaacatctctcatggagcaggttctcannattttaaatgtaagtactttgccgtacttttctaaaagagaaaggctatagtttctgatttatcttttaagttnttcctccctgtctaggatgctagaga

SEQ ID NO: 73202 - DNA, 230 bp, Glycine max
gcttaacattcaattcgagtggttcttttattctggactcaatcagacgtgcgcgtgagaacgtattgttgattgaatatactcaaagctacaacattcaatatcgagggtgctcgatatagtaccgtactcgatcagacatactagaaaaaatttactgccggttgaatgtgctcagagcatctactttcaatgacaagcgggcagatgtattaccggactcattgaga

SEQ ID NO: 73203 - DNA, 382 bp, Glycine max
tgcaagcttctatgggatcaaggggtctatcatgtgttcattttatgtatgaggactccaagcataccttaatagttaaaggttcaatagttgctaaaaaacaaaagtttagcaaaactaacctgaaggctatgaaggtggccttggaacaaacctggaaagaggctctataagtgggcgtggaagccatcagaaatcgaatacaaaaaagaatggccaagttcattgttgaatttgataagatagaaatgaaaattccaacatgtacgatgcattagataaagagtttgtttgtgtaattataggataatcttgtattaaatattatggttgtacaatgaaaacaacatattcaaggttttaaaatgaattatatgttttg

SEQ ID NO: 73204 - DNA, 393 bp, Glycine max
  unsure (1)..(393): unsure at all n locations
gctagttaatccctcttcttctatggccttcaatttgtatactttctaaaataggctttacaatacttgaccatcactagacctgagatcagttactctatgaataaggtttgccaatttatggccaatcctttaaagtcacattgaactacaatgaaaacaatcttaaggtacatgaaaggtatagttttgcatggtcttcatcttcaagttgttgttttaggtcaaccttactctgttcaagccctttgtgatgcaaattgngcatcanatgttgatcactgaaggtgaatttcaagttttgccatatatttgggcccttatcatatatcttggtggacctgcaagatcaagtgccaaggcaaaatatcgtagtttggcataaactactat

SEQ ID NO: 73205 - DNA, 507 bp, Glycine max
  unsure (1)..(507): unsure at all n locations
caagcacctgggctgcagctatactgtcttgcataaaaacatgctttatattattatanaactcanaaatagaaaattatatcaatcttggcctgttctgttaagcatttcaagaacgagaagtaaatttattaacaaaaagttgaatgttccatatacccgtcttgctggaaaaacatcattcttgtaacccttaaagtcatagtttggaatatctactgcttggccacgcttcaacttgtccatgacacgtagcaattgctcagtatcaaaagcttctgattatatcaacaacatgcattaggaataaagtagctatagcagtctaagaaccatcattcatatatataaaaaaatntaaacgttaaaatntccatatcaaaagttgctaccttatcagtttttaggtgtattatactaattatgcttgcaaggtacttaagtatcgtaccatataaaatgaacttttgcttaacctttggaatgctcatatgcatataacacaat

SEQ ID NO: 73206 - DNA, 73 bp, Glycine max
aagcttcttgtatatctctcttaatgaagcttctagaggaagctacatgaagctgccttaataaaaacgctgt

SEQ ID NO: 73207 - DNA, 419 bp, Glycine max
  unsure (1)..(419): unsure at all n locations
tatcacaacaaanaaatatttccgctattttcactttttatctttacaaaaaattaacaaaaaatgggaataagattccgtcaaaagatattttttataaaaaaaaaatggagagtgagaagataaatcatgggtgtgcgaaatcacagcccatcccaaattctcactgtgagcttcattggatgcatgtcagatatccgttcatacttcctaggcaacaatgcatgcactacgcaacatgaaataactcgtgatggtgcccataaatattaatgaaacagagactcatgaggaggaaagcttataaaaaatattaatgagccattttagaacttggaacattaattangaattttaaatatatttatctagtaaatatgaactttaaacaataacattgcatagctatcctattatat

SEQ ID NO: 73208 - DNA, 406 bp, Glycine max
agcttgttaaagaacttagaaaagatcaagaacttacttgttctcacatcgttcgcgtgtatgatatccactccacaaggtttgaagtagaggagtccttcaatcctattacgcaacgtggtggacaaaagtgggcagttaacttaaatggtcattattgtcaatgcggaaggtattctgcacttcactatccatgttcacacattattgcagcttgtggttacgtgagcatgaactactaccaatatatagatgttgtttacacaaatgagcacatcttaaaagcttactccgcacaatggtggcctctcgggaatgaagcgactattcctccttttaatgacgcatggacacttatccctgacccaactacaattcgtgcgagaggtcagccaacatcaacaaa

SEQ ID NO: 73209 - DNA, 493 bp, Glycine max
  unsure (1)..(493): unsure at all n locations
agctngctgctcgagcctcaaatgtgtttccttgttattccaaattatagaaaggttaccgatgtcactctcctgttcacaatcgttattttatctctgcagatgtaacatttttttgaagaaaaaccatactttgctccctccatggttgagtccaatactcttcaagatgtttttcctattccctatcttggtccatcaccttctttgcaggaatcagagtcaattgtagattctaccatagatattcctgacctccacttgagcagactcaaagataacccatcgtatattgacgtcgtcctcgaattcctgacgcagaacttgaaggtaatgaaagaccagttgaatcatctcctactccagcgaacaacccaaccatggacctacccgaagagaatcttgacttgcccattgctcttangaaaggtactcggtctacacgtaatccttatcttatntataacttcttaangtatcatcgtctctcttc

SEQ ID NO: 73210 - DNA, 116 bp, Glycine max
aacctaaaaacaaaataaatttccaccgaacgtttgaattgtattatccattaacttcggttaaaataaattccgaccgttcggtcgtgccgtaaccacattggagatcaaaaaga

SEQ ID NO: 73211 - DNA, 411 bp, Glycine max
  unsure (1)..(411): unsure at all n locations
agcttagttaatccctcttctcctatggtctttaatttgtaacttcctaaaaaaggctttacaatacttgaccatcactagacctgagatcagttactctatgaataagggttgccaatttatggccaatcctttaaagtcacattgaactacaatgaaaacaatcttaaggtacatgaaaggtatagttttgcatggtcttcatcttcaagttgttgttttaggtcaaccttactctgttcaagccctttgtgatgcanattgngcatcaaatgttgatcactgaaggtgaatttcaagttttgccatatanttgggcccttatcatatatcttggtggacctgcaagatcaagtgcanaggcaaaatatcgtagtttggcataaactactatagaattatcctggattc

SEQ ID NO: 73212 - DNA, 491 bp, Glycine max
  unsure (1)..(491): unsure at all n locations
gcttctcatatattatgcgcctgaatctgatcttcttgtgattagttatgaccatttgaatttctcgagagcttccgttgttcaatttcgagcgtctcgatatttcatgcgcctgaatcgggcatccgagtgaaaagttatgaccatttgaatttctcgagagcttccgttgttcaattacgagggtctcgatatattatgtgccgaaattggacatccgagttaaatgttatgacatttgaatatctcgagagcttccgctgttaaatttctagcgtctcgatatattatgcgcctgaatcggaccttcgagtgaaagggtattaccattagaatttctcgagagcttncgttgtcaatttcgagcgtctcgtatattatgcgcctgaattggaaattcgagtgaaaagttaagaccattttgaacttctccagagcttcccgttgtcaatttcaaccgtctcgatatattatgcacttgaatcggacct

SEQ ID NO: 73213 - DNA, 352 bp, Glycine max
  unsure (1)..(352): unsure at all n locations
catatgccaacatgtattatatgtcacttatattctacacctaaattatggaaaataggttaattcatttaatattatataaaaaatttaaagcaatcattaataattannaaataaattttaagaaataaaaaaaataattaatttcagaaataaaaattaaaaataaaatttctttattaataatcataaatatctatttaactaccccattaaaattaaaacaatcataagtattaaaataaatttcattaataaaatcatggaccttatatattattaatatctatccttattaacctattaaaacctctcatttttaatattataaaataatggacagagaaaaaac

SEQ ID NO: 73214 - DNA, 498 bp, Glycine max
  unsure (1)..(498): unsure at all n locations
agcttgcccagagaaggaatccacggaggaaatgcttaccttcttattgactggaaagcggnttctaatgactcctctgcggcctccacataaggcataaaggatgggcagttcaccaagatgtcttcctcgcctgatacgatgaccagatgcccttccactacgaatttcaaattttggtggagtgtagagggaacaactcccactgagtggatccacggacgccccaacagacaactgtaggggagttaatgtccattatttggaaagtaacttggcatgtgtgagggcctatctgtactgngaggtcgatctctcccctaacctctcggcgggtgtcgtcgaaggcacaaaccaccattgaactcggctttaggtgggaggcattgaatggtaatttctccaaagtgctcttaggcatcacgtttaaactggaaccattatcgatgagcaccttggctatgatatggtccatacacttgactgatacgtgtaaag

SEQ ID NO: 73215 - DNA, 165 bp, Glycine max
  unsure (1)..(165): unsure at all n locations
cttaccccactattacccacaaccacccctttttttatctatgtgaagaaaangacatcggcagaaatgcagntgagaagagaaaggggcctatgctttacttgtgatgacaagttttcccctagccatcgttgtcctaataagcaatattttgttccacagtgg

SEQ ID NO: 73216 - DNA, 508 bp, Glycine max
  unsure (1)..(508): unsure at all n locations
atccttaagtcacctgcggcatgcaagcttcagaccanagcaactcanaatctangtatctattacccctcaatttagtggatnttcaaggtttgagaagtgaaaatgagaatggggtaattttggagcaaactctcatctcaaacaagtctataacattaatctaaactcgctcaaactggttgtacgacgaanactctaccgaatcaaaatttgactcctcaatacccaatttaccctagaaatggctattgccttcactttggtcactcattttcctcctttgcacaacccaagctttcccacagtcctaaatgacatttcaaactaggattaactcactttaacctccaattaccactaaatccagatttagcttttcaaatcctcaaagcatcacacttttccactcatatcactacattctcactntnntaaccctaggttaactctacccttcatctctatcagttntccatcagcaatttcagcacacaagcatcacaag

SEQ ID NO: 73217 - DNA, 493 bp, Glycine max
  unsure (1)..(493): unsure at all n locations
agcttaagtcanaagtgataaaaaagatattatttattatttttattttaaaggatctaatgataaataatatgatcagtttaatttatatatacaattagcataaaatatttttatatttacattcaacatgaatttatcttagtttattaccatatcatatatattataaaattagataatgtggcaataagattaattntttttttatgtttaacaagcatatgctatttaaagatataaaaaataataataattttcaaaaagaaaaagataaagtatggaaagagagagaatgaccgagtagaaaagattgcgaaagaggcatcagacccctcaaatagttgttccttcttcgccttctcagttntcctctttaactctaggtgctacatatctctatntatttccatacaaaaccaacaatatgaaatctgttntacttctagtatcccatcaagtaaaaaaagtatataccatcccaacatgcagc

SEQ ID NO: 73218 - DNA, 439 bp, Glycine max
  unsure (1)..(439): unsure at all n locations
agtcacctgcggcatgcaagcttctggtgtctgggaagcacgttattctgttgtttctctatcggntccttcgccaagtatgtgtatatgtgtatatatgtattatattcgntgctctggttgttgtttgtattttgttttgtgcagaagaaaaaagaagaagtagagacgagagtcgtcatcacggaaagggcagggcggacgaaatcagtgtcctatctttgctttcctcttatctccgatgagaggtaagtaaagaggggcaactgtcataccctaatttcgtctggggattattacttgatgacatgcaataaatgaagtcccgagacgtctcanaaatcaaaaggaagcagacttgcgcgatccgtgatattccgtaatgtggcggaaatcgaaaagaggtgtttttgcacaatccgtgagtttccgtaacttc

SEQ ID NO: 73219 - DNA, 324 bp, Glycine max
  unsure (1)..(324): unsure at all n locations
agctntgatcttccaccaccgtcgccactatattttatatctttanttttatattattagtactttgattntcagccttgtattttggctatatcattatggtatttgaacaatntactattccctatttgcatggtatgtttgaacaaatattaagtatgttatttgactatatgggttttatagataaaactttatgaatggtgcttcctggcttgggtggtagtatctcaatgaatggtgtatggatggttagatatgtttgaatatttcaaaattgctacgcacttttgctttttcgtgatgccccagggggagagaaat

SEQ ID NO: 73220 - DNA, 482 bp, Glycine max
  unsure (1)..(482): unsure at all n locations
agcttacaanaccatgcncatatgncattgttgtttttcatctagcactnngggggcacatgttttggcatgaatagcaagagaatgggggcaatgtggcatgccccattactctagaatgaaacataggcctaaggccatcccttacaaccccttaatttagcgaaaacaagcatggattcacatgtgaattgcctcacgaatttcataaaaaatgagcaactaaagcactaanacacatcaagggagagccaaataaccaggggaaagtgcacttacttgtggggagtgaaataaagcgtgaaaagggaagcaaaaactcaacaatggaagcttgggggctgctgtctttgtagttcccgtgagcttgcgtgtttcgaagtgaggggggagagatttggatggaggaaaactcctcctccttcgtttttatttgcatgtgcaggggtgctcgcccaggtgagctaaccttgttttttttg

SEQ ID NO: 73221 - DNA, 418 bp, Glycine max
  unsure (1)..(418): unsure at all n locations
cttctgaaccaatcgnacatcaccctgcactgctacgtgatatagacagagtcagaggcagtgacagcagtgtggaacatcaacctcttctttacattntattggtgaataggttctcttttagataaatagagaggatttccattttctaaattagagcatggatacagagtcacatatcatgaagatatgactatcaagttaggcacgtcagatactcagtaaaataaaagttgacaactnttgttacttaataatgaaataacatgaggaatgatggtcattaaatagnggagacaccaacataatggaaatgcggaaccggtacacgaattgagacatggccaaaacaattatatgagttaaacatggaaaatcttctgttgaagatgacatgggtcatggctgtttatatgtt

SEQ ID NO: 73222 - DNA, 500 bp, Glycine max
  unsure (1)..(500): unsure at all n locations
aagcaccgcngctgcagcttttatttagagatgcaatgggtgatttatctatgcactcctctaatgactatggcatcatttctggcactaaactgctgggagttggaggccatattctcaattaaatttctggcttcagcaggagtcatgtctccaagggctccaccactggcagcatctatcatacttctctccatattactaagtccttcataaaagtattggagaagaagttgttctgaaatctgatggtgggggcaactggcacatagtttcttaaatctctcccagtactcatacaggctctctccactgagttgtctaatacctgagatatccttcctgatggctgtggtcctagaagcagggaanattntttctaagaatactctcttaaggtcatcccagctcgtgatggaaccttggagcaggtaatacaactagtcctttgccactccctctaatgaatgaagaaaagccttcagaaatatgtgatcctc

SEQ ID NO: 73223 - DNA, 502 bp, Glycine max
  unsure (1)..(502): unsure at all n locations
gtcacctgcggcatgcaagcttcaatgagcaccgcttatcatccgcaaacagttgtctctacagaggttctcaatcggatcttagaacaatacttgcgcgcttatgtccatcatcgcccttcagactggttccattttttatctctcgctgaatggtcatataatacaacatggcattccagcttaggcgtgtcacctttcgaaatagtttatggtaaagccccacataccattgcccagtatgtacaaggtacctcccctattgatgtctttgatcacatgctgaaggataggaccgagcttcatgccactctgcaacgtcanttttgcaaagcccaggaagccatgaaagcctcagccgataagctntgccgtgatgtgcattttgaaattggtgaatgggtttatgttcgccttcgtccctaccgccagacgtccatagcgtcgacttacaccaagctttccaaaagatntatggcccattccangtactggatcacat

SEQ ID NO: 73224 - DNA, 488 bp, Glycine max
  unsure (1)..(488): unsure at all n locations
acctgcggcatgcaagctnntgcggattggtcttcgccagtgaaaggatcgatgngttttcttaagagcaaatttatcatcctgcttggacgaatgagaaaactggggcaaataaagagggtgaggatgagggagaaacccatgctgtgactgccattcctgtacggccaagtttcccaccaacccaacaatgtcattactcaacccttctccttacccaccgcccagttatccacaaaggccatccctaaatcaaccacaaagtctgtctaccgcacttccaatgacgaacaccacctttagcaaaaccaaaaacaccaaccaagatatgaattttgcagcgagaaagcctgtagaattcaccccaattccagtgtcctatgctgacttgctcccatatctacttgataattcaatggtagccataaccctagccaaggttcatcaaccttcatttctctgagaatacgactcgaacgcaacgtgtg

SEQ ID NO: 73225 - DNA, 279 bp, Glycine max
gacggactagccaataacttcctgggattgctagttcatcaaaagcgtacaaaagtagattaaaataaagccaaacttgtcttggaagctagtctacctctgaacaaaaaagaagtgcagagttaaataggaaagattaatttcttgaacaggtgtatagctaattcggctagaacaaagaaggcatcctcaccactactgaaagtaaaggataaagatcaggttacttatgaggaagaacaaaaactagcctttgaccaaattaagcaaagtttagat

SEQ ID NO: 73226 - DNA, 480 bp, Glycine max
  unsure (1)..(480): unsure at all n locations
agcttgtgacatctatagcattcaacaagttcttactcntgtttccnctaccccttcctctaccaccattcctccctcttcctcgattaccaccccttcctgcagaagagactttcaaggcctgttcttcatctttctcaagagtatactgcattctttgttcatgcactaagaggctactttgcaattcatcgatggtgagagcagtgacatcattagactcttcaattgaacatacaacataattgaattttgatgtcatggacctaagaaccttctctaccaccttagtttgacccattgactcaccatgcgtagtcatcttatttgcaattgctaaagttcttcgaaaatactcattaacagtctcattatctttcatagaaagaatttcacattctcttctcaaagcttgaagntgagcacgttttaccttggtggagcctctgaatttctggcgcattgaagtccaaatatcac

SEQ ID NO: 73227 - DNA, 416 bp, Glycine max
  unsure (1)..(416): unsure at all n locations
agctngcttctacagttgcaacttggaatttctttttttataaacctttccttcctcatatgaatccagacccaatgtcttggttcaaaaataactctgacgtgacccttattttcttcctttgcatattgttcattcttcttctcaatgttggctcgaacttttaaatgcaactccttgatagaatctgcctttttcttaccatcaaaattaacatactcattagaaggaaaaggtaagatatccaaaggagtcaaaggattaaagtcatacacaacttcgaaaggagaataagaagtagtagaatgaacagacctattataagcaaactcaacatgtggcaagcatttctcccagtttttcaaattcttttgaatgatagcatgcaacaaggtggtaaatgtcctatttagaac

SEQ ID NO: 73228 - DNA, 473 bp, Glycine max
  unsure (1)..(473): unsure at all n locations
agcttaaagaggtgagtctcatatcggtttaattgatttcttatatcatctaatcgattacattattcttgagttattagaagaatatgtaaaactcaagttattntaatcacataatctaatggaaacattttcatcctaagaactatcaattctatcacaacttctttgagctagctcagaaatcccatttatttgaaaacttaaaaaataaattgttaaattgtttacttagttgttagcaacaaaattgaacactagctataaaaaaattatgcatatagccacatggaaacaaaacatattcagaaactcaatgtgctacagtgggatgcataaggacttaagaagaaacccaagggagaggtggaaaattaaaaagctcttgcatctgtctacattctagattattagttatcatggactgatccaaaagctcanaaaagcatagcaaccaattatttaacaagatc

SEQ ID NO: 73229 - DNA, 377 bp, Glycine max
tactggatatttcggccagtgcaccaacaaatcattcctttgataacacaaagtgtaatttgcgatgcatgctaacatgttgacctatatatggcaacaatgactttgaaatatacaaatactgggttggcaatcatgattcatgccatgccagtctcatattcaaacccaaacatatttaaacacaaacgaaagaagtctgatttaaaaaagatatataaatattgctttagaaataagccaatttatattttcatatagaaaaaacataatattcatgtgatctaagttgagattagatataagcttattaaaatcggtgtaaataagcctatcttcataataatttaatttgtggtattaattcagacgattat

SEQ ID NO: 73230 - DNA, 497 bp, Glycine max
  unsure (1)..(497): unsure at all n locations
agcttgagatcatgttgctngacagtcatgcatgtactagtttctattttatgcgtaatccttntgtttttgtttaggctatgctagtttgcagtaagaaggtgatcaaacgagttcggtgcggactcaggctactcaagaacaagaggcaggcaatagcaaggcaactgagaaaggacttggctgagctaatacaaagtagccatgaagaaattgcatttaaccgggtttgtttgttaatgctacatactcatttgttaaccactacttgcataagtatattccttcatgtcctgtttttggttctaataagatgaagttntctactttttctttccattaagtatgagtatagggagatggttttccatgaacaaagttgcacgggtgtaggtactgtcactgttctatagcttaatgtgtaaccgtcactgcgtactacccccatgttatcggaaaaactgctcactanacccctttctcctcanatattcacg

SEQ ID NO: 73231 - DNA, 504 bp, Glycine max
  unsure (1)..(504): unsure at all n locations
atctctgagtcacctgcggcatgcagctnntgaaggatcaaaagtgccttatgaatccttctgtgcttatgccaccagtacctggaaggcctctcattntgtacatgacaatcttggatgagtcaatggggtgtatgctggggcaacatgacgaatctgggaagaaagagcgcgctgtttactacctaagtaagaagttcacgacctgtgagatgaattactccttgctcgaaagaacgtgttgtgctttagtatgggcatcccatcgcctaaggcagtacatgctgagccatactacctggttgatatccaaaatggacccggttaagtacatctttgaaaagccaactctcacgggacgaatcgcccggtggcaagtcctgctatccgagtttgatatagtctacgtcacccaaaagggcgataaaggaagcgccttagcagattatctggctcaacagcctcttaacgactaccagcccatgcattctgaattcccggatg

SEQ ID NO: 73232 - DNA, 480 bp, Glycine max
  unsure (1)..(480): unsure at all n locations
agcttcagcanatttgcaccaatcccacttcctancttgntatcgagtaccatgatggcctgctattcttcaaccacaaagtttggcttgaactagaaaaccctttcattgtgttgttgatcgaagaattccactcaacaccaattggcggacatttgggttttgccaaaaccctgcatcgagtatagaacaaattttactcggctaatatgcatgcggacatcaaacttttcattcgtcagtgcatcacttgtcagcaaatgaagtatataaccaaaaaacccatgggattgcttcaacctttaccggtcccaactgccccatggcaagacttatccctcgatttattacgggtcttccgccttcatagggatacactgccatcttggtcgtcgttgaccatttcacgaaaggagctcatttgggtgccctccctacccattatatagcacacaaggtggcacatctcttctttgacat

SEQ ID NO: 73233 - DNA, 405 bp, Glycine max
  unsure (1)..(405): unsure at all n locations
agcttaagccaattatacgacaataactnnttatttgtatgtctganngagncncgnaatataacgaaacgctcgaaattgaatgtttaagctctgagccaattctaacgataataactttttactcggatgtccgattgagtctcgtaatatatcgacacgctcgaaattgaatgttgaagctctaagcctattcaaacaacaataacgttttactcggatgtccgattgagcgacgtaatatatcgggacgctcganattgaatgntgaacctctgagccaactcaaacgacaataactttttactctggatgtctgattgagtaccgaattatatcaagacgctcgaaattgaatgtgaagctctagccaattcaaacgacaataacttttactcggtgtgt

SEQ ID NO: 73234 - DNA, 496 bp, Glycine max
  unsure (1)..(496): unsure at all n locations
agctngacattaanatttccctctaatattaaaagcctatataaaattaaattagccaaaaattaaaaaaattaaattttttcttaatatacatttgattaaatattaaatttccttttaataattgaaaacacttaaaatatctttaaatgataaaatgctagtcaattattctaaaataaaaattattaaattaaattaattttaatcttatccaatattatattttttactaaacacttttcattcattcatgaactaatctactatccaaaattattaaatagcattattcaatttaatcaattcattaattaatcatgatactataagtgagacaattttttatttaaaaataattataattttttaggtatgacattaaataattaataattaaaaaatgattcaagactaaaaggattcattacaatattcaaaatagtccatcgaatcttccatgacaaattagtcaatgactaactcaatatctcgg

SEQ ID NO: 73235 - DNA, 473 bp, Glycine max
  unsure (1)..(473): unsure at all n locations
agcttcgattttatctccaaactccatgaatgtgcttctgtttccctctccatgtgctntntttcgattntcttcactgcatgttcgttgtttcttctaaagttgccattnttatctcaaaaagtttcaatttttatctccaaactccatgaacacacgttcgttnttttgctttctttgtcaaaggttaaacatttgtgatgtatctcatttctccaaaaagcttcgaatttgtatgccgttttttttttccgattntttgttttttcactgcatgttcattgtttcttctaaagctatcatttttatctcaaagcttcgatttttatctccaaactccatgaacacaagttcgttttcttgctttatctcaaaaaacttcgattnttgcctttatccctcttgatgtggtattgatgtgcttcgttntcccttcccgtcttcttctacgttttctttntttacctctattt

SEQ ID NO: 73236 - DNA, 497 bp, Glycine max
  unsure (1)..(497): unsure at all n locations
agcttgtcaaaagggaagcatagttaaaaatcctttcttagctaaacgttgnntctacttcaaaaccccttgaactatttcacattgatttatttggtccctctagaactatgagtttaggtggaaattactatggtttagtaatagtagatgattactcaaggttcacctggactttgtttttgaaaaccaaaaatgaagcttttaatgcttttcacaaacttgccaaggtgattcaaaatgaaaaaggtctcaacattgtttcaattagaagtgatcaccgaggtgaatttcanaatgagtcttttgaaaacttttgtgaagaaaatggaattcaccacaatttttctgccctaagaacacctaagcagaatggtgtggtggagaggaaaaatagatcccttgaagaggtgccagaacccttctaaatgaaacaaggttacctaagtacttttgggcagatgctgtacatactatntgttacaccttgaataaag

SEQ ID NO: 73237 - DNA, 463 bp, Glycine max
  unsure (1)..(463): unsure at all n locations
agcttcttatccaaggcacattcttgggttgtttttctntgcatggcttattccctagtggatggcgcctcctctcacctcttctcctttatcttccgctgcatctccaaggtggaaaatcaccattgaaggacctcattgaagctcaaagatccaacctccatagaagcttcacaagcaagcttccatcaagataccacatgatgtaaactccattggagcttgtaggcctaggatcttcttcatcaatagattcctttgcttcttggaagatgaatggcagcggaatggagaaggaagagggagaggagacgccacttcaaggacaagatgagtctagaagaagctgaccaccataggaggccatggataagagcttggaggaagaaacagatgaatgaagggagagggagagaagagcacgatnattngtgctctaagagagctctgaactttgaagtta

SEQ ID NO: 73238 - DNA, 433 bp, Glycine max
  unsure (1)..(433): unsure at all n locations
aaagntaaccacatcaccaacaagacatcaataattaattactcagaaaagaaaaaaaagaaaaaagattagaacaagttcccactcggaaatactttattaagttaaattgtaaacgttttaaatggcgattctgataactgttaatgcacttctccttccctgtttgtttttctactaaaaaatggtgtcttttaaatttgacgcttaaagtgttgtgaattgtcttaccaaatgtatagccgactgagtaagagatcctaataaatttggattatagttttgcaaaataaagtntagattaaatntaaatttataaaaatatcctaagccttgattctcttaaacgaatnttcagtannaaaaatattattatgaaacatacntttaaagacaaatcatacatgattttaaactgatttaattcttaaac

SEQ ID NO: 73239 - DNA, 217 bp, Glycine max
  unsure (1)..(217): unsure at all n locations
ggaatctagcatcatatggctttgttttangtcacgangcaccacacaatnttcacattcttcatgacgatagagcaataatgatccaaccctaatggctatttgtacctttcattcaaactttgactattactaactaaaattttgttgtttccaaacaaatgattactaaggcttccatttggcatgtgctcatatacaaaaagaaactcactta

SEQ ID NO: 73240 - DNA, 448 bp, Glycine max
  unsure (1)..(448): unsure at all n locations
gttccagnatatgacggaggaggtagaattcattttaaagtttaatcctacttgctttntaggaagagatataatatcaatttctaattatagtgacctgattttcctagaaatgaccaatagattgtgtttcagacttaaacttcatttgataatatgatnttggaagcaatcatagtcttaaataaatactctggtacacttttgataaaggatttagttggctcaatggaagtgtcaatatagaatattgatgcatgtganaaatccatgtaatctgcttatacctatgatttagggattaggatttaagcctctaaatagtaagagagcggtatgtatccatagtagtcaatagcatgctgtagcagagcagccttgngctactagagttgaaataactgagtggttttcaataatggccactgcagccacaatagtggcctat

SEQ ID NO: 73241 - DNA, 515 bp, Glycine max
  unsure (1)..(515): unsure at all n locations
gtcacctgcggcatgcaagcttgtgcatccaataccctgatgaggatgtcccattgttcttataactagactgatnccattgcttccaaagtttcatggccttgcaggtgaagacccgcacaaacatctgaaagaatttcatattgtctgctccaccatgaaacccccagatgtctaggaggatcacatatttttgaaggtctttcctcattctttagaaggagtggcaaaggactggtttcattaccttgctccaaggtctatcacgagctgggatgacctcaagacagtattcttagaaaaaaatttccctgcttccaggaccacgaccatcagaaaagatatttcaagaattaggcaactcaatggagagagcttatatgaatattgagagagatttaagaaactatgtgccagttgtcctcaccaccagatttctgagcagcttcttcttcaatatntttatgaaggactcggtaacatggagagaagtatgatagatgctgccagtggtg

SEQ ID NO: 73242 - DNA, 504 bp, Glycine max
  unsure (1)..(504): unsure at all n locations
gtcacctgcggctgcagtacaaatttaatttaagtttgtaccacccttattgnttgcaataggaaaactcaaatatccataaaagaattcataacttgcaacatttgaatcacaatagagactaatttaattgtttctcaaccaaattcaaataaaaaaaatcaagtcttttaaagcaacataaaagtttccatagcttcaactccaactttatgtcattgcccacatagatgaatatttcattatcacttgacaaatgactccataggtaacatcgtatagacattattttgtgagtactagaaccaaaatctacccactaatgtcattcggtacaaaactaaattaactttaaaataaacaaaagaaatgagaagcttatcattcttcacacactaaatagtgtaactgggactccgtttntataatatgcctcatcctacaaaagcaacaagggaaattctaatcttgttctcttgtctcttctctataaaaacaaagata

SEQ ID NO: 73243 - DNA, 458 bp, Glycine max
  unsure (1)..(458): unsure at all n locations
agcttctgtcaccttcttccctgctccattctcnnttacntttccttcttcatcctttcttctaaaacattttcaaactacataattgagagagaaaacaaagttgaaggtagcttactctgtatttggaggaatatgcgtgattgacaaggttcttaagcatgccaagaccaatacttgcaagaaataatgcctgataggcagtctctgccactctcacgaagatgatntcttcttcttttactcttcatcatcaccggtactaagacacaagcacaccaatacactcatccacacgccggaattatgaaccatattaatgaaacttgagttgagtgccttttatttctctctactgatcagtatatacatacacgtacacaaaagctccactatcacacgtgtttattacactcagatcactgccccatccacctaaattttttgtaatatattta

SEQ ID NO: 73244 - DNA, 491 bp, Glycine max
  unsure (1)..(491): unsure at all n locations
agcttgtacttcagtcatccataaacctaattttttatattntacatggctattgttaacctacacttgtcgtaatggatataaattatcaattaataaaaaagataccttataattatggtacttacatcatccatagttgtagtatagatatgttcaaacatttgtagcctgatataatttctgttacatatgcacttgtaatgaaaaaggatgtgtgtacattangaatcctaaattttggcccatcccatggcaactcaacgggcttctgataaacatcaaacaaactcttaatcaattctcccaatggatcctctcctgcaactatattgcacctttcaacatctccaaccagtttaggcagacgattgtgtgaatcctataaggttaaggaaaatgacaattacactaaatttatgaaacaacttttaacaatgtgacaatgactgtaaacatgcagagggaaaataaatacctcatcagataca

SEQ ID NO: 73245 - DNA, 504 bp, Glycine max
  unsure (1)..(504): unsure at all n locations
ttaagcaccgcggctgcagctggtcgagtctacccgtgaagatttagtactatgaagaacgaatgaagaacgtcgaagaacggttgaaacctttgcgagattcctcacggaaaacgttacggaaacgtttcggaagcgcctcggcttatattttcttcatggaaacaatttttccaagcaaattcgaaagagagagaagtgcctaaggggctgaaccccttccttcttgccttcctcccctatttatagcaaaataggggaggtggttgccgcccagctcgcccaggcgagctcaactcgcccaggcgagcagggttgcttcctccagaagcaaccgccttctggaggaatattccggagggcccaagtgggcctgggtgctatttgcacccccatttttactaagtacaccccnctctgctgtttnttggtgattctttttcgtaaagtaccggaacttacgaatttcgtaacgatacttggtttctttccgtaatggtacgg

SEQ ID NO: 73246 - DNA, 446 bp, Glycine max
  unsure (1)..(446): unsure at all n locations
agcngccgctgcgggtgtgatcgaaccgctcgtgcttantctctcttcttccaacctcgatgctcgccaatcctctctcctcgctctcctcaacctcgctgttcgcaacgaacggtacccccccttctcccaagatgtatgcttttttgtgaattgtgaaatgggtctgcgaatttggcttctgggtctttgtgtaaaccttgtttggttcgtctgaatctgattcttatgtggtgtggtgtgtgtatagtgttattgtcttagtgtgatacttaatcttatcccagtaggaaaaaaaatggagtataacggcactgtttatttatttattattgataaatcgtactgcaatatctagttgatggatgattggaatttccctttatttttaatgacactgttataaagaaaatttgttcttctgaatccagctcatgtatgataca

SEQ ID NO: 73247 - DNA, 337 bp, Glycine max
ggcaagaagaactcggtccctatatactttgatttgagtccatccgactgtcttgtgagggatatatttgagaagaggggtgagctgtgggaaaaacatggaggggagcttaggcttatgtatggagggttggagcatgagtggaaagatgctgttcatggcctctcacgtgttgaagaatggaagttggaagctcatgatggacactggagagattgcatactgagggctgtatcattattatcaatgaagatatgctaaagaagtgcggctgatcatctgacaaaatggagggagatagtgatagaagagagctgcctttcactcgaatgagaac

SEQ ID NO: 73248 - DNA, 425 bp, Glycine max
  unsure (1)..(425): unsure at all n locations
aactacagatgtaagtnattaagcatgataatacaaattaaaatagtatctaacgtacagagctatgataatacaatcttaaggtgctctgaacttcgtaattcatatttaaatagtctcaaaattttatttgtgcatctagaattgaatttcagatcaaatgtcagagtctgacaggaaaaaaattgtcaactgctggacattgtgcgcatatttggggaccatattaaggagtttgaacgtagtcacatcgcaggcatccaatttaaagattagatagggaaacagaatcaccccgaatagagaaaatcctacacacaattttgttataatgcttaattcctttgaagtccttgcggctganagagagattcttncatcattaattgagacaacacatgggtccgaaccataaattcattatg

SEQ ID NO: 73249 - DNA, 361 bp, Glycine max
acgatgaaacacaattataatttctataatttgtcattagagagcgttccctggcgtgccttggtgaccgtttggtcacgggttcaaattcggaaacaacttctttgcatattcaagggtgagactgcatacaatgattctctcccgtaccttcacatagtgaggagccttctggcaccagcgtatagttcataatttgtcattacttagataacttctatctttttccggtaggatgagttggatgaaaactacagttgtgtaccacattacatatccgctgaaaaaaagatagtaagaatactaaggctattttctggattatgtccaaaagtaatagtgtgctatatccacattgttg

SEQ ID NO: 73250 - DNA, 435 bp, Glycine max
  unsure (1)..(435): unsure at all n locations
gtctggaaggcgtgaaatatggtggtaaagctgcagacacgtgggcagtaggagttactttatactgtatgatattgggtgaatacccttttcttggagacacccttcaagatacatatgacaaagtaagaaatacacatgttctntattataattacaacaaaaatgtcattctggtttcgaaagttctcactatacaaagtttcttaactttttcacccagatattatacatggcattcatgtttatactggtgcctatatcacaatcttagcttgctgttttcttcctgatccagatagtcaataatcctttagtactcnccaacgacatgaatccaccattgaataacttaatagaaggacttctttcaaaggatacatgacattcagcatttttgcatatgatgtgactacgtctccttgtaatgcttag

SEQ ID NO: 73251 - DNA, 426 bp, Glycine max
  unsure (1)..(426): unsure at all n locations
taatgcctataggttggacctcccaagagagatggagtcagcaccacttttaatatttctgatttaattccttttgcaggtggagctgatatagaggaggaggaaccaatagatttgaggtcaaatcctcttcaagggggaggggatgatgcaatcctccctatgaaaggaccagttaccagagccatgagcaagaggctccaagaggaatgggctagagttgataaagaaggccttatggttctcatgaaccttanggtagatttttgagcccatgggccaaggttgggtccactcttctttgtaatagtagaataggttgtntcttcttttgggcctgtattttggcattctagtagtatagggtttagccttgtatttanggcatcttgagagtcttgtagaggaattttttttgattcatgt

SEQ ID NO: 73252 - DNA, 479 bp, Glycine max
  unsure (1)..(479): unsure at all n locations
aagtcaccgcggctgcagctgtaaagccggctgatgatgtanggatatttttctgtagcgtggttccaggataagggaatgccctacaatatttgcatgatatgcatgcaacaatgatgatttagaaatttatgcaaaactgatcatgcatacacccatgtagacactcaaacatcaagttcgtggtcatgtgacactaaggcttangatttattttttccctttaaatcaacccagtgtttctaaaagatggtcctttatcaatntatgcacacatccaagtccatatatgcattcgggaaaacttccacagcattcaccccacaggtgtacacacacattnttcttccaaaaatctgcttgtgttctgactggtgaaatgattaaaagaacaactggcagttcatctcttttcanagcgtgtcggtcttttagccaattaattaactatntctgtcatttattattcaatttctatc

SEQ ID NO: 73253 - DNA, 316 bp, Glycine max
  unsure (1)..(316): unsure at all n locations
aaacaagaattaatgatacttgcattgacattataaaggtcatttatactgtcatctgatcacacatcgtcatatatgataactntgttgactcttgcaataattatcttgaaagttataatgatgatttctgatttatcaacaatgtaaaagctcttacactaactgtacatgcctattgagttcttattaaaaagagcttatagaaatttcatcatctatgagcattattaagtnccatgtaagctctttcaaatgcctcctaaatccttcttaccaattgaagcttcgaccaaaatggatggagacttacaat

SEQ ID NO: 73254 - DNA, 435 bp, Glycine max
tttttttttgtctcaactaaagaaatacggcgacaagcaactacaaaggtaagcttgcatactgcaaaaagactaagagggaggggtggaggaccttatgatgaggacaaagtcctaaaatgtctttataaagagttcctgctgcagctggaacagtattcagctacaagcttggcgaatgaagaaagctttacctccataagttttgaaggttcatcaatcatcatatacttcaccagttgtcgacctacgaattacgtacaatcacaatataaaaactcaatgtcaatggtatgaatcaaacgaattttactgtcagcttacaccaacaagctgctatatgtctccttaaaaccaacgataccaatctcaagaattaaaaagaataatttgaattctctagaattttctgtacaacattaccatatctattgt

SEQ ID NO: 73255 - DNA, 415 bp, Glycine max
gatcttaagtcacctgcggctgcagctttattaagctgaaccatttatcataatattttttttttatcagaaatagagttatctctttatttgggagaggattctcctaaattcttgagtgatcaagaacaccctgctgtatcaaagactttcacaacctttgtgtgttgccctcctggagagaggatttttcttctatcatctccccttgtctttcaaccacaattcagaaatcccctctgccaaaatatctcgtgaccataactccatttacacactcaataagtgattcttgagcctaaattgatttcaaacgagaccttcacctcgtttgaatccctattggagcctgtacttccgtatgcattttatatttgccaccacccttacctacgttaccatcatcatcatttat

SEQ ID NO: 73256 - DNA, 301 bp, Glycine max
taggtatcacagttgaaattttgtcacaagacatgattgattaataataggcgaaacgtcacatgtatacatgcagcaatatgcagtgctattatgcgaattatattcccgatgcaatatacacatgtgccatctcccctttggcttacagacaaatgttgacttatgcaaaaaaaaaaactacaaggagggaataacctatataaacttacttatcttgcaaacaacgacagctacaacaatccggtgaaacggccaaactatccttatcttcggtaaagtatagatgctgtttatttta

SEQ ID NO: 73257 - DNA, 283 bp, Glycine max
  unsure (1)..(283): unsure at all n locations
ggagaatacccnctncnnggagacacccngcaagaaacaaatgacaacagaagaaacacacacgggcgccatcataaccacaacacaaatgtccttctgtattcgaaagtactcactttacaaagcttcttaactttttcacccagatattatacatggcattcatgtttatactggtgcctatatcacaatcttagcttgctgttttcttcctgatccagatagtcaataatcctttagtacttcccaacgacatgaattcaccattgaaaaacttaataga

SEQ ID NO: 73258 - DNA, 441 bp, Glycine max
  unsure (1)..(441): unsure at all n locations
tctacttcaaaaccccctgaactatttcacattgatttatttggtccctctagaactatgagtttaggtggaaattactatgggttagtaatagtagatgaatactcaaggttcacctggactttgtttttgaaaaccaaaaatgaagcttttaatgcttttcacaaacttgccaaggtgattcaaaatgaaaaaggtctcaacattgtttcaattagaagtgatcaccgacgtgaatttanaatgagtcttttgaaaacttttgtgaagaaaatggaattcaccacaatttttctgccctaagaacacctaagcagaatggtgtggtggagaggaaaaatagatcccttgaagaaggtgccagaacccttctaaatganacaaggttacctaagtccttttgggcagatgctgacatactatttgtacaccttgataaag

SEQ ID NO: 73259 - DNA, 444 bp, Glycine max
  unsure (1)..(444): unsure at all n locations
aaagcgaaccacagcaccaacaagacatnnaaaattaaccactcacaaaagaaaaaaaagaaaaaagattagaacaagctcccactcggaaatactttattaagttaaatcggtaacgctttaaatggcgattctgataactggtaatgcacttctccttccctgtttgtgtatctactagaaaattgtgtcttttaaatctgacgcttatagtgttgtgaattgtcttaccaaatgtatagccgactgagtaagagatcctaataaatttggattatagttctgcaaaataaagttcagattaaatttaaattcataaaaatatcctaagccttgattctcttaaacgattggtcagtaaaagaaatattattatgaaacatactgttagagacaaatcatacattgatttaaactgatttaattcttaaacatagacactcg

SEQ ID NO: 73260 - DNA, 515 bp, Glycine max
  unsure (1)..(515): unsure at all n locations
ttaagtcacctgcggcatgcaagcttctaactnatacaagaatgaagctctgataccatttgntatacaagtggcctcagatatcttaagaagggggggttgaattaagatattccaaactacttccccaattaaaaatctatttcactttttattcaagttatgaattcccttaatgacaatcttcttaaatattgattcaaataaaacaatntgaatatgaatataaagcaataataaataaaggagattaagggaagagaaagtgcaaactcagatttatactggttcggccacacccttgtgcctacgtccagtccccaagcaacccgcttgagagttccactatcttgtaaattccttttacaagttctaaacacacaaggacaatccttcctttgtgtttagaattcctttacaacaagagactcacggtctcttaatcccttagagaatgangagaagaagaagaataaatctctctagaaagagaatggatttacagattgagcact

SEQ ID NO: 73261 - DNA, 487 bp, Glycine max
  unsure (1)..(487): unsure at all n locations
gcttcgggctgctcaattgctctaggttgctgcatgttattacaaaggtctgtatggnggncagtagaggagcacaaaccacagacccttgcgacaggtacagatttctggttcaaggccagctgggttaccaagttaaccaatgcatccagtttgccttcaagcttcttagtttcagatgatgcagctgagtttgtagctacctcatgcactcctctaatgactatagcatcatttctggcgctaaactgctgggagttggaagccatcttctcaattaaatttctggcttcagcaggagtcatgtctccaagggctccaccactggcagcatctatcatacttctctccatattactgagtccttcataaaaatattggagaagcagctgctctgaaatctgatggtgagggcaactggcacatagttntttaaatctcttctagtactcatacaggctctcttcactgagttgtctaatacctg

SEQ ID NO: 73262 - DNA, 282 bp, Glycine max
acctgactaaatttaagaaatacatatgggacagggtctaaagagaatgccaaaatttttgggctcattgcagacctgataaggatttgttggaaagaaagaggtggctgatatttggaatagaagccctcttaaggtctctcgtatgctagatttgccataccaagtgtattcttcctacccaacagatgtgtggccaacagagagggttacattattaatgacactgacctataattcacgcccagaggaagctataatggtattaacatcaatatgtgc

SEQ ID NO: 73263 - DNA, 423 bp, Glycine max
  unsure (1)..(423): unsure at all n locations
actacacagaagcctttgaatctcttctttactttcaaatgagaaaactaccagaagataagtattttggttatttccttgggggactttaaactgatataaaacacataatccacaactgtaaaccaaatacccatttggatgccaagcaattagcatgagatttagaaacagaaaggggtgactattgtccagcagttggagggaattcatggaaatccaaaacttgaagccaaggaggtgctacaagattttcatagggtgacacangttggaacaattgggagcaccaagctataactgcatcatacaaaggtggtcataacagngataatggttttggatctgtnttccctccatcctccagattatttcttgctcattagttactatcagataatgaacactgctaaaaagtcacct

SEQ ID NO: 73264 - DNA, 488 bp, Glycine max
  unsure (1)..(488): unsure at all n locations
agcttaacatcttcactgtaagttgcaccttattcattggtcttagcgtggatgatgcgctaagcgccacttcctctctgtgaaaatntattatagctgcgctaagcgtgtcgtcccgcgctaagcctcagattcattctgtaagttgagctttcaagctgggcttagcgggaaaggatgcactaagcgccaacatcattctattntgaattcattggaagtgcgcttagcgcagggagtggtgctaagcctgaatcactcactataagttgaagcttgatgtacgctaaaccccaaatgcttactggaagttacaacttcaagttggacttagcgcgaggctaggctaagcaccagtgttttaaactcaaacatcagtttggcacgctaagtgcaactgcgcgctaagcgcaccatacgaatttcagtttttaaaaagtagaggcagaggcacttgggttgctaccttggcacccaaaccttttgac

SEQ ID NO: 73265 - DNA, 470 bp, Glycine max
  unsure (1)..(470): unsure at all n locations
agctgaagtgctntatagaactngaactcataactttttattgatacatatgcaactacttcatttttgttggaaaaatgattatgttttctagaatttttaattcattttagatttggaacattttgttatatgtttaattcattattggatcctgtgattgtaccaatttggtttacatgtgaattattgtgaactgagctntgttgctgtaacaatgtcataatagctttatattgttgagaagtcaatctcatttcagcattatgtgtatcttgactntattctagaacaacactatctccttcttccatcgacacattcatgttgttgatgcttgggccttgaggcttatagagcttatgtctaggagggtaaccatgtctagcaatgctttgagagtgagggtctgcccttggtcagattctaatcattctataagggtaggcccagtgatgtaggtctaaaac

SEQ ID NO: 73266 - DNA, 414 bp, Glycine max
  unsure (1)..(414): unsure at all n locations
acagcagggggcacaacttcatatgccatttcgaagccattagcattcccattgatgaagtttgaattcgtcactagggcaccaaatggattggcagcataagaattatcacccagagcgtgctctctaagaccaaaataaacataataagtaactacctaaaacagctggggattcaggaagcataaattatagcatgaatagatcaagacataagtggaaatgaagattacaacaaagtacactcaaattcatcaattagcaggcaagctacccaaaacatatcagtaattcagtgtttaaataaacatcatcatatgacagaccctattaataacatgtcatttatgctgagttcagttgtgctctcataagntattcttaaattataccacatttattattctattatgt

SEQ ID NO: 73267 - DNA, 517 bp, Glycine max
  unsure (1)..(517): unsure at all n locations
agtcacctgccgcatgcaagctntgagccanaatcctgactcaccatataccttgccttttgtgagaatgncgatccttaccctcggaagcgaanaaaaagagaaggaaaatctccaatcaaaggaaaaaaggaaagaaggaagatttccaatcaaagagaaaggaataaaaggaaagaatgaagatttccaatcaaagagaaagcaaaanaagaaaagaaggaaaattcccaatcaaagagtgggagaaagcaaaaagaaaagaaagaaaattcccaatcaaagaatgggagatagtaaaaaaggaagaagaagaaggaaagaaagctcctgatcagggatcgaaggataacagaagaaatgtgcagaaaggtctttggaccggacaatatctgaacaatacagaattgtcaccaaatgaacaaaaagaaggaaaggaaaccacgacctanaatggtcttctccctttgattaccaaccaaaatcccgtgcgctagcaactttttcgccccgcact

SEQ ID NO: 73268 - DNA, 371 bp, Glycine max
  unsure (1)..(371): unsure at all n locations
tgcagcttaacaattattttctcaactggttgttaatatgttgcctccccacacagttcctttntctgaaatttacaaacacttatatcaaaggggaacgccaagtatttaaaattaaaatggaatgatccgagtatctaacacaaggaacttgtttatttggcaaagctttgttcaataatcaggcattttgttgacagaaaataataattgtgaattgaagtaaaagtatgatatattctaatgtgaaaaacaataaatgcaagcaattaaaagtgacatcagtggtttaaaagaagtgggtctttctaataaacaagttgatgcatataaagatatntctctaattataaatggtcttatgttctatg

SEQ ID NO: 73269 - DNA, 491 bp, Glycine max
  unsure (1)..(491): unsure at all n locations
ggagaaccaagccaatcagaatgctagacgttatattttggtaatagaggtaacaatggcggtaatgacggaccgaggcagaaccgggttgagggagtaaagctcaatgttcctcccttcaaaggtagaagtgatccagatgcctacctgcaatgactacactgatgcgcagaaagtcaagctagcagcagctgaattctccgactatgcccttgtttggtggcataaataccaaagagaaatgttgagagaggaacagtgagaggtagatacatggactgagatgaanagggtgatgagaaaaaggtatgtgcccactagctataacagaaccatgcgacaganactccaagggctgtcccaagggaatntaaccgtggaagaatattataaagagatagaaatggcgctactganggccaacatcgaagaggactccgaagacacaatggctcgtttcctgaatggtctaaaccctgaaatcagagatg

SEQ ID NO: 73270 - DNA, 493 bp, Glycine max
  unsure (1)..(493): unsure at all n locations
gcagcttgctgccacaggagtttccgactatgctcttgtgtggtgngtcatgctacaaaaagagagagcaagagatgattagccaatggttgatacatggacggagatgaaaaagatcatgaggaagcggtatgtgccggctagttactcaagggacttgaaattcaagctccaaaaactaacccaaggcaacaagggggttgaggagtatttcaaggaaatggatgtgctcatgattcaagcaaatattgaagaagatgaggaggtaactatggctcgatttcttaatgggttgactaatgatatccgtgatattgttgagctgcaggagtttgttgaaatggatgattngcttcacaaagcaatcctagtggagcaacaattaaaaaggacgggagtggctaatacgacgtttaccaactttggttcttctagttggacagacaaagcgtaaaaaagatggtgctgctacttctagtagttccacacctat

SEQ ID NO: 73271 - DNA, 397 bp, Glycine max
  unsure (1)..(397): unsure at all n locations
agcttgtagccattagaagagaatgagcatgtgatttgatttatgactgaaaatgttagtcagtttgtcagattgattgtgaaggaatgcattgaccgtatcccggtgagagtgtgatccttacatcttgagagaaacgactatcatctagtacttgattttgcatgaatctctgaagtatggactaaatccatcgaaatgaggatgatgaaggtcatgtttgattgtgatagccacttanccaaaaagcttaccatgtgcttgaatgaatcatcccttgtacccaaattttgctgaatgaattattgatngatagaaccctgagcctatacaacgttattctcctgctaccttgacttaggttgtaggagagcatcatctacaggaagcatggttc

SEQ ID NO: 73272 - DNA, 405 bp, Glycine max
  unsure (1)..(405): unsure at all n locations
tcaacaagaatcaagccaaggctattgtgcaagcaatcaatggggcaaaacacaccaaatgattataatgatggatggctcaaattctcacaaaggtaaaatcatcactttcaaattgagctttcaaaactatcatgacatgtagagaagaatcaaggatttcaagtcacaaaatgtcaagaacttttattttcaaaacaattacccatttcttgaacatatcctataattcaaagaanaacatgcaaagtcgtacgtgcacacgaaattgacccaaaatattaaactgaaaatccgacgaaactaacaacattaacaaattaacacaactaacatattaacaaaaccaacanaactagccaaaccaaagaacactccntcccccccaccccccatacttaaaca

SEQ ID NO: 73273 - DNA, 446 bp, Glycine max
  unsure (1)..(446): unsure at all n locations
acctcagagtcacctgcggcatgcaagcttctttagatctaccaacgtaaatccgaaaccatttgttcgcacacctatattgntggcaacccacttacactctaaaacacaagcaatgaatttgacataattaagctcccacatattttctatgactccacagaaaagcattgaagctagacggggattggtatcatttacactagcaaagtgttgagattcaacccttatactaaccccattattttgcattgtactcttggtgtcttgtgatttcgcgtagaacgaatacttgttgatatcgtatccttgccaagatataacaccctgttatgccctttcaaccccttgttcttagacattattggattactttccttcactaaaccttcatcatgtactatgtatggcaaaactttcttactattattcagcatatacaaatg

SEQ ID NO: 73274 - DNA, 473 bp, Glycine max
  unsure (1)..(473): unsure at all n locations
agctngaagggtgtgtaccccaccattttcatattattatactggtaatgtgtctactattattctgatcatctctttccccgtcaatggaggtgccacttgagctgccaggtctctccatcttggggcgtattctttggaagattcatgcccctttttgcacatgttctgtagttgcatcctatccggaaccatatcaaaattgtactgatactgcctaacgaaggcaaccattatgtccttccaagaatggactcgggaaggctccaagttagtgtaccaagtagcagctactctagtaagactttcttggaagaaatgtatcaacaattcctcatcttttgcgtatgcccncatctttcgacaacacatctttagatggttcttaagggaagtagtccccttgtacttatcanagttcgacaccttgaacttgggaatgaccatgtntangtactangaacaattcttct

SEQ ID NO: 73275 - DNA, 482 bp, Glycine max
  unsure (1)..(482): unsure at all n locations
agctaacatcttcactgtaagttgcaccttaagcaatggtcttagcgtggatgatgcgctaagcgccacttcctctctgtgaaaatntattatagctgcgctaagcgtgtcgtcccgcgctaagcctcagattcattctgtaagttgagctttcaagctgggcttagcgggaaaggatgcactaagcgccaacatcanttctatttgaattcattggaagtgcgcttagcgcagggagtggtgctaagcctgaatcactcactataagttgaagcttgatgtacgctaaaccccaaatgcttactggaagttacaacttcaagttggacttagcgcgaggctaggctaagcaccagtgttttaaactcaaacatcagtttggcacgctaagtgcaactgcgcgctaagcgcaccatacgaatttcagttttaaaaagagaggcagaggccttgggntgtaccttggacccaaactttgactc

SEQ ID NO: 73276 - DNA, 465 bp, Glycine max
  unsure (1)..(465): unsure at all n locations
agctagatgttgaagacgccgggtaaatgtcttgaatcntcatcttcagcctcttttatggcctcttcatcgaataagttttcttcggatgaacttttctgactcgatccatgaggactgctggatccaatgccttgaccttcaccctgttcctcaacattcactgcatccgtctcaagagcgggagatgttcgagcatgtgagggtatttcttctacagaaacatcttgttgtacctgattcgaattatcatggaaaaaggttaacaaatacgttcgtataagctatgatttaaaacacattaagaggataatacctcgacggcaggttgntcttgtggtgagtccggttgatcgacagggttgcccatctcatcaatagaaggagtatcctctacttcagtgccgtcaatatcggtcgaaggtggttggacgtcaacaggttgattgccaccttgttcttttg

SEQ ID NO: 73277 - DNA, 421 bp, Glycine max
  unsure (1)..(421): unsure at all n locations
agcttcanactttcccttcaaaatctcaactttgncctttatggaccnctttctgcagactaagaatggcttctgtttctgggtttaagctgacacccctgagggctgtgggtggttcttcatcatcttctgcatcaggtgatgatggatttgtcacactgatagagtatgtggcgaaggaaggaatgaatgtgaaagatgatttggtggtgttgcttgatcacattcagtatgcttgcaaaagaattgcagcacttgtggcttcttctttcaattacagccttggcaaacaaactggtcatggttctgttggttctgataaggatgccccacagcctcttgatattgtctcgcgatgtttcttttttctctctgttgacaatattaaaattgagtggtgtctaacctactatccttttat

SEQ ID NO: 73278 - DNA, 490 bp, Glycine max
  unsure (1)..(490): unsure at all n locations
agcttcagaaccaaagcaactcaaatctatgaattatttacccctcaatttaggggattntcaaggtttgagaagtgaaaatgagaatggggtaattttggagcaaactctcatctcaaaaaagtctataacattaatctaaactcgctcaaactggttttatgatgaaaactctaccgaatcaaaatttgactcctcaacacccaatttaccctagaaatggctcttgccttcactntggtcactcattntcctcatttgctcagcccaagctttcccataagtcctaaatgacatttcaaactaggattaactcactttaatctccacttaccactaaatccagctttagctnttcaaatccttanagcatcacactnttccactcatatcactacattctcactntttaaccctaggttaactctacccttcatctctatcaattgtccatcagcaatttcagcatacaaacatcacanagcatcac

SEQ ID NO: 73279 - DNA, 400 bp, Glycine max
  unsure (1)..(400): unsure at all n locations
gcaagcttgaaatggtntactatcattgatgagagggatggggtggtgtttagtattccacagcctacgagcaggatcctgatatcctttggttgcactctagaggcagcaagaaggtccttaactgccccaaacatcaccattgatacctcttgcctgccatcattcagtgagtttctgtaaccagggcggaaaactccttttggcaggtaggtttcatcgcctatgccagatttcttaagaactcgttcttgaaactcaatggcggtttcattgaaattcctagatatttcggccaactgaatgaactctgccttagagatctgcataaataccctattattgaatgcatgccaacattggaatatanaaaataaataggcttaccccctcaagcata

SEQ ID NO: 73280 - DNA, 502 bp, Glycine max
  unsure (1)..(502): unsure at all n locations
gtgcacactcgaccggatcttaagcacctgagctgcagcttgaatggttactatcattgatgagagggatggggtggtgtttagtattccacagcctacgagcaggattctgatatcctttggttgcactctagaggcagcaataaggtccttaattgccccaaacatcaccattgatacctcttgcctgccatcattcagtgagtttctgtaaccagggcggaaaactccttttggcaggtaggtttcatcgcctatgccagatttcttaagaactcgttcttgaaactcaatggcggtttcattgaaattcctagatatttnggccaactgaatgaactctgccttagagatctgcataaataccctattattgaatgcatgccaacattggaatntanaaaataaatatgcttaccccctcaagcatattgcccaaaaactaagtgttcaggtttgatatatgttagtggacttttaaggcgctattatacagtaatac

SEQ ID NO: 73281 - DNA, 450 bp, Glycine max
agcttaagctccttcaactgcacaaggctcttaatatttgaagagattccttgtggaaccttcacccgacgaagacactgacaaaaacttatcttctccttcttggacaaagtatggcaggctgggggcaagtaaattttcttcccatcagaccttggatgcaactgtgatcgtatacctatatcagctagatcttgacaggtattcaagccatccttcgtcttgccttgaactgtaaggagcatcccaatcacactgtcacaaacattgttctccacatgcataacatcaatacaatgtctaacgtcaagatcacaccagtactgaagatcaaagagaatggacctcttcttcctatgtaactctgactttatccttttttgggcttccaaatacttattcggtgttgaacccctgatatacctgtcaccatcatggatcgcgcatatc

SEQ ID NO: 73282 - DNA, 393 bp, Glycine max
agcttgagcttagctacacatacctctctaatagctcagctcaccttcttgagatgagaagctagagcttatctacacacccactataatagctaagctcacccccatgactaataaacatgaatatacaaacaatgagtccttactacaaagactactcaaaatgccctgaaagacaaggctaaaaccctatactactagaatggacaacataccaggcccggatgaaggaaatactcactctaatatttacgaagataagcgggctcatacttagcccatgggctcgaaatctaccctaaggctcatgagaaccctagggccttaccttggatctctagccctagcgctggtggcctatcctccaccctcaacttttattcagagacccat

SEQ ID NO: 73283 - DNA, 460 bp, Glycine max
  unsure (1)..(460): unsure at all n locations
ggctgcagcttacatggttgagtggactcgtctagtgaaacatctacttgatcctaaagggttttctcaatttttaaatgatctttggatagattcttgaaatttcattgtaggtttttgtaagcttttgagagaatagactagttagatagaagctcatgataagcatttctaagagatttagggtccgaaatttacctcatcttcttagtctgattcaaactcctcagaggttgtatttgtcatcaggcatatgtgggcttcttcgttgtcttcattagatgaggtgttgtccaggtcttccttcccactgctcataagaaccttcttttctttagtcttgaagaatttcttcttatcttgacttttctccagatctagacattcagacttagactttgtatactcgtagcanactatagagcttgtggtctttatccttctttcttgggcattcttc

SEQ ID NO: 73284 - DNA, 400 bp, Glycine max; identical to SEQ ID NO: 73279
  unsure (1)..(400): unsure at all n locations

SEQ ID NO: 73285 - DNA, 441 bp, Glycine max
  unsure (1)..(441): unsure at all n locations
agcttctttccncgcatggtatatcccctcataaggcttcttctcttctgctgtagcagtcttccatttagcagtaacaatcttctgcagtaaggtagccagaaatatttttttatactggaaacattattttaattataatagtctaaaaatggttaataatgtgttcatttattatactcttataaaattcaatcatacatctcacctccaagatttcataaaattacataaattataagtgaagaacggatccaacggtaatttggtttttaaaggatctgcatgagcatcanggctattacataattggtgagtgaaactaggcaataatattttagttaacatntttttctaaagcttagccatgaatgaaatacagtgtatagactctaccctacagctagtngcaagtaanaacaattgcactaaagaaatatt

SEQ ID NO: 73286 - DNA, 459 bp, Glycine max
  unsure (1)..(459): unsure at all n locations
agcttcttgaacgagatcaatttattcattggcatatattaaaggatgaagacatggtacgtgatatattttggtgtcatcctgatgcaaagaagttatgcaatgcatgtaatttggtattttttatagacagtacctacaaaacaaacaggtacaaactcctactacttgactntgttggagtgacaccaacgaggatgacattctctgctgggcttgcatatctagagggtgaacgtgttaataatgatgtatgggttttagaaaagttatgaggtctattcttaagacgtgatggcctccctgtagttattgtgacagacaaagacctagaattgatgaatgcagcgaatactgtgttccccgagtgtacaaactctttgtgtacgtctcacatcgacatgaatgttaaggccaaatgtaaatccctaattggcaaaaaaatgcttgggagtatgt

SEQ ID NO: 73287 - DNA, 443 bp, Glycine max
  unsure (1)..(443): unsure at all n locations
agctntggagaaccaagcctatcagaatgctatactacatatacatgggaatagaggtaacaatggcggtgatgacggaccgaggcagaaccggattgagggagtaaagctcaatgctcctcccttcaaaggtagaagcgatccacatgcctacatggactgggaaatgaagactgagcacgtatttgcctgcaatgactacactgatgcgcataaagacaagctagcagcagctgaattctccgactatgcccttgattggtggcataaataccaaagagaaatgttgagagaggaacggcgagaggtagatacatggactgagatgaaaagggtgatgagactaaggtatgtgcccactagctataacagaatcatgcgacagaaactccaatggctgtcccaagggaatcttaccgtggaagaatattatatacagatgg

SEQ ID NO: 73288 - DNA, 442 bp, Glycine max
agcttctatataagctgacaccatttatcaataatttcaagttgagttctattcagataattatagtttatctcttttatcttagtgagagagattctcctaaattctcgagtgattcaagaacaccctggctgtatcaaaggactttcacaacctttgtgtgttgccctcgctggaaagagagattttttcctttcttttatcttcaccctcttctttcaaaccacaattccagaaaaatccaccacctctgcccagaattatctcgtggccataactcccattttacgcactcaaattaagtgattcttgagcctatattgaattccaaaacgagacctttcacctagttgtggaatcacctcatttggagccctgttgcttcaagtattgtcatatttatatttctgtcaagccaccacttagcctacattataccatc

SEQ ID NO: 73289 - DNA, 487 bp, Glycine max
  unsure (1)..(487): unsure at all n locations
tcttaagcgactgggctgcagcttaactgagatagatagttactatctctattccgatctagaaatcgtagacaatcaacttaanaaaataagcatcatatcgaggcagtccctaaaataataataattgaagcgggacacaataagatcacaggagatggaatattacaactaagctaacatgttgtatacaagcatgcaaagaccataatatcagcattaatgaactttggaacaattgagcacataaaaatatgactggttaacaaaacaaataaggcaaaaagaatcaaagcaaatagtagttaaggtccatataagtaaagcacctttatgccagtggtgttcaaagcactggcatcacttccatggtcagattcggtcaaagcctgatgttaagaaaataatccatttcagagaaggttcttcagcataatatatatatatatataagctggccaaggtaacatgtttgactgactctttt

SEQ ID NO: 73290 - DNA, 456 bp, Glycine max
  unsure (1)..(456): unsure at all n locations
agctngaggatagagacttcccaagctatntatcttctctctcaaagaggctctctaactttctagctttcccactctaagaagtggattcactcttgtcttggatggttaggaatgaaggctcctacccttatttatactactccaccaccacaatcaatggtggagattacttgtatcctagggtggagattaattctctagaatgctccacacattctatgagtctctacactattctacttctttccatactcttccataaggttccagaaggttccacacatctccagaatattccagaggtttcacaagcttctagagagttctacactactctagagttctccaggacgttctaganaattctacacttttctagaaagctctagaattttctagaatctctccaattaaggagggatcccaacaaatatatatcacccaattctggat

SEQ ID NO: 73291 - DNA, 466 bp, Glycine max
  unsure (1)..(466): unsure at all n locations
agctntagctagatttggtttcttatttataacttaaaactattcttcccttgaggagtgctaggaatactctctctaacacactccttcaaacacactctcacttattgggtaaaatttatcgaaaattacaaaaacaggagagagagagagtcattaaataggatatgggatccgcaattcttttttatttccaataaatttcaaccaataggagggagtgtgttcaaaatagtgggtaagagagcatattactagcattgctcttttccctattatcaaatctcttgaagtatgttaaagtctattatctattagacattttaatgcaagatgaagtaaaactacaatacatagagcaaaaagatctctatgatatgactaattttctagggaaaatgataacttaccctatataccgcatatttcatagaaaattaacttatttgttataaggataatacac

SEQ ID NO: 73292 - DNA, 342 bp, Glycine max
  unsure (1)..(342): unsure at all n locations
ttaatcacctgcngtctgcaatcttgatgagaatcatgatactggccaaatacacgctaattgctcatgtggagaatgacaaagccacctagtggataatgatgaaagccctagtggataatcgatgaacgcccanatgcctacacactatctaaactaataattgttgctaaaggcccaaactaatctgaacgcccaagcataccagctattagttataaataattgtcattggaatttcgaccccaactgtttagaatgcccatgtgtatntatatctttttggtcagctacactataagaattgctttttgctatgaatatcacaacttttggcatttg

SEQ ID NO: 73293 - DNA, 387 bp, Glycine max
taatcaccgccgctgcagctttgattccgggcgatgcattgttctcaatgctgatggatcgccatgaaagctccttacgaaggatctgaccacactggctgagactaggagtgtccttacttactccaagctcgccccttcttattacacctctgactttaacatggatcatgcgatgttggtatatggactcgttatgatgatggacatagacgtgggctacatattctcatgccagagctctcatatggccattccaactcctctaggcttggattacctttactcattacaacattgtgcataaccaaaggaggtctccctgattccctactttcaagatcttcacccgaccttaactcgctcttttatgaaaacagttggacc

SEQ ID NO: 73294 - DNA, 439 bp, Glycine max
  unsure (1)..(439): unsure at all n locations
ttaaatacttgttatattatagcatgttatctactatcgggaggataacatgctcaaaatgtctgcttctcaaaataacaaacatcgctcaaaatgtttanatcacaaggcagtgttttcagcacctaataactttgcatatagttcattcttgttagggtgcgatagtcatcaaaattaatgtcaattaaactcataaaaggtactatttataaatacatttacaacctgatgcggagtccaaatttagattcggttccttttaagtaaattgttcggtaatgatgagaaaattacttgaagtgaattgtttaattgtctataagagaattaatgatctatgcttaacccgcgcgtatgttacattataattttaaaaattgatggtcgagattaaaatcctaaatattaatatattatgtctatatcttaatgaatt

SEQ ID NO: 73295 - DNA, 472 bp, Glycine max
  unsure (1)..(472): unsure at all n locations
agctngtcgagttcatggagaatattgtgctcttggatctctagaatctctttnggagccgaacagggtctaaagggaagtgtgatgatgactcgaacacaatttacagatgaatggagttcgagaatctctcataactgaactactctgtctctctgtgttgcttacttgcttccaagtcacttcgctgatccacccacattgatcatggccgtggattcttattaacaaggagacatgagaaaacaaacaagacttgagggattagtaatagagagatattgaaaataaattctttataaaaacaattcagtttaactacttaaaagttattttaactataatttttntaagcataactattataaaagttaatgaacaaatgaaattgcaatacttgtcatccacttacaagtattgttatcttcattttaaagatacacttgacccagtattatctatgatcttatta

SEQ ID NO: 73296 - DNA, 454 bp, Glycine max
  unsure (1)..(454): unsure at all n locations
agctntacattatattaaaatcaatgacnttgatgtaatacttttgatattattctgatataattttatctctcctctttgtaatgagaataattttcaataacagttttttttctccacttttacttagttgattttattcctgaattaataaaaaaaattaccaactaatatccttcccttcaactgttcatgtataattgcaatctgtgtattatttttaaaatttactcttcaacggatggaaggaactacacaaagccgctaagtcaccaagaataactacatccagtttttatccagatttttacataatagctacacgttatttttctgtaagtgtacattatctttctctattatttntttctatctaactcccacgcaaggaagtgcatatccaactgaatcatgtactaattgcatccgntgttcctttatatgttctctgttc

SEQ ID NO: 73297 - DNA, 397 bp, Glycine max
  unsure (1)..(397): unsure at all n locations
agctngagatgaggaagtgttgaagggtgaaacttcctgcttttattgttgaccacagagtggtacctggagatatgtcgcgggggtcaggagaccttgaggacgtcaggtggggtgctattgcccaaaaccaagcttgaccaatcccgacccaacccgggcatagtcggtcagtgagaacctgtgatgtacctaagcaggcgagctcctggcagtcaacagataaaaggaaaacaagaccacaaagcaaggaggcttgtggtggctggccagctgtgaattttgtgtaatatgtggattgtggcctctggtaatcgattaccangggtgggtaatcgattactaggcttatacatgaagacaggaggctaagaatgtctctggtaatcgattacca

SEQ ID NO: 73298 - DNA, 410 bp, Glycine max
tagcttgtttgggtgaatgcaatggctatgaagtgtttcataacatacactaacagaaggaaccactaaatccatctcttggatgtattaaatagaaagccaaatggactgaagtgttccctataacatatgtcaacttgacttattgttcccctcaaaatcgaaaataaaaaaaaagtgacgtctgtggaaagagttacacaagaatttatgaatttccaaatgacaaccaaccataatatagaaataaagttgtatattaataatcaattcattcagtttattgcctcatgcacacacaaaccttgattaagagtgaattaatgaaatatttggaacaagttggagtttgcacttaatgaatagatcacaagatgaactagtctaaagtgtgttgatcatgtgagcaa

SEQ ID NO: 73299 - DNA, 467 bp, Glycine max
  unsure (1)..(467): unsure at all n locations
atcctcttagtcacctgctgcatgcaagctggaacaggtgaaaaagtgtctgacaaatctattccagcttgttgtgtgtaggctttagctactaattgagctgtgtatctgcccactaccattaggtttatatatgagcttgtaaacccatctatatccaatacagtgcttgtcagtaggtaaaaagactagagacaagtgttatttgcttctaatgcttaaatttcttcagtcataactcgtctccacttagggtatggaattgcttgatgataaaaccgtggttcataagtagtggagatttgattgatgaagttgtgataagatgagctaagtcgagccatgaaacaataatgtcatattatatatggttgagaagacgcgaagtagatgatattagacaagtaaaaaggtctcttatgctttctggatgaccttctaagaatnttctgtggtggcatagactc

SEQ ID NO: 73300 - DNA, 472 bp, Glycine max
  unsure (1)..(472): unsure at all n locations
agcttatagtntanatcanaatagatctntttataatgttgtcactntgtgctctntntatgaatcttcaagagttgtggttaaggatttccccctttcttctaagtcttgaaaatccttaagaatatttttcgtccactagatacctttttgtttagtaatgccttgacctcctcacaaacaaatgtgtcttgtacatcactagttgaagtggtttccaagaaaaaatcaactaaatgagcttgatgagttttcttaagatccctatgctctctttcaagatgttgaaaacttgtttagttttctataagctttagagacgtgagcatatacagataaaagttgattgtaccctttaattaaatattttctagattcaaatattatctcttcaccatcaaagttgatagtggcatcaagatggtgatcttcatcatctgaacttgtgtctaatgctgattcagctntactg

SEQ ID NO: 73301 - DNA, 409 bp, Glycine max
  unsure (1)..(409): unsure at all n locations
agctatatggttgaagaagattcgatgtgatttatttttgtatcaaaagaacaaaactggaatttttgctgacaaccaagcagccattgctattgcaaacaatccagtgtgtcatgggaagactaaacatttcaacatcatactctattttttgagagagatgcagcaaaatggagaagtgaacttaatttactgcaagtctaaagatcaactgactgacttgtttacaaagccattgcctatcgacaaatntgaactcttaagacaaagaattggagttgcagttcctaaagaaaggaggagtgtttaaagttgtttaaattacttatgtaactgcatatcaacacatttaaaatctatcttgttgaaatcttgttatgtgattagtctctattttgcaatttattgt

SEQ ID NO: 73302 - DNA, 411 bp, Glycine max
  unsure (1)..(411): unsure at all n locations
agctntntttgttcggtattgcctaanaaatatgctatgtagttcggctaggtttcttcgtgcgagctcaaccgaagttgtatttcggccgacgccggcattttgtcggccaggaaaacattagcccacctcggcaaaaaaaaaacatgattcaccggtattgacagaaaaaaatgctggccttagtcggccaggaaagatgaccgatcgaggtctaaataagaagcatgaccggattacgccgatcgaacgtttcctaatagatatcctccaagtattattcagggattgaatggaaaaaacaatagccgacatcggtagttaaatagccgtgactgatattattcagccaacattgcgcaacttttttcacaaacgctggccgataatatttctttacggtaaaggatg

SEQ ID NO: 73303 - DNA, 444 bp, Glycine max
  unsure (1)..(444): unsure at all n locations
agcgtgtcaatcttttgagcaaggaccgcccccaatgcataattggatgcatcacacatcaactcaaatggggctgcccagtcagatgcctgaatgatatacgtggtattcaatgcatgctcgtggcaatcaacagcctctctgcactggtcatcaatatcaaactccacctcctttagcagcagattggataatggaacggccactctgctacagcccttgataaagcgcctataaaaccctgcactggccgagaaaggaacgaacctctcacacacaagaggggtcaggcatttgagaaataacagttatctttgcagggtctacctctatgcccttattganattatatgccctgaaactatacattgttctaccattaagcgacattatttaaaatacagcacaaggctagtatctatgcgtctattaagaactctatcc

SEQ ID NO: 73304 - DNA, 436 bp, Glycine max
  unsure (1)..(436): unsure at all n locations
agctngngaggattgatggcgacccggtgttgagagatacgaggatatgggctacgtgggagtacgtgagctcagttggaggtgggcaacaggggatggtgggtttatgcgcgcattgtggatgtgggaaaacttgttgtgcaccatcgcccgaccgccacctagtaccacatgtgatgggtaccccataatcctacaagcttgagatgaggaagtgttgaagggtgaaacttcctgcttttattgttgaccacagagtggtacctggagatatgtcgcgggggtcaggagaccttggggacgtcaggtggggtgctattgcccaaaaccaagcttgaccaatcccgacccaacccgggcatagtcggtcagtgagaacctgtgatgtacctaagcaggcgagctcctggcagtcaacagattaaatgaaaacaag

SEQ ID NO: 73305 - DNA, 449 bp, Glycine max
  unsure (1)..(449): unsure at all n locations
agctntatcaaatggatgttaaaagtgcctttntatatggcctaattcaagaagaagtatatgtagaacaacccccaggttttgaaaattcagataagccaaatcatgcttatagattgaaaaaggcactatatggtttaaaacaagcccctaggacacgatatgaaagactaagcaaatttctcatagagaaaaacttttctagaggacaagtggataccactctgttcataaagaaaaaggatgatgatattctattagttcaaatatatgttgatgatattatttttggatccactaatgattctatgtgcaaggaattttctcttatatgcaaagcgaatttgagatgtcaatgatgggagattaaactacttccttgggctacaaattaagcaaaccaacgaaatcatattngtcaaccaagccaagtactgcatagaactgat

SEQ ID NO: 73306 - DNA, 325 bp, Glycine max
tgctttagcgtgattcccttcttttacttgtcatctacttcatgttgatctactctcatgagttccatttctcgttcctgaagctttccaataagagttgctagacacatgttactatagtctcttgaatcctgcatatctcctctccttgggttaccaatctgatgaaatcctccctagtataggactaattttctaaccctgttccactaaactcccagatgatttggcctttccttaaaataaaggttacggctctctataatcctaaggtaactcttgatccactgacccacgtttggtctcctctttttagataagtaaa

SEQ ID NO: 73307 - DNA, 432 bp, Glycine max
  unsure (1)..(432): unsure at all n locations
agcttctagccaaatggacttaccttgaattaattcctttgatagccctttagagccttgtttccctttacttgtttngaagctcactacatgccttaagtgaaaaaccatgatatctccatatacttaaggaatattggagctttggaattgttttgggaataagtgtggtggagttatgattcattggacaacttggtatagaggctatgcttcatgatgtatttcgggccatacttgatgaacattgtatattggttaaatgtgggacatgctgactgaaatgttgtttctcagagctaatgagttaaaaatagaataacatctacaaaataaaatccaaaaagataagaaagcatttatggatgaatagatcttaatggtcaaaatgtgaaactttggtctctcttatgtaaattttaacttactctt

SEQ ID NO: 73308 - DNA, 417 bp, Glycine max
agcttcaagttgcttggacaacaacttattttttgtcaacaaggcatcttgagatgaaagctctaataaactctttttggtaggaatatgaactctatcatgccaaattgcatgggcactggcaaccatattttcaattaagtccatggcttcttcaagtgtcttcacggccataacccattaatgaagatgttcaactatatatgctctgaaaaagctacagtgggagtattctgtaccaagctatagaatctttcttatgcctcactcacagaattatcgagaaactgatggaatagaaaaattacaacttttccctctacaattttagactctgggagatatttttatagaaacttctcaacaacttcatcctaagtctttaaactgttaccttgaatgaatgcaacgatctct

SEQ ID NO: 73309 - DNA, 429 bp, Glycine max
  unsure (1)..(429): unsure at all n locations
agcttcttagtctcagatgatgcagctgagtttgtatctacctcatgcactcctctaatgactatggcatcatttctggcactaaactgctgagagttggaagccatcttctcaattaaatatctggcttcagcaggagtcatgtctccaagggctccaccactggcagcatctatcatacttctctccatattactgagtccttcataaaaatattggagaagctgctccgaaatctgatggtgagggcaactggcacatagttttttaaatcgctcccagtactcatacagactctctccactgagttttctaatacttgagatacctttcctgatggctgtggtcctggaagcaaggaaaaaatttctaagattactctcttatngcatcccagctcgtgatggaccttggagcaaggtaatacag

SEQ ID NO: 73310 - DNA, 460 bp, Glycine max
  unsure (1)..(460): unsure at all n locations
agcttctaaacgcttctaaaccactccgtttctctccccctttggcaacatcaaaaagccaaagtacgtggtaaacaacacaagagcattcatataatccaatataactaaagtgcatagaatcatttataagtcaaaaccaaatataaaccaaccaaatagaatccaatcataaaatactaagtgccaaataccgaaagatatctatccttgtgtaattgattacacgtaatggtaatcaattaccagaacaatatctaggttgtttcatcaaaaaatatatatttctatgctaagaacatctatctatatcaaatattaatactaatactcattnatttcaatcaaacaagtattaaccacacaattaacacaccaatcaaacataatcaatatcttagaataaaagatcaatcaatcatgaaatattaatatttcaatcaaccaatcaatccttagt

SEQ ID NO: 73311 - DNA, 463 bp, Glycine max
  unsure (1)..(463): unsure at all n locations
agcttaattgcagcacctaacgttccctcagtggcaatattatcatctatgattagggctcgttctccaggttgtacagcccctacatgcatctccattatgtctggtccatactccaaagaatactcttctgagataacctcccctgtaaagataattgaaacatgaccattcaaacaaatcataacatcttctctgtcattgaaacttcaagagcatttactgaccacagtgaagaagtacaaaacttagaattagaggaacatgcacaacacagaaattcaaagatctcaaaccataattatctgctaggtaggaatttctgacaatgttatatgcaattacttctaaagagagatacaaaacatatataccaggcaatntattgtgtttcctcatggngacaaattttgtccaatagctaatgcaatgggtggaccaaatatatagcctctagcttcaa

SEQ ID NO: 73312 - DNA, 462 bp, Glycine max
tgcatgcttatcacagggagtatataatttattatgagtattcttataagcgtgatatctattcagaacaacaactaatgatacttgcatagacattattaaggtcatttatactgtcatctgatcacacatcgtcatatatgataacgttcgtgacttttgcaataactatcttgaaagttatgatgatgatatcatgatttatcaacgatgttgaagctcttacactaactgtacatgcctatagagttcttactaaagagagcttatagaaatttcatcatctatgagcattattaagttccatgtaagctctttcaaatgcctcctaaatccttcttaccaattgaagcttcgaacaaaatggattgagacttacaataattatcttgaaggtcatattaattatgattgatgatcgattaataatggaaaagctcttacattgacaggacatgccta

SEQ ID NO: 73313 - DNA, 455 bp, Glycine max
  unsure (1)..(455): unsure at all n locations
agcntttgtctgctgatatgctatcaaatttgaatatatcttactatatgtctgcatcttacccttttagaaccaacaaatccttctttaattttgaatttgtttcttcctccatgtagtgtcttctaattcagcaattttctttttaaaatagctaccttagctgcaagctcaattggatcaactatagaaccatgcaggtcaaggtctgaatactaagcataaatcttcctccattagtagcccaatcaaatgcatcccatattgttgcgtgcaaagtcattggattagcagggaaatctcctcccatatcttctgtccatgtggcttctctaataagaacattatccacatgaaatattcgtatggataaacgagaacacataattatgaaaataagtaagcgacaacttatatctcctagatattatacaagggacatatgagctttcatc

SEQ ID NO: 73314 - DNA, 436 bp, Glycine max
agcttggtcatcattatggtctgaagttaagaatctatatcttggttcctttagaatctacttagcaacatcttctgatgatccctattcctttttataaccattgctcttttgcattgagttatgatgagaaccaccatttgtttcacttttagtgctcaaagacccttgacttaaagaagttgacttgttaaagtcagatggttttgatggctcaagtcctaatagtccaccattagtccagaacctaatgaaatgattagccaaagactctctagaagtctcttcagatttgtagatatttctgttgttcttatctacttcgacatctggtaaattagagttattggaactagaaaatgatatattagtctcaattggtgctgacattgtatcattaacaatagaagaaccaatgtaggtatcagtgcatact

SEQ ID NO: 73315 - DNA, 431 bp, Glycine max
  unsure (1)..(431): unsure at all n locations
agaatggagaattgcctaagcaatcactacgcatagctccaaactcgaaggtggaggacacatgaacgaaaacacaattcatggggctacgaacaaggggttgagaatgganaattacactaancaatcactacgcatagctccaaacttgaaggtggaggacacatgaacgataacgcaattcatggtgctccgacaagattgagaatggagaattgcactacgcaatcactactcatagcttcaaacgcgaaggtggaggacacatgaatgaaaacgcaattcatggggcttcgaaaagattgagaatggagaattgcactaagcaatcactacgcatatcttcaaactcgaaggtggaggacacatgaatgaaaatgcaattcatgcggctctcaaaagagtccgaatggagaattgcactaagcaat

SEQ ID NO: 73316 - DNA, 415 bp, Glycine max
  unsure (1)..(415): unsure at all n locations
agcttgactnntggttagacatgattgatacatgattttggactcgtaggacttgatttgggaaagattggatgaggggaagagtggtttccgaaatctgcactttatgcagaatattgctgagatattgtgcagcataattttgcataagtacagaaaaatgctatgttttgctggttgtggaaagagtagtgcacaatgagttctggatgtttgctagttgatcccaacggtcaaaatgtaggcttatgtactagagacttccagtaaaattttcgagacgatccaacggttaacgaattggaacaaaggagatgttactggagtctttaagtgagaaaagctgtgattttggtcggtggtttgggcagagatttctgcctttgtcctatattattggctgngatagtttgtg

SEQ ID NO: 73317 - DNA, 419 bp, Glycine max
  unsure (1)..(419): unsure at all n locations
agcttctcaaccaagcttccatcactatgggaccttggaagtctcctaacccgatggattcccaacaagctntttctagaagtggaatactattggggaatctattctttgtaatgcgaatctgctctagcattctcctgggcatattcaagattataaccacactcatatttgcctcattcctaaaatcaagaagcttgagtttgtctctcaatttcgtcttatttcctttcgtaatgttagttacaaagtgatgaccaaagttgttgtgaacaggttaaagctccttatgtcgcgtctcattcccccaatcaaattgagtttataccaagtagaagtattcaggaaaaaaatttttgttgctaaaaaatgatgcacaacatgtgtagaatgagtggganagttggcttctttatcat

SEQ ID NO: 73318 - DNA, 444 bp, Glycine max
  unsure (1)..(444): unsure at all n locations
agcttctagccaaatggacttaccttgaattaatttcttcgagcctattntcccctttctttgttgtgaagctcattacaagccttaagtgaaaaaccatgatatcaccttacccttaaggaattatggagcttcggaattgttttgggaataagctgggaataagtgtgtgtgtgtgtgggggggggggggtcataatgttttctagtctcatatcctattattctcccatttatctagatcctcatgatgtgtactatctaatactctctacaactctgtatcgaacatggatacattcttgctagttctatgtatcttcgtcattcggtaataaacagtttttgcaactaaataattgtatattattatctatcgcgcgctgtctttgattactttcaattacaatactcatgtttgtttatttgctactgagttttcata

SEQ ID NO: 73319 - DNA, 439 bp, Glycine max
  unsure (1)..(439): unsure at all n locations
agcttatgcacggagaatgtaattatgaaattgagatgccctaagaaacaccatttccagttaaccatgcattatgtaccatgttcaattattatgttttgtggttgtgtgttttttttttagaaatgggtttatgatcccaacatggctggctcatggtgcctaacacatgcaactaagaatgtagtgtgaagtttcatgcttccccttctttggttttgttttgtagaggataacgcaaggatgagcgaacatgataacaaatggtatgcatntttgcagatcaaaaaagttgttgaacgcatatgcatgatgatgccatgactcatgcaaaatgtgaggctgtaattgataacagacaaatgcaggaacgatgtgttcattatgatgccatgaagagatgtttatgtgatgcatgatatgaatgcatttacggaca

SEQ ID NO: 73320 - DNA, 409 bp, Glycine max
acctgctgcatgcatgctagtcaaacccatatgaacacatatcgtttactgtatatcaaattatatttatacgtgcttccaaacttgatggatgctggatttttccactttaagtctacttatccagactttaattaataatatgaaggctaaaaatatcgtcgacttggacaactatgttgacatcactgcttgagagcaacataagcatggtgctagacaaatgatgatattggcatctctatgtgtggatgagactattataagaccatcaatggcgcatattgtgcaagagttggagcatattcatagagatattgctccagtgtattctcaattcaacgaggagattggtgccgtgactctagggaatgagctcttttagtaactcttgcgaaatgcaaattgc

SEQ ID NO: 73321 - DNA, 438 bp, Glycine max
  unsure (1)..(438): unsure at all n locations
agcttgttgaatagctcttctagcttataaactccatgtttgaggtgttaccaaattcagatagggtcggtccaaatagatgggagtttggcttccttggactctttccttgcaccacttttcactcttcacactaggtcattttttgagaactctcttggttccaactttgaattaaaccttttttccatcctttgtttgcatgcctacattgngatcttttcctgatctcatagctcgtcgatgaggtcaagttcatctttcaaagcttccacatttcctgtgttgtcataatgcatttgttggaacaagggttctccaattcctactagaatcaatgcttttgtcccataagttagccgaaatggtatttcgttggttgtggactatggcatacataaagtcctcccatagaactattggaactcctcacccatt

SEQ ID NO: 73322 - DNA, 455 bp, Glycine max
  unsure (1)..(455): unsure at all n locations
agcttccgttcccgagagcatctcttatttatacatttcagcctctgctttcgcgtagcttaggaaaaacgtcatttcttcttctttctttcttccaaagccatttctaaagttccaataactgtctccatcacccacaaccaccattagccaccacaaaccatcattgttctccattgaaaacccacaccgagaggaacccttcaaccgaagcggaatcttccaacttggcttgcggtttcggtagagaacgaaaaccctaatctgacctttcgttttctttcgaggtaaccatggttctatgcttgtttcttgttagtatcatcttgtctttgcatcttttctgcctatggaacctccattgcatgtcttatgcttcctttgaaaaaccttagagaaagagactntgtnaacgttatcctttcatgaaatgcatggtattttcgtaacctaca

SEQ ID NO: 73323 - DNA, 476 bp, Glycine max
  unsure (1)..(476): unsure at all n locations
agcttataagaacanaattgccttaatcatttccaaatatgcatgtgaattaggacgcatcaacaagaatcaagccaaggctattgtgcgagcaatcaatggggcaaaacacaccaaatgattataatgatggatggctcaaattctcacaaaggtaaaatcatcacttttaaattgagctttcaaaactatcatgacatgtagagaagaatcaaggatttcaagtcacaaaatgtcaagaacttttattttcaaaacaattacccatttcttgaacatatcctataattcaaagaaaaacatgcaaagtcgtacgtgcacacaaaattgacccaaaatattaaactaaaaatccgacgaaactaacaacattaacaaattaacacaactaacaaattaacaaaaccatcaaaactagcaaaaccaaagaacactccccccatacttaaacaacacattgtccttaatgtagcaca

SEQ ID NO: 73324 - DNA, 366 bp, Glycine max
  unsure (1)..(366): unsure at all n locations
tcttaagtcacctgcaggctgcagctgcacccagctcgcgatgtgaggtgtttctccgaccaactgtagtgagaaatttttaggccatggggcatggttgatatttgcaccccaattagactaggtacactctcaaaattttatttgtgagctctatatttggtcgggtgcggagaacacctagtttctttatcacgcttcaatacattgatcaatgccactaatcctagaagattaatgtatcgactctttacatatatagttggctgttcagagacggcttatcgatatctgaagctacttatggatacatggtatataaccgaacataganggatcgcacgttattatgttgctctaaaggtc

SEQ ID NO: 73325 - DNA, 279 bp, Glycine max
  unsure (1)..(279): unsure at all n locations
agcttcgatcanatccaaacgacaataactctttactctgatgtctgattgagtcccggattatatcgggacgctagaactggaataccgaggcgttgatataaatcaaacgataatatctatctactctgatgtctgagtcagactcgctatatatcgaaacgctcgaaattgaatgttgaagctctgaacgacttctgacgactctaactatcttcctaggttgtttgagccagccctttggtctatcagatacgctccattgtagaacgctgaagt

SEQ ID NO: 73326 - DNA, 304 bp, Glycine max
  unsure (1)..(304): unsure at all n locations
agcnttgttgcctcanacttcgaggtctctccgtaggtctccctcanacccttctctccctatcttcaacagtaccactccctgaagctccctcgaaacctcgctctctcgccaacatccattgtgtgcagtggagctcgcaccgtgagtacgcatagtgaggtcactcgtgttgtgacctgtgtgccatctcgaagaagtgtagctgctgtgacccgtttgcccatggtcttcgcaccttaggtgatcgtaccagtaagttgacaaatctcctagcctgaacatgctatgaggaaatgtaaag

SEQ ID NO: 73327 - DNA, 459 bp, Glycine max
  unsure (1)..(459): unsure at all n locations
agcttcttgagatgtgaacttggatctgtcatatctggcctgngtaggtgtagaaggtgccttacttttcttagatgccatctgcgaaatataagacaaaacacaagagattagcacaggttattttctcaaaaacaaaaaataaaactaaaatttttactaggcgcttagcgcagcaggctgagcttagcgcgccttatgaaattttacttaggcggtaagcacagcaggctggcaagcagcctgaagacacaaaaaatatttttttgcagaatatgcttagcgcatagctgagcttagcgtaagtctacaattttcaaaaccaaagagagttggagcttagcgtagcatggtgcgcttagctcagcctcatcagaatgacacttaggcttagcgcacagggtgcgcttatccttaactacaaaacttataagacagtgagggagttgagcttagtgc

SEQ ID NO: 73328 - DNA, 465 bp, Glycine max
  unsure (1)..(465): unsure at all n locations
agcttcatcatgcttgttagtcatcatttntcacagcattgccacagccgttgtgcttattagtcattatttttcgaggtatgtatctattnttataactgttgtgcttattacatgctngttcatatcaaaatattatttgatattactagatttggttgcattttgagtgaaccctagtttctcgtttaagattcaatacattgattaatacgaatagttttgattaatcaatgtattgaatcttgaattgtctgtttggatagtttgggaggacattttttatagttgattcacacgtatagctaaattctcttttccatgatttggagatgtttcagtatattgcatttcacattgttcttctggtgcatacttgactgcggtgattgtgcaacatgtcatcgctttcatcttgtgtacctgaagaccaatgcgaaatggctgccaaatttatcatatctt

SEQ ID NO: 73329 - DNA, 455 bp, Glycine max
  unsure (1)..(455): unsure at all n locations
agcttcagaccaaagcaactcanaatctaggtatctaaaacccctcaatttaatggattttcaaggtttgagaagtgaaaatgagaatggggtaattttggagcaaactctcatctcaaacaaaactatgacattaatctaaactcgctcaaactggttttacgacgaaaactctaccgaatcaaaatttgactcctcaacacccaatttaccctagaaatggctcttgccttcactttggtcactcattttcctcctttgcacagcccaagctttcccacaatcctaaatgacatttcaaactaggattaactcactttaacctcctgtcgcaacgtgcccttcgcgggcgagcgagggcgaggctcacaggtgcgctttccataggaggaaagatgcgtggagtcgccaccaacgtttatttgtggaaaacgtcgggaaaaccgaaggaaact

SEQ ID NO: 73330 - DNA, 253 bp, Glycine max
gtcacctgctgcatgcaagcgttgcgatgagggctatgaatgaagcattatttccttagaggaaagaaccattgatgtagaattcattcattaacctgatgaagtctggatttcaaaatctcctcaaaaatgcgtaatgaaagttgaaatttatctcatcccggaccagggcttttgtcccccccacaatcccaaactgctgatttgatctccacattagaaaatgtagtcacaaagctttctttatctgttg

SEQ ID NO: 73331 - DNA, 463 bp, Glycine max
  unsure (1)..(463): unsure at all n locations
agcttattatgaggtggaagatcctttggtgctcagttgtctggaacacatggatagctagaaattcctgcatttctagagaccaagcttttgacagaaaagtcctaatgcaaaacatcatgttccacacgtggtgttcgcgttaaggtttgctagacaagattntgaagcatccttcccacaatggtcatcatagccgaagttgttcctttgggattgtgtaacctagagccataaattatggtagagctgtatgagggccacgttgatgatattcgatgatatgaagagtgcttgcggatgcttgttcattatgaacggtgaagagaatatgatattctgttatatgggacagctagttgtactatgtttattctcttttatctgtgggttatgttgaatttatacgttcataagtacccttaaactctctataacccttgtctctgttgttggttgtatc

SEQ ID NO: 73332 - DNA, 222 bp, Glycine max
gatcttaagcaccgctgctgcagcttacgttccttttcgaaggatgttccggcgaataacattgtcagcgcagcagttccaggcgtcctcacagtgaatctatgagttcatagtgagctgggccttgaaaggtgggtttttctttttctaaaagccatttggacaaaagaaacaccgaaaccaagttaaaacaaggtttatttgaaatgaccagctgaaaaa

SEQ ID NO: 73333 - DNA, 450 bp, Glycine max
agcttgttgcattccaggtacgtatttctttctcctactcatatatgcaagtgcatgcattattcacacttgattttctcatcaatacatggctctttgtagtgatttgtgtctttattttgttaacagatgcaaagctgcctttgtatggtttcaagaacgctaatattgggaaggatttggccctgcatgcatgctccggggagcctcccctcgcattcctcgactctcttcttcttggagaggtattttgcacatggaaaacgcttaacatcctcttttcttgttaccctttgattcaaagcttctacattttaccctttcatggcagtgggaagatcgcatgcagagaggactttttcgctatgatgttaccgcctgtgaaaccatggtctgttttgctttagttcttgtcttcctatgcatacatatatggatggcatgatttct

SEQ ID NO: 73334 - DNA, 464 bp, Glycine max
  unsure (1)..(464): unsure at all n locations
agcttcctggttggccctccatgtttagaataaagcccttgcccggaatgcacaaactagcctccatctctctgggatcagaccttaatctgcaaaatctagaataagtaggtaaagattccccctcttctaataacactggagtctagaggaactcatttaagttgtctgcatctatcctgattaaatggcctcttattctagcacatttaggagcttgattngcaggactatagaaattggcatagaattctttaaccactggcacatctatgcttctttcctgaaggttggcaaggcatttgtgaagatttcgcctctccaattctactttaaactcatcaaactcagaatgataaagtttcacattcctttccggaaggatccttcggtctaaaatattatcgatatatcggttccaggcttcctctgattgaaatctcctgttatcattctgatccagt

SEQ ID NO: 73335 - DNA, 462 bp, Glycine max
  unsure (1)..(462): unsure at all n locations
agcttgtatgattatggngtacccatcacatgtggtactaggtggcgatcgggcaatggtgcacaacaagttntccacatccacaaatcgcgcataaacccaccatcccttgttgcccacctgcagctgagctcacgtactcccacgtagcccatatcctcatttctctcaacaccgggtccccatcaatcctcccaagcttccccaacatccaagtaaatcaacactcaaatagcacatactatcacagccaagataatagggcaaaggcagataactctgcccaaaacaccaaccataatcacagcttttctcacttaaagacctcagtaacaattccttcgttccagttcgttaaccggtggatcgactcgaatatgttactggaagtctctagtacataagtctacatttggacgcgtgggatctactagtaaacattcagaactcattctgcattac

SEQ ID NO: 73336 - DNA, 464 bp, Glycine max
agcttgtgtcattaagcgatattccacttttggcgttgagcacgacctcttgtattgagcgaattacctcctcgggttgcaattgcacttagcgcacaggtctcgttaagaaagttgtccaaagatgttatttgaaaaatctcaatagtaaaaaatgtatgcatgaatcaagacagttgcagttcatgtttgaaggtgatccaacggttaacgagtctgggatcatggttttactgaaataggttaaacaaactccacataaccttattgttcacaccaagcaaccgcacacaaataagtcacacaacacctcaactaatccaacttaatcaaagaatgcaagaattatattaaacatctattttcagttatcaatattttaggctgttacaaaagaccatttcttgggtatcaacaccaaagtattcaagaatcttggagatcagaactgcatatggacacct

SEQ ID NO: 73337 - DNA, 471 bp, Glycine max
  unsure (1)..(471): unsure at all n locations
agctntggacaaacaaaacatgcaaactaganaatgaaatctaaaactaaaaactgaaacataaatataaacctaaattataaaatgtactaaaagtagaataataataaaagtgttcaaaagaaaggacaatagaagtcctgtcatgggtcctgtggtgcagaaggggcaaaatccatggctgtgacatcatcctcatcctcaaagagctccagcacaggcgtgcctactagtgatgcctatggggaagacaactccagcacaggtgtggtcactggtgatggctgtggagttgtctctggagtagcctctgcagcgtcctcctgagtagatgggtcagtctctgggatctctacgtcagcctctggatcaacatttgtatcagcctctatctctggctgaggctcctgagctgcagaggcctcactctccncaaaataagaatgctggactcctggccaagccacctga

SEQ ID NO: 73338 - DNA, 478 bp, Glycine max
gacctgccgcatgcaagcttagcgctgaacacatatatccagaatcttaatgtttgaacacttgactcgcttagcgcacagatgcgctcaacgggctcatcacttacgttcatcagcaaggataacgcgttcatctacaaatccaaaactttgacagctctaatgaatacgctaagcgcacagcacgcttacggcgttgattgcgattcctagacaaaatcataggggtcttcacccctttcagctacattgccccaaatgggcttctaagttacctacaatcctacattgactaaccctaagactactaaccttaacctaacaacatacaactaagaaaacaagaagtcatttatcctaatgttcgaagaatgaaaaataaaactagacatgtgctaacttacttagatagttcttgaaatgcagcaatgaccatgcatagaaacaatacacacgaagtgagatagtacacaagtgc

SEQ ID NO: 73339 - DNA, 467 bp, Glycine max
  unsure (1)..(467): unsure at all n locations
agcttnttaactngataaagtcttcttgcttgagcggctnggtgaagatgtcaactacttggtcttgagacttcacatatcctgcatgtacatcctttcttgttgtgctctcctttatgtagtggtaacgggtatcaatatgtttgcttcgatcatggaacattggattctttgctagagcaatgactgacttattaattatcgacaaagatcttggtcaactcttcttgtgacatgcccaactcttttaacaaattcttgagccatattgcatgacaaatgcatgaagcaactgctacgtattttggcttacaagtcaaaagaatgactatatatcgactacttttttgacatccaagtgaaggttgtatttcccatganaaacatatatccactagtacttttctgatcatcttcatctctagcccagtcaatgtcattgtaacctacaagcttatagtcattac

SEQ ID NO: 73340 - DNA, 385 bp, Glycine max
  unsure (1)..(385): unsure at all n locations
ctgcagcatgcatgcttctcaaggaggtgagcatactcattagatgtggtgtgtgcancctaagcctctatctctctcaaggaatgcttctcaagcgaagagagcctcntatttctagacggtgcgtgcgtagactaacactctagctgactcaagcgtacatactctcataccaaactatcttaaggaagactctctaaacgagtagtcttctcaaagacatcttacttatataaagcttctcacaggaagctaccctagtctataacacaaaatcatgcgtaacactatgttggaactatgacgaaagacactgctatgatatacactcaaaagctccacttctcttattcaatcatctcatcaacaatcccgctcccgccat

SEQ ID NO: 73341 - DNA, 447 bp, Glycine max
tagcttcaatcttttctattcccttctacttactacctatagagggtgttgatgtggcgttatggattgaatggttgctaaccttatgtcttatctcaacagattattctatacctaccttatcttctactcttgacaatactccattcatacttcaaggagaccctacaaaacttcccttccctactacctatcaataattttgccatctattgcacaatgatatacatgcttcccttcacctactctcctttcaaaccaccaaccttttccccacaaaacccaatcctgatccacctttaaatagcccatattccctaatacactccctgtctcactaaatacaacaacttttattaacctattccaatgtttttaacactccacaaggactaccacattcccatccttatgatcatcacattcctctcttacctaatactaccc

SEQ ID NO: 73342 - DNA, 437 bp, Glycine max
gctcgataacacgcagagactaacgtcaacttctgttaccttcgtcaatcgcggccgacaagcccgttgacacgtggagatatacgtcatataccgcgctcacattatctgtgatactgacttttgagtcacgctgacgagcggaaatacccgagtggttatccgtataaactttttgctatctgtaagacgaaaagcttgatagcacgcagagactaacgtcgtcttctgcgcccttcgtcgatcgcgatcgacaagcccgttggcacgcggagattgacgtcatcttccgcgctcacaagatgtgtcatactgacttttgagtgacgctgacgagcggaaataccagagtggttatacagataaacctcttggttctgtaagatgagaagctgatacacgcatagactaagagcctactgcgccctcgtaatcgt

SEQ ID NO: 73343 - DNA, 483 bp, Glycine max
  unsure (1)..(483): unsure at all n locations
accggatcttaagcacctgctgctgcaactctctattttatgagttacagcctaatttttaataaattattatgattaatcattattaattataatcaagattttgtaaaattttatattattcttttgatattgcagatgaaaataatattatttcatcaagtgtcaaatgtgtgctntatgacaaactctttcgaatgagaaaaaatacacaagactgattcccatccatgtctcatgactaagtagtcctttcatgtcattgaaccataagaaacttcaatattcattttgaaaactttcaccaaaacgataatgttttcccttcttacaatctcttacatacatcatgagaaacgaaatattccaaattattgaactggaccatgctattgatgagaagagacatactaatactattatttttgaaatatactcttctttattgattagaatatattaaaagtcataaaattctatata

SEQ ID NO: 73344 - DNA, 354 bp, Glycine max
agcttgttaaagaacttatgaaaaatcaagaacaagcttgttcgcacatcgttcgcgtgtatgatatccactcgacaaggtttgaagtagaggagaccttcaatcctataacgcaacatggcggacaaaagtgggcagttaacttgaatggccattattgtcaatgcggaaggtattctacgcttcactatccatgttcacacattattgcagcttgtggttacgtgagcatgaactactaccaatatatagatgttgtttacacaaatgagcacatcttataagcatactctgcccagtggtggcctcttgggaatgaagcggcaattcctccttctgatgatgcatggacac

SEQ ID NO: 73345 - DNA, 481 bp, Glycine max
  unsure (1)..(481): unsure at all n locations
tccttaagtcacctgcggcatgcaagcttgaatcggacctcagtgtgaanagtaatgaccatttgaatttctcgagagctttcgttgttcaatgtcgagaatctcgacatattatgcgctcgaatcgaacatccgtgtgaaaagttatgaccgtttgagtttctcgagagctttcgtcgttcaattccgagcatctcgacatattatgtgcccgaatctgaccttcgtgtgaaaagctatgaccatttgaatttctcgagagcttccgatgtataatttcgagcgtctcaatatattgtaggcctgaatcggagctcagtgtgaaaagttatgaccatttgtatttctcgagagcttccttggttcaattccgagcatctcgacatattatgtgcccgaatctgaccttcgtgtgaaaagttatgaccattngaatttctcgagagcttccgatgtgtaatatcgagcgtgttgatatatt

SEQ ID NO: 73346 - DNA, 452 bp, Glycine max
agcctgtttggtaactatttactaaaatattatttagttcttgaaaatataaaaataaaaaaacttatttaatgttgtgctttcttatcaattatttaaaaaatataaagagataatattgttcttaaaaataaaaaagccacaacatctttataatactttattaatactctgtgataattgttatctaatatttaaatctgtcattaaaatattttaccttaacttatttccttttcttgtctttaaaaatagatcttaaaagttattttacaagatagttttaaaaaaatacaacagaatcaatcaacctgtatgtatctctcttgcctttcttctgaaaacaaacgctactgaaatttatcctacactgggtataagaataagagaaccctaacttcttttgcaacaggatatacagtgttttatgaagcagaaacattccatcttct

SEQ ID NO: 73347 - DNA, 420 bp, Glycine max
  unsure (1)..(420): unsure at all n locations
ttaagtcacctgctgcatgcaagcttggatntccttatagtagggaatctatcctttctattatagagccaaacccattcaccctcattaagaactagctcttttcttccactatctcctttagtaaataaaccattgtttgggtctctattagtgtcttaaccctatcatgcaacttctttacaaactctgacctagattccccttctttatgtataaaagaagtgtctagcgggaggggaatgacgcctaacagtgttatgggattaaacccatagacaaccttaaaaggggactgcttggtggttctatgaacccccctgttgtaggcaaattctacatgaggaagatactcatcccaagacttatgtgtgcctttcaaaagagcccttcaaagggtggataaagacctattcacta

SEQ ID NO: 73348 - DNA, 484 bp, Glycine max
  unsure (1)..(484): unsure at all n locations
cctgcggcatgcaagcttatacaaagaataaacaaacaccaccatttcttttgaacaatgaggaggatgcagctcatctattcttcaactgcagtaaaaccctccctatatggtgggaatctttgtcttgggtaaacatctcaggtgccttcccgcaaaacctgagacatcatttcctccaacatgctcatggggggatacgctggactaagggctcatagatggaagtgttggtggatagcattaacctggactatttggcagcataggaatcagatagttttctcaaacgatagctttaatggtagcaaactgatggatgaggcaatcttcttgtgttggtcatggtttaagaatatggaaaaaggttttgtaatgcattttaatcaatggtcgagtaatctaagagaagggatttngtatcaggggagggaagcagacataggacctgngtagcctatagcttacaatgtgagcagcttat

SEQ ID NO: 73349 - DNA, 439 bp, Glycine max
  unsure (1)..(439): unsure at all n locations
agcttgcctcaaagaggtccaggaaggacaaggctgtcgaaggaactagntccgctccggagtacgacagtcaccgctntatgagcgctgtacaccagcagcgcttcgaagccatcaagggatggtcgtttctccgggagcgacgcgtccagctcagggacgacgagtatactgattttcaggaggaaatagggcgccggcagtgcgcaccactggttactcctatgaccaagtttgatccagaaatagtccttgagttttatgccaatgcttggccaacagaggagggcgtgcgtgacatgagatcctgtgttaggggtcagtggatcccgttcgatgccgacgctatcagccagctctctgagatatccgatggtgttggaagagggccaggaatgcgagtatggccagaggaggaaccggtctgatgggttcgatg

SEQ ID NO: 73350 - DNA, 458 bp, Glycine max
tgcagcttgaagtgtaatcgaattactagactgatgctctatacacactgaatatgttgcagctagaatcaagaggtacagtcacaagagcattctttatgaaatatatctggatatgagtcatagaactatagaggatcagcattgcttagaataagaaaccatacgcgatcatactgtctatgtatgaaagatagaacaccatactacaagcatacttagagataatgaggttcctataacaagtgtgtaacgcacatataggatgtaagaattaaatagtccctaaggatgtatgtaatgaatcacatgtctcaacaatcacggtttttatcacacacaacgagaagaggggattagcccactcaagtttacacatagatgaaacacacctattcgagtacacctgaatattctagggtcgtgacgacatttatacacacatcaagtgtctagac

SEQ ID NO: 73351 - DNA, 453 bp, Glycine max
agcttgtataatattgaaacgacaaatatctttatctaagattaccgaataaattccgtagtatatcgagacgctcgaaattcaaaataaacctctcagcaaaatgaaacgacaataactttttactcgaatgtccgaatgaatcccgtaatatatcgagacgctcgtaactgaaaacagaagctctgagcaaattcaaaagataataactttttactcggacgtccgattgtttcctgtagtatatcgagaccctcgtaattgaaaccagaagcccgtagcagactcaaacggcaataaattattactcggatgcccgaatgaatcccataatatatcgaggcgatcgttattgaaaacagaagctatgagcaaattcatacgacaataactctttactctgatgaataccgtaatatatcgagacgctcgtaattgaaacaaaagctctga

SEQ ID NO: 73352 - DNA, 440 bp, Glycine max
atccttatagtgacctgccgcatgcagctttccctatttgcgataatagggggttaattgaagaacaaagcggttcacccccttaggcacttctctctctatctaatatgctgaagataattagttccgtgtagagaatccaagccgaggcgcttccgtactgtttccgtcggatattactcgaagtatctcgaccggtcttcacagattcatcgtacgttcatcggtttcttcaatctgtcaacgggttagcacctgaaactcggtctttcaatttctctatgtacccgtggtggtccacattctgttacaagtactcctatctttgtgttattttactttagatacccccttttgacgtgctttagccatgtattataagtcatttcgcgcttaatgtaaaaataaataacatgccactatcggttgaattgcttatc

SEQ ID NO: 73353 - DNA, 461 bp, Glycine max
  unsure (1)..(461): unsure at all n locations
agcttataatatattccatctataaaaatattataaattatttttttgtcctcactaaaacaaatttctagatctgccattagcctaaccatgaatgaggcgtagcatggagctcacctttatttatatgaagtagttttttttcatctttagtccatagtccaataagcaaccaacataaggtacattcagtgtaggagatatcacaacaaatcataatagcatttctcaccattatggtgttataaatcataagcatgacaacatttcaacatgtgtcacaaaaatngcaattttacttattaaaatatcaatggcataaactcatagcatggtagtcgtgcacaatatcatccaccaatgtatctaactcaacatttagggttattnggaattatgttatatctaattgaatccaattcanacttaaagtattatntacataattntcagtataaaat

SEQ ID NO: 73354 - DNA, 384 bp, Glycine max
agcttattaacattcagtgaaggatgcgtcaaatcccaagattcttgaagtgtccccacctctccgtttctttgatcaacttgaggcctttacctctatataaaccactcttaatgctcatttcctttcatctaaagcttttagtcttctatatcactctcaactctgcttcttttcaatcagatacattttctttggtattccaatggccactgttgaagtaactctactaaaatacttgctactctactctaactcacatggttgctcagtacagaacccgcaaataaattcccttatgttaattttaaattggaatcaatttcttttattttcagtgtgaactcaaccatatacctgcttcgcgtttttataaatattttt

SEQ ID NO: 73355 - DNA, 463 bp, Glycine max
tgcttacctcacgagtatgatggcataacaccactctctttctcttaatttctttcgccgcagaggacgttgttgacacccacaacatcaacaaccatcattgacgtgtgtcctggtctctcacccatggacccttaaacacctaaagcttgatctttcttcccgatactacaggcaacaccactttcgtacattctccaccgagatctgatctctccctctcgcatcgttaaaaccactgcggtcgcacctctagaatctcacgaacgaattctttctaggttaccaacgcacagcctttattccattataacatggatggctaaatctaaatctcctaatccgaactctcagtctctcaccgctcttaatttgacagaatatgtgtccttatgactacttataatgcatatgacgacaaacggtcagagagaaatctctatcactcacaggacatcttatt

SEQ ID NO: 73356 - DNA, 462 bp, Glycine max
  unsure (1)..(462): unsure at all n locations
agctntgatgcaacatttggagaggttaatgaaacaacgagatgatgcacttcatgagaggttggatcaaatggagaatagagatcataatggagaagaaaggaggagaagagggaataatggtgttcatagacaaaaccgaattgatggtattaaactcaacattcctccctttaaaggaaagaatgatccggaggcctacttgtagtgggagatgaaaatagagcatgttttctcatgcaacaactatgaggaggaccaaaaggtgaagcttgtcgccgcggagttttccgactatgctcttgtgtggtgaaacaagctacaaaaggagagagcaagaaatgaagagccaatggttgatacatgggcggagatgaaaaggatcatgaggaagcggtatgtgccggctagttactcaagggatttgaaattcaagctccaaaaactaacctaatgcgacaa

SEQ ID NO: 73357 - DNA, 463 bp, Glycine max
  unsure (1)..(463): unsure at all n locations
agcttcattatagagtcaaagatcaaattgagaggaaaaataaaagctatgctaaacaagccaacaaagggagaaagaatgttgtcttcgaacccggagattgggtttgggtgcacatgataaaagataggtttccggaacaaaggaaatcatagcttcaaccaaggggagatggaccattttaagtgcttgaaagaatcaatgacaatgcttacaaagttgagctgcccggngagtataatgttnagtccaccttcaatgtctctgatttatctctctttgtatgcacaaggagaatccgatttgaggacaaattcttntnaaaagggagagaatgatgaggacatgaccaatagcaagggcaaggatccacttgaaggacttggaggacctatgacatgggcttgagcaaggaaagccaatgaagctcttcaacaagtgctgttcattctgtttgatacaa

SEQ ID NO: 73358 - DNA, 447 bp, Glycine max
  unsure (1)..(447): unsure at all n locations
agctagtagtgaggcttggctacaacaatntattggnttttctaggattcaaatgtttagattctaagagagcacaaatcatagacttatcccaatgatcttgtatcatacaagtagctntctcactatcttttcctcttaagttgcttatgaccttattgtaacaacacaatgtattctttctttttaacatacaacttatttgttgagtgtgctgatgcttaacctttatctcttcattctaattgacttccctctcccanatttagagtaactttgccgtgaaccatatgctctcctaaaatctaaacaaggtattaggagataattatttaagtgtagggttcaattcatgacaaaatcatntagcttatacagggagcaaaggatgcaattatcattcaaggtaagctttttggtcaaaaggcttgtgtatgtacaatcatg

SEQ ID NO: 73359 - DNA, 395 bp, Glycine max
  unsure (1)..(395): unsure at all n locations
acattcaattntgagcgtcttatatattactggactcaatcatacatccgactcatatgttattgtcgtttgaattgactcacaccttcaacattcaatttcgagggtctcgatatatgacgggactcaatcatacatccgagtaagaagttattgacgtttgaattggctcagagcttcaacattcaatttcgagggttttgatatattgcgggactcaatcatacattcgagtaaaaagttattgtcgtttaaattggctcggagcttcaacattcaatttccagcgtctcgtgatatgacgggactcaatcagacatccgagtaaaacgctattgtcgtttgaattggctcagagcttcaacattcaatttcgacggtctctgatatattac

SEQ ID NO: 73360 - DNA, 428 bp, Glycine max
tcagcttgcggttacgcgagcatgaactactaccaatatatagatgtcgtttacacaaataagcacatcttgaaagcttactccgcacaagggaggtctctggtgaaagaagcagctattgcctcttttgatgacgcatggacacataatcactgaccctactacaattcgtgtgaaaggtcgagcaatatcaacaccgataatgaatgagatggaatggctcgaaccatctgagctccgactaaaatgtagtatatgtggagtagaagggcacaacacgtgttgatgtccgatgccatctgaccatgcgagacgcttactcaatcgatctatgcatgccacacgaatgacttgtatcggtcgaagtagcataaatgtataactttgcggctcaatgaaatcgtatgttcaaacgtacatattttggt

SEQ ID NO: 73361 - DNA, 470 bp, Glycine max
gatccttaagtcacctgcggcatgcaagctttaacagagaggaatgtgtgagttactatacatagttcgatgagttcacagtggaactcaagagactccattgggatgaggagttgaatgactatgtggacggcaatattgatgttgccattgtaaaacacttctatgcaatcctctatgaccccgacgacaaatcacctaaacaggggagggtgagaggtcatctgatgaaatatgatgaggatactcttagcacattgcgcatactctagagatgaactcctgatgcctgatgcttacgagtaggctgctaacctttgtatcgcaagcctatgcagattctgaagagaaacatgaccacgctaacttcgactgggagcgcatgttcctgttataccctcgatctcatgacgacacttgtgatggcactctcgacagagcccatctctattatggcatcatactgaaca

SEQ ID NO: 73362 - DNA, 461 bp, Glycine max
  unsure (1)..(461): unsure at all n locations
agctngacaggttagatatatatctctgatgtcttatatgtgcctgacattgatcaacatctacttagtgttgctcagcttgtagagaaaggattcaaagttatatttgaagaaaattggtgcttgatcaaagatgcaaatggaaaagacgtattcagggtgaaaatgagggctaaaagctatgctctaaatctaatggaggagaagcaaatagctttttcaagcatgaccacctatgttgaactatggcacaaaagtctcggacacttccatcttgctggacttttatacatgcaaaaacatgcttggtgaaaggtgtgtcaatgcttgaagacaagttagccgattgtgtggcttgccaatattggaagctagtcagaaaatcatttccttaattaacttggagagcaactcacaagctacaattagttcacacagatgttgggggacctcagagagta

SEQ ID NO: 73363 - DNA, 402 bp, Glycine max
  unsure (1)..(402): unsure at all n locations
atgaacacgttcatgctttgtactattantctcccaagcaccttttaagaatgagtgaaagttattatgcttcacccaataagcacaaatctaaaaggtcttcatctcctgctcttccattttttcagacgccactctaataaagtcttcatatcctattctctagctctcaccataaagatatatgatattgaaagttacgactcctatacaccacatgtaggaacctactaccacctagcctaatttcaccaaccaacttacatgcgcctgatattggggccatgatgaataatctcaatattccacctattatatttccatacacaccatatttctccaaattcgtccctgtcttcctgaatgaaatgatctaagcctactccttggaataatctcctg

SEQ ID NO: 73364 - DNA, 432 bp, Glycine max
  unsure (1)..(432): unsure at all n locations
gctngaaagaaactagatgccttggttaacctggtaacccaactggccatgaatcaaaaatctgcacctgtagccagactctgtggattatgctcctctaccgaccaccacacagacctttgcccttctgtgcaacaatttgaagcaattgaacagcctgaagcttatactgcaaacatctacaacagacctcctcaacctcaacaacaaaatcagccacaacagaataattatgacctctccagcaacaggtacaatcccggatggaggaatcatcccaaccttagatggtcgaatccttaacaacaacagcaacaacaacaatagacttattttcaaaatgctgctggcccaagcagactatacgttccttcaccaatccagcagcaacaacagcaacaaccccagaaacagcatacaggtgaaggctcc

SEQ ID NO: 73365 - DNA, 461 bp, Glycine max
  unsure (1)..(461): unsure at all n locations
agctntataattgttgagacgcactntggataaaattgaagcccatcgcanatacaaacgaccataacacttccaacggatctcctaataaggcaagtaacctatcgcgacgctcaaaatttaacatggaaaactcgggtgaattccgacgggctaaagttttgactcgcatgtccgattgaggcccataatatatcatggcgatcaaaagtagaaatggaatgactatgcatattcggacaaccataacgtttgactcggatgccctatctaagctcataattggttgagatgctcttaggaaaaaaatgaagcccatctcaaatacaaatgaccataacttttccaccggatctccgaataagtcaagtaacctatcgtgacgctcaaatattttcatggaagactcgggtgaatctcgaccggcaactactttgactcggatagtcgattgacgccca

SEQ ID NO: 73366 - DNA, 445 bp, Glycine max
  unsure (1)..(445): unsure at all n locations
tgcttgctaaaagatattatgggccctaccatatcttggaacacatgggcaaggctgcttataagctcacactgcctgaaggcgcatgtattcaccttgtagtctatggatccttgctcaaactgatacattattccaccaaggaggacctcactttgcccttgactttaccagctacctccactggcaattaacccatcattactccttcagtgatatacagcactcattaagatcctgatttcgttgactccaagctgtatgagtaggtcagggggagggattatcaccctacgatacttcatgggaacactgggactatcttacattcacatatcaccttgatgacgacgtgatttcggaagacgaatgtaatgctaagacggatgaacctcaagcatgactaanggacaggtgactacacctgtgtaccttatgaactaca

SEQ ID NO: 73367 - DNA, 250 bp, Glycine max
  unsure (1)..(250): unsure at all n locations
cgtttccgtgagaaattacgcgaagattctcgaccgttcttcaagattcatcgttcggtcttcgttntcttcaatcttcaacgggttagtacctcanaccaagctnnttcattcattatatgtacccgtggtgggcccacatttgggtcatgtatttttattctcgntntcatttactntttataccccctctttgacgtgctnangccattcatttaagtcatttctcgcctaatctaaaaataaaata

SEQ ID NO: 73368 - DNA, 376 bp, Glycine max
  unsure (1)..(376): unsure at all n locations
tagttacctgtgtctgtgagtcctacttaatattttttttactggagcacacttctaataaaatcttataatattaatgacgcttttgaaactattttggactaataatgaaataattcatatttgcttaccactattacccccatctagtgcatatatgctattcaaatctacttgcaagtaggcttggtattacatatgtttggatgaatgtggtatctggncctatagagtgctaatatttaggtattgtgaacagctaatgcagttttcttaagcgtatgaataagtcactttattcataaagatgtaggactatgatatgtatctttaactcagctctctattagagatgttccctttttaactgagctga

SEQ ID NO: 73369 - DNA, 428 bp, Glycine max
  unsure (1)..(428): unsure at all n locations
gcctaataaagctactcaccttgcgagctatttctcgaagcctaagcaagctgctcacctgtgagagcttaccttgcccaaatggctttttctataaacatgccatgccctggtgagagatatgaagggttctaaaaaactgaagatagagataaactaatgcgcgacggagacatgataagaagaatatgagaataagctgtggtgttccccccccccacccnncncnnactcatatacattctcttgctagtcttgtaccctatgcaacaatcggctagtttttcctaagattatgatgtaatctatggacccttataggtcctttgagatgttatgcgtgcattcatcttctccacttagcattggtaaattcattttatttgtaaggcttacttctaatcgcgcactagtgtcatgaaattgga

SEQ ID NO: 73370 - DNA, 235 bp, Glycine max
  unsure (1)..(235): unsure at all n locations
ttgactttcaatggtttaagtttctaaagtatactttctaaaggtgcttgactaactgagagcttaaagcaggtttgtttcattaacatctgatactntncatcaacttttcatcctttaccagcctngaatnctcttgaacctcttcttcttctttgaccaaaagctttctaaaagtttctggttntctaaacccttgaaacttgtgctattcatctttttcatctcttctccc

SEQ ID NO: 73371 - DNA, 406 bp, Glycine max
  unsure (1)..(406): unsure at all n locations
cgctgcactgctaatatcaactatagacttttttttctcatcttcacataaacacagacattcttattagaaaacattttattgcatcactctttataaaaagaccaccctttaaccctgtgcacttaatgcttggttactatttctaatagaatatatatttacttaccccccctactttctgcnacacactcctgattattgaacaaagcttttcaaataaacaagttccctatgttcgatactcggatcattccgttttaattaaatacttgacgacccagtgcactttccaataaaccacttttgcataaaataagagtaattacaaattntggaaaaaggtactctggaagagggcaacacagtaattttggtatcgtttctaggaaacttactttcattt

SEQ ID NO: 73372 - DNA, 284 bp, Glycine max
ttttcagtgcaatgaggagaagctacgtattggaagggacctaattgaaaacatatttaacagtttgtggacttgagatgatgatgctgaattgagatgatgaaggcatgttgattgtatagctacttaccaagactgacatgtgctgatgaatatccttgactagttgactgaagatatgatgatgacccgacctatcggtattctgtacctgactagtgtagaacatatcatagaagatggtcaagcaattgtccaattggggagatatacgtaattgtcaa

SEQ ID NO: 73373 - DNA, 255 bp, Glycine max
tggaactcttgacaatcaaatggcatacttttacttggaggcgatcagccatatatatcaatctcgaatgacacgagcgtagaatcaatgcatacgttaacgagcaatcagcctaatatagcatcaatgacacaaacttcaaataaggctactttctgagcgatcagcctaatacaacccaatgacagagcttaaataatgatactttaagagtaataggataatataaccaataacagagttgaataatgctac

SEQ ID NO: 73374 - DNA, 394 bp, Glycine max
  unsure (1)..(394): unsure at all n locations
catattctctttggagtcaaantagtattcagatttaatcagaaaataataaaacttatgcaattcaattacancacaaaaagtgattattaataaatcgtcgaatttatccccagaagggcaacaaatacaagttgcgtgagttcttgtaattgtgaatttgagagtttgttccataatcaaaagcattggattgaaggaagatatcttgaaattagttaccttctatgagcgacttctactaaatatatttacttcagttctctacgtgaggtgagaaagatacaccctatattaaagagatatacaaagatgcatgagtgaacgaacaacacgaccccaagagtactgatatgtgagagtgggcgcggataacgtgacctgagagcgagtg

SEQ ID NO: 73375 - DNA, 497 bp, Glycine max
  unsure (1)..(497): unsure at all n locations
ggatcttaagcaccgcagctgcagcttaccgcctgcaaagcctcgagaatgttcttcttgtatttactctgagaaacaaaagccttgttctagnttttcagatatgggtccatctctcaagttttctacaaattttacaactgcacatacgtactcttgtgctcataaaaagtataaaaatatttaacagctacaattcacgaacttcagaatatttgtaaaatggataccccctccccacccttccttcnaaacaaagttattatgataacaaatgcactattgcttgtatgtctatagtttgaaacgattttggaataatctatttaaattttatgattgacttcctcaagctaattctctcaacaacctaatataccttctaaaagaatattatttgaatttccatgcaccccggtagagtggtacatttaataaagtcgttaatcgttacaaaagtaaccactgttttttttatgtatacaaaagtaatgacg

SEQ ID NO: 73376 - DNA, 470 bp, Glycine max
  unsure (1)..(470): unsure at all n locations
tactcagctatccaacagggcctaactgctaatagagcttatctaacatattttctatttcctatattaagacaatacccataaaacaatgtgtgcaaaaaaattacattatatgaagaattaanaacatgagatgtcatggttgtaacctgcaaacaattgatgtactagcagaataaaaaaatgagcaacaagagacaaggaaaattaccattcatggccaaaacaatgacataaaagcaataacagcggagggcagttgatgcttctccatcactccatttttcaccataaagcaatctaatgagtgaataagaataacttggaccaaatgccatanaaacaaggcctgcanaacataaagctggatattataccacanagaaacaataaaatatgcaatttaaggcataacatgtccgaaacatctcttcaggtgtggaaaacaaaaataaagctatttacacaac

SEQ ID NO: 73377 - DNA, 124 bp, Glycine max
  unsure (1)..(124): unsure at all n locations
gagaccggggaacgcagaaggggaacgaggaaacaccgcgagagcgcacgggcaaaccccaaaagcgagagggaaaaaagaaaggaacatagagcccccccccccccnacaagaaacgcgccag

SEQ ID NO: 73378 - DNA, 471 bp, Glycine max
  unsure (1)..(471): unsure at all n locations
agcatgcacagctttctttgagcaaacataggctagctcttgtatttcaccccaagtaaatgccacattcttcttcactatctcattgagaggtgatgcaattgcagagaaattatgaatgaaccttctatagaagccttctaacccatggaagctcctatatctccacactttgtggggtggaccattcttggatgaccttgattttatcagggtgccccccccccatcttccccnttacaaaccctaagaaaactatatgatctacacaaaaagtacacttctctttattttcatagagggtgtttttcctaaggacagaaagaacttgcctgagatgtcctaagtgatcatctaggctcctactgtacactaaaatatcatcaaaataaacaactacaaatctacctatgaaatcccttaagatatgatgcataagcctcataaggtgcttggtgattagtgagccca

SEQ ID NO: 73379 - DNA, 199 bp, Glycine max
  unsure (1)..(199): unsure at all n locations
aatcttcaattctactattaaaaaaatganaaaaaattcattggtgcaattctgcnattcgtcagttcaaanaaaagagagaagaaagagtgaagttgataatgaggcttgtatangattgattgngagcctggtgatttgtgatatagaggttgagttactactgtctaattccactatcccattgtcttatccttgg

SEQ ID NO: 73380 - DNA, 171 bp, Glycine max
  unsure (1)..(171): unsure at all n locations
tggactgaagagagagagagagagagagagagaggaggttnagttttgacacatgtcaaccgttaattgggtaatctgtcagattatgtgcatagccactagacacatangttcaaagtcatttgaacctaactctagaccaaanaataacacattactattttataggat

SEQ ID NO: 73381 - DNA, 485 bp, Glycine max
  unsure (1)..(485): unsure at all n locations
acacatnnaagatgaatttctaggatgaataaagcaatatgtttatctttagcanaganctcaagataagaattaagatcggctttagatagactcttacaaaagactttgaaaagcacaaatgattggccaagtgagtttctatcataacactaatttttccaagcattctactctcttgtaatcgattaccagacgggtgtaatcgattacaagaagccttaacatttctgaacacagcttgcanagttctaaaactgatgttgaaacccagtaatngaataccagttcatgtaatcgattaccagtgctcataaccgtcaaaaatattttgagaaacatcgtgatcaattacacaaaacatgtaatctattacccagtggctctgaacattagaattcaataattttcacacgaagagtcacatctcttgaagaaaataactgtgtatcaactaccaatattgtatcgatactagtgccagt

SEQ ID NO: 73382 - DNA, 128 bp, Glycine max
ggaaggttaaaaccccccgcccgacgcgagataagaaaaaaaagagaggagtaaaaaataacaggaatcggaaggtagagagaggagaaagggaggaaggagtaataagaaagggagaaaaagaaaag

SEQ ID NO: 73383 - DNA, 206 bp, Glycine max
  unsure (1)..(206): unsure at all n locations
ctaagctctagtctacctgatgaatcgtgctacttatgcactctcttatgacatagcatcacttctggcactaaatgtgtgggaagttgaagccatcttcttaattaaatttcttgcttcagcangggtcatgtcttcaagggcttcaccactagcagcatctatcatacttctcttcatgttgctgagtccttcataaaaatatt

SEQ ID NO: 73384 - DNA, 217 bp, Glycine max
caatctccccctcttttatgatgacaactctgaaatcaagaaacacacacacacacactgtttcctagtcgatcactcacataaatgtccattctcccccattgtggttaagttgatgcttcattgaaaagtaagttaattacttgtgtgagctcttgatttattcgctatttctctgcccctttggcatcaacatgaggccaaagagcgtaacaaa

SEQ ID NO: 73385 - DNA, 274 bp, Glycine max
  unsure (1)..(274): unsure at all n locations
atagaatangctgattccctctcttttctactaattnttcggaacaaaaatagtattctaggtgttctagaacccaagttgtgaatgtacccacttagttaagacgtgtgacccagttgtggtagaatcaaactattaagcctcagaaccatatgatttctgccatgcgtggtttgggtcaagcgccnacatgagtcagcttccgatttgattctgtcacgcagttgtttatatacacaatagttcatgaatatactatgcgataagtgatacc

SEQ ID NO: 73386 - DNA, 395 bp, Glycine max
  unsure (1)..(395): unsure at all n locations
aagcaagaatatgaaggcatatacatacatcataccaagtacttgaaagaacctctgaagaagcccaagatggatgatgcagagcatatgaaaagtcctatgcatccaaccactataccttgactagatgaagaaacaaacaaggccccccaccacgacacctnnnnncataacacacacctcttttgtatctaactgcatccagacttgacattatggtcagtggatggctttgtgcaaaaatcctaaaggaaccaaaggaagttcatctatctggggtcatgcatatatcgaagtctaattggaactccgaacctcgggtatgctctaagagagaaagaaaacaggttgcttggtactgcatgcacattccctgagaagagggaaaaaagtac

SEQ ID NO: 73387 - DNA, 518 bp, Glycine max
  unsure (1)..(518): unsure at all n locations
tactcnncctngcatgtnncaagttnttgggccatacctagtcatattctttgatgttattatagacatgtnaccattcttcttagcaatgaagagttgggtcccatttctgtgttggacgacacacccttctttgctaaagaaaacatcaagtccattatcacataattgacttatgctaagcaaattatgtntaagccctttaacaaacagtacattatcaatgggaggataggggtcaatactcttctttcctactctataggccactcttgacactacacttaatctccccatgagattaagacccaagtattctttgtcactaagccactcatggctttcacaaacaaaatatgtttgatagagaatgtattctaatcactcaatgagtgtttacacaataagctcaaatacaatgaaactcactaacttagccaagttaagaatcacttatcttgctcaagttttcttcattcagtggactgatcnatgtacacacttgcttatatagactt

SEQ ID NO: 73388 - DNA, 472 bp, Glycine max
  unsure (1)..(472): unsure at all n locations
agcttgtgatcataaagtggctcacagacttatgacacattatgtatcanagatgcgcaataatggaactccatatataaacagcaggagggtgtataaacaaatatccaactacttatcaacccacattgtgaaagaaccatatgcagccttctaacctggaaattgttgtgtcttaattttattaagagacacagtccatggttatattttaccccccccccgctgcncnnncgcagagtcagtagtctttaaatggcctctcaatagattttctagttctaagttcatttgtaatcaataaacaagaatatatttctctctgtactgttctcttcctactacatttgtaatatggtatcaagaatgtaaaatgagagaagctgaaggatatttggactgaaaatcatgtgtcaaagaaaccctatggagcttgttatatagacaggtagtattgattatacataattag

SEQ ID NO: 73389 - DNA, 444 bp, Glycine max
  unsure (1)..(444): unsure at all n locations
tggagccatagtctncacgccccacctgacaatgaaattccctacactgacatggaagaatgaactgtcaagcctgaccaaatgcaagcatgataatgctatgtagaaagcctgaggtaggactatatcctcccatccaggagcctaccatgcctcaccctacagcaactaaaggcactcaagtcatgacagtggaccaagggtcttaaattcgtgacctggccgtctgctaatccaacatagacaaagaatttgacatagatccatgagacgacacctncaacagaggcctgaaatcgatcaaaaacttatccagctgtaactnggaccaaaactggggcagtgcacgcaactcaatagagacctctctagtcacgagcattggcgcatcgccaacgtgcttcaatgaaatgtagatntattttcctggcatncatctaaaat

SEQ ID NO: 73390 - DNA, 285 bp, Glycine max
  unsure (1)..(285): unsure at all n locations
cgctcactgcggaggctgctagagcattctttttttgtaagacaccccatcccctctgaacatcgctcatggatattgggaattgcaggcaactgcctgaataagctctgagggaaagcatggctggtgacaggaaagggaaggggggcccccccccggcccnncccctaccgggagaccggatgaaccggagtcgaaaacacgaagtccggggatgagaatggcatgtggtggcgaattttaagattgttcctctgggcgaaccctgaccatactcactgtgtg

SEQ ID NO: 73391 - DNA, 429 bp, Glycine max
  unsure (1)..(429): unsure at all n locations
actacacacatgagcccacttagaggtaagggatgaatttctcgcaattagggttaaaatgaacatgtgtaaggatccttagaggatcaaattggcatttattttgggaattttactgcattgtgattcttcctttatgactataatttcgagattattgtgcccgacgggcccnnttgntgccccatgcgaattgggtgataaaattgtgtgttcttggtgatttcaagtttttgacctatgatttggatatgattatgtaaaatggtttgaggggtttaatcatatgaacataacatattaatattattattgtgtgacatgtatatgatgcatgangcatgataatgtgttgtcttgggattatgaaagtatgatgaactatgtgtaagtgacaagttaagtatgtgttaaattctgagatcacac

SEQ ID NO: 73392 - DNA, 119 bp, Glycine max
  unsure (1)..(119): unsure at all n locations
cttagcatagctaaatttctcttgattcgttcaagtttctttcatccaactaaatggacaacattacaacactttgttcatnttgactcanaagattctctagtggatcaataacctta

SEQ ID NO: 73393 - DNA, 232 bp, Glycine max
gcgctccaaggtgaaagatatcaccaccaacccagagtagtgctgggaagtgattcattttctctgcagaagaaagcttcattttcatggaaggtgacggaagacggaacaagctgaaccaaaagaaggctgcggttttatctatatatacctatctgcatacgccttgtagtgtttgagatatttattttctaccctggttctacctcagatctatatgattcccttatat

SEQ ID NO: 73394 - DNA, 346 bp, Glycine max
atctagcttcttgctgttgtgggttcagcgtaagaaatgtttattttgcttctttactgcacatgcatctaatttcttacaaactctattcacaatccaacggaaatggaaaaatggttcgaaggggtcactttacaagatcaacgtgataattagatcatgtttatgaacaatttgagtttgcggaaagaaattcaggcgaggacattctcacacaaattttaaaatccacgtggtgggcaaatagtctaccttaattatacatcacggtacagtcagacatgttactaaagttgatgtcggaaagaagattggaagaaaggaaacgttagagagaaactaaact

SEQ ID NO: 73395 - DNA, 433 bp, Glycine max
  unsure (1)..(433): unsure at all n locations
taccgctgaggatcccctatttttatatcgagaaggagatgcgacgcagcctagataaaagaagaatatccggcaggagatgcgacataacatacaagaaacgcgcagctcgtgggaaaacagctgcatgaagcctggaaggaaacaagaagtcatcagacatcactgcccaaaggaaatgggagaaaacccccccccccccccgctncnnccggcgggcagagaacagaaaattaacaataatcaccatgtactacactcaatccttccagtaccatcatcaagcacaaaaagaacagcaggaatgcggcccagcttggtggacaccctccctacaagagggaccgggacccaaattggaggacaagcgaaccccaaaaccccacccaattcacaaccaagattcaggagaagcacattggtacggcccacc

SEQ ID NO: 73396 - DNA, 326 bp, Glycine max
  unsure (1)..(326): unsure at all n locations
acaacttctcttcactactttaacggncacctctcctctttattgctaattaatccattatcattcattaaaaacgacagtgggttattggaatgttgtaaagatgtaagagtccataatgattgacaaccgatcattaccaaacttcatattcgtggatgctgcgacacctatatgaagggagtcacggtcatctctataaatgacattgaatgaatccatagttggatatattaatgatgcaaataattcaataacacattaattttatacacttaataatatgagcttactacacatctcaagaattatttattacatttgtg

SEQ ID NO: 73397 - DNA, 81 bp, Glycine max
accccccccccccccgagggataaaaaaagaagaagatgaggaaggtagagatgggaggaaaagaaagaggtaaagaagag

SEQ ID NO: 73398 - DNA, 440 bp, Glycine max
  unsure (1)..(440): unsure at all n locations
tgatctaagctgggcaatcanatacttcccgcatttatctctagcatgcattgtttgtggtctcgtcctttgtcacgggaagccggaaggtccatatcaccttcttaattgacacatggggcactgcgcccncaaatgcgcaagtaagaagagataattttccgggctctcgtgtccgtaaaatgcattcatatcatgcatcgcataagcatctcttcataacatcataatggacatatcctgcattngtcccgtatcatatttccgcctcacattntgcatgagtcatggcatcatcatgcatatgcgttcaacaaactttttgatctgcanaatggcataccnattggtttcatgtttgctcatnncttgcgtttcctctacaaaacaaaaacaaaaaagggggaagcgtgaaacttcacactacattcttagtttca

SEQ ID NO: 73399 - DNA, 422 bp, Glycine max
  unsure (1)..(422): unsure at all n locations
agcttattccaaatctaagaacgcaggccaacatattctcatcatacacatgagcgaggataaggtcgaaaccaaaagcgcgaacacaggccaccacggagaaaacacaaacggagaccagagaggcgcgcaccaatgcaacacaacaagaagcccacaagaccccatgacaaagacggctgctcaacggagacagggcgacaatggtgcccccccccaccccgccnnnnccacggagcgagacgggtgcaaatagacggggccagagtgagcagagagacacgaagcaagtgaaacttatatatggctgaccgaacaccaacctcaccaaccctacggaaacatcaaagacaggcgagagggaaacagaacccacttagagaaaaaggaaccgtgcttcacaatgacaaccaggacgtgag

SEQ ID NO: 73400 - DNA, 57 bp, Glycine max
agccaacgagcacgacgccgggggacggacaagggagatgctgggtccccccccccc

SEQ ID NO: 73401 - DNA, 481 bp, Glycine max
  unsure (1)..(481): unsure at all n locations
agctagatcaaaacagttctctaaccattcctttctattcttattatacaactgctcattcaaatcattctcacactcatttcataccaaacaatcaattgcatatcattttcaatcaattcactgttcaaacacactttttgtacaagcaaacaactcaaagtgccatggataagagcttggaggaagaaggagatgaatgaagggagaggaccaaacaccncggaattttntctctaagagagctctgaaatctgaagtttaatttttaaatgatcaaagttgaaaaaatgcacacacatggcttctatgtatagcctaagtgtcacacaaaattggagggaaatttgaatttctattcaaatttttcttgaatttgaaattgaatttgtggagccaaattttggaggcaaaatttcactaattatgattaagtgaaattagctatgggtcagcccactaatccaagattaagtcaatg

SEQ ID NO: 73402 - DNA, 208 bp, Glycine max
tactaagcttgaatgtatctcattacctgctaggtttaggatttcttattggtttaagaacaatttgacccaaatttgggggagtttgtttggtggataatttaaaaggtaagaaacaacaacacacacaacaaattaataaaatgttttatgtgttaaaaaaaaagagagtagttcaaataaagtgtgtgtgcttttagaacaaagt

SEQ ID NO: 73403 - DNA, 450 bp, Glycine max
  unsure (1)..(450): unsure at all n locations
agctcttacaatagtctctatctatagagctaggttttgtttaatgttgntnctaggatcttatatctgatcatttttcactatacctttcgagatcctactcaaaactatgttaaggacttaaccttggcgtatgacaatggtatctcaatcctattcatctacaaaccctccgggagcaaactcaaaaactgatggagatgatgttacaaatcacccccccgcccacccccnncggatccctgcaagtcatgcatcaaccttgtatagattatatgcatgggaaagatagctctatgacaaagtgaagggactggatactatgtattccttagtaacctttagatatttctctatgccggctactgtatgttctgatattaagatggtgcagaaggcctcggttgggatatcagactaagctctgaaggttatttggtagcaacttat

SEQ ID NO: 73404 - DNA, 367 bp, Glycine max
  unsure (1)..(367): unsure at all n locations
atgcgcataatttcctacgaaacgtcacttgcacaagacatcctattaactaagaaaaatgcacccatatacaatcaaggcagcttcgntacctagattatntacatgtaccttccaggtgtatttggtacttacatcacacacatcttccttggctaaatntacatacatgcatactcaaagcantttgggggtaccaaaattgcacatgtgcacatcttggtatttctaatacctatacatacacaaacttcacgatgaatatngactatctacancatanagtgctacatttcatgctctnttcaagttnttgctacctatagccgcatgcaaattcaaagtatatttcctttgctgactaaaa

SEQ ID NO: 73405 - DNA, 231 bp, Glycine max
gtggagaacatatagcacacaaaagatgttattgctaaacagctcttaagcacacacttccgggaagttgtatcactatattacagcaaactatttctacgaatttcatgacagttgaggatttaactgaactgagggaaagctgtgtaccgctagccacaccgaactgttttagggcctaaggtcactctactacagaagaatactgcacaaggaatctgactgcactgc

SEQ ID NO: 73406 - DNA, 418 bp, Glycine max
  unsure (1)..(418): unsure at all n locations
tggtggaaagaaactcattgcgtcaatttttttatatctaacgctaattatatagggctntaaacacaaagatgtatatatagatgcggcacatatatatatgatgtaaagaataaactactatnntaacatgttccttgcctatacaggttgtggctcttgcaaatctaaagaacaacgatgtaatcctattagttctcaagcgcctcaactccctataaaacaagtataacataatgtataatcttcttataaatgcattgtcaacattgcatttttggtaatatactcgctcatgacttcttctttattttntttttatggacgcctgcttgagaancctntatggangctgcgtctttgagcttcaatganggcctttaatggngatctcaaccatggagttgcagccgaagat

SEQ ID NO: 73407 - DNA, 223 bp, Glycine max
  unsure (1)..(223): unsure at all n locations
aaagggggaaacagagggataagaaagaaaaaggagggggaggaaggaagacggggaaaaaggaagagaggggaaagaagcggagaaaaaacgggggaagggaggaagaaggaaaagggggaaaaaaggagaccccccccccgaactcnnncagaggaagaaagcggggaaaaaaaaacagaagagaagggagagaggagagaaaggggaaacggggaaaggg

SEQ ID NO: 73408 - DNA, 375 bp, Glycine max
  unsure (1)..(375): unsure at all n locations
agcttctcatatattatgcgcacgaatcagactctttgttcataagttatgaccatatgaatctctccactgtattccgtgtgacatgttatgaccactttgaattctctcgattagcatntcggtgctcaattgcgagcgtctcgataaattatgcgcctgaattggacttccgtgtgacaagttatgaccatctgagattgtcgagagcattcggcccccacccccccccgctnnnnaattatgcgcctgtattggacatctgtgtgacagatatggcctatgaattcgtaagagcatttgcagtacatttcgagcggctcgataaatctgcgtcgtatcggacttcgtgtgacagttatgacatttgaattc

SEQ ID NO: 73409 - DNA, 169 bp, Glycine max
  unsure (1)..(169): unsure at all n locations
tagctntcatttatgcgcctgatcgacttccgttgaaaagtatattttctgatattctcgagagctctggtctttcaatntcgagcgtctcgatatactaagcaccctgactcggactgccgtgtgacatgttatgaccatttgaatctctcgagaggcttcgatgttc

SEQ ID NO: 73410 - DNA, 174 bp, Glycine max
acgccagccaacaggggactacactcaaacggcaaacgacggggcacgcgggcagcagatcccgacgaacgcaagcaagggggccagcaggagaaggagacggacgcaccacgcagcaaggcgaccacagaggcaaccgcaacacgtgcggcagaaaacccccccccccccccc

SEQ ID NO: 73411 - DNA, 415 bp, Glycine max
  unsure (1)..(415): unsure at all n locations
tatagatattctattacttagatttcaatgagacttatctctagaaaattgctttcgatcattaagattctatgaaattggggattcatggtaggtgcatccacagtccagcatagtaaggattttgcaagacatagtgaaactggttggctcccccctctgccncntnnnntgattagtagttgtgccatgctaattaagagtaaccttagcacgtgtcacaaccaggctggngcaggtaccccactcccatatatgatgctagatatcaccactcatcatantccattaacttcctaaaggatcatgactgactaatgcccaaacattnttctattataggatctaatttagttctcttttgaatatccttcactgggaactgatacatgaatccgcacataggctgttatca

SEQ ID NO: 73412 - DNA, 461 bp, Glycine max
  unsure (1)..(461): unsure at all n locations
agctngaatcttatagaagcaccatgatctatcctctttccatcaccataaagaaggcacacctaccattctaaaaacttaatcccattctagaacgacactatatagggaccgaaagacaacagtccgaatcaccatcgaaagaaaagttcaacggtgtgctacatatgtncaaccaagcacacacagacaaacatgtcattatcccccccccccgccttccnntntggaagaccgcgaggcggaatgagcgagggaaaatgaaccatacaaacgatgagagagtgaagctactgtgagggcgcgggcatgcaatgatgacgatgataacacacatgagcttcgacacaacactagacaactgcgacatagacactgtgtgtaacatcccatctttttcggtaaaataaataaataaatagatatagagcagatacataaataaatatagagcaaataat

SEQ ID NO: 73413 - DNA, 312 bp, Glycine max
  unsure (1)..(312): unsure at all n locations
tatgcaagaagcatantgatccaatcagatgcagaagctttatttctcttataatacaatatcatctattttatttatttctgtaaaaatatgacacatatttatatatctatataatttaatatataatttatatgctataaaaaatatatttttatttttatttttaaaaatcattctagacgtcttgaaaatatctaaatctaatttttataaaaatctagagatcttgaaacattgatttagacattttaagaatgctaaactcatttttattttttaaaatatttaagaggttaagcaaatctttta

SEQ ID NO: 73414 - DNA, 257 bp, Glycine max
  unsure (1)..(257): unsure at all n locations
atacaccttgtgtacagcccacaccacactgcaacgactaacgaccatggcttcccccccccccccctnncaaccctctcatgaaaggagcaaaacatacacagaggaagggcggatagaaaaggaaagtaacaggggaattttaaatttgaaaatgcagatgaaagaaaataggggcacaaataatctgccctcatatgctagccacagatctaatgcaaattatcataatttgacagctaacagctacaagaaga

SEQ ID NO: 73415 - DNA, 361 bp, Glycine max
  unsure (1)..(361): unsure at all n locations
cactccaaacatgaacttccatcgctctggttcttgacaaaactgctggtataagaagggtagccgagatggcatttgaatcaaaaattgctccaagctcaagagccgagtgacctcaatcatctggagagctcctagcccctccgccccactgannccccactctgcgctgctccaactatattcaccacaagaccagatcaatgagcccagttcaacgacccgatcctgattctgaaagcatgatctcttgacacttattatcctaaaatgcagaagcttgacggctcttccttgacctgttcttctaaaaccactgtgacatttggtattccaacaggagccaattctacctttggag

SEQ ID NO: 73416 - DNA, 480 bp, Glycine max
  unsure (1)..(480): unsure at all n locations
gatcctctgagtcacctgcggctgcagcttatcttagttatggacaaanactagttttttatagaaagngcgcccgccctatattctgaatgtacaaagctgagatttggcgactttggttatgcacatcagtgtggcacagctgcattctttgctattattatcctttccttttttgaactttcatattgctcattcctctctgtggatataaacacccccccnctctccatgannnagacctcactaagaaaaccaccatcctatgttatgccacaactgttggaccttgtggcctcaataatattaagagggataggcttagaatgcagaagaagcaacaacaatcaatttaacaatgttctttaaacatgcaagacacaattgattgccacaaaatatattagataagggaagagagaatgcaaacgtgantttatactggttcgacatattccgtgcctacgtccagtactcaag

SEQ ID NO: 73417 - DNA, 385 bp, Glycine max
  unsure (1)..(385): unsure at all n locations
caaaagaagtagcacactgtaattgtctgtgaagcacgttcaccctgaatgtcccttgactaagctgcttagacttgtcctctcanattcagtcctacaaagaagaataacaaaagtatttattcgacatatgaatgaatcacattctacatactactaaaagagagtatattatattgatgtataatgcaatcaatttggtaagcattaaagagagacaaaaatcgaactattagttggcctataacaatcatcaataaatcagacaaaataaattaagttggtggcgatcacatacctgattcaatctcactacgcacagacttgaatcatgaaggaataacangtgggttgtcacaatcagatactctggcggaacactacc

SEQ ID NO: 73418 - DNA, 124 bp, Glycine max
atggctgaatcagtggaccgtacgtcccgagacttgagagatacatctatttggatcccatttgcaacattaagtcggacaagcctgctgcagcaactgactgagggaaatggtagacctttag

SEQ ID NO: 73419 - DNA, 332 bp, Glycine max
cagatcagtaaacttttgtctctaaaccaaactgatatttaaattactatagctcactgttgttaaagaccatgccttactatgtgcactttactactgcttactgtttaccataaagagttattttgtttacattaatataatgtcgtcaacatgcctactctgaaaaactctataatagcaagtcctgattgaactcgacactcgttaatttaaactgacacccggtactttcggttattcctgattattgtgaaatgagaaggaacttggaaatacactcgcttaggttctcctatggcattttgtacacaacttaaatcatctttatt

SEQ ID NO: 73420 - DNA, 252 bp, Glycine max
  unsure (1)..(252): unsure at all n locations
tactcacctcccatatgttattggcaccatcattnttataattgtacataacaccgcaacatacatttttctcttctcttttgcaaaaaaatactttatttatgctgttcagacttccagcctacacatttacaatgagaaaatgcattcccgtttggaatgaatcacttaggttagccttaccttaaacaagctttgcttattacctgacttggaaagctttntttttataaaggctcgaccttgcccttt

SEQ ID NO: 73421 - DNA, 286 bp, Glycine max
cccgagccgccccctccccgcccccccacaccgccccccccccccctccccaccccacccggccccccccccccgcgcccaccccccccccgcccccccgccccccagccccccccccgtacccccccccccccccccccagggggaccaacctgcgccacccgccgcgccgccacgctccggccccccgcccacacgcccacccccccacccccccccccgaggcccgccgccccccccccggcaccaacggcccgctccccgccccccccaaccccccccgccc

SEQ ID NO: 73422 - DNA, 445 bp, Glycine max
  unsure (1)..(445): unsure at all n locations
gtcacctgcagctgcagctgaccaatctaccaacccggctttcttctttgaaactggatgacctaacaggcgatctctgcagtcacagataaatgaaacatacctaaagcaagagcttggggctggcactggaatttgtgtatatgtgatggggctctgtaccataccacgggggaatctatacccgcccccctcgtcgncnngnagctaagatggtctctggtaatcgattaccaaggggtgtaatcgattaccaggcttgaaaacgaagttaggaaacttaaggagcctctggtaatcgattaccagcctgtgtaatcgattacacagaggaatgggtcactggtaatcgattaccatgcatgtgtaatcgattacacagtgtattattgcatatttcatgtcctgaggttgagtattcaagtctagcctctggatatcatta

SEQ ID NO: 73423 - DNA, 367 bp, Glycine max
  unsure (1)..(367): unsure at all n locations
acacacagagacaaatatggtcatttgcaccttttgtcatccagaggcggcgagcctgatgacatgcggagacaaattatggccatccgcacaccttttgtcaaccagaggcggngagcccgttgacacgcagagacaaattatggtctttttgcacccttgtcatccagaggccgtgagcacgatgacatgcgaagacaaataatgggcattgcgccttcgtcaccgagaggaacaatccggtagatcggatgaagtggtcgttgggccgatatttcaaaattctgcgggttcgtgtctggaatgaccgacgaatgtgttcgttgacgaaagaggcttacttacttccattatcccataagacaaa

SEQ ID NO: 73424 - DNA, 487 bp, Glycine max
  unsure (1)..(487): unsure at all n locations
gcaccgcagctgcagctannctctcttatactagtcaangattgncttcatatttcttacnaccctcttcgcaccattttaattactgattagtcttaattgccaattaattaagctgtttattatttgagctcatttagctaatttgatgttcttaatctaatttcagaaattaatgaaacatatggctcaatctggatttctgttagtggacttgaagaccgccccctactncagcgctttcttatttaatttctaattaggagattgcaatcttattttatgtggttcagtgtttattccgttttgggccagaatattattatatggcccagtgactctttttaaatagcagccttgtgatttgtgcaaggctattctgttagactattattcagagcatatggtttatggtttntaccgttttctgttctaatgctactgctcacgtaatgcaatattccatcttctgcttctaattacaatt

SEQ ID NO: 73425 - DNA, 253 bp, Glycine max
catctcaatattacacttctcctcaagctggaacatataaatcgtatgcaccaagcttggaacatataaactgaatcctaggtccgcttaaggatttagtcaaaatatctgctggctgatcattagagttaatgaactcagtgacaatctctttagacagaagcttctcccgaataaagtgacagtcaatctctatgtgcttggtcctttcatggaagactgggtttgaagcaatgcgaagagcaacctgata

SEQ ID NO: 73426 - DNA, 434 bp, Glycine max
  unsure (1)..(434): unsure at all n locations
agcttgccacccagctcgcccaggcgatttatgtttttcttctncagaagcaaccgncttctggaaagcgcaagtgggcctggntgctatttgaacccncattcttactaagtacacccctacctttttttggtgattctttttccgtaacgttacgaaactttacgaatttcgtaacgatgcttggtttctttccgtaatgttacgacacctatggaccttcgttnncncccctttttggttntcgggatgtcacggaactctatggattgcctaacgatgggtgccaagtacctcgaagtggtcaaacgaaatgtgcatcccaacaacggatggtccccgaacgaaattagggtatgacaggttccnctctttacttgtctnttattggagataaaagggaagntaaagatagacactaatttcgttcgagc

SEQ ID NO: 73427 - DNA, 409 bp, Glycine max
  unsure (1)..(409): unsure at all n locations
agcttctcaaggaggtgagctagntattgttgctcgtgtgaactaagctctagcttctcaaggatagtttctcaaagaagcttctcaaggaagctacctagtctataaatagaaacatgttgaacacttgttggaactctgatgaatgagagtcgtgtgagacatacttcatagttccacttctctccctcttttattccttgaccccgcgctcccccctctgnnttctctccctctctcttttcctccattgaagcatccttccaagcttcttatccaaggctcatcttggtggtgaagctccttcttccatggcttattccctagtggatggcgcctactctcacctcttctacgttgtcttacgctgcattttcatggtggaaaattcccattaaaggacctcatt

SEQ ID NO: 73428 - DNA, 348 bp, Glycine max
tgcaagcttccatttaatttcagcatctcgatatatactgacttttcgacttcgaggtagtcctgccgtaagaaacgtctagcctggtctcgatttgaccgctaatattactggcttatggacatctataaaaagtattgcgactaattgacggagatcctttaaagtggaggcctataatcaaggcctgcgacccagagcaaaaaggagccaaaattgtacagcatagatccattagacgactgtttgtactgaatctactacttcgcgtgaaaacaatatttgcatatcacaccatgaaaatatgacgacaattaatcgagcctcagagctgcttgaaagacactt

SEQ ID NO: 73429 - DNA, 362 bp, Glycine max
  unsure (1)..(362): unsure at all n locations
atgcagcatgcaccngcatgacaaagtaagaacacggattacaagctctatgatcaatcatccaagcttttagtgcaaccaagaggatggtacctacctagatgcacatatatagattgacggtgaaccagctactgcctgtctagtttactgcagctcatatatcaaccacaaccacttagcacttctgcgcactcaaggtgctatctttggaactcactctcaccttcccataaaggagcattctaggtataaactatggtatactgacataacacaagaggcctaacaacacaaccacatgtgatagtgtctgttcggatagtctctcacaacattagagaacatggtgaggtgagtca

SEQ ID NO: 73430 - DNA, 350 bp, Glycine max
  unsure (1)..(350): unsure at all n locations
atactctctcaatggagcagggtgagangccttgatgattttttgtacactanagagtttatacgtcctctgcttactctaagtcatctccttcacaggagaccattttataacagctctgtattataggtctgatgaggggataataaaggtaaaccggcatctaatatatatcccatagtacttaactggatatttacgaatcatcatggttgttttaacaacgggggaggagcgtctgatgatactcatcgttggatagattaacgtgttgagatctacacttgtttaatgcgatgaagagagcaatattcaatgctcatttcacgatatcctcattacatataatg

SEQ ID NO: 73431 - DNA, 142 bp, Glycine max
  unsure (1)..(142): unsure at all n locations
cttccttctaccagaaagatgaacaccatcttctctaatctgngttcgtctcaacatcttaatggagaaagtttttgactagactatctcattcttatgggactaccaagatagaagagcttcaacttactagcgatttgta

SEQ ID NO: 73432 - DNA, 444 bp, Glycine max
tctaagcttctgcgaacaccttactgctcgatcctctctggtgtatgtggaaaatctgaccacttgctaggcaaagtgaactatggtcatcatacagaatactctggttacaggtattatcacatatgtgagtcagccctgctatcttgcagcgatacatgtttccgcacacatgttcattttaacattaccagttgcatctgcgaccattgattgggctgtcttggcccaatatacttgagagactaataacatatgaaggagctgcaaccatggaatggccatatacctccatttctttggtccaaagagaaacttctaagcttccaatctaatactcttcaacttcaacgcctagcctgaattatctgcatggcccaccacaacaatacataattcaatcaaactcaacacaaactgacttgcttggctctaaagaaatgt

SEQ ID NO: 73433 - DNA, 409 bp, Glycine max
  unsure (1)..(409): unsure at all n locations
agctnggacgaatntggtaagaaaaacaagaagaaaattatgagcctcttaccaaagctntgatggacgaaacctcaagaacacttgcatgaatcttagaagaagaacgatatggattcctctctcccttggctgaactcgtganaatgaggaagaaggtcccaaaaatttgcttttaaagaattgtgaagataaggtctaaggcttttgtccaaaagatattttgattaagcctaattgacaagcttaattgacaccatgattgactaatggccagccatgttgaacgtgctaagtcatgcttccgatgggtattattgctttngaaatttaaaccanacatggttaaagtagacataggaataaatagtaaaaatcgttttctatcccagctcgtaatcttatctta

SEQ ID NO: 73434 - DNA, 448 bp, Glycine max
  unsure (1)..(448): unsure at all n locations
acccaatctgactcacataaaccttgaccagggtgagaatgtcaatccttaccctcggaagcaaagaaaaaaggagagaaggaaaatttccaatcaaaggaaaaaaggagaggaaaggaaattcccaatcaaagagtgggagaaagcaaaaagaaaagaaagaaaattcccaatcaaagaatgggagaaagaaaaagagaaggagaagaaggaaggaaagctcctgatcaaggatcgaaagaaaacagaagaaatgtgcagaggggatctctggaccagacaatatctaaacaaatacagaattgtcaccaaatgaacaaaagaaagaaaaggaaaccataacctaaaagtggtcttctccctttgattaccaaccaaaatcctgtgcgtcggtgacttgttcgcctcgcgtcanacaaaaacagaaaaagaaaatagccaacaaaat

SEQ ID NO: 73435 - DNA, 318 bp, Glycine max
tataatctgaagtctgggtcaccttatggactatacaaatattcgacggccggtcattagaactaatgaacgtatgtgacagatcgcgttggacagaagcctttctcgaaagacatgaacagcagacacactatgctgacgaccttcctgatagacagggtttgaagcaatatgaagagcaacctgagtataacaatactgctacatgtgcaactcttcacaaaactctcgttttttgaaaatatttgatgatccacttgagtgtacacagaaccatagccatctatccatattcagatggtgcacaagaacgagctt

SEQ ID NO: 73436 - DNA, 407 bp, Glycine max
tgtgacagaatttccatgcaaattcaagtatctcaaatatgttaaatccttgagtggggataacagagaagagcttgtgcgtagtgctcggagacaatggattgatggcaaccaatgattatgtccaagtttaaatccaaaatcaagaaaagtcccgcaaggattcaactttcttaaaggaaaccatattgacggactcattagaatttaacaagagtaaatgatgaactctacttgacaaatgagtcaaccttatatgatcatgaaccacacattcttcacccattatagaccgggccagatcatgaaatagatcatgcatcttgaaacttgtaatgatacctaacccatctaactttgcttcttgaaaaaatgatctattgtataatattctccgcactttattt

SEQ ID NO: 73437 - DNA, 468 bp, Glycine max
  unsure (1)..(468): unsure at all n locations
agctntcacttgtatactgcaaccataataaatactttctgtttttccctcccgtggatgtagccttactcaaggagaaccacgtaaagctgtttttgggttctttctctcatttctctatccttttctattctgctgcaatctgtgtatgatatttctattttcttgcatctactgctactgttcttgcttgttcttcatcacttccacaacaaactggtatcaagagctcaagttgcgatcaagggaattcaagattctcgtctgaatataaagatcaagctgtgggagttctgtttctggttntntccctgcttctttgtgatcaagaacactcaagatatcatgtcaaacacaatcaggatcgagatatcaatggaaaaacaacttcaatctgtgggcatcagaatgcgtgcttgtgaagaacaacggttgggctcctgtgctttgctatgtgaaaaagagtgc

SEQ ID NO: 73438 - DNA, 452 bp, Glycine max
  unsure (1)..(452): unsure at all n locations
ctgggatgaaacagatgtgattcatcaaaaattacatctctgctgagaagaactttcctttcagttggtgaccagatcctatagcctttcactccatcaccataacccatgaacagaccctttctacattaacatgataataggcattgcagccaaatactcttaagtttgagtagtttgttgttttgccattccatatttcaataggagttttaagtcctatagcagtagagggtgttctattaattagaaagcaagttgtattgatagcttctccccaaaaacttctgttgagaccagcataggacaatagacatcttgttctttccaggagtgttctattcattctttcagcaactccattttgctgaggagtgttcctaacagtaagntgtctagcaatcccttcatctctgcaagaattgtaaattccgttgagcaaaactccaagc

SEQ ID NO: 73439 - DNA, 476 bp, Glycine max
  unsure (1)..(476): unsure at all n locations
agctntatgaaccttcattcatatgcntttttcaataaaatgtcatctcgggtatcaaccgtgcccaggtcataagctgtttttcatcttttgaaaaaaaatggccaaaacaaaaaaaaaacaacaacaaaacaacaaaatggaaaaaataaaaataaataaatctggttaactaanaagccaacactctttcgcaaggaagtggactccaacttttctttgaaaagattntccattcagaacacaaggttnttttgaaaaaatgtgtgtgtatgcccctaaagggtgaatgctgtgaaaantttcccgaacgcccaanatggactcagataaaggtatgaattgataaaagagcatgttttggaaacattgngtngacataaatagggaaaatgaatcctgagccctagtgtcacatgaccataaaaactggatgcttaagtgtccacatgggtgcatgcatgaaccagtttgca

SEQ ID NO: 73440 - DNA, 432 bp, Glycine max
tctaatgctatgtgagtagtgaattattctcatgaagttcttgataccgatatgaattttcaggtttttggtgatgtggtggcttttgatgctacatataggaagaataaatatgtgttcatttgtgattttctttggagttaatcatcacaatcaaaccatagtctttgctattggtcttattactaatgaaactgaagagacatatgtttggttgttagagcaatttgtggatgccatgaaaggaaatactccttcttgtgtaattactgatggtgatattgccatgaagaatgcaataaggaaagtttttcccaatgctcatcacaggttatgtgcatgacatctattgcgtaatgcaacgattaatgtcaatattcttggttttttgcccaaacttataagatgtatgttgggtgactatgatgttat

SEQ ID NO: 73441 - DNA, 392 bp, Glycine max
  unsure (1)..(392): unsure at all n locations
agctngcttctacagataaccgttgtntatggtattattttatatgcatagatctcccacagaaaatttagttcctctgcacttagaaattgaagctacattgagaaggaacagggccgagaggagaaggaaacttctgcaagacagaacagttgcatccattcttgaggaagaaactctttttttctgattcattatcacctgattcaccatcatcaagggaatctgctactcaagtgcttgaaacagccagcatggaagatgaccagcactagaagatcaccctcgatgttattcaagcagctcagtaccgcaattctttactatcattgcacgtcctgaagtgcaagctcacaacatcaactacccacattctttaattcatataatat

SEQ ID NO: 73442 - DNA, 427 bp, Glycine max
  unsure (1)..(427): unsure at all n locations
agctagtanggttaaagtctcacgattgtcacgtgctcatgcaacaattgttagccgtggctatacgagacatcttgccaaacaaagtctggttaatgataactcgcctgtgctctttcttccatgctatatgtagcaaattcattgatccagtcatgtttgatgagatggaaaatgaggtcgcaattatactgtgccagttggagatgtatttttcccctgcttttcttgacatcatgattcacttgattgcgcatctggtcatagaaatcacatgtcgtggtcctgtttatctaccgtggatgtacccggttgaacgatacatgaagatcttagaagggtatacagacaatctatatcattcagaatcatgtattgttgagaggtacattgcacaatacgcccattgaattttgtcagaatactt

SEQ ID NO: 73443 - DNA, 437 bp, Glycine max
  unsure (1)..(437): unsure at all n locations
ngaaggtaaactagatgccttggttaacctggtaacctaactggccatgaataaaaaatctgcacctgtcaccagactctgtggtttatgctcctctgccgaccaccacacagacctttgcccttatgtgcaacaatctgaagcaattgaatagcctgaagcttatgctgcaaacatctacaatagacctcctcaacctcagcagcaaaatcagcgcacaacagaacaattatgacctctccagcaacaggtacaatcccgggtggaggaatcatcccaaccttagatggtcgaatccttcacaacagcaacaacaacaaccttattttcagaatgttgctagcccaagcagaccatacgttcctccaccaatccaacaacaacaacaacaacaacaacaacagctacagccctagaaacaacaaacagttgaggct

SEQ ID NO: 73444 - DNA, 524 bp, Glycine max
  unsure (1)..(524): unsure at all n locations
cgaccggatctctaagtcacctgccgcatgcaagcttgatcatacagttctctaaccattccaatccattcaaatcatacaactgctcattcaaatcattctcacactcatttcataccaaacaatcaattgcatatcattttcaatcaattcactgttcaaacacacttnttgtacaagcaaacaactcagagtgccatggataagagcttggaggaagaaggagatgaatgaagggagagggagagaagagcacggaattttgtgctctaagagagctctgatatctgaagtttaatttttaaatgatcaaagttgaaaaaatgcacacacatggcttctatgtatagcctaagtgtcacacaaaattggagggaaatttgaatctctattcacatttctcttgaatttgaaacgaatttgtggagccatatcttggaagcaaacattcactaattcatgaatagtgaaanttagctatggttcactccactaatccaagattaagtcaatgattctccact

SEQ ID NO: 73445 - DNA, 420 bp, Glycine max
cgcttgaaattgtcatctccatttaccttgcttaggttttatgagagcacattggtttaagacaattttgacccaaatttgggggagtttgtttggtggataatttaaaaggtaagaaacaacaacacacacaacaaattaataaaatgttttatgtgttaaaaaaaaagagagtagttcaaataaagtgtgtgtgcttttagaacaaagtcaagtgaaagactagcgagtaagctaagtggattgaaaagacaaattgggtaagtctagaatttgtgctctcttagaattcaagcttttgcatcctagaaaaaccaatatttttttttgtagccaaacctcactacaagctaataaaagtccttctgattcaatttgtgcatttctaacattatggcatgagatgaagtacaaaaattg

SEQ ID NO: 73446 - DNA, 489 bp, Glycine max
  unsure (1)..(489): unsure at all n locations
agaatactcaatanacaacttaagagagaagttgaaatacttggtctatattagttcactcaaatagagctacgtccagctctcctttacacaactataaagggatccactaatcaaaacttccattacaaccaggtattctatcctatcactctnggctataaaagtatactctatgtcactcttgacacacccttagactccccctgaatctaagaacactcaagtatggtttaacactgagccacttttgatattctcaaacaaaagtttgaatgaatacaatgattccacaacactcaaagagcggatatataggatactcaaatgcaaataactgtgcttagcaaatgatgataagattaagtgttgagtatatccgccactcaatacgcaaagtgtcgctttagagaacttgacactcgttttctcttgattattatcaatgatgagtttctttgcaagatatagcctttatagactttagtg

SEQ ID NO: 73447 - DNA, 444 bp, Glycine max
  unsure (1)..(444): unsure at all n locations
actcagcttgaatagtaaaccgaagtgcttcaagcttcatccgttggtcaaaaatcatagcaattgaaagaatgacattatagtcacttcaatacttgctaaacttttccatcatcaacactgacatattttgcaatactggatcatcacacttaagtgtttctcgcaacaaccattcaattttccatacttgcatgaagtattcattgggcttgtctatatgtcataagtttacgctacgaaattggaatatgtctattattgaatttggttgctaacttgctacaaaataaaaactgaactacctaacaattataaataattataaatctataataataataaaataaaataatatattatttaaatattgtgggttgactggctggcccatcaacccacngggtgaacccacctaacccacgggctaattggtgccggctg

SEQ ID NO: 73448 - DNA, 465 bp, Glycine max
  unsure (1)..(465): unsure at all n locations
agcttcatgatgaatcatgattgattcanatatgttntcatgatgacaaagatgatgacaaatagctcaaaggtctatcaaagaatgagttcaagatgttaaagatagattcaataacacttcaagactcaagaggaaagttgaagaacacttcaagattcaagaggaaagttgaattcaagaatcaagaatcaagagaagacttaatcaagataagtatgaaaatgtttttttcaacaactgagtagcacatggatctttctcaaaacatgtttactaaagaagttttactctctggtaatcgattaccagaatattgtaatcgataccagtagctgaatggatatgaaaatgtttcaaacgaattacaacgttcaattgattccaaaactgaattcatacatgtttggtatcgatgccatgctttgacgtaaatcaattcaagttaaagccatcttcctaatg

SEQ ID NO: 73449 - DNA, 300 bp, Glycine max
gactctgtgccattcctgcgaaggcaaacatatgtgaagttcaatttaccagtgggacactactgttaaagcaaaaacggcatatagcctcctctcataatttcaaacatcaatgtgactttatagcaagcatatgcgcatatttacttacgaacgagctcttgcgcaaaagcgttctttgactaatacaaatgcacccctatactatcatgcagcttcgatacctagaatatttacacgtcttccaatgtgttatctgtacttacatcacacacatattcttgggtgaatatcctacat

SEQ ID NO: 73450 - DNA, 515 bp, Glycine max
  unsure (1)..(515): unsure at all n locations
acgctgtgttgtacaccgaaatgtccatttcctcttcattattcatcattcatagttatgttacataattgcattgcgctacgcacacgtcatttctgtaaacctaaggccccttattaattctgttgcttccacttatatgtttatttntaaaataactagaatccaacttgaattactgagaatgtcttcgaatatctaagaatatcttctttgtgtgcatgtagtatgctgagccaaaaagctacatagttaattatttttgagtgataggcgtcagacttgactctagactgttgtgtttggtttgtcactgctctgataccgctcatgcctcttgttattgaccgaatatatcatgtatgtatttgtctgactcacaccaatgataattacataggtcatctatatatcaaatactgtgttatataaccaactaatgtgcattgtgagtgtcacgctctttcccatttgacattctatactatgattaataccgaaagcttgcattaatc

SEQ ID NO: 73451 - DNA, 414 bp, Glycine max
catggctgttcttaaacccatatttacagaacaaaattggggcatggtgctcaatacacacttaatacacgttctaaatatgtgttatactagacaactacatctcaattgacaaagagagacttggtgctctaataatcaaattctcatgcaaaatgaaaacttttggattaagaaaatcctcacgctttcccaactatcattactcttctaaagccaaaagtatccaagctcttccctcttccttagagaaatacacgacgaaaggatgaatgaagattattcctgcacccaaatggagattctaggagcttcaaaaatcactctgtgaaatatcaaaatacaatgaatgtaaaaaatactacctacaacctaatggatcacataaagctgacttgagggttatgaactatc

SEQ ID NO: 73452 - DNA, 501 bp, Glycine max
  unsure (1)..(501): unsure at all n locations
gtcacctgcggcatgcaagcttcatattcttgaagcatggcaganagccaatcatgatctgtcagggcttgtttgacagattgnggttcacaatgagtcaacagcagtgtgggattgattcttggtaaatggattcccgatttagatctggattgcataggatgtatatttggtagtctttgaggagaggtgggattaatttttatttttctttatcagcaaaaataatatgtattataataataagattagtacaagtggtactgttatatttacactgttgtcatactatgtgtagacctatggagttctaatacaagctgtattgccagaataaagcatccataggtctggatttatctagatacccctccaccaaaagtaacctatagagcaatcctcccgagtacaaacccttgtattgctagtccatgaatgaaaagggatgtcaaattctttntccatatttttgagccgtatccagcacanaaatatggcgtc

SEQ ID NO: 73453 - DNA, 444 bp, Glycine max
  unsure (1)..(444): unsure at all n locations
tatcgtaaccgattacacaattattgttgagacaatgattgattctataggagtctctgctntaatccattaccagtagatataatcgattacttctctcttaaaaagtgtttcacaagtgatcaagaacactttaatcaattacatcaaaaatctaatcgattacattgttcttgacagttttccaatttttgggaagaacactttaatcaatcaaaatggtaataatcaattacttctttgaaataattgattacattgtatatttaattgattacaggcagttattacgagctggtataagctagaataacattattacaaaatatgttgtttacatcggttatttatgactttcaacatcggtttttaaatcgatgttgaaagtaccgacgctgatagtattattgataacatcggttttttaaaaactgatgttaacgt

SEQ ID NO: 73454 - DNA, 348 bp, Glycine max
agcttaactagttagttgctattatctatattcagtgtttaactctatctatctaagcaataactaatgcaacccataaaagtgcgcattctggttatatacaatattcatcactcctcttctttgatatatctccaacaaactggtattagagctattctctcaaggggatctgtgagtaattcagcaataaatcttaccttccttgattcaatacataacatggattctgaaacaccttttgcagcattagcaccaccattgattaagggtaaaaattgttaattataggcagctaggatgaaagtccacctctaagcgaatgatgtctaagaagctattgagtaa

SEQ ID NO: 73455 - DNA, 230 bp, Glycine max
tgcggcactttgaagtgcgcctctttagactttccttcgtccatgactccactagtgtgacacatgtccctatttatggacataggagctattcttcgacaagggatcttgtgagaaattccttgataaactttcctgacaagacttcctgataacatggagcctgctcacctaccgctctttaactcacctagctcttggaagcttctgagaatatgctctggacagag

SEQ ID NO: 73456 - DNA, 379 bp, Glycine max
  unsure (1)..(379): unsure at all n locations
atccttaagccacctgacgcatgcagctactctcacatacctctctaatagctaagctcaccttcttgagatgagaagctagagcttagctacacaccctctataatagctaagctcacccccatgagataaaacatgaaaataacaaattaaagtccttattacatagacaactcaaaatgccccgaaatacaaggctaaaaccctatactactagaatggccaaaatacaaggcctagacgaaggaaaaacctattcgaatatctataaagataagcgggctcatacttaacccataggctcggaatctactgtattgctcatgagaaccctanggcctctccatggatctctagcccaatctactctgagtcttct

SEQ ID NO: 73457 - DNA, 423 bp, Glycine max
  unsure (1)..(423): unsure at all n locations
tgactacctgaataattccttgatttccccttgagcctatgttcccctttctttgttttgaagctcattacaagccttaaggaagatatgatatttggccatgcttaatgttttattttggccatgcttgatgtatatatatattgcctagttcttgctttaatcttcaaatntgtactgtttaaaaaaatgaaaaaaaaatcaattgctgcaaattctgcaaattcgtactgttcaaaaaaaagagaagaagaaaagaagtgcagttgaataaatgaggtcttgttatgaggacttgatatgggagccttggttgattttgttgatattagagggtttgggtttactacttgtgcttaatntccacttattccccattgctcctctattcctttgggatttagctgcttattccatattttt

SEQ ID NO: 73458 - DNA, 456 bp, Glycine max
  unsure (1)..(456): unsure at all n locations
agctnganaggtagtcatacctcacaaaatatatatatgtatgtttaggtagaaagataccttagatatgcatgtatgtaaacaaaaaaatacttcacaaaatatatatatgtatgtttaggtagaaagataccttatatatgcatgtatgtaacaaaaaaatacttcacaaaatatatatatgtatgtttaggtagaaagataccttagatatgcatgtatgtaaacaaataaacacttcacaaaatatatatatgtatgtttaggtagatagttaccttcgatatgcatgtatgtaacacaaaatacttcacaaaatatatatatgtatgtgtaggtaaaaagatacctgagatatgcatgtatgtaaacaaaaattacttcacanaatatatatatgtatcgttaggtataaagatacctcggatatgcatgtatatagcaaaaacacctcac

SEQ ID NO: 73459 - DNA, 455 bp, Glycine max
actacgcttaagtatgcccgattcattcatccctatgagatgttgttgttttattggcgatcagaatttccattccttggattaccgggttgaaccaagctcaagcttttacaaaaaaggttcatcaggtcaagttgaaatatggaagtaaccatcctgcgaaattggggcaaaagatgaatcgagtcacatcactgtttcgtctactgccaaacatatttaggattatagatgtccttgttacttccagattgaccttgacaaaaatgtcatggaccatgttgaaaatctaaattgattcaacgacatgtgctgcataaaaattcgcaatacttctactgtacatcattcgcatgcatccatgcttttcattacgcgcattgctcattgcattctttccttgacaaatataacaaaatagaatgaacttatacaaaaaaaaggaaacgctttac

SEQ ID NO: 73460 - DNA, 468 bp, Glycine max
  unsure (1)..(468): unsure at all n locations
agctngcttctactatagtgaaattgtattctactactactacaagtgaattcctttgagtatatcatttactatgtatagggtgtttctttgtcatcatttgatccatttagctgaccctgccaagtgggaaaaaagtttggttgttattgttttaaggtgctccacagccatgttcatgtgccagtgatgagtttataagtattataagacattttaatgtggcctatagcttcatgatagttaggttaggactcgtagtagttgctctcattacaaccctcatctataagaacctcatccattacaacccttatagtagttgataaatggctgcacctgcaaagattatctggcttagttggtaggaatataaatgttcccaatgtacaatgttacttgtatattttctatgctattggcttgataatatactacatgtgtataccattgagatatgcacttggc

SEQ ID NO: 73461 - DNA, 451 bp, Glycine max
  unsure (1)..(451): unsure at all n locations
ggcatgcattcgcatcttgtcatcctgtgaatcggttgatgaataaagagtcattttgagtgatggtcaataccacaccatattgagacatgggtaagtgaaggtaatgcacgcgttntgtggtattgtttcaaattatttgcatgatgccacttcctttgttcaaagcttatgggcaggtacgagtatgtgctatgcccatgatcaatcaatcatcatccccgtccagctcaagacgttaaagaaacgctcctaggaggtagcctagtatctctaattttgttctataaaattgttgctatatacttgattgttatcttgaattatatcttgaattcacttaagtttgtgtgcaaccatacgatgttaggaaaatatatacataaccttgaacaaacacattatttgcaaatgcttgtgtgatcatgtgtgatgcacaagtttaaaaaga

SEQ ID NO: 73462 - DNA, 400 bp, Glycine max
  unsure (1)..(400): unsure at all n locations
agcttanggatagaatacttacttgttggtgatgaacataggcgcataacggaatcaaaaaatgcgaaaaatgaggaccctatggctgcaaactcgtcaatcccgtgggtatggcttttgaaaggggggaaaagaagtttttgaatgcaaaaacgtcccccctttcgtcattcttataatttggtgcaggggtggctcgcccaggcaagctcagctcgcccaggcgagctaacctgcattntttttttttgagaggaacattaaccatgttcgctacacctatggagtcatcgtcttgctgacttgcacaactagcatccattgtctggattatctagatctcctcccaaaatacctataagcgtcctccgagacaacccttgtctgctttacatattaa

SEQ ID NO: 73463 - DNA, 428 bp, Glycine max
  unsure (1)..(428): unsure at all n locations
ngaatagcgtttcacattttggcatcatcaaaagcttcatactacatatgcttctacaattactaatacttgtaatcccatctttatgatttcaatgaaagcataatttcaccaagttatgactcacgataaaccctttggagggcaatgatccataaataaaccattttaagagcaacaatattgtcataccctaatttcgtctggggactgttgcttcatggcatgcaacctttgattgaccgcttcgaaatacttagcaccctttgttgcacaatatgtgaagtctcgagatgcaccgaaaatcaaaagatggttacgcgattcgtgaaattccgtaatgtggcgaaaaccaaaaggaagtattgttacgcaatccgtgagtgttcgtaacttctttcaaagctaaaaaagagtaaatacatgat

SEQ ID NO: 73464 - DNA, 360 bp, Glycine max
  unsure (1)..(360): unsure at all n locations
atcctctaagtcacctgctgcatgcacgctngagctatcanaagactcgcttattcgtttagtgctaatttctctaccttcacagtttagtcagtttaagatctcttataactgtcagaagcagaaatggtctcttaatgagctcatttcatacggtgtgcaagaagaggaaagactgaagcaagaaaggactgaaagtgctcatgttgtgagtacctctaaagacaatggcaaaagaaaaagaactgaggagcccaccaacgaagctgctagaggtccaacacactagacatataatcatggtgacaactgtttcttttgcataagcctgacatgtaaaaagaatgtgccaattcattc

SEQ ID NO: 73465 - DNA, 399 bp, Glycine max
  unsure (1)..(399): unsure at all n locations
ggaccttaaaactccgctgtatcatcttttgtatactggncaatatatttgtctataagatcggtagtgtgatgctgcctaataggccaacttacaacagcaagccccaagagactcagcataaggatgcacaggccaaagttgagtatgtgaaaagaatgtatgaccaagtgaaggtgcaaattgcaaagaagaatgaaagctatgccaagcaatccaacaagaaaatgaaggaagtggtacttgaacttggtgatgatcctggacatttgaaggcacatgtgttccaggaaagatggaatgatgagaatcctgaaattggtcaaatacaggccaaaggccctagtggataaggacgaataccccgattgaagaatgatgaatgcccatattgatgtg

SEQ ID NO: 73466 - DNA, 328 bp, Glycine max
gtctacttctgcagaagcatctataacagtctttgaattatacacaacaactggttgcatatctgatctaagtgcagcatctggtggaatctctgacttaagtgactctagagttaactctccatccaagtgggttatgtattgatggcactgagtctttacgcgcttgattagataagtgaacagaatctgaagttgaagatgatgacatgacacgataagaatctgtgctggcgtctgaactattcaaacttgctgatgccaatgacactgctgcagaacaaacagatgatgacgatggatacggtgatgtttcatagttggaaat

SEQ ID NO: 73467 - DNA, 386 bp, Glycine max
  unsure (1)..(386): unsure at all n locations
tagcttaaggaaataaaacataagaataataactcttagtcagtcggtggatcgaagcaacgctngatgaagctcatatcatcttcaagtccagtgatccttgtatccatgtgatgtgccatcattttgttctattttctaaaccctttttgcaccattataattactgattggtcttaattgtcaattaattaagcagttttattatttgggcccatttagctaatttgatgtttttaatctaatttcaggaattaatgaaacattgggcttaatccggatcttggttgtggacttgaagagggcaaataaagcagcgcttaccttagttaatttctaattaggaaattttgcaattntatattatgttgttcagtggttatttc

SEQ ID NO: 73468 - DNA, 416 bp, Glycine max
  unsure (1)..(416): unsure at all n locations
tcaagaaaaggcccaaactcctcttcaaaatctgattttatgattaaataggcggctatgttcgtgcttgcgagccaagcacaattctgaactgcttagcgcttattagtggattttggctttgcgcgtgcttttctcgctcancggatggactgaagtggtgcacttcgctggatgacccttcgcttatcgcaaatgcacagctcatccttcttccagattcttcctcgcgctcaaccgaggagtgttgcactcaacggatggctcgctaagccagaagattggcttatcgagaggggggaaatcatcacttcacaaacttgcctaattaacttgaaattgagagaaaatgattattaaacacacaaaatagaaatactttgtatttattacctatctttaacaaaaagtaatta

SEQ ID NO: 73469 - DNA, 468 bp, Glycine max
  unsure (1)..(468): unsure at all n locations
agcttcctcggagccattcctgctaaggcaaacatttggaaagttagttnttaccaagatatgctacccttaaaacagatatggcatacaactccctccaataaatacaaacatcaatgtaaatttagagcaagcttatgcgcatacttcttcacgaacgttcacttacacaagacattcttataactaagaaaaatgcacccatatacaatcaaggcaccttcgttacctagattatntacatgtacttccaaggagtatttgttacctacatcacacacattagcgtcgtgctattcacgtacatgcttactttaaagacttgcgttgataaatattctcatacacgcacactattgagccagatgcgaattccagtatattatcttttgctcactaaaattgtattcatattatgaaggagttttgaatgtattttcttacataacatgaacatatcatagattt

SEQ ID NO: 73470 - DNA, 420 bp, Glycine max
  unsure (1)..(420): unsure at all n locations
tatgcgcatatttccttacaaacgttctccgaataaaatgcacccatatacaatcaaggcagcttcgttacctagattatttacacgtacttccaaggtgtatttgttacttacatcacacacatctccttggctaaattcacatacatgcatacccaaagcattttggggtaccaaaaattgcacatgtgcacatcttggtatctctaatacctatacatacacaaacttcatgatgaatcttgactatctacacaataaggtgctacatttcatgctctattcaagtttttgctacctaaagccgcatgcaaattcaagtatattttcctttgctgactaanattgtattcaaatgaagaggtatacatcttttggtaatgtatcttctttacataacatgcaacatatttatgtata

SEQ ID NO: 73471 - DNA, 334 bp, Glycine max
agcttcttcactaattcccttccacactcaatcatggcctatatcgcgagagaaggtccacctgagaattatatatgtattctaatctttcacaataatattccgtttatactcttttcacatgccgacactaatagccaaataaaagactgtgacgttataataaattcattaatttattcatctttatagacttatcaatattttaatatgtatttagataatcagatcaagtttccaaatattataaaattccgttatagaatatacttcttctaatctatgaaaaggtattgtaatggcttttctctatttaactttttacttctaaaac

SEQ ID NO: 73472 - DNA, 416 bp, Glycine max
tctatgccactgcggccactgtgaaagagttcgttggtccattaatccagatccaagtatctacattgctgtttggtcgaaaatcagcttattggaaaaaaacacaagttccacgtagagataatgtcaagaaagagtatataagaagaaacaaccctcatcttaagagttaattctaaggttgagttagacccaaatccattaaaagagtcatcataaacctattctagatccattaaaagggtcacccaaatccactcacctaatgagggcaaccctcatcttgagagttagctttgtagaagctgctgtttcgagacaaataggttgcaccgtcacttgcactcccaaacccatgttgaagctgcctttctctgcaataatggtcctctttccatcatctatcagatacaata

SEQ ID NO: 73473 - DNA, 513 bp, Glycine max
  unsure (1)..(513): unsure at all n locations
agctttatgtgaaaggatgtgactcttcacatttgaatttgaatttcaacattcaagcacactggtaatcgattaccaaaacattgtaatcgattacagcattntgaaatcaattggaatgttgtaaatttagttgaaaactttttcaaatccattttgctactagtaatcgattacaacaatctggtaatcaattaccaaagagtaaaaactctttggtaaacatgttntgagaaaaatccatgtgctactcaatntttgagaaaaccatntcatacttatcttgattaagccttctcttgattcttgaatcttgagtcttgaatcttgatctcttgagtcttgattcatgattcttgaaatcaactttcctcttgaatcttgaagtgttcttgattctatcttgaatatcttgaactcttctatgattgactcttgagcttcttgtcatcacctctgtcatcatctttggttatcatctntgttatcatcaaaacatctttgaatcactct

SEQ ID NO: 73474 - DNA, 416 bp, Glycine max
attacggtggttaaaaaaaaattaatgttgtcgttattttagagactaaaatgacatgttgaattattaaattaattgatgcttgtaatttgaagaactaatttgatgtattaccatgcttatctctttgtagttttgtaaattttcaatggtttgaaaacactaaagcaatacttgaattgtgtttcgttttattttaatattttgagaagaaaacagttaaaacaagaaaaagaaaagaacataaaagtcatttttgtaactgatctgaattttttttatttatatttaattgttttgtgagtttcaaagaacaaatgatcatttctcctaccgtgttaattaatgcttgttactgcaaccttcttacaagcttcctttgtgtatataatatagctaaagctgtggtaaaatga

SEQ ID NO: 73475 - DNA, 415 bp, Glycine max
  unsure (1)..(415): unsure at all n locations
agctngagatgaggaagtgtagaagggtgaacttcctgcttttattcgttgaccacagagtggtacctggagatatgtcgcaggggtcaggagaccttggggacgtcaggtggggtgctattgcccaaaaccaagcttgaccaatcccgacccaacccgggcatagtcggtcagtgagaacctgtgatgtacctaagcaggcgagctcctggcagtcaacagataaaaggaacaaagaccacaaagcaaggaggcttgtggtggctggccagctgtgaatnttgtgtgatatgtggattatggcctctggtaatcgattaccaagggtgggtaatcgattacaaggcttaanaatgaagacaggaggctaagatggtctctggtaatggattaccacggggtgtaatcgattacc

SEQ ID NO: 73476 - DNA, 462 bp, Glycine max
  unsure (1)..(462): unsure at all n locations
ggtaggattatggtgtacccatcacatgtggtactatgtggcggtcgggcgatggtgcacaacaagttttccacatccacaatgcgcgcataaacccaccatcccatgttgcccacctccaactgagctcacgtactcccacgtagcccatatcctcgtttctctcaacaccgggtccacatcaatcctcccaagcttccccaacatcaaagtaatacaacattcaaatagcacaagctatcacagccaagcaagatagggcaaaggcagaaaactctgcccaaaacaccaaccaaatcacagcttttctcacttaaagaccccagtaacaattccttcgttccggttcattaaccgttggatcgactcgaaaaatttactggaagtctctagtacataagcctacantttgaccgttgggatctactagcaaatatccataactcattctgcactactctt

SEQ ID NO: 73477 - DNA, 350 bp, Glycine max
  unsure (1)..(350): unsure at all n locations
agctngcanaggaacgcnccatatgaggagccaggttatgcgatatgacggcgtcagctccggcgtccacctctgaatggaagagaaaggagttcctccattaccaagttcctgttgtttgatattataagccgtgtcgtcgtccatatcgtggaggatgaccatgtcttctccccagtatgcaggtttcacatccgctccgaacatcccctgcatctcctcctccaccctttcaaacattccaatgttttttaaacgacccacccagactttgtcaaagccatttgatttctcctttttcgttagaataagtatggactctacaacgctccccaacgtgatcccctgta

SEQ ID NO: 73478 - DNA, 441 bp, Glycine max
  unsure (1)..(441): unsure at all n locations
ctattcccgagagcatctcttatttaagcatttcagttctttgctttcttgtagcttaggaaaaatgccatttcttcttctttctttctgccaaatccatttctaaagttccaagtactttctccatcacccacatccaccattagccaccacaaaccatcattgttctccattgaaaacccacaccgagaggaacccttcaaccgaagcagaatttccaacttggcttgcggtttcagtagagaacgaaaaccctaatctgatctttcgttttctttcgaggtaaccatgattctgtgcttgtttcttgttagtttcatcttgtctttgcatcttttctaactntgcaaccgccattgcatgtcttatgcttccttngaaaaaccttagagaaagagactntgtaaacgttatcctttcatgaaatgcatgttattttcg

SEQ ID NO: 73479 - DNA, 213 bp, Glycine max
  unsure (1)..(213): unsure at all n locations
canncttttatccaaggctcatcttggtggcgaagctccttcttatatggtctattccctagaggatggcgcctcctctcacctcttcttctttgtcttccactgcatccccatggtggatagtcaccattaaaggacctcattgatgctcacagatccagtctccatagatgctccacaagcaagcctccatctagaggtcatcagagcaca

SEQ ID NO: 73480 - DNA, 359 bp, Glycine max
tcctccatatctggccttacataacctatattaacaccgccaccaacacaataagggattcttggcacccggaatacaacgcttcctttgaataagttgccaaggaataatacatagggactggtccttgttaaaaaaactctggtccaaaatattgattcatatcctctaagcgtgctcccattggtacataaaatgctcacaattgaaaccccctctacatgtctatcaattcatcatgccatatccatgtggtgtaattcttcttaatcctatcacacaacagatggtcctgtatgacatccacatttgtctcctcgggttatacaataatgaaggacaacatatctttgcctcat

SEQ ID NO: 73481 - DNA, 153 bp, Glycine max
atgctgacctgcttaggaggggagcataatgtggctttcgctgaagactctcatgcatatctctatgacctggaggataagtctctcaaccaagttatggtaatagcgcacttgagtagatttgacactgattgcctcaacaccttcctggag

SEQ ID NO: 73482 - DNA, 376 bp, Glycine max
  unsure (1)..(376): unsure at all n locations
aacctgaaattgagagaaaatgattattatacacacataatggaagtactaagtatttattacctatacttaacagaanatacttataacactacaaaataaccataaattggaagagtttgatacaacttacacaagttttatacacaaaagttagtcgtattcaccgactaacagtacacgaatctggaaggaaagtagtagtagaaacatgatggcaggcaaactcaaaagatatggcattatgggcaaaaagtagttgatttctacaataccaaataacccaaacaaaattcacaatgagggtgagaacaacttttctagtttgggcactccattttctatcgagtagctaaagcacggagtgacaatagat

SEQ ID NO: 73483 - DNA, 393 bp, Glycine max
  unsure (1)..(393): unsure at all n locations
gtggttaaaaaaaaattaatgttgtccgttatatataaactaaaatgacatgttgaattattaaattaattgatgcttgtaatttgaagaactaatttgatgtattaccatgcttatctcttttgtagtttgtaaattgtcaatggtttgaaaacacttaagcaatacttgaattgtgtttcgttttattttaatatttngagaagaaaactgttcaaacaagaaaaagaaaagaacataaagtctttttgtaactgatctgaattcttctatttatattaattggtttgtgagtttcaaagaaacaatgatcatttctcctaccgtgttaattaatgcttgttactgccaacttcttacaagcctactttgtgatataatataactaaagct

SEQ ID NO: 73484 - DNA, 385 bp, Glycine max
tggggtacccatcacatgtggtacaaagtggttgtcagacgatggcgcacaacaagttgaccacatacactaagcgcgcataaacccaccatgctatgttgaccaccttcaactgagctcacgtactcccacgtaccccatattctcgttactctcaacaccgggtccacatagatcctgccaagcttccccaacatcaaagtattacagcattcaaatatcacaagctatcacatgcctacaagattgggcatatgcagaaaactcttgaccaacaccaaccaaattacagcttttctcacttgaagacccgagtaacaatttcttcgctccgcgtcattaaccgatggatcgactccaaacattactggaaggctctaataca

SEQ ID NO: 73485 - DNA, 222 bp, Glycine max
agctggagcagcacgtgcgaggactttacatttagtgtttaatgacatcgtgcataacagtgcagctgtgagcggaacacgaatgacatacttgaggaaccaagttgatgatcttcagagtgacatccgtgctaatgtgactatagcggatgtggtcttagcagctcctccacgtacttatgcctgatgaaagtgattactatactatgaagttcagactgc

SEQ ID NO: 73486 - DNA, 357 bp, Glycine max
  unsure (1)..(357): unsure at all n locations
gcatctcttatntaagcatttcagcttttgctctcttgtagcttaagaaagaagccattatttcttctttctttctgccaaatccatttctaaagttccaagtactttctgcatcacccacatncaccattagccaccacaaaccatcattgttctccattgaaaacccacaccgagaggaacccttcaaccgaagcagaatttccacttggcttgcgggttcagtataaaacgaaaaccctaatctgatctttcgttttctttcgaggaaccatgattctgtgcttgttacttgttagtacatcttgtctttgcatcttttctaacttgcaaccggcattgcatgtcttatgcttc

SEQ ID NO: 73487 - DNA, 390 bp, Glycine max
  unsure (1)..(390): unsure at all n locations
gcttcttcgaaaggtatggttatctccagtttcctgataatatctaaaaatctcgccaaatgacagtccttctccttcttggaaggtccacaggatatggtacttccgcaacttcattcacagctatttcacttctactcttcttttcattctcatgtttttcatctttgtcaattattntatattaagtttccttatctacttctttctctttttcttggtcattcaattctcttatatcgaccattatttgtttctctttttcctgaatattctcacctcactcatcattgttcttgccatcagtacctatctcttctacagctctcttcttgagtccaacactattcttttccttattattcacaaaccttttacttcttggatcat

SEQ ID NO: 73488 - DNA, 436 bp, Glycine max
tagcagccaactcctgagggtcacgcctcacgagttcttatctataataagcacaaagtgttacccctcttccacaacaacaggggtcttcaagaaagtgttaagcgtatcctcatcaaacttaatcaaatgacctctcaccctcacctgcttaggtgatttgtcctcggggtcatagaggttggtgtagaactccttcacaatggcaacatcaatgttaccgtcaatgaaatcagtcaactccttatcccagtggcgtctctcgagttcctccctgaactcatcaaactttgtatagtagaccaccacattcctctctggcaaaagcttgctaggcacaataacatcagtgtatctttcccaaccctcttgggaagtgaatctggatctgaaaatctaacttgggaagtgaaagggtccttttttcctataacca

SEQ ID NO: 73489 - DNA, 505 bp, Glycine max
  unsure (1)..(505): unsure at all n locations
agcttgntattctaatgtaatcgattacagggaatggttatcgattaccagatccttaaacaagactttatcactgaaagctaactattcttaagtcaaatgcacacctaattatcacaatcagatgcattcaaatcaacaagcacaatcaaactcattctattacaaacacaatcaagacacattcaatcaacaatcatcaatcacaaacaagtctaatcaatttaacaatcaattagctacacacaatagattatattcctattaaagaaattcaaacaaaggtgatcaataatcaatataaccttcaaacacaatcatcagaatcaataatcaaagacaatcaacataactctcaagcacaatcatcatagacaatctagaactcaatcaaaagcaatcatcatagacaatcaacataactctcaaacacgatcatcagtgctatcacacataattatcacagacagtcatcataactatcacacatatatatcgaagacag

SEQ ID NO: 73490 - DNA, 443 bp, Glycine max
  unsure (1)..(443): unsure at all n locations
tgtcatattaccaaaattctatgtgaaaagtggcagcttaaccttattgcttaatttaaaaattccctataactcactttcaggttctggtgtgttctgtcagaacagctaacatgctacgatatgctaagttgttaactgtttgcagtattctaattacgaaatctatcacaaaagtttcatgtcatgttttattttccaatcagatcaaatcaccacgtccataaaatttctcaatgccacatctaaaccacgatcttcacgatataaaattagtagtctcaaatataataaatctgtcaatctaatcacaaccattgggcagctaactgatcagacataattatacaaactatggtttaaagaaatgacaattgtgttaagacggcgaagtcttgtcacactcattttttctatgngacattatgtagtgtctttttaca

SEQ ID NO: 73491 - DNA, 290 bp, Glycine max
agcttagtgcagctaggcgcgtagctcaatacacaacctgtgcttagcgcacagactctcttagccttattctgaggaaaacttacacaagcaatgtggcgcttatccgtacaggtcaagcttaacgctatacaaaaattctgaatatcataacttctgaacactagaccacgttactcacaaacacatttagcgggctcatctcttatgttcatcaacagggatgaacgctcttaccgcgacatggaccgctaatcgcattcatctggaaatccaaaattttaactgat

SEQ ID NO: 73492 - DNA, 354 bp, Glycine max
tatggtaggatctgggacctaaccatggctgacgtctctacggaggccattgcctccctcgcccaatattatgaccagcctttgaggtgcttcaccttcggggacttccagttaacacctacggcggaagagtttgaagagatcccgggatgacctttgggaggaatgaaaccgcatcttctctcatgattttatccctccctagctagaatttcgaacatagtcacaatctcaacacacgaattggactgccggaagcaagtagaaaatggggtggttggaatgccaacgaaatgtttggaagcaaacgcgagagtcttggcagccaagacaaatgggccccattcatggaca

SEQ ID NO: 73493 - DNA, 346 bp, Glycine max
cttacgcatatattagtatgacccctaacctagaattttaattactcaatgtcattaacctagggaatgaaaacaaactaaatgactgagtgtgactgaaatcgttggacacctaaagtgctccgctacagtcaacaagtcacccaccgtttggtcttccataaggctgatgcctacgttgccaaatgtgcccttattacaacatgaactatagcccttttagttgattaacccaatacatattcttggtcagccaactatacacggagtgggacattatttagacaaactaaacactcttgaattgaaataaagtggtgtcatttagtcctccgtttgggccatg

SEQ ID NO: 73494 - DNA, 488 bp, Glycine max
  unsure (1)..(488): unsure at all n locations
atctcgctactctatangatattagtattctactactactacatgtgaattcctttgagtatatcatttactatgtatagggtgtttctttgtcatcatttgatccatatagctgaccctgccaagtgggacaaaagcttggttgttattggtttagggtgcttcacagccatgttcatgtgccagtgatgagtttataagtattataagacattttaatgtggcctatagcttcatgatagttacgataggactcgtagtagttgctctcattacaaccctcatctataagaacctcttccattacaacccttatagtagttgataaatggctactcctgcaaagatcctttggctaaatcggtacgaatcaaatgttcccattgtcaatgttacttgtatttttcctatgctttggttgtaatatttactgtgttaccataggattgcactggcttgataccgggttgtaaggtacttattttttt

SEQ ID NO: 73495 - DNA, 455 bp, Glycine max
tgcatgcattcgcatcttgtcatcctgtgaatcggaggatgtttaaagagtcatattgagtgatggtcaataccacaccatattgagacaagggtaagtgaaggtaatgcaagcgttttgtggtattgtttcaaattttttgcatgatgccacttcctttgttcaaagcttaagggcaggtacgagtatgtgctacgcccatgatcaatcaatcatcatccccgtccagctcaagacgttaaagaaacgctcctaggaggtagcctagtatctctaattttgttctttaaaatttttgctttatacttgtttgttttcttgaattatatcttgaattcacttaagtttgtgtgcaaccataggatgttaggaaaatatatacataaccttgaacaaacacattttttgcacatgcttgggtgatcatgtgtgatgcacaatttataaagaggggg

SEQ ID NO: 73496 - DNA, 444 bp, Glycine max
  unsure (1)..(444): unsure at all n locations
tgtgagatatgttactgttntactagtatgcttttaatgactctacttaaggtgatgtatactatgcgttggatttctctgctagcttatccgttaataatgtgtgttccaatcttgtaatttcttattggcaatcattctagctagaacccaaaatgtttgtgaatagaatttattacgtaccttctcctttaatcataataattttattctttggaaaaattgtatttgtagatgtatatattgtttggggataatatataactatgataggaaagtacttagtaattaattaagataggaaaaaacagaattctaaaacattatgtaaaaaatatataaataatataattgtgttcgtttatgacaggataaagacatttcagtaatcaatcattttacttaaacaaaacaattggattggtatgtttttttaattcggga

SEQ ID NO: 73497 - DNA, 187 bp, Glycine max
actgatctccactgactcacaccttgaacttaatacttggtatattacgaccttatggaagacaatgccccacttgcttcagcatctccatctgcactcctttttgttaaaacgcttctgtatgaaagcctaactttgttggatcttcctgaagacccggtgtacatcatttttatctattaaactt

SEQ ID NO: 73498 - DNA, 428 bp, Glycine max
  unsure (1)..(428): unsure at all n locations
gtggtaatcagagcacaagagcttcaagtatgtgctccttannacctccattaattttttgctttaccttctcttccattgttgtttcttcatttttctccatgtatctcctcacatgtctagtgctaaatgttgttaacatgattctttagaatttccaccaattaaaatagctatagaagctagatttaattctctatggttcaaatttcttgttcatgttcttgaaccatgagttgtgttgagtttaagttcctttgagttttgtcttgctatttttttgtggctgaaacctaaaacataaaattcttacaaaaatattaaagtagaagaaaacctcaaaaatctagagtgacttgttcacctgttgtagttttgtcatagaagtcatgtctagtcatgaaacttgtcacataagatttcttatg

SEQ ID NO: 73499 - DNA, 402 bp, Glycine max
tctgaagttcaggtgtgagttcataaccttcttgtataatctctatgagcctatgcaacttccaaccatgcttttatattaaaaatcattgtcaatgtctataacaatgattccctttctcacccacatctgtttcaaccttgactccaaggccttaaagccaatctttcttcccaaaagctttaaatcaatgtactcttccatggtctatgtaattcatttcttcttcttctttgaatgaataaaggatgggcaatcatattatcccaacgtcctttcctctgctcaaatatttgtactctccatatctaattcctcttcttcatttgtgtcaaatcacactcctttgatgagtgaagactaaaatctgagttgtttccccccaaaaaagtgtccttatac

SEQ ID NO: 73500 - DNA, 469 bp, Glycine max
acactatataatactctcgcttggtaagatcccatcagttgatcttagcttgatttatttttaaaaaagaaaaataaccaactcactggtaagtgtccatgtgttttccagagttcataaaactaattaaaattcaaatattcctttcaaaaaaaatattagaatagtgaatataaaaacctggcgctctgcaaaacctggaatataaaaaacgaaaaggcccaaagcatcccatccatcgatcctccaactccatatttggcagtgtcagaacaaaaacatgggcagtgtcagaacaacttcaaaactccaaccaccattctccttctgaatcttctcctctcctcattgcaatggccgcagctatggagtgctggtcgcgccgcgccaccaccaccgtcgacgaggaccacgccgtcctcatgcagccacccgaacaggagccaacaataccccaaccaagagactc

SEQ ID NO: 73501 - DNA, 222 bp, Glycine max
caacgggatacgaatgcaacgcgagcagtccgtggcaatgcccaacacattaatggacgatgccaacacacaatgaccaaagacaaacgaatcggcacaagatgtgcaacgaccatgaacaaaacaacgaagcccacgacacggcaaaaacgctaacgaaacgccactatgacagaaaacggacaatgtaaacatgatgaatgaaactcacagaccacacga

SEQ ID NO: 73502 - DNA, 400 bp, Glycine max
agcttgtgcgaacaattcaagttgtattattattatttctgctcgccacattgatccttatcgcatctcgaggacatgtgctgacaagctcacatgcactcacctacacgcaaccgacatattctataaatatcactagtgtgagaagacattcttataactttcaaatattcatctgaacccttaccactatgtctcacccaactgcatatttctgcgtttactacaatgaccatatctgaacacaaatgatgatcccaccttcattaataacaaagcaagaactttcatggtcaacaaggtcataactcttacactattattcgaacttgttcaacaataataaacattgaacaacaccaacatatccaacatctcacttgtcaagtcctatattcga

SEQ ID NO: 73503 - DNA, 277 bp, Glycine max
tccgcttgcagtgaaaagtatttataatctcgatcatttggctctacttgaatgtgcgatataatttgtgttgctcacaatatttaactagatcgatgagagttgcggctagacatggcaacgatatggagcggagatagatattgtctctctagtctttgaacccaactccactacatatactcgtacccgtttatgatacccgacggattacaatgtgatatcccatcccgtaactgcagtgtatcgggggtgctgacttgttccgttgcaattg

SEQ ID NO: 73504 - DNA, 342 bp, Glycine max
cgcctgaagcagagtcggtgagagagcttgagatgactttgtgagtgattgatatatcctaaaggtgaaggagacatgcccaccacttggatgtttgagatctatcaacttggtcttctatatgctagaaagaatgcttcctgctatggacagctaaatcctatgtcggatcttctctgaatgtacctgacgtacactatgtcctacctatttaatacagaattgagtgtgctctgcgctatctgctattcactccaggatgcctttacctagatcaccgcaatgcatgctatgttagagtcattaacagtggatactgtgcctactctatagccatgaatg

SEQ ID NO: 73505 - DNA, 386 bp, Glycine max
ctataaatactcacctgggctaagtgagtctgtctcgctaagcccaaggtattttatctttgtcaaatatttgtgcatccgctaagcgagccgtgctcgctaagcgcaatttcgtctctattttataataaggcttagagagcctgcttgctaagccattaatgttgtagtagtcaagtcctgctaaaagcccactggcactaagcctgtgtagtgtgccacgctaagcgcaattagctctctgttagagaataaggcttagcaagccatgcttgcttatccatagtatttttttagctaagcgagggtgtcatgcttaaccaaagtctattgttttcttgtgtcgcgctaagcgccccctgcgcactaagcgcatgttgttattt

SEQ ID NO: 73506 - DNA, 416 bp, Glycine max
cactgagctgcactgagccaagatttataaaaataatattgtctatatggcataaagaaagaggtgccataagtgctaatgttaaaaataacaaaactttgaaataagggcggaaaagagaggtgtcgtaagtgccaataataaaagtgttgttagaggaataaaggctgaaaaataaataagcctaggcaagaaataagtgaacagttttctaaagatgcatgctctcttataatccagatgttttgaaatctcataagaaccatgatttcttgtttagccaagccccattacaagccaataatagtccttagtgatccaccaagtgttagtaagaataactttaactgagaagaagtgcaaaatttgggaatcttaattgcacgtatggaaattcaacactcaccccaacactt

SEQ ID NO: 73507 - DNA, 445 bp, Glycine max
  unsure (1)..(445): unsure at all n locations
ngcaccacacatagcacatataaagggaaataggcttatgttgcctacagtcctgcaacatgtcagtagtattaattctattaagcattttagtctagtgttactgaatagcaacaattgtggtgcaatcacactatcgtcttgtgaattccatcaaatctgccatatcaaagttgtcacattgcatcttacacaaaaagggccatccatccctcatggttcttacaccacacatatgtttatatattcgtattctctccttaacgaatgatgttcttgacattggtgaaaataaaccacagaaggaaacttgtggaaatacatgcatcttgccctgctaattaccatataacgagatgacaattttcttatattttcgaggacattatgcgttgctgaatcatcatcaagatatataacttatttttactatgtctgaatctct

SEQ ID NO: 73508 - DNA, 437 bp, Glycine max
  unsure (1)..(437): unsure at all n locations
tgttatgaagatggaattcggaggtatgggtttcatacttcttcatatatttaatcttgatatactaggaaagtaatattagaatttgatgaacaaccaagatactatagtttttaaaatttacaaagttaaatacttttccaataataataatgtctttatattaatatatattagtttaaaaagtaatataatttctctatttgaaagacagtaaatagtttcaagacatacttattattattttctggagggagagatattataggaattaaatttattaataaaaaaatcttttatgaaaaacattagagaaacgaacttatataataaacaagaaagagatatttattattttggaagtaaatctattgatctgaaggaaaagatagtcagtatgttgaaagaataattntttgaactatgttaaaagaatc

SEQ ID NO: 73509 - DNA, 383 bp, Glycine max
  unsure (1)..(383): unsure at all n locations
agctntagctntagtntagggacataattatntagctttgtatattgtnatgttgtgcaccgatcctattattctganatagtatcaaagttgtagatttgggtgactttggttatgcaaatcgttgttgcacagctgcattctttgctattattatccttttccttttttgaactttcatattgctcaatcctctctgtggatatcaagatcaccatttgctttatgattggagacctcactaataaaaccaccattcaatgataggccacaactggtggaccttgtggcctcaataatattaagagggattggcttanaatgccagcgaagccactacaatcaatntaacaatgttctttaacatgcacacacaattgatt

SEQ ID NO: 73510 - DNA, 373 bp, Glycine max
  unsure (1)..(373): unsure at all n locations
ntggagaaataggaagccttggattggtgcaagcagcgatcacaagcagtgtaagatgaaaccaaaagaagttaaacacagaactgcctgtgaagcaagttcaccctgaatgtcccttgactaagctgcttagacttgtcctctcaaaatcagtcctacaaagaagaaaaacaaaagtaattatacgacatatgaatgatttgacattctacataacttactaaaaagagagtattattatattgatgtataatgcattcaatttggtaaagcattaaagagagacaaaaatcgaactattagttggcctataacaatcatcaataaatcagacaaaaaaaaataaattggtggggattcacatacctgattc

SEQ ID NO: 73511 - DNA, 464 bp, Glycine max
  unsure (1)..(464): unsure at all n locations
gatcctctgagtcacctgcggctgcagcttntaatacaggcattaccaacatttctacttgttctgaagatgaacataagtgtaagacttgtaacagatcgatgaagcaaacacatccacaaattttgtccggaaaagaacattggtgttattgaacatgccttccttcaaggaaaccacaataaactgcagaacaaaagaaccaaaagaaatgaggtcattcaacttattggatgctgaactgtcactagcaagaactttgaaaataacatcagagaaaatgaatttaacaatagcaaagccaaaaagagaactatacggcaaacaagtttttcccctacttggtagtttcaactacatnggattaaagacactataatantttattgtaaataaattatcacgtatattgacaaaccanagtaaaactagaacaatgacatttctggttttctttaatattc

SEQ ID NO: 73512 - DNA, 452 bp, Glycine max
aaagtatgcccgagtcattcatccctatgagatgttgttgaagtattggcgatcagaattgccattccttggattatagggttgaaccaagctcatgcttttacaaaaaggttcatcaagtcaagttgaaatatggaagtaaccgtcttgcaaaattggggcaaaagatgaatcgagtcacatcactggttcatctactgccaaacatatttaggattattgatgtccttgttacttccagtttcaccttgacaaagatgtcatggaccatgttgaaaatctaaattgattcaaccccatatcttgcgtaaaaattcgcaatacttcaattgtacatcattcgcatgcatccatgcttttcattggttgcattgctcgttgcattctttccttgaaaaataaaataaaatgaacttaatcattgttataaaaaagaaagggacacgctttac

SEQ ID NO: 73513 - DNA, 484 bp, Glycine max
  unsure (1)..(484): unsure at all n locations
agcctttagcacaaagagcatcttggctacaatattattttcttatagtcataacaagctcaacatattccctatcaatccgatgttaaaaacatatatttcccccatatataacaaatcgataaatggtgtgtgattcaatgaaggtgccaattcatgaaaaataactgttaaaaactaagttcccctccgacacgtaacgacgttcgatgaataccgttacgctctccgtaatgcccattnttggcccaactctaagtcacaacaaggtcttctactgcatactcttttcttccttcatcgtcatcacacactttctctctctagatcattctcactctctctctcatctctgaattttctcctctgtgcgattcactttattaataggagtctactcgctccttttcctttacctgataatgagacaccctctaccncgacatatatataaataaattaaatatcatgtgtaacataaatc

SEQ ID NO: 73514 - DNA, 340 bp, Glycine max
  unsure (1)..(340): unsure at all n locations
cttaagtcacctgctgcatgcaagctntaagcttgatgagagtgtcagtatatcataacatatgcttaccacattcacatacaaagccctctcatacaggttgaataacttagaccatgatcaagacaaggactaaatgcatatattatgtatagaactgaatactacagttcatttcccttttcgggtaaccaatctaccaagtaagatatacattattcaaaacaacaaaaccctgctatggcgaatcaattaataattcacaactgagaactgatttaaagggcatctatgttttactatattcatagaatcttcagatgttatccttggaagcata

SEQ ID NO: 73515 - DNA, 390 bp, Glycine max
  unsure (1)..(390): unsure at all n locations
agcttgatattgcattctggcacctattctgaatcttctatgctgtctctacatatataaaacagtcccaccatcccaatttcgcagaatcatattcatatatcattgnggcatttcactgagcacttggggggcgcacgtttggacacaaattgcaagagaatggggacaatgtggcatgccccattgcttcagaatacaacataggcctaatgccttctcacacaaaccctcaactcaacaaaacatgcatggattcagatgcgaattgcttcacgaattttcataatatgagcatctaaagcaccaaaacacatcaatggagagccaaataaccaagggaaattgcacttactcgtggngagtgaattatagcgtgaaagggaaaca

SEQ ID NO: 73516 - DNA, 449 bp, Glycine max
  unsure (1)..(449): unsure at all n locations
tatgcgcatatntccttacaaacgttctcttgcacaagacattcttttaactgaaaaanaaaaatgcacccatatacaatcaaggcagcttcgttacctagattatttacacgtacttccaaggtgtatttgttacttacatcacacacctccttggctaaattcacatacatgcatactcaaagcattttggggtaccaaaaattgcacatgtgcacatcttggtatttctaatacctatacatacacaaacttcatgatgaatcttgactatctacacaataaggtgctacattttatgctcttttcaagtttttgctacctanagccgcatgcaaattcaagtatattttcctttgctgactaaaattgtattcaaattaaaaggtatacattttttggtaatgtatcttctttacataacatgcaacatatatatgtatattttt

SEQ ID NO: 73517 - DNA, 368 bp, Glycine max
  unsure (1)..(368): unsure at all n locations
agcttgcctcatagagatccaggaaggataaagtggctgattgttctcagttccgctcccgaatatgatagtcatcattntaggagcgctgagcaccagcagcgcttcaaggccatcaagggatggtcatttctcccggagcggcgcgtccagctcatggacgactagtataccgacttccaggatgagatagttcgccggcggtgggcatcgctggttacccccatggccaagttcgacccagacatagtcctcgagtttatgccaatgcttggcctacagaggagggtgtgcgagatatgcaatcctgggtgaggtgtcaatggatcccatttgatgcggatgcgctcactcaggtcctgtgatat

SEQ ID NO: 73518 - DNA, 439 bp, Glycine max
tgtcaccgacatagtcaacatcacactaacttactaacttgaaaccctttccttaatgcatagaccaaggttaggagttcgaataagatatctaaatattcttttaacagtagttaaatgaacttcccttgtctcaaaatcttgcacgtaggcatacactgaacatgatgtcaggtttgaacacaattagatatatgagagacgttatcattgctctatattgggttttgtccatcttcttgaattactcatccattctaagataagttgtcgcaacctacccttcggcgggagggcgacgcgtgactcgcgggatgcgtgttccatgaaaggaatacgcgcggagtcgccaccaacgtttatttgaggaaaacgtcggataaaccggataagacgcgatctacgaacttttaagtgaaaggttcgggagttgtattta

SEQ ID NO: 73519 - DNA, 407 bp, Glycine max
tactctcgctgtatacgacaaatcaaacatacgtatgagcagtggttatgtatccacgactattagagccttccgacggattctctatgcgtaccggctatcttgcttttacaaaattgacagacaagatcaactccactccgtaatctgcagaatcttatcatatggtgcaggacacgatcactcgtatctaccatgggatatgaactgtcaccaacaataacgaacatcgttgtaattgaactattcctgagcacatgaagcaatatcatacctcaattgttgaagcatatatattcttgaataacgagttctgcataaagatatagcgaagcgcgttataacataattcatgtgcactcatgcagttcattggttgtgctgtacgtgacatacaatcctgtgga

SEQ ID NO: 73520 - DNA, 478 bp, Glycine max
  unsure (1)..(478): unsure at all n locations
agcttgcaatcnactacacacatacagtcatctattaccagagcacattctcaacaaatattctcaacattcacatcatcttatgaggatctcgaatggctatccaaggactatatatatatgctacatcagacacgattttaagaacagattttggataacataaaggtcttatcctattaaaaagcaaatcctgttattcatatacaatttccatggcctaattacttgtgattctatacggaatatttcgagtgctcataaagctcagtctatctctatcaagagagatatcttcgtatcttcctcttcttctgacaaaggattaagagaccgatggtctcctgtcgtgaaaaattctaacacaaaggaatggtggccttgtctgatacgacttgtataggaattacaaataatgatctctcatcgggttgttggtgatggacgtagcacacggcgtggccaaccacttaaacta

SEQ ID NO: 73521 - DNA, 442 bp, Glycine max
  unsure (1)..(442): unsure at all n locations
tctaaagtagtataatgaagtcggctatgatgaggtttttatatctgacctccaatactagatgtcaatttagaagctacagtggagattggaatatctaacagatcccttgcaatggcttgtagtgttggatactttagctcattcaatttccaccacattaagatatcaaaatctgaacttcttggtaaaacttcctcctctaagtaatgatctagctatgttagttgaagttctttcctttttctttcattcaacgtatctatcataatcacacaatttagtctttccgtcattaaccacatttggcgattgaaaagaactagtaaaatcttcatgctttctggctggatattccgaaaccaaatcttaacacatgttttagatcctattaacttgtgtaaaanaaatacatggtgtaaattgattcgaagtaaaactc

SEQ ID NO: 73522 - DNA, 370 bp, Glycine max
gacctataaaactccgcttgtgcaggatcggtcgatacacaccccacgcagttatttatctgttacgagataatcggacggcacctgtttataccgcgtcgctaactcctcacatgccgagtacgagataatgagcctccaacatcctgcattgtgtcacttaatttctgcagagtgtgatctcctactcgtacataacatggcaaaggccaggagtactgtgctgttatatacgcagaagctatcctagccgagagtgacgctgtgaacgtccgcgaacatatgcgacattatatgctagggcactgatggctataaattaaatgcactcctctgattattctctcagcacaaaaacaacgcggcgctc

SEQ ID NO: 73523 - DNA, 230 bp, Glycine max
agcttctcaaggagggaagaatggacagtcatgaatattctaccatagccatcaggccacatgagagagatcctgattgcggctgaggacgtgtacatcttatggataacaacttcattggaagcatttctcagagtacggggataatcggaataatgggtgaaggtgaataatgacaatgtaaacgaggcctgactatgttgctcatcactgttgattgcggacgtgga

SEQ ID NO: 73524 - DNA, 386 bp, Glycine max
ctgctcgctggatcaagtggcctctgaataattaagaatattgtgttgtattaatgattcctaaaccttcactcattaaaaattgactcttctaaggcttttacttatgttgataagagaataacgagtatatgatacacttatcccacagttacagcggtaatttaaatccctagcggacagtaagcgagtatggagtactgagacatacacactgcacttttatactgtttcagtaactacccgtgcctacattcagtccccaagtgacctactgtcctcgagattgctctcaaccttgcacaaattcttatacaagcgaagatccacaccggatgtaccctcccttgttctctcttaacaacctaatggatgtactctccact

SEQ ID NO: 73525 - DNA, 405 bp, Glycine max
  unsure (1)..(405): unsure at all n locations
ctgcagcttggaattgctttngcacctantttgaatctcctatgttgtacctacatataagaaacagtcccactctctcaatgtttacacatcatattcatatatcattggggcatttcaccgagcacttggtgggcgcatgtttggacataaattgcaagaagatgggggcaatgtggcacgccccattgtattaaaaaacaacacaagccttaggccttcttacaccaatccttaactcaacaaatcaagcatcaaagcaactccaaactgacttacaattataagcacgttcttcaatttatagcacctaagatgaaaaaactctcaatgggaagcttaaactcaagatagatactacttgtggaggagattacaccaaatgaatcaacgaaccaagtggct

SEQ ID NO: 73526 - DNA, 419 bp, Glycine max
  unsure (1)..(419): unsure at all n locations
tggaatnngcattgggaacctattntgaatctcctatgctgtccctacatatataaaacagtcccaccatcctaattctacaaaatcatattcatatatcattggggcatttcaccgagcacttggtgggcgcacgtttagacataaattacaagagaatgggggcaatgcggcatgccccattgtttcataatacaacatacgcctaaggccttctcacacaaatcctcaactcaacaaatcaagcataaaagcaacccaaaactgccccacaaatatgagcacgttctcacaaattagagcaccaaaagatgaagaaaatacaccaatgggaagctaaaaactcaaggattgaatacttactctgtggagtgagtagaaacaccaaaaaatgaaagcaagatgcaaccaaaagtgac

SEQ ID NO: 73527 - DNA, 465 bp, Glycine max
agctgtgccatagttgccttttataatccttagcattcactaatccttgtgtatgtacccttccaaccaaccaatgatgatctggttctatcttccaaccctaaccgtatgggcctacagtccatgaaccattactgaatacccacttgacactataactatatctgtgcacattccatgataacattcacaagacccacaccacaaaccctaatgagttgcgcatgtgagcgggattaaaccctaacaatcaactatagtgctgagaaaagcaagaatacatatcttgggaatgtcaataccttaatgacacccctcatggagcatgtaggaagaataaacttaagcttacttagatataaaagttttgggattttcacaataaagagatttacaactgcattctatcccttatatattttttctttgattcccaaatagaattatttggctctggatatactg

SEQ ID NO: 73528 - DNA, 447 bp, Glycine max
tcaccttctggtcctcctcatagttgtggcattataatacatgctctattatcatctcccactccaagtaggcctccggatcatatctttcctttaaatggaagaatgttgagtttaataccatcaattcggctttgtctaagaacaccatcattccctcttctcctcctttcttcttcattatgatctctattctccatctgatccaacctctcgcggagcgcatcatctcgttgtttcattaacctctccatatgttgcatcaaagcttgcatttggaattgcgaaagccccactccatcattaggattagtacctgacatctcaaacaaacaaatcatacgtaacaagacaattatagctgctgtttgaatacctcacccactctagtgtatcacacaattatggctcatctctaatgaaacactcttgccttttaccactcta

SEQ ID NO: 73529 - DNA, 269 bp, Glycine max
agtggcgcttagccgtacaggtcaggcttagcgcgtaacaaaaattctcaaaatcttaatttctgaacactagtcccgcttacacacaaacacatttagcgggctcatcacttatgttcatcaacagggatgaacgcgcttaccgcaacatggtccgcttagcgcgttcatctggaaatccaacaatgtaacagttgcgatgaatatgctaagcgcataagcacacttagtgcattcatcacgaatttcagatagaaccacatgggtct

SEQ ID NO: 73530 - DNA, 430 bp, Glycine max
  unsure (1)..(430): unsure at all n locations
tatggtaagatctgtgacctaaccatggctgatgtctccacggaggccattgcctccctcgcccaatattatgaccagcctttgaggtgcttcacctttggggacttccagttaacacctacggtggaagagtttgaagagatcccgggatgacctttgggaggaaggaaaccgtatcttttctcaggatattatccctccttagctagaatttcaaaaatagtcaaaatctcaacacaagaattggactgcgggaagcaagtcgaaaatggtgtggttggagtaccaaagaaatgtttggaagcaaaggcgagagtcttggcaagtcaagacgaatgggccccattcatggacatcctggcacttttgatcttcaggtggtactctttccancatgtgatgggttggtggatacggcagtgattgatgc

SEQ ID NO: 73531 - DNA, 391 bp, Glycine max
  unsure (1)..(391): unsure at all n locations
agcttgttattctgctgttgattaatagtatgaaacctgattccatcaatcttgggtcactgaccaattggttcttggaacctatggaagataaaggatttcacctcttccttcaccttgtatgggtcgtcagtccatgaaccaataatgaatacccccttgatagaatntctatttcggttagcattcatcaataggtggaaaaaacgtgtgttacaatcgccttcttttaaccatcttcatctggatttctgcctaagtaaggaattatgggctggtgcagcaacccagagagattcctgaacttcttcctctacaattcttcttgctcatttaactggctatgcattgagttctccttcagcttatataaatcctgattcagctttgt

SEQ ID NO: 73532 - DNA, 400 bp, Glycine max
tgcaactctcgctaagcctgactctgggccggcttagctaatataatgtatcttgaatacagagaggcatgcgcttagcaaaagatgaatcgcttagcgctactatggccgcaaggattttgacttagctggcatgagtagagcttatcttaatgaaccccaatttacgccgcatcgaaatgggcttagcggcgacgtctcgcgcttatccaatgaatacgatgagcttatcgagcaggccatcgcttatctgaattcagatcaaatggaaatgggcttagctcatccttagccagtttagcagaccaaatcagcttgatatgcaatggttgagcgctaagtgctagagactctccgcttagcacatgacaaaagatgcacttagcgcatgacaaaagat

SEQ ID NO: 73533 - DNA, 445 bp, Glycine max
agcttgtgtaggctccatctatccatgttgtctctccctaatctcatgcatttgtattcaagtggctgtagaatgtagagagattgaaatccttaatgttcattcaaaatgtttgtgacccaaaccatagtagaattctgagtctacactggaagagagggtctgggcacttcatgtttcttcttcatctgttgctcctctataacaattttttcctcctccttttgttgatgggccaggcttttggtttggacctttcccttctgctccctaaggatccttttaacctttatagcatggccaacagtttccaaagccttgtctttattagcaatagccttggccagtttcttctgcctcttttactgaatgtcatcctagttcactagaagaattagtatgttcctcttgatgcaaccttcattaccttcaggttacaacactg

SEQ ID NO: 73534 - DNA, 142 bp, Glycine max
tggttttgcttttgctaacaaacaccggaaggcttgaatttcattcaaaggcaaaggcaacctattcattcacataatcccttctttatgccacgcataaatcacccttcctcttgcttctttttctgcatacacttgtgca

SEQ ID NO: 73535 - DNA, 374 bp, Glycine max
  unsure (1)..(374): unsure at all n locations
agcttgttngtctggagaataattgcttgttcgtctgttgtaatgataagaccactttttctgtatcaacctggacactatataagatcaataacatggttatgtagtgtgaaagtgaattactatggcatgcacatatgataagctacattgtggttcagttattcgctaaagtgtgtgaatcttcaaaacgttgtttattatcatatctatatctatgattntatatagagctaattgcgacatttacaactcanattttattatttcgcaaatattattatcgaagttttatttctgcaaattttttcactcaggttttcaatctttgaaagtttaccaccattgacgatagatagatgaatttgactttt

SEQ ID NO: 73536 - DNA, 438 bp, Glycine max
aattgcgttccctaatcaaaattcgatgtgtcctcctccagtaaaggttaacactaaaggtgcaccaatgaatagaaacccattgtcaacaaagcgtgatccatcttactgggagtatgtacatgtttttcattctcaacaaaatagcgattcgttagtgaggcataggtcattatcttttgaccaatccaatccaagaaggatgatgcctatgttggatcaatttcaaccatttatccatgacttcattgatagtgttgttgatgtcgaagctgatggaaattgtggatatcgggtggttgcatggttattaggtatgggtgaagactcttggttgttggccgcacccatctgcttatagaacttgccaaatttgcagaagactatatccagctctttggtggcacagacatatgtgaggatttaaggatgtcacta

SEQ ID NO: 73537 - DNA, 351 bp, Glycine max
  unsure (1)..(351): unsure at all n locations
agctcaaggacatgattattattcaactntatcccaccatgttggtagttaatgtttcaattagggatagttcattgaagattgtgattaatgtgaataaaatactaccaaagttaatgaactattctctagcttcaatatggtattagtgatttctttcatgcttcattactnttatagtatcaatcatgacatgttctaggattgttcatacggcccttcattcctctcatcctatgtctcttgatgctactcagtagaacctttcctttccccccttccctttgggtgaccttttcccgtcttggatgacctttctatntttaatccaccttttccacatcattctat

SEQ ID NO: 73538 - DNA, 412 bp, Glycine max
  unsure (1)..(412): unsure at all n locations
cggatatatatgtacaaacttacttgttgaaagatattttatcctctatcttgagtgactgaacgatgatgatcgctcattttcatcttatctctcttactcaaatgtgtcacccaccacccatggatgctggtgtcgtctttgtctaaggagaagggagatgtctttaccacaaccacctctctcatccctccttgtaactcatttgcagatggtggtgaactgcatgtggaccacacatgtgcctcaagaacttcatatgtgcccttgtcctcaagttcgaccccttccttgtctacaacatcctccacaatctctttacctaaaacccctcatgaagaagtttgcgatgaaggcaaatccgaagaagaactcatctccattntacttccattgtgttgcgagtggtgat

SEQ ID NO: 73539 - DNA, 432 bp, Glycine max
ctgcagctatcctaaatacactcattgtaccaccaagttcctaactctgtcacttttaaagtcttgctgagtgagtacaaagtgacttgcagcacgttggtgagtaattaagtattcctctgtctgtcaaatcttaaaatcatatacatatctaagatgcatttaatgttaatttcacgatgtgttgagtaccatctactcatttatgaaaactgtatgattcacccatttgaatttggaagggattatggagtgcataaattgttgaatcattggaggaagactgcaaaaattcgatatggatagaggacttttgtataatcacaaatattgcaagctggaactcaaattccccgatgcaacttctaactttattttattctggatttgcttgtaattaacatacattacattatactattatcgatctat

SEQ ID NO: 73540 - DNA, 424 bp, Glycine max
  unsure (1)..(424): unsure at all n locations
gggtttcttctataatggttggctgaacaccctagttggggatttctaatgaacaactgatgtaaatacataatatctaattgattgtgttttatgtgttcaatgcttcattcaatgcttgatgtttgtttgcttttggtctgatcacccatttgtgtgcacagttaggtgactttatcattgagaaatgtactgttgccatagaacttgattaaagcaggatggaaacttaatcttacatgagagatctgcgggttaagttttggttttaattatgctgttacaataatgttgtttagtttaggcctagtcttacatgagggatctgtggacgaagcttatgctaaattatgctaaactttcgtagctacttgagctgagtctagtcttacatganggatctgcggatgaaactcagtttaag

SEQ ID NO: 73541 - DNA, 321 bp, Glycine max
  unsure (1)..(321): unsure at all n locations
gacacttagatactcagctatgttctcaatacgagcgtctcgaaatcctacttgatataantggacatactagtgaaaagtcattgttctttgaatatgtatagagcttcttgtttcaattaccagcgtatgaatatcctacgggacaaaatcggagatccgagttaaaagtgattgacggtagaatattctcattgcttccgttatcaataaaagcatctccatatactacgggacacaatcgaagatccaagtacgaagttattgtcgtttgaatttgctaagagcttcatttttaaactacgagcgtctagattatta

SEQ ID NO: 73542 - DNA, 451 bp, Glycine max
  unsure (1)..(451): unsure at all n locations
agcttctaaggaagctacctagtctataaatagaagcatgtgtaacacttgttggaactttgatgaatgaaagtcttatgagatacacttcanagttccacttctctccctcttttattccttcaatttcatgctccccccttctctctttcttttcctccattaaagcatcctcttcaagcttcttatccaaggcaattcttggtggtgaagctccttcttccttggcttattccctagtggatggtggcctccctctcctcttctactatgccttccgctgcatctncatggtggaaaatcaccatggaatgacttcattgaagctcaagatccagccttcataggaagctcacaagcaagcttccatcaataatggtagctttaaaatcactaagtttcgactatgcatcatgataatcgagtatatgctatgatagtcgactatatc

SEQ ID NO: 73543 - DNA, 466 bp, Glycine max
agcgtgcatgatatacattctccgcctctctcatgcaatttcttaattcttctagacatcatcaaaatcttcatgatatacattctccccctatgtgatgatgacaaccacctgcaagctatgatcaacaacaaagaaaaaatatctagttgcatatagcttactcccccttggttttgcaatgattgcttatatgagacagtggaagatttcatatttttcatatgtaaacaaagtgtctcataaacaatagatactattacttactatattatctattatctttctctccccctgtgtcaacgtatgaccattctattgattatacacgattaaaatgttaccactatgtgcaatgtatgagattaagtgattccatatcgcaattaaaactatcattcaatatatatctagcaatacagtactgtgacacattaatctgacaccatcaaaacaatcaatcatc

SEQ ID NO: 73544 - DNA, 438 bp, Glycine max
tgttaatcatcttggcaagaaaaatgaatcagcacgtgtacggtttaataaagagtgactaaatcctcactatataaagtgtgtgtatgaaaaataaacttcacactctattattataaaatttcaaaacaaaagataaagtgcttttaatgcgtgaaaattgaagttttaacactaaagtttaggtggtttaaatgcaagtggacaattgaatattacttgttagatgaaaactatttgaatggatacattgaaaattattttgtttcaattttcaagagaacttatttattttagttggtgaaaatcttcaccatagatagagaagagaattagtggaaaagatacacatgaaaagagtgtgtgtgagaagagaaattgtaaaataaaatcactttgttcagagaaaaaacatctttgtgtgaatgttatcatttt

SEQ ID NO: 73545 - DNA, 417 bp, Glycine max
agcttgtcatttgagagttgagaccaatgtgattttcttctgcaatttaatcatcaaattgatcgtgtcttctataagcatttaatgtacttctttcatcattgctaattgatagtggcttccctcttaactagcaaaactgcaaaagcttaaattagttgatatgtctagttatttaagaattatatgaatgccattatgtctatcttatgaacatgtaattatgtacttgtatgcaacttccaaagatctactaatatcttaatgcaagaattgataattaagtctctttattaatgcctattcaatatttttataaaatattgccttatggaacctacagtgagaatcactgccatctcatggatgctactttgcattgctcaacggtcaaacctacttctaaaagttctcatg

SEQ ID NO: 73546 - DNA, 426 bp, Glycine max
ttttttctcctcaagtggaagagacagaagatatggatattattcttagtagaggtagagatcttcctagcattgctcgttgagaaaattatgtacatcataccagagttcataaattgagaatgataacagactcataacaccgatattgtcaaaaggaagaagaaagcttttctacttccatggacttggctgacgggcgtctctgaaaacagaagtgccaccagatgctgctggggaaggggatgatgcaatgtaactagttcctgacacagacactgaaggtatgtttacgggatttccctgatgacctgagagagcaaagcgtgatggactaccagcatccccgatatttgcccgagaacgatgtgaaatcttcatataagatgtaacagctaagcatcaatatgtatctcgtatatgatg

SEQ ID NO: 73547 - DNA, 476 bp, Glycine max
  unsure (1)..(476): unsure at all n locations
gctntagccttaagtagttccaagttgttgattcccttatctctaacacanaattctntccaagagccaacaaatggctcagcacatgtgtaaaatggttntgcacatctgaaatgctttttctcgataacattctaaacatttcatattcttgaatgagagttttctttcttgccctctttacntttgtagttccttcatgacttacttggagaagcaagataaaactcatcaagggttaaaatggaggcaagaatatctttagctctaacattatattgagcatgtctactntctttcggtgtacatgaattaaagtatttttctacctctnttccatcaacaacaaccttaggaatatgaggaccatntacaactacatctcctacttccctatcaacggaatcaagaaaaactctcatgcgtactttcccaaatgaatagtcttctctagtanaaagtggcggatgggtaat

SEQ ID NO: 73548 - DNA, 437 bp, Glycine max
  unsure (1)..(437): unsure at all n locations
tatgaaattggtctctggggttntcttaattatatgatgttgaggatgggcttttgcgaaaggtggagaaaatggatatatggatgtatgtctagtgcatcaatatccattttaatcaatggcagtcctactaaggagtttgtccctgagaaaggcttaaagtagggagatccccttgctcctttccttttcaatttagtagctgaaggccacacaggtttgatgaggacaactatttctaagaatatgttcagcatctatcaagtgggaagtcataaggaggatgttaatattttgcaatatgcagatgacactctgttttttggggctacaaatatggataatgttagagtcctaaaatctattctgagatgctntgagatggtttctggcctcaagatcaattatgctaaaagtcaagttggttgtttgggaaa

SEQ ID NO: 73549 - DNA, 264 bp, Glycine max
  unsure (1)..(264): unsure at all n locations
agctntgaggtaccaatcgttgtcttgtnttcacgacctcgtagtgaggaagaatgaaagaagcagttgattcttgcanaaagaattttcaaggaagagaaatagttgaaggatctttcagttgatggattaagtctaatgactcctatgtagaagcaagatgttntgatgttntgatgatgccaaaggatcaagtgcttccaagttttattcaagactagaatccaagaaaatcaagatatatgatcaagtntgatctcttta

SEQ ID NO: 73550 - DNA, 449 bp, Glycine max
tccttgggccatttcctataaagaacaaacatttgggaagttagtttcaccaagaagtgctaccttcaaaacaaaaatggcatgcaacctcctccaataaacacaaacatcaatgtaaatttaaaacaaactcatgcacatatttcctcacgaacatacattcacacaagatattctgctaactaaaaattgcactcatgcacaatcaaggcatcttcgttatctagatcacgtatatgcacttccaaggcgtatttgctacctaaatcacatgcatttcctttgctaaatttacatacatgcatactcaaggtattttggctaccaaaaattgcacacatgcacattcgggtatttctaatacctatacatacacaaatttcgtgaggaatcttggctacccacacaataaggtgctacatttcatgcttattcaagtgttttttttt

SEQ ID NO: 73551 - DNA, 343 bp, Glycine max
  unsure (1)..(343): unsure at all n locations
agtcacctgctgatgcaaggtatcccgcnagaaatatattggctacaatgatgtccctcggacacagaacagatcgttgtcgatatacactatatntgacaactataagaatccacttaatcaagccaattgtttccttatctactacaaaactagaacttactagaggaaggaagctcatacgtgcaattgggatttgtagtccttgacccacgttagaatgttgtgaacacatagtagacgcttatccatatctttgtcgtgagatagaggctcaatgactccatacactaatacgtgactctcggtgtgtacgcgactcatccatatacctatttcacat

SEQ ID NO: 73552 - DNA, 392 bp, Glycine max
gtttaatggcaattgacgtgaagatgtgagtgattatttcattcttttgataataatatatcaacgtcttagcttccatattttatcaatttacacctgccaatatgaatataatgacaatgatggtgaacacataagaacataatgattgaggttgacagggatttatatataatatagatatccatatgcacgtgattttttctcaagcaccatcagcaaaagcacgtgaatggaacgaacgcgtgtaaccaatggggttttgagttaatagacagacggtatgatccactctacatatatagaatctgtgaaaacagtgtcttggtgtacttccgttaaaattcaatatgtgtccaccacgtacctactattacatattgtttttatgt

SEQ ID NO: 73553 - DNA, 463 bp, Glycine max
  unsure (1)..(463): unsure at all n locations
agctntgcattaactnngtcaacctcctatccttgagttgctaataaaaaattatataaactcccattctaacgattattttacagatattttttaataaattatgaaatgaaaaaataataaaaatcatatccattcattaatttttttcttaaaaaaacttcattgaattttttatattgttacgttttcaaaagcaaataataacccccagcccttgttttntaaatttaaatgatattttaatatcatgtttctaaattctaatacctagtctaatttaaaatattattattgaattttaaaaaattgatgataaaaatacaaatatttaaatntaatatnatttaattannattaatatttttttaaaaatattaataatatccctaaaaataatatttgcaagcatttacaaatctttaatcttgggtatcctgtattaaaaaaaatcatcttttaa

SEQ ID NO: 73554 - DNA, 421 bp, Glycine max
  unsure (1)..(421): unsure at all n locations
ttatattttttacaagtgtcatgagctaactatcccanaagcgttggttttaacatgtctaatatcttttaactcatctcatacaagatccctttaggcttgaacagtgaataacccacatgcccaactacattgtgcttaatttcaacattctttttgaagaatgggtgttgcaaggatcaattgttgatcgcttggtcataaaggatctgatacagtatcataacccaactatctgaaagcttaagttgttaagtgaagccagatgattggttttatacttttataacacctctaacaagaagtaataattgggagatagtttacttagcaatagctgcaagtatatttcttcaaccacaattgtggatcaaggattatataatgcattcaagccactgaatgtgtgcatagatcatta

SEQ ID NO: 73555 - DNA, 343 bp, Glycine max
catcctcagacctatgttccttgtgccctttgttttatgagaatctggagcttctgtttgatctatgtcatggctgagctgtggaggagtgtggttatttccgtactctttagagggttagctaatcaagctatgcttttgggtttgatccttcgatgatgcgtgatggcatcgggttatgatcttcaattctgttgtcataagaatgacatcttgattgccttatctggatttactgatgttcgttgtacttgatatctatatcctattttgcttgaacccgcgtggattgaatatagatttggtcatttatcctttttcagcatcgatccgattccgttat

SEQ ID NO: 73556 - DNA, 398 bp, Glycine max
tcttatacttatcccaagtttcagaatttctacacctagaccactccttgaaacactcctcttttactctaactttgctctgaacattttcattccaccaccacgattctttacccctaggtccaaaacctctagcttcacccaacgtctctttagccactttaataatctcttgggacatcttgttccacatatcatttgcacttccttgtgattgtccacaccaaccctcccatatcttttgttggaagattccttgtttctcacccttcaagtgccaccatttgatccttggtgctaccagaggacttcttctctctgtcctatctctaattcttacatccataaccaaaactctatgttgggtagtcaagctctctcccgggataactatacag

SEQ ID NO: 73557 - DNA, 492 bp, Glycine max
  unsure (1)..(492): unsure at all n locations
atcctcttagtcacctgccgcatgcaagcttcttggcttaaggcatacctacaaaacaatntaatgggtagatntaggtaccccaataaatttagggtccttttggttagtaaccttagttggtcctttaggaatccatttatatttcccatttgtaactctatatctccaaatcacacaatttttagaggaatgacccttatgcatgcaatatggacatgttgtgaatggggtgctagacgctntgacaaagttgaataaattcttaaaaaactttttgtcttgtcaaatagtagccaattctcgctatgttaaatatgcatctttgttgtgcatgaaacacgtctagattatctcttcccattgtgaatttggacaaggtctttaccaaatactcattcttngatagaagtgccttgcacattttacactcggaatgggaagatgtgaagatatgtttgtcattgcaagaagagtttctagtgctttttc

SEQ ID NO: 73558 - DNA, 434 bp, Glycine max
  unsure (1)..(434): unsure at all n locations
agttagattctcacaaaacanatgagaatccttcatttcaagccttatgaagaccataatacatagtgtacaatttcgccttcaagttggttgtagtaccacgcttcctcgagaaaccagagatccagttgcccatatgatcacaaatcacgccccaaaaattagtagtactcgagttgccagaagaacttccgtcaatgtttagctttacaaaaggacgaacatgagcttcccaaccaacatatagattgttttcatcacgttagtgtgttgaaatccagcctcagtgttagtaaataacatatgaatctgattaagaagatgatagaagtcctaagccttgtcttgaaaatttgtagccaacaagaaacaacaaatacgttgcctttggatgatngaatgctggtcatgagccaatcctttgtagtagcaat

SEQ ID NO: 73559 - DNA, 454 bp, Glycine max
  unsure (1)..(454): unsure at all n locations
agctttatgcttaagtatgtatggcanaacttcattattgnttttcatgacatacaagtgagctngtaacaaatcttctagacttggagtgatcacatgcagtactcttgaacccttaccacccactctgttatcatgccgagactcaggaaggccaacatgcttatccttctcaatgtatcttgaacaaaaatcaacggcttcttctacaatgcacctctcaacaatagatgtttctggacaatatatattctttgatacccttttaagatcttcatgtatcgctcaattgggtacatccatccgcaataaataggaccacaacatttgatttctctgaccagatgcacaatcaagagtatcatgatgtctaagaaagtatggggaaaatacatcttcaacttggacagaataattgcagccttattttcctgctcatctaactcgacatgat

SEQ ID NO: 73560 - DNA, 411 bp, Glycine max
tttcagagacatgaatggaataagattggagttttcaaatgcttggaagcattcaaaattctcatttgagaagaactccatatctatgaattttgcgtctacaatggaacgagatgaaaagaggtttgtgtaccgtatacgctgttcctctgatgagaataatgatctggagggaatggagggaggaattggggcttactgtgaccctgaatgccgctgactccgactcgaggttcctttccactttttcgatggttccgccatttgagaaattttttcggaatttcaatcagttcaaatgaaagagattgaaaaaagatgaagtttgggctttgcggggagttgattggacaagaatagagtgagatatggctggaagaaaaattgggggcgagggtttctaagagagag

SEQ ID NO: 73561 - DNA, 317 bp, Glycine max
  unsure (1)..(317): unsure at all n locations
ttagaagcttccgcatatgaggaaggtattactgttgatgatatggacatgatgaagtgtttgtgtgtgggtgagagacattattatgaaagacctgaacttagggggtagcgaacaatcgtagaagcgctgtgtttgcgtgaagagagatcacgatcatcatcctactactatgatagggcatgtttcgctcacgtgtatcataccctaatttcgtacggggacctttgcttggtgacatgcgacctttctatggtccttgagaggtgctnggcacccatcattaggaatttgngaaattccatgacatgccgaaa

SEQ ID NO: 73562 - DNA, 386 bp, Glycine max
  unsure (1)..(386): unsure at all n locations
tgctctngattgttttcgcaacttggcttctagggttgtgcctcataatcccatttttcagtatagttcaaggatttgtcaatctgggtatacggattcgggttcaaaaggagctagatttaatgggttgtctttgtgttgttcaatttctcagagactatgagcacaaggtgttgttggagttaacgggaactttcacaatctgtttcttttgggggctaatagatttactatgttgatccttgtaatttgcaccatttcaagccaagagggacaaggcattggtttcataattctagacacatttttgttgctaatatggttggttcacgagttttaatcattgtgtattttggaaacttggaaacagttgcttacaccaagcg

SEQ ID NO: 73563 - DNA, 285 bp, Glycine max
  unsure (1)..(285): unsure at all n locations
agcttanggatggaatacttacttgttggtgattaacattagcgcaaaacggaatcaaaatatgcgaanaaggatgaccctanggctgcaaattcgtcaatcccgtgggtatggcttntgaaaggtgggaaaagaggtttttgaatgtaaaaacgccccccctttcgtcatttttataatttggtgcaggggtggctcgtctacgctatcccattctttccagacgagctatcctgcactatcttatttttttttgacgggaaactaaacattttccttcccttc

SEQ ID NO: 73564 - DNA, 450 bp, Glycine max
  unsure (1)..(450): unsure at all n locations
tccncaacatccaggtaattcaacatccaaatcatctcttactaaaaaaccaagcaaaacagggcaaaggtagaaaactctgcccaaaactcaaaccaaaatcacagctttttctcacttaaagaccccagtaacatttccttcgttccaattcgttcaccgttggatcgactcgaaaattttactggaagtctctagtacataagcctacattttgaccgttgggatctgctagaaaacatcaagaactcattcttcactactctttccacaaccagcaaaacatagcatttttctgcacttatgcaaaattctgctgcacaatttcacagcaaaattctgcataaagtgcagatttcgaaaaccacacttcctctcatccaatcttgcccaaatcagatcctacaagtcccanaacatgtatcaatcatgtctaaacctaagtcaaac

SEQ ID NO: 73565 - DNA, 342 bp, Glycine max
  unsure (1)..(342): unsure at all n locations
cctctgagtcacctgccgcatgcaagctngtggattatcatatcaaaaggtatcttcacattatcacaatgattcacaagccatggatgacctgtgcataaaatcaagctatgagcgcgagaattcatgggattataaaacgcgaaagttaatgccatgcaccacctatgggaaatggagcacatactgagagcctgagctgcagttagccttttacgataatccttattcaacagtctcttcacaaaatctnttgcgtcagctgataacgatggccaaggagctttctcataacttggatctgtcttcaggacagcctgaaatatgccagattctgtcctg

SEQ ID NO: 73566 - DNA, 435 bp, Glycine max
cgtataaggtgatgatgaaaggtgagaaagaaacatgctttctatcatattttaagaaaaaatctacaatttttttttatacattaaatcattaaaatggcattgtttgatttttttattgaaaaaagtaaaaatattcatcaaaatatatttaaattatattgaaattcaattggccaatgttacaaaattctaaaacaaatgaaaaagtctgacttcattgcatagaaaaattgttatggtagacacttaggctatggactggtctattccttaggaaggtccaaaaacatcactgtaacttttagtctctcattcaattgcggctctggcgagatcttactcctagctttcatttcacgccacggcgccgaatgttgcacagtctatggagctcggatcttggtatgtttttagttcacatcacataaaaaa

SEQ ID NO: 73567 - DNA, 390 bp, Glycine max
ctccgcttcaaaatgaagacatctgtctgctgataattttgttgcatgatctcaccattcatcatgctgtgaccttttatgggagaatgctccatctaagaagcaagtatcccccgataagctctaccgtgcagctgtattaagaagccgatttgctgacaccatacttaaagctcatgaaaagacacttgaaaaggtttgttacggttgtgagattgcattggtggattttgacgtgctgcatcctaattgcaatgtatggattaaaaggctctgatgctttagctatatccattgcaatctttcatgcgtgttttgcctcttttgtagtaagaactgcttgacaattggttgattaaattgatcttgatctcacggtgacaagtggga

SEQ ID NO: 73568 - DNA, 440 bp, Glycine max
  unsure (1)..(440): unsure at all n locations
agcttgtanattcttaacatcccgtaatacttacttcttaatntaaaatgggtatactacaaagttgattggttgtataagaaggatgagatattgtaaactctntaataagtgttctttattagtatggataaaaataaataaattaaagtgtgtctttaagctcaatgcctaaatttttgttttttacatatgaaattttaaaaaaggcaagttgaaaaaaaaaaaaaacatgtaactaatcgttggttttatccgtagaaatcaaatacgaatatcatagatttataacaaattaagcacactactcaatcaactaaatcatatcccatgaataaatatagctaatctatcactataattaagattatattcgactcatattagcccctatatatcttccatctccaattgattattatgaataatattgtagtctc

SEQ ID NO: 73569 - DNA, 445 bp, Glycine max
cggatgtggttcttgcattatttgcgaagatatgtttctccacaaccaaatttatgtattatatcagtcaggggaaccagtttgctagcagctttacaatctgaacatgttggttggaatgaaccacatgtttcgtctgtgttttgcattcgccacattgcctatttctgcccgagcattacctattgttgccttagtcaatgaggcatttaataggataaatgattcctttgttactaacgacatcaaaatcatgaatatgataaaggcatggcataggtactccatagatgtatatgtcatgatgcacgaaaatcaatacattgctacctcgcattatgttcgcatgtatgttcaataaacacgggagtttgaggttcaagaaattgcatatacgcgacttgatcgatgagcaatggcgtgcactgtcaaattgatgaatgat

SEQ ID NO: 73570 - DNA, 395 bp, Glycine max
  unsure (1)..(395): unsure at all n locations
agctctttattgtaaccttgaaattcaagatagcactctgatttctgaggggtttgggataaaaatggtcattgaccaatccctctttcataacttatcccaattgtctaatgacggtgtaccatttgaaggtacactgaataacgattggaaattcgatttctctgcatatgatgcccgccagatggtttgcaccaaccatgcggatatgactggatgccttcttgtcggatcattggctttngaaagccgcattcctcattatctcattgtgcgtattttgctttcacggtcttccaaccttgaccaagtttctgaagaagatcttgntatcatgttagcctttcataccaagcgtcaacttgactgggcacacttaagtcagatatcgcatg

SEQ ID NO: 73571 - DNA, 403 bp, Glycine max
  unsure (1)..(403): unsure at all n locations
cttctccactaatctagtgctngcaacattggtataacttccaccatcaatgattagagaacaaacctttccattcaccaaacatctagaatgaaaaatgttttcattttgtgtatcatctctatctttgcacaagcttcccatgagtctccttaccatcaaaagatatccctcttccggtggaagaaaaccatcatcctccgcttcactagaggaactatgagaactcttagatcactatccacctctccattcttcaacacaatcatgttccttttgttagaatattgggatgaaatatgattatttcccaaacacttaaagcatttaatggaactagttntattggaagggggttgagtagcagaagtaggattacctcttgaagacttccttttaagat

SEQ ID NO: 73572 - DNA, 315 bp, Glycine max
  unsure (1)..(315): unsure at all n locations
atccttgagtcacctgcggcatgcagcttgctgccttagaaactantatggctagataatatcagaggcggagattgaaagaaccgntgatactgacatatgaaacactaccggagcttggatcttcattggtgcctaatgacaactggtcacaattaaaaatagccaatgctatcttatctgctgcacacacaaatatttctgaaacaaacaagttcatggttgtgaatgtaacccacatgaccggtcagagaatagatgggcattcatctatctattatctccgtcgtagagccggccatgtgcatcatcatc

SEQ ID NO: 73573 - DNA, 440 bp, Glycine max
  unsure (1)..(440): unsure at all n locations
tgtatatgcttgtgagtggaatccccatgctgtataatcactccaacataatctagaagcaaattctgtggctgaccgttgtatcatacttgaaggagataatcgaattacagctcccaaggtantgtgtgtgtgtgtgtgtgtgtatttaactatttattcacccagcaaggaaaaaattgatttaccaaatcagctggccatctccctgttgttctcctaccagagaaatgagaatcagtctcaggcataatccatctaaagacaccccacactctgtgtcagttatgccttgattgcccttatgttccctatcactggtaaacatatttccaatttaggaggattaactataaaattgattaccaacatactgatatggtaaacatgttcatttgatcaacctttttttttaactctataaaatggaaaatgtgctc

SEQ ID NO: 73574 - DNA, 246 bp, Glycine max
  unsure (1)..(246): unsure at all n locations
agcttgaacaccacgtaaagcacaatcaactgccacatcttaatgaaaccccacattacaattcttattgatacttatatatggttagccaagtggactaaatgacccantaattagataagaacctacngacaatgccacctcactgattaagaacttactaagaagagcaacaaactaatgtagagctcataccttgtaaactggcagcatataaagctttgagctttgagcactcacgactgt

SEQ ID NO: 73575 - DNA, 335 bp, Glycine max
gtgcccgagtaatatgaaagctataagtctttcttttatcactcgtatatggataggtctaattcaaattgtgcaaataataatcacggttaaataggtatttattcctttaaaattgaccatatgttttaatcctcataggcattttcctcatcgttaaaatctacccaatgtttattacagctaacatctgatttttctatcttatattatagaatacatttctagctgctaaacattgtcataattaagttatgaaaaatagtcacgaactcgttcactgttttaaagaatgctcttattctttaattgatttgattctacccctccaaatt

SEQ ID NO: 73576 - DNA, 406 bp, Glycine max
  unsure (1)..(406): unsure at all n locations
agctntaatacattatacatcgaattattaacataaacatatataagttaagatttgtttttcaatatcattgaattttttttcctgaanaatgaaataaaggaatcatttctttggagcacaaggaatatttcattctaaattaaaagataagagccctctgaattctgtaataaattaatggaaaaattggttaaaggatcattattatcaatatgacttgtccaaaagtaaatggtgtgggaatatcttttgaatctttatttttatggggaagctaanaattcaccagtctataatttaagacaattcaccaaaagccttaggatctacatgtttgattattaaggattagacaaaatacttggatccacagttggttcttgatctaagcgttctttgacat

SEQ ID NO: 73577 - DNA, 351 bp, Glycine max
taacaaaactttcaaggaaattaccaacgctatagaggtggctcacgttcaaataatccttatgactcgatgcagcaaaataataatgcatattctagtcccactaactcttcttatgcatgtccttcaagcaacactgttgcaagtccttctaacaactcttatgcaggtccttcaaatatgggtcaaccaccacaacaacaacaagctcagtctgataaaatgtcaaaaatggaagatactctaacttagtttatgcaagtgtccatcacaaaccataataacaattattcttccattaaacatcttcaagttcatgttagacagcttacaaaacaactgtctgagcat

SEQ ID NO: 73578 - DNA, 329 bp, Glycine max
  unsure (1)..(329): unsure at all n locations
acctgcaagcttgcatgcttgaccttcacgganaacatgatagcactgacatgttctactacattgcctataattgaaagcatgatgaccaaaataacagcctcagtacttatacaatgacttaaatgtcgtatctcctcttctattgaacactctcgcttcttccattaatcacatattgttatatagcatgggtcaatggggacaggacatgtatgccttatgacctcttctctcatcacccagaagatattttaaattatgattgttaaacaaatagaatagtagtcatatagtaatatgctataattgtttttcggggtgacacc

SEQ ID NO: 73579 - DNA, 396 bp, Glycine max
tgagtcagcccctgaccctgggttctacttctccttctcctctttcaaggcacggattaatcgatatggcagatacagataccgatcctgaaagcgggaacgatttgcgacaattctgcgcccagttctccatccccaaatgtcaccctcttccggccaattttccggcgcatatggaaatccctcgccggacatttccggtgccactgcctgtaaattcaataatccattattctcctccatctccatctccatctccatctccatctcgaacgctacttagctagctagggtttatggtttgatcgaatcaaaactaatagggcagagtttgactgtgaaaacagcaagagctaacaatatgtatattgttaagactggtttatcgagaatacc

SEQ ID NO: 73580 - DNA, 254 bp, Glycine max
  unsure (1)..(254): unsure at all n locations
atctgacgcatcttaaccgactgcagcagcaacttggttctacgacttacccgtngcagatcgaagatcattgtcgaactattgaagaacgccgaacaacagtcgtaaccttagctaaattcctgacggaaaactgtacggaaacgctcctagaagcgctcaatgactttgatgttctttgaccgaacaatgtctaccagccatctctaaagagagagaattgcctcaggggccgaacccatttctactacagt

SEQ ID NO: 73581 - DNA, 381 bp, Glycine max
cttgcagatctggtatgttagtgtatagctctactgatctttatatgattggctaagattgtgttaaaacatacgcacttagacaatgaaggaaagctggagttgctgcacatgatgtccaacgttatgtcaaggaataagatcgggctgcacaatgtacaaggcaagataaaatggcaaatgaagaattgaagatgcgggatccacgatgtcggatacaatgtcctgacatcctgcccgagaatactggagttgctgtacaatgcaagataaaagtcaagtgcacaaatgaatctgcaggatccacgatgtcggacacgatgtcctgacatccggcccgataatactggacatataaatctgttatatctgtaacacatt

SEQ ID NO: 73582 - DNA, 409 bp, Glycine max
  unsure (1)..(409): unsure at all n locations
agctntgagccaaaatcctgactcaccatanaccttgacccagtgtgagaatgtcaatccttaccctcggaagcaaagaaaaaaggagagaaggaaaatttccaatcaaaggaaaaaaggagaggaaaggaaattcccaatcaaagagtgggagaaagcaaatagaaaagaaagaatattcccaatcaaagaatgggagaaagaaaaagagaaggagaagaaggaaggaaagctcctgatcaacgatcgaaagataacagaagatatgtgcagaggggatctctggaccagacaatatctaaacaaatacagaattgtcaccatatgaacaaaagaaagagaaggaaaccataacctagaagtggtcttctccctttgattaccaaccaaaatcctgtgcgtcggtgac

SEQ ID NO: 73583 - DNA, 275 bp, Glycine max
caattgtgggaggcctcaacagcttatgagtctttattaaggcagaaaatctacagataaatggcttagagaatgggacaacaactcagctaattccatacagcatcaatttcagaagaacattatacggtcttcaaggacattctattcatggagagtggattcagaaccctattgatgttaagaaggaggctgttaattctctcctaatagattctctgacagcagtcttgtagacccactcttgatggagtgcaattcttctcattaaatca

SEQ ID NO: 73584 - DNA, 405 bp, Glycine max
tcttagtttcagatgatgcacatgggtttgtatctatctcatgcactcctctaatgactatggcatcatttctggcactaaactgctgggagttggaggccatcttctcaattaaatttctggcttcagtaggagtcatgtctccaagggctccaccactggcggcatctatcatacttctctccatattactgagtccttcataaaagtattggagaagaagttgttctgaaatctgatggtgggggcaactagcacatagtttgttatatctctgccagaactcatacaggctctcttcactgagttgtctaatacctgagagatccttcctgatggttgtggtcctggaagcaaggaaaattttttctaacaatactctgttaggtcataccagctcgtgat

SEQ ID NO: 73585 - DNA, 247 bp, Glycine max
aaaaaaaggggggttttttttataagcgcccctaataaaatttttgaatatcacagccttaaggggtcacggcaaaaaacttttaacaccggacacaaaattatgcaaatgttccatatagtttctttagggctatggaataattttagaactataggcctttgactggctaaaaagggtacttccaaacacaacagtttatggtaaagacaaacttagatctttgcttattttggagggtcttcaa

SEQ ID NO: 73586 - DNA, 374 bp, Glycine max
  unsure (1)..(374): unsure at all n locations
agcttaattaanacanacatctaatcattccagtccactcaattcatacattntctcattcatatcattcacaaacactcatttcatatcaaacaaaccactaaaacatgattcaatcatttcactgttcaaacaagctttttgtacaagcaatcgacactaaaacaacagaaattaaaaggctaataaagcatatactaaataactgacatgaaataaataactgataaaataaactgttcatacatttgaaaaatttaaaaactatgcagaatttaaaactcctgatcatcctattgctgatcttctgcatgctcgtttagatctagcaccggagcagctggtgcatcctgaagaatgggttgctctggctc

SEQ ID NO: 73587 - DNA, 440 bp, Glycine max
  unsure (1)..(440): unsure at all n locations
ntacatggagctacatcacaacctccgcaaaaacaatataataagcttgcccaacaaatcaaaggtgtgaccaacaccattgctagcagattttcctataaagggaagtccaatcagtcccgtaagcatcacctccataccatttgggacattgacatcaattgtgttgatgcaccatcaccacgaagtctccttcccatcatatttacaaaaagagacttcaagggcatcaaccctatcaaccaggacaaccctatggttatcgccatcataattgccaacttcatagtgtccaaggtcctcattgaccaaggtagctccatggacatactatactagaagacattctagaggctcgaagtctcatttgatatagtccagccacactctggaccactcctctgctttgctggagaaaaagttgagaccaaaggctacat

SEQ ID NO: 73588 - DNA, 377 bp, Glycine max
tgctcgtcttcatcacataaatcaaaatcaattctctgatctacaaagctcagctccagcttctttatccccatatcaattatgcagcttgtagttaacatgaatggccatcccaatattataggaatgtcattatcttcacatgacatacattaccacaaagactatcgagaagataaaatgttgtactctgaccaacacatctttaattactctgtatggtctggtaatggagcatctactagttgaaagtcttcctagtgggcatgatcttcaactcttccaaccttcttgacatggagagtggcattaagttaatattggctcctaggaacatagtggcattcgctagaaagcttctccaaatggcatggtta

SEQ ID NO: 73589 - DNA, 435 bp, Glycine max
  unsure (1)..(435): unsure at all n locations
cctgcgaaggcaaaaatttgtatagttagttntaccagtgggacactactcttaaaacaaaaatggcatacaacctcctcccataaatacaaacatcaatgtaaatttagagcaagcttatgcgcatattttccttacgaacgttcacttgcacaagacattctatcaactaagaaaaatgcacccatatacaatcaaggtagcttcattacctagattatttacatgtacttccaaggtgtatttgttatttacatcacacacgcctccttggctgaatttacatacatacatactcaaagcattttggggtaccaaaaactgcacatgcgctcatcttggtatttctaatacccatacatatacaaacttcacgatgaatcttgactacctacacaataaggtgctacatttcatgcatttttttttcaagtt

SEQ ID NO: 73590 - DNA, 377 bp, Glycine max
  unsure (1)..(377): unsure at all n locations
tagctctcgattcattctatgtacccgtagtggtccacattgggtttcgtgcatctttattctcgatgtgtgtactttntataccccgtgttgacgtgcttaagccatattacttaagtcattgctcgtctaacttaaaaatagaatcaatttccaccgaacgttagaattgtattatccgttaacttcggttaagataaattccgaccgttcggtcgtgccgtaaccacattggagataaaaaaagaagctaatataatataatagtcgataattcatcttttagtatattagagcggacaataaatcggacgtctgctctttgagaattctcagtctcaatcgacttgagtggtaactaaagtgaaactaacgct

SEQ ID NO: 73591 - DNA, 389 bp, Glycine max
tgaaatcaggtgcagccatttcccttatagttctctcacgaggtggaggttgtgccatgttctcataatgtgcaaaatcataatgctcataatcagaatgctcaatattataatgctcaagatcacgatgttcaaaatcaccaataacagaatgcacagattcaccagttatggaatgctcagaatgatcaaaaggtataaaatgatgcctaattaatctatgaaatgtcctatctatctcaggatcaaagggttgtaagtcagatggattgcctctagtcatacactacattcagcatgcacacaactagttgccttgtcatgtaaataaaggtgtaggtttgaactacagctaccctcaaatgatatccaaatgacttgaaattttg

SEQ ID NO: 73592 - DNA, 384 bp, Glycine max
  unsure (1)..(384): unsure at all n locations
agctngaagctgagtgccgtatactgaaagtcatgactctctacacattntctgtcaatgatcacaggtctgtgactgcatcttcagtttatgctgagtccttcacagatagcatgtcagatagtggagataggttacttgcagttgaaagtgatatgcgtaaattatgtggctgggagatgaatgaatgtgagctatgccgtttcgattcatgttcatcttctgtagttatggaacttgatcaattcaagaatgacaagggtaacggataaaattatgcggtccctccaactgagatcaatctcatggatgaatttcttgagatggagaagcttgtcgcattgtcacatggtgaaagtggaagcagttttgtatggaacgagt

SEQ ID NO: 73593 - DNA, 424 bp, Glycine max
tgcaacggttgatgttgactatcatgcaccctttgtatctggaagagttcctgcttttgaatgagtcataattacccatttggtcatcttgtttttcgcaccaggtcttgtaccattctatttgcgctctataatgtaccaccttgtataagataatggctaggcttgcagcattcacggttggtgaaagacccattctccttgttgtcttcagacattccttggcggatgtaataactgagtcctgttggttacatcacagtgactcgttcagtgaacatcttcatgaatggataacatcactatataagtgagaaaccactgctggaatcatatacactgcttgccgattaaatccccttgagttttgaatcgttaatattataccttatcttaatctccatattgcgaatagtcttaattt

SEQ ID NO: 73594 - DNA, 440 bp, Glycine max
  unsure (1)..(440): unsure at all n locations
agctngctgaagaagggcaattgctgtatagacttatattgcaacaatgaatgctttaagagagggtgctaaaagggtaggtattatgaagaanaatgttgcaaaagtcacacctctcaacactcatggtaatggaagctgcctggaagacaatagcaagaagagaccttcatcaatttctgatgtcatcccatcattatggccttggcaagattcagtgccacatcacttcaatcttaatgaccttgggcttcctgttactgatctgaatacccccagtatggctcctgtttctattcaccgagatggtggccctctagataacactgtattgatttgaatcaccctttgaagtattacgttattcggtcagatatattggcattacttaattgatatcattatcgatcaggttgtcctacttgttcaggcatgacttg

SEQ ID NO: 73595 - DNA, 424 bp, Glycine max
cgctggcgttgagactgagcattcctggaaacaagtatatttataatttgcagtcaaagatgaagcagaatgatcattttcaggattaataggctgggcacaatgctcaatctttatacgctttatagatgggtgcaagtcctctgaagtttcaacaactaatggaggcttcgagatcaatctatgcgatgcacttacaatattgttaggtttagaggattcattcactgcaattggcaaactcgattcaaccttttggctaatctgatgcttgagttgaaatgcacgtcgatactgtctcacaaaaacacaaacagggcaacatggatcctttcttataataaaatgatgaagcaacaaccttgtttgatggcaaccaggatatacacaatggcacccggtgcatccctctatgagcttgctt

SEQ ID NO: 73596 - DNA, 482 bp, Glycine max
atccctaagtcacctgcagctgcagctctggtattatagacttcttcaacaagtagtcttctttaaacagtcttcattttgcgtgtgatattgcatatgaagaatgtattcgctggtgcattaaatgcacatgcactcaatgctgatacaccactctgattatcttccttgagtcacacttctacaatacgcttcaatagtcatagtgcatagtatgtctgataataataagtgtagcagttgacatgtcttttaatgagataagagaggttgatcttgattgatctcttactttcttcacctcaaccgattctagaagggatgtcgaacattctttgcaatagaatcatatacacaaagcgataactcagtcttaagagctttaaaactaggcgttgtctactatcgcttatcgaaaaaatcaaatacaataatatctgtcgttagattgaagcacaacctttaaaattgaaattatttgc

SEQ ID NO: 73597 - DNA, 387 bp, Glycine max
ctgaaagctcaaaagaagactcaaaagtgtcattggatgttatggagagtgaaaaaaaacaactaatgttgttggacaatcaagaatgagatgaatcccttccatgattatcacacttatgatctggtgaagtgtcctaaaagcaagaaggtcttcaatccaagaaagaaatatatattcaaattatgggcaaaaggattcaatcaaagaaaatcaatgttgattttgatgagattttttcaaccgggataaaaaagacattcattacaattatgttaaatttggttgtatacttgattcggaggtacagcaaatgaatgtgagaattgtgttctttcatgatgaattagacgaagagaattgtttgaagcaacctgatagttttca

SEQ ID NO: 73598 - DNA, 328 bp, Glycine max
  unsure (1)..(328): unsure at all n locations
acacgagcgcaactaccggcattcactagacaagcgacatctgttctataaggnctncacgaaaagtccaagagcaggagatgcaaacataaaccaccataataataaattggcgccaaaaatcgccgaagaacccaatataatatagacataatgcaaagcaacttaaaaaacctaagtacaccagaccaagcaaacaacccatgaacaccataaaaggagcgatccgacaaataaaataatcaccacacatgctctacgaaagaaaagaaggccacaaaaaaactccaagaacaaaggacaacgcgaaaccacaagaaggcaaaaa

SEQ ID NO: 73599 - DNA, 452 bp, Glycine max
  unsure (1)..(452): unsure at all n locations
gctcatgttgngatattttattcttctcattactgttataagtgcaatttatatttttttgacgccataaataaaaatctaagtttgattaanaatcattattctctatcaatatatgtcagttcttttagtattgctcgcgtgcatagaaggctcaattttatgcttatccagtcgtctgctttcaaccatcaagtacaaacattttgaatccatttgtatgtatacgtgcaaaacatcattttactctagttaaacaatggatgctttttccattttccctttctctttcgttatcattattagctaggattggctgccagctgattattgtttctatatctgcttccaaaagaaattgtgtagtggcgttaacattttgtatgctacccaatagaaaacaaagggtacatagctattgagcccatttatacctataattattagatagt

SEQ ID NO: 73600 - DNA, 494 bp, Glycine max
  unsure (1)..(494): unsure at all n locations
gtcacctgcggcatgcaagctttttgagataaanatggtagctttaaagaaatatcgatcatgcagtgaanaaaatcgaanaagaacacatggagagcgaaaacaaagcacatttatggagttttgaaataaaattcgaagctttttgagataaaaatgatagctttagaagaaacaatgaacatgctgtgaaaaaatcgaaaaaaaaacacatggaaagggaaaacgaagcataacctttgagnttttcgttcggcatttccctcatttccgtccgacatttggagaacaacagcaccaaggcatcatcttcgaacggtggtaggaaaaaaaagagaatgacaatgagaaagggtggggagagtgaaatatagagaacggtggtaggaaaaaaaaagagaatgagaatggaaacggtagagagagaattgtggagataatgggaaactgtgttggcattaattacngggttggcactgtaacaagaagtgata

SEQ ID NO: 73601 - DNA, 455 bp, Glycine max
  unsure (1)..(455): unsure at all n locations
tctgtctatggactaacaaatataaatgcatagtactcattcttgttctttctttggctaacatacacacttgttcaaactcatganaagaaatcatgcattcaatccaaaatcaaaccatacaccaattttcacaaaaagataaaagtgtgctactgccatatcatcaaaatcaagtcaaactgtttcatatgcttcagaatgagcaaaccaattacgcataaataaaactagcagtgcatataaacataaaagaaatattgtactgaaaccataattataataataataaaccaaaaagaaaacaaaaagcatcatcaggaattcagaattcctgtgactggtcctgggtgtccagtgtctgaacatcctgctcatctgttagatgaagtactggagtagctggaggagaagtgtccatagccaggactagtgtggtcgggtcctctggcatc

SEQ ID NO: 73602 - DNA, 412 bp, Glycine max
  unsure (1)..(412): unsure at all n locations
aagcaccgcagctgcaagctgggatttgtgatagtgatttgccggatatttgtgatatataaacaccaccggatgtgcgtttttatgggagattgtgtcttcacatggagttctataaatcaacgcattgtgacactttctacttgtgaagccgagcatgtatctgcaccttcttgcacatgtcatgccatttggcttagaaaattgttggacgaacttccgtcgtgtcaaacgaaagctcatagatctatgttgataatagatctgcacaagagctagccaagaatccgatgttcacatgaacggaagtatngcatatacgatacgacggtatcatattcattactagagtgcattacacagaaagaagtacaatcgtctcatgtgataactcaatatcaagttgcggatg

SEQ ID NO: 73603 - DNA, 471 bp, Glycine max
  unsure (1)..(471): unsure at all n locations
tactcagctatagtgtagataattatcatttttacctccatntctgtgtttattatagctataaagannatccttcaaggatgtagagctactgcatacccgagaccttagtttagccagaaaaacttcatgttagttgatctacacacttggtagcttttgtctcgattttattcgtactttttcaataaaatttccctctatatttcgcaaaacaaaaaaagccctaatctctagtacctcccatgtgtcatataactttccttgtgacttgtagtatctagccaccaccctcgccatagtcggtctccctaccaccctaaatgttgatggtctcaacgccctctgtgtttactaccacactatttgttttctccataagttcctctctcttctctttctcgagtttgctcttgttattatttgacagatttgtatgacatcacttttattttactattgtcgcaatct

SEQ ID NO: 73604 - DNA, 468 bp, Glycine max
  unsure (1)..(468): unsure at all n locations
gtcacctgcggcatgcaagcttggacaataaanatataaaacaaatcagaccattcttatttaagacttaacccaaccaaatacatttctacccctaatgctataattaagatataaggataccatattaacaattttttgattgcatagaatgaagctaatttgcagggcatgaaacgtattctttctaaataagggtgagaataaaaatgatcatacccttactatcattttacaaatggaaaaagggggaaaggctagtaaatttgagcttcttgagtaattaattcagaataaaggataaatttctattgatttaacaaaagcatgtagcaaaatatcaacataaatgttgatgatgacaaatttatacctgcttcacagcttcggctagctattgaatataatgttgcaatataattcaaggctctaaatgtccatgtattaagctaggaataagtcagcatt

SEQ ID NO: 73605 - DNA, 420 bp, Glycine max
caatagggtgaccacaacagcgctggtggcggcaacggacaatggtctttcacataaacctgtggtacatgaacaaacattatatgatgcgctgacctgtgccaacgaacaagcgaagtcattgcataattgttacactaactatattcaatgtacctgaacaaaatgatttccaaacacgtgaccgacacatatgatgcggcggccagaacagtcatgtggtggttgacttctaagagggaaaaatgtcatgctatgttgatgggacaacgatacaaggattacgctataccgtgaagcaatcacatatgccatgtctgtgatatccatccacttgtccacactaacctgaatgaaccaaacatacacatgtgagtaatttaaacattgtactaaaagaaataacctagaacatacctt

SEQ ID NO: 73606 - DNA, 431 bp, Glycine max
  unsure (1)..(431): unsure at all n locations
agcttgaagtgagaaagtgtggaagagtcagtctctttatntttattcgttgaccatagagtggtacctggagatatgtcgcggtggtcaggagaccttggggacgtcaggtggggtgctattgcccaaaaccaagcttgaccaatcccgacccaacccgggcatagtcagtcagtgagaacctatgacgtacctaaacaggcgagctcctggcagtcaaccgataaaagaacatagaccacaaagcaaggaggcttgtgtggtggttggccagctatggatcttgagtgatatttggaatatggcctctggtaatcgattaccaagggtgtgtaatcgatttcaaggcttaaaaatgaaggcaagaagttaagatggtctctggtaatcgattaccatgggtgtgtaatcgattaccangtctaaaaatg

SEQ ID NO: 73607 - DNA, 492 bp, Glycine max
  unsure (1)..(492): unsure at all n locations
ctcagctatgctgcnacatttacatagacctctcacctcagcgcttatgttctcactaacattatgacctctccaccaacaggtacaatcccgggtggaggaatccttccaaccttatatggtcgagtccttcacaacagcagcaacaacaacaaccttattttcagaatgctgctagcccaagcagaccatacgttcctgcaccaatccagcaacaacaactacaacaacaacgacagccccagaaacaacaaatagttgagactcctccgcaaccttcccttgaagaacttgtgaggcaaatgagtatgcaaaacatgcagtttcaacaagagaccagagcctccgttcagagcttaactaatcagatgggacacttggctacacagtttaatcaacaacagtcccagaattctgatagattaccttctcaatctgtccagaatcaccaaaatgtgagtgccattacatcgaggtcgggaaagcagtatc

SEQ ID NO: 73608 - DNA, 370 bp, Glycine max
  unsure (1)..(370): unsure at all n locations
caatccaccctacatggttgcgacgcactatgagattaacatttcgggtttgggtctccccttgaatgcattctagggtgctctgctagagcacttgaaagtggacccttctcaactccaccccaatagttgggtcatggagaaagcctctgagattttgtgccctattcntaaaattcgacccaatgtgcctgtgttatttacttttttcagatgaagatgacggtaagatcagttgtgtctccttgaacagcatgtacaaaaagcttttcgagttttactcgaatgtgtttcactacttcaaagattgtgtcttctatgatcttactactgacctcggtgttgatggattaccactatatgtctaaca

SEQ ID NO: 73609 - DNA, 312 bp, Glycine max
gaccaaagccatattgtagagactaaatttgacacaatatgatatggtccatgtaaatgttgacgatatgggacgaatatccagaataattacaaactttttatgtcgcctctgaaaatgcgtggccgatgtcccacgatcgacttggtgaacaactcacctattcctcttgtggagaatgagcattatattattacatactctctacaaaaaaagataacgagggaatactttatgatgtctatctaatgtatataacataatgaatatgtggtcgtgaatgggacacttatagagtggtggatattaaat

SEQ ID NO: 73610 - DNA, 368 bp, Glycine max
  unsure (1)..(368): unsure at all n locations
cactatcagncaacttcacgctgaagcacttcttcagctgtacgaacaaagtgatgctactgaatgatgacacatcgcataccttgctctacgtcgctacattgagatactaacaaatttaccgaagcggtcgaaactgtcactattgattgacaatattcgctatctgtgctcatatcagcaagagagatgcccctcattatctcttacctgttgttcacaacaatacgcgatcttaatctagaagctatatatgctgtagataatgattatgagatcaccacgctgcacaagagactccagcttctgtgacagagaatgcttcaccgactgcggtgaccaagattgaggagactacgacagaactg

SEQ ID NO: 73611 - DNA, 467 bp, Glycine max
  unsure (1)..(467): unsure at all n locations
agcttgtattcattagttgtatcaaattgagcatcttatagttgttcatcaacatcagacattggcctaggacaaataagagtagctctaggatctgtctcaatgatatcctcgtttgcttccacaagagatgcttcaatgattgactgaagcatggcttcttcaaaagcttccctttcagcaaggtccatgtctttaggagtagtggcaacttctatttttgcttgtctctaagcaagatctagaaaaaagatctgtgttgcaagttttgcttcaaattgagctcactctagttcttccatctaagcattcttcatctcttgtttaaattatgcatgtattgattcaacaatgaacaaatttggcactaccttcaatatataagacatcgtctgtggagggctaaaagggaatatcaattttacctattccatntaatcttcccttacccatgcctctaaaggaaa

SEQ ID NO: 73612 - DNA, 467 bp, Glycine max
  unsure (1)..(467): unsure at all n locations
cgtatattgtcttattcnaacaggaccactntcatattcttcctttgcattggcataatgttcaattactgtcaaggcttttggagcatctataacttgttcaactatattttgtgcaacatttcggttgataagctgcatcaaatctctctttttcctctgtattctttcagcacgaaagtattttttggttttcaattgcttggcaactttagtttgtatctctcctttgacaatcttcttccgtatcgcatccagagaagcccccttctcaagctcttctaacaattcttttcttgcttcctcaaattccatctaattcaattaagcagtgagtgccaaaaagtattgttagagaaaatgaaatatgattgacaatctaagtaattaatatttaatactcagcagaaaaaagaagaaatcagaaaagatgttataaagttacaagttgttgttcccgagagtag

SEQ ID NO: 73613 - DNA, 443 bp, Glycine max
agcttatagttattggagggagaataaaacaatccttattctattgtacctttcaagaaacgaagaattctctctgcggcttttagatgaggagaggtaggagcctccgtaaagcgacacacaactcccaccgcatatagaatatcgggccttgtattggttagataccttaaactccccacaagactcttgaagaccgtggaatctaccttctctccttcatcaaactttgatagcttcaagccacttccataggtgtgttcacgggattgcaatcaagcatattaaatttcatcaacacttctttcgtgtagttttcttgtgagacaaagataccattctccgttcgcttcacttccattcgcaagtgatatgacatgagtcccatatctgtcatatcaaattcacgagacatggactccctcgagtcttcaaacaaattt

SEQ ID NO: 73614 - DNA, 447 bp, Glycine max
  unsure (1)..(447): unsure at all n locations
cgcttgcggacttgaagccattgtatgtgatgatccanattatcttgtgcgtttgaatccttcaagcggtatatttatatatcctatacagatgatgcactaccttaatcttgtctttttaatatgtaattcacatgagacattctgaggctgtttcttgtcattacaactaaactgaagcttaatcatattagtaatagtaaataaaatgaagaaatctctaaacccattatttngtaattagtctgagtgttttgccttttttgaaccaaggttgatgtggtcctaaaaagagtacactcttcttgtgtcaatataagactacacaacactttactagatccttctaccatataatacttggagggtntacttatctatacctttttaatgctatatgtangtgatatctaccatgctgcacccaatactgatcattctcaagac

SEQ ID NO: 73615 - DNA, 475 bp, Glycine max
  unsure (1)..(475): unsure at all n locations
agcttaacanaaggcatgcgaagtgggtggaattcttatatcaattcccttatgttatcaaacataaaaagggaaaaggtaatattgtagccgatgctctttctcggcgtcatgcattactttctatgcttgaaacaaaattgattggtcttgaatgtttgaaaagcatgtatgaaaatgatgaaacttttggagaaatttttaaaaattgtgaaaatntttcagaaaatggtttctttagacatgaaggctttcttttcaaagaaaacaaattgtgtgtgcctaaatgttctactagaaatttgcttgtttgtgaagcacatgaaggaggtttaatggggcattntggggtccaaaagactctagaaacattacaagaacatttttattggcctcatatgaaaaaggatgtgcagaaattntgtgaacattgcattgtatgtaaaaaggcgaagtctaaggtaaagcctcatgg

SEQ ID NO: 73616 - DNA, 457 bp, Glycine max
  unsure (1)..(457): unsure at all n locations
tgaggatagagacttcccnactatntatctcanaaatcctcccatctacttcaaaaatttcctttgtactattaacccactctaataatattntttctaagctatggataacactactcaatcgtcaactatttctgtccctatcttcaatggtgaaaattatgatttctggcgtgttaaaatggaaacatatttttcatctcaagatttatgggacatagtagaagaaggcttcaccattcccgcggatacttcagttcttaatgcatctcaagaaaaagagttgaagaaaaataaacagaaaaattcaaaggcgttgttcaccttggaacaagcggtgactgatccaattttcccaagaattatgggagctaagactgccaaagaagcgtggaacacattgcaggaggagtttcaaggaagtgttaaggtacgtgccgttaaacttcaatctcta

SEQ ID NO: 73617 - DNA, 428 bp, Glycine max
acctctgagtcacctgcggcatgcaagcttccttgagaagattcctagagaagttagagcttgctacacacacctctctaatagctaagctcacctccttaagatgaaaagctagaacttagctacacaccccctataatagctaagctcaccccatgacaaaatacatgaaaatacaaaaaagtccctactacaaagactactcaaaatgccctgaaatacaaggctaaaaccttatactactagaatggccaaaatacaaggcccaaaagaaaaaaaaaacctattttaatatttacaaataagagtggatccaaccttggtccatgggctcaaaaatctaccctgaggttcatgagaaccctatggccttctttagtagctctagcccaatcctcttggattcttctatccaatacccttgtggg

SEQ ID NO: 73618 - DNA, 390 bp, Glycine max
  unsure (1)..(390): unsure at all n locations
actatntcgncatctntctcctctaaaccatagcttgaagattttgttatgtctcttctttttgaaaggaatacatgcaagcatgagttattgtgttgatttgataaaaaanaaaatattgaattgngaactaatcttctactatcaacttaccataatcactgaaatttcttaaattaagagaaagttaacggattcttttgtttagtttttattgttgatagctaacattttttatcgaggataccattgtatttttgggctagatcattgaaaatgtttcaccatgcagaataatttcttcttttacagcattgtaattnttcaatcacatctggatttagataggttctgatttagacacacattatgatattgtcttgatcaact

SEQ ID NO: 73619 - DNA, 459 bp, Glycine max
  unsure (1)..(459): unsure at all n locations
agctntacatcaaatattagtaatgacccactattctataataaaataacttaatgccattaacctatggaattaaaagaacttaatggttgagtgtaactgaaattgtggcaaccaaaagtctgatgcctgtgttgccaattgggcccttattacaacttgaactaaacctaactaaagcctttttagttgattaacccataacatattgttgggcagccaactttacaaggattaggccattatttatacaaactgaacactctaaaattgagacaaagtggtgccatttattcctcctccatttgggccatgatacaactcacaaccttggacttttctccttgaaacttgggcttgtattcaaatagtattggcaacacttgttgagacgctcgaaattgaacaacggatgccctctagatattcatatggtcataatctatcactcggatatgc

SEQ ID NO: 73620 - DNA, 480 bp, Glycine max
  unsure (1)..(480): unsure at all n locations
tgtaggattatggggtacccatcacatgtggttctatgtggcggtctggcgatggngcacaacaagttttccacatccacaatgcgcgcataagcccaccatcctctgttgcccacctccatctgagctcacgtactcccacgtagcccatatcctcgtttctctcaacaccgggtccccatcaatcctcccaagcttccacaacatccaagcaaaacagcattcaaaccgcacaagctatcacagccaagcaaaacagagcaaaggcagaaaactctgccaaaacaccaaccaaatcacagcttttctcacttaaagaccccagtaacaattccttcgatccaattcgttaaccgttggatcgactccaaaantttactggaagtctatagtacataagcctacattgtgaccgttgggatctactagcaaacatccagaactcattctgcactactctttccacagccaatcacacac

SEQ ID NO: 73621 - DNA, 469 bp, Glycine max
  unsure (1)..(469): unsure at all n locations
agcttgaaggggtgctctggacaganaccaaacggtgtaagtgtttttctttctcattaaaattacttgcccacattatgcaattcctacaaaggttagtcagattctttgtgatatggaaatactatcataatttgcaattgttgttaacattggtttggaaagaataccgtggttttcaatctgtcggttgtcttttctttggaattattttacatacacggcagctttgcttctaatgtttgatctaaccacagcttagccatgtcataacttctgttttcaaatattattcctcattgtggatttgcataattatatagtgactatggaaagtcttcaattatatagtaactattttctgaatctatttgtgcaggcatgaattcagacttaagcatgatgattggatgaacacggtaaaacctgatcttcatcctggtgtttcagcacaattgtcatgaaaatt

SEQ ID NO: 73622 - DNA, 499 bp, Glycine max
  unsure (1)..(499): unsure at all n locations
tcagcttaagagctccactcgttaacactcctaaacttgatagcatatgttatataacctgtttgtctctataaattagggtattttttattttaatcttttaaagattntgttttgttttagtccttggaaattttattttagatcatattgtttagtaataatgttaacttataatataacaacaacattagcaattcattggcctgccggatcatcaagaagttttaatagggtaatcacttgtatttttttataaactatatttttaaatttctcataaactagtttcacatgttttaaacaaattagcatttaagaagaaaatttacaaaataaaattacaaaggattatcctattaaaagttaaaacatgacatgctaattagttgctaccaacattgctattatgtcataagttactattgntacttggcattatggacttaaacaaaaaaatgaataanaaaaatatcctattttataaagtctggagata

SEQ ID NO: 73623 - DNA, 427 bp, Glycine max
  unsure (1)..(427): unsure at all n locations
ctgcacaaggctcttaatatataaagagtatttttgtttgttccttacccgacgaagacactgacaaaaacttatcttctcctttatcgacaaagtatggcaggctgggggcaagtatattttcttcccattagaccttagatgcaactgtgatcgtatgcccatatcagttagatcttaacgggtatacaagccatcctttcgtttgccttgaattntaaggagcattccaatcacattgtcacatacatttttctccacatgcataacatcaatacaatgtctaacttctagatcagaccagtacggaagatcagagaaaatggaccttttcttccatatgcaactcttacttttatgctttctattagtctctccaaagataggattcagagtgtgaacctgccaatatacatgctcaccagtc

SEQ ID NO: 73624 - DNA, 496 bp, Glycine max
  unsure (1)..(496): unsure at all n locations
gtcacctgccgcatgcaagctntgtagcattggtcttcgtctgggaaatgatctattttttctgtaaagaggcaaacttagtcatccttcttggacgaatgagaaaactggggcaaatgaagagggtgaggatgaaggaaaagcccgtgctgtgactgccattcctatatagccatgtttcccaccaacccgacaatgtcattactcagccaataaacaaatcttctccttacccaccgcccagttattcgcaaaggccatccctaaatcaaccacatagtctgtctaccgcacttccaatgatgaacatcacctttagcacaatccaaaaacaccaaacaagatatgaattttgcagcgagaaagcctgtagaattcacctcaattccagtgtactatgctgacttgctcccatatctatatgataattcaatggtagccataaccctcaccaaggttcatcaacctgcatttctccgagaatactactcgaatg

SEQ ID NO: 73625 - DNA, 480 bp, Glycine max
  unsure (1)..(480): unsure at all n locations
cgccgcccatctcacctangcgagctggtntgcttagtgaagatgttttttatggctcttccccaaatagatcagttcaccctcccttttattcatttccttccgaaacattacaaaactgtacggattgtgtggaaatgagcatttcaatctggctagcaaaagtttgcacattgacaaaaaagatgtcccggataaaattatggtatgacagtatcccctatttacttatcttttattggagatataagggaagtaaagataagacactaatttcgttcgagctgaatatccacctgaccgaccactaatggaagtccaaccagtaaaacctgtgaaagcatgaagacattgaggtttctctttgtctcattttatactttttttaattttatttgtccatatatattcattgtgatcatttggttatttaaaaaagcatccaaacagatgattgtgagtcctatgagcacatggaca

SEQ ID NO: 73626 - DNA, 494 bp, Glycine max
  unsure (1)..(494): unsure at all n locations
acctgcggcatgcaagcttgtcacaactatgtgaaattactcacattatagataatatttggtaactatnnncatccagaggactagaatatatcacagaattgacattttgttccaaaagaagacactgacatttaagtccaagtaaaatcattaacaaattcctccaacaaaaaaatactgacaatttaatccataaaatgtttactgacgtttacgtccaaaaatgatttcttattgacatttttgtccaatctaatcagcacgatcacgttggcaatcaattntgtaacaaatttgtccctctgtagacaacttttttaacggtaagggaagatagttaacgacaggatatttttgtcacacttttaacactttcgaggactaaatgttgcatttaaatctttcaaggacacatttatcaacgaattacacttttaggaataataatgattatttacctcaaaaatagagataagacaacctctaatatc

SEQ ID NO: 73627 - DNA, 478 bp, Glycine max
actagctcggcaaccattataacagtcgtacgccaaggattacttttcctttaaatacaaacaaagaagaaatctgacatttaaaaataatctcaaagcaaaagaaaaactcttcaaataattaataatgtgttaaataataataaaatcatttatatgtcatacataacactaaatgatataataacatttaaagaaaaagcattacatgatactagtcatcctatatatataaataacatagtaacacggcacaaatcataaaaaaagataatgatcacatctaatattattataaatgtaaattttattttaagaatatctagtaagtgactgtctcatttagtattaatatttatataatctaatgagttaatatctagtacataaagttagtaataaattaaaaattaaaaaatatttaatgctgaatacatctaaaaattaatcattattatttataatcaggataaaagaa

SEQ ID NO: 73628 - DNA, 466 bp, Glycine max
  unsure (1)..(466): unsure at all n locations
ctctttngtgcaactatctcatcctctttttatgtgtgtattgaagctnganaggnnctggngcaggtggtgctactagtggaggcacttgaatttggntgtcagatctcatggtgatggcactcacatttttcagatcttgcacaatttgtgaaggcaatttgtcagaattatgggactgagcttggttcaactgagtagccatctgtcccatctgatttgtcaaactctgaattgaggctcttgtctcttgctgaaattgcatattctggatggtcatttgcctcactaactcttccaaggagggttgaggaggggcctcagttgcttgttgtctttgttgttggtgctgctgttgttgcattggaagaggaacatatggcttgtttggaccagcatcattctgaaaatgagggacaggatgttgttgtagaggacttgtccatctcatatatggatgattcct

SEQ ID NO: 73629 - DNA, 458 bp, Glycine max
  unsure (1)..(458): unsure at all n locations
ctgctctaattacatgatgttgtttatggaggaagtgtttccttttgtttttagagagcccactggtaaacttcttttcaaattttgcctctccaggaaatggccccgaggaatcttgcctcaaagaggtccacgaatgacaaagcagccgaaggaactagttccgatccggagtatgacagacaccgctttaagagcgctgtacaccaccacncttccaggccatcaagggatggtcgtttctccgggagcgacgcgttcagctcanggacgacgagtatactgattctcaggaggatataaggcgcccgcagagggcatcactgtgtactcccattgccaagtgtgcaccagaaatagaccttgagttttatgcctatgcctggcctacagacgagggcgtgcgtgacatgagatactgcgtaatgggtcaacggatcccagttgatgccgacact

SEQ ID NO: 73630 - DNA, 396 bp, Glycine max
  unsure (1)..(396): unsure at all n locations
gcagctgaggcgctcctctntgcggactatattttangttgtntttagttgctagaattctaaaaacacaatgtgccaaactaactttgcaaacacaagaacaaagccatgtagatagtcactaatatgacgctacagccaattacattacaatggaaagaatcgccggttataatgcgtgtccgatgtacgacgatcgactaaattaacaagcaacggaagcatagttttatgagtgaacactaacatcngacatactcactacagactaggataaggatgtaatactacatatagaggtatatgtatatatataacagacataagtatggttatcacttaatgagaatcattatactatatatatatatagcaagcaagatttctgacgcttac

SEQ ID NO: 73631 - DNA, 326 bp, Glycine max
  unsure (1)..(326): unsure at all n locations
actaacagcaaagtccacgttgaatcacttctctctttataagaagaagagcaaattagtgaatgatgtaacatcgtatatntagcactacattctatattgctatactaaaaattatattgaagattttaaaattgagactatccattaactatattttttatctagggtacaatattagtttctggtgatgcccccatcgatctcttagcttgttattcacaagaatatgcgatcttaagcttggattatcgaatgcttagtttaatgaatatggatcccgcaggttgcacagcaaacaccaacaactgtgacagagaatgaaa

SEQ ID NO: 73632 - DNA, 366 bp, Glycine max
  unsure (1)..(366): unsure at all n locations
agcttgagccanaatcctaactcaccatanacctngtcnctggtgagaatgtcaatccttaccctcggaagcgaaaagaatagaagggaaatttccaatcaaagaaaaggaaagaaggaagatttccaatcaaagagaacgcacaaaaagaaaagaaggagaattcccaatcaaagagtgggagaaagcaaaaagaaaagaaagaaaattcccaatcacagaatgggagaaagtaaaaaaggaagaagaagaaggaaagaaagctcctgatcagggatcgaaagaaaacagaagaaatgtgcagaaaggtctttggaccggacaatatctgaataatacagaattgtcaccaaatgaacgaaaaga

SEQ ID NO: 73633 - DNA, 504 bp, Glycine max
  unsure (1)..(504): unsure at all n locations
acctattaaactcagctctgatgcctgtaaagttttaggcacaagcggagaaacattgtgtttagctatataagatcgngagattcgatagaggtggaaagtactatgatagatacatggagaatggagaagcacctggtctatttgcgaagtttcttcaagaacattagattgttgcccaatacactatggttggttctccaaattataatggtgtggaagaaagaagaaaccgaactgtaatggacatagtgaagagtatgaagagtaatagaaaacttcctcaattcttatggattgaagcactaattaaagacggttgtgtagtattaaatcgagtaccaaccaaggttttctcatagacaccttttgagttattcaaaggttggaaaccaagtttgagacatatacacatttggngatgcttatctgaatgtagaatttataatctataagagaagaaactagacctaagaactatagtggatattcattggatatgct

SEQ ID NO: 73634 - DNA, 497 bp, Glycine max
  unsure (1)..(497): unsure at all n locations
atccttaagtcacctgcggcatgcaagcttgagatgaggaagtgttgaagggtgaatcnttcngtttttattgttgaccacagagtggtacctggagatatgtcgcgggggtcaggagaccttgnggacgtcaggtggggtgctattgcccaaaaccaagcttgaccaatcccgacccaacccgggcatagtcggtcagtgagaacctgtgatgtacctaagcaggcgagctcctgtcagtcaacagataaaaggaaaacaagaccacaaagcaaggaggcttgtggtggctggccagctgtgaaacttgattgatatgtgagatatggtctctggtaatcgattaccaagggtgggtaatcgattacaaggcttaaaaatgaagacagggggctaagatggtctctggtaatcgattaccaggggatgtaatcgattaccaggcttgaaaacgaggtcaggaagctaatgaagcctctggtaatcgattaccaagt

SEQ ID NO: 73635 - DNA, 477 bp, Glycine max
  unsure (1)..(477): unsure at all n locations
ctatatgccattgctttggatatntggttggagcanaatgtttattatttangagttctcattggctntagatcagcacataataggattgtctccatatcatctctntgatgttcaactcaaggttagatttgtctgataaatgttaatagaagagttatactatatcaaaatttcattgttcaagtgaattatgttttgaccaaaaggaaaacttctttgtatcatttcattatactaaaaataaccaaaaggtactaacaaataacgattgagtagtattagaatattcaatattgtactagattgttttctattttaaaaactgaacaaaatagcacaccactagaaatgccctacagttaaccattaaaaaaagaagaaacatgttaaaaattaataagaaaaacaaatganaagattggtgggaaaaaaatgccctacaattcattangggtgggtatacatactggtctg

SEQ ID NO: 73636 - DNA, 419 bp, Glycine max
  unsure (1)..(419): unsure at all n locations
aaactgcgaagtatagctaaattgaatggtgcaatcccaatgtgtgattaagagacatacacttgaatgctcttgtgagtgagtgaaacacttgattagtgaggagtgtgttcttcttgcatcaatgatgaattgccatgcttngatgctcaccttgaaatttgagctcgtgtatccttgctatggtctcctaaagaggacatccgtgtgaataattgagtccttgtcccattcatctttttttatagacaatacatgtgttggatatgttaggatggaattgatctcaactcatgtcaatgttttaatcttagcactaatagtcttcatttaacgatgtgtgtactcttgcttgaggacacaaaagttttaatttgagggagttgattattgccaaaatacttactgagacatgtgaa

SEQ ID NO: 73637 - DNA, 394 bp, Glycine max
acacttacattgcacgttttctgctacatggctagatgcatttctaatatacggtgcttcaaaattctgcaatggagcattttggctagatttcacatggatgacatgaggtgaaagcatgtcaatggtgatcggttgtgtggagttgcatcattcgcaatatatgagttcaaaggaacaccattatttcttttaagtcaagctgtagatgtggagaaactcttgaacaaaatattattcacgatgtggtcatggctgacgacatatcagcctgactttgatcactatctctttccatcagtggcatccaaatccgcgaatatgtttgtcttaatgatttttgtatatgtgggtgctgaatttgattctacccatatgctcaccagtttgtata

SEQ ID NO: 73638 - DNA, 461 bp, Glycine max
  unsure (1)..(461): unsure at all n locations
agctntatgcatgtaaccatcatgatgcagatttatttgtggtagctgttgcagtctttggtctggtttttgcttttggagattntcttccatcaggaaggtatgctcgcaaatttaaaccagacaatatatctcatgtcctgataccatcactcaattcaattgttacttttcctttacattgtatgggctggtgtgttagtttcctgcgaaggcacatcattgttaattgccctttagtcttgattacagtttaaattgggatatctttctgtaccccaaaaaatgggatatcttgcagtgttagtcccactgaagacagtgctgtggtcaatagtaagttgtctgaggaggataaagctactcttcaggtatgatttccacccaattattngtatcttctggcaatcagtaaggcactaatgttcttcctaattatnntagtcttgaactcttatttt

SEQ ID NO: 73639 - DNA, 447 bp, Glycine max
  unsure (1)..(447): unsure at all n locations
gtttgaaatcctgtataaatcagacaacatatatctctctggatttcctttanataactctgaatttcaaagcatcaacatcaatgctctgatcaaatggagtcatgaatgacggattcaattggggaaaaaaagttaaatatgttgtaatgacaatggtaatatgatagtggaaagggcagcatgaccatangtatgacatccttatttctccagaccctaaccaagtcgtgacatgaattcaaagtaagcatcaccataaatatgtcatgtcaaataaagcaccaaatgaacctaaaagttgtaaaatataggccaaaacctgtttgaataacattcctaatgccaatgtacacaaagtatatgaccataaagcccacaatttanacaaaacttagacccatgcatcaattctacaggtgataacatacataatctaaacaccta

SEQ ID NO: 73640 - DNA, 318 bp, Glycine max
taaggaggcgcctatctacctctttctttgtcttcgatgatctgcatggggaaaatcaccattaaggaccccattgaactcaagatccacctccataaagctcccaagcagcttcatcagtggtatcatacacagagcttaagacgcgctcttaacctcataatatttttcctcctttcttcattgtggtcttattttatcctgttctcctacatgtctggctaatgttgttacagatttttaagttccccaataaactgcttgaaactagattgattttttggttcaattcctgtcttgtcttgaccataatgtgtt

SEQ ID NO: 73641 - DNA, 356 bp, Glycine max
  unsure (1)..(356): unsure at all n locations
atatgtgatgatgtgccttgaatggaactcgacgagtttccttcccttttcttttatatgctggctctttggctgtgtcgcaacctacccttcagtgggaaggcgacacgtgactcgcgggttctggtctcacgaaaggaatacgcgcggagtcgccaccaactttatttgatgaaaacgtagataaaacctgaagagacatgatctacgaaccctcaatgaaaagttcatgagtngtatttatgcacagtgaaggtattagcaccccacgcatccgttcaagagacggcaggctttaatcaaatgtgcaaatatgacttccatntatattctttttccttgttacgtacttatgt

SEQ ID NO: 73642 - DNA, 465 bp, Glycine max
  unsure (1)..(465): unsure at all n locations
taacttagcttgaatcaatataacaagactgttctatgttatanaattttacacttcttctaagaattcctattgacaattaaggtaatattatccattangaaattctccattgagtcagttcaatggtcacattcatatgcacataatttatatatgtaaattaataaatgagatctattaatgttcattcaatgaatactatcacatatgtcaatctatccaaattattaatgtcatattcataataatcttacgatcaagaacaattaaaattaaaattatgagagacttttttctcattctcataatctctattatgataacaaatctttaattntaatcaatgaccttatcaagtcaactattataagatgtattggatcttaggcatacacaattattcccaacaatttcccacttgcctagagccaattactcatgtacttcatgcctacttcccac

SEQ ID NO: 73643 - DNA, 115 bp, Glycine max
cttaaagtaatgtaactgcaattgtgtggacttggggatgccgatggaatatgtcattatcaattgaagggtcaaaaattataaaaacttgtgaataagctggatctctctcttt

SEQ ID NO: 73644 - DNA, 476 bp, Glycine max
tcagctcgtgcctgtctagcacaagtttgttcctagtttatcagtgttattttctgctctatatttcacaagtctgtaaatgagtacgtacaaagctagccttttttttttcttttcccttttaagttcaacaaagccatgcatcttgagtttgcaagtttcaagagaacttataatgtggcaaagttgcgaaatctatgcaccagatttaaatgagaatgcctctgctttcctcaaaatataagttccaaattccaagttataaaatattggctgttttctgtccagaatccatacatatatattcttagctccactaacacatagaaaaatgaaaaaaattaaaaaaaattcaatactatacagatgcaaatttgaattaagttggagattcaaaagtagttagtcttgagggtatatatattgcgtgagaaaatatagttaaagtctcatatcggcatttcatacctacttgc

SEQ ID NO: 73645 - DNA, 495 bp, Glycine max
  unsure (1)..(495): unsure at all n locations
ctcaagcttctcctttgtgttcaaccnctgccactgctccttcccttcatacattatgtttctcctttttttcttccgatactcgattctttatcgagttccaacttcttcatcaccctctctgcttaaaaatgttatgttttgaacaatgatacaaattgaaaaaccccaagttttcaaatgctaacgaatcttgtgtagagaagctttcccttcattcaatttntcaattgacaattgtataagttctctcaagtttagagctttttgcagcacccgaaaaaagggagatcaatgattcattatgtatgcttaaaagttctttgtctatttctatctttctttctttcccttgattactatttgcagggcaccttctgtaccatcagttctggaaggcacagccttcgtcattcaaagaggtgattttntcttaatagctaaaacttcaatctttacatacacacacatgaccccacttntggnttcttttta

SEQ ID NO: 73646 - DNA, 468 bp, Glycine max
  unsure (1)..(468): unsure at all n locations
ctcaatccactttcattcagctagatgttcttttatgtagtagatattnctatggatagaaatgattntaaacattgaatgtgtatccaattaattttatggatttgcatctcaatatatagtagacatttctgtgaaatttgattaatacataagttattcctattttccaaactatagaagaaaatattcaacgaaaatatgattccgtatacatttttcaagacagtacataataagtatgattatgttgtacattatgcaacataatcacacttctattgaacatgcttaattgaccctcactcgtagaacataattatgtttttgttgtgtactttttccatacacncagtagcacaacaaaattacgagtctactgcacagagtgggatgcaaaaagaagtataacataatcacaatntctttgtggaatgacaacgagatcatgatgttacatgatcatac

SEQ ID NO: 73647 - DNA, 408 bp, Glycine max
ccagactacatgagaaacaaagagatggcatgatgctacgataagatagagaacatttcaagtgtgctatactgtgttggtgtacaaactctcgcctacatgtgtttcatggaagctgaagtctagatggagcggccccctagaaataagtaatgtatttccgtgtgaaggactagatcacataatacaagatatgggcattttcaagacgaatacgcatagagttaaggcatatcatgaatgatttcaacaggtgcaaaccatggtgcatcatctcctaccatgccttctaagacatcacgatggagtatgtctccttgtgccaagtgtggaactcctctaacgataatactgattcagaagtcaatgatgatgtggaagactaactagtgcctcccattagcacat

SEQ ID NO: 73648 - DNA, 334 bp, Glycine max
acaaccaagctacttgtgtttccaaaagactcgaatgagatggcactcttatatagaactcatacctgaatctccttatatatgtttccatctcatcgatattatggaaaattctcatgacctgtaactatgtgaaagttaagttgttgagagaagccagccttacttccaccaccttcacactaatacttaagctattcacacaccaatgagttggaaacgaattaaatctcacaaattcaaagacagaccctcatattggagatacatctaaggttctgtctaaaatacccttgcaaattcaaacagtagatcttgaatctctgctgaaatt

SEQ ID NO: 73649 - DNA, 350 bp, Glycine max
  unsure (1)..(350): unsure at all n locations
actcagctcggtgcgcttactgtggagcatgatctcgacttttttattcctngcacagcgatcgatgagacgggggagactgtgaaatctgcacttatgcaccaactttgcggtgagattgtgcagcagatttttgctccagtgcataaaaatgcttgtgtgagggaggctgagggaagtcttgagctccacgagttcttgatgtttgctgccaaagcctcgcctgccttgtgtgagctgatgccttatgaacttccggtgagatttaggcttcgatccttcccgttacgatttgactcgaaggactctgtactggaggctgtccatgacaaaagctgatagatatggat

SEQ ID NO: 73650 - DNA, 385 bp, Glycine max
  unsure (1)..(385): unsure at all n locations
agctngtgatctcaaagtccaacaagaagaatattattattaatgagaacccttcaaccctttcagtctcattgaaatctcgtacaaggatggttctttgaaatctctgcatcatgaacattctttatttggattgtgaggggtcttagcaatctaagactagacgatctctcaataatagttgcttccttagcaatcccaattctctatttgcaattctacttcttttctcttgaatgtgggaaacatctttgttttagttggttccttttacatatttataggttctgtttcatgggtttggtgatttcccatgtgtcttttcttgtaccctttcctttaattaataaatattcagtgcgcactctctgctactgcttggtct

SEQ ID NO: 73651 - DNA, 489 bp, Glycine max
  unsure (1)..(489): unsure at all n locations
ctgagccaaaatcctgactcaccatataccttgacccattgtgattttgccaatccttancctcggaagcaaaaaagaatagaggggaaatttccaatcacagacaaagagaaggaaaatttccaatcaaagagaaagcacaaagacaagaaaggaaattcccaatcatagagtgtgagaaagcataaagaaaagatagacaattcccatcccaagaatgggagaaagtaaaaaataggaaggaaagaaagttcttgatcaaagaaactagaagaaatgtgcagaaaggtcttttgaccagacaatatctgaacaatacagaattgtcaccaaatgaacaaaagaaagaaaaggaaaccatgacctatagtgcgcttctcccttngattaccaaccaaaatcttgtgcgtcggtgacttggtcgcctcgcgcataaccaaaacagaaaagggaaaggcaaaaaataatccaaagccgaaaaactcccca

SEQ ID NO: 73652 - DNA, 275 bp, Glycine max
tgatctccagattgagtcaagaacaattccacaatctggagatacttgtctcacgattcaagcttcacgaatcaagactcaagagtactctttatccagattcgtgactcaagattcgggaatctggaaaacactgattgtagattagctctaaaatgttgttcataacaatgtgtcatgaaggtgtcacagaagcttttaccaaagaggtgtactctctggtgaacgattaccaggttactgtaatcgattaccaggagccaaatttgtgttca

SEQ ID NO: 73653 - DNA, 395 bp, Glycine max
  unsure (1)..(395): unsure at all n locations
gtcacctgcggcatgcaagcttgatagctaacaatcacatacctccattgttctagattatgagaggcttctttgatggttcagattcagtttcatataagtagagttgcggcagagtgaatgaccaaagtatgacaagtgataactgctaaataatagtgaattgatagaggaaaatctgtctagaattaacttaaaattaattatttaacagatattcatgctttaatgtggaaagatttaattaatttcaaattttgatagcagatgtgaaaaagggaggtataacaagcaaaaaggagcataattnaaggaataaagacgataatcagaaaaagcccaagcccaagtttgcacctataaataagatggtcatcctatgaaaacaaacacac

SEQ ID NO: 73654 - DNA, 495 bp, Glycine max
  unsure (1)..(495): unsure at all n locations
aactcagcttgacaggattacatgatggattctttcaaccnatttgaatattgtatataactcanaacattattaattaattaacaattaatgttggatatttctaaccctgtatntacggcaaagaacaatggccattcctttgtctagttgaaaattttccgcgagtgcatttctacctaacaaactaattcgtacatggagaggtcaatatcatagtactataattaagttggggagaaatatttttctcttgtcaattatcattactacaactcttgtaatatagttaacaacacatcacataagacaaaagaattatagtaaactcanatagatattggttntaatttctagctagagtgccaaaagaatcggaagcagaatagtatataannattgtggaaagttctctattaagtattttttttacatattatnttcattggnttaatattattgacagaaatgtatcgaaacacaaatttgtgattt

SEQ ID NO: 73655 - DNA, 489 bp, Glycine max
  unsure (1)..(489): unsure at all n locations
accttaagtcaccgccgctgcagctggataattctcctaactgggatcgttgttattattttaggctacaacatagaacacaagaacatgattaattggagaaatatcctcatgtgcatcaacttgtttgttagaaagacccaatgccttttacctattgttgtcaaacttttacttagttgcatttattgttttactataggattagtttatttctgttttaaccatcaattatcaatgttcgtttcaacaatgctttacttctgaacaaaactgtgtctaataagttccctgtgttcgatactctgatcattccattttaattttaaatactngacgacccagggcactttctggtgaatcggatttcccttgaacatatttgttggagaaaaattggacaaanagtaaccatatgggaaatctaacaatatgctgntattatcaatgttcgaacattacaagaaggataccactagcaattaatac

SEQ ID NO: 73656 - DNA, 415 bp, Glycine max
gatggagatgatgttgtctatgaaatacaaaagttaaaatcacaggtcacatcacatgacacatgaagtaaatggaaataacaaaagtgttagttttaaaaaaaaagtaaatactaacggcagtttatatatgatgtatcacgataggacgaccatataaaataaatatttcttttaaatagaaaaatatggagaatagtcattaatgtttatttaagacaaaaatatgaaaaaactaaaaaaaataaggaatgatctataatttgagaaagaaaaacagatttaggaatcatctacgtacggaaaaaatatttacacctaacatgcctctcatgaagacaacagtctttatttgagggtactaaacaataaaattacttatttattatattctttcctcaagacatgaattatg

SEQ ID NO: 73657 - DNA, 196 bp, Glycine max
  unsure (1)..(196): unsure at all n locations
agcttcgccaccaagagagtgccttggatatttatttttgacagggtgctncaacgaaggaagagagagagagaacggtggagcacaaaattgaatgaggaagagagggagagaagcggaactctgatgtgcggctcataagactttcgttcgtcatagttacaacgagtgttacacatgcttctatctatagact

SEQ ID NO: 73658 - DNA, 445 bp, Glycine max
  unsure (1)..(445): unsure at all n locations
ntcaacaagagtcttcacanataaccatcatgaagcatatnactattctaactacccatcatatctcccaaaaccccatacccacgaaaatcanaggagaaagaagtccacccaaacctgaaatttcgaagtcccactcgtagacacgcacttcacgactccaaaaatgctctcctttcgcgatttggagcagaaatgatggccaaaggttgaagctttgtttggagcttcaatggagaatgaagaagaagagaatggcaacgtgagggagagagagagctgtctgaaaagtgtggggctgagtgaagagagagagagagttgctttttaattttaaaaaggcttttttctcatttcttattattntattataaactatgccacatgtctncatttgagtggagcaagaagggcccactttccctttngattgtgacccatactc

SEQ ID NO: 73659 - DNA, 314 bp, Glycine max
  unsure (1)..(314): unsure at all n locations
gcttcaggactaaaactgcaatntaatcacacaacttttatgtcntctttatgggactcagaagagagaaagtgaataccgttgaagtccttggcgatcagaggggaaccacgtcttcctcaaggactctctcctccccgccgacgtgaacccgggttgaatgcccacaaaccccatcaccttatgcctggctccgtcgacgacctcactaccggcgggacccgtgacggtggagtgtcccaaaccatgcgcaccgatcgggggtgcgcgttgacgcaccggctgccactaatctggccgaggaaagcaaccat

SEQ ID NO: 73660 - DNA, 400 bp, Glycine max
  unsure (1)..(400): unsure at all n locations
gcgcgggtctaggagacanaggtcaagtggtcacgatatatgattatgatgtttcgagtacattagatttggtacgaccatgccctcctgatttccagctgggaaattggcgagtggaggaacgccccggcatttacgcaacgagcataatgtaaacctttacggttttaaaagctctatagttgggcctaagctctagagtttttccttttgctaacgctatgtgtcttttgttttgaatttataaaacaggatctttcttatctgttcctacgtctctacccattctcattcatttgcatgttaacttctttttctgaaacgacagatccgatgacgaagtctccggatgtactaatacttgggacccagctatctactcccagctctaaatgaatca

SEQ ID NO: 73661 - DNA, 423 bp, Glycine max
  unsure (1)..(423): unsure at all n locations
tgcaagcttctnccncaatnttctataaatagggggagatgtgttgtataaaagggttcagccccttacgcacttctctctctttcgaatttgcttacgaaaatcgttccatgaagaanatccaagccgaggcgcttccgtaacgtttccgtgagtgatttcgcgaaggttttcgactgttcttcggcgttcttcattcgttcttcatcggtcttcagtcttcaacggggtagtacctcaaaccaagctttccaattcattctatgtacccgcggnnggccacatttggtttcatgtatttttattctcgtttcattcactttttatacccccttttgacgtgcttaagccattttatttaagtcatttctcgcttaacctagaaataaaataaatttccactcgatcgttgaattgtattat

SEQ ID NO: 73662 - DNA, 479 bp, Glycine max
  unsure (1)..(479): unsure at all n locations
gcttgaaggcctannaccttggtgatatatttcaccaagggcgcatcttttctatgccccaacacccttcggcagctaaacctgtccctttcccataccaaaacagtcatgcagtcccatggaggtacacacctccgaacaaaaaggaagaagaagccaccaacatcagttcattgttggccaaggtaagcaatatcacggggcttagcggtgtgacccgcagcggtcgcgtgtttgcaccccccgacctaccaattcaacccacgaacgtcaaggggaaagcaaaggtagtggaagaacaaaatgataaagcacccctcactccgaaggaggatattccggtgaaaggtcttccggagaaaagggatggttacggcaagaagaaagtgtcactataggaagccagcgagtttctctacataattcagcagagcgagttcaagggtattgaatagctcaacaaaacccctggcaaggtc

SEQ ID NO: 73663 - DNA, 480 bp, Glycine max
  unsure (1)..(480): unsure at all n locations
agctntatcctctanatgtttatgtgcaaaaattgattttattttattaaataactttgattattttattntttatgagcattcattgagaaatttattaatactcttgatgttacatatggtagtggtagaatgttgtacatgtcttggtgtcactgcataaagttttctaagtgttgaaagatgcgctcggtgggttgaattcaattgctaaaaanaaaaaggtatatcttcaaatcaaaacctgaaattaaattaaaagtattttgtcaaagtgattgaactatccagtcaagaatcgaattttaacactaaagatacacaaaagtaaaaattatgaagattgccaagtactagatggtgaaacatttgatgcaatggttcaaattgaagttaacttcggctcttttcaacatataaattgtaaaccgatacttgtgtggatgagtttgtgtacatgtgtttgtactatataactca

SEQ ID NO: 73664 - DNA, 480 bp, Glycine max
  unsure (1)..(480): unsure at all n locations
tactcagcttttacctctggtctctgcttctggtttatcctctgttataacactctctctcatcccaagcantttttataggcaacttgccttgttgcaaccattatctctgcgtgtaactaactcaactatcaaattattctatcaaactaactatatgggttagcaatgaatctcaagcttgaccctgaaattcgatcgtatttctttcttatgttttttgttttccacgtaatatgaaatgaaaaatacattgtttttggcatgaacaaagaataggcagcagcttataccctggtgagtgtaaaaccaatttaggattggagaccagattntttggcagtaaagaaactgggttagcacatttccaagtgggaatatttganggactaaggaatgatattggcaaaagnttggcagggatcacaatttagttgccaagacattgtgtaactgtaaatgtaaactaaactattgtat

SEQ ID NO: 73665 - DNA, 460 bp, Glycine max
  unsure (1)..(460): unsure at all n locations
tgcttccgttttaaatttctagcgtctcgatacgctattctcttatatcggacatgcgagtgaaacgttatgaccattttaatttttcgagagctctcgttgttcaatattgagtggttagatacactatgcgcctgaatcggacatgcgagtgaaaagttatgaccattataattactcgagaggcttcagtgttaaagttctagcgtttctatacgctctccgcatgaatcggacatgcgatggaaaagttatgaccatttgaatctctagagagcttccgttgtacatttcaagcgtctcgattgttatgcgtctgaatcggacatgctagtgataagctatgaccattctaatctctcgagagcttctgttgttaatatctancgtcttgatgtgatatgcttctgaattggacatgcgagtgaaaagctatgaccattttaatttctcgagagct

SEQ ID NO: 73666 - DNA, 489 bp, Glycine max
  unsure (1)..(489): unsure at all n locations
tactaagctcgaantgaacaacggattntctcgagaaattctaatggtcatatatttttactctcttgtccgaatcacgtgcataacatatcgagactctcgaaattgaacaacggatgttctcgataaattccaatggtgataacttttcactcgcatgtccgattcctgcgcagagcgtatcgagacgctagatatttaaaaacggaagctctcgagaaattcaaatgggtataacttttcactcacatgtccgattcacgcgcatagagtatcgagatgctagaaattgaacaacagatgctctcgagaaattaatatggtcataactatttactcgcatgtccgattcacgcacatagcgtatcgagatgctagaaattgaacaacggaagctctcgggaaattaaaatggtcataactattcactcgcatgtccgattcacgcgcatagagtatcgagacgctagatattgaacaacatatgct

SEQ ID NO: 73667 - DNA, 407 bp, Glycine max
  unsure (1)..(407): unsure at all n locations
agaagcgaacatgagaatgcggtaatttcggagtcaactctcatctcacacaagtctataacattaatttacacttgctcaaactgattntaaggcgaaaactccaccaattcaggatttgacccctcaacacccaatttaccctataaatgactcttgctttcacatttgtcactcattnttcttatttgctctgccaagcctttctccaagtcctaattgacattctaaactataatcaattcactttagactccaattctcactaaccccaaaattagcttatctaaccctctaaatctcacacatgttcactcacatcactaccattctcacatttaacccttggttaactctccccatcatctctaccagtgttctaccaacaatttcagcatacaaatgcc

SEQ ID NO: 73668 - DNA, 481 bp, Glycine max
  unsure (1)..(481): unsure at all n locations
acactgagtgcctgagatgtatataatttctaatcttgtttcttattatcgcttcatcatcatcccccgatccctcgatgacatttatgtaatatttcagtaacatttgtatttaaattgaaatttttacacacatatcacaaaatgagaaagaaagaagagggattacggtaagtcaatgccatctgatagtatttttaaggtccagtcaatgccattatttcaacaactttgatagtagtaaagtagttccattgcatatcattcctctcatagcatgcacaccacgcttgtggcattacctgatgaggagatcagagagtagctttgcatgaagtgttgagccaaccaggaccctgtctgggagtatatgaagccatctggatgaagttttcatgcactggtgagtcatatcaatctagtgtatcaagcattttgaaaacaattnttattatcaataaattttacaacatctaacttt

SEQ ID NO: 73669 - DNA, 477 bp, Glycine max
  unsure (1)..(477): unsure at all n locations
agcttatgaaatttaatgaaattattggagaaattattttttgtttaaatnnataaccaaagaacaatataaaattatgttatattatctgtatatcatcattaaattcttttacatatttaaaacattaatgcatatattttctacattatttttttttgtcacatgttaggataaaaaaacactatcgaaaaaaatataacacaatacaccatattaatttgggtttgtctaaccaaccccacgtgaaaataatctgatttaataaccaatataatttaaatatttattttattatgaattctatcaattaatattataactatcatatttaatgcatcatctttaaggctgcgatccttcaagaattgaagactgcatggacctgaactatcatgatattctttgtgcctcagattcaccacatgctcttagtctcattaatcagccaatgatggagttgcatcactatgtgac

SEQ ID NO: 73670 - DNA, 414 bp, Glycine max
cttgaatctgcctgaatgatccactttgagagactcacatctccatataggctacccatagccaccgaagacgcgcatcttgaattaaattgtagtcccaatgcttcacaagagttactagaatatcctctatctgagttgcaccaagatgtttctcatcatcatcaactttttcctccaagaccatgagtgtataagcaggagcgccaattatatcaccaactggtgaatcatggcgaggagaacgttaaagttctccattatatagtattaaagcatacatgccaccacatatattggctaaagctcaagttgcatgctcctgcagagcctggcctgcatcaccttgcatacactcattatatagagctactatagctgcaataaggattcggataccatctgcattaacaa

SEQ ID NO: 73671 - DNA, 467 bp, Glycine max
  unsure (1)..(467): unsure at all n locations
agctntggtgtggtgtatggagatctgagcacttcttctctctatgtcttcacaagcaccttcagggggaagttgcagaatcatcatgatgaagaaactatattcggcacgttttcgttgattttttggacccttaccttgattccattgcttaaatatgtattcatcctattgggtgctgatgacaacggggaaggtatgctgctgataactctattctcttagataatttntcttatagaaaggttatgatctgtgtgattgtgatctgagtatgatacttttgtcatcaggtggaacatttgctctttattcgctgctgtgtaggcatgccaagtttaatttactccccaatcaacaagcagctgatgaggagttgtcatnctataaatatggtccctcttcacaggctgtagcctcttcttcattgaagagggttctagagaagcatataaggttaagaacag

SEQ ID NO: 73672 - DNA, 458 bp, Glycine max
  unsure (1)..(458): unsure at all n locations
tcacgaagataaacagttaatcagatgtcactcccagctattactatagttgttatgcttgcaactcatacctagcaccttttgatgcacattaatattctctccttttactttgtttccttcaacatgtggtacatgtattccttaattgggtttcaaagtgcatcacattagttatgcaactaatagctgaagtaccttttttccttgttctggatggagcactaccactatttccaacccaataatacattnttttccctcattctattaccacaaccatataattaataatctaaacaaggccaatggatgtgtcaaaatttaatttattaatattatatatatgataatatgaatatacatcaattagctgcgatggttgcagatttacagagttgaggccagcaccaacatctgtgctttactttaccaatacaacatctacaagtaaaccc

SEQ ID NO: 73673 - DNA, 476 bp, Glycine max
  unsure (1)..(476): unsure at all n locations
agcnttcattctacacctgaaaagaggatgagatagttgtacaaaagagaaagcttcctaacatanaatttcatgcaggtggaccttattctagtaattccgacttgcaatagcctcatatccctcttccattcccacctagagcaattccaaacaaaaagatggaagaagtggaaaaggagatcttggagaccttcaggaaagtagaggtgaacatacctctgctagatgccatcaagcanattccaagatatgtcaagtttctaaaggagttgtgcacccacaaaaggaagctcaaaggcaatgaaaggattagcatgggcagaaatgtgtcagcattgatgggtaaatttgttcctcacattcttgagaaatgtaaggacccaagtactatctgtataccttgcattattaggaacagtaaatttgagaattccatgctagatctangagcatcagttagtgtcatgcctctg

SEQ ID NO: 73674 - DNA, 465 bp, Glycine max
  unsure (1)..(465): unsure at all n locations
ngctctanantacattgatgtntgtattgaggggaggatgtacttgccatttttgctntaagagtaacgtcccactggtaaaactaactntccaaatgtttgccttcgcaggaatggccccgaggaagcttgcctcaaagaggtccaggaaggacaaggcggccgaaggaactagttccgccccggagtacgacagtcaccgctttatgagcgttgtacaccagcagcgcttcgaagccatcaagggatggtcgtttctccgggagcgacgcgtccagctcanggacgacgagtatactgattttcaggaggaaatagggcgccggcggtgggcaccactggttactcctatggccaagtttgatccagaaatagtccttgaattttatgccaatgcttggccaacagaggagggcgtgcgtgacatgagatcctgngttatgggtcagtggatcccgttcgatg

SEQ ID NO: 73675 - DNA, 470 bp, Glycine max
  unsure (1)..(470): unsure at all n locations
agcttnctcggggccatttcctgcgaaggctaatatttgtaaagttagttttaccaagaaatgctactcttaaaacgaaaatggcatacaacctcctccaataaacacaaacatcaatgtaaatttagagcaaactcatgcacatacttccttacgaacattcactcgcacaagatattcttctaactaaaaaaatgcacccatgcacaatcaaggcaccttcgttacctagatcacttatatgcacttccaaggtgtatttgctacctacatcacatgcatttcctttgctaaatttacatacatgcatactcaaggcactttggctaccaaaaattgcatacatgcacattcaggtatttctaatacctatacatacacaaacttcgtgatgaatcttggctacctacacaataaggtgctacatttcatgctgtattcaagtggttttgctacctaaagccgcatgc

SEQ ID NO: 73676 - DNA, 455 bp, Glycine max
  unsure (1)..(455): unsure at all n locations
gcttctatgaaggctggatcgttgagcttcaatgttgtccttcactggtgactttccaccatggagatgcagcggaaggctaccgagaagatgagaggggaggcaccatccactacggaataagccatggaagaatgagcatcactgtcgcatcctacccttcggcgggagggcgacacgtgactcgctggatgcgtgctacacgaaacgaatacgcgcggagtcgccaccaacgtttattcgaggaaaacgtcggaaaaaccggagaagacgcgagctactaacttttaagtgaaaggttcgggagttgcatttacgcacgaggaacgtgttagcaccccacacgtccgtcccaagggacgagagcctgtaatcgaatgtgcaaacatgactntgattntatatgttcccttantatgtctctatatccatcataccctctatatatatttctc

SEQ ID NO: 73677 - DNA, 469 bp, Glycine max
  unsure (1)..(469): unsure at all n locations
agcttccaacatcattcttctgaaattggtttagttcttcttgcattgctttaaccatcaaacatagcatcacctatgtgttttggcttaatctctaagagtaatgttgtatgcttgagagagttccttatctggactttgtccttaggatcaccaatgatctaggactttggatattgtttcctcaacaaatgtctagttggttctttgatttctttaggttaattttccactagtgatttgaacgcgtgtttgtcttgattggacacagcagcagatttcacgatattttctattttcatctctgcaaaagactcatccagctctgacattgtaatgtcaagcttgttgtcattaaatcttacatgaattgcctcttccatagtcaaggttnttgatttgtacactctatatgccttggatgattcanagtatccaatattccaaaatcacattgtgagtcaaactt

SEQ ID NO: 73678 - DNA, 422 bp, Glycine max
  unsure (1)..(422): unsure at all n locations
ngactaggcgagtngattntagccttagnnncactttatttattattcaattcaattaagaatgagaaatcccaaagagaaaaaatgtccgattgattntttcgctnttattttactaaaaggtattntttgattattatattattattttacctctttttttgatttccaacgtggttacggcacgaccgaacggtcggaattcattttaaccaaaattaacggatgatacaattcanacgatcggtggaaatttattttatttttagattaagcgagaaattacttanataaatggcttaagcacgtcaaaagggggtataaaaagcagatgaaaacgagaataaaaatacatgaaacaaaatgtggaccaccacgagtacatagaatgaattgaaaagcttggtttgaagtacttacct

SEQ ID NO: 73679 - DNA, 482 bp, Glycine max
  unsure (1)..(482): unsure at all n locations
tgtcaatatgtcaaagcaattgaagaagcatatgttccgcatttagagcaaaggaaagtctcatggcattgtagagtgaccaagctgatgccctatgatcaaaacacaaggcagtgaccatgcattgaaagctttccaagaaacacattaagtcggtgctcaagtaaggaattggaaacttcttgcttatgtctgtttgaaacgagacaacaagtatatgataatatagtgattctataagttcttatataaagagaacaagtggttaagataacttataacgatgcttacttgaattatgaaccatcctacctaaataagggtgctaccaattaaggacacataaagggcctggatgcctgtttgctgtgccataagagctagttctttccattatctctgtatatctccagtgaatactntattttcctaaccaatggttcttccattggtaaatgaagaggcgaggctcctctcacaca

SEQ ID NO: 73680 - DNA, 396 bp, Glycine max
tgattacttgcacaattggaaacgttgggtggaatcatgccttcaccaactaactttgatggtgttcaacagatgtgagccaactggtctttattggcaagattatgttacttgaccgacactaaacagaaggttggtactctttctaatcttgggttaagatttaaccaactttgttgtgatttgagttgtaaattgaagcaatcattcaagaaccgcgattgttctataattggtcatgcgttgttatgggcatagattatctcacccatgtgtgttggttcatacaataaggtgaactgcctggccatttctctgaactagaactttatatagatagacgtcgtatactataaatttcgaactcataatgtgttattattgaattctcatcgg

SEQ ID NO: 73681 - DNA, 352 bp, Glycine max
tatattgcttatatatttaggctttatataacatatctatatatgtaactttatacaagaatcaatggacatcttacccatatcttcaaccaatttaggaacccgcgtctgtttctctatatctcttccttaaaagaatcatcagcctgttcagcatttccctctaaattaacatgcagatcaatgttttcgtcatctgagattacatccctccttttgtacggaaggtatgccaactgtaaacaaaattgataattagaacaatgcatatacaatgaatgaattatacagagtattgtcatcttgagacattaatatgtaaaacagacatttacatttctgatttagagaa

SEQ ID NO: 73682 - DNA, 500 bp, Glycine max
  unsure (1)..(500): unsure at all n locations
tagagncacctgcggcatgcaagcttgaaatggaacaacggaagctctcaagaaaatttattttttctatactnttcactcggatgtccaattcaggcgcatcacatatcgagatgctcgaaatagaacaacggaagctctcgagatattcaaatggtcataactattcactcggatgtccaattcatgcgcatcacatatcgagatgctcgaaattcaacaatggaagctctcgagataattatatggtgataactcttcacacggaggtgcgattcaggcgcacaatatatcgagacgctcgaaattgaacaacataagctctcaagaaattcgaatggtcgaaactattcactcggatgtccgattcaagcgcatcacatatcgagacgctcgaaatagaacaatggaagctctcgacatatttcaatggttataactattcacacggaagtcttattcacgcgcataatataacgaggcgttcgtcatttaacaac

SEQ ID NO: 73683 - DNA, 475 bp, Glycine max
  unsure (1)..(475): unsure at all n locations
tttgagcgtctcgatatgtgatgcgcctgaatctgactttcgagttataagntatgactatnntaaattcccgagagcttccgatgtccaatttctattgtcttgatatattatgcgcctgaatcggacctcagtgtgaaaagttatgaccatttgaatatcacgagagcttccattgttcaatttcgagcgtctcgatatgtgatgctcctataatggacattcgagtgcatagttatgacccatttaatttcttgagagcttccgttattcaatttcgagcatctcgatatattaagcgcctgaatcgaacatccgacttgaaagttatgaccatttgaattgttggagagtctctgttgttcaatctcgagcgtctcgctatgtgatgcgcctgaattggacatccgagtgaaaagttattagcatttgaatttttcagagctttcgttgttcaaatcgagcgtctcatata

SEQ ID NO: 73684 - DNA, 503 bp, Glycine max
  unsure (1)..(503): unsure at all n locations
tctgagtcacctgcggcatgcaagcttcgaagggaagagagagaccgatcacgagcatatagtanggttttaaaagaagagttagccatttgctcaaggaccaaaagaaacttgtctcagcgtttatgcgagacaaagaccaacatgctagctatcatcactaagtaccaagaagaactaagtctagccatggcccacgagcatagggtggctgacgagtatgcccaagtgtacgtggaataggaggctagaggaagggtgatcgactcattacaccaagaggcaaccatgtggatggaccgatttgctcttaccttgaacgagagtcaagaacttccccngttgctagccaaggccaaagcaatggcggacacctactccgcccccgaggagatccacggacttctcgactattgtcagcatatgatagatgtaatggcccatataattaggatccactanggaacttctattctcactcagatctcgactagttataaact

SEQ ID NO: 73685 - DNA, 475 bp, Glycine max
  unsure (1)..(475): unsure at all n locations
tctgcttatgagtgcatagctctntcaagaatatagcatatcttgtttatttgcttattgcatccagcagaggtatngttacctctactctactaaatgtttccaagatctccttctctgcctcttccattnttttgttggaaattgctattggagggaatggaaaagggatatgctgctgttgtaagtcagaattaccagtagaagattcacctgcatagaaattgttaggcaacttactctntaaatttttgtcatcatctatttctggagtacagtgaagttgggcaggttcatttgcagatgaggaagatgctactggttgaggtccttgatactgctttcccgacctcaatgtaatggcactcacatttttgggattctggacagattaagaaggcagctngtcagagntttgtgattgagcttggttcagctgggtggccatctgccccatctctgattgtaaactctg

SEQ ID NO: 73686 - DNA, 313 bp, Glycine max
  unsure (1)..(313): unsure at all n locations
caacacagaggggcgctctcgacagtatcatgaacgagggtctaatattaaaggtactaccatcatacgcacacacacacgcgctctcacgtagagtgacttatgattatcagacgaagcaagtccacggctatatctgagggagcgaaatcgatctaatgagattccacctcattcattgcgataggagtaagagttactcctcttagtgcttcatattacgtgaagaataaacttgatctaatggtaaaaaagagtgttaaccagagtatcgaaatcgctttntgtgcaagcgaatcaaacacattatctt

SEQ ID NO: 73687 - DNA, 490 bp, Glycine max
aagtcaccgcggctgcaagctgaagcaactggtgcattggtaacttggatcctatctggccttgaatcagaaatctgtacctatcgcaagggtttgtggtttgtgctcctctgctgaccaccatacagacctttgcccttccatgcagcaacctggagcaattgagcagcctgaagcttatgctgcaaatatttacaatagacctcctcaacctcagcagcaaaatcaaccacagcagaacaattatgacctctccagcaacagatacaaccctggatggaggaatcaccctaatctcagatggtccagccctcagcaacaacaacagcagcctgctccttccttccaaaatgttgctggcccaagcagaccatacattcctccaccaatccaacaacagcaacaaccccagaaacagccaacagtggaggcccctacacaacctttcctctaagaacttgtgaggcatatgactatgcataacatgcag

SEQ ID NO: 73688 - DNA, 413 bp, Glycine max
  unsure (1)..(413): unsure at all n locations
gtactataaactgccatttgataggtgagaatggttggattactgctaacagtnttgggcatatttgtgatcatatttgttgggagcttgcaagttgatgacagtacaatgcgcgggatgtttgccagattcttgagatgcgcttctctcattacaacgtttgcctgtncattgcttataagtgtatgctagatattatctagatatgcatgatttaacagcttctgcatgttttgtccattgaatcatatattgctgaacttgtttacatattttggttatgtaacttctcagacattggtgattcagacaaatagtgttgagtttatgccggtttatctttcaatttccaccttcctgatgagcatctncttctttcttatgtgatcctcagtgatgatgccttcatttat

SEQ ID NO: 73689 - DNA, 477 bp, Glycine max
  unsure (1)..(477): unsure at all n locations
agcttcgtccacagatccctctggaagactatgcctgattaaacaacattattctaataacataattaaaaccaaaacttaatatgtagatccctcttgtaagattaagtttcgatcctgcttcaatcaagttctaaggcaacagtacatttcccaatgctaaagtcacctaactatgcacacaaatggattatcagaccaaaagcatacaaacattaagcattgaaggaagcattgaacacaaaaaaccataatcaattagatattaggtattcacatcagctattcattagaaatccccaactagggtgcttagccagccattacaaagaaacccaaacaataataatcttacaaaacctcggtttcaatgcacaagctgcttctcttgatgcttctagggctctnttccccaaataggcactatggtgtgctctggaatctgtgccatttcttttgcctacaatctggctaaaa

SEQ ID NO: 73690 - DNA, 473 bp, Glycine max
  unsure (1)..(473): unsure at all n locations
ctgaatgggacaccacttcatttggtcgccattgaatacttctctaatgtgttgaagnggctgcgtacgccagtgtgactatgagtgtggtggttaggttaatcaagaaagagataatctgctggtatgggttacccaggaagattatcattgataatgccaccaatctgaataataaaatgatgaaagaaatgtgtgaggatttcangatccaacatcacaattctactccttatgggcccaagatgaatagggtagttgaggctgctaacaagaacatcaagaaaatagtttagaagattaccgtgtcatacaaggattgacacaagatgctcccttttgcactacatggttatcgaacctcggtatgcacattgactggngcaaccccattctctttggtaaatgggatggaggttgtgcttccgtttgaagtagatgttccttcattgaggattctagctaagtcggga

SEQ ID NO: 73691 - DNA, 467 bp, Glycine max
  unsure (1)..(467): unsure at all n locations
agctnntcaattcattctatgtacccgtagtggtccatantgtgttntgngtattnctattcttggttcatttactttttataccctctgttgacgtgcttaagccattttacttaagtcatttctcgcttaacttaaaaataaaataaatttccaccgatcgtttgaattgtattatccgttaacttcggataatataagttccgaccattcggtcgtgccatagccacgttggaaatcaaataagaggtatgaaataatataataatcataatacatcttttagtataataaagcggaaaatcaatcggacgtttcttctctttgggattgttcattcttaatcgaatcgactaataactaaagtgaaattaaagctaaaattaacttgcctagtcaagcttcgtcacacaaatatggtttgttaagtttggcatttcaatttcttactaagtaanatgggtcat

SEQ ID NO: 73692 - DNA, 455 bp, Glycine max
  unsure (1)..(455): unsure at all n locations
cgccacccagctcacccagcgagcaggttgcttcctcttaagtaactatcttctggaggaatcttctggagggcccatgtgggcctggttgctatttgcacccncatttttactaaatacaccccctgcccttntttggtgattcttttttcgtaaagttacggaaacttacgaatttcgtaacgatacttgttttctttctgtaatgttatggaaccttgcggattacataatcatcccctttttgacttacggaatgttacggaacttcactaattgtgcaacgatgcttccttttgatttccggtgtgtcacggaaccttacggattgtgcatcaatattntcttttgatttttggcacgtcacggaatttcacaaattgcctaatgatgggtgccatgcacctcacaatgaccataaacaagtttgatgccaccaagcacacgtccccgga

SEQ ID NO: 73693 - DNA, 490 bp, Glycine max
  unsure (1)..(490): unsure at all n locations
agtcacctgcggcatgcaatgctttaatttcatacaaggaagcatgacttanctcatgtaatctaagttttggttttgaatgtaaaaaggcatgaatattatgacatgtttgagaggttgttattanaatttaaatttggctgccccatgaggaatgccttgcacctaggtagcatggaaaatacctttcaaaggtatgtatatatgtgaatatatatagcatggaaatgccttgcaaaatgttgaataaaatgccttgcaaaatatgaatatatatagcatgaaaatgccttgcataatatgaatatatatagcatgaagtgccttacaaagtgttggatgggtagcgtaaaagtgtttttcaaaatatgtgtatttgtgagtaggtaacaaaagaagccttccaaaaaaatgtgtgtatatatacataagatgtagcattgaaaggtttgtcacaaaaatatgtacatgaataggtgtcgtataatgc

SEQ ID NO: 73694 - DNA, 485 bp, Glycine max
  unsure (1)..(485): unsure at all n locations
actagctttgagagaacatggaccactcatttatnncattaggtagtcgtttctagncaagggctgaaagaccatacaagtttcctaacgatttctaattatgtgggccattaagtctatcatatgctgacaatagccgagaagcccatgaatctcttcgggggcggagtaagtgtctgccatcgccttggccttggctaacaatcggagaagttcttgactcccgttcaaggtaagagcaaaccgatccatccacatggttgcctcttggtgtaaagagtcgatcacccttcctctagcctctttttccgcgtatacttgggcatattcgtccgcaatcctatgctcgtgggccgcggctagacctaactcttctcggtacttggcgatgatagctagcattgtggtcttcgtctcgcattaacgctgagacaagcctcttttggaccttgaacaggcaactaactcctctttcaaaccatgct

SEQ ID NO: 73695 - DNA, 436 bp, Glycine max
  unsure (1)..(436): unsure at all n locations
agctntccattctctgggaagttcatcattggatttttacttttctggagaatcttcattatttcctttatcatttcctttggaatcttgctcatgaatggtcatatgttctaaagaatctgcaatgtcatctagcatattctttcttgacaatatagcattagattcatcaaaggtaacatgaatggattcctcgatattcatagttcttttattatatatcctatatgctttgctttttaatgaatatccaagaaaaataccttcatcagattttgcatcgaattttcctagattatctttaccattattaagcacaaagcacttgcaaccaaaaacatgtagatgagaaatattaggttttctaccattatataactcatatgggggtttctttaaaatgggtcttatcaaggccctattcatgatgtaacat

SEQ ID NO: 73696 - DNA, 364 bp, Glycine max
  unsure (1)..(364): unsure at all n locations
ttcaggtttctcaaaaatctttgtcaagacaaccaaatcagggatccagcagctctagggactccatttcctatgctctcttagatgctgcaaagcaaaaatcatttctaaaggcatttgacaaaacaggttatacatcatcaaataatttgttgattgcctacaaacctcgaagagggaagtatagtatatttatgggtgaaatgacaatagaggagatagagaatttcattagctccgttctcagtggagatgtacccttcagagaagcaacacggnggaagcctgtactagagtattatgtcataaaagtgggttttgactgttatggctgcatgctcatgtacagagtcaagagatacat

SEQ ID NO: 73697 - DNA, 485 bp, Glycine max
  unsure (1)..(485): unsure at all n locations
ttaagcaccgcggctgcagcttggattctataaacgacctacatcctaatattngtagcttanaataaaagcatgtgatgcaaactatttatttgattaataataaggaatgacctaacaactagggaacttataattaattaagcatgagatgtggatttcaaaattaatttttatactaaacatctgaactacccgggggagtatgaaatttaatttgtagataccaataaaattgacgtgacaaccagatacttatttggtatgattatttttcaaagtgtatgtgatacatcatgtcttaaaaaaatatatgtgatatattcttccttagaatatgtttgagaaatgactcgacaaccaagtgactcattcatagttttaaggaatttcccacataaagaaacattgaaacaaaattggttggatccaattatgacgattagtatcgctacctaaggattgttttcatgcataagatgctt

SEQ ID NO: 73698 - DNA, 457 bp, Glycine max
  unsure (1)..(457): unsure at all n locations
tctgggaggttngatggatcctcttctaatgtataattcatatattcgggcccataatctntagcaattcttgctctcttacctcttcgaggctctatatctggttttggttgtgcaagattttcactactaatagcaggaagataattggatgaagtacctccactatcccttaatttaaaaggaaatttattttcataaaaatcagcatcatttgactctatgatcactcttgcgtttatgtcataaaacctatacgctttgctattaatagcataaccaatgaacacacattcataggctctacttgcaagtttaaccctcttaggatctgggatccttacataggccagacatccccaagttctcaaataagacaaatttggttggtctttctttaatatctcatagggagatgtcttgctctttgatntggggattctatttagcacataac

SEQ ID NO: 73699 - DNA, 467 bp, Glycine max
  unsure (1)..(467): unsure at all n locations
agctngactgagataagcaccatatagacataattgtgtatttttttagtaaataagtatctgaaatacttcaagaagagaggttttgattntatttaattgttaactcttcattcttttccatttttcactttgtttttattaatatcgtatttgtttatattttcaatttatttcagagaataaagagctttgagaaaaatgaaattgaggcccacaaggcattgatcagtttttatgttttgcttgcctttaatctttgtatgccttggattacccaaatttaattatgtccagttnttgtgtgttctcaacttcttatcttgtcttgcaaaatagcattccaaagtagcatcacttagaaattnttattgtatggtattgatcgttttcattttctaatccttaacatttgcccttcaatgaaatcaagcacttattggcangccgaatagatgatttcacat

SEQ ID NO: 73700 - DNA, 493 bp, Glycine max
  unsure (1)..(493): unsure at all n locations
ctaagcttcaagaaaatatggcctcagcanactccttatttccagaagggttttctatcatagacctccaatctttaatggagagggttaccattaccgganaacccgaatgcaaattnttattgaggcaatagatctaaatatttgggaagccatagaaatagggccttatatacccaccacagtggaaagagtttcaatagatggtagttcatcaagtgaaagcataactatagaaaaacctagagatagatggtctgaagaggatagaaaacgagtacaatacaacttanaagccaaaaatataataacatctgccctgngaatggatgaatatttcagggtttcaaattgtaagagtgctaaggaaatgtgggacactattcgattaacacatgaaggaactacagatgttaaaagatctatgataaatgcactaactcatgagtatgaattatttagaatgaatgccaatgaaaatattcanagcatg

SEQ ID NO: 73701 - DNA, 431 bp, Glycine max
  unsure (1)..(431): unsure at all n locations
ttaagtaacgngctgctcttattaaattatattatgttaaatttatttttttaacacaaataggtgaaaattataccaaatattcaactcggcctatgtatgatcaggttgtatttagattaaggacgtcagtcaatataattacataaaccttacctattaaattttgattgaattgagtaatatatttaaatgaattattaccgattgacccctgaacactggtatgacctacctttgtaggttccacacttattatttatattagagatctctacatgcaatccaatgcttggttgctacgctcatgctacgtatacaccacaccatggtgcggagagaatgatgatacttccatggtttaaaccgggtcaaattgtttgctggattattatacctgagctagagtttcaactatattggttattcat

SEQ ID NO: 73702 - DNA, 326 bp, Glycine max
aacatacttgattgacttgatttgcttgcctctgacccagatagatgacattctcggtatggaatggctatcttcccaacatgtcatgtacaactattttgataaaactgtcgcacttgatgattttcgaccgagttacgatatgatgatatctctgccaaccaagtcgtgacattcttaaaagaagatggtcaagtgtacatgatcttttctaacttactgacagagacaaaggcttctatgtgtgacctccttgctgtcagagagatacctgaagtgttacctgaggatatatccggtctgccacccgagagagagatagagtt

SEQ ID NO: 73703 - DNA, 465 bp, Glycine max
  unsure (1)..(465): unsure at all n locations
cgctntganatngagaagctaaatattgaatgggtgttattatcactattgagtgataatgactacaaaatgcattcttgatgatagaatgcctatatataacacacgtatttggtcactcaactcaccccttctaattttgtctatacaccatcttcagagagagtgagagcttggaaaaatcaaaacaaggcaatcttttcatggtaatggctgaagatacattttgatttttttttctgcatttgttaatgacttgtgtttcgttttgtagtttgtaacatcacaggttaaaaaaaaaaaattagtctcacatttggtatcatagcctcagttgcctcaacctcatccattttcggttttcggtatctttccgatgacaagatattgtaatatgcgcaagccattggatacgtgaagggttttatgatatatattggttctcatatattatatccttattct

SEQ ID NO: 73704 - DNA, 487 bp, Glycine max
  unsure (1)..(487): unsure at all n locations
tctacttatgtggcagggcgggcttccttcactttcttggctccatctctagtcttgaccactggtcttccttcccgcgatgcttcttttcatgtccgcctgagtgggcttatagcctaaaccatacttcccacgatttccttgagtatttatcaggctagttatgccgccgttgtctttgcctaaacccatcccgggttcataaccgttccccaacatatactcggccatcattaccgctgcatcggatagacaaggctgcccaaagagggagtccacggaggaaatgctgaccacctcaaaagactggaaagcagtttctaacgattcttctgcggcttccacataaggcatggaggatgggcagcttaccaagatgtcttcctcgcctggcacgatgaccaagtgcccctccactacgaatntcagcttttggtggagtgtagaatgcacaactcccactgagtggatccacgggcgccccaac

SEQ ID NO: 73705 - DNA, 448 bp, Glycine max
  unsure (1)..(448): unsure at all n locations
ctaagcttctccccatttttattatagtgggagaatgtgaagagaaattgntttctcntttggaaancagaancacttaatattagtgagaaanattggttccgcgaacaaaatccaaaccgatgcgttttcgtaacgtttccgagagtgatttcgcgaaagttttcgaccgttcttcgacgttctttattggttctttgtcgttcttcggtctttaaccgggaggttcctagatcgaactttccattcattctatgcacccttagtggtcctcatttgttttacgtgcttcatttacattcatttactttccgaccccctttgacgtgcttatcatttgcttaagtatttctcgctaatcaaatatatatatttttcaccgcatttgatcgaatatcgtgattttgttaaagaatccaccgtcgtcatgccgactacgtgaaccaaa

SEQ ID NO: 73706 - DNA, 473 bp, Glycine max
  unsure (1)..(473): unsure at all n locations
agctntcttatcatntggatgctcattgcttttattattcgaatgagaatttctgatcctctacacccaattctaactttcctttccccatatctactatacagttggtcgtggacatgaaaggacgtcccaagattatgggaatgtcaggatcctcctctatatccataaccacgaaatctataaggaatacaagctgcttgacctgaatcaacacatcctcaatcactccatgtggtctcgcgatggagcgatcaaccaactggagggtcatgcgtgtgtgtgggcattatctctatctctccaagtcgccagcacatggagagaggcattatatngatactagctcccaagtctatgagagacttacccacaacaacctcgccaatggaacacgatatagtgacacttatatgatccctatgcttcggtggaaggatgccgtaaatgacaacactacaatttccttccat

SEQ ID NO: 73707 - DNA, 472 bp, Glycine max
tgcttgtggagcttctatggaagctggatccttgagctattacgttgttcttcaatggtgactttacaccatagagatgccgcggacggcacacgagaatacgagaggggaggcaccatccactatggaataatccacggaagaaggagctctcccaccaagaattgccttggataagaagcttgaagaggatgctctaatggaggaaaagaaagagagaaggtgggagcaccatatcgaacgaataaaagagggagagaagtggaactctgaagtatgtctaacaagactctcattcatcaaagctacaaccagtgttacacatgcttctattcatagactaggtagcttccttgagaagctgtcttgagataacttccttgagaagcttctatgagaaaacgttcttgagaagctagagcttagctacacacacccctctcataactaagctcacactcctgagaagctt

SEQ ID NO: 73708 - DNA, 475 bp, Glycine max
  unsure (1)..(475): unsure at all n locations
agcttcgcttatgcgaggtgctgtaatccaatatcggtcatgctcagtgnngnctaatacagagcatgatgatgggaggcagaacaacaaatgttgtatataagataagaagctgcaattcgtcctttgcaatcacagctttcctaagccaaatgaacaaacaaacaacgaaatttaaaaaatggagaaaagggttaagaataacaatgtccaagcaaatgtttggacttattggaaaagaacatggtatggaagaatgaacatataataggggaatgaggtccatagcatcaacttcatatcagatgaaaagaagagagggacggtggaaatttaagccaaaaacgagagagagaggaaatggatctaccatatttacatttcgtaatggattggagatattataccttatattcatctaattatagagtgtgggtagagccaacatatcacccatggctcaaggatcgtgttg

SEQ ID NO: 73709 - DNA, 501 bp, Glycine max
  unsure (1)..(501): unsure at all n locations
acacgaaactaagctaagggtaatctgacacacctaaagattgagggttcgacttcttttacgatgtctaactctctagctaggacactggtcacatcaagggtttcctattcaagctccaactactaagctaactctaatggttgaaactaaactcacaacaagattcttaagaattctacccatctcttgtacctcgaattcaactcctaaggttcccacaatatatcaaactaacgataatgcctccaaaacatgaaggtgaacaccatggctaccaactctagatcatacgtaggataaatcctttcatgagtcttgagttgtcgagaaaacataggccgctacttggcctcctacaagtactcctctaaacataaaacttactgtggatattntactactccaacaaggacctactcggctaaggagcactcaactggttacaatgactaacttctctatgatactcagagtttactctctatatgggacctacaa

SEQ ID NO: 73710 - DNA, 466 bp, Glycine max
  unsure (1)..(466): unsure at all n locations
agcttcaccggatgatgccgatcgaacatntcttaatcgatatcatccaatngntattcagggattgaatagaataaacaatggccggcgtcggtcgttatatggccccgactgatatctttcagccgacattgcgcaatttcttttacaaacgctggccgataatgttattttatttacggtagaagaagttttttgatttggtgttgcctaaaaaatttacaacgtatgacggctaggtttttccgtgcgagctcaaccgagggttctttccgaccgacactggcatgttgttcttctcatttaagaggataagaaaacgttcgcccaccccggcaaaaacaacaaaaaaaaataaaattattcacggaaattgatcgaaaataatgatatcggacgtctgtatggacagatgaccgatctatgtcaaaatataaagcatctccggatcacgcccatcatacat

SEQ ID NO: 73711 - DNA, 444 bp, Glycine max
  unsure (1)..(444): unsure at all n locations
ntctttggaccttgaacaggcaactaactcctctntcattttcattcttgtgctcgcgactgggccctttcttcctttcgcaacttgagttcactattgctatcccatagagctccgcgaaatttgttccggccatactcttccttgcgagccctcttggtctcttgttcaagggctcttgcggtaattgcattctcttcccgtaacccggcacactccttccgaacgtgtgtagcggccaacttgaacttctccttggcaagttttgcctttcctaattcgcttttgagagcttggacttcttcgtcctcctccggtgcttcaaaactctcttcgctgacgactnttaactgggcgagccaatctaaacctcgtatatgaactttcagccattcatggtaaccaccaatgatgccattacgaatgcctctaagctcttgatct

SEQ ID NO: 73712 - DNA, 492 bp, Glycine max
  unsure (1)..(492): unsure at all n locations
ctcagagtcacctgcggcatgcatgcttcgtcctcagatccctcttggtggactatgccctannttatacggcnccttgtaggtttnagaactaacttaaactgagtnttcgtccacagtatccctcttgtaagactagactctgctcaagtagcttatagaagtttagcctaatttagcctaagcttcgtctgcagatccctcatgtaagactaggcctaaactaaatagcattattgtaacaacataattaaaaccataacttaatccgcagatcactcttgtaagactaagtttcgatcctgcttcaataaagttctaaggcaacagtacatttcccaatgctaaagtcacctaactatgcacacaaatggatgatcagacaaaaagcatacaaacattaagcattgaaggaagcattgaacatagaatacataatcaattagatattaagtatttacatcagctgttcattagaaatccccaactagg

SEQ ID NO: 73713 - DNA, 434 bp, Glycine max
  unsure (1)..(434): unsure at all n locations
actnntttctctcnttttctctcagngggtcttctttcttctttctctnnncaannnngaacttccttttgcttgaacaaatttcatggatcttccattgatgatgatcatggaaggccaaacactcaatcaatccaaggatccactccaagcaaggctgaatttgagttctggtttagtatttctaatccatgtgaatgttcatctttttcttcaatcctattttggattttcatgattatgaatatgcttaggattgaaaacaaattagtttaggaatttctttcctaattntgactttaatcacagattgcttagatgatatttcaacctaatttgcgatctcaatgaatttagagattgattcgattgaaacatttctaatgacattaattgaactctcacaacatgatcattttctgcagaactgtgat

SEQ ID NO: 73714 - DNA, 494 bp, Glycine max
  unsure (1)..(494): unsure at all n locations
ttaagtcacctgcngcatgcaagcttcaagaaaaagatggcctcagcacattccttaattcatataggaattctatcaatagacctccaatctttaatggagagggttaccactactagaaaacccgaatgcaaattnttattgaggcaatagatctaaatatttgggaagccatagaaatatggccttatatacccaccacagtagaaagagttacaatagatggtagttcatcaagtgaaagcataactatagaaaaacctacagatagatggtctgaagaggatagaaaactagtacaatacaacttaaaagccaaaaacataataacatctgccctgagaatggatgaatatttcagggtttcaaattgtaagagtgctaaggaaatgtgggacactcttcgataacacatgaaggaactacagatgttaaaagatctatgataaatgcactaactcatgagtatgaattatntagaatgaatgcaaatg

SEQ ID NO: 73715 - DNA, 425 bp, Glycine max
  unsure (1)..(425): unsure at all n locations
tgtgcaaatcaaatcactcctacatttcatctctagcatgtattttctttctttacccactcctcacgtttggttntttagggaaaaacaccataactaaacgcgccgcaagggatccctatcgcaccagatccaaatctagaacgatgggtgatcaagaggagacgcatgaacagatgaaagccgacatatcggctctgaaagaacaaatggcctccatgatggaggccatgttatgtatgaagcagctcatggagaagaacgcggccactgccgccgctgtcagttcggctgccgaagcagacccgactctcttggcaactacgcaccatcctccctcaaacatattaggacggngaagggacacgctggggcacgatggcagccctcacctgtgatacaaccgagcggcttacccttatgga

SEQ ID NO: 73716 - DNA, 428 bp, Glycine max
  unsure (1)..(428): unsure at all n locations
atctataattataagagagcacgaatcctttttactccatttntnngncaacncaacacactgtacctttgtacttagctttattctaatagcacacacaccttttatttaaaacttacagtgatgtttttatcttacactctatttacttattggttatgtgtgctactatctcttacccatataacttggcaacccaaaaaaactcctccaaatgtggggcaaatagctctgaatcctatagctctcctataacctcagagaaggtatatggagatgacattttaaggcttgaggttcagtttaaacatgtcaattcttctgctcacacgtgggcgcaaaggatataacataaatgtattaggtatggtttcggcctagtacgtatgtaatactatcatggccttcatcatcctcaattgcttaca

SEQ ID NO: 73717 - DNA, 235 bp, Glycine max
aaacagcgaagagaccaacgattctcgctatcgccaaaggacagcccggccacgccaaccgaacaacacctagccaccgcgcaaagatccaagacacaacagcaaaaccacatagccacgccgccaaaatgacgaaacacggcaacgagcaagaaccaaacccaatgccaaaaaaggaaccaatgcgcaaagacgacacaaggcaccaaccaaaaaagagacaaaaatagcaaag

SEQ ID NO: 73718 - DNA, 427 bp, Glycine max
  unsure (1)..(427): unsure at all n locations
agctntacagcagatattagtaatgaccctctaatcnatatttaaaataacntaatgccattaacctagggaattaaaacaaactaaatggctgagtgtaactgaaattgttggcaaccaaaagtcacccccaacagccaacaagtcagccaccatttggtctcccaaaaggctgatgcctatgttgccaattgggcccttattacaacttgaactatagcccttttagttgattaacccaaaacatatttttggtcacccaactttacaaggattgggccattatttagacaaactaaacactctaaaattgaaataaagtggtgtctattaatcctccatttgggccatgatacaaatcacaaccttgtacagcacttgttgaagagcttacttggcttaccttgctctagcccttttcataagt

SEQ ID NO: 73719 - DNA, 429 bp, Glycine max
  unsure (1)..(429): unsure at all n locations
ctgcattggaattgcgaaagccccactccatcattaggattagtattctgacatctcanacaaacaaatcaaacgtaacaagacaatntatagtgctgtttgaatacctcacccactcaagtgtatcacacaattatggcttttctctaatgaaacactcttgccttttaccactctaattcccctngagttcttaggcaattcaagagattatggccacaacaaagaacaattcaccaatatgtgtaaggtaaggctagacaaggaaaaggttaaccaagaaaaaggctaacaatgtttttaggcacaaatgaaggaaataaaattcagaatttaagaattcaagtaacaatccttcatgcaaccaatatattaccttaaagagatttttttttataagttcttcaagcatgaaccattcagcccaat

SEQ ID NO: 73720 - DNA, 466 bp, Glycine max
  unsure (1)..(466): unsure at all n locations
ctgtttaaaatatgatttagattataattatggtcattttattttngaactcaangntaaaatcttaattcagcacacacccatcattgtgatctttaatttacattagataatgtgatctcgaagtttaattaattattttagaggctttaaaagttatgaaaaattatgaaagcttaataggttatatatatataaaaatctacatcatatcgatggaaaattcatatttaattttattctgcttctgcctcagctccatctattactcttgctcaacaagataatattagcagcttagatattgagcagttacaaagtcatcttggacacaagctttctggtcacaaatatntactagtattggatgatatatggggtgatgatcgtgcaaaatggatagtgttgaaagatttaataaaagtcggaagtctgtgaaagtggaagcaatgttctagtgacaaca

SEQ ID NO: 73721 - DNA, 451 bp, Glycine max
  unsure (1)..(451): unsure at all n locations
ttaagcaccgcggctgcagcttntctactgcataagagtaaaataaattctttttgaattatgaacatagttaatatttataattaactaattgttgaaactacatctttcataaaacatttctcaaaaattgtaaactgcaaaaggaactttaatcagtatcactatcatcccaatccttttgtcttctaatcacaatntcccagattttgtcaccgtgtctataataaaaggagacttcatctccatgatcaaagtctctttctgcaaggaagtcataccatggttgagcaatggctttaggagcaatgccagggttgagagtnttaacaggccattgcaatggagggccaaatcgtcttaatactgtcatttgatggccctaagcattaagaggtatttcagtagatggccgaagtttctgcaaataaaagaaaagtntaaataatat

SEQ ID NO: 73722 - DNA, 422 bp, Glycine max
  unsure (1)..(422): unsure at all n locations
cacctatcttnnatctggaagnaccttgcttactcctttaattgttaacaattcttaacttanatagaanatataaaacacttggatcaataatggtgtgtaatagctaggctagtctaccgaattgcagcaagtaatatagaggtaagaatcaacagtgtggacaaattgcaactaaactagaaactttcatttgcagttagaaaattcgcacaaaatagggggaagttcagaaaacagggaaaaattcactatctaatggtggtagtgtcctatntattctaatcttcccttatgcatccaattgcattctcaatgcagaattcaattttcaattgatgaccaaattcagaagttagttctattgcaatttcttggtaactaaaccccaaccctcaaccgaacattcttattccatgggt

SEQ ID NO: 73723 - DNA, 403 bp, Glycine max
  unsure (1)..(403): unsure at all n locations
tgcaagcttancaattcaatgacaataacttttattctttgtccgattgagtcantttataattcttgacgctagaaaaagaatacagaagctctcaccaaatttaaatgacaataactttttactcagaagtctgattgtgtcccgtaatatatctagatgctcaaaattgaaaacagaagctctgagcaaattctaacgacaatagcttttgactcggatatccgattgagtcatttaataattcgagacgctcataantgaatacagaagctctaagcaaattcaaatgacaataacttttgactcgaatgtccgattgagtcatttttaatttgagacgctcaaaattgaatgcaggagctctcaccaaattaatagacaaaaacttttttctcagaag

SEQ ID NO: 73724 - DNA, 490 bp, Glycine max
  unsure (1)..(490): unsure at all n locations
tcagaccannagcaactcaaatctaagtatctaanacccctcaatttattggattttcaaggtttgagaagtgaatatgagaatggngtaaatntggagcaaactctcacctcacacaagtctataaccttaatctanacttgctcaaactggttttacgcctaaaattccaccaaatcaaaatttgactcctcaacacccaaattttaccctaaaaatggctcttgccttcactatggtcttttgtttttctcctttgcacatcccaagctttcccacagtcctaaatgacatttcaaactaggattaactcactttaacctccaatttctactgaatccagatttagcctttcaaaccctcaaagcatcacacttttccactcataacactacattctcactttctaaccctaagttaactatacccttcatccctagcagtgttccatcagcaatttcagcacatagacatcacaagcatcatcata

SEQ ID NO: 73725 - DNA, 170 bp, Glycine max
ccaactaccttttgaagccttactccatgattgattgcgcaccactgtatcatttattatctacgttcttttgatgtacaaaaacagggtttgcgcctattgcatttatttatcctaaatgcgccaagtgggagatacctgacataccccaatgggacaatacttgacca

SEQ ID NO: 73726 - DNA, 486 bp, Glycine max
  unsure (1)..(486): unsure at all n locations
aacaacagtcccaaaacctcaatttattcgaaaccaagtgtcattatttctatattaccaattnntggagtcgttaatgttgaatcatagttntgctttctcatctgccctttgtctcatctctttaccttacaactcagtcaattctatcattaccctttttcaatatgcagaattagcaacatgaaaacatatctaatccagcaaatgccaccatcaatagccaggctatggtccagaaccaacgaaatgcctcatgtcccatttctttcatcttctaaatntattgtagcttctgcagatttaaaagaagcatttggttcttcatttcaacatgaatctactatntagtttataattcactcaattctgcctttaatcattntcaacatgcagaactatcaacatgcaaagatatctaattctgcataagccaggatcaacaggaaacgtatcatgcagcagatgcgacattctcatgctcag

SEQ ID NO: 73727 - DNA, 475 bp, Glycine max
cttaagtcaccgcagctgcagcttctcctatttgctataataggggttgaattgttatgaaaagggttcagccccttaggcacttctttctctctcgaaataactgaggaaaattattcccgtgaagaaaatccaagccgaggcgcttccgtaacgttgtcgtaacgtgtccatgagtaattacgcgaagattctcgaccgttcttcaagatccatcattcgctcttcattttcttcagtctacaatgggtaagtacctcaaaccaagcttttcaattcgttctatgtacccgtggtggtccacattttgttgcatgtatttttattcttggtgtcgtctactttttatacccccttgtgacgtgcttaagccatttatttaagtcatttctcgcttaatctaaaaatagaataattttccaccgatcgtctgaattgtatcatccgttaaatttggttataatgaattccgacc

SEQ ID NO: 73728 - DNA, 379 bp, Glycine max
  unsure (1)..(379): unsure at all n locations
cttaaatatatggagcaattttggtttgttatcttgctcgattacgttgaattgngggtttgtatgggatggccctatgcctataatgcattttgaaacaatgggacatgccacattcgccccgttcttttgctattgatgcctaaacgcgcgcccaccaagtgttcggagaaatgcctcaatggcattagcgcgtgacttttgtaaggaaacagcccatggggcattttggtttgtacatattttctattttttgggacatgtattcattcctgaataaggctagagtaattgccccacatatattctatgcctaggaaccaaagtttttatgcataagaacacaagaggaggtgcatgtcgggtaaagttacccttt

SEQ ID NO: 73729 - DNA, 492 bp, Glycine max
  unsure (1)..(492): unsure at all n locations
atcttaagtcacctgcggcatgcagctcgataggaagaagttaatattgaagaggatgnccttagtgatgaagaaagctgccctcacatttccttgcatgaaggatgcaactgcagctcattgagctcgataaggaagaagtaatattgaagaggaagccaagagtgatgaagaaggcagtcctcacattttcttgcttgcaattgaaggcatggaaggaaccaccactattataatacaaggggcaagtgggacgaaaaatgctgcatatcctcattgacaatggctgcacccatgatttcttggactatgctttggccaatatgttgggatggaaggcgaatggggatgaattatctgctgtacaggtagctggaggaataagatcgtatgtgtattggatgtggaaaaactttaaatggagaatgcacgatgaagatctacatctgatttgacggtaatggagcttcatacttatgatttggtattggg

SEQ ID NO: 73730 - DNA, 483 bp, Glycine max
  unsure (1)..(483): unsure at all n locations
tatagaatntataataagagaacaatgacaaatgaagaatttattantgtttctttatgagtctaatgctatttctccaagaaatgatattttagatgatattgtagaatctttagaacaaatgcacattcatggacaagattctaaaggaaaaggataaggaagcaatgaagatcctccagtataagtacaagcacataatgatctttcagagagtggaagcttcaagagatcattctttngacaacattattggtgatatctcataaggggtaacaactagacactctctcaaatatttatgcaataacatggctattgtatctatgattgaacctaataatttaaatgaagccataataaatgaaaattgaataatagctatgcaggaatgtcataccctaatttcgttcggcgattattatgttatgatatacaacctttgaatggncgcttctagatactttgcaccctttgttgcac

SEQ ID NO: 73731 - DNA, 473 bp, Glycine max
  unsure (1)..(473): unsure at all n locations
agctntannaaatgtacggcattggaaccttcttatgantatacttctctngctccagcctngattataagggagaggaattcaaggcccttgttatgcaattcatgcccaaaggtaactttgacgtgagtttatacccagaagatgttgagtcgggatcctctctaaccttgttgcaaagattgaacattcccattgatgttgcttcagcaatgaactacttgcaccatgactgtgatccatcagtagtgcattgtgatctgaaacctgccaatgtccttctagatgaaattatgattgcagatgtcgcagattntggattggcaagtgatgcaatcctactccgcaagggcattggatagaataactccaagtagattgggccagagatgcaagagaaggccctangagtcttatgagccttanggtataattcgggcccatgggctaagtacgagcccgcttatctttgt

SEQ ID NO: 73732 - DNA, 426 bp, Glycine max
  unsure (1)..(426): unsure at all n locations
ctcagctcttgacttcaaccatgctaatccancataagcttgaccttataangcanganaaagcgcaactcctaatgtcccgcccatctcctctatcaagtactccatcttcttctccaaagaggtgtgattatactgcagtatctgtggctgcttcttgctcatagcaacaatgtcttcacacgaaaacccataattcaagaacaaactaatgaccttctgcatgttcccacagtttgtcctagtagcagacctaatcgccattgccaagtcctttgacctatacctatagccaatcttcaccagcaacaccagcttataagcgatgttctcattgaatgaaatgctcagaaacgtgggccctttaatcaagaacttgaagatctcatcagaatccaacccacattccttgagaaactgtattct

SEQ ID NO: 73733 - DNA, 469 bp, Glycine max
  unsure (1)..(469): unsure at all n locations
agcttgttgctcttctccacaacaacacgtgagaaaataantcttttgatagcnncctcttacaccctcgaatcctgtgggctgatacaagaactcccgcatcacacacatcctcaatagcacgtgtgctcgttctgcaagtgaatcaaattccatgctccatttgaaaaatggaccccagcttgtgtctctctaaacagatcaggagctacatatgtgtgttccagagaatcaattttagatctttgtaggaaagaggaatccaagtcactagcaccgttaaaccaatcagactcgcatgaattatcagtggtataactgctaaaactctcagaactagtaggtccaccaaaagtatcatctgggtcaggattatcattaaattgaccagctgatgaacggtaactactaaccaatgcatcatagaatgaattatcagcagcctgaagtctaaactaacctgcacatg

SEQ ID NO: 73734 - DNA, 310 bp, Glycine max
ccgcacagagaggagttaaatctaaacacaaccagggacggaacagaaaacggagccccgaacccgagaactgacaacggaaagaggcaagacatccagacaaccagccgacacaccataaaacaacaagcaagccaaccaaggaccgaggcagaccgcataacccaagaaggccagagagagccagcacaaatctcgaaccgccacccagaatcaaccaccgaagccacaagaaaaacaacctgacttgcgacaacaatgcacacacgccacaaaaaaccacaacgaaacgaccgaaagatcgcgcaga

SEQ ID NO: 73735 - DNA, 479 bp, Glycine max
  unsure (1)..(479): unsure at all n locations
agctntntagctaagtgggtatcttcaattaaaacatgtgttttattctcttcaaactcatgtattcattccatacttagagattcatgcaaaaaaccattacttattgctagttgttctctcacaattaaagatcacactctcaccgggctgcggctaatgcattccttcacaatcaacctgacaaaccaactaacatttttagtcataatcctaattccatgttctttctcttctaataacggcatgctcattcaaggcatatgatttgcgcatttcagttcactaacatcatacaattgatcactgaatttcgaaacaaagcatcaaaccactggataatatcaatgcattgttcaatcacgctttatacaagctaccaaacaaccaanaaccataaactgaaattcanaactgaacttaaatntaaaagctgaaacataaatctaaattataaaatgtactaaagacataataat

SEQ ID NO: 73736 - DNA, 480 bp, Glycine max
  unsure (1)..(480): unsure at all n locations
ttctatcaattcaatacttcatcatgagttctttatttattntcgtacttaatgctcttatttgattggtcatcttatagatgaattcaggaattgacttgtgctttggtgagccttgttgaaactcgaacatgaatcaagtacttaattaatattatctctagggatagaataatcttggttaagccttgctaattctcgaccattaatgttgatggctcgcatcgatatgtccaaaggattgngtatctagggatattcattcatcaaaatctacatcaccacccaagtctagtatttctatctttacgtaattatnttattgtcatttaatttttaatgcaatttattttatcttatttatttcgtgacaatcacganataaaaatacaaaaacctagtttttagataaataatcacatgaaatccctcatttattcctttgggagacgacctgnatgatatttcaattactacatt

SEQ ID NO: 73737 - DNA, 345 bp, Glycine max
tctgccacctgtagaatatgagagtcgtcaacagagaatggcgctacattgtcgggtgtgtgctcccccttatcgtgcatgctgatgttttctaggcccattttagtctggtcccgggctagctggtcaacagggttctcatggtggttgtgggtctgtttctttttgtgccacgtgctcttcgagtacactctccaagagcacagggtagtagctggagctttgttatgaaatggacttgaagattgttcatctggtgttggcttcgtggggaaattatataggcccaaaagtgctggcccattatcaccatcagtctcctttaagggtttgtcattattatta

SEQ ID NO: 73738 - DNA, 492 bp, Glycine max
  unsure (1)..(492): unsure at all n locations
ttaagcaccgcggctgcagctgtaacaacttggcctatccagataagatcagtattttgggatgtcggngccaagttagaataagatagaacactccaggtttgggccagagtggtaagatctttcctcatgagcttccacggtagaccctcaatattaagtacaaatcccctcccaaggatacacagccgggctgcaagctcttgaggatcaggcctcagtctagcaaacctggagtaagagggcaagctctccccttgctccacgaccgctgggtctccaaaaaggtgttgagggaatcaacatcaaattttatcaggtgccctcgaaccctaacttgctntggttctttgtcctcagggacatataggtttgcatagaattctttgacaatggccacatcaatgcttccctcagtcaagttggtcaactggttatgccagtttcttctaatcaattctcttttgaaatcatcaaactcagtgatataca

SEQ ID NO: 73739 - DNA, 485 bp, Glycine max
  unsure (1)..(485): unsure at all n locations
ctcagctatgctgaagcatctacaatagacctcctcaaccttagcagcaatatcattcacagtataacaattatgacctctctagcaacagatacaatctcgaatggaggaatcactctagtctcagatggtcaagccctcatcaacaacaatagcagcctgctccttccttccaaaatgttgctagtccaagtagaccatacgttcctcctccagtgcaacaacaacaacaacaacaacaacaacatcaacagagacaataatccactactgaggcccctcctcaaccttcattggaggaattagtgaggcaaatgacaatacagaacatgcaatttcagcagaagactagagcctcaattcagagtttaacaaattagatggngcagatggccacccagctgaaccaagctcaatcacaaaactctgacaagctaccttctcaatctgtccagaatcccanaaatgtgagtgccattacattg

SEQ ID NO: 73740 - DNA, 405 bp, Glycine max
  unsure (1)..(405): unsure at all n locations
cttgatgaggctcatagctcatgagcagnnnccttttgatattattctagccggnngnntagnagagctgctcaatgaccttgaactcgctcttgtgaataatgcggaataactcgcctgcttcctcgagtgttacatcattctcgtcacatccatcccttatctcagagagacctttcattggaacatccttgttcggagcggggatcactttgtcattttgcccttccgctatcttcgccttccttttagcgtctgtccgctgtgtcggcaggtctaggggtgcgaacacgtgaccgttgcgggtcatgccactcagcctcgtgatattggttaccttggccgacaacgtgctgatgtcggtggcttcttccttcctttcgcttagaggcgcataccttcacg

SEQ ID NO: 73741 - DNA, 398 bp, Glycine max
gacgacaacaagcctatgctctggacacagcttacaaattctctgcacggaactgatagtcaagaataagataatagacctgaataagataaaatagtacgggctatgaactacaaggaattgactacttactcccaaagatcgtcaccaacaagaagaatgtcgttttccaatcaaccactcccactgttccttttcattccgcctaatcattgcactgctaatagttataattaacttctacagtcatctataatttacagtattcaatatgtgaatggccagctttcttcttggcactgctaatagttatagttaacttcttctgtcatcagtcaatgtctttgtgaagtgctgaattctctgtttgagctgcaatctatatcatgtatacatgc

SEQ ID NO: 73742 - DNA, 477 bp, Glycine max
  unsure (1)..(477): unsure at all n locations
agcttgaagatgntttggcttttacatgcccatcttttttgagtggcatttgtattggttgttatcttgattgttgcatcttantacatttgatatatgttntgtattatgaatcgtcatggttagagtgaagaaaattttctacgttagaaaaatttcttcagaggcaaaaaatatctattttaatttattacaacaagttgttggatgcttgtagagttaagtatcatatcgatttaatcgattattgtagcactttaatcaatttcactgttgtttgagaaagtgactaattttttcagaagtctttgctttaatcgattaccagataagttaatcaattatttctctcttgtttaagttattcagaggtgaacaagaatactttaatcgattactttgatcatctaattgattacattattcttgaggtattttccagaatgtggatgaacactctaatcgattaattagata

SEQ ID NO: 73743 - DNA, 491 bp, Glycine max
  unsure (1)..(491): unsure at all n locations
ctcagcttatgctggaaagggtattatgaaattgagatgcccgattaatctctatttcctagttaaccatgcattaggtaccatgttcaattattntgtttttaagtgaaacgggtttatgatcccaacatggttggctcgtggtgcctaacacatgaaactaagaatgtagtgtgaagtttcatgcttcccctntttttgtttttgttttgtagaggaaaacgcaaggatgagcaaacatganaacaaatggtatgcaattttgcagaccaaaaagtttgttgaacgcatatgcatgatgatgccatgactcatgcaaaatgtgaggctggaatatgataacggacaaatgcangatatgcccattatgatgttatgaagagatgcttatgcgatgcatgatatgaattgcatttacggacacgagagcctagaanattatctcttcttacttgcgcatntgggggcgcagtgccccatgtgtacaatta

SEQ ID NO: 73744 - DNA, 473 bp, Glycine max
  unsure (1)..(473): unsure at all n locations
agctnntagaaatgatntctatacaaaagttagtcgtatattgcaactaacaaggatgaagctttaagtgtgattcctttctttntcttatcattctcctcatgttgattcagtctcattagttccatttcgtgttcctataactttccaaataaagttgcaagagacatgttagaaagatcccttgattctgtaatagttgttacctttggttgtcattccctacttaaacatcttagaactttattaataagatcctcattgggaaatatctttcctaatgatgcaagatgatttactatgtgtgtgaatctcttttgcatatcatgtatagtttcatttggattcattctaaacaattcatattcatgggttaaggtatttattctagacctttntacatctattgttccttcatgggttacttgtaaggtatcccacatatcttttgcactcttgcaatttgatactct

SEQ ID NO: 73745 - DNA, 434 bp, Glycine max
  unsure (1)..(434): unsure at all n locations
tgcctcanagaggtccaggaaggacaaggcggccgaaggaactagttcctccccggagtacgacagtcaccgctgtaggagcgttgtacaccagcagcgctttgaagccatcaagggatggtcgtttctccgggagcgacgcgtccagctcatggacgacgagtatactgattntcatgaggaaatagggcgccggcggtgggcaccactggttactcctatggccaagattgatccagaaatagtccttgaattttatgctaatgcttggccaacagaggagggcgtgcgtgacatgagatcctgtgttaggggtcagtggatcccgttcgatgccgacgctatcagccagctcctgggatatccgatggtgttggaagagggccaggaatgcgagtatggccagaggaggaaccggtctgatgggttcgatg

SEQ ID NO: 73746 - DNA, 469 bp, Glycine max
  unsure (1)..(469): unsure at all n locations
agcttatatgaatgataatgatgattctttccctctgtgataggttcgacaggtttctaaagagaaagggaaatcaaagaataccacatttcaaccctaagaagaatntcaaggagggtgaagaatcctctccaattccaagatgctttgaatgtaatcaacaacgacacttgaaaatggaatgtcctacttacaaaaaaaaatggataaccttgagaataaatctctcaaagaaaagaaagcatacataacatgggaggagaatgacatgggctcatcaagtgactctaaaaatgaagatgcaaatctaagtctcatggctagagattatataagtgatgaagagatagcatcctccaatcttgattcaactatgtcacttgatgaacttcaatatgcatttaatgattcgcataaagaatgcattaaactttgcaagacttttttcatccaataagaaagacatttc

SEQ ID NO: 73747 - DNA, 366 bp, Glycine max
  unsure (1)..(366): unsure at all n locations
aaaggaaaaaaaataagaaaaaatgataaanaaatgctaaataaatctatggaaaaaaatcacatatatgaccctaaaagaaaaaaagaaataaaaatggaatcatcatgtaggtgatactaccatttttcttagagatggaaatcatnttgttttgcataatgcttctttgatcttggagtaggagtttttgcttaagccttatcctatgcctatttctacaataaagaagtaactctcttgcattttctcctatggccaaagtctctagccaaggtttaagaaagccaaagaataagtgagacaataattcatagctacccatggatctaggaagtgcanataaacttatatanttttggaagt

SEQ ID NO: 73748 - DNA, 471 bp, Glycine max
  unsure (1)..(471): unsure at all n locations
agcttcaacctctacaaaggctttntctcttcttgcttattttgagncacttcntctgccagctcaccaacctggatttttgcactttggaatgctcgttgagttgatntagttgtttccttgaattgcatcaacaaattatccagattggaacctctttctgcttcattntgatagtagggttgtaactctggccccccttganaaattttctattgagtagctcttgccaaaatgaatttcatgatttttcattgaattttgattggcttttgagatatcatggtatgccatgaattcctcacacacactctcaagattaggagttctttcttcttcatattgattgtaaggacttaactcctgttcccacctagagtcattcatggagtagagatgacaattgtcattgtaatgctctcttccacaacaatcataattgatcaatggtggttggctgacccttgatcg

SEQ ID NO: 73749 - DNA, 433 bp, Glycine max
  unsure (1)..(433): unsure at all n locations
tgtaatcgattacacacatactggaatcgattaccagttgagnttttcataaacatcctcaacagncacatcgtgttatctggctcttaaatagccaccaaggcttatatatatgtgacttgagatacgcaattgacaagagatttgaagaacaaaaaggtcttatcctcttaacaagcaacatctgatttatccacctcacaaaattccatggccaaaacacttgtgaatccaataagggaattactatgagcgctcaaattgtgcaatatatctctttcaagagagatatcttcttctcttcttctttattctgaaaacggattaagagaccgagggtgtcttgttgtgaaacgattctaaacacaaaggaaggattgtccttgtgtgtttagaactcgtaaaaggaattcacaagataatggaactctca

SEQ ID NO: 73750 - DNA, 470 bp, Glycine max
  unsure (1)..(470): unsure at all n locations
agcttattaaaaaaagaaaatatatttaaattattgtttatccaaatagcctttttttaaaataaaaaaaagtgcactctgtattttttttattgactcatacatctattatttatttgatattggatggatgtataatgtcatagagaaattatttttacacaaataagtatagtctgattaatatgaaaaataaatgctccgcaataacattaaagtaaaaaaaaaaaaaaaaatctattgtttactgggtttgggggttgtgtgggggttctataaaaggattaggaaatgggaacagaagagaacaaaacatagggataaggaaggttgaagaagaagcatgacgaagaaggggaagaagcaattgatgtcatccgcgccgtggagaggcgaggagagtgaaaaattcttcacagagggatagctgaaagtgacgaggcanggtgatggcactttcaccatgcacg

SEQ ID NO: 73751 - DNA, 479 bp, Glycine max
  unsure (1)..(479): unsure at all n locations
ntgaagaaacgtcanagcaggaagtatgggtcatggctatggaagatgagatacagatgatcaagaaaaacaacacatgggagttagtaaatcgtccccatggaaaagatatcattggggttaagtgggtctataagacaaagctcaaccctgatggcaccatacagaaacacaaggcgaggctagtagctaagggttactcacagcaacccgaattgactacaatgagacatttgcaccagtagctcgtcttgataccataagagctctaatagctcttgcgtcacaaaaaggatggagtatccatcaactagatgtcaaatccaccttcttaacgacgtacttgaagaagagatctatgtggagcagccacaatgattcgtgtctgaaggcaaagaaaacaaagtgttaaaactaagagtagcactctacgatctgaagcaagcacctcgagcatggtatagcagaatcgatcagta

SEQ ID NO: 73752 - DNA, 262 bp, Glycine max
  unsure (1)..(262): unsure at all n locations
tctgctactgacaacttatttaaatgcaagttcacattcttgttctttctttgtctaacatacacacttgctcaaactcatgaaaaanaaaacacaaattccatcacaatcatgcattcaatccaaaatcaaaccatacaccaattttcacaaaaagataagagtgttctactgccatatcatcaaaatcaagttcaacttttccatatgcttcagaatgagcanaccaattacccataataaaactagcagtgtatataaa

SEQ ID NO: 73753 - DNA, 264 bp, Glycine max
  unsure (1)..(264): unsure at all n locations
atttcctaatatgcatgtgaattangaagcatcaacaagaatcaagccaaggctattgtgcaagcaatcaatggggcaaaacacacccaaagattatgacgatggatggctcanattctcacaaaggtaaacttatcactttcaaattgagctttcaaaattatcatgacatgtagaggaaaaacaaggatntcatatcacaaaatgtcaagagactntttatttcagaacaattacccatttcttgaacatatcctataattc

SEQ ID NO: 73754 - DNA, 289 bp, Glycine max
  unsure (1)..(289): unsure at all n locations
agcttcttggggccatntcctgcgagaataaacattngggaagttagttntacaagataatgcttatcttaacataaaaatgacatgttaatccctctgatgttagaacgaactcatgtaatttatttatgcacacgcgtatgtgtagaatatcctactatntatgccaacataccaggacatcggacacattctaattgtcacacatacatatgcantttgaaaagaacatacacttttacgctcaaggtattggcgtaaaatttacacttaattacatcctaaacat

SEQ ID NO: 73755 - DNA, 232 bp, Glycine max
  unsure (1)..(232): unsure at all n locations
ctgcagcttacaaagaagtactcttatgagaagttgtatcttcatggtagatntctcacacgacgaacttggtttaagtttctctcacttggaaggctgtaacttcacttcatgatgctctctgctgaccttttaaagaatcaaatgtgaccattaaagtggagcccactccactgacagacttctagtggaagagacatagatgacacttctcatgaaagctaatatgatc

SEQ ID NO: 73756 - DNA, 263 bp, Glycine max
  unsure (1)..(263): unsure at all n locations
cgatatcacataataattttattatgggngaagaacaacgcacagttgtcagataacaagtggacaaactcctcaatgccaacttcatcagagaagttagatattccacctggctcgccgatgtcatcatagcataatacgctaacgacaaatagcatatacgcattgactatactgatatgagtagggcgtgccctaaagatgcataccctttgcccaacgttgacaggctatttgaaggagcattnggattctacgtgcta

SEQ ID NO: 73757 - DNA, 272 bp, Glycine max
  unsure (1)..(272): unsure at all n locations
gctttcaccttcgcgacccctatntggacggacttgataattnngtgaaaatgtttatcattcatttcgccatgctaaatggcaaatcttttgactgagtcattcattcctttccaagttaacatgaatttcatttgtactaagtactacggtttcccttctcataagttaaggtttggagctcaaggactttatgcctgaaaatcttattcatattcatcatggcaacctaagattcagtaacgtgacaagataaatatctgctatctttt

SEQ ID NO: 73758 - DNA, 282 bp, Glycine max
  unsure (1)..(282): unsure at all n locations
tactcatcaaggccactaccctcgacacgatacaacctccctcgacactagacaacctctttcgctcgcaagacggctcatagcttggagggattatatactatatagggtccacaaaatacacgtggcaagttatgtggcactccaatagacatatcagccctctatgtcagctctagcacagaaacacgaatgtccaaaccttagtagccaggctattaactgacaggttatctctaaccactntattatttgaatatatggcaatcttcttatcacgtg

SEQ ID NO: 73759 - DNA, 291 bp, Glycine max
  unsure (1)..(291): unsure at all n locations
agcttcttctctttcccatgactagcattgacattcctgtgaaaagcagccttctcccactgatcttcatcaaagattctacacatattggtcaactgtgcaaagttgtgaataccgngataatttaccatcatctttacttctggtcgaaggccattgacaaatttcacgcatttggacctctcccctgcttccccctaataatgaggaaaataccttacaaggttctcaaacctcgccgcatactctgccaccgtcatactttcctgtttcagctcgagagactccatc

SEQ ID NO: 73760 - DNA, 287 bp, Glycine max
  unsure (1)..(287): unsure at all n locations
agcttcccagatccgatcatggaaggactnggcaactgttcttattaggcagtaccagtacaatacggacatggctcccgatcggaaccagcttcagggtatgactaaacgagagcatgagtccattaaggaatatgcccagagatggagagatctcgcagcccaagtcgggcccatgatggagagggagatgatcacaattatggtagatacgttacccacgttctactatgaaaagctgataggctacatgccagctaactttgcagatctcgtcttcgccggag

SEQ ID NO: 73761 - DNA, 290 bp, Glycine max
agcttgcccagtgagcaagttgaatatcataatatctacctattatgcacaactcctcatatgcagcccacattagaggatccattgagagtgcctgcttaaaattatgtatggcacttttccttctgtcagtgtatctgaaaaagagaataacagccaaagaaatttagaaaggtggatttatcatatgtggcaagctagcatgacatacacacatacatacatacatatgtgtacacacacacatacacaaatatatggaattgactccagttacagcatccaatgtc

SEQ ID NO: 73762 - DNA, 291 bp, Glycine max
  unsure (1)..(291): unsure at all n locations
agctntcatggtgtgtggtcaaagntgtggccttcctcggtatgacatctttagtgccttcataatttatgctcaatgaggcctagatctatttaacagttcttagtctgcaaatcttgttgcactcatttttttatagggcaaatgttagagtatatatggcttttgtgttgagctccataatggccagatcatcatctgtccatttagctntaggtccaagaatgggaatatccccatcggtgatgataatctagatttatattgngtggacttgatgtacatctccat

SEQ ID NO: 73763 - DNA, 207 bp, Glycine max
gcgctgcactctcaacgctgctgcttttttttttccactatcacaaggtgccattttgcctttccttgaagggtccacacagaacttatcctgaatcatgccacacttatatttatcctcggtatatgatgcgatagagttatttctttccactccaacccttgatcatttcttgagaggaatgcacttactctaatcatctctcta

SEQ ID NO: 73764 - DNA, 248 bp, Glycine max
  unsure (1)..(248): unsure at all n locations
ccaaaaaatgcacccagatacaatcaaggcagcttcgttacctagattatntacatgcacccccaaggtgtatttgttacttacatcacacacatctgcttggctgaatttacatacatgcatactcaaagcatttcggggtaccaaaaattgcacatgccgctcatctggtatttggaatacctatacatatacaaacttcatgatgaatcttgactacctacacaataaggtgctacatttcaagc

SEQ ID NO: 73765 - DNA, 159 bp, Glycine max
ctcctgagaatgacagacaccgctctatgagcgctgtgcaccacgagcgcttctaggccatcaagggatggtcgcttccacgggagcgacgcgttcaactcatggacgaccagtattctgatttccaagaggatataaggcacccggggtggacatcac

SEQ ID NO: 73766 - DNA, 230 bp, Glycine max
  unsure (1)..(230): unsure at all n locations
aaagcacatcaaggagagctgagagaaaggcaccacctaccactgctgctgcattatctcaagacaaaagatgatcagagtagaaagacacagcaaggattggtgctatgacttggtggctcttggtaagtcaactctcttcacttatgacgttggcctggatgctttttngagtctctttccttttgttccccacatgtngctntcttgatatttctaatttgaattta

SEQ ID NO: 73767 - DNA, 245 bp, Glycine max
  unsure (1)..(245): unsure at all n locations
ataacntatgttgttgaaactcattcanaattcacactanaattatgtgtggatatatgtccaataaatctatacccacatacgttgtacctatatgatactttnntgttgtcactataggtgactttccttgtagtggtaggatttttttattccattccaatcttctttgacaaagtaccaacatctatatgataagttcattcctctttnttagttacaaatcccacatccaagacccagaa

SEQ ID NO: 73768 - DNA, 232 bp, Glycine max
  unsure (1)..(232): unsure at all n locations
cactctgttcttagaaatgtgnacctaagcgctttaccttaatgctcctgangttgtattatcaattctacacttagttccatgcaattctacattaaagtattcaacataggaagctacaatatcaagtaaatatagattatcattaaccaagagtgaatcagctccaacaatatcttgaataaaagaatacctgaacacattatttccaaatgaacacaaataacccaat

SEQ ID NO: 73769 - DNA, 283 bp, Glycine max
agctattccagggataggttagtattatgcatattctacttctgctcaggttgaaccaatgccaactgatccacattctgcattggaagatccatcttctcccagacttgaagtagctcccccatcttcacctattattatcatctctgaagactctacagagtcagcatatggagaagctgttgctctctttgattcccctattttccatgtgatagatgaggaggatgctcacactcgggatacccaggatctgtctcaggacttttaaattcctgatgat

SEQ ID NO: 73770 - DNA, 281 bp, Glycine max
  unsure (1)..(281): unsure at all n locations
agctntaactganacactaagtaagttgccaactctattttantggagccaacctttacctttattngttntacaggttacaggttgcacactttgtggtggagctcatgggtcangcttgtgtattcccactaaagaaacatctcatgaagttaattacatgggaaaccagtctagacaaaattnttatgccaggtggatttttggatttcaacatggtcaaccttaccagcagcataatcaatggagaactcaccctgataatcagttcaataaagacc

SEQ ID NO: 73771 - DNA, 244 bp, Glycine max
tggaacattgtctccatgaggtgatggtaagcacttttgaccaggtagagaccatgaggggttgcagttgtgacaaaagggctatttggaactctaagccaaggttgagtccatatgttgatttgttgaccatctcccaacctccacttcattccttccctaataagaacctattaagcatggatactatgctagacatagcttggattgtgcccaagttgagcatccaagaactcaccctttg

SEQ ID NO: 73772 - DNA, 292 bp, Glycine max
  unsure (1)..(292): unsure at all n locations
agcttgagttcctaagcctagaatagcattctgtctctcattntanatccttcatgctgcccctatacatataaaacagtcccacaacccaaagctcacaaaaccatgctcatatctcgttgaggcatttcaccgagcacttggtgggcgcatgtttaggcacgaatatcaagagaatggggacaatgtggcatgcgccattacttcagaatacaccctatgccaaggccatcccttacaacccctcaatccaacaaaaacaagcaacaatctgaggataaatccctcacgt

SEQ ID NO: 73773 - DNA, 287 bp, Glycine max
  unsure (1)..(287): unsure at all n locations
agctntgacaganatccgacatcgtaacattgtaatttactatgggtttgttcacattcacaatactcatttttggtgtgtgagtttctggagatgggcgacgtcaagaagattttgaaggatgatgaacaagcaattgcgtttgattggaataaaagggtggatgttgttaagggtgtagcaaatgctttatgctatatgcatcatgattgctcaccttcaatcgttcatcgtgatatatcaagcaagaatgttcttttggattccgattatgtagctcatgtctc

SEQ ID NO: 73774 - DNA, 207 bp, Glycine max
  unsure (1)..(207): unsure at all n locations
ttaattaactgcaatatttaaaatttatgggctcgcgtgaagtgatntgaatggatctatattaatagtgctacatatctccacttttttattcattgtctcagatggagccttgttttctgatttttttttttatccagagcctataaagctatatgaatattctgtcgattatattactggaatgaataatagcgtatctgatag

SEQ ID NO: 73775 - DNA, 216 bp, Glycine max
  unsure (1)..(216): unsure at all n locations
cacttacaatacttttttnttatcagcaaaaatagatatttatatatatatatatatatatatatatatatatatatatatatataaaaataattgaagtaccagaggtacttaatacatgggtagtgaagccatacaaatggttccatagtcagacaaaacagtctgaataggaaccagactatgactacatatgagatgtatatctgctgatta

SEQ ID NO: 73776 - DNA, 211 bp, Glycine max
  unsure (1)..(211): unsure at all n locations
tcttctcctttgtcttccgctgcatctccatggtggaaaatcgccattaaaggacctcattgaagctcaaagatccagcctccatagaagcttcacaagcaagttccatcaagtggtaatcagagcataagagcttcaagtaggtgctccttaaacctccattaattnnttgctttaccttctcttccattgtcgtttcttcattntttct

SEQ ID NO: 73777 - DNA, 247 bp, Glycine max
  unsure (1)..(247): unsure at all n locations
gatagagcctcgtaatataacgagacgctcngaattgaatggtgaagctcttagcaaattcaaacgtcaataagtatttactcggatgtctgattgagtcccgtaatatagcgagacgctcgaaattgaatgttgaacctctgagccaattcaaacgacaataactgtttactcggatgtctgattgagtcccgtaatatatcgagacgctcgaaattgaatgttgaacctctgagcagaggcaaac

SEQ ID NO: 73778 - DNA, 293 bp, Glycine max
  unsure (1)..(293): unsure at all n locations
agctttaacactttctcacaaaaattaaatgatgttaatattccaattattcacataanaaggaagaattaagagagaaaaattaacaattcctacataatttaatcccaaaatttacctataaatagcagttatcactaaccaaactttgtgtaagtgtaaattgaagatcttagtcaaacttaaatcacttttatgtgacttanataaaaaggatataacaaaataggcctcttgctagatgtggaaagcaagttttcttataggccataannattattgctcgtctgact

SEQ ID NO: 73779 - DNA, 293 bp, Glycine max
  unsure (1)..(293): unsure at all n locations
agcttgangaatatggngtacccatcacatgtggttctatttgtcggtcgggtgatggtgcacaacaagttnttccacattcacaaagcgtgcataaacctaccatcctctgttgcccacctgcaactgagctcacgtactcccacgtagcccatatccttgtttctctcaacaccgggtccccatcaatcctcccaagcttgcacaacatccaagtaatacaacatttaaacagcacaagctatcacagcaaaattnttctgcacttgtgcaaaattctgctgcacaatttc

SEQ ID NO: 73780 - DNA, 291 bp, Glycine max
agcttgtctcaacagttgagcgagaccgagacctatatgttatccatcatcagcaagtaccaaaaagaattaaatctagccatgacccacgagcacaaagtggcggacgagtatgcccgagtgtactcggaaaaggaggctagaggaagggtgattgactcgttacatcaagaggcaacaatgtggatggaccgatttgctcttactttgaacgggagtcaagaacttcctcgattgttggccaaggtcaaagcaatggtggacgcctactccacccccgaggagatccac

SEQ ID NO: 73781 - DNA, 284 bp, Glycine max
agcttcaaaggatattgcagagaatcaccaaatgtgttttatttactcactccagcttggcgagaacgagctcgtacttaatgaactggatctattgaaagatgacacagatgtgtataagttgattgggccagtacttgttaagcaagatatggccgatgccaatgcatatgtccgcaagaggatcgaatacatcttagctgaattgaagcgtcttgatgccactgctcaagatttggaagagaagcagaatagccagaaagatgcaatactaaaattgcaac

SEQ ID NO: 73782 - DNA, 248 bp, Glycine max
actaaaccatataagtttagtaattgcgtgtatttaagtttctaaatggttattttgtggtgtaggccacattggatattccacaatcatccaatgctaagaagaaggtcatttcattggtggcaacactcttggggcaatttaagccaccttgacctctaattgtgtatatatagacaaggagaaacaagatgattagactccttgtaataagtatggtctggatccaaagacttaagaggaatttg

SEQ ID NO: 73783 - DNA, 241 bp, Glycine max
  unsure (1)..(241): unsure at all n locations
tcatcgccaagtaccaagaagaagtaggtctagccacggcccacgagcatagaatcgcggatgagtatgcccaagtatacgcggaanaagaggctagaggaagggtgatcgactctttacaccaagaggcaaccatgtggatggatcggtttgctcttaccttgaacgggagtcaagaacttccccgattgttagccaaggccaaggcgatggcagacacctactccgcccccgaagagat

SEQ ID NO: 73784 - DNA, 291 bp, Glycine max
  unsure (1)..(291): unsure at all n locations
agcttgtcgatggtaggtagagggaacctatccttgtcatgatattgttaaggtgcggtaatctacgcanaactgccatgtgtcgtccttctttntaacaagcaacactagtgaagagtacggactatggctgggtcaaatggggttgctttgtagcatatcctcaacttgcctcttgatttcgtgcttctagaaatatggatacctatatggtctgacattcatangttgggaagtcaggacaagatgaatagtgcgatcagtgggtcgaggaagaggaaaggaactatg

SEQ ID NO: 73785 - DNA, 227 bp, Glycine max
  unsure (1)..(227): unsure at all n locations
tgttctcagaatgtgcaaaatcagaatgctcagaatcagaatgctcaaaattataatgctcaagatcangatgttcaaaatcaccaataacagaatgcacagattcaccagtaatggaatgctcagaatgatcaaaaggtataaaatgatgcctaactaatctatgaaatgtcctatctatctcangatcaaagggttgtaagtcagatggattgcctctagtcata

SEQ ID NO: 73786 - DNA, 274 bp, Glycine max
  unsure (1)..(274): unsure at all n locations
agcaactagaatctaggatctttttcnctcattagtggatnntcaaggtttgagaagtgaaaatganaatggnggtaatttggagcaaactctcatctcanacaagtttataacattaatctaaactcgctcaaactggttttacgacgaanactctaccgaatcaaaattggactcctcaacacccaatttaccctagaaatggctcttgccttcactttggtcactcattntcctcctttgcacagcccaagctttcccacagtcctaaatg

SEQ ID NO: 73787 - DNA, 300 bp, Glycine max
  unsure (1)..(300): unsure at all n locations
agcaccgccgctgcagctgcgtgaacttgattgaagttgtcgacttttatttctatgctccgngccccggtgctctggtctactctgttcttcgtttngggcatagtgctccctactangcttgttgacttccgcctttgttcaaaaccctttattaaaaccacanttttctttctttctaatctttgntcaaaatcttaattaatacgaataatgtactccaatattatttatggctataacgtgcttgttttctatttaattgaaaaaactctgaattcttaaatttcccactcgaag

SEQ ID NO: 73788 - DNA, 157 bp, Glycine max
  unsure (1)..(157): unsure at all n locations
cttgaccaatcccgacccaacccgggcatagtcggtcagtgagaacctgtgatgtacctaagcaggcgagctcctggcngtctacagataataggaatacaagaccacaaagcaaggaggcttgtggtggctggccagctgtgaattttgataatat

SEQ ID NO: 73789 - DNA, 293 bp, Glycine max
  unsure (1)..(293): unsure at all n locations
agcttcaccatatggcaatcaatagtcatgccatatctatgcatgatatagaaatatcatttaatgacctatagtatgcttagccacatagaatttatgatgcanatatgcatcttaccttgtaattatgtttaccttctaaaatattcatgaatgcaagcaaaataattgaatcagtcatcatataatgctttggccatatttaagtcaattagtaccatctcttcttattaactttataaaaaggcctacattaccccctctntaaaagctttatcagaaggcctacttct

SEQ ID NO: 73790 - DNA, 295 bp, Glycine max
  unsure (1)..(295): unsure at all n locations
agctagtgcanatcanatcacctcctacatttatctctatcatgcattgtatgttggtctcgtcctttgtcacgggaagccggaaggtccatatcaccttcttaattgtacacatggagcactacgcccncaaatgcgcaagtaagaagagataattttccgggctctcgtgtccgtaaaatgcattcatatcatgcatcgcataagcatctcttcataacatcataatggacatatcctgcatttgtccgttatcatattccagcctcacattgtgcatgagtcatggcatcat

SEQ ID NO: 73791 - DNA, 286 bp, Glycine max
  unsure (1)..(286): unsure at all n locations
gcttttatccaggcagtctcttcgaggtgtatcttctttctccaaagcttattccctagtggatggcgcctcctctcacctcttctcctttatcttccgctgctactccatggctganaatcaccattgaaggacctcattgaagctcaaagatccaaactctataaaatcttctcaagcaagcttccatcaggaattctgcaaagctctattgaagaaagctatctcgtgcagctgtcgtgttgactagattagaactgctnttatgttaatgtgtgtatatctg

SEQ ID NO: 73792 - DNA, 291 bp, Glycine max
  unsure (1)..(291): unsure at all n locations
agcttataagaacaatatagcctcaatcatttcttttattcttgtgaattaagacgcatcaacaagaatcaagccaatgctattgtgcaagcaatcaatggggcaaaacacaccaaatgattatgatgatggatggctcaaattctcacaaaggtaaaatcatcactctcaaattgagctttcanaactatcatgacatgtagagaagaatcaaggatttcaagtcacacaatgtcaagaacttttattttcaaaacaattacccatttcttgaacatatcctataattca

SEQ ID NO: 73793 - DNA, 289 bp, Glycine max
  unsure (1)..(289): unsure at all n locations
agctanagtatgcccgagtcattcatccctatgtatatgtgttgaagtattggcgatcagaattgccattccttggattatagggttgaaccaagctcatgcttttacaaaaaggttcatcaagtcaagttgaaatatggaagtaaccgtcttgcacaatcggggcaaaagatgaatcaagtcacatcactgcttcgtctactgccaaacatatntaggaattagtgatgtcttgttacttccagtttcaccttgancaagatgtcatagaccatgttgaaaatctaaa

SEQ ID NO: 73794 - DNA, 207 bp, Glycine max
  unsure (1)..(207): unsure at all n locations
attaacttgggaataaagagagaaaggagcgacagacaagtccgtgacttctaactttcctactcacagatagcataacattgaccgatcaattctntttggataaaataacacaggtctgaagttctttatcatcaaatttaattagtaaatgctccctttcatacatgcagactagtgggacttccacacacgagaagtccaaac

SEQ ID NO: 73795 - DNA, 224 bp, Glycine max
  unsure (1)..(224): unsure at all n locations
tctaatgactcctctgccgcttccacataaggcatagaggatgggcagctcaccaagatgtcttcttcgcctgatacgatgaccagatgcccttccactacgaatttcaacttttggtggagtgtagagggaacaacccccactgagtggatccacgggcgccccaacagacagcttgagggngggttaatatccattatttggaggtgacttgacaggtgtga

SEQ ID NO: 73796 - DNA, 230 bp, Glycine max
  unsure (1)..(230): unsure at all n locations
taatggtgcttttccaccatggagatgcagcggaagacaaaggagaagaggtaagaggcggcgccatccactanggaataagccatgaaagaaggagcttcaccaccaagataagccttggataagaagcttggagaggatgcttcaatggaggaaaagaaagagggagagaaagagagaggggggagcacgaaattgaaggaataaaggagggagagaagtggaacttt

SEQ ID NO: 73797 - DNA, 184 bp, Glycine max
  unsure (1)..(184): unsure at all n locations
gagaaagaaaatttccaatcaaagaanaaaaaggggaagcaaagaaattcccaatccaagagtgggagaaagaanaaaaggaaagaaaggaaattcccaaccaaagaatgggagatagtaaaaagagaagatagttctagatcaaagaaactagaagaaatatgcagagaggtctttggaccgg

SEQ ID NO: 73798 - DNA, 302 bp, Glycine max
  unsure (1)..(302): unsure at all n locations
cttgagtcacctgcggcatgcaagcttgccagctcattcacaaccgcaacctgtttgtttgttttncctctgtgaatgtgtagacacaaaggtngaagtgcagaccacaatgaagatgccanagatacatactccaccaattaaaatgggatgatgaaaaaatatggtgctaaaatttgaaccaaacttcacaggctatatcagcaacaaggctttatatcactacgtggggatgtttctatgtatcaatcaagtcactcatcatgaaattgaaattaataaaaatatgacaagggcctcac

SEQ ID NO: 73799 - DNA, 273 bp, Glycine max
  unsure (1)..(273): unsure at all n locations
ataacaatgacaattttttatatctatacatgtcttccttggggagnctaattccattcttccaaggaaggatatttaagatgatatttcagattccttagaagatacacatattcatggaaatgactctaaagaaaaagatgaaggaagcaatgaagagtctcaagataatgaagttagagcaaataatgaacttccaagagaatggaaagcctcaagagatcatcccctcgacaacattagtggtgatatatcaaaaggggtaacaactat

SEQ ID NO: 73800 - DNA, 285 bp, Glycine max
  unsure (1)..(285): unsure at all n locations
caagctanacattcaacttcgagcgtctcgatatatttctagtctcaatcaaacatccgagacaaaagttatcgtcgttagaatgtgctcagaggttcaacattcaatttcgagcgtctcgttatattacaggactcaatcagacattcgagtaaaaaggtattgtcgcttgaattggctcagagcttcaacattcaattttgagcgctctcgtgtatgacaggactcaatcagacatccgagagagaagttattgtcgtttgagtaactcagagctcaacattc

SEQ ID NO: 73801 - DNA, 288 bp, Glycine max
agcttatgagtcatataatatacgccagtagtttactgtctttatggaggaataaaacgtgcaagcagagataatctgcaatgatgtgattgtcattatataaaatgtaagaccatcttgtgcggcccataaccttaataactatgtatgtatgttgatacattaacatgttattgagctggcacaagtgctcccttggactttgtttgtcagcgatgatttatgtagcctctatatctgggattgtctatctgtacacatcatgtgcctcaggagcttcatgttctc

SEQ ID NO: 73802 - DNA, 287 bp, Glycine max
  unsure (1)..(287): unsure at all n locations
gctgcaactaagtgctcacctttagtagaggtgattttcttaanngtggtcatgtaaacctcttcctctagatgaccattaaagaatgtcattttcacatccatttgatgtaactcaaagtcaaaatgagctactaatgccataattactaggaaagaatctttcttagatacaggagaanaagtctctgtgtaatcaattccttctctntgagtgaaccctatggcaacaagtcttgccttatgtctctcaatgttgccttgagagtctgtcttggttttaaaaac

SEQ ID NO: 73803 - DNA, 291 bp, Glycine max
  unsure (1)..(291): unsure at all n locations
agctntagcttctctaggaatcttcttaaagaagcttttcttgaagcttcttaaggaagtttctcaaggaagcttctcaaggaggtgatcttagttattagaggggtgtgtgtagctaagctctagcttctcaaggaagcttctgaactcaaggaagtttctcagggaagctacctatgctataaatagaagcatgtgtaacacttgttgtaactntgatgaatgagagtcttgtgagacacacttcanagttcaacttctctctctcttttcctccttcaatttcatgct

SEQ ID NO: 73804 - DNA, 277 bp, Glycine max
  unsure (1)..(277): unsure at all n locations
agcttacttcgaggttcgtgacccantaagatgtatgtctctttataaacatatgaggagccttttatatcagtcatttatcgtaataatatcttagagggttacattacgattacgtatattattcaccgctggtgatagtgaatatcatgattcaatttcatgaacatgtgtctgttgtaccttatgagtctcagtgcggaagccttgatatggttgctgcctcgcctatatatagcaaaataggggcagtggatgccgttgagattgaccagat

SEQ ID NO: 73805 - DNA, 314 bp, Glycine max
  unsure (1)..(314): unsure at all n locations
atccttaagtcacctgcggcatgcaagctngcatgtgagcgcacatgcaccttgagaaacctttctatgctngacatgtgttcctccaaaatgggcttcccgcgttgagcatgcacgagtgcactaagcaaactgctacaattcttcacacatcttccattccattgttgttgtacctaaactctacaaaataaagctaaacaatataaaattccttaactttaactntcttaagctaaaaatccaaaagaacctaaattcctaatcttttggatcanaccaagcattanaacagaggaaatgagataattgat

SEQ ID NO: 73806 - DNA, 141 bp, Glycine max
  unsure (1)..(141): unsure at all n locations
agatcctcagtacaaagatttaaggcattttcagtggcattgggaaaagggggagcctgtcattgtcagcaatgtgcttgaatgtacatctggtttaagctgggaaccgctngtcatgtggcgtgcattacgtcatgtaac

SEQ ID NO: 73807 - DNA, 297 bp, Glycine max
  unsure (1)..(297): unsure at all n locations
agctntacagcagaatttagtaatgacccactaacctatatatattataacttaatgccattaacctagggaattaanaaaaaacttaattgctgagtgtaactgaaattgtggcaaccaaaagtcacccccaacagccaacaagtcagccaccaattggtctcccaaaaggctgatgcctangttgccaattgggcccttattancaacttgaactaaacctaactaaagccctttagttgaataacccaaaacatatatttggtcagccaactttacaaggatggggccattatt

SEQ ID NO: 73808 - DNA, 292 bp, Glycine max
  unsure (1)..(292): unsure at all n locations
agctggaattgcatttgngcacctatnntgaatcttctatgctgtacctacatataagaaacagtcccactcttccaatnttacgaaatcatattcatacatcattggggcatttcaccgagcacttggtgagcgcatgtttgaacataaattgcaagaggatggggacaatgtggtatgccccattgcttcagaatacagcataggcctaaggccttcttattcaaatcctcaactcaagaaaacaagcacanaaacaaaccaaaactgccccacanatataagcacattc

SEQ ID NO: 73809 - DNA, 292 bp, Glycine max
  unsure (1)..(292): unsure at all n locations
ctgcagctttgaaattatttatacanaagtagtcatattttcgactaacanactcccccaatttatagtttttgcttgtcccaagcaaagaaagaacaattcacttgtcctcaagtgacaaagatagtggccaatcaaaagaaaatggtgtttgattcatcaaggacgtcaactatatgaactgaatatcatggaatgctaaaatcaatcacttctcacaagcattcagctnttcaaagataggagcatacgcattagagtcacaactgagataagctagtaagcatgacag

SEQ ID NO: 73810 - DNA, 200 bp, Glycine max
tttttcttttctatcattatattctaagctatgccacatgtctccatatgagtggagcaaaaagggcccactttttcctcttgatgtgactcatactcagtcacaaaaagggaaaaatctgacctttgcaacgctaaaatcctgcctcggtttgcgtgctgtttctctggttacagtccctcgcgtatctctgcactcgt

SEQ ID NO: 73811 - DNA, 285 bp, Glycine max
  unsure (1)..(285): unsure at all n locations
agctagcttaagatcctatatagatnnctntaattttctcttcatgtgttcctttccttcaactaagaacctcattggttggtccatataaacattctcctctaaatctccattaagaaaggcagttttcacatccatctgatgtagctccaagtcataatggactaataatgccatgataatcctgaaagaatcctttcatgagactggtgaaaacgtctctttataatcaatgtaatacttttgagtaaatcccttagcaacaagtctagcctctgaatgttc

SEQ ID NO: 73812 - DNA, 289 bp, Glycine max
  unsure (1)..(289): unsure at all n locations
gctctatataagctgaaccattgtatcaatattctctttgttgagttntattcagaannatagaagttatctcttttatcttagagagagcgattctcctatattcttgagtgattcaagaacaccttggctgtatcaaaggactttcacaacctttgtgtgttgccctcgctggaaagagagattctttccttcctttcatcatcacccttgttctttcaacccacaattccaaaatatccacctctgcccagaattatctcgtggccataactcccattttacgcac

SEQ ID NO: 73813 - DNA, 306 bp, Glycine max
  unsure (1)..(306): unsure at all n locations
gatcttaagcaccgcggctgcagctgangatatggtgacccatacatgtggattatgtggcggtcgggcgatggtgcacaacaagttntccacatccacaatgcgcgcataaacccaccatcccctgctgcccacctncatctgagctcacgtactcccacgtagcccatatcctcgtttctctcaacaccgggtccccatcaatcctcccaagcttccacaacatccaagcaaaacaacattcaaatagcacaaactatcacagccaagcaaaacagggcaaaggcagataactctgctcaacac

SEQ ID NO: 73814 - DNA, 304 bp, Glycine max
  unsure (1)..(304): unsure at all n locations
atcttagagcacctgcggctgcagcttaatttaaaaaatgaggatatatattttgactntcgttattgatatatataattcttatgatataattaattgtttatgttacattatcataaagntataaagaacagtccgtcaccgcaatttcagtcgcagcatcaagaattttaaagtcgctacacagtgatcacgatttatcttcgatatcaaggatcattaanaatcgtacccgctatcgcaatttaaaacctttagacagtgagaaagtaatatttagagtactactatattacccgatgag

SEQ ID NO: 73815 - DNA, 287 bp, Glycine max
  unsure (1)..(287): unsure at all n locations
agctngataacacgcagagactaacgtcgtcttttgtttgtcttcgtcaatcgcggccgacaagcccgttgacacgcagagatttatgtcatcttccgcgcttacaagatctgtcatactgagttttgagtcacgctgacgggcggaaatacccgagtggttatccgtataaactgtttgttgtttgtaagacgaanagcctggtagcacgcagagactaacgtcgtcttctgcgcccttcgtcaatcgcggccgacaagcccgtttacacgcggagatttacgtca

SEQ ID NO: 73816 - DNA, 296 bp, Glycine max
  unsure (1)..(296): unsure at all n locations
agcacctgggctgcagctgaccgagaatanaattatgagtantatttctatctgtgcaagaattgtactatgtatcgagtcacagtgtaatttgcctctgtgtgaatggactttgtgcaaggttcactctgagtacacctattccaagagaggttaacacactaatatagaaagttaacactaatctagaaaattaggataagatttactagttttagaanaagcaattttaccatttttggcaaaattttattctatgctnttatagttagttntcaaaaagtgcaagaagtcct

SEQ ID NO: 73817 - DNA, 220 bp, Glycine max
  unsure (1)..(220): unsure at all n locations
gaaaatgagaatggggtaactntggagcaaactctcatctcacacaagtctataacattaatctaaactcgctcaaactggtttttacgatgaaaactctatcgaatcaaaatttgactcctcaacacccaatntaccctagaaatggctcttgccctcactntggtcattcattntcctcctttgtacagcccaagctttcccacaatcctaaatgaca

SEQ ID NO: 73818 - DNA, 296 bp, Glycine max
  unsure (1)..(296): unsure at all n locations
tgcagctgcagctactcatctgtgctctcattatctaagctatatacatagagatatacttcacagagcaggcatggaagactacaaagggatntccactcctttacctgcannatcttaagtgtccaaaactggtgctgacccctttgccaaccccactctgtacagaagcattgtaagagacctgcagtatgctacaattaccagacctgaacttggatactcagtcagcaaggtgtggtcagttttcgctcagccactggtctctcattggagtgcagtcaaaaggatcttaa

SEQ ID NO: 73819 - DNA, 290 bp, Glycine max
  unsure (1)..(290): unsure at all n locations
agcttacctatcgtccatccttgcctgtgcttcncatattacaatgccgcagaagaatttatgacactntntgtgtatgaggtggcaataatatctgcttcgggtgtcatttcctgaacacacataaatagttttagttttttttacaggcaaatagtttaagttcaatcctgngaagaaaatggagtgtacttgaatataaattgcttcagatgacatccttttgaaatattgaaactgtgccataatcatatnttgaccatattattgaagacatagtagatacaatg

SEQ ID NO: 73820 - DNA, 286 bp, Glycine max
  unsure (1)..(286): unsure at all n locations
agctntgccaatntagtttttgccagcgaaaggatctatgtgtgtttgagaagaggannaattgattatcctgctctgatgaatgagaagcctgcganaaatggagagaataagaagaagggaggaacccatgctgtgactgctattcccacatggccaaatttcccaccagctcaacaatgtcaatactcaaccaatatcagcccttctcattacccaccatcctatcaaccaagaacactattagttgtcttatacgactaactnttgtatagaaaacactttc

SEQ ID NO: 73821 - DNA, 276 bp, Glycine max
gagcccgggtagtcaaagagaagttcattgttcatatccatcaaagtctgaagagagtatgatgaactaatggacgtcaatatggccaccgctgaagccttggaacgagaaaccaagaaggcccgatagtaagaacacgaccaaaacaaagttttgaggggctttatagggcagcaatagtgagctcaagctccgaagaggtgaaaggaatcatcacgggtcaaaggcatgatcttgaaagacgagctaaaggcttgccttatgtcggaaagaaat

SEQ ID NO: 73822 - DNA, 280 bp, Glycine max
  unsure (1)..(280): unsure at all n locations
agcttgtatctgccccaataatggttgcacctgactgtatttatagttctagctaatgtataatgccagcgactatgttatgggtgtagcggtacgacaaacgcaagacaggatattccatgccatatattatgccagcaagatcccgaacgacgcataactgaattatgctaccactgaaaaggagatgctagccatcgtttaagccttagagaagttncggtcttatttagtgagctccaaggtagtcatcttcatagatcatgcagcaatcaaatac

SEQ ID NO: 73823 - DNA, 285 bp, Glycine max
  unsure (1)..(285): unsure at all n locations
agcttgccgccacagagttatccgactattctcttgtgtggtggaacaagctacaaaaggagagagcaagatatgaagagccaatggttgatacatggacggagatgaaaaagatcatgaggaagcggtatgtgccggctagttactcaagggtgaaattctgatactgtggacagatgtcgtacaggatgtcacgacatcacgcttcagaacatgcagattatatttgacagtgtgaacagtntaaacaagtaaataacacaagagaatcgttaacccagttcg

SEQ ID NO: 73824 - DNA, 286 bp, Glycine max
  unsure (1)..(286): unsure at all n locations
agctnttatccaggcatattctaggtggcgaagctcctttntccatggcttattccctagtggatagcgccttctctcacctcttctcctttatcttctactgcatctccatggtgtaaaatcaccattgaaggacctcattgaagctcaaagaaccagcctctgtagaagctccacaagcaagcttacatcaagtggaaatcagatcacaagagcttcaagttggtgctccttanacctccattaattttcagtnttaccttctcctccattgggtgttcttcat

SEQ ID NO: 73825 - DNA, 283 bp, Glycine max
  unsure (1)..(283): unsure at all n locations
ctgcagctcatgtgaatcagattgatcaagagttttattataacaaagatgatgacaaanagttcaaaagtcaagaacacttcatgataacaaagatgatgatctcaagaatcaaagaatgagttcaagattgaatcaagcacacttcaagaatcaagacgaaagttgaattcaagaatcaagaatcaagtttcaagattcaagttccgtgaatcaagatcaagattcaagactcaagattcaagaatcaagagaagactcaatcaagataagtatcaaaaag

SEQ ID NO: 73826 - DNA, 293 bp, Glycine max
  unsure (1)..(293): unsure at all n locations
agctntgtgtaatcantacactaattaggtaatcggttaccagtgactgtttctgaataaatcaaaagatgtaactcttcanaaaggttctgactctctcaaattgggtttaagtttttctaaaagttataactcttctaaatggtcttcttgaccaaacatgaagagtctataaaagcaaggctttgatttgcttctcaaaacaattattcattcaatctttctatacttttcacattcatttgatcaatcctatactagcctngaatctctttgaacttcttcttcttctt

SEQ ID NO: 73827 - DNA, 312 bp, Glycine max
  unsure (1)..(312): unsure at all n locations
agtcacctgccgcatgcaagcttggagtngtgaaccacctgattattcagaattatatgtgttnggatcgctggccttngctcatgttaaacaaggaaaactggatgcaagggctgtaaagtgtgttttcattggctatcctaaaggagttaaagggtacaagctgtggaaattagaaccgggtgagacaagatgtatcatcagcagggatgtgacctttgatgagagcataatgacaatgctaaataaagagcaaaaggataacagctcaagtggtaagagtactcaatttgaggtagagcattctaaaat

SEQ ID NO: 73828 - DNA, 231 bp, Glycine max
  unsure (1)..(231): unsure at all n locations
gtgttactagtacagatattcaacaattggtataacctctcgtgttatgttatgtatgtcagtatgtgtttacaaagggttgttgatgaatatggtgatctanaaacaaaatgaagttttcagtacagagacaacggtagttattatgtcgagtacttagggtgtgcgaagttaagaagagcccatttgattaatctttacttcagtgtcagcatatatatgttctaaagc

SEQ ID NO: 73829 - DNA, 281 bp, Glycine max
  unsure (1)..(281): unsure at all n locations
ctctaattgacatgcacncgaagtttctgttcattgataacgctatctcagcggttgagaatgtcgaacaaaaatgtgtcgctcattggaatgctatgatcggtggtttatctcttcatggaatgggtttaacggctttcgattttctcatggagatgggaaggctttctgctactcctgacgatatcacattcattggaagtgttgagtgcttgtccgcctgctggcatgttgcaagacggactgatttgttttgagctcatgcagaaagtatacaatcc

SEQ ID NO: 73830 - DNA, 267 bp, Glycine max
tatgggttggatgttttattccggttgttcctggtgcggagatgatcgtacagcgggtgaaccataagcggaagtttcttttggtgaggtagccatggaaaagcagagcgtttggaatgatttcgtaaatctcagaaggctattgggaaatgctggtaaaaacacgaatgccaagcagatataaatttgaatgaagaatgtagaggggcgtgtgaggcaacggtcgaatttgctttgtggtgaacgtgctattaatgttaagtgatt

SEQ ID NO: 73831 - DNA, 247 bp, Glycine max
  unsure (1)..(247): unsure at all n locations
ctctcacctcacacaagtctataaccttaatctaaacttgctcaaactgccaccgaatcaaaatttgactcctcaacacccaatttaccctagaaatggctcttgtcttcactatggtcactcattttcctcctttgcacaacccaagctttctcacagtcctaaatgacatcttaaactaggattacctcactctaacctncaattaccactatatccagatttggcttttcaaatcctcaaagca

SEQ ID NO: 73832 - DNA, 289 bp, Glycine max
  unsure (1)..(289): unsure at all n locations
agcttgttagagtatcttaccacactcttgacttatctctntacttctgatacttgtaataattgagttaaggaaatgatgctaatgtgtctcagtcccactttatgtatgcattttctattttaatgcacatgttgtcttccaagtctttccaacatttaaaaaattaagaatcaatatttactcagaattttaaatttaacattccatttttcatatattgatcctacttgagagagcattgtttgtgacagtctggctctntttttaatctttttctgatcatgtt

SEQ ID NO: 73833 - DNA, 247 bp, Glycine max
  unsure (1)..(247): unsure at all n locations
agctntgatacgcatgtgaaaactgtggcatcatctttactttcatttcgacccttngtctacacatgagaggggttttcacaccttaccctactctaatatacccaacaccactaatacacatgtttttattctttttgcaggtgtcgaggaaaggagcccaacatatgaagaaccttcggatctgaagtcaaatcctttccaaggtggaggggatgatgcaatcctaccttccagggttttggat

SEQ ID NO: 73834 - DNA, 258 bp, Glycine max
  unsure (1)..(258): unsure at all n locations
cctgccgcatgcaagcttagcatcaatcacctagctgaccatttcttatgtttaatacanaggttcacattggcaaagggtgagaataacaacacatacaccattcaaagatgaaaacgttactgatatttcttgggcagtggattggatgcagaatagtgatgttacttcaatcgaggatgaccatcatcagtgctaccatgaccaataacagaaacaccatggtctagttgactccctcattgaccagtgcaaaaa

SEQ ID NO: 73835 - DNA, 286 bp, Glycine max
  unsure (1)..(286): unsure at all n locations
gctaacaggaatgttgccttctttatctgtgacatatgtattgncacccctggaaatgtttggcattctatgttaattttccaaagtacaaaacaacttatcaatcatgaacacagcatatctgagacagtatatgaagaaaatatccatgaaactgaagtttaaaattgaaatacaataattaaagggtcgataatgaattacagaaatgatatttccatattaataaaaagaaacttaactagtgccatcttagagggtaacaaagaacaacacattctaacgc

SEQ ID NO: 73836 - DNA, 236 bp, Glycine max
tggaagtacttagtatttattacctatacttaacaaaaaaatacttataacactacaaaataaccataaattggaagagtttgatacaatttacacaagctttatacacaaaagttagtcgtattcaccgactaacacttagcgacatggggggtcgcttagcggatattgcagaaaactctgcttctgcataatcggcttagcgagctactggctgctaagcctaatgataaccg

SEQ ID NO: 73837 - DNA, 205 bp, Glycine max
  unsure (1)..(205): unsure at all n locations
gcagcttagatcatatcttatcgttatttctagctccttatntgcatctcatcagtactcagaaccgttataatatactatgaattatggcgctctcttttgtttgaaacgatcaatgcagatntcactanttttctgnttaatgagaaaccctacatagatgtattattatcttccgagggcaagctgtaattntgtgaaactg

SEQ ID NO: 73838 - DNA, 160 bp, Glycine max
  unsure (1)..(160): unsure at all n locations
cagagctggacctaggagatatgaacgagaggtcatgagacactcttgacgtcaggaggtgtgctactgtccaaaaccaagcttgaccaatcccgacccaacctcggcatatntaggtagtgagaacctgtgatgtacctaaacaagcgagctcctggca

SEQ ID NO: 73839 - DNA, 232 bp, Glycine max
  unsure (1)..(232): unsure at all n locations
gcttccgaagacttacgganagatcttagagtngaccttatcagaggtattcatagaagccattgcatcactcacccaatactacgaccagcctttgagatgcttcacattcggagacttccaataagtaccaaccattgaagaaattgaggaaattctaggatgtcctctcggnggaagaaaaccatatctttcatccgggtgtctcccctctttgagcagaattgcaaca

SEQ ID NO: 73840 - DNA, 253 bp, Glycine max
  unsure (1)..(253): unsure at all n locations
cgctctgttcaagctctctcanaatctataggtaaacctatgatctcaatcagatactatgctagatagcacaccatgtaacctgacaatctcacttatatacaagggggtcaacttctccaaggaaaatatgatattgatgggaatgaagtgagtagacttagtcaatctatcaacaataacccatacataatctaaacctntaggggttctatgtagtcctaccacagaatccatggaaatattgtcccac

SEQ ID NO: 73841 - DNA, 416 bp, Glycine max
  unsure (1)..(416): unsure at all n locations
cggaagagaacacaanaagaaggaaagtccccgatcaaagaaagagagaaagcnnaaaaaaggaaagaaaattcccaattaanagagggagaataagaaaagaaaaagaagaaaggaaatccccgatcaaagatcggaagaaaacagaagaaatatacagaaaggtctttggaccagtacatatctgaacaatacagaattgtcactaagaanaaattccaaccaaaaacctgtgcgtcagtggcttgttcacctcgcgccanacaaaaacagaaaagaaaaaggccataaacactcanagccatatttcccaccaagagnaaccccattcccaagaaaaagtcctacttgatcatgatcacgcatgtaaatcttgatttgatangaaatgatttgcgaaatcaagtcatgacata

SEQ ID NO: 73842 - DNA, 362 bp, Glycine max
  unsure (1)..(362): unsure at all n locations
catgcagctatagatacaaactaagatctggcccatctggctctcataacaattgtaatnagatgggtagtgcctgcaagatttggattataaaattcacatggaagtaacaagagacctttctctccatataaaattaaacaggttctttaatggtatattgactaagtgatcaaactctgccttcagaggcacatatggtgaaaatggccattacacctcttgagtatatattcttattctttgcttctatgaaggctctcttgctctgcttctcttaaatactattacatcagaatatatcgctgcgccatgctggactacatgatcctagtganatatcattatcctaaataaactct

SEQ ID NO: 73843 - DNA, 242 bp, Glycine max
  unsure (1)..(242): unsure at all n locations
gatatatatgtgcctgagtcggacctccgaaagaanaggtatgaccatgtgaatctctcgagagctacctgtgtgcaatttcgcgcgtgtcgatctataatgcgcctgaatcaggcctccgagagagaagatatgtccattggaatatctcgagagcttgcgatgtcaatggtgagagtctcgataattatgcgcatgactctgacatccgagttataagtatgagcgatgaatatcttaga

SEQ ID NO: 73844 - DNA, 271 bp, Glycine max
  unsure (1)..(271): unsure at all n locations
agctagcctcanagaggtctaggaaggacaaggcagccgattgaactagttccgctccggagtatgacagtcaccgctttaggagcgctgtacaccagcagcgcttcgaggccatcaagggatggtcgtttctccgggagcgacgcgtccagctcaaggacgacgagtatactgatttccaggaggaaatagggtgccggcggtgggcatcactggttactcccatggccaagtttgatccagaaatagtcctttgagtttatgacaatgc

SEQ ID NO: 73845 - DNA, 354 bp, Glycine max
  unsure (1)..(354): unsure at all n locations
tcggtttagaatgagaaatcccaaagagaaaatgtccggttgattctccgctttatttactaagagatgttttttttattattattatattatttcttacctctttctttgatctccaacgtggttactgcacgaccgaacggtcggaattcattttaaccgaagtttacggataataccattcatacgatcggtggaaatttatcttatttttaggttaagcgagaaatgacttatgaaaatggttaagcacgcaagagggggataaaangttaatgaatgagaataaaatacacgaacacaatgtggccaacaccgttcataaatgaatcgaaagctggtcatggactaccc

SEQ ID NO: 73846 - DNA, 301 bp, Glycine max
  unsure (1)..(301): unsure at all n locations
gcttacactngataacggagaacacatgaacagtgctatgcaatgacattcatggtgctccgaacaaaggtggagtatggaggatggccttgagggtccgcacttaggcaatcgtgaaactcagctccaaactcgaaagtggaggacacatgaacaaccctaaacaataacattcatgtgactccggaacaggatgagaatggaggatngccttgagggtcctctcttaagaaatcatggaacacaactccaaactcgaanatggagggcacatgaacagccctaagcaataacattcatg

SEQ ID NO: 73847 - DNA, 318 bp, Glycine max
  unsure (1)..(318): unsure at all n locations
tcatgcgctgagcctggctaaagacaaccattgcgcctagcgagtagatctcgcgcctaacatgcgggctttgtggcgttccgaaataatgactggtttaataagaataaaataaatagcaaaaaccatgcggaaaattttttttctctctctctttcttttcacactggcattcatttcatggtatataaatccagaggaaacatatcactatagagtctngaatggccagttcacaactctattcggatcattttcttctgatcactcataacctctaaaaactatttgctatttccaaaatatactagccatcat

SEQ ID NO: 73848 - DNA, 446 bp, Glycine max
  unsure (1)..(446): unsure at all n locations
tatcttacctatctatctcccannatatcttgcanagactcaatagattttatgcatgaagttctaattctagatgtntgctttgatgcgtggacataatgtaatcactctatgtataacaatgantttattaagataccccttcctttgagttctattagaaatttttctctttcgagcaactaatccctaaaactgatgcatataagaccttccttatatatttactaaggattaccctctttcgagcacttagcccctaaagatgatgcaatgatgaatgatacatgaaattaaaataagaaaggataacaggaaagaaaatatttgtttgtattaatagatatgaagcatacaatacactctttggattttaggcctgncagccctactaaggaagttagcctctcattgtatgagagacttacacttatgggtgatgtgga

SEQ ID NO: 73849 - DNA, 341 bp, Glycine max
  unsure (1)..(341): unsure at all n locations
agctagtctcagcgtntatgcgagacagagtactcacatgttagctatcatcgccaattaccaagaagagtcgggtctagccacggcccacgagcatagaatcgcggatgagtatgcccaagtatatgcggaatcagaggctagaggaagggtgatcgactctttacaccaagaggcaaccatgtggatggatcggtttgctcttatcttgaacgggagtcaagaacttccccgattgttagccaaagccaaggcgatggcagacacctactccgcccccgaagagatcatgggcttctcggctattgtcagcatatgatagactaactggccacataatt

SEQ ID NO: 73850 - DNA, 293 bp, Glycine max
  unsure (1)..(293): unsure at all n locations
gcatgcagctttccaagggttgattgcaagtcaagcctgacattatgtttctcatgtctggcatgagacagctagagcagaatgctagatcaaagggcttatgctgggcatgagactttatgatgagcatgggtgatgctaacctgactaggagcggatcgtttgatacaagctataggacgttttggatgatgccacttccagtgaaagaagataagtcagggtagacgccacaaggattaccttgataagtctgagattggntcaacaaggaatccagagagaagctctca

SEQ ID NO: 73851 - DNA, 84 bp, Glycine max
ctttgcccttaccgcttttttagtaatagtttccaccttttttctgttaattaaagcgattatcatgaggaggactggacgatt

SEQ ID NO: 73852 - DNA, 286 bp, Glycine max
  unsure (1)..(286): unsure at all n locations
tctacggaggaaatgcttaccacctcanaagactgtatagcggtttctaatgactcctctgcggcctccacataaagcatagaggatgggcagctcaccaagatgtcttcctcgcctgacacgatgaccaaatgcccctccactacgaatntcaacntttggtggagtgtaaagggcacaactccgactgagtggatccacggacgccccaacagacagctgtagggagagtaatntcttcatagtgctcttaggcatcacgtntatacttggaccattatcgatg

SEQ ID NO: 73853 - DNA, 397 bp, Glycine max
  unsure (1)..(397): unsure at all n locations
gatgctggtatcatgaccaatgacctagctaaaggggctgatgctgttggctcagnttttgcaatcttagataagtacacaaaaattgagccagatgatgacatagatgggtacaagcctgaaaagcaacagggaaaatagagctttatgatgtccattttgcttacccagctaggcccaatgtgatgatcttccaaggcttttcaatcaaaattgatgcaggcagatcaacagcattggtcgtgcaaagtggctctggaaaatcaacaatcatatgcttaattgagagaatctatgaccctctataagggatggtgaccattgatggtagagacatataatcataccaccttatgtcactaaggaagcatattgctcttgtaagcaagagccaaca

SEQ ID NO: 73854 - DNA, 318 bp, Glycine max
  unsure (1)..(318): unsure at all n locations
tgctgctgcagctgctganttcttattataggaatatagtatggttgcacgttattgattgtatttaangggcctgccaacatctgccagtgtcttaacattcatgcaagacattcattattactttcttacatggatgtgtttcgcataatagtagtatacttattgattacccancatctactttatgtatttgtggcaaatactcattctaaaagattttacaattcctgtgatctattgtattagacctgctttatataaccaaatctttattacaatcatctttttaaatctgtcaaactacctttcaaaaat

SEQ ID NO: 73855 - DNA, 187 bp, Glycine max
  unsure (1)..(187): unsure at all n locations
accaattctccggaaaaaacacacgagancttgtttctttttaaaactagtgaatgagcaccccctacccaaatatccctccgagcgacaaggggatcagagggcagggcaagacaccatgcactagaggaacgccaaggacgaggcgagagccaacccaaagggcgccccctgcaccgtgcacagg

SEQ ID NO: 73856 - DNA, 289 bp, Glycine max
  unsure (1)..(289): unsure at all n locations
ngcttatctaantggtcctgagtaagtgtaggagtcatgttgatacttgtggtgttctgagatgcagttgaagattcaacacgttcttcctcatcaactgcagaatgatgagcagaaccagagtgatttttcatcatgtgaggaggaacaccatgtctttgtagcaattctcaacaaagtgattcgtcttatgacaataggtacagtagcgcttggaaccagaattagatcttccattagcagaacctcgagacttactagttgaagcattaacaagagcctttgatca

SEQ ID NO: 73857 - DNA, 392 bp, Glycine max
  unsure (1)..(392): unsure at all n locations
agcacctgggctgcagctctctaanaagaaataagaatataatatgatatgagattctccattagctaanatgagttntccattagctaatttatagatgtcatctcatctnttagagaagctatattggtgagcttctaanaattaattcatggagagcttatttttgcttatggaaaagctcatctcatcttttntcttcttattntcttcttttagaagtgcttctaaagaagtttacccaaacaaacccatatgaagtactaaatgctaagcacagacttgaatattgtataaaataatggctccaagtgtaatataatattcacagcccgtcatattccctaatggaatatgaggaatacttacaagtaccaacacattctctacta

SEQ ID NO: 73858 - DNA, 401 bp, Glycine max
  unsure (1)..(401): unsure at all n locations
acccactataattttcaacactctagctcttaatgataaataccacctcttgaaacacaatgcctgagaacttgttacagacgcttctaataatttcaaggcagagccaactgtcacatgagactgagtaagctgatcatagtaattagaatcattgatactcctagcaagacttggacatgtatcacccttgtaatcacatgactttaaaggagattctatagtcttcatcaactccattgatgtggtncacttgttatggttgactaagaagattggatctttacttcacaatgagcataatgaaataatgcttttaaccagctacagcaagaatcagacttcactttctctataatgtcctcgatataatattagctagcaaccattcaccctgacac

SEQ ID NO: 73859 - DNA, 274 bp, Glycine max
  unsure (1)..(274): unsure at all n locations
agctagtgctgataccacataggtggagcattctcgcnattatcgtgagcctgactagtctccctatgaatttacctagtgagagtgacctgacttactaatatgtggtctatcttgtcatgaactcctaagcacccaacaaggctttcactaacatggtaccacatngcatataggattgagtcttagtgtatctgttgcataacacttgtgtattgatcgatattgatngatttagtgatattgtgtcttgatccatgagtatgtgaatgat

SEQ ID NO: 73860 - DNA, 467 bp, Glycine max
  unsure (1)..(467): unsure at all n locations
agtcctcttatcaggcaatggaatcccatatcgaagaatcaccagagctcctaccagtagaanaagataacaataacanaaaaacaaattgatgagaaaacacacataggacgatgcagaaacaaaaccactagtaccctttcagcagtcatcacttcttcttttcaaattatctatatataatatagaaagaanaaaaatcacacccacaaccacaaaacaagtaccccaattaaaatcacacgaacctgaaacaggaacagagtgngagccctttgattccactnttctgccctttacctgtcatcattagaaacaaacaaacaaacgcacacacaattaatagcgtccaaaggccaaacacttcacaaaanagttcctttacaaacaaacgcaaacacaattaatagaaaattttgaaaagtcctttagaactcgcaaagccatattgctgactacagagctct

SEQ ID NO: 73861 - DNA, 228 bp, Glycine max
  unsure (1)..(228): unsure at all n locations
agctntcacagatagcacanacacaatatttactatagccttaatngtatattttaaggtgttacaaccttcttctttngngtggttctgaacttctcttgatggataggagatggaagaggacactactnggatgtagtggatggatgcatttgtagtggttagataagagcatcatgtgtgatctcactgcttgatgatgatggaggagagggaggagtccattcc

SEQ ID NO: 73862 - DNA, 318 bp, Glycine max
  unsure (1)..(318): unsure at all n locations
tctgagtcacctgcggcatgcaagctngtatagaagaatttaagtcctgnataattcacatggtcatnaatttgtgctcggatgtccaatagaggcccataatatatctgagatgcagcgaaattatagaattgcagcccccaacgaatttagacgcgccatacacttgtgactctagatgtccacatagaagcaccataatatattcgagacactctgaaagtcaacaagaaagccccgggcgattccaaacaaccacaacattttatatagaagtccgattggacccattatatatcaagacactaagaaatgaac

SEQ ID NO: 73863 - DNA, 398 bp, Glycine max
  unsure (1)..(398): unsure at all n locations
atgttggcgcttagcgcatncttttccgctaagcccagctgatcaaggccgtacccgaatcaaattaacattaaaaatgcagtatctatgaagtgatcctaggtcgtctggcaacgagcaatggtcaaccaaacattcataatagatagtaataaaatagtaacaaactaggggggttgttggttttgtaattaaacaacaagcatttttgattagaaataacagaattaaacatgttgttcccttgattacaagaattcagaagatacgtacttctgcacatggatagtgattctgctcctaaaatcacatcagaggacaacaccagagatcaaaccaactcaaatcgattcacttcacataaaatagatacggatcaatcaattagatcaaatcat

SEQ ID NO: 73864 - DNA, 285 bp, Glycine max
  unsure (1)..(285): unsure at all n locations
agctagtgtctctagatctatcactcaacacaatcactgtttctattccaatacacttactgaccagtcttaggaatttgacaatcctagacatgacaaataactacttngaagggctaattctagcagaaattaagaaccttacanacctcanacacatgaagcttggaaaanacaagcttaacggtactataccaaaagagattggtctcttgtcaaaccttgaggtgctngaatagaatcanaatgtcttccaaggaccaataccatcattcaatggaaatc

SEQ ID NO: 73865 - DNA, 257 bp, Glycine max
  unsure (1)..(257): unsure at all n locations
ctgcagctctactatgtggcatggcgggcttccttcactatctagtctcccacgcgagctttgaccactgctcttccttcccgcgatgcttcttttcatgtccgcctgagtgggcttatagcctaaaccatacttcccacgatntccttgagcatntatcaagctagttatgccgccgttgtctatgcctaaacccattccgggttcataaccgttccccaacataactcgggccatcattactgctgcatcggaca

SEQ ID NO: 73866 - DNA, 362 bp, Glycine max
  unsure (1)..(362): unsure at all n locations
cctagaggagactgaccattccatgtgttggagaagatcaacgtctatgtctanctatatgacttgcctagtgagtataatgtaagtgccactttcaatgtgtctgatctatctcttattgatgcagatggaggagccttgtattcgatgacaaattcttttcaagaatgagggagtgatgaggacataaccaaggaccatgaatcacttgaaggtcccatgaccagaggcagacttaaaccngcccaacacgtcctagagacanggctggtcattcgtatagctgccattgatgatgattgaaggcacaagtgcacaaagatgaatgcccagaggcagaggcactaccaagactactaatt

SEQ ID NO: 73867 - DNA, 271 bp, Glycine max
  unsure (1)..(271): unsure at all n locations
cattctcacaagaaaaagtttagagacattggaagaaacttaagtcttttgttttgatgatcaagttagtaatatcagagagggagcctttatgctttcttcgagaactgacaaccaaatttgtaagtgcaatgacttccctaatgatatggtagagaagaatcacatcaacaaagtanacttatcactngcaaaanacattagaattatgttcacgataatataccaccatatacatctngagtatatatggcatgggtcatttgacatt

SEQ ID NO: 73868 - DNA, 407 bp, Glycine max
  unsure (1)..(407): unsure at all n locations
actggcacaaggatcaaagtgggactgaacataaacatgtntgattatgctacttcgatgaaagcaagtctgggcaaacagagagaataataaggagggaggaacccatgctgtgattgtcgatcctacaatgccaaatntcgaactagctcaacaatatcaatactcagccaacatcagtacttctcattacccgccacccttactaccaagaacacccaatcatctgcagggcccgcccttaaatagtcacaatacccgcctgctgcacacccatgaccaaacaccacccctaataccaatcattacaccaaccagggaatgaaccttctagaatagaagcctatagaattcaccccaatttcaatgccatatgctgacttactcctctatcctgtcaataatgc

SEQ ID NO: 73869 - DNA, 241 bp, Glycine max
  unsure (1)..(241): unsure at all n locations
agagtagtgtctcactggtaagactaactntccaaatgtntgccttcgcaagaaatggccccgaggaagctagcctcanagaggtccaggaaggacaaggcagctgaaggaactagttccgctccggagtatgacagtcaccgctntaggagtgctgtacaccagcagcgcttcgaggccatcaagggatggtcgtttctccgggagcgacgcgtccagctcagggatgatgagtatactg

SEQ ID NO: 73870 - DNA, 423 bp, Glycine max
  unsure (1)..(423): unsure at all n locations
gaagagacaaggagataaggagaataggagaatattcccgatcaaaagaataagaagattgcatatagggaaaattcccaatcaaggaaaatgggggaaaacaaaaaaagaaagagaattctcgatcaaagatcggaagagaaaagaagaaatatgcagaaaggtcttatgaccagacaatatcttgacaatacagatttgtcccaagtatacaagataagaaaggaaaccacgacctagagtggtcctctccctttgattgccaaccaacatcctgtgtgtcagcgactttttcgccctgcactaatacacaaacagaaaggaaaagcccctaaacattcaangctcaaattcccacaaaanaacaccatttccaagaataagtcctatgatccatgatcacacatgttatcattgatttga

SEQ ID NO: 73871 - DNA, 385 bp, Glycine max
gctcataaggatccgtgcacaacctgtttaatatagaatatgaggtgttctgctcccctggctaaatgactgatggcgtctctagaaaggcatgtagtgatgccgcatcaatataatcagccgccctctgactcgaacctagtttggtgatttgtcttcagggtcatacaggttcgagtaaaactccttgaccagtgccacatcattgtgcccgtccatgaattagagcaaggccttgtgccagttccgcttgatcagctcccaatggaattcgttgtactcagcgactaagagattaacattcctctccggaaggatgctccgggagagaatgttctgtgaataaccgtcccacaacctctcagagttgaatctagtgggatca

SEQ ID NO: 73872 - DNA, 417 bp, Glycine max
  unsure (1)..(417): unsure at all n locations
gcttctgagaaagctcatgaagctgcctaagtaanaacactgtccaaccttcattaaccgttggatcttctcgaaatttggtccgcaacttcataagacaattgtccataatctgaccattggtatctttgagaagatgtctggagtgtgctagactcctcttaatgaagctcttgtaggaagcctcttaatgaagcttctagagaaaactacatgaagctgcctcggtaaaataacgctgcccagccttcgttaaccgtggatcttttcgaatttgtttgcaacttccaagacactttccatgatttgaccgttgggatctttaagaaatgtctggagtggctagaagcttctttctgagagctatcctattaagcattcaacctttgtttcgtgagcttagaaaaacgtcatttc

SEQ ID NO: 73873 - DNA, 328 bp, Glycine max
  unsure (1)..(328): unsure at all n locations
atcgtaagcaccgcggctgcagctttcgcgaaatacnganaattgngacttagtcttggtagaagtctctacatattgcctcccttgcccagtattatgaccagcccctaatgtgcttcacattcgatgacttccagctagtgccgactgtgaaagagtctgaagatatcctgngatgcccactgggaggaaggaagccatatcttttctctggttctatccctccacgacaagagttgccaaggtagtgaaaatctcagcacaagagttgaaccaggtaaagcataataggaatggngtagtcggagtatcaaagaagtgtttggag

SEQ ID NO: 73874 - DNA, 270 bp, Glycine max
tcggaagcgaaaagaatagaagggatatctcccatcaaagaacaggaaagaatgaagattctcaatcaaaaagaaagcataaaatgataagaatgaaaattcccccatcaaagagtgggagaaagcaaaaagaaaagacagacgattcccaatcaaagaatgggagaaacgtaaaacggaagaagataacggaaagaagctcctgatcacggatcgaacgaaaacagatgaaatgtgcataaaggtctttggaccggacaatatctgaac

SEQ ID NO: 73875 - DNA, 319 bp, Glycine max
  unsure (1)..(319): unsure at all n locations
tcctctcagncacctgccgctgcagctgcacctcagctggactctattgcttccaattaaacatttgtggtaaggggcanaagatggaaggcatatagctttggtgcatcactctngctcctcatggcaaactgaatgtccatgacaaagctgttggatgataatattgagatcttgtcaatactttcttttattccatgaacataaccgatatgggctgttcttttaagcctcgtgcataagtcatctacggttntcacggttaatagcagtgaaagcaatgatgtctncaacctcaagctcatatcttccattcaca

SEQ ID NO: 73876 - DNA, 476 bp, Glycine max
aaaactagctggctcttgtaataacctctcagggtacagaatcttatcacaattgcatgcataaattattgcatttccacagttcaattaatggtagattggcttggctggcaagtgtgcagactcaattgctatttctgaagaatcaaggtcgcacgggcgatagaattatacgctaggtacacggatgtgccagcagctgaaggcgtatttcatgcatacgtaataagtatatcactcaccgcgtttgatgctacaccacaacttgattcaacaatgcagaccgatggtttgcacttggtttctaatttaatgaactcgggctaatactgagaatatgtttacagaaatgagaacagaggatacaacatttaaatttgcatgggcgagatataatggaagtgacctttccatatcgtggatcaaaatatatgatatgggacgaatgcttttatataccatttgaattttgcact

SEQ ID NO: 73877 - DNA, 428 bp, Glycine max
  unsure (1)..(428): unsure at all n locations
atctctagagcacctgccgctgcagctatatcgacctctcttcacttctaattcgtataaaacgnnaaacacannntctcataattntcactcttcatatccacaggtttccaaacaagatgatgtttaatgcattcataatcttcaattctttgaaaacatctctgaatattgttgatctaacaaagactcttaagtctgaagataaaaatatatgaatgacaaataataagactctatgttccttctttagacgtcatcaaacgaatcatattttctcttttttatcctggaagagccgaatcagattgtaaatattacataatgaccagaggtcaaatcatgtttgctgggacatattaacgaatttactacataaaactatctacgctccttatttcagtcatggactcatggacaattgatat

SEQ ID NO: 73878 - DNA, 221 bp, Glycine max
  unsure (1)..(221): unsure at all n locations
gatgacacagatgatgacacatagcccaagagaatgatttaagattggctcagaccttcctagagtctgagaggactccgagtcagatcatgcttatgattcatgagtaatcacgatctagattctagactctagattcaagaatcacgaacagactcaatcaggataagtactattatattcttcaaaacaatgagtggcacgtgagatnttcacacaat

SEQ ID NO: 73879 - DNA, 262 bp, Glycine max
  unsure (1)..(262): unsure at all n locations
gtcaatgtttgatattagaggaaaagtngaaggcttgtcanaagtcaaagaggagctcgtccgaatatgtgagcaagacagaagagaacatgtgggctatcattgaccaatacaaagagaagctaaatctagctactacccatgaacaaagattagaggacgagtatgcgaaagtatctgtcctgcaagcggaaagggaagcaagggagagggtgatagattcatagcatacagaagctatgatgtggatggatagggtcgc

SEQ ID NO: 73880 - DNA, 311 bp, Glycine max
aaaacagctgaggaaggtgatcacttttacccaaaggcaccatgtgatgacggttgctcttacctgacggagtaaaacttccccttgttaccaagcaagcgatcgaacacctcttcgcccgaaagatcatggcttcttcggtatgtcaacatatgaagacttaatggcccacatattaaaatcgtatgaaactgatggctctaactgataatacacttctttgaataaagatggccagtttactcaaagctggcaataatactctacattatttacatgattttttccatctacttgtttaggaaaactac

SEQ ID NO: 73881 - DNA, 331 bp, Glycine max
  unsure (1)..(331): unsure at all n locations
cacctgacgcatgcaagcttatactnttcacggatatntcatggtactaaacatgttttatttactgaatcaaaggcgtcactataagccaaattaattaatactgaaccacctagctagtccatgtcaagtgagtgacccaccaccaaaagcattcacttattattctctacacatcaaatcaagatcaagtagcaacaagttatcaacatacgaaccccctcatcatctatatatctcacacacctcattatatatcatctctttcatggtggcccacagaattttgggtccaccctgagcaagggaaatgattagagagagagagagg

SEQ ID NO: 73882 - DNA, 408 bp, Glycine max
  unsure (1)..(408): unsure at all n locations
agtcacctgcggcatgcaagctagaatanagagtactatnntgcacagaatggaaagtatcaacatactcttcagaagatggatcacgctntgntgattntnggttttaggtcatcggtttcttctgtgcacctttagtgttgaccttttctggaggaggacacatagtagtttgatcaaggtaggcaatttcctggagtttactctttagagatactntgccacaacatcaagctccttatatagcttgaatatggnttccatctcttctcgtatggtcacttatggctcagataacccttggtctgaaaaagtagccttcgccaaacatccggatgaatcaagtggatggaccagacatatttcatagctacatgccatgaagacgtgagtttctcataccacccc

SEQ ID NO: 73883 - DNA, 487 bp, Glycine max
gctcatagatgggcgcagattatatcatcattaataaacaggtaagctcttggtcaagtggcttgtatatacaacaataatggccttcatcatatccacatttatgcatttcattttaaaattcagagattgatacacaaatcatagctctatgctagtcgttctctcaacaattaagttcacactctcatcgggttatggttcaagcttttctttttcaatcaatctatacactgactaacaattctaatcgtgatcctactttcttgttctttctcatctacatacatgctcattcaaaactcatgacttcaacacatgcttcaccctttcatgcaatcaattcacaacaccaatttcacaacaaaaataatcttgtttgcactgcatactcagatgatcaagtcaaactgttcagtatgcttcaagacatgcatactactatccataatcaaaagtatgtaatcatatatatatacccatatca

SEQ ID NO: 73884 - DNA, 273 bp, Glycine max
  unsure (1)..(273): unsure at all n locations
ccttcctttcttccttttcttcatcttatagtaagtttctagagttcgacaggtaagggaagctntaaactaactntcatattatgttcgatatgttggatcattgtcttagattattaatagcgcattaatcctatattcatgtctggaaatgaaagatttgagttggatatggatcggaacttaatagaacggtaactatagtagaaagtcatgacttctgcacaccttgtttcgccctgctacaatcatttcattgcatctaacattcca

SEQ ID NO: 73885 - DNA, 383 bp, Glycine max
  unsure (1)..(383): unsure at all n locations
atctctgagtcacctgcggcatgcangcttctttaaccttctttaagtaagcttcaagaattctcattcaataatgttcgtgtgatgtcacaaagcttgtattactactaatgtatgctaatgttggtggcagggaagatgcaagtcacgaatgagttattggtgaacaatagctattgggctgaaagagtaagcacnggtgtgctttataatcatatcttctaattgttagggataactgcgtaagtgcatcctagcttgtgttgtgaatcgtaaaaatgtatgccctgnanaggacatgnttgatattttatttttgttggaagagtcatatagtnnaaatatgattatttagctactcattctgtgtcgcactgtttaaa

SEQ ID NO: 73886 - DNA, 321 bp, Glycine max
  unsure (1)..(321): unsure at all n locations
gatggttgcattcattcaagggcaacagtttaaagacctgngatgacagttgtgagaagtttctaaaaaaatatttcccagagtctagaaaaatattntgagtgaggcattagaaagatttcgtagcttgctgtggaaaactcccactcatggtttttcagagcctatacagttggacatcttcatgatgggttacgactgcagtccaagcaattactcgacacttctgcaggaggaaaaattaagttgaaaacacctgaagaagccatggtaaacctttacttacttgacactaagtaagttgccaactcaattgcatgc

SEQ ID NO: 73887 - DNA, 349 bp, Glycine max
  unsure (1)..(349): unsure at all n locations
gatcttaagtcacctgccgctgcatgcgaacccttcatctcttgcttcaatggttatcttcgctacatactgcatgttctattaaaacataagttaataatgtaataccaatgacaagaatataaactntggttgaaatacacaattacggtttcccaattattcctaagagttcctaatactatcatggacatctagtgcatgatgtaatatccgcactcagtgcttccttcttgtctattacactaaatacataatgagatctggatattaactacacggtaactacaactagtgttcacacacataagcagtatatataagtagaagtgtatttanatcacgtacc

SEQ ID NO: 73888 - DNA, 314 bp, Glycine max
  unsure (1)..(314): unsure at all n locations
atctctaagcacctgggctgcagctaaaacaatcttaataacaattatatngttattttaatnngagagnnataaaagaaatttgtttaagtaaccaatcagtagcgcatgcaattcatgattntctttattcatatttctagagtatattaatgcgtgtaagttaacttattcgattaacactgttgtaactgttcaacaatcagtttagatactaaaagatagagtttgaaacaacccataactagctagctcatcagaatttaaattggaaataataacaaacatacactacagcactgcttcctttttct

SEQ ID NO: 73889 - DNA, 387 bp, Glycine max
  unsure (1)..(387): unsure at all n locations
aaacaaccaaacaacacannaatatgggggtggggtgaacttatcaagctaggagtgtaaatagcgaatttcaaatcttggcagaggattctggaccttntctttctttctggctaagcaacttgtgcgagcagggtggcaagcacctccctcatcttgttgaaanatggcttccggagcttccgtagaattcccgctaccatatataagtatatttcacttaatatgggtgagaaggaagaataagaaagaagaaaatcaagtccgatatgcttccgtaactttttctgtaattacgagaaaggggggtgaacttatcaagtttggggtgtaataataattntgaattttcaatcttgcccttcagacatttggaagctggttgct

SEQ ID NO: 73890 - DNA, 352 bp, Glycine max
  unsure (1)..(352): unsure at all n locations
attttatgatactcgttattactattatgggaacattatactttccctcaaatttcttaattttatgtcaccgataattatatactattttcacctttaaattgttttgatctctttatcatacaatttctcttccattcttatattgattgtttcaaaatcatggcaattatacaagtgtatatcgcataagaatatggttgaaaaatatattaaaatttcttgctatggcaatagctccaaaaagaaatgcttcatgatagaatcatattttaagattacactactgttattattccatatttatttaataagatacctatntatgttttcttatttccccactctatat

SEQ ID NO: 73891 - DNA, 288 bp, Glycine max
agcttgtaactaacacgtgtataaaagtctactcaaaggattaaaagtcttgcagaaaggtcaccctagtgcattaagaggaagccttgccctcgacataaggcccatactctctttgctctctcactacctcactcgtcttcgtctctctctccttccccaccatcagcgtctgtctctaacattcgattgtaaattgctaactaagttgctcttgcataataaatacatataatcaatccaaaggttcattcattgtataatggagttaaattaatttaattaatc

SEQ ID NO: 73892 - DNA, 421 bp, Glycine max
acatatcaccaaggaccactctgcggtcaacaaataatagtaagaagactgactcttccacgctatttacatcaagcttattggattatggggcacccagcatatgtggtactatgtggcgatcgtgcgatggcgcaaattatctcccccactttctctagtctggtacaagcataccatcctcagttgcccacctttaactcgagctcacgcactcctacagagtccttaacctcgttcctctcagcaccggctccccatcaacccctccaagctttcacaatatccaaaccattcaatctcatttatcatgaaactattcttaaccaagaataatgatcgaggcagatactctatccaaactcattcaatacacaacgttcttactcatataccccagaacattctcttcttacgatcg

SEQ ID NO: 73893 - DNA, 373 bp, Glycine max
  unsure (1)..(373): unsure at all n locations
tactaagctcgctggcgngatgttttagccttaatttcgctttagttattagtcttttctattaagaatgagagatcccacagagaaaacgtccgattgattnttcgctttactttactcaaaggtatattttttattattatattattattttacctctttttttatttccaacgtgcttacggcacgaccgaacggtcggaattcattttaaccaaaattaacggatgataccaattaaatgatcggtggaaattattttatttttagattangcgagaaatgacttatataaatggcttaagcacatcaaaagggggtataataagcaaatgataacgagaataaaaatacatgtgtcgcaacctaccct

SEQ ID NO: 73894 - DNA, 326 bp, Glycine max
  unsure (1)..(326): unsure at all n locations
atccttaagcacctgcggctgcagcttccatcaccccttataggatgaaggtaggtcttttggccaggccacctgtgcatcanactccttcatgctcataatggagggcaatcccaagccctaaaggctctgcatgatgatggactacccnctatgaatgctctggagcatggagtgaagcatctgaggagtgaaaataaaatctgttggacctgtagagactagagctggaagtggaatctgtgaaggtgctggaggaatcactgtgatctctgtggaggaagagggaggaagtgtataaaaagaaagtgtcggtgcctctgatg

SEQ ID NO: 73895 - DNA, 186 bp, Glycine max
ggctaacatagcaccttgtggtgacaaggaggctgttgtcgaatcgagtgacaatggtgtccactctgtcaaactccatcctacctatgggtttatatgggagagggaggaaattgatgctgttccctctgaagatggagtcattccaccaactgggtggaatacatacgaagattaatatgactg

SEQ ID NO: 73896 - DNA, 259 bp, Glycine max
  unsure (1)..(259): unsure at all n locations
caagactgtactaatacattngctgcccaagtttcatggtcttgcaggtgaagatcctcataagcatcttaaggagttccatattgtctgttccaccatanagcccnctgatgtccaggaagatcatatctttctaaaggctcttcctcatgctctggagggagtggcgaaagaatggttgtactaccttgctcccaggtccattaccagctgggatgaccttaagagagtgttcttggagaaaattcttcctttatac

SEQ ID NO: 73897 - DNA, 320 bp, Glycine max
  unsure (1)..(320): unsure at all n locations
agctagacgcacatcgttcgcgtgtatgatatccactcctcaatgttngaattataggatttcttcaaccctataacacaacgtggcagacaaaagtgggtagtaaactagaatggtcgtcattgtcaatgcggaaagtattctgcgcttcactatccatgttcacacattattgctgcttgtggttacgtgagcatgaactactaccaatatatagatgttgtttatacaaacgagcacatcttagaagcttactccgcacaatggtggcctctagggaatgaagcggctattcctncttctaatgacgcatggacact

SEQ ID NO: 73898 - DNA, 340 bp, Glycine max
  unsure (1)..(340): unsure at all n locations
ctagggcttcctggtaccaaaatatctttattaattngatcataacaaaagtgtcatgtaaatgggatattcaaacaacatactatttcacgatctgaaaccaaccctatgagaactaaggggagactttttagagcgaacccctgatatgaaatcatcatggcccctttaataaacaccgacaaagagcaagtaacaatgtcaacaaactggagtgacaatgatgaaacaacattactggaactaaggaaaatattgggcactaaagttgaaacaagaaaacattgggccgtgaaaagttttgttaacagaccaaatggcagagtacttttgccactat

SEQ ID NO: 73899 - DNA, 308 bp, Glycine max
  unsure (1)..(308): unsure at all n locations
tgcaagctgacgagtatggtgtacccatcacatgtgngactatgtggaggtcggtcgatggtgcacaacannatttccacatccacaaatcgtgcataaacccaccatcctctggtgcccacctccaatggagctcacgtactcccacgtagcccatatcctcgtttctctcaacaccgggtccgcatcaatcctcccaagcttccccaacatccaagtaattcaacattcaaacaacacaaactatcacagccaagaaaatatggcataggcagataactcttgccaaaacaccaaccaaaatcaca

SEQ ID NO: 73900 - DNA, 353 bp, Glycine max
  unsure (1)..(353): unsure at all n locations
acctggagatatgtcgcgagggtcangagaccttggtgatgtcaggtggggtgctatngccaaaaaccaagcttgaccaatcccaacccaacccgggcatagtcagtcagtgagaacctgtgacgtacctaaacaggcgagctcctggtagtcaaccaattaaagaacaaagaccactaagctaggaggcttgtgtggtggctgccagctatggatttgagtgatatctaaatatggctatggaatcganaccaagggtggtaatcgattaccagggtgtgtatcgatacaggcttaaaatgaaacatgaagtaatatggctctggaatcgataccacggtgtgtatcgatac

SEQ ID NO: 73901 - DNA, 250 bp, Glycine max
  unsure (1)..(250): unsure at all n locations
actcattctggagtctctgctntaattaattaccatgtgatataatcaattacttctctttctataagagtctcagaagtgaccaagaacactttaatcgattaccttgaggatctaatcgattacattattctcgagagtgtttcagtctttgngaagaagactctaatcgactgaaatgataatataattgactacattgtagaattaatcgattacaagcagttatatactattttctctctatata

SEQ ID NO: 73902 - DNA, 372 bp, Glycine max
  unsure (1)..(372): unsure at all n locations
atctctgagtcacctgcngctgcagcttaagaaaaaagatggcctcagcatactccttatttctatgaaggaattctatcaatagacctccaatctttaatggagagggttaccattactggaaaacccgaatgcantattttattgaggaaatagatctaatatattgggaagccatagaaataaagccttatatacccaccacagtggaaagagtttcaatagatggtagttcatcaagtgaaagcataactatagaacaacctagagatagatggtctgaagaggatagaanacgagtacaatacaacttataagccaaanatataataacatcttgcctgggaatggatgaaatatttatggttcaaa

SEQ ID NO: 73903 - DNA, 482 bp, Glycine max
  unsure (1)..(482): unsure at all n locations
actggtgctatattcatttgctttaactataattgattgttgagctatgtaaattcatcaatttaatcgactatttacaatttgcctgcacaagtataataaaggtagaataataaatttacacaattatgtaactctattttttcattcatctaaaccaaacaacttaatgatattatttatactttatttctcttatatcagataacccaacatttcaacttatttatcctttctcaaatattactattctaattttatgggctctacttatgtggtatgaatcaataagagggttgacctaattctttttcttgattttcacccaagctatgtcaaaagggtcactgttcataaagggagtgcagtgctatgtntctctataagacacacatctagtccattaggaagaagtgcataacggtgcatggtccatttggtatacgttttgtactcaaagactgcactagtattagatgatc

SEQ ID NO: 73904 - DNA, 87 bp, Glycine max
ctaatgagtcccactttgtctcatccatcataaaaacacactgtggtcaggtatagcacacagatcttgaggctatgtcatatgcta

SEQ ID NO: 73905 - DNA, 137 bp, Glycine max
aaacgggaaaaaggcaacgaataacaatagaacgccaaaagaacgacgcccggaaaaaaaaaacggcggaagaacaaagaagcggcgagggaacaaaaaaggacggacacaggacaaccccaaaccaaacgggagcg

SEQ ID NO: 73906 - DNA, 314 bp, Glycine max
  unsure (1)..(314): unsure at all n locations
tcaccgcggctgcagctatattgttgaatatacttattttgattnnttatagagntatatatacatatatatatatatatatatatatgacacatagttctgcttgaattatataaaaagagtaattctctgattaagtaatatatgtgtagtcaatataaagaaaatttgtactgtggaaaacattaactctctctaacaacattaacttataggatagtttgtaataatcatactattaatacacagcattcaatatcttaaccataatatggacataatgatgtaagacattattatattcacatatggga

SEQ ID NO: 73907 - DNA, 470 bp, Glycine max
  unsure (1)..(470): unsure at all n locations
attagtcattatactctctatattcttccgaaattcttnggctgatagcagcagtgtagcattcaccctagtagccttgacaaaagctttctcaatcttgtcaagttcgggttaagccttcttggacttgacatcgaccttctcaaactaagtccttgattggaagcgaccgattgaatccatggaggcgtggggaccagtgataaatcactttttgagtgatattctgtgaagtttgtaaccttcttgcaagattactaagtcgtgcaaatagtataaaatggatgttcaagtatcataaccacaggactcgcgttatactcaacataatagcaacattcactgacttcgactatcagaacaacaatgaatttaattggattggaaaatgtaatataatacataaataacatatttgttggcattcatgaacactgaggcattctagaggtaatacaagaataagagtg

SEQ ID NO: 73908 - DNA, 245 bp, Glycine max
  unsure (1)..(245): unsure at all n locations
agcttaatatccgtcttatgataactatgtntaaggtcttttctcactagtttaagggtnttttctcactggtcaagaaaacaaatattccaagagtattattatttgttagagagaattcttactanaacattattgttctctctcttgatttcatattaagattnttaagataacatcttttattacatgataaaatcggaatagatattntaatatcttatttgaaaataaaaatatcagtc

SEQ ID NO: 73909 - DNA, 477 bp, Glycine max
  unsure (1)..(477): unsure at all n locations
ctaagcttgngtgagattgacatgatgtagagatnntttgtggcattgtatatnatcttttaattaattcaaaccatttcttctcanggaggggattgtaccacaaaatgagcaaagtttgatcatatacaccgaagaaaggtcaatgaggaaacatatcctaatgagaggtgcggaaaagatcaggaacaccatgtagattccaatgttccttcagtgcctagaactgagaagtcaggttatgatcagccttccaaaagaattatatgatatgaagattggagatgacacaggcaaaaacaacaatgagaaggatatattgggagtcatattcttgtctccttttgatgtttgtgtgagtcgtcaccgtgatacttctatatatgtaaaatcatttatgtatccattggcaacgagcatactagttagtatttggtaagctggtntctttcttcttatatgcaatcactgagtatg

SEQ ID NO: 73910 - DNA, 418 bp, Glycine max
  unsure (1)..(418): unsure at all n locations
cgcctatanatactcagctgtgcctgttaaactataattcctagatcctgagcaactatgtgtgttctactatgacttgagacacaaacgtgatcaaataacatgcagagatataaaaggtactacgttgcctactactatctcttctttaacatcttgagctggacgcctgatgacttgttattcacggacctagtaccttgcttaactttggctttggacttggttggccatgtgtcgtangcaatactctaacctctttgtggatgacctgcgggctctggaggaggcggcggagcatatgttgcctgttgctggccatccccaagctgttgatgtgtttcgtcttgcgcctgcctgtgggcgcaatacctcttgatgaaagcttgataatacgtgacctgatgaccatgctggg

SEQ ID NO: 73911 - DNA, 181 bp, Glycine max
  unsure (1)..(181): unsure at all n locations
aattcattccannatttggggaaatactgggtaagaatngaagtggtcaaagtaacatcataaacacactaatttatgtacatacacatataggttctgtatatctgtgttaaaaaaaatggttatgtgtgtatgctgtaattccatgaatgaaagctgagtgcctaaatcaaggcaagta

SEQ ID NO: 73912 - DNA, 276 bp, Glycine max
  unsure (1)..(276): unsure at all n locations
agtaactcagctcgccataaatcagaaatctgcacctggtgcaagagtctgtggtctatgttcttctgcagatcaccatacagatctcttgtcttctttgcagcaatttggagtcaatgagcaacctgaagcttatgctgcaaacatntataatagaacctctcagcagagaaaccaacaacaacagaataattaggaccttncatgcaacagatacaatccangttggaggaatcatctaaatctgagatggacgaagtcctcacaacaacaaca

SEQ ID NO: 73913 - DNA, 425 bp, Glycine max
  unsure (1)..(425): unsure at all n locations
actcagcttccccacatcaaagtatacaacattcanacagctcaatctatcactttctataaaacagagcaaaggcagataactctgccaaaacaccaaccaaaatcacagcttttctcacttaaagaccccagtaacaattccttcgttccaattcgttaaccgttggatcgactccaaatttatactggaagtctctagtacataagcctacattntgaccgttgggatctactagcaaacatccagaactcattctgcactgctctttcacaaccagcanatgcctagtatttttctgcacttgtgcaaaatcctgctgcacaatttcacagcaaaaatctgcacaatatgcagatttcgaaaaccacacttcccctcatccaatcttgctcaaatcagatcctacaagtcccaaatcatgt

SEQ ID NO: 73914 - DNA, 203 bp, Glycine max
atgccctaacatcacacaggccaccattaaagcggcactagatgagcacggttgcaccgagggagactcgacataagcattgcataccacttccaaagctaggaaagatgtctctaaggattattctgtggcttccacatatggtgtagaagaaggacaacttacaagaatgtcttccttctcgaagactatgatgtactacc

SEQ ID NO: 73915 - DNA, 298 bp, Glycine max
  unsure (1)..(298): unsure at all n locations
tgcagcttctngcacataactctaatatataacactacttatattanaaaangatttttaactntgacacaatntcaaaattcgtcaaacaaccttcatagtctaaaaatttccttccacgtaccaatactgataatttcccattaaaaatgtacacctttatttatgatctctagttgtcattaaatccaaatatttcaaacatataatttagaaagttccaatcgaanaatcacatgctntaatntttcgaaattcactgttaagttcaattagcattcttttctagaaccttttt

SEQ ID NO: 73916 - DNA, 292 bp, Glycine max
  unsure (1)..(292): unsure at all n locations
agtcacctgccgctgcagcttaacctagggttttaccatgttgctccacctatctctaacagngttatgagcatataataaattatgttcgaaaaagctattagtgctataaggaaattgagtaaagaacctgctgattggctattacataaagacataccanagcatacatgggctatgcacacatttgaccctcaatgcaagagtgacaatgtaacanacaacttctgcgaagtggttaatgcttgggttgggacgataggaaatagactgtcctatcaatgatgtaatc

SEQ ID NO: 73917 - DNA, 500 bp, Glycine max
  unsure (1)..(500): unsure at all n locations
aatataatggaactggctaacttaacaaagctaagattcactnatttctcgtctgtcttcttcatccattaaagntgatagcgctacacatggccgttactgtgcaaagagagatagngggaactctatacactctctgtagcatatcttcatagaactaccactcgccagtgtcgtcttgcgctcaaagttgactttcagtgtaccaatcaaatataacgtctacagcataagacatatggatttagaatattaaaacagacagttatatcttcccttttggcgttgtggacgagttgctaattgacctatggacgctactattgatgatcgctatttgacctaaggatagagaaataggttcattgcctntgactatgagcgaagtgcaaagcacttctcttctgagactggatgtgaggcgtatcgccaatgacatcattggtatcatcaaaccttatttcatgattttgctgttctatagagaagatgaaccgact

SEQ ID NO: 73918 - DNA, 246 bp, Glycine max
  unsure (1)..(246): unsure at all n locations
ttcataatcctattctgatgaatatgacgcctgtggtacatggagacaataagaaggagggatgaactcatgctatgactggcgttcctacatggacaaatntcccaccagctcagcaatatcaatactcagccaatatcagcccttctcattactcatcaccctatcagctaagaacacccactcttccacatagccacgcctaaatcaaccactaaacttggctgttggcagtcaataccaaca

SEQ ID NO: 73919 - DNA, 359 bp, Glycine max
  unsure (1)..(359): unsure at all n locations
agcttccctanatanactgagtagtgatatattgaaatttctaatattntaaatatcttaccaacacctctcatttctctctatctntcttctcctatcacatcattaactatatatngtaacaccatanaatttcgctaactctaaatcgatgtggatgttgaggtatggtgtgaattanccatgtgtgatttgcttgatgaggatgttgagttatgtagagttctatggatctaagttgaaaatatgagatttcanatnntacctaaacctggtccggtaaactgtgatcctagattctgtaaccgatggatcgccttctaatgttcataaccaagtcttagggttgaccatggatt

SEQ ID NO: 73920 - DNA, 539 bp, Glycine max
  unsure (1)..(539): unsure at all n locations
actaagcttctatccaggctcatcttggtggtgaagctccttcttccgtggcttatttcttaatggatggcgcctcctctcacctcctttcctttgtcttccgctgcatctccatcgtggaanatcaccattaaaggaccccattgaagctcanagatccagcctccatagaagtcccacaagcaagcttccatcagaaaacgtggaggaggctntggctgtgcagcaactctgatttcgtgagtatttatagaagatgacgcatcgtaantcgatacaggtattggtaatcgantacaggcccaataagccttctgggtaatcgatacaggatggtgtaatcgattacaggctgcctggtcatgtgtaatcgattacacaggatggtaatcgattaccaaagcctatcctaggctagtntcttaagagaatatctatggttatgctcaaatacatcctatatgactaattntcactactaatacactannatcaatcattcaattattatatacacagganatcatatattctatcat

SEQ ID NO: 73921 - DNA, 310 bp, Glycine max
  unsure (1)..(310): unsure at all n locations
agctgtatcgatttacatatactgtatatcgataccttatcanngatttcagaaanattatcaacagnncacatcttttatgtggttcttgaatggctatcacaggcctatatatatgtgactcgagacacgaatntgctaagagttctttagaacaaaaagggcttatcctcttaaaaagtaaaatcgttntatcctcttacacattccttggccaaattacttgtgattcaataaagaattatttgaattctcanatggttcaatctatctctttcaagagagatttcttctcttcttcttcttcatt

SEQ ID NO: 73922 - DNA, 307 bp, Glycine max
  unsure (1)..(307): unsure at all n locations
agcttcattcgcagatccctctngtaagagaaggcttantttatatagcattatcgtaatagcatattcagaaaaccanaacctcaacaatcgatccctggtaatgtggttattcagtcctgcttctatcaagttctaaggcaacaatacatttcccaatgctaaagtcacctaactgtacacacaaatgggtgatcataccaagagcacgcanagaataagcattanaagaagcattgaacacataanacacaattaattagatattaaagtaattacattcagtgttccttagaaaatccccaac

SEQ ID NO: 73923 - DNA, 476 bp, Glycine max
  unsure (1)..(476): unsure at all n locations
cacactataaaatactaagctntntcgattcattctatgtacccatggtggtccacaatgnngtttgtatatttctattctcgttcatttactttttatacccnnctttgacgtgcttaagccattttatntaagtcatttcttgcttaacctaaaaataaaataaatttccaccgaacgtttgaatngtattatccgntaacttcggttaaaatgaattccgaccgttcggtcgtgccgtaaccacgttggaaataaaaaagaggaaataaatatataataatanaaaatgtttcttagtaaaataaagcggagaatcattcggacattttctctttgggatttctcattcttaattgaattgactaataactaaggtgaaactaaggctaaaatcaactcgcctagtcaagctcgtncacaaaaataggttnntgaaagttgcatttcaatttcttactaagtaaaatggatca

SEQ ID NO: 73924 - DNA, 312 bp, Glycine max
  unsure (1)..(312): unsure at all n locations
agctagaacatctctaaaggagaaaccctccttctctagtcattctntcattcncttcttntagccatccaatcccttcttntattcacattagcccttanagtgtaaagcctctcatggcaatgagagactaaacctccattgttgggagcctggcaaaccaactggtgtaatgtaactctttcttattatctaattaatgtaatcctgtttctatggctctnttatgtgcctatnntgttattatggttngatcatccatatagtggttaagggataatgcattgaanaatgattggtttctaaagaact

SEQ ID NO: 73925 - DNA, 473 bp, Glycine max
  unsure (1)..(473): unsure at all n locations
actaagctccgaacaactgtgccaattcacttntctacttgatacagtccacggttacatctagatagctnggaatctcattgggaacgaacagaggactgatgatagtgttggagtttcaaccatgctcattcacctacgtcgaaagaaatggcagtgcgacgggtatctgcttgagcctttcatgtattgcctgctgtgattcaagttntccctcaccgtttntataataaacttgcgttgctgctgggaacagtggacatttggagagtggtgttgtgaacatcataatccgcaatggagggagggctgtgtccatacaaagcctggtatggtgacattngcaacactgagtggttggcagagatgtaccattgctcggccaagtgaaagaacacaaaccatntgtgtggaatatcggcaatgaaacagcgaagataggcaactagagtacgattcactatctctgtttg

SEQ ID NO: 73926 - DNA, 335 bp, Glycine max
  unsure (1)..(335): unsure at all n locations
ctcagagtcacctgccgcatgcaagctanacaggcatcattctatattattntatgtgatattataaaaagactcgtgacagaggtgataactcggcatacttctgtgataaattgtgtgaatgtcatatatctaacagaataataattgaattatgacaaacgaaaagttggttcatatcattcataganaataaagaaacatctacataaagataaaatctgaaaatgttacatgttctcatctattcttaccgatgtatcnaagaagcctctgttgtacgtgtatcaagtatgggataggcatagaaagatcccttctaaatatcttcactc

SEQ ID NO: 73927 - DNA, 246 bp, Glycine max
  unsure (1)..(246): unsure at all n locations
atatgtgtgatattattattaaacatcanagaattgaacagtttacaattgtatagcaccagtggtctagtggtagaatagtaccctgccacggtacagacccgggttcgattcccggctggtgcagattggttntagacttttactacttaaantttaattgacataatctataacattatagccactcaaacgaaggcttcccctggtttttcatatatnntaaaactactctcttgtatttat

SEQ ID NO: 73928 - DNA, 472 bp, Glycine max
  unsure (1)..(472): unsure at all n locations
ctatgtaaaacttgagactatcatgttattttttgaccaaatctaaatattatatcgaccatgaacaaaaatacgtggatttaatctatgtatgttgtgtatatccaaaggattacacaattatgtgatgtagaatatatcaatataccaatcattgggttatgtgatactggacttgatttggttaaacaagactttgaatgtgagcgaaataagactgttgatttcagctttggagaagagaataatttatttatgaagaaactcggtccttaccaatatgggaatcgagtcccaccacgtgaagaaatcatgagacagagcaccacaccattagccatgctggtcgcacaaangtttccctctctatatatatgagacaggactaaaactatagaggagtagagacagcctgatgactccctcagagtcatactcaatccaaggtctaccacccttgtctttggcactt

SEQ ID NO: 73929 - DNA, 418 bp, Glycine max
  unsure (1)..(418): unsure at all n locations
gcagctgaggcaactgatgcataggtaactaggaacttatctgngcctgaatcagatatctgtacctgtcgcanagggtttgtcgttgtgctcctctgctgaccaccatacnataccttgcccttccatgcagcaacctggagcaattaagcagcctgaagcttatgctgcatatatntacaatagacctcctcaacctcagcagcaaaatcaaccacagcagaataattatgacctctccagcaacagatacaaccctggatggaggaatcaccctaatctcagatggtncagccctcagcaataacaaacagcagctgctctttcttacaaaatgctgttgcccagcagacatacattcttcaccaatcaacacagcacaacccaaaaataccacagtgagccctcacaccttcct

SEQ ID NO: 73930 - DNA, 239 bp, Glycine max
  unsure (1)..(239): unsure at all n locations
atcaaacataanaagggaanaggtaatattgtagccgatgctctttctcgatgtcatgcattactttctatacttgaaacanaattgattggtcttgaatgtttgaanagcatgtatgataatgatgaaacttttggagaaanttttaaaaattgtgaaaaaaatttagataatgtgttctttagacatgaaggctgtcttttcaaagaaaacaaattgtgtgtgcctaaatgttctac

SEQ ID NO: 73931 - DNA, 304 bp, Glycine max
  unsure (1)..(304): unsure at all n locations
gcttgagggaagagagagaccaatcacgagcacatagtatggtcttaatagaggagttatctgcttgctcanaatccanaagaaacttgtctcagcatttatgcgagacagagaccagcatgttagccatcgtcagcaagtaccaagaagaactaaatctagccacggcccacgagcataaagtggcggacgagtatgcccaagtgtacgcggaanaggaggctaggggaagggtgatcgactcattacatcaagaggaaacaatgtggatggaccgattngctcttactttgaacgggagtca

SEQ ID NO: 73932 - DNA, 411 bp, Glycine max
  unsure (1)..(411): unsure at all n locations
ataaactctctctatgttttgtgtttgaatgtccaatacttntaatagaatttctgcacttgtaaatattcaatgaagtcttgtgctttatgtttattctngagacatcttttaaagacaacaatacactacgtttgtgactcttacttgtaagaatgattttgtcgctgataaccctccatcttgtcgttgcctttatacacttgaaattcaaatgttagaggaaatttcaatactagaatattctaatgagtgaatcaaccttgagatgcttttgcgtgtatggcaatcgaattgtaagttagttcttgtcattttggacacataagatcacacaatacatggctactgctatncacaaaagctcttgatgcacatcctactccccaagggcattggatataagactcc

SEQ ID NO: 73933 - DNA, 300 bp, Glycine max
  unsure (1)..(300): unsure at all n locations
catgcacgctatactatatcgatacgctcatantaaacatcggatactctcgcgacattcanatgggcataactttacacccggatgtccgattcgggcgcataatatgtcaagagtctcgaaactgaacaacggaagctgttgagaaantcacatggcactaactttcacacggatgttcgattcaggcatatcacatatcgagacgctcagaattgaacaatggaagctctcgagaaatttaaatggtcataacatctaactcgaatgtccaaattaggcgcattacatatagagata

SEQ ID NO: 73934 - DNA, 293 bp, Glycine max
  unsure (1)..(293): unsure at all n locations
gttcaatttcgagcttctcgacatattatgcgctcgaatcggacattcgtgtgaaaagntatgaccattttaatatctcgagtgcttccgatgtttaatttcgagcgtatcgatacattataaacctgaatcggacctcagtgtgagaaggtatgaccatctgaatttcacgagagccttcgatgttcaactacgaagcgcactatatgggaagcgcctaaattgacattcgagtaaatgtatgaccatttgaattctcagagcttcgttgtcaattttagcgctcatatgtg

SEQ ID NO: 73935 - DNA, 294 bp, Glycine max
  unsure (1)..(294): unsure at all n locations
agcttatgcttatgcttcattcactacattaaagccgctttttatgttggttctgtttgttggtatgatagcattacactatacgtgctcaatacgaatcatgattcttagtaacttagttntttttttgtaattctatcanaatttcagaagactcatttccattttcaactaanacatcaacatgcacctcaattgtattggccaatttcgtttcggatatttatggatgcagttataataaccaaaattatcgcaacctcttcanaactgaatggtaaatactgaatcaac

SEQ ID NO: 73936 - DNA, 463 bp, Glycine max
  unsure (1)..(463): unsure at all n locations
ccaactattgatacttggttttatccactaagcctctaagaagagcatcgaagtggtttcacaggtacaccctaccatcatatgaggaggaatgcagagaggagcaacaccatgaatagattatggccaattcgataggaacatttgacaccccatgatgagcgctaaatgctcttatcaaatttgacgaaattctcctacagttatattcctctgtgagctactactagaacggtggtgagacataccttgtaagacactctgacgctcacgttagtagcacaaaggtaggaataggtatcaagaatagattaaagtcatggtagtttcttgaacctttgatgatccttttgtagaggtgaaatanatatatgatcctaattctcttcgtagatgatgtattaaggcagatacatctatctatctttctatacgagaattcactactaaaattgacttaacc

SEQ ID NO: 73937 - DNA, 221 bp, Glycine max
cgcgctgatctacaatcgacgcatctcagtacctagactatgtacatgtactcgcaaggtgtatatgatatttacatcacacacgccttcttggctgaagttacatacatgcatactcaaagcattgacgcgtaccaatgaatgcacatgcgctcatgctaggtttactaggtcctacacatatacacacttgatgatgaatcttgactacctacgcaata

SEQ ID NO: 73938 - DNA, 336 bp, Glycine max
  unsure (1)..(336): unsure at all n locations
agctggggtgatgttgcgcgtactgatgggtaccatgaggttgttgtctgtggttgacccacgcgggtgttgaagagacagcatgggcatctccttccttcccttttgcccctgttgccccgattcttttggcattcgcgtttgtggaggaaacgtaatcaaactttcctcttttcaatccaacctcgattctttccccggcanacaccagatccgcaaagctggacagcatgtaacccactagcttctcatagtagaacactggcagagtgtctaccatcatggtgatcatctctctctcaaccatgggaggagctacttgtgccgctaaatccc

SEQ ID NO: 73939 - DNA, 483 bp, Glycine max
  unsure (1)..(483): unsure at all n locations
agatantaagcttctctgaccttgacaggcaactaactcctctatcaaactttgctatgtgctctctactnggccctttcctcccttcgcaacttgagttcattattgctaccccatagggctccatataatattgttccggccatactcttccttgcgagccctcttggtctctcgttcaagggctcttgcggtaattgcattctcttcccgtaacccggcacactccttccgaacgtgtgtagcagtcaacatgaacttctccatggcgagtttggcctttcctaactcgcttttgagagcctggacttgctcgtcctctttcggtgcttcaaaattctcttcgctgacgacatttaacttggcgagccaatcttaacctcgtatgcgaactttcgccattcgtggacccaccaatgatgcattacgaatgcctctagctcttgattttcattaacgggtttccatgcttatggattcttg

SEQ ID NO: 73940 - DNA, 289 bp, Glycine max
  unsure (1)..(289): unsure at all n locations
agcttctanactntatacatagaatgaagctctgatacctcttgttggacaagtggcctcagatatcttaagaaggggggggggttgaattaagatattacaacttatctccctaattaanaattctatttatctttctattccagttataaattcccttaataatgaatttcttagatatggattcacatagaacaacttgaatatgaatataaaacaataataaataaaagagtttaagggaagagaaaatgcanactcagatttatactggttcgggcacaccctt

SEQ ID NO: 73941 - DNA, 193 bp, Glycine max
gatataaaccagctggcaataatactccgccctatttagatgcttttattttcattagccactactcacggttggatgtttagggaagaacaccattactatacgcgccacaatgttatcctatcgcaccagaaccaaatctagaacgatgggtgatcaagacgagacacaggaacagatgaaagccgacatg

SEQ ID NO: 73942 - DNA, 278 bp, Glycine max
  unsure (1)..(278): unsure at all n locations
agcnnttgtgagaaaactttcttgagaagcttctttgagtttacttccttgagaagctagagcttagctacacacacgcctctaataactaagctcacctccttgagaagattcctaaagaagccagagcttagctacacacacctttctaatagctaagctcacctccttgagatgagaagctagagcttagctacacacccnctataatatctatgctcaccaccaagacaaaatacatgattatacaagaataagtgcctactacagagactact

SEQ ID NO: 73943 - DNA, 298 bp, Glycine max
  unsure (1)..(298): unsure at all n locations
tcgctatatgtgtttatgatgntccaagaactctggatntggtccgaccatgccctcctgatttccagctgggaaattggcgggtggaggaacgccccggcatttacacaacaagcataatatccgatgacgagtccnccgaaggtactaatacctgtgacccgtctatcaatttcgagcatgaaatgaaccaaacggaagatgaatgagatgagggggtgggaccttcttccgaactagaaaggatggttgcccatgaggatcaagaaatggggcctcatcaagaagaaacagagct

SEQ ID NO: 73944 - DNA, 308 bp, Glycine max
  unsure (1)..(308): unsure at all n locations
agctngcacatttacactaagactcactctatcagatcattataagtatntgacatggtttttcgngaaaaaatgttaactattaattattaatcttttgttggtatgagaatngaaatccataacctttctattttgccttcttcactcaccaccaaaacaaacattataaccccaaagtatttgacatattagaataatttttctactataatattatgttcatattagaacattntgctcctatctgttcacgaacacttnctttaagattccttacttaccacatgcacgaaatgagtgtcaag

SEQ ID NO: 73945 - DNA, 298 bp, Glycine max
  unsure (1)..(298): unsure at all n locations
agctttgtgaagtgtgcttctcttccattccgatcagaagtattgcgtcatcttataactgatcagccncaccccacaaacaatacatgcatatcctatcttatccaacanaaatagattgcacagaatctcataagtataacgaatggatngaatngtacagaacagaatgctgcatgcacaacaacttaactagnaaagtccttcatgtgctgctgacaccctttttgtcaaacacattgccactctcaccttctaaaagatctncaagtgatgtcactcaaagcagattttatat

SEQ ID NO: 73946 - DNA, 395 bp, Glycine max
  unsure (1)..(395): unsure at all n locations
atccttagagtcacctgccgcatgccaagcttggagtntccaagtgccaattcgtcttcttctttttccagtcttcttctggcttcaattcatcagtgggctttccttctgtgtccagcatcttgggatgttcccagcctttgatgacagctntccaggttctgctatccagtgattngaggaaggccaccatccttgctttccagtattcatagttggttccatccagaataggtggtctgttcactggtcctccttctttctccatgttcatcagaatntatctccctagatctcactcagtgatttcgagtgcctgctctgataccaatngaaattctgatactgtggacagatgtcgtacaggatgtcacgacatcgcgcttcagaacatg

SEQ ID NO: 73947 - DNA, 351 bp, Glycine max
  unsure (1)..(351): unsure at all n locations
atccttgagtcacctgcggcatgcagctatgttanactagtctaaacttactatggatngatgtttagtactntaggctacaacatagaacacaagaacatgattaattagagaaatatcctcatatgcatctacttanttgttagaaagacccaacgctntttacctatagctgtcaactnttacttgcatttactanttttaccatagaattagtttatttctggttntaaccatcaattatcaatgtttgttccaacactgccttacttctgaataaaactctacttaataagcaagttccttgagttcgatactcggatcactccgctttaaatttanatacttgac

SEQ ID NO: 73948 - DNA, 502 bp, Glycine max
  unsure (1)..(502): unsure at all n locations
taccctgatgaggatgtcccatatgttcttaatactttactgatgcatnntgcttcaaagtttcatggccttgcaggtgaagacccgcacaaacatctgaaagaattccatattgtctgctccaccatgaaacccccagatgtccagaaggatcacatatttctgaaggcctttcctcattctttagagggagtgacanaggactggctttattaccttgctccacagtccatcacgaaagtggatgacgtccaaagagtattcttagaaaaaatttccctgcttcgagaaccacgaccatcanaaaggatatttcaggcattagacaactcagtggagagagcttatatgaatattgngagagattaagaaactatgtgccagttgccctcaccaccagattnttgagcagctntgtcataccctaatttcgtccggggacctttgctcgatgacgtgcgaccattcttnggtcctcgtgaggtgcttggcacccatcatt

SEQ ID NO: 73949 - DNA, 355 bp, Glycine max
  unsure (1)..(355): unsure at all n locations
agctnngctatgaaaccttcttatgtatgtcattnganngtcagaacantttgatgcaaatgcanaatataagacatcanataacataatgtaaagaggaagggaataggagattcaacatanaaatttctatttatattggtttaccccaaccttggactacgtccaatcctcacccttcaagatgagaatttctactaacacaaccaacaacgtgtttgaccagttaactgttggattntacaactcctagccaccttgtgaacttttatactagcagactgctagaccaacaacctactcttantcaacattgctaccacctattgaactntcaacatcgcctcaccacagc

SEQ ID NO: 73950 - DNA, 481 bp, Glycine max
  unsure (1)..(481): unsure at all n locations
cagctaccgagnggaatcctttnatagacttgtagattgaagacttatgtatttcttggtcacaataaatgaataatacgcttgtatgactcattccatcattttgtgtgatacatgagatgcttgatactgggaagataatcttccatgcttgcttataagaatgaatctgattgaactctaactgaattttatgtcccaaatatgtttatttacatatttctcacttgctcttatgtttcagcatcactggaagaggtgtgggtgaatttatttgtgtcagttgtactctacagagaatgggtttacgtggacaaggtgatacgcctgtgcatatttgtgaacctgaagatactataaataagaacatggtttagttgtacatggcccatgcctggaaaggacttttattatctttctaaagtgtcttacactatgcagattgtaactaacatcattatttatttataatactcatggt

SEQ ID NO: 73951 - DNA, 224 bp, Glycine max
  unsure (1)..(224): unsure at all n locations
acgctcaacanagnactntcgacacctactgtactgtgatttgaccaaggctagtatgggaatgttgagacaatccttcaaaaccttattgatacattctaagaggttggtngtcatgtggccatatcgacgtccttctctatcataagccatcgtccattttttctttgaaatgcgatcaatccatgtagctatggctagacttaggtcacgaaagttttcta

SEQ ID NO: 73952 - DNA, 280 bp, Glycine max
  unsure (1)..(280): unsure at all n locations
atcctcagagtcacctgaggctgcagctcacacattattttctanacttgtgttgaatattgtnggctcncaccagtccttttctgaaattactacacttatataaaggggaacgccaagtantataattaaaatggaatgatccgagtatctaacacatagaacttgtntatntggcaaagctttgttcaataatcaggcatcttgttgacagaaaataataattgtgaattgaaggtaaagtatgatatatcctaatgtgaacaacaataaatgcaag

SEQ ID NO: 73953 - DNA, 292 bp, Glycine max
  unsure (1)..(292): unsure at all n locations
agctngngctctngcctcactcaccgcctttttggttttatttctagctatcttatacttattccaagtttcaaaatttctacacctagaccactccttgaaacactccttttttactctaactntgctctgaacactntcattccaccaccacgattctttacccctaagtccaaaacctctagattcacccaacgtctctttagccactntaataatctcttgggacgtctgggtccacataatannttgcacttncttgtgaaaatgccacaccatccctccatatctt

SEQ ID NO: 73954 - DNA, 418 bp, Glycine max
  unsure (1)..(418): unsure at all n locations
gacatctttatccatttaaactttntctttccggtgaagacccatatcaaggttnnttacnaatatatcttatgatattaatttaaattaatggccccgtgacttttaagttattaacacaacactttaaccaactgaactaataagataattgtgttataaaataattaatgtccgtatatataacactaaaatctataatgtatatttaatacacatgcaaatttacataatagattttaatgcaccaacattaaatgtcacacaatttattattgtaatttacatgtgcattaaatatacattagaaattaanaaaaaattaatttgtaaacatatttaaattttttttaaaatagaatccgatatacatatagatgctaaccgatgcatggaaatctataaacatggatggcat

SEQ ID NO: 73955 - DNA, 421 bp, Glycine max
  unsure (1)..(421): unsure at all n locations
agctntgagccaaaatcctgactcaccataaaccttgactcatggtgagaatgtcaattcttaccctcggaagcaaaataaaaggggagagggaaaatttccaatcaaagaggaagcaaaataggagagaaggaaaatttccaatcaaaggaaaaaaagagaggaaagggaattcccaatcaaagagtgggagaaagcaaanagaaaagaaagaaaattcccaatcaaagaatgggagaaagaacaaagagaagaagaaagggaagaaagttcccgatcaaaaaaaaataatatgcagaaaggtctttggaccggacaatatctgaacaatacagaattgtcaccaaatgaataaaaagaaggaaagggaaccatgacctataatggtctttccnctttagttgccaggcaaaatcttgtg

SEQ ID NO: 73956 - DNA, 472 bp, Glycine max
  unsure (1)..(472): unsure at all n locations
agctnggatgaagttgtgaatcctcttctccttttctcactcatttttcatgcaccaccacttccaccactaggggatcagagctccaaaactntgttttcctttagctcttactttacttgctctaaaactctctactatgagggttatttttttgtgtcaaactcaaatgatagttgggggtatttacagggtaagatgggagacacatgtgataaatatgaccaataagtgttaagaatcacataagtctttaggttacatatttaattgtccttacctcttcatntctatttatcaattagatattctagatgcttcctaggctatttaaagtaaaatatttgtttgcattcctatttttaacaataaaaaatagaaattgtgctactatctgcaccagagaaattgacctatgcatatngttttagtgtagtccaattttacttacagtactcatgttattcacacc

SEQ ID NO: 73957 - DNA, 475 bp, Glycine max
  unsure (1)..(475): unsure at all n locations
atcctctgagtcacctgacgctgcagctngtccttggagttaaacttatccttgcatcattttctgactntggaaccaccattgtatgttttacgcttcctttggaaaaccctagagaaagagactntgtcaaagctatccttttctgaaatgggtgttattttcgtgaccttcattgaactccgttcgcattgacgtgattggaatttcaaaatgatgctccttttgtagaacccgtaataccccttagccttttcatgtagtgacatgagtatttgactcagggtatcgttgtcaacattatntctganatccgtatgaagtttccttcattntgacgtatagagactnagcgtggaccgacaagcgtgaacgaagaagagacctctaagtgacgcanagaggaacccggcggngagctcacaataggtgagggggagttattatannnaattaccgtttgacaccatagtta

SEQ ID NO: 73958 - DNA, 337 bp, Glycine max
  unsure (1)..(337): unsure at all n locations
caacaagtagatatcttatggtgaaactcctggaaagtttacttgaccgaaagtggtcaagtccatgtagcctctggtctctactctcttgcctgcaaaaccaaggagtggaccagcttgaggatgggcagtgtcagggaagaccttgagtctctagaaagttttccaatataggatgtaagtggaactggccctggtgatgaggaccttagacaccatgaagtttgccatgatggagatagccacgaggtcgtcctggntgacagggttgatacccttgaagccctatccgtganagtgatnggagagagactttgtngtaatgtgcataacaaaa

SEQ ID NO: 73959 - DNA, 384 bp, Glycine max
  unsure (1)..(384): unsure at all n locations
aaacanaaatacccttacatataggttatctacataacggtctaactaactgagctaataggccaattatgttaaaaaataattaacttcgctatatataacactaaacttctaatgtatatntaatacacatataagtttacataataaattgtgcaacaattaagtttgatctaataatgtactntctacatatgctaaattttattgaacctataatgtgtatataaaatttatatatgtagaagatattattagatcaaaattattattaaatgttttacattattagatcacaattaattgctataaaatntattatggtcaactatatgtgtattanatatatattagacattgtagtggtatgtatagcaacactaa

SEQ ID NO: 73960 - DNA, 254 bp, Glycine max
  unsure (1)..(254): unsure at all n locations
ttaagtcacctgacgatgcagcttctccaccacagttggagctgcgttttgtttcttagtgcaattctccattctcaatctgtgttcgaagcgccataaattgcgttttcgttcatgcgacctccacccacgagtttggagacatgcgcaatgattgcttagtgcaattctccattctcaatctttgttcggagccncatgaattgcgtgttcagtcatgcgtcctccacccacgagtttggagacatgcgtag

SEQ ID NO: 73961 - DNA, 415 bp, Glycine max
  unsure (1)..(415): unsure at all n locations
agcttgagatgaggaagtgtagaagggtgaaactttctgcttttattcgttgaccacagagtggtacctggagatatgtcgcggnggtcaggagaccttgnggacgtcaggtggggtgctattgcccaaaaccaagcttgaccaatctcgacccaacccgggcatagtcagtcaatgagaacctgtgatgtacctaaacaggcgagctcctggcagtcaacagataaaaggaataaagaccacaaagcaaggaggcttgtggtggctggccagctatgaacttgattgatgtgtgagagatggcctctggtaatcgattaccaagggtgggtaatcgattacaaggcttataaatgaagacaggagactaagatggtctctggtaatcgattaccacggngtgtaatcgattacc

SEQ ID NO: 73962 - DNA, 392 bp, Glycine max
acaagggactaccatatggctatgcgacttataatggcttctgcaatgttcgagcttcaacatattgtaagagaaaataatgagcgagccgactcgctatcagaacttgctagtacaatagggccaatatagaacagtcatccaagacataatcttataaccaatcctagacaaggttgtggcgagtgtaactccccttggctgagaatggatgaccgagatctatgacttactggagaaagactctctcccatagaatgcatgtcaatatgaggctcaatacaatgccagttatatgtgatacagggatatacatgtctgataggcttatgacccatgtcaagttttactcggatcatccattactatgatgaatcataaaggattgtgaa

SEQ ID NO: 73963 - DNA, 461 bp, Glycine max
tgacgcatgcaagcttgaacctcaagggttaaaggcatgcatctattgttatactgatgttgaaatggcaaaacaatcttgattcatataaggaattctgtattcaatctagatttgaaaaaagtacttaaccgttgatctctcctttattgaaaaaagtagatatgggttttggatctgggaagctccctatgtatgaagttggagctacaattgatattgccttggactcctgcatggtatctttgaaaaaagtcgaggctaatcaagcttcaatgtgctcagctagtggtgtgactatgatactccctcttctggtgtctgatgtgaatcgttcacgggttctcaagatcttgtcatgtcctataactgaagatacctcaggatttttgacattctctcagcatttttctgatttttaatctctgactgagtttgtgcaataattggctcataatatg

SEQ ID NO: 73964 - DNA, 435 bp, Glycine max
  unsure (1)..(435): unsure at all n locations
agcttatcgtcctttggcttaccttttgagctaatgtgggccgtttgttgggcccggnttggcctacttgtaatgtttgtcttcctaccccanaataataagaataacaatacatgaggcatagaaatcctgtattttctttttcatttcaacttttttagttttctttcttccaaggaggatcaaccaacctactcatacaaaagattggtgaggcctatcatttaaatccaagttataaatacaagcaaaaatctgtaccaatttacaactaaacagcagcaaatctattatgaacccccatcctgtaataaaaatntgtggtgtgataattagcaatggaatngatttaaccatcaatcaatcaagaaaatatgctgctgcatcatctaatgattctgcagccatagctgcttcggctattctaataacatt

SEQ ID NO: 73965 - DNA, 422 bp, Glycine max
  unsure (1)..(422): unsure at all n locations
atccttaagtcacctgcggcatgcaagcttcttgcgtagccgctctngggtgctcagaaatccctaaacaaatccctcttattactagctattntgaattctttagttcctgaatgtacaaccttcaaattggtgctcgttcccctctttcttttctgcaaaaaagaaaatcaaatgctgtcaaaacatggatgaagtcctaagaaaatcaatatcaaagaaaacatggatgaaatcacaattaanaagcacaactacctatctttcagagtcctttggttaaattggcttgtctccttatgtagctgggttttgtttaataatcttatacctttgccttccaaaaaaaacttatcactaatcctcttttcattaatccaattntgtatgttattggataaaagatcatgggttctccacct

SEQ ID NO: 73966 - DNA, 484 bp, Glycine max
  unsure (1)..(484): unsure at all n locations
agcttcgaatgagcaccgcttatcatccgcaaacagatggtcagacagaggttctcaatcggatcttagaacaatacttgcgcgcttatgtccatcatcgcccttcagactggttccattttttatctctcgctgaatggtcatataatacaacatggcattccagcttaggcgtgtcacctttcgaaatagtttatggtaaagccccacataccattgcccagtatgtacaaggtacctcccctattgatgtctntgatcacatgctgaaggatangaccgagcttcatgccacttctgcaacgtcattttgcaaagcccaggaagccatgaaagcctcagccgataagctttgccgtgatgtgcattnntgaaatggtgattgngtttatgttcgccttcgtccctaccgccagacgtccatagcgtcgacttacaccaagctttccaaaagattntatggcccattccangtactggatca

SEQ ID NO: 73967 - DNA, 382 bp, Glycine max
  unsure (1)..(382): unsure at all n locations
gatgatgacaaatgatgatgacagaggagatgacaaaaagctcaaagattaatcaaagaacaactcaagtgagtcaaagatcaatcgaataacaactcangtgaatcacatacagttcaagatacgaatcaagaagaattcaagactcaagaagagagtttagagtcgagaatcaagattcaagattcaagatctcaagaatcaagatcaagattcaagactcgagattcaagaatcaagagaacgcttaatcaagataagtatgacaagggtttctcataaattgaatagcacatggtttttctaaaacatgttaccaaagagttttactctctggaatcgataccataatgttgaatcgataccagtacataatggattt

SEQ ID NO: 73968 - DNA, 303 bp, Glycine max
  unsure (1)..(303): unsure at all n locations
cctgttgccccgattctttnggcgttcacgtttgtggaggaaacgtaatcaaactntcctctcttcaatccaacctcgattctttccccggcaaacaccagaatccgcaagctggacggcatgtaacccactagcttctcatagtagaacactggcagagtgtctaccatcatggtgatcatctctctctcaaccatgggaagaagctacttgtgccgcaaatccctccatcgctgncatattcttaaagggttcacctctttctaaacatattctgcagttgagtacggcaggagccatatc

SEQ ID NO: 73969 - DNA, 493 bp, Glycine max
  unsure (1)..(493): unsure at all n locations
atctctgagtcacctgccgcatgcaagctngttactaaggcctgaaggaatcagctcacccattcgagtggtttgcttatggctaaagttttctctttagcccaggcgagctagatgctagcctgagcaaatttatggtcagaaaccttcatgaaatgaccatttttcctttcctttaagctttgttttgggatccatcaaacaaccataaaaaacctacagagtcatggatgaatctttcatatttaagcaaaaatattagtaaatatacaatatatatatatataactaaatttaaaggtaatttggaagaaaactattacaataaaaggataagtgctaacaatttaaacccaaaaacaacttanatttgacacttatcagccactcttggatggccttgattntctcagggtccacatgcatcccatttntgctaaccacanagcctaagaagactacactatcgacacaaaaggtgcatttatcttta

SEQ ID NO: 73970 - DNA, 503 bp, Glycine max
  unsure (1)..(503): unsure at all n locations
ggatcttaagtcacctgccgctgcagctagtactcttggcaattgttaaaactattcacttataanattgtgactcttgaaaaaatcttcagaaacaagtcacttaaagaattgtgactnttggaaatttattttttgaaatcagtcactggtaatcgattaccattaaggtgtaatcgattacacatcaacagatgtgactcttcattntaaattntgaaaattaaaacgtttagaagctctggtaatcgattacaagtattgtgtaattgattacacaagttgaaaatgtttaaacacaagttgtaactctttgaaatttgaaatcttaacgttntaaaacactggtaatcgattactaccttctagtaatcgattaccagagagtaaaactctntggtaatgattntgtganaacttcttgtgctactcaatgttntgaanaactnntttaatacttatcttgattgagtcttctcttgattcttgaatctttagtcttg

SEQ ID NO: 73971 - DNA, 259 bp, Glycine max
ctgcgcctctctttaactcttgcccacgctctcttcctggccttgtccctacttgaattgtccgctctttcttgagccttggctttgcaaggcttgggaatgatctttccgacccgccctcttcagcgggggggcactgactctctgcagttgcttctactcttgaactgactctcgctttcggctaatcttcctgcattactgcaccactacctgttacttagctctgacccatgacctcatcttacttgcttctacg

SEQ ID NO: 73972 - DNA, 426 bp, Glycine max
agcttgcagtctctcaatactgatcatatcagattttactgtctataagactccagtcacactgagaaagccattggtaacactagaaggaaacggctacgggcacaaacttctaggattacagagagtgagcagaatgctggtgatagtgaaggacaatcagatagtattacagctggtgggcgcaggatgaagaggcaacagttgctccactgacgcgagttactagggagatgcgatacaatctcatgcggcataagatgtaagtttagtctcatgcctcatctgcgatcaatagcagtttacattatatgtctatgctcgaatgagtttactttcttggggataattatctatgatgaggtgtaaattgaatatatgtcggtatcggctgtcgggataatgatatgtctgaaataaattcat

SEQ ID NO: 73973 - DNA, 465 bp, Glycine max
  unsure (1)..(465): unsure at all n locations
agcttattacatgtngatgatataacacacatatgtgtataaattgttaaaataaattagaaattaatagttcanataataaaattaaatggaaggatattaatatattaagattcaacgataaatactttcaatgcatntttagtttaattatttattaactctttttaattgaaaaataatatagttcaatttaatatatacatgttttgtgccatgtaagtattaatattgtatgatgtttatataattcatgaggtgtgataacatgtcgcattgagaatatagcattgtgattgagattgagtgtatgtaataaattgagtgtgttgaatcgtaagatatatgtgtatcgagaatttgtacgcattgagttgtgatgaattgtataatcacacaactgtaagaccctttaagggcaacgagttaatgtatgatgagtaatatgatgaaatccactatggg

SEQ ID NO: 73974 - DNA, 396 bp, Glycine max
  unsure (1)..(396): unsure at all n locations
tgctcgagatgatgaagtgttgaagggtgaaactttctgcttttattgttgaccacagagtggtacctggagatatgtcgcggtggtcaagagaccttgaggacgtcaggtggggtgctattgcccaaaaccaagcttgaccaatcccgacccaacctcggcatagtctgtcagtgagaacctgtgatgtacctaagcaggcgagctcctggcagtcaacagataaaaggaaaacaagaccacaaagcaaggaggcttgtggtggctggccagctgtgaattntgtgtaatatgtggattgtggcctctggtaatcgattaccaacggtgggtaatcgattacaacgcttataattgacgacacgaggctaagatggtctctggtaatcgattacc

SEQ ID NO: 73975 - DNA, 476 bp, Glycine max
  unsure (1)..(476): unsure at all n locations
atcctctgagtcacctgacgcatgcaagctnggagcacacaatntagaaagcctagcttgagggggagtgttaaagttgctggtggataatgttttattaatgttttatatttcttgcttgttgtcgaagctcttagacgctgtccggtaatctgtcaccataggctaggctgtagccttcatcatgaactatntttggtaccatctgtcaattctcatatatatatattagtatatataattgggtcagagaagagagatgagagagggagagacagagcgagacagtgagagagacagcgggtgggaaagagtgatgtcgagaatggagagaatagagaatgagaggacgagaggtatgaagggtccgtgtctgtctatcgtcagggaaaggaaaggatgtcaacaacgccgcatgcgagtcaactggagagatcatcggaatatatcatctgtgtacttcacacgttttcctg

SEQ ID NO: 73976 - DNA, 348 bp, Glycine max
  unsure (1)..(348): unsure at all n locations
tcatgctccttgattcataattgattcagaccacatatgctgatcaaccactacctacacagatgcgcgtgcgaatacaggcatatgaatcgtcagtcatccacatctgttcagctctcttcatatctatatgtatcacaatttaaaataatataattcttaaaaacatctaagggcctgtgaggactgcacggacccacaggaccgaganatgagaatactctcccttctgctgacatccctacgcagcatatcaatgctctgatggtcgaaactaataatgcttactatcatgttcataacacacaacatgtgtggtatatagtatcacccgctttcatctcctga

SEQ ID NO: 73977 - DNA, 323 bp, Glycine max
  unsure (1)..(323): unsure at all n locations
tcttatgcaactgtatttgagcggctccaggttgactaatgatgcattgaaatcactaaaaaatatgccaaggttgttgttcctcggtttaagttacaatgcttatgaaggtgaaactntgcattntcattgtggagggtttccgaaactaaagcaactgtccctcggaagttngatcaattgaagtgatccttatcgacagaggaagcactgtgttctgtggaagaaaatngtntacgagacctctcccaactcaaagcagttccctctggaatcaacacttggagaagcttanagatctctatatcgacgacatgccaact

SEQ ID NO: 73978 - DNA, 456 bp, Glycine max
  unsure (1)..(456): unsure at all n locations
agcttccgtttcaattggagcgtctcgatatattacggtactcaatcggacttctaaatataaagttattgtcgtttgaattatctcagagcttctgttgtncaatttgagcgactccatataatacgggactcaatcggacatccgagtaaaaagttattgtcgtttaaatttgctacgagcttccgttttcaatttggagcgattcgatatattacgagactcaaccggacattcgagttaaaagttattgtggtttgcatttgctatgagcttcctcattttcaatttcaaacatctcgatatattacgggactcaattagatatccgagttaaaagttatttcggttntcatttgcaaggggcatctgttntcaatttcgagtgtctcgatatattacgggactcaatcggaaatcccgaataaaatttgttgtcgtttggaatttgatact

SEQ ID NO: 73979 - DNA, 311 bp, Glycine max
  unsure (1)..(311): unsure at all n locations
aactgaggtcgataaagctaagcgccagtcatggcagctaagcgagattcattgcggcaatatgagcgctaagcgagaacctttcagctaagcgcatgcttctctgtacttaagatgcatcattntagctaagctggccagagccagacttagcaagagtacaactttttaatctgcgacctcgctagcggactactctcatgctagcgagttctgacaaaacatgaattgaatgtcgtaacgctgtcactagcagcctattaaaaccaacattctctgctcctaccacggccgtaacaagatcaactgta

SEQ ID NO: 73980 - DNA, 383 bp, Glycine max
  unsure (1)..(383): unsure at all n locations
ataccctggactcatgctactaatagcattaatcatgggttgataatatggtgagttaactgcattaaatggaattgaagcatctatcatccattttgcaatggctntgtcacacttttctacaattngcttattntgcaagacactcttcaagcaaggttgagctccaggagttgttctaggcatganatactcatctacataaggagtgttcttccccttttgagactngaaagaaattnggtttggagtttctcttaattcctcaactactctcacaaggtcttcatccatttcaaatgtatcactttntttagaatggtcttgctgcactnttctnttcttgttctnttcaatctattcaagtaatggcttcatttcat

SEQ ID NO: 73981 - DNA, 423 bp, Glycine max
  unsure (1)..(423): unsure at all n locations
atccttagagctcacctgcagcatgcaagctngctctanantacattgatgtttgtatttatgggatgaggttgtatgtctattttgttttaagagtagtgtcccactggtaaaactaactttccaaatgtttgccttcgcaggaaatggccccgaggaagcttgcctcanagaggtccaggaaggacaaggcagccgaaggaactagttccgctccggagtatgatagtcaccgctttaggagtgctgtacaccagcagcgcttcgaggccatcaagggatggtcgtttctccgggagcgacgcgtccagctcagggacgacgagtatactgatttccaggaggaaatacggcgccggcggtgggcatcactggttactcccatggccaagtttgatccacaaatagtccttgagttttatg

SEQ ID NO: 73982 - DNA, 486 bp, Glycine max
aagtcacctgacgatgcagcttagaaaaaaattgttataaaaacttatgtatatttaatattatagtagataaaccatgataaatcatcacaagtaaaacagaacgtgcgatgggtacggaaaaaatgagcgattaaagaaaagtgaagaaaacagaaatataaactgtaataaataatgcgatgagaaatatttcttttgaaaaggatgtaaaaaaagataatataaaaaaaaatcaaaattacaaatactttttttttggagtaatgtaataatgttatgtaatactgtatgcaattccaaggcttcctaatttgtcggcaggaaaaatagacggtgccttttcttccaattatacaaaatcaaaataccattggtatttattatttactgcggcgacacacgcaccgtacacattacataatttattactactaaatactaataaaattcaaatatgtaccttttttcttataaatgtattat

SEQ ID NO: 73983 - DNA, 256 bp, Glycine max
  unsure (1)..(256): unsure at all n locations
ataatatatcgcgatgttcgatatcgaattacggtttctctcgagaatatcatatggtcatggatggtcgcactctggtccaattcatgctgataatatatagcgactctatatagtacacgactgatactctctaganattcaaanggttactgctgttcacacggatgaccagctccggcttataatatgtagctaggctacatattacacaactgaaactgtcgtgaaactcaaatagctcatgctgttcgca

SEQ ID NO: 73984 - DNA, 412 bp, Glycine max
  unsure (1)..(412): unsure at all n locations
gttgactggtgagcaggtatatcagcgggttcaacacctgaatattgtatttgggaagacccataagaaggataaaagtcagagtcgcatatggaagaagaggtccattttctttgatctttcgtactggtgtgatcttgacgttagacattgtattgatgttatgcatgtggagaaaaatgtttgtgacagtgtgattgggacgctccttaacattcaaggcaagacgaaggatggcttgaatacccatcaagatctagctgatatgggtatacgatcacagtngcatccaacgtctgatgggaagaaaatctacttgcccgcagtctgccatactttgtccaagaaggagaagataacgttttgtcagtgttctcgtcgggtgaangtccacaatgatactcttcaaata

SEQ ID NO: 73985 - DNA, 381 bp, Glycine max
  unsure (1)..(381): unsure at all n locations
gcttanatggaccatcgcttcatttggtcgccattgattacttcacctaatgggttgaagcggcttcatacgccagtgtgactaggagtgtggtggttaggttcatcaagaaaaagataatttgctggtatggtttgcctatgaagattatcactgataatgccaccaatctgaacaataaaatgatgaatgaaatgtgtgaggatttcaagatccaacaccataattctatgccttgcangcccaagatgaatggggcagttgaggctgctaataagaacatcaagatnatagttcagaagatgatcgtgtcatacaaggattggcacaagatgctcccttttcactacatggttattgaacctcgatacgcacatcaac

SEQ ID NO: 73986 - DNA, 383 bp, Glycine max
  unsure (1)..(383): unsure at all n locations
gcttcttatccaggcactatctcagaggtgaatcttcttcttccatggcttattctctcgatggcgaagcttcttatccaaggcactctaagcttcttcttgtcgcagcaccacttttcttcaatttagaatctgctacattttgtgttgtagctcctttccaccccttaaagttgtggaacaaatattccctcgtggattgacaactatttgggatgagaagtggccagaaccttgttgctacaactgtntcatagtggtagctaattgaacaattcgagtatgcaaatcatgaatcatggcacccattgtgttgcaactaaatgttgcttgcaccattcgctcaccaattcctctaaagaatgtcttacanttgtttggac

SEQ ID NO: 73987 - DNA, 468 bp, Glycine max
  unsure (1)..(468): unsure at all n locations
cgacctgcngcatgcaagctcggctcgaggtacttaccacgtgaagatcgaagatttatgtataacgaatgaagaacgtcgaagaacggctgaaatctttgcgaaattcctcacggataacgttacggaaacgtttcggatgcgcctcggcttagattttcttcacggaaactatctttccaagcaaattcgaaagagagagaagtgcctaaggggctgaacccctttcttcttgccttcctctcctatttatagcaaaataggggacgtggttgccgcccagctcgcgcatgcgagctcatctctgcctagctgagcacggttgcttcctccataagcatccgccttctggaggaatattccagagggccctagtgggcctgggtgctattttgtcccccatctttactaagtacacccacctctgctggtttatgtgatcctatttcgtaagttacggaacttact

SEQ ID NO: 73988 - DNA, 464 bp, Glycine max
  unsure (1)..(464): unsure at all n locations
agctatagtaactgtgtgcaaccacaacatttacattgagtgtccttattgatatgttctatagttgattgtgcacaaatttctaattttcataacatatgattcatggatatgatctaggcattctttctttctttacattntaagccactggccaaatagctattccaatatatatttttgccatttgcaagctatttgagccaaacacttgatatttttggaacactaacctaggataaaagtttcctaccttaccttangttangagagcaagggtgtttttgatggngatntctatcatttggtggctaatgtgatgtgaatactctatntttatgggtgttaaagaaaattaaatatttatcagaaaagaaaagaaaaaaatagaaaaaacaataagagaaaagaaaaaatagaggaaaaacangttctttatggataaataaatgtctgaatcatgt

SEQ ID NO: 73989 - DNA, 183 bp, Glycine max
cgaatgaagaacgtcgaagaacggttgatatctttgcgaaattcctcacggaaaacgttacggaaacgtttcggaagcgcctcggcttagattttcttcacggaaacaatttttccaagcaaattcgaaagagagagaagtgcctaaggggctgaaccccttccttcttgccttcctccccta

SEQ ID NO: 73990 - DNA, 451 bp, Glycine max
  unsure (1)..(451): unsure at all n locations
agcttgagaaacttgatgttggatcaagtggcctcagaatatttaatagggggagggggggattgaattaattattaatgtaccttgaataattaaaacttatccttcttaatgttactagattcaattaggctntactactaagttatgtaacttaaacaaaagtaaagcgtaaaagtaaagtacacagcggaaattaaaaagtgtagggaagaagaagacaaacacaagaatnttatattggttcgataacaacccatgcctacatctagtccccaagcaaccaccggttcttgagaattctttcaaccttataaaatcctttacaagccaaagatccacaagggatgtaccctcccttgttctctttganaacccaagtggatgtatcctccacttgaactgattcacaagagatgtaccctctacttgtaccacanaggatgtaccc

SEQ ID NO: 73991 - DNA, 498 bp, Glycine max
  unsure (1)..(498): unsure at all n locations
ctgctgcatgcaagcttcttcttgcatggcatattccctagtggatggcgcctcctctcacctcttctcctttgtcttccgctacatctccatggtggaaaatcaccattaaaggacctcattgaagctcagagatccagcctccatagaagccccacaagcaagcttccatcaagtggtaattagagcacaagagcttcaagtaggtgctccttaaacctccattaattttttgctttaccttctattccattattgtttcttcattntttctccatgtatctcctcacatgtcttgtgctaaatgtngttaacatgattctttagagttacaccgattaaacttgctatagaagctagattntgatttctatggttcaaatttcttgttcttgttcttgaaccatgaattgtgttgagnttagggtcctttgactnttgtcttgntatttttttttgtggctgaaacctaaaccataaaattcttacanaaatatt

SEQ ID NO: 73992 - DNA, 448 bp, Glycine max
aacggttatcctattgagtattcgaatatatcgagacgctcgcattggataagagaagctcgtcgatcatgcatatcgcaatagctattagctcggatgagcgatcgcctgccgtaatatatcgagacactcgaaattgaaagcagaagctctgagcatattcaaacgacaatgacttttgactcggatatccgatagagtcatttaataattcgagacgctcaaaattgaatacagaagctctatgcagattcaaatgacataacttttgactcggatgtccgattgagtcattttataatttgagacgctcaaaatggaatgcaggagctcttaccaaattcaaatgacaataactttttactcggatgtccgatggagtcccgtaatatatctagacgctcagaattgaaaacagaagctctgagcaaattcaagcgaaagtaac

SEQ ID NO: 73993 - DNA, 383 bp, Glycine max
  unsure (1)..(383): unsure at all n locations
tgtcatgaagctattgcaacctataatgtagttgataaccctacaattaacttcagataatcttaatctaattgctttagcaatgtattgatatcaggacaaatggtcatcatatacacaacagaggtatagtcatcctaatttactcagttacatgaagcttgtcatgttcaaaatatcacatatgcaaatngatgataccttccaaataatagcttcagaagttgattatcacgactcanaattaaagcctgcaccattacactgtcatactatntaaccataacagagaatntaatacaaagtcacactaaacttgacttacatcacacctgcttaagacactaagtataaacattgcatgaagtatacatgcattcagt

SEQ ID NO: 73994 - DNA, 395 bp, Glycine max
  unsure (1)..(395): unsure at all n locations
ctcaatacaatgtcaataagttggaggatcttaatatgtactaaacctttctaatgattgatatatgtagtagacattttattcatgacaaacgttgaatgtgtatcccattatttctcaatatgttgatatttctatgaatttttatttgatacatgtaattgctgaagacaactatagtttatggaaaaaaatatacaacgaaagtgtgatgtctgtatacataatgtgtaacgaagtgacactcctattgcatatatttntctggataaaatacacaatgaaagtatgaatttgttctattatgtaccacaaaagtgtgactctgttacacatcattaaatagaaccatacttctgttttaaccccccatgcacaacggaatcacaattctg

SEQ ID NO: 73995 - DNA, 477 bp, Glycine max
  unsure (1)..(477): unsure at all n locations
ccggatcttaagcacctgggctgcagcttgaatcgatacacacatactgtaatcgattaccataggagaatttcagaaaatattctcaacagtcacatcttttcatttggttcttgaatggccatcaaaggcctatatatatgtgacttgagacacgaatttgctaagagttttcataacaaaaaggtcttatcctcttaaaaagtaaaatcgttttattctcttacaaattccttggccaaaacacttgtgattaaataaggaattatttgagtgctcaaattgttcaatctatctctttcaagaattcttcttctcttctttattctgaaaagggattaagagaccgaggatctcttngtgtaaagaaatctaaacacaaaggaagggttgtccttgtgtgattcagatattgtaataaacttttacaagatagtggaactctcaaggaggttgcttgtggactggacgtataca

SEQ ID NO: 73996 - DNA, 311 bp, Glycine max
  unsure (1)..(311): unsure at all n locations
gcgcgggtctggagacaaaggtttagtggtcgcgatatgcgaagatgatgttccgagtacatttggattggtacgaccatgccctcctgattntcagctgggaaattggcgagtggaggaacgccccggcatttacgcaacgagcataatgtaaacctttacggttttaaaagctctatagttgggcctaggctntagagtttttccttttggtaaggctntgtgtcttttgtttttgaatntataatacaaggatctttcttcatctgttcctacgtctctacccattatcattcantttgcatgttact

SEQ ID NO: 73997 - DNA, 503 bp, Glycine max
  unsure (1)..(503): unsure at all n locations
atccttaagtcacctgangcatgcagcttaacattggcctaagaaaatcactaattttataatttagattggttaactannaattaaaagcactcttggagcttaattatatacacgtcaataagtaaaggtacttcaccttgtataatgatctccttgtgtcaattggcgcaaactgaatgcacttgtctattacaactgtgcaaggggtggtaaagtcactgccatatatctcangattaaagaaaatctgcatacatcatacggaaagcatacagatatgttaatatgactgatcctgttaacattatgacccaaactgaacccattgattcagctcacaattagaccaaggcactacntatatttcattaattcttcagtagtttagggaacaagatcaagtggaactaatagctatacatagataagcggtatcaagactctgagagatggagactacttgatcagttcatcctagattanaccccaaccagtctaca

SEQ ID NO: 73998 - DNA, 475 bp, Glycine max
  unsure (1)..(475): unsure at all n locations
gcaagcttggacttcctgtgttctgagaacctctccttcctcatgtgtacccaaacccaatcacctggttcaagcaggactttctttctgctgttgatggcttgccttgcatagctcgcatttttcttttcaatttgagccttcacttgctaatgcaacttcttcacatactcagctntagcctgtgcgtccttatgcttaaacatagcaatgttaggcatatgcaacaaatcaagaggagtttaaggattaaatccatacactatctcagatggtgaacaattagttgtgctatggacagcctcgatataagcatactcaacatgagacaaacatgcttcccaagatttaagatttttctttaaaacagtcctaagcagtgcgcctaaagtcctattgactacctcagtatgaccatcagtttgtgggtgacaagtagtagaaaacaacaatctagtaccaatcttaccccaca

SEQ ID NO: 73999 - DNA, 197 bp, Glycine max
  unsure (1)..(197): unsure at all n locations
ctgtgtgatcattatggatctgtttgtggttcatatgtagctaatatcggtatctgtccagtctctaatatagaattatgagctctatatattggtattctcattgctcagcgaagacgattcaagcagttcactgatggagtcaaatcttagctttntatcaatcttctatagcataggtgcattgattctcatcc

SEQ ID NO: 74000 - DNA, 419 bp, Glycine max
  unsure (1)..(419): unsure at all n locations
agctntgagccaattaaacgacaatatctcnttactcgtatgtcttattgagtcccgtcatatatcgagacgctcgatattgaatgttgatgctctgagcaaattcaaacgacaatatacttttactcggatgtctgattgagtcctgtcatatatctagatgctcgaaattgaatgatgatcatctaagtaaattcaaacgacaatatctttttactcggatgtctgattgagtcccgtcatatatcgacacgctcgaaattgaatgttgaatctctgagccaattcacacgacaataactttctactcggatgtctgattcagtcccgtcacatatctagatgctcgaaattgaatgttgatgctctaagcaaatctaaacgacaatatacttttactcagatgtctgattgagtcc

SEQ ID NO: 74001 - DNA, 303 bp, Glycine max
  unsure (1)..(303): unsure at all n locations
accattcgttgtggttcgacaagaatagcccattagatccttctacaatctctnttcttcctccacacctcgaaatcttctacgtggcatcatcgactgcgcctctntcctcactgactgctccttctgctccatcgtcttcaaccttgttgtcctctttctttcatctcatttacttctcttgaaatcttctaagcaacatcattccctttcatctntctttccactctntggctcttcctcaatnntccgtaataatttgcccttctctttctttcatctctntngcttctctctntcatg

SEQ ID NO: 74002 - DNA, 509 bp, Glycine max
  unsure (1)..(509): unsure at all n locations
atccttgagtcacctgcggcatgcaagcttcanacctcaattntctcgacagtttctntntcgttcacttgtgccccatatgattataaacagatggggtagcgttattttcctcgaagattgaagatttatacagaaatgaaaagcccgcgaatcaaaatcgctttgggtagctcgttgagctcggaattttttttccttttagaaaaaaaaaggtggtttttttttctgaagatgatgactattgattggttgtagcatctctgaaccactgaacggaaactgatctggtggaagctgtgtctttattttttctctgtgattttctcgagaaacaaggagaagcttatcaagaatnttggaagaaggtgcgggtatcggattggatgtgttttctgagaatgagtaaaattaaaaacgaatntgacaacgtggctcaatnntgatgggtcgattcatgataactgtactcctaccaatatcaattatggtgtctgctgcattaatac

SEQ ID NO: 74003 - DNA, 477 bp, Glycine max
ctgatgcatgaagctctcgaagggatcaaaagtgccttatgaatcctcctgtgcttatgccatctttacctagaaggcctctcattatgtacatgacaatcttggatgagtcaatgaggtgtatgctggggcaacatgacgaatctgggaagaaagagcgcgctgtttactacctaagtaagaagttcacgacctgcgagatgaattactccttgctcgaaagaacgtgtagtgtttagtatgggcatcccatcgcctatagcagtacatgctgagccatactacctggttgattccaagatggacccggttaagtacatctttgaatagccaactcttacgggacgaatccgccggtggcatgtcctgctatccgagggtgatatagtctacgtcactccaaaggcgataaatggaagcgccttagcatattatctggctcaacagcctcttaacgactaccagcccatgcatgct

SEQ ID NO: 74004 - DNA, 293 bp, Glycine max
  unsure (1)..(293): unsure at all n locations
ctcagagcttcaacattcaatttcgagcgtgtcgctatattacgggactatatcagacatccgagtaaaaagttattgtcgtttgaatntgctcagagcttcaacattcaatttcgagcgtgtcgatatattacgggactcaatcagacatccgagtaaaatgttattggtcgttgaatntgctcagagcttcaacattcaagttcgagcgtctcgttatattatacgactcaattagacatccgagtaaaaagttattgtcattngaatctgctctgagcttcaacattcaa

SEQ ID NO: 74005 - DNA, 272 bp, Glycine max
tactcacaggccgctgcagctcctaatacctattgagaataagatgccatgattgatgtgtctgtcttagatgaaagacgttggtctctcatgaataatgacaaagataacatgcctcactctatatgctaataacttagctatcaccttgtacatacacccaatcaatgagaatggttagcgatcatcacaggactgagggtgtttaactgctggaacttaagccagaaaggaatcagtactgcctctagaggagcttccatgcacatgga

SEQ ID NO: 74006 - DNA, 449 bp, Glycine max
  unsure (1)..(449): unsure at all n locations
ttaagtcacctgacgctgcaagctgggatgtgcgcgactgatgggactatgatgtgtttgctagggttcgacccacgcgggtgttgaagagacggcatgggcatctccttccttcctttatgcccctgttgccccgattcttatggcgttcacgtttgtggaggaaacgtaatcaaactttcctctcttcaatccaacctcgattctttccccggcaaacaccagatccgcanagctggacggcatgtaacccactagcttctcatagtagaacactggcagagtgtctaccatcatggtgagcatctctctctcaaccatgggaggagctacttgtgaccgcaaatccatccatcgctgcgcatattctatanagggttcaccctctgtcttaaacatattctgcagttgagtacggtctggagccatatcagaatatgactgatact

SEQ ID NO: 74007 - DNA, 303 bp, Glycine max
  unsure (1)..(303): unsure at all n locations
atcccgcatgatatcaaagcctgtccttaaacccattattgaatcacctaccatactattcatgcaccaagcccattgactagagatagtgcttaataagagcttataaagctaaggcacatttcaacttacaagacggtttcgtaggattgagttagacccaaatccaacattatggatgaatcctagtttatatatgggtttgctaatgcactcatacctttnnttagtatgagtgcattagcaaccaacaccaaaattattagacagaataacccagcaactctcctctctgtcagtcaa

SEQ ID NO: 74008 - DNA, 501 bp, Glycine max
  unsure (1)..(501): unsure at all n locations
atcctctgagtcacctgacgctgcagcttaagaatatggcctaacaaacttcttattctcataaagacactctataaataggccatctatgttaatggagagggttaccactactggacaacccgaatacaatatttcattgaggcaatagatttaaacatttgggaagccatagaagttggaccttatgtacccaccatggtggctggtaatacaacaatagagaaacctanagaagagtgatatgaagatganagaagattagtgcagtacaatttaaaggcttaaaacattattacttctgctctgggaatgataaantatttacggtttcaaattgtaagagtgctaaggatatgtgngacactctacaagttacacatgaaggaacaactgatgtcaaaagatctangataaatactctaactcatgagtatgaaattattangatgaagacaaatgaaagtactatacaagatattgcagaaaagattacacaca

SEQ ID NO: 74009 - DNA, 448 bp, Glycine max
  unsure (1)..(448): unsure at all n locations
agctnggagaggatgcttcaatggagganaagatagagggatagaattagagaggggggagcactaaattgaaggaagaaaaagggagagaagttgaactntgagttgtgtctgacaagactctcattcatcanagttacaacaagtgttacacatgtttctatttatagactaggtagcttccttgagaagctntcttaagaaaacttccttgagaagcttctttgagaaaacttccatgagaagctagatcttagctacacacacccatctaaaaactaagctcacctccttgacaaaatacatganaatacaaaanaaaagtccttactacaaagactactcanaatgtcctgaaatacaaggctaanaccctatactactagaatggtcaaaatacaaggcccanaagaaggaanaacctattctaatatntacaaagaagagt

SEQ ID NO: 74010 - DNA, 476 bp, Glycine max
  unsure (1)..(476): unsure at all n locations
agcttaagaaaatccacaacatctttataattgtaatatgataacaaaaaanagtgattntaatcacttaaataaaagttcaattggattaattttacaagttatttaagtactattgtgacaataaaaaaattgtatgataacttaaacaaatataaattttaatttatattgttataatttttttatactatacattttaataaaaatcttaaaaaaaggcataaaagaaaaagaaaacattnttttattaatatgtgtaaataaacatgttaaaatactactcataattaaattatccatatttatattctctaattntattattntaaattgatttcctttatttatcttattntattatattntaaataaatattntttttcttaaaaaaaaacttaagaattcgggtccccaacccgaattcttaacttgatttgattntttaagaaaatatttataaatttaatcttcc

SEQ ID NO: 74011 - DNA, 357 bp, Glycine max
  unsure (1)..(357): unsure at all n locations
cacccctctcataactaagttcacctccttgagaagcttncataagaagattcctaaagaagttagagcttagctacacatacctctctaatagctaagctcacctccttgagatgagaagctagagcttagctacacaccccttataatagcgaagctcacccncatgacaaanaacatgannatacaaaananaaagtccttactacaaagactactcanaatgccccanaatacaaggctaanaaaaaccctatactactagaatgggcaanatacaaggcccanaggaagganaacctattctatattacaaagataagcggctcatacttacccatggctcngaatctacct

SEQ ID NO: 74012 - DNA, 417 bp, Glycine max
  unsure (1)..(417): unsure at all n locations
ctcaactaaagaaatacggctacaagcaactacaaaggtaagcttgcatactgcaaaaagactaagagggaggggtggaggaccttacgatgaggacaaagtcctanaatgtctntataaagagttcctgctgcagctggaacagtattcagctacaagcttggcgaatgaagaaagttctacctccataagttntgaaggttcatcaatcatcatatacttcaccagttgtcgacctacgaaatacgtacaatcacanatataaaactcaatgtcaatggtatgaatcanacaatntttactgtcagcttacaccaacangctgctatangtctccttannaccaaggaaaccaatttcaagaattaataagaataatttgaanttctagaatgntcgtacaacattaccatatct

SEQ ID NO: 74013 - DNA, 501 bp, Glycine max
  unsure (1)..(501): unsure at all n locations
gtcacctgaggcatgcaagctngcaaanatgaagctgccatatactcgttatgatgatctttttatttgatattgcctatgaacatggataagaaattctacataggagaagccacctgcgctcttgtcttctatcatatatgagaagaataacattcctgatggatggtaaataagatagtttaagtagaaaaatcaagaacaatgtacaccagcataacaattgtctacagatttctttcttctattntaatacttcccagtctaaactagtctagcataccaactactaatcttagtagacaatgcagacaagttgagactttagtaaacaagttgtacattaagtcaaagcatgaatgactcactgaccatattgcttttgaacttgaagctaatatntaaattgttaaaaacaatgtttaattctaaaaaatgtngtttggtcatgtgaggcaagtaacagctacaatatagcataagtaactctgcaaagaaact

SEQ ID NO: 74014 - DNA, 392 bp, Glycine max
  unsure (1)..(392): unsure at all n locations
gagtacatgatactgactacttctttgagctttcattgcaaaatgagtaccaacgtcactaatcaaaatctaggcaccccaaatcgagcaaagatattcttctttaaaaatttcaccacaatcttagcatcattcctttgagtagccacaacttccacccatttagacacgtaatctacagttaccaagatgcactcattaccatcagatgaggggaaaggacccatgaagtcaataccccaacaatcaaaaacctcaacctncataatgttttgagaagcatctcattcttcgggaatccccccctattcgtgacatgatcacacataagaatgggatgggattttgaaagtgtgactagaaaatccactgcagacctacaactgtttgct

SEQ ID NO: 74015 - DNA, 440 bp, Glycine max
  unsure (1)..(440): unsure at all n locations
cctgaatctaaacttctctgattacatgtttatgactgggacaagggtttccaacgactntgnttctagttacttgttgattntgacagaaaaaattaacataaaaatcttagctatagtagttatcattgactaagctcttaaggtagtcatgtttgaaagcaagttcatcatttttcctttgaaaattttacgtacgggcaacctatgtggtctaaatgcccatttcttttaaagtttcatcaacaaatctaacataacaggtatgttgcaagcaatgactatgaaaatcatttgaaaaaattaattatgcatacattaaagggaagcagtgaacgacagggtacacnagaaaataaagaaactcatagccttcaactgggattcttctcgcaagtgccattccaagtgaatcctagtagaagctatggttgatgatg

SEQ ID NO: 74016 - DNA, 295 bp, Glycine max
  unsure (1)..(295): unsure at all n locations
accgaagctctagtgctagcgttaccagacttcanagcacccttcgtcgtggagacggatacatcanacacgggtatgggcgcggttctatctcaggggggtcaccccattgcttttttcagtaagccaatttgcccaagaatggccaacacatccacatacgttcgagagttggcagccataaccgccccgtcaagaaatggtggaatatctactgggcccggattcccatcctaatgatcatagaagctaagaaactcatgagtaagccattcaacgcctgacagaccatttc

SEQ ID NO: 74017 - DNA, 484 bp, Glycine max
  unsure (1)..(484): unsure at all n locations
agcttctactttgacaatcacagtgtcaaggacttaactgatgacattattgcaaattcaatgttttgacattccttatatttgtaggtactaccaatgggaaacgggcaaccccaaatccagaaatgggttctacatctcaaggggaacggaagaggaagcggttagcaaccgacggagaggaggaaactttgcaaagccaattaattgatgtcttagaaaagaatggcaaaatgctacatgatcaacttgaagctcagaacctgaatttcagtttgatcgccaacagcagaaagacactgcaagtaacatagttgctgtacttgataagcttgcagatgctctanggagaattgctgataaattgtagagcaaggaggatccgaatagaatagtgtacataacaatntggagtcaacaatagtgattcccataatttatctcaggatagtttttagaagatgaacatcatactagttaccct

SEQ ID NO: 74018 - DNA, 436 bp, Glycine max
  unsure (1)..(436): unsure at all n locations
agcttanggatggaatacttacttgttgatgatgaacattaacgcanaatggaatcaaaaaatgccgaaaaggatgaccctanggctgcaaactcgtcaatcccgtgggtatggcttttgaaaggggggaagggaagtttttgaatgcaaaaacgcccnccctttcgtcattcttatattntggtgcagaggtggctcgcccaggcgagctcagctcgcccaggcgagctaacctgcaccccccccttttnttttttttnttttttttttttcgaggggaacattaaccatgtcccctcccttctcagggattagcattttgcctaacttgaacttacttaggtcagaattaggcgttgattacttatttaatcattactcttttccttttcaaaacaaacaaatagtaaaagaaagctgcaaaatacaaaggata

SEQ ID NO: 74019 - DNA, 484 bp, Glycine max
  unsure (1)..(484): unsure at all n locations
agctntgacctcaatgatctcagctgtgtctcttccttgatacaacctcccanaattatctagtgcatcaagccaaatattataccactctatctgcattntgtagttgtagcaaaacagcaaacatttcataaaaatgtacactgcctacaccatanaatccagaaaagaaaccagacccaaaatgtaaatgagcactgagcaggacaactacgatggaaatgctgctagctagtttctctttggcttctagcaagacttatacaaaatgaanaaaaaaaaagaaacagacaattgttaaacatgcctcccataattattaaatatacctccttttcttatttttttattatntaaaatacttttacagtataaagtatntttgaaaggaaattggatacaatgcaagtatatatggcaatttggaggctnntagattgcaggtgaaatggatattaaaagctgagaagtagaaaatcaagac

SEQ ID NO: 74020 - DNA, 214 bp, Glycine max
catcgaccggatccttagcacctgagctgagctactctgaaataacttgtattggttttatatagaaaaagtgtggcactgtagcggaaatactttgcctctaaagatcttactgttcacttgtaggcttccatgatggagacctccctaatttgatgtgccctatcgaagctacataaagatgaccgttattcgaacactaacaattaaacga

SEQ ID NO: 74021 - DNA, 429 bp, Glycine max
  unsure (1)..(429): unsure at all n locations
gcttgtaatcatttccatatactgttatctattaccatagcagattttcagaanatattatcaacagtcacatctttntatgtggttcttgaatggctatcanaggcctatatatatgtgactcgagacacgaatgtgctaagagttctttagaacaaaaaggtcttatcctcttaanaagtaaaatcgttntatcctcttacaaattccttggccaaattacttgtgattcaataaggaattatntgaattctcaaattggtcaatctatctctttcacgagagatntcttcttttcttcttcttcattctgaaaagggattaagagaccgagggtctcttggtgtgaaagaattctaaacacaaaggaagggttgtccttgtgtgtctagaactcgtaaaaggaatttacaagatagttgaactctc

SEQ ID NO: 74022 - DNA, 487 bp, Glycine max
  unsure (1)..(487): unsure at all n locations
agctngccacaagattctccttgcctggcacttcanaaccttctctggttggatcatataaatgtcttcctctaaatccccatgcaagaatgcagttntaacatctaactgctccaagtgaagattctatgcagctacaataatcagaataactctgatggtagtcatctttataactggagaaaacatctttatgaaatcaattccttgtttatgctgaaaccctttcaccacaagtctcgtcttgtacttcttctaccgtcagattcttcctttagcctatagacccacttattctataacactttctttccttctggaaattaattaaagaccacatcttattcttttgaagggatgtcatctcatctttcattgctagctcccactcaatagagtcattcccttgcatagcctcactcanacattctggctcacaagcatcagttaacaataaataatgcaatgaaggggaatacctatctgg

SEQ ID NO: 74023 - DNA, 418 bp, Glycine max
  unsure (1)..(418): unsure at all n locations
caagcttgagccanaatcctgactcaccatanaccttgacttagggtgagaatgtcaatccttaccctcggaagcaaaaaaaagaatagaagggaaatttccaatcaaagaanaagagaaggaaaatttccaatgaaagcaaaaaaaagaaaagaaggaaaattccccaatcaaagagtgggagaaagcaaaaagaaaagaaaggaaattcccaatcaaagaatgggagatagtaaaaaaggaagaagaagaaggaaagaaagctcctgatcanggatcgaangaaaaacagaagaaatgtgcagagaggtctttggaccggacaatatctgaacaatacagaattgtcaccgaatgaacaaaaaagaagganaggaaaccacgacctanaatggtcttctccctttgattaccaacc

SEQ ID NO: 74024 - DNA, 430 bp, Glycine max
  unsure (1)..(430): unsure at all n locations
atggtgtggagggtgtgccatgttctcagaatgttcanaattagaatgttcaaaactataatgctcaaaattaggatgttcaaaattaccaaccacaaaatgctaagaatgttcatgatgctcaaaaggtacaaaatgatgcctaactaatctatgaaatgtcctatctatctcangatcaaagggttgtaagtcagatggattgcctctagtcatatactacattcagcatgcacaaatagttgccttcctatgtaagtaacagtgtangtttgaactacaactaccctcaaatgatatccaaatgacttaaaattntgtgagcaacaccctaaaatcatgaaaagatggtacaaaaagtttcaggcaaaaattcaaagtctaactatggaaactacctaangaaagttagaaaaataaacaataaaac

SEQ ID NO: 74025 - DNA, 436 bp, Glycine max
  unsure (1)..(436): unsure at all n locations
tctatgtaccctnggtggtccacattgtgtttctgcattttattctcngtttgtgtactctntatacccnctgttgacgtgcttaagccattttacttaagtcatttctcgcttaacttaaaaataaaatcaatttccaccgaacgtttgaattgtattatccgttaactntggttaaaatgaattccgaccgttcggtcgtgccgtaaccacgttggaaataaaaaatgaggttaaaaataatatttatatcaataaaacatcttttagttaaataaagcggaaaattcatcggacgttttctctttgggatggatcagttctattcgaattgttaataactgaagtgaaactaatgctaaaatcgactcgcctagtctagctcgtcacaaaaataggctttcgaagtttgtcattctattcctactaagaaaat

SEQ ID NO: 74026 - DNA, 173 bp, Glycine max
tctggctaaccacgaactctaaaacatacttacagtcctagcgcatgagatctagctaccactgttcattcatcgtatcgagcaggccgcgctagccaaattcactaatggcctaagggtgatggccttatttctctattcttaccctgttgaccatttaatactgatagtct

SEQ ID NO: 74027 - DNA, 423 bp, Glycine max
  unsure (1)..(423): unsure at all n locations
gatctctaagtcacctgcacgcatgcagctagaacngagtcggtgtgaagcttagattgtttgnagtgattgtagatcctagagtgaaggagacattctcaccattgtattacttaatcttgcatctaggatactctttgcgcctctctatccatacttactagccctctacccttgccacgtacaagtcaattatatcatgggataatgaatgactaatctctttatagtgggatttggatacaccccacacgcttatattgtgaaaaataatacaaaatgagaatctcgtgtttccccttcacattgataaatactcatctaccagaactatgaaaatcccataagaattggaacgtgggtcatctatgttagcgtcattcatattctacgattcttttgatcacgtggctcgtgttaatt

SEQ ID NO: 74028 - DNA, 472 bp, Glycine max
  unsure (1)..(472): unsure at all n locations
agctngtgcaatcctcaccttacaagctggtttgtgaggttgagttatgccttgaacccaaaatttacgatgttattggagctttttctggatccattgttgggccacctgaattgtcatgcttcangcccatagacctaggcatgagggtgtgtgttggaaagccaccttagttgcaatcatccattgcccatcttaattgnggcctctntggattgcctgaattgcaacctaggggggtggttgtttagtcccaaatcgacaagagatgtggtttaaatagagttcataaagcttggtctattctcactttacaagctgatttgtgagggtgagttaggccttgagccccaattctaagatctttctttgttgggtattgccttcttgtttgctatatgttcttgtaaacaggccccttggttcgcatgttntatggaagcttaattttctaccttttttatgtttaaat

SEQ ID NO: 74029 - DNA, 464 bp, Glycine max
  unsure (1)..(464): unsure at all n locations
agctntatgttggtttanagctntcgattagctgtcttctatctacatatgtatgtgtgattaagtaataggataaacatcgaccaaccttcccttttgatgtcaatcgctatcagtagccttggttctaggaacaagccttatttctttatatatccaccttacaccgagatgatgatgatgatagtgccaaacaagaatagctaaaatagtctgtgatattcaaattatgatagtataggtggtatgggctttcaatctttcataaatcaaacaaaatttaacttttacaaaagcagaacaatgacttgcagtggtgttcagactcacatttcattgaaccattaatgaccttctgcaaaatactaattatcttgcaaaacagtaattgcattattaaggcacacacatcaacttttaaaatgtcccaacattatgaataaatatataggatctactaatca

SEQ ID NO: 74030 - DNA, 313 bp, Glycine max
gcttattaaatactcgttctataagaactcttttatcattattctgtttataaaacttcttagagacatgtctcttgttaattcttgatgggagtggcgcatatgttatatatcaatatttccccctaatataaagaacactgtggtacctatgttcgatggcgatcttaaggacgataaaccttagttatgcaattcggtagattcttctctaactcttatacaacgcatataacgtattcttgatccttaaaaatagcattaggtaggtcaccgtttcgctcatagtgctccccctatctctaacaatctc

SEQ ID NO: 74031 - DNA, 441 bp, Glycine max
  unsure (1)..(441): unsure at all n locations
atccttagagtcacctgccgcatgcangctngctgcaccattgacagatntacttaatatagaagtattcaagtggacaccagaggcagagacaacatatgttcaattgcagaaagtcatgacttcagctccagtgttagctcttcctaatttccagctgcccttcattctggaaactaatgcttccgacactggtattggagtagtattacatcagaatggccatccaatagcatntttttccaagaaacttgcacctagagtgcataagaaatctgactaatttatagagatgttagcaattgatgaagctatagctaagtgcagacactacttgctgggacacacaattattatcaaaactgatcaaaattagtcagatgatgatgttgatggatggaacaacccctacagacacctgaacaacaacagtggttacac

SEQ ID NO: 74032 - DNA, 442 bp, Glycine max
  unsure (1)..(442): unsure at all n locations
agcttgtacataacttaggaacaagctagntctcacatctttcgcgtgtatgatatccactcgacaaggtttgaagtataggagaccttcaatcctataacgcaacgtggcggacaaaattgggcagttaacttgaatgtccattattgtcaatgtggaaggtattctgcgcttcactatccatgttcacacattattgcagcttgtggttacgtgagcatgaactactaccaatatatagttggtggttacatcaatgagcacatcttataagcatactccgcatagtggtggcctcttgggaatgagcagcaatctctcttctgaaaagcatggacactaatcctgaccaactacaattcgtgcgaaggtcggccaaataacaaggataggaatagatggatggatctaccatctgaccaccgacaaatgtatagatgtg

SEQ ID NO: 74033 - DNA, 474 bp, Glycine max
  unsure (1)..(474): unsure at all n locations
gcttaaacaactnntggtaatcgattacaatgagaccgtaatcgactaanatagagagttntaacctctgaagaanattntctaacttagaaactnttcttcacacacactatgatgacaatcgagataacaacttatacaaatgccaagataacaaccaagtgtgtgtgaagaaaagtcaagggagttaggcatgtaaaagccaaaacttctttaaagcttcttcaagcttttccttgagccttaagatatagcattaggttgttcaaccgtttgctcatgttgctcccnctatctctaacaatctcctcctttttggctttgatgatgccaaacttgaatacgacattgagtacatttgaagagtcttgagattggattggagacatgatccttagtcttatcctgaatagttcttaacacttactcatcatatatgtcaattcatcatcatgaatcatatgtatatataac

SEQ ID NO: 74034 - DNA, 454 bp, Glycine max
  unsure (1)..(454): unsure at all n locations
agctnggttcgaggtacttacccgttgaagatcgaagaactatgaataacgaatgaagaacgtcgaagaacggttcanacctttgcgagattcctcacggaaaacgttacggaaacgtttcggaagcgcctcggcttagattttcttcacggaaacaattttttcaagcaaattccaaagagagagaagtgcctaaagggctgggatccatttcttcttgcattcctcccctatttatagcaaaataggggaggtggttgccgcccagctcgcccaggcgagctcagctcgcccaggcgagcagggttgcttcctccagaagcaaccgccttctggaggaatcttctggagggcccanatgggcctggttgctatntgcaccctcattnttactaagtacacccncctctgctatnttttggtgattctttnttcgtaaagttacggaaactta

SEQ ID NO: 74035 - DNA, 496 bp, Glycine max
  unsure (1)..(496): unsure at all n locations
gatccttgagtcacctgcggcatgcaagcttctatggatgctggatctntgagcttcaatgaggtccttcattagtgtatttcaaccatggagatgcattggaagataatggagaagaggtgagaggaggcgccatccactagggaataatccatggaaggaggagcttcaccactaagagagtgccttggataagaagcttagagaggaagcttcaatggtggaaaagaatgagagagagagcggngggagcatgaaattgaatgagaaaaagagggagagaagttgaactntgaagtggtgtctcacaagttcacnattatcanagttacaacaagtgttacacatgcttctatttatagcctaggtagcttccttaagaaacttccttgagaaacttccttgagaaacttccttgagaagcttctttgagacacacccctctaatagttaagctcacctctttgagaaaaaagctagagcttaactacacaca

SEQ ID NO: 74036 - DNA, 481 bp, Glycine max
  unsure (1)..(481): unsure at all n locations
caagctttgataanaccggcccaatttgaactntatcaactatgatagcatctcacccagaaactccctccgccaagtaatgtacacgtcaatgcattcctccttcaaccctgctgtcaccatcagccttacacattcacgaaggtcattgataataactgatggcagagaatccaccaccaagttgtcatcgcaatgcaattgcagatctggagtctggacaagactagctntgaggtattcctcagcatgcttgaaaattgttaaaataacattttcattctccttcttaagcgcctctatgcaacccatgaattgtgcacaatactattgttatcactatcattatttcttttgtgtgattcagtgactaacaatcctagatcctcaatntctggaggggaatcagcctcttgtgccacagatacaatagcctgtgtcgaatccacttgagtaacactangactggttctggttcctt

SEQ ID NO: 74037 - DNA, 430 bp, Glycine max
  unsure (1)..(430): unsure at all n locations
gtcacctgcggcatgcaagcttatacaatatacttgtccttcattaactgtctttgtgcttgtcggccacgatcaacanagtactttcgacacctactatatgttgatttgaccaacgctgttatcggtatgttacgacaatccttcaataccttatttatacattctgagaggttcgttatcatgtggccatatcgacgtccttctctatcataagccatggtccatttttcctttgaaatgcgatcaatccatgttgctatggctggactcagttgacgaaatttttctaaattntgatcaaaaatatgcttgcaaggagtgtagcctgcatgaaattagttagcaacaataatttgaagtatacatganacttaaattaacatgaccatgataaatganatcttacccaattntttcaacatttctt

SEQ ID NO: 74038 - DNA, 419 bp, Glycine max
gacccggatcttaagtcacctgaggctgcaagctgtttatttattattatgttatgaaactctttatcttctgacatgcatatacatgaatgtaataggcggcttatttaactaattgctatcttttattccttgaatttgattgaatatataaacttcctgattgtacataaagcaaatattgtgtatttcatgtggcctatttaataattgccagcgataatgctaccaattgttggtagcaacaagtgtaggtcatggtttctctctggaattaagattatgatagagttattagtcgtccaagtggctaaatctttaactatatttaattccacatcaatgatagtttcttcaattacccattgaataatacatgctgagaatataatattgagttatgcggatattaaaattca

SEQ ID NO: 74039 - DNA, 472 bp, Glycine max
  unsure (1)..(472): unsure at all n locations
agcttatgctaatctaccttgcaccccaagtgcatttcatgttcttaataatcaaacactatcatatataggcataggcgcatacatcattctctcatcaattcatccattattagcttatttgtttcttcaattctttcccatctctttagcccacaatttcaaggaacaaaaatgatgagagagggtcaacaacatggtatggtgagatcttattggatcctactaaatccacttaatcctagacctaataccagaatcatcaatcggtctaattccccttacacaactagaatatttgttangggttcttctaagccaactaatcactcaaagtacacaggatagtgtggcagaccacgttgccctgttgccacctctactcagcttggaagtccaagggcaaaaccataggtaccatacagcacaaacacttagtaacacactactattanaataagctttaacgatg

SEQ ID NO: 74040 - DNA, 95 bp, Glycine max
atatcaattatatcatcatcatatatcttactatatatatatatatatatatatatatatatatatattatgaccacaagcatgtcattgcatac

SEQ ID NO: 74041 - DNA, 481 bp, Glycine max
  unsure (1)..(481): unsure at all n locations
agcttagacaacanagtgtacaaactacaagatctggatgtgtaagcaattccaagaacatggaacgccacccacctaaagttgtacttcagctgacctaatgtaaaaccagatgtagatgttgtactctntctcctactcgagtcttttgtcccaaaagaaaaacaaattacgcttttggcttaagaggttgtaacgaggcacatctaggataacgaaaggaattcgtactcaaccaaatacattgaataaagttctacatcccttcattttcataatnttcttgtatcgcaagataggtacatccttggtgagtctttccaaaatctatgacggacgcgtcgctagtcgtttcttcaaggggctcgcaaacccaaggtccacccatggtgagtctctcanaaacccaagacggacaactacctngtcaattctctaaacacaccacgtctctagtacgtgccactccacgagtgacatg

SEQ ID NO: 74042 - DNA, 478 bp, Glycine max
  unsure (1)..(478): unsure at all n locations
agctngttctttnttcattattganagtgagaacacaatgtgactatttatagagaaaacaattataactgcttgtaattgattaaatcgcctacataatcgatcatctcgaagaagtaattgattagattctcattntaatcgattaaaatgttcttctcaaaacctgtaaagctttcaagaacaatataatcaattagattcttgatttaatcgattaaagtgttcttgtcacttctatgaacactttcaagaatgatgtaatcgattactataccctcgtaaatgattaaagcagagaccctaagaaaacatacatggtctcaaaagaatagagtaatcaattacagatacatgataattgattaanattgagttatgcactgaagatgtttctttccttagaaacaatcttcctacttctacatgataatgcatgatgtacacatagatagattaagactaaaaagaaacaatc

SEQ ID NO: 74043 - DNA, 416 bp, Glycine max
  unsure (1)..(416): unsure at all n locations
agcttctcccgcaatgttctataggtatgaggtgaagtgttttgaanaagggtataaccccttacgcacttctctatcttactaatctgattggaagacatggatgcagaagacaatctgaaccttggctgcttcgatacgctttcgtacggaatatcgcaaaggtttcgaccgctcttcgacgatcttcatcgctcttcgatctataactggtaaccacctcgaaccaagcttttcgattgattctatgtacccgngagggaacacattgagttcccgtatgttattctcgtgtatttactattatacccctctctgcgtgcttatgccatgttattaaatcgtttctcgcttacctaaaataagatagatttcaccgatctttgaatagattatgcgtaacttgggtaaaatga

SEQ ID NO: 74044 - DNA, 67 bp, Glycine max
  unsure (1)..(67): unsure at all n locations
tgcantatcgagtctgttgaattattancattctgccaatggaacatcacaacgatatgacctgatc

SEQ ID NO: 74045 - DNA, 478 bp, Glycine max
  unsure (1)..(478): unsure at all n locations
atcctctgagtcacctgacgcatgcagcttctccccaattntctataatatggggataagtgatgtgaaaaagggtntagccccttaggcacttctctctctttcgaatntgcttggaaaaatcgtttccgtgaagaanatctaagccgaggcgcttccgaaacgttttcgtaaggaatttcgcataggtttcgaccgttcttcgacgttcttcatcgttcttcgatcttcaacgggtaagtacctcgaaccaagctnttcgattcattctatgtacccgtggtggtccacattgtgtttcgtgtatgtttattctcgtttcatttactttttatacccctctttgacgtgcttaagccattttaaattaagtcattctcgcttaacctanaaataaaataaatttccaccgatcgtttgaattgtatattcgtaacttcngtaaatgaattccaccgtcggcgtccgaaccacgtga

SEQ ID NO: 74046 - DNA, 474 bp, Glycine max
  unsure (1)..(474): unsure at all n locations
atccttgagtcacctgcggcatgcaagcttattagagaatcccaaattcacctcgtgaggatttagtagcatttagcatgattatcaatntcaaataggatgaccaaccattatgaacaatgcaatatgtgaatacactcaattcaaaggttcttatatataaagggccaaggtcaaccagagttgaatattataatattgaaacaatgttcatggttaaagcaataccatcaaggtcaatcaacacatntgtagagagcatantttcacacacacaacagaggtgttgcttagagagcacattntcatgtactaacctgtggaggaagtcgcgagggaacaagccacacaaccaaataaggcttcaagtcgcgaggtatggagaagacganacgatgatgacgtctcagcacaacacaggtggngcaatgactggatcgcagaagtacacttgggagcaccttcgtgagtgat

SEQ ID NO: 74047 - DNA, 69 bp, Glycine max
tatctactgctgaactttggggacttgcctataggcctatgtatttacctgaaccccaaaaaaggaaaa

SEQ ID NO: 74048 - DNA, 502 bp, Glycine max
  unsure (1)..(502): unsure at all n locations
tctctaagtcacctgaggcatgcaagcgttccgcatccgtacttggaaggatctgattaccgtcttcctcaagcagtattagtacaactctgatatggctcccgaccggactcagctgcataacatggttaatagggaaagcgagtcccttatagagtacgctcagggttggagggacctagcagcacaagtagcccctcccatggttgaaagggaaatgattaccatgatggtagacaccttgtcggtgttttactatgagaaattagtgggctacatgccctccagcttcgcagacttggtattcgtcggggagaggatcgaagtgggcttgaagagagggaagttcaattacatctcctncacaggtaccatcgctaggaggaacggagcaattgtggcaaagagaaaggaangagatactctagctgtcacttcaacgctcgcatggatcaagccgctgcagatctcccacggcacccatcagtatgtgcaacatcac

SEQ ID NO: 74049 - DNA, 470 bp, Glycine max
gtatattcacactatgtatgattaattgtgtttattccttgacctgtgtaattagcaccattgtctaggttaattagatagagttttacttcttttggtaaaagccaagttgtcttttatgcctaattgatggaagcttgcatgagaagcttctatggaggttggatctttgagctttaatgaggtcctccaatggtgattatcaaccatggatatgtagcggaagataaaggataagaggtgagaggaggcgccatccactagggaataagccatggaaggaggagcttcaccaccaaaagagtgccttggacaagaagcttatagaggaagcttcaatggaggaaaagaatgagagagatagggggggggggggcacgaaattggaggagaaaaaagagggacaaaagtgaaactttgaagtgtgtctcacaagactcttcattcatcaaagtgatgaccgcttttgt

SEQ ID NO: 74050 - DNA, 423 bp, Glycine max
  unsure (1)..(423): unsure at all n locations
agcttctaaactntatacaagaatgaagctctgataccacttgtaggacaagtggcctcagatatcttaagaaggggggggttgaattaagatattacaacttatttccccaattaaaattctatttcactttctattcaagttataaattcccttaataatgaatttcttaaatattgattcaaatagaacaatttgaatatgaatataaatcaataataaataaaagagtttaagggaagagaaaatgcaaactcagatntatactggttcggccacacccttgtgcctacgtccagtccccaagcaacccgctggagagttccactatcttgtaaattccttttacaagttctaaacacacaaggacaacccttcctttgtgtntagaattctttcacaacaagagaccctcggtctctt

SEQ ID NO: 74051 - DNA, 456 bp, Glycine max
  unsure (1)..(456): unsure at all n locations
agcttgaagacaagactatacgaggtatcttccttgtgtatagcaatatctctaagggctaccgtgtctacaacttgcaaactaagaaactcgtcatcagtcgagatgttgaagttgatgaatatgcttcttggaattgggatgaagaaaaagtggagaagaacgttcttatacccgctcaactatctcaagaagaagctgaagaagaagacccaggtgaaccaccttcaccttcaccacaacaacaagataaaaaattatcatcacctctactccaagacgagtaagatctttggtggacatatatganacctgtaacttggtcatacttgaacctggaagctttgaagaagcgtcaaagcaggaagtatgggtcaaggcaatggaagaagagatatagatgatcgagaaaacaacacatgggagttagtanatcgtccccatgggaaatatatc

SEQ ID NO: 74052 - DNA, 433 bp, Glycine max
  unsure (1)..(433): unsure at all n locations
gtgcgggttcgggagacanaggtcaagcgttcgcgatatgcgaagatgatattccgagtacnttggatttcgtacgaccatgctctcctgatttccagctgggaaattggcgagtggaggaacgccccggcatttacgcaacaagcataatgtaaacctttactgttttaaaagctctatagttgggcctaggctntagagtattcattttgttaaggctttgtgtctcttgtgcttgaatttataatacaaggatctttcttcatctgttcctggtctctacccattctcattcatttgcatgtntacttctttttctaaaacggcagattcgatgacgagtccnccataggtactaatacctgcgacccgtctatcaacttcgagcaagatatgaatcaaacggaagatgaatgagatgatgatgtgggac

SEQ ID NO: 74053 - DNA, 381 bp, Glycine max
  unsure (1)..(381): unsure at all n locations
atgcctttaacagcacctttgtcaatgaatttcttcatgcctcttaagtgcagatgtccaaatctttgatgccatattctgacttcatcttctttggaggatagacatgtggaggagtagctggtttcttggggtgtccatangtaacaattgtcctttgatctgctgcccttcattataacttcactcttctcatttgtcaccaagcattctgactttgtgagattacattcgacccttcatcacacatctgactgatgctgatcaagtttgcagtcagtcccttcaccagcagtactttgttcagactaggaagtccatcatgagctagctttcccattccaatgatcttttctttagagccatctnncaatgtcacat

SEQ ID NO: 74054 - DNA, 437 bp, Glycine max
  unsure (1)..(437): unsure at all n locations
gagtcccaacgcgtgggtaagcccgttaaggtaagatatagaacttangggcatccgtaatggcatcatcggtggttatcatgaatggctgaaagttcgtacacgacggttagattggctctccatattgaatgttatcaacgaggagaacttcgaagctcctgaagaggatgaagaagtatgagctctagaaatagaactaggaaaaacaagacttgccgaagaaaaattcaagttagtcgctatggacgtccggatagagtgtgtcgggttacgagaagaaaatgcagctatcgcaagagcccttgaacaagataccaagaatgctcgcatggaagagcatggccgagacaaattccgtggagctttgtggngcagcaacaatgagctcaagtttcaagggaagagagagaccaatcacgagcacatagcatgtt

SEQ ID NO: 74055 - DNA, 423 bp, Glycine max
  unsure (1)..(423): unsure at all n locations
agctngtggggcttatgtactgtctaggatccacataatgtacgtggcaagcgacgtggnacatcaatacacacgtcaatcttccatcntagtcctgtgataggaacatgtacacatcgcccttagcagtcaggctattgggccgacaagttaactctaatacctcattacttgaatattaatgatagtgttgcaacctccttatcaagtggcaggtacttaattatctataagatacacattacatataagcaacaacttatctactagctattgtctacaagctagcaattatctgcgaggggtgatacactaccgtaacaacccctacaaacaaggacccgaagctgctacttcactctataagtatcaggttctatctcaccattntcatatctcattctcatctaactcaggtactta

SEQ ID NO: 74056 - DNA, 468 bp, Glycine max
  unsure (1)..(468): unsure at all n locations
cgtctcagcgtntatgcaagacatataccaacatgttatccatcatcatcaagtaccaagaagaattaaatctagccacagtccacgagcacaaagtggcggacaagtatgcctgagtgtacgcggaataggaggctagaggaagggtgatcgacttgttacatcaagaggaaacaatgtggatggacgcgattgctcttactttaaacgggagtcaagaacttccccgnatgttagccaacgccaaagcaatggcggacacctactcctcccacgaggagatccacggacttctcagctattgtcagcatatgataaacttaatggcccatataattagaaatcgctacgaagtttgtattgtcactcagatcttgactagttataactttctgaagtaaaatgagttatcccacgtttttactccaaaaattagtgtgaatcanatcactcccgcatgttatctct

SEQ ID NO: 74057 - DNA, 369 bp, Glycine max
  unsure (1)..(369): unsure at all n locations
atcctctgaggcacctgccgcatgcaagctaggtggtactatagctgcactaaattgttgctgtggtaatcanatgcacatgctatgcagtataaggaggtaaagacactatattactacaattatatgaaattgagaagataatacttagaatataatattagtagcatgaccgaaaataaaatacccgctgtgtcaaataacataacaattgtctcaaatacagggaacaaaatactccaacgccatcattagccgttctgacttattgctgtcttataaaaaaatgtcgcccattactttcgaattgtggtgatgatgccgatgtacaactgtgtgtcattatctaaccactgcaagcattcataa

SEQ ID NO: 74058 - DNA, 433 bp, Glycine max
  unsure (1)..(433): unsure at all n locations
agctttacatgcatgttcacatcatatntactatacttcgatcaactgatgcaatctatttgattgaaaagataatatatattactcttctaatgtagtcgacaactaaaaaaaaatataacagaaagtaatgcttaggccaatctaatcaagtcattttgaatctcgtcattactatcatgcatctcaaagagaaggagaatcaggcatcgtaatacatagcacaacaaaacattaaaagagaacatgccttccaaagccaaccaaggttaaaatgtattcatatttggtgaactntttcaaaataataacacatatatataaacatggtggaacaatctgaccacatgcacaacacattccacacattatttctgaaaatgagtggaagggaatataaanagcatgtataanactgacatgcctaaataac

SEQ ID NO: 74059 - DNA, 250 bp, Glycine max
cacaaagtggtacctggagatatgtcggcggggtcaagagaccttgtggacgtcaggtggagtgctattgcccacaaccaagcttgaccaatcccgacccaacccgggcatagtcagacagtgagaacctgtgatgtacctaaacaggcgagcttcttgctgtctacagataataggaactaagaccacatatcatggaggcttgtgtggtggctggtcacctgtgaactatgagtgatatatgggatat

SEQ ID NO: 74060 - DNA, 396 bp, Glycine max
  unsure (1)..(396): unsure at all n locations
ttcttctagagtcttccttgcacttagcccataagtgttacgcttagcggaagctcactaagccagcagatgggcttagcgagaaggtggaaaaaaacactcttcaaagcttgcctaattaactngaaattgagagaaaatgtttattaaacacacaaaatggaagtactaagtatttattacctatacttaatagaaaatacttatcacacattggaagagtttgatacaatntacacnaagtttatacacaaaagttagtcgtattcaccgactaacaatgttctcattgctctcatagtccttggatagaaggttgatctacttctccgaatcattggatgagtcattgtcataccatgcaatatacgccttcttggatcttctctcttcatg

SEQ ID NO: 74061 - DNA, 350 bp, Glycine max
  unsure (1)..(350): unsure at all n locations
aagctnttattattatttgtaagcttctataattcttggagagttcanaagctctcaaaacatcttatacatctcgagagaacagactaagcgcttagattgtatattcatctgttagacaattaagaactagtcagtgagccaaccaaacaacaaatctcttatttgtttagagccatcagcggcgtgatatgacaaagaatattgagttgtccaacttgatgatagcttggttggaacaccaaaatgacggtgaaaactactgtactttgagagtagtgaacttgttgttgtcgaaaccgaccacctcttgaagaacaaccagttaaactcctggtctatattacttc

SEQ ID NO: 74062 - DNA, 447 bp, Glycine max
  unsure (1)..(447): unsure at all n locations
agcttgtggcctangatcttcttcatcaatggattcctttgcttcttggaagatanatggcagcggnatggagaaggaagagagagaggagacgccacttcaaggagaagatgagtctagaagaagctcacccacccataggagggccatggggataagagcttngganggaagaannngagatgaatgaannnggagagggagagaangagcacccgaaattttgtgctcaanaggagctctganatctgaagttaatattcanatgatcaaattntgaaaaaatacacacacatgacctctatttatagcctaagtgtcacacanaagtggagggaaattcaaatntcactttgaattgtggagccaaactctggagccaaaatttcactaattatgaatagtgaattttagttatggttcaccccactaatcccagatcaattc

SEQ ID NO: 74063 - DNA, 409 bp, Glycine max
  unsure (1)..(409): unsure at all n locations
acgcatcaacaagaatcaagccaaggctattgtgcaagcaatcaatggggcaaaacacaccaaatgattataatgatggatggctcanattctcacaaaggtaaaatcatcactttcaaattgagctttcaaaactatcatgacatgtagagaagaatcaaggatttcaagtcacaaaatgtcaagaacttttattntcaaaacaattacccatttcttgaacatatcctataattcanagaanaacatgcaaagtcgtacgtgcacacaaaattgacccaaaatattaaactgaaaatccgacgaaactaacaacattaacaaattaacacaactaacatattaacaaaaccaacataactagcataaccaaagaacactcccnnccccccatacttaaacaacacat

SEQ ID NO: 74064 - DNA, 472 bp, Glycine max
  unsure (1)..(472): unsure at all n locations
atctctgagtcacctgaggcatgcaagctatacttactctacaacactagctctcgctcttgcggtaacttcactntccttattcgggctntactcttaaacactaaccttgctgtagtctatgctcanaagcaatatacaatgaagcctatgctcacatagtgtcattctagataaatctctctatatgcccttaaagagtcacatctcatccatttcaagtcatcacaatagtttcacatcacaatataccataactaatgatggaaccatgcacacataacacaacaacaacccaaggcattcatggaatccacatcatcaatcacacgagttaaaccaactcacaataatgcactatgcaatgaaatgcaatgttcttttctctttatcatatgcatggtggaccaaaaaaacactttacanaagaagctngatagaacatgtagtgacaaacccatatatgatcaca

SEQ ID NO: 74065 - DNA, 250 bp, Glycine max
  unsure (1)..(250): unsure at all n locations
acaaaaaagatcattcattattatgagctntaaattggtcaccttgtattcttgtgtagtggtgaaatccaagaatcanattcatataataaagatggcttagaagatattgctaccccacnaattctgttggctcactccaggatctgatnganaccaatagtcatcttccatctgcaaataaacacaatgactaaacattgtcttcccagcttatggttntagtcattagagcttcaagaatacatac

SEQ ID NO: 74066 - DNA, 406 bp, Glycine max
  unsure (1)..(406): unsure at all n locations
agcttaagcagtgatcanacttgctatatggaactgactttgtgaacatatcaacaggattgtgcatagggctaatcttatgaactttgattcttctttctgaccgaatgaagtgatatctaacatctatatgcttggttctatcatgatgaacctgatccttggccaagcatatagcactaaggctatcacaatagatgttagcatattcttgattaattccgagatcatttatcagacctcttagccaaattccttcctttgcagcttcagtaagagccatatatttagcctcagtagttgatagggcaacagaaggttgaagtggtgccttccaactcaccaagcagccactaagggtgtaagcataccttgttagagactttctcttgactagatcagcagc

SEQ ID NO: 74067 - DNA, 452 bp, Glycine max
  unsure (1)..(452): unsure at all n locations
agctttaacactttcaacacannaaattagatgatgttaaaattccaattattcatataaaaagggagagttaagaaagaaaaattaacaattcctacataatttaatcccaaaatatatctatacataataattatcaaactctcccaaatttaaagctttgtttgtcctcaagcaaaagtaactaattacactaatataaagtttagagtttaccaatcacaatacatgagataactgcatatattccaaaaacttcattggtcaattctcaagttcacatttgtcataagttcttgaaaggagcatgaaaaggatgcacttcgagatgaatcaattagcaagaatgaaaagtcacacggatgattcaccaagcttcattcctcacaaggctaatgtttctctcaatcccacaagtgcctcggttataagtggttcaatcacaacaactg

SEQ ID NO: 74068 - DNA, 408 bp, Glycine max
acaggacatactcgttaagcagctaaagcacctttcatcttccacacatgtgtattataaacacaaatatgccatgccatcttcatcataaaaaccgcttaactcaacaccacagacgtacctcggctgcctccacgaggcgaccttcgtctttgtacagaataccgcaatgtgtgagagcacaagcattgtgagggtccaacctgatagcctcggcataactctcaaaagcaagcctacccatgatttgcatctgcaaacatatccctttcccaataagagcctcaacattctcggcatcactctccagcacgcgctcatactgcgcaagagcatccacaaacttggtccttgaacgcaggatgttggcatacgaaacatcgttcttcccttcacatctcttactca

SEQ ID NO: 74069 - DNA, 398 bp, Glycine max
  unsure (1)..(398): unsure at all n locations
agcttcttatccaagacaatctcgtggttgtgaagcttcttcttncatggcttattccctagtggatgacgcctcctctcacctcttctcctttatattccgttgcatctccatggtggaaaatcaccattgaaggacctcattgaagctcanagcaaagatccagtctccatagaagcttcacaagcaagcttccatcagaactgtagatgtcaatataaagacgcgtaatctcntttacgagagtggtcctggatgcttaacaacaactcatgaaatcatcaataatttatacttgtgtaaacatcanaattcaaggtatggtacgtcgtccaatgatgagtggatcatcctaacctaacatgaattagttttcttaattttgtgtntgtgattct

SEQ ID NO: 74070 - DNA, 419 bp, Glycine max
  unsure (1)..(419): unsure at all n locations
ttactctctgggccgtttgtctcccgttgatattgagacgttcgatattcagaatagaagctctgagcacaatctaaccgacgataaattttactcggatgtctgattgtgtccatagtatatcgagacgctcgaaattcagaattgaagctctgagaaaaatcaattgacaataactgtttactcggatgtccgagtgtgtccatagtatatcgagacgctcgaaattataatcgaagctttgagaaaatcaatcgaaataacttntactcggctgtcgatagtctccgttgttatcagacgtctatattacaatnaagctctggcaaatctacgacatacttttactcgagtcgatggtccgagttatcaacgctgaactaaaggactctgaaaataacacatactttactcgtgtc

SEQ ID NO: 74071 - DNA, 401 bp, Glycine max
  unsure (1)..(401): unsure at all n locations
agctgatggttctgagaaggtggattgtaatattttgtggttagcaaatgatgttcttggaggatttccagtactcctgtgtaacactattataggaaaacatataatatagtattccaattggtacctgtcattttctataaaagtagttgagatctgctagtgctaatgatattcactttgtattggaatttattaatgatggattgaccagaagttctcaccttgaaactgtcaatgtaatttgcttcagtggttatttatatgttcttgtgtgccactgccagcctgttatacttgattaccttgccagcaagactatntgttcagatgatctggtagtcgtctcgccagatgttggtggtgttgccagagcacgttgcttttgccaaaaattatct

SEQ ID NO: 74072 - DNA, 361 bp, Glycine max
  unsure (1)..(361): unsure at all n locations
tatggtctttatttttttacgaaattttacactacgttaatggccgaaaaacatacaaaatatattcactcatcatttaagaagaggaagaatgagaattatgactataaccagggtgatgaattgnaatgaacattatctctgacggccttagaactaatatctttgtaactaattantagcatatgtacatatatntgactccnatagatatatnttttattgaataaaaaagatacttaatctaaactaatatggtcttacatataaaataaatctcacatatntatgaattttatatttattattattatttattatatttatatttatttattcggaagatattcttactcatgta

SEQ ID NO: 74073 - DNA, 349 bp, Glycine max
  unsure (1)..(349): unsure at all n locations
agctntgagccaattaagacgacaatatctttttactctgatgactcgatgagtcccgtcatatatcgagacgctcgtaattgaatgttgatgctctgagcaaattcaaacgacaataatattttactcggatgtctgatagagtcccgtcatatatcgagacgctcgagattgaatgttgatgctctgagcaaattcaaacgacaataactttttactcggatgatgattcagtcccgtcacatatcgagatgctcgaaactgaatgtagaagctttctgcctcttcaaacgacaacaacaatatgactcggatgtctgatagagtcccgtcacatatcgagacgctc

SEQ ID NO: 74074 - DNA, 299 bp, Glycine max
  unsure (1)..(299): unsure at all n locations
agctantgagaaactcatatggtcattacttntcactctgaggtccgactcaagcgcatcacatgtcgagacgctcganattgaataacggaagctcttgagcaattcatatggatatatatttatactcgtacgttcaatacatgcgcataatatatggagaggctcgaaagtgaacaactgaagctctctagagtataaaanggtcatatcttatcactcggaggtacggtatatgttcactacacatcaatacgctagaatatggacacggaagctatcgagaattgaaaagagat

SEQ ID NO: 74075 - DNA, 410 bp, Glycine max
  unsure (1)..(410): unsure at all n locations
agctngcctacttgtatcatcttanaatctagagacttctccactttcgctacatacacttcttattggctttgattaaaaaaacttgttctagtcaatgtcttgggtgtagcataagcaacttctagaaaataaatcacgcacaagatgttattatattattatatgttatcagaaaatagttttatcaaaaaggacaaacaaaattcaaaatgaaccgtgatggatatcccaaaaggaaaaatatggaattcaaacaataagacaagccattctttacctttcttcactgaaactttntgtcttgaaaattaaccacacaataagcaagcaaaatcaacttgttctcattaacaaaattcaacgaataattgtagatccaaaacatgacatgcangctagtaataaca

SEQ ID NO: 74076 - DNA, 336 bp, Glycine max
  unsure (1)..(336): unsure at all n locations
tattattaatgcagacgatattaacacaatggctttcaaaggagccttttctagccatgctntcttttttatacttttactttattgttgtaatcactttatatcttctcacattcttcttccatatattatatttctacttgcacctccttatagtcattttatcttgccaccttttctataaacttcttggtattctacttaacttnttgcataactctntctgattgtntattatgcaattgatctatacacgataaaatgttaaagacaccgcgtacctagctcatttatatgatactagtttacaagttacacagaggtacttcatggaat

SEQ ID NO: 74077 - DNA, 382 bp, Glycine max
  unsure (1)..(382): unsure at all n locations
atcctacactaattcaataggcccattaaacactntgaaagctcggactgggctgtacccgacactgtggactgtcggtacggacgtagtttgaccaagacctattctctaacctggaactcatggtcccgacggtgtccgtcgatgatcgctctcatacgattctgggctttctgtngctttngtcggagtaaggcaaataccgactacctttggctgagtaattcatctactgcatcaaccttngatgtgcccgtcaggtactgcggaaagctcagaggtttgcagccaaaggttacctcgaacggtgtcaatcctgtggctgagtgagtggacgtattgtatgaccactcaacccacaacangaaatgcccncacgtac

SEQ ID NO: 74078 - DNA, 92 bp, Glycine max
ctatatattcatggagaaagtgttcacggtccgcttgcattaaatctccaatgtcttgtcaaaaccacacgtacgttcacgagaatggattt

SEQ ID NO: 74079 - DNA, 306 bp, Glycine max
acaatgtatcttctataccttgagctggacctatggtaaactctatctaccctagttcgtgagtttgcatgggcttcatgcctaggtaagttgaataccaatgtgcttgttcacaacctctatgggaaatgaaaacagtgatttgcaaatatttcaggacaaatgtgaagatttagtgagacaagcaatgatcttgaaacagatgttgagctgtatgctagacatgttatttatctaacttcagaatagaattttagtcatcttcatcttgagacctcatcgctcatggttgacttatctttttat

SEQ ID NO: 74080 - DNA, 497 bp, Glycine max
  unsure (1)..(497): unsure at all n locations
gtcacctgcggcatgcaagcttagctattataggggtgtgtagctaagctctatcttctcttctaaggaggtgagcttagttattagaggggtgtgtgtagctaagctctagcttctcaaggaagcttctcaaggaagtgagcttattatttagatgggtgtgtgtagctaagctctagcttctcaaggaagttttctcaaagaagtttctcaaggaagttntctcaagaaagcttctcaaggaagctacctagtctataaatagaagcatgcgtaacacttgttgtaactttgatgaatgagagtcttatgagacacaactcacagttctctccctttttcttccttgcaattcgtgttcccccctctctctttctctccctctntcttgtgctccattgaagcaccctctccaagcttcttatccaaggctcatcttggtggtgaagctctttcttccatggctttattcctagtggatggcgcactctctcacc

SEQ ID NO: 74081 - DNA, 362 bp, Glycine max
  unsure (1)..(362): unsure at all n locations
caacaagcgataccatgcactatgcacgcataaacccaccatacactagttgccaccgtacactgagctcacgtactaccgcgtattccatgtgctcatgtctctcaacaccggatccccatcgatcctctcaagcttccacaacagccatgcataacaacgttcacacagctcatgctatcacagctngcatacagacagaggctaaacgctgccacacataaccaaatcacagtgtttacgtaaaccacagaaaattcttcgtcaatcgtaccgtgatcacatcaaacactggagtataagatacctgctttgacgtggaatctacaaatcaactatttgataacttccagcacccacac

SEQ ID NO: 74082 - DNA, 472 bp, Glycine max
  unsure (1)..(472): unsure at all n locations
gcttctatagaaggtttgttcctaatttctctacaattgcatcacctctcaatgagctggtgaagaagaatgtggcatttacctggggtgaaaaacaagagcaagcctttgctttgctcanagaaaagcttactaaggcacctgttctagctcttcctgacttttctaaaacttttgagctagaatgtgatgcctctggagtgggagttggagctgtatngttacaaggtgggcaccctattgcttantttagtgaaaaacttcatagtgccaccctcaactaccccacctatgataaagagctttatgccttaataagagccctccaaacttgggaacattaccttgtttcaaggaatagtcattcatagtgatcataatcacttaagacattagagggcaagcaagtaaacagatgctgcaaaaggtgagtcctaagcaattcatatgtttctatacaaagggaaacaat

SEQ ID NO: 74083 - DNA, 225 bp, Glycine max
  unsure (1)..(225): unsure at all n locations
ctggcaccatctatcatacatctcttcccatattactgagtcccctcataaaaatattggagaagaangctgtcttgaatctgatggtggggcaactggcacatagtttcttaaaatctctccagtactcatacangctctctccactgagttgtctaatacctgagatatctntcctgatggctgtggtcctggaagcangganaaaattctctaagaatactc

SEQ ID NO: 74084 - DNA, 546 bp, Glycine max
  unsure (1)..(546): unsure at all n locations
tcagagtcacctgcggcatgccaagcttgaatatgtagaacctattctagtatacatgttctcatttgcctatatatgcagnccctaattatgcagaanaaggttatttatctcatactntagtgtgaccaagctaagaagtgagaacaaaataagaattaatttaaaattaagtattagtcacatgttacattctataatgcaaccttatcattccctcactaacatagtaccaaccttacctaccaatcaccactaatccttataaacttagaattatgcagaaaaatggtatctagtgccttgattcagtaccatacgttgattatagaaagatacactaagtccctgtggcttttgcttacacttactaatatctaaccatgtcatactcatcctaaatgacaccatatgtggccctatagttctatttgtgtaagacccaccattatgaagaatacaagtgatacaccacaagctgagaaaaaacacnatccttggtgaacaaccaatgatgcagaccaagcacactcacacacacacaca

SEQ ID NO: 74085 - DNA, 442 bp, Glycine max
  unsure (1)..(442): unsure at all n locations
agcttcaaaacctcttttactcctaatgtcgtntttatataaattgngaattctccctcattntctaaagcattnnttgcttcagaaacataataggatttgaaatccttcttccttgaccattccacanaaagtcacctatgtttgttgatctctattcctttacactttagtttacaagactacttntttccttgtcttccattctttcttcttccttaggtcctctaaacttcttagttcacatttgggcaatntttatctaatttgttatattctttttcttttatcatcnatcttaattttttacatcattactatgttcttattgctcctagacttatagtgattgtgtcataatgtgtaactatgatatattatttatcatgaatttctntaactgtatatgtgtagtataaattattatgttttattgtatatt

SEQ ID NO: 74086 - DNA, 444 bp, Glycine max
  unsure (1)..(444): unsure at all n locations
gtcttttcctgactgtctactggtgattcatttaactctgcctcctcccatctctnttatttgtggagaaacgctagcaacacaatttttattgattgaaatttattgaaatcataaaattctgttagtttcgtgtcttatttaaggaacgccacttatgatattgtgattntcaatcctttttaaccaataatacatagtatgttaggaatggtgtataaagtgtgtntattagcgcttctcttatttgttttcatttgtcagatgttgtttttatttattcagctaatgtgttaaaacatcactttgatagcaacatatgtggcagaatgaaatcctgatattcaagctntagtgcatctagcanaatattacacattatcacttcgcgtgataaccattgcttgtctcatacatgaaggtatgtaatctaagtccaataat

SEQ ID NO: 74087 - DNA, 510 bp, Glycine max
  unsure (1)..(510): unsure at all n locations
gatcctcttagtcacctgccgcatgcaagctttgactatanaagaagaaaatgggtgatttatnatagattggggtttggattctgatgaaaaaagaagggagaataagaggtggcggtgtcatgagagaggatggcgagggaataatgtgaaaggttaagggtatatgaatgagaggaggatagcacggccaatttacatttcttgggggtagaatagcaacccctaggaaaagataataccataaacatccccttggactccaatgatcgaggagaggatatgaactatgggaacatgaaataggacaatgaagatcacttcataactcattcaatgttatatgtgttaggaagttggctagcttgaattaatgggctagttatatggatccatgctatatggttcctttggacctagagacaccaataaatctataatggcagattttataatataagcctcttacgccttggattangccatcatagctattgtcactacccacat

SEQ ID NO: 74088 - DNA, 411 bp, Glycine max
  unsure (1)..(411): unsure at all n locations
gaatacttgagactcccaaacaacaacaacatcaattgcccgctacaaattgtagaggcacatgggtttctaggtatgttggttctattgattacatgcattggaaatggaaaaattgcccagttttatggaaagaccaatatagcataggtgatcattgcaaacccacaataatgcttgaagtcatcgcttcataagacctgtggatatgacatgcatattatagagttgtaggtttaaacaatgacattaatgtgttaaaccaatcacccatgtntaatgacgttntgcaaggttaatgtcctncagtgtaatntacaattaatgaagccccatataatatgggatactatcttggagatgacatttatcctaattagaccagctttatgaagaccattcccatgacat

SEQ ID NO: 74089 - DNA, 413 bp, Glycine max
  unsure (1)..(413): unsure at all n locations
agcttgtcaagccccctagcttggacaagtgttgtcctatctactnntctgtaagatggccaaggaggacacacttcttggttgcaggaaaagtcaaacatgtcaagcaaggggcagtccttgtgatngacaattctatcttnttttgaccattggagaacgcattgaagacaagcatttcatttgtcttttactacgggcaagtgcagtgcacgcatgttactctagcatatgtgtcacttgaggagtggacacgtattggagatgtggtgcatgggatagtanggctacctcgtggtgcgaactttcatggcatcatttcagctaccgctaattactgaagagtcatgcctccacttaaatgaagtatcctatctgatttttatcaccaccactttgaatttatgctcttt

SEQ ID NO: 74090 - DNA, 515 bp, Glycine max
  unsure (1)..(515): unsure at all n locations
agcttataagaacaaaatngcctanatcatttccaaatatgcatgtgaattaagaagcatcaacaagaatcaagccaaggctattgtgcaagcaatcaatggggcaaaacacaccaaaagattatgatgatggatggctcatattctcacaaaggtaaacttatcactttcaaattgagctttcaaaactatcatgacatgtagaggaaaaacaaggatttcaaatcacaaaatgtcaagagacttttantttcagaacaattacccatttcttgaacatatcctataattcaaataaaaatatgcaaagttgtacatgcaaacagaattgacctataatattaaactagaaacccaacagaactaacaaaattaacaaaactaacaaaactagcanaaccaaaaccaaagaactcccccctcccctcatacttaaacaacacattgtcctcaatgtagcacaattaaaagaataatagcgattagaacatcaaatagaatcggacaaatgtaat

SEQ ID NO: 74091 - DNA, 443 bp, Glycine max
  unsure (1)..(443): unsure at all n locations
agcttanaccacagcaacccacaatctatgtatccattaccnctcaatttgatggattatctaggttagagaagtgaaattgagaatgaggtaatattgaaacatactctcacctcacacaagtgcataacatcaatttaaacttgttcaaactggatttacacctaaaacttcaccgaatcaaaatttgactcctcaacacccaaatataccctagaattggctctttggtcactatggtcatttgttgtctctttagcacagacaaactttctcacatgttctaaatggcatttcaagctaggattaactcatcttaacctccatctaccacagaatccagatttaacctttcaactctcaaagcctcactcttttttcactcataacaccacattctcactttctaacactagggtaattctacccttcatctctaacag

SEQ ID NO: 74092 - DNA, 209 bp, Glycine max
agcttgtacgtatgtaagatacatcttcttcgaccttggtgatcctcgaatccatctcattgaatcgcatgtgcacgttgaactccaaagtatcaaacctttcaccaacaaaggattgaagaccatctaacctgtccaatatcttttgaagaagataggaatcttctccaccatgtaagtgtccttcttcaataatggagtgagcaccc

SEQ ID NO: 74093 - DNA, 462 bp, Glycine max
  unsure (1)..(462): unsure at all n locations
atctctgagtcacctgccgcatgcaagctngatcaanacatttctctaaccattccaatccattcaaatcatacaatttctcattcaaaccattctcaaacactcatttcataccaaacaatccactgcatatcattntcaatcaattcactgttcaaacatgcttttggtacaagcaaacaactcaatagtgctgaaatttaaataacttaaacataaaaactgaaattgactganattaaaataattgaacataaatcatanaataactaanaataaactaaaatgttcaagatgcacaaatttaaatgtcctgctcattatgtagttgatcttcattaagatccagtgcttgagctattgatgaatcctggataggctgctctagctctgtgactggtgtagatggctacgtctcctcaagagcangtgcagaggatggctctatgtattgatctgtgg

SEQ ID NO: 74094 - DNA, 179 bp, Glycine max
  unsure (1)..(179): unsure at all n locations
cttgtgctgtaaccacgattcgtatctatccgtacataatttcgttacacaaatatgggagctatggaaagatattcacttagtatatgacaaacaattaatccattttatttgaaacttccacggcaccaggagatgagaattgaaaatntgtgccaatgacaatgagtcacctttca

SEQ ID NO: 74095 - DNA, 383 bp, Glycine max
  unsure (1)..(383): unsure at all n locations
acctgccgctgcagcttgattaaaatgtttaaaatactttaattaatattgaattttattcctttattaatatatatgtgaggggtagagggtgtcacaccaatgttgctaggattctgnntagaagttttcttanaaggttctagatttcgttaagaaccttgtcgtataaatagcttgtaataaggtgttcaaaggaatgagaatatacgctacttccatcttcttcttctctgcacttctggaggcgctnggtcctcanaatccaagtgtaacattggttctttcattgcactacaatggcggacgcaactcaatccaaagcttcctctaaccacttagaagacgtcatttncaagctcgcagcctcccaactcttcatg

SEQ ID NO: 74096 - DNA, 414 bp, Glycine max
  unsure (1)..(414): unsure at all n locations
cctcttattggactaggcccaatctagatggccctcttaggtttagactaacttatattgagtttcgtccgtagatccctcttgtaagactatactcagctcaagcagcttacaaaagtttagcataatttagcctaagcttcgttcgtagatccctcttgtnagactaggcctagactaaacagcattattgtaacaacataattaaaaccaaaacttaatctgcagatccctcttgtaagactaagttttgatcctgcttcaatcaagttctaaggcaacagtacatttcccaatgctaaagtcacctaactatgcacataaatggatgatcagaccaaatgcatgcatacattaagcattgatggaagcattgaacacaaaanacataatcaagtagatattaagtattta

SEQ ID NO: 74097 - DNA, 386 bp, Glycine max
  unsure (1)..(386): unsure at all n locations
caagctanactcataacagaggaggagtaataagtgattgatctattataagatacagcttgtatgtcgttcttgattatacgtttgtcatcatcaaccaaggggagattgtataagcaagcttcatgatgatgaaccaagcaattttgattatgccaaaagcccaagtgattgattcaagattgattcttgactctatgatcaagaatcaataatcaagaatccaatctctgattttagattcacgagatgatatcaagaagcaacacaatcatgacgtcatataggataagtattataagaatgtttcacaaaccaaatagcacagttttgtttacaaaatattgttctcacattgtctaatgttaccagagggattactctct

SEQ ID NO: 74098 - DNA, 452 bp, Glycine max
  unsure (1)..(452): unsure at all n locations
agctngtgcaaatcanatcactcctacatctcatctctatgcatgcatttctttctttacccactcctcacgtttggttttttagggaaaacactataactaaacgcgccgcaagggatccctatcgcaccagatccaaatctagaacgatgggtgatcaagaggagacacatgaacagatgaaagccgacatgtcggctctgaaagaacaaatggcctccatgatggaggccatgttaggtatgaagcagctcatagagaagaacgcggccaccgccgccgctgtcagttcggctgccgaagcagacccgactcccttggcaactacgcaccatcctccctcanacatagtaggacggggaagggacgcactgtgacacgatggcagccctcacctgtgatacaaccgagcggctacccttatggattgccgccaactattaccacccgtc

SEQ ID NO: 74099 - DNA, 443 bp, Glycine max
  unsure (1)..(443): unsure at all n locations
agctnggcattanaagaggatattggattaattctccaattctttcttgattctcccaagttcagtagttaggttgacaatcctcttattgagacgctcttattctaccaaatcacttgtcattttccttcgatagtttgaaaattggcagtatgagtagatttttgagtttccatttgccttagttgttccaagtcagctacagcagaacaataacaaaattgatgcatattgtgattaaagattaaatcatcaattgccatgttgttatggttgaggagttggcaactagcataaaaaattgtaggagccttgaccaattttgataaagagaactgaattgacttcaacatagctggattagaagggatgtcctcttagataaantgctttacatgagaaaagtgatcagcaattgtggacccatccgacatcgctggaat

SEQ ID NO: 74100 - DNA, 472 bp, Glycine max
ccggatgatgccgatcgaacatttcctaatcgacatctttcttatttcattcacggattgaatatagaactcaatatttgacatcggtcgtgaaacggccatgactgatattcgtcagccgacattgcgcaatattttaaaaaaaaaacgctcgcacgccgataatgttttttcttacggcacgggaatatttcttgaatctgagttgcataataaacatacaatgcatgtcggctaagtttttatcgtgcgagctcaaccgatgtatcgtttcggccgaaactggcatgttccgatttattcggacaggagaacattatcccacctcggcaaaaaaatattattcaccgatattgatagaaaaatatgacagtcggcgttggacatgacagacgaccgatcgaggtctaactataagcattaccggatgatgcacgatcgaacatttctaatcgacatcatccaattgtta

SEQ ID NO: 74101 - DNA, 461 bp, Glycine max
  unsure (1)..(461): unsure at all n locations
agctnggtgggactggatcctgaacaaacatggttgtcttgtatttgcanggattcatgatattaaaagttaaaaaatagttnttgaaaatagaaatcaaacacacccatagttcttaattcacaaaaatgaggaatcttctcaaacaactcgtatagaaatttaaatgcaaattgagcctttacaaattaaaataatctacatctttttgtagatattgngatgatacttaaatccttataattcagaataacaaattggcatagtttgctccttctgtagcatatcactgtctaaaatcttatttttgccactaataataattaagggtttaaagcctgatattctcatatggtcaaagcaacacaacccattatcagacccagataacaatatcatatatgtatntactcaccacgattacttgggcgacatgcatctgtatgggatagtctactcct

SEQ ID NO: 74102 - DNA, 427 bp, Glycine max
  unsure (1)..(427): unsure at all n locations
caagatgaggaagtgtagaagggggatacttcctgcttttattcgttgaccaccgagtggtacttggagatatgtcgcggtggtcaggagaccttgtggacgtcaggtggggtgctattgcccaaaaccaagcttgaccaatcccgacccaacccaggcatagtcagtcagtgagaacctgtgatgtacctaagcaggcgagctcctggcagtcaacagataaaaggaacaaagaccacatagcaaggaggcttgtgtggtggctggccagctgtgaatcttgtgtgatatatgggttatggcctatggtaatcgattaccaagggtgggtaatcgattacaaagcttaaaaatgaagataggaggctaagaaatgtctctggtaatcgataccaaggngtgtaatcgattaccaggctttgaaatg

SEQ ID NO: 74103 - DNA, 426 bp, Glycine max
ccggatccttaagcaccgccgctgcaagcttgtccaccaaagttatctttattgttatttcaaaatctattattatggactcatcatagcataaataaacgtgggtgttcggaaccctgatgtaaagatacatatccattgttattttgcttatggggaaaactagatccagttgaactaatctcattcaaaatgtataaccaaacatgttgtctacttcagcatttacctaagaatatgttaactagcatttcaacatgattttggctgaaccatctaatgcgcactccctaatcaattacttgtccttatgtttgtctctctgtgcagccgatatggtgaggaggcaagctttgtttcaggggattctgggtccagcagctaatcacatagtcaagttacctaaaaacgtattttatttatatt

SEQ ID NO: 74104 - DNA, 454 bp, Glycine max
  unsure (1)..(454): unsure at all n locations
agacaatggtttcataagatctccatacctgctaactatgtgtttacctaatctaaaagtgactacttcctattcactggtggatctggtctatccactggtggttttcctagcttacctcaaatttccaaagatataaacaatcctggctggcccaaataaatacaatttgacagagattcagcattactccaaaatttgttcaagctcaaggctctcttggggaacctaaattctttaaccaaaggcatttctctatgccaatgcacaccgtttctctactggaatatatacaggcttcctaggggctaaacaaaaccagtgttcgtgtctatagatcccaacctccaatttaatgggatgctggtgatctattagaagatttatctntatagagaagatagatcggtagtttaatgtacataatgacctcaaagttgacatcacatgcatg

SEQ ID NO: 74105 - DNA, 340 bp, Glycine max
  unsure (1)..(340): unsure at all n locations
acggaagctctctagaatntcatatggtcataactnttcactgcgaggtccgattcatgcgcataatatattgagacgctcataattgtacgacggacgctctcgagagattcaaatggtcatcacttttcactcggaaggcagatccacgcgcataatacatcgagacgctcgatattgaacaacagaagctctcgagaaattaaaatggtcataacctttccactcggatgtccgattcacgcgcatcatatatagagacgctcgtaattgaacaacggaagctctcgagaaattcaaatggtcctaacttctcactcagaggtacgattaggcgcat

SEQ ID NO: 74106 - DNA, 502 bp, Glycine max
  unsure (1)..(502): unsure at all n locations
gcttgcaaggtgtgcccttgatagcttattttgaataactatgaaagtcctctttggttaggctggtgcttggaggaaaataagatcaacgtaagacccagagaagagtgggcagttcgtgatcttcagtactcggcttaatatctagaaaaccgataaggaccttgtagattaaaaaaaaagagtcccatcttttatgctattttaagtaatcaaagacggaactagacatggaataatctagagacagatatatccaccccaaagcttgtctctaaagacaaagtttcattgtgtcgggaatatccgtatcactttcctatntgatagatacagaatgttctccatttctaaattcgtcgttatatcaaaagtttctagaataaaatatttaattatatttcgtatcattagtattgttttttagaaaatgagttccatcatattgctttttatacgaaataatggctttattacctctgcgctctttatatctctattt

SEQ ID NO: 74107 - DNA, 267 bp, Glycine max
actcaagattcaagaatcaagagaagacttaatcaagataagtgtcataccctaatttcatctcgcgaccatctatttgttgggatgtgaccctcgcttgaccacttcgaggtacttggcacctattgttgcacaatctgcgaagttccgcgacatgccaaaagtcaaaaagaaacattgttgcccaatccgtgaatgtctgtgatatgccggatgtacaaaagaagcattgttgcacaaacccgtacatttcggatcattccggaa

SEQ ID NO: 74108 - DNA, 398 bp, Glycine max
  unsure (1)..(398): unsure at all n locations
cgcagaattctntaatgggcttaattttttgggattaattaagtatttcaaactattagaaaatatgcattntatattggttatttatgactttccacatcggttnttaaccgatgttgaaagtattatcgttaacatcgattttctagaaccaatgttaacgtagaattgacaacatcggttatntaaataaccgatgttatataataagaattacaccacaaaaaggtatgaatgttaacagttcacatcagttntgtgttaacatcggttntatgtaaaaccaatgttaacttatgcattaacatcatcagttnttgtagaaaaccgatgttaacatttgttatgttaacatcagtttcactcanaaagtgatgttaacgtataagttaacatcg

SEQ ID NO: 74109 - DNA, 201 bp, Glycine max
  unsure (1)..(201): unsure at all n locations
agctttatatggacgaaagtgcaatacttctatntttttggtatgatgatggagaagcaggacttcttggaccttgacatgccccacatgataacgaacaagtgaagttgattctagagaagataaaagcatctcttgattagcagaagagctattatgattgaaggaggaaaccattagattttcaagaacgagaacatt

SEQ ID NO: 74110 - DNA, 508 bp, Glycine max
  unsure (1)..(508): unsure at all n locations
atctctgagtcacctgcggcatgcaagctnngtggaagttgaatgctaattccgaagggggctaagtgtgtgtgtatatattaaaaaatattgaatggtaatagtacccactttttcagtactgtagtatcataaatgaatccggcaagtcggaccaattgttaggaaccaagtcttgaaatgaggaagaaaataaataattntattgaatagtgagaaaagaaccagaaataggagataaaactctcctgcaagggttttctcttcacactcttcacanaggatntctcctttcacaaagagctaatgcccgatctacagatgataagggctccctctctcctatccttcttgccttggttatatctaataaacccctctaactaactaactaactaatcaatatcctagctgtagtaactaactctccctttctcatagttctagcagatgccgaggtttctccctttattttcttctggtgggggctttataaattntatcaaca

SEQ ID NO: 74111 - DNA, 279 bp, Glycine max
atttctccgacaacacctacattgtaccgtgatagcttctagaagctgtaaaccaacaaaggataacacgagagtaatgaactgaacctaatactaccattgtaaaaatagtcaacgttatctcttaacggttaacgtcatatttttatctagagacttatatagcgaatttgaataaacataaactaggatagaattaaaaaataaagagacccatttgatgaatttggaaaaataaggggactacttttataataagtctacaaaaataacagtttg

SEQ ID NO: 74112 - DNA, 522 bp, Glycine max
  unsure (1)..(522): unsure at all n locations
atctctaagtcacctgcggcatgcaagctngatatatgctnggcactcatgctgatcaaatgttatgtcttgtgttttaatttgnngtttgttaaatngaaatcaagggaagtcaataggtaatgcttntttctagctcgcataaatgacaaatttcgaagacctaactttagctcttccatgtgttgtgttgattgtaactgaagaattctaagaatattaaacatctgattggggattaattgtttgtttcaaccatgacacatgnttgtttaaacctatttgaatcttttttatcattgcattgtatntaaacaacacaagaggcaaatagctnttgataaatgttagttgaaacttttacaaacaacttgngggcctatattttcctaacacataaggcatataaatactgttaccaaaattacaataaaacattattcatgtatagaattataacttccataagaaaatttttaaaagtggatacagtacagagttaatccacattcattcctttct

SEQ ID NO: 74113 - DNA, 347 bp, Glycine max
  unsure (1)..(347): unsure at all n locations
aaatgctagtagatatccaaatgtgcaagtgcaaaatctagatcatatagaaagttcaataacanaactatcacgatggcgagtccagctaaactcaaattcagtcatttgtaaatgttaaaggtggtgtgcattntgaagaccgtatgcaactttaaactataccaaatatcaactcctaaatgcacgaaaatggtatnttgcattagaaatattataanaactaatcagccgaatagaatagtttttaccagacgatgaaggatcaactgtctcanaatattctttcaataattgctgataacattcagagtcatccagaagttcaggatcaccatcagtacgtg

SEQ ID NO: 74114 - DNA, 443 bp, Glycine max
  unsure (1)..(443): unsure at all n locations
agcttagcatgtgtcttcagccaggctcagcgcacgattggcgctaagcccgaatccacttacccgcgctaagcgcaacatcatgaattcagagcctatttaaagcctgtcttatacagaattagggtagagactntaagcagatgattggcacagattccagagcacaccatagtgcctaattcgagaaaagagctctggaggcagcaagaggagtatcttttgctgagacacctangttttgtaaacttattattgttagggtttcttctgtaatggctggctaaacaccctagttggggatttctaatgaacaactgatgtaaatacctaatatctaattgattatgttntntgtgttcaatgcttccttcaatgcttaatgtttgtatgcttttggtctgatcatccatttgtatgcatatgtaggtgactttagcatt

SEQ ID NO: 74115 - DNA, 517 bp, Glycine max
  unsure (1)..(517): unsure at all n locations
atctctaagcacctgggctgcagctataactctcgtcttcaattcccatcatatntaatgatcattacgtagcttcacagctttaatctgacgaactataaactcaaaatcctattgatgaagctaactnttaggccaataagaattccgtttaagttcagcctgaagaacagtagccgtcccaaccgcaaataanagcacctgtgtaatttaaatattctattagaaagtcacatatacataaaaggagtatgcttgacaaanaaaatttcagttaattnttatntttttattaattgaaaagtttatttatatttttaataaaattttttagatgccacttaaagtaatatttttaaaaggttaatctttatttttttatatttattatttggtgctcttggaatattattagaatttctttttaatattttcgaaatctgtatcttatttttttacataagattttcatttatgttctatttacatgatatggtagggactacaatatatataa

SEQ ID NO: 74116 - DNA, 507 bp, Glycine max
  unsure (1)..(507): unsure at all n locations
agctngagtngaggaagtgtagaaaggtgaaactttctgctnttattcgttgaccacagagtggtacctggagatatgtcgcaggggtcaagagacctctgggacgtcaggtggggtgccattgcccaaaaccaagcttgaccaatcccgacccaacccgggcatagtcggtcagtgagaacctgtgatgtacctaaacaggcgagcttctggcagtcaacaaataaaaggaacaaagaccacanagcatggaggcttgtggtggctggccagctgtgaatcttgtgtgatatatgggttatggcctctggtaatcgattaccaagggtgggtaatcgattacaaggcttataaatgaagacaggagactaggatggtctctggtaatcgattaccacggtgtgttatcgattaccatgctcganaacgangtcagaaagctatgggagcttctggaatcgataccagtgggtgtatcaataccagcttaaaaaggactggacactg

SEQ ID NO: 74117 - DNA, 402 bp, Glycine max
  unsure (1)..(402): unsure at all n locations
agcttcatggtggaatcaaagtgattcatatgtgtgttgatgataacaatgatgataacaaaagatgatgacaaaggtgatgacaaatagctcacagatcaatcaaagaacaactcaagtgaatcaaagatcaatcaaagaacaactcaagtgaatcaagaacaagtcacgagttcacgataagaatcaagaagaattcaagactcaagaagaaagtctggagtcaagaatcaagattcaaggttcaagatctcaagaatcaagatcaagattcaagactcaagattcaagattcaagaatgaagagaagactcaatcaagataagtattaaaaagtttttcataactttgaatagcacatgatctttctcataacatgtntaccaaagagttttactctct

SEQ ID NO: 74118 - DNA, 398 bp, Glycine max
  unsure (1)..(398): unsure at all n locations
tgcacaacaagttntccacatccacaatgcgcgcataaacccaccatccactcgtgcccacctccaactgagctcacgtactcccacgtagcccatatcctcgtttctctcaacaccgggtccccatcaatcctctcaagcttncacaacatccaagtaaaacaacattcatacagcacaagctatcacagccaagcaaaagcagagcatagtctgataactctgctcaaacaccaaccagaatcacatgctttctcacttaaagaccacagtaacaattccttcgatccaattcgttaaccggtggatcgactacaaaatttactgaaagtctatagtgctaancctacatggtgaccgtggatctacttcaaacatcataactcatctgactactc

SEQ ID NO: 74119 - DNA, 507 bp, Glycine max
  unsure (1)..(507): unsure at all n locations
agcttcctcagtcttagtattttccctctccctctcttaggatttcaggggtttgacatttatcatataccttgcctcagaagtaatcccagaggatcatgagttatgcccacctgtgcaggtgagttgattaagggaaaaataggagaccaagggtgttcatttcttgcacacttgcttccagatccatacacttttcacattacctccttggttagacaactttattctttgtatcaagtcacagccaagcacaaactaaaacttatagtggaaaaaaattaaggggacataatgacttgtgaaataaagctaatacattattacttctcgttntcttaattttattnnttctttgggctattgccatagaanaatgtaatgctcntgcatgtacaacaactatagcctttcccactaacactaagcttagcaatataattgtagagaagtaaatatttaaatctgatctaattgagagtgctacaaacactctaactttaacac

SEQ ID NO: 74120 - DNA, 470 bp, Glycine max
  unsure (1)..(470): unsure at all n locations
tcactcagtaggtctacaatatatctatatcatgaattcacatcgaaaaacttatgtctaaagcaatgtttccctcttaacaagaaggatgtcaagaggaagataccactagtgcaaaaaaacaattttagaatggtcatacaaaaaccgttttaaacaaaatgcagtgaactcttgtagttagaagaagactttntagaacggcttgtaaatgaccgatctaaaagatngaccgttctaaaaagtcatgactttntatagcatcactttntatgacggccatacaaccattctaaaaagtcatttntaaccattctaaaatctcttttctgtactagaggcattggaatgaaatacanagaatcagacacttctatttngtgaatgaaactgtgatctgcagaggtgtttatttcttgaatgaaactgtgatctgcggaggtgtttacttgttgaataaactgtgatct

SEQ ID NO: 74121 - DNA, 473 bp, Glycine max
  unsure (1)..(473): unsure at all n locations
agcttcaagaacgagaatgagtggtggtgtgataaagatcaatggtggtggttggaggagaggctntggtggtggtggcatgcgatagtgatgatagtgaagctttagtctttaggtgaattagagaagacgggaagtgaagagtctagagttaaggagttaagaataatctggactaggctaagacacacttgtgtgtattatttttggctatgctcaataagaagcacttcatacacatatacttggtcatgtttatgtaccgacgatgtaaaaatgtcattatgaacccgcctaataatacatgtgtcaacccgcttttatgactcctatatcatggtatacccacccaaattacacttttctctctcgatatgtttagttgtgggttggactgagttcactcgaacacccttaattatgaggtttgtttctctatgaagaaataatattagtgaagattaatcaaatag

SEQ ID NO: 74122 - DNA, 466 bp, Glycine max
agcttctatagagaatggatctttgagcttactaatgtccttcaatggtgattttcagccatggagttgcagcggaagataaaggagaagaagagagaggaggcgccatctactatggaataagccatggaaggagaaacttctccaccaagagagtgccttggataaaaagcttagagaggaagcttcaatggaggaagagaatgatggagagagagagagagaaagtggcatggaaaattgaaggaagaataagagagaagttgaactttgaagtgtgtctcacataactcttattcaacaaagttctgacaagtgttacacatgtttctatttatagcctaggtcactatttgtgaatatcatttccatttcatgtgaatctaagagaaatattctaaggatatgccaaaggcatcttatcatattccaagaatatgctaaaggcatattagcatattccctt

SEQ ID NO: 74123 - DNA, 425 bp, Glycine max
  unsure (1)..(425): unsure at all n locations
agcttctaaggaagctacctagtctataaatagaagcatgtgtaacacttgttgtaactntgatgaatgagagtcttgtgagacatacttcaaagttcatcttctttcgtttttttattccttcaatttcgtgctcccccctctctctttctctccctctttattttcctccattgaagcatcctctccaagcttcttatccaaggctcatcttggtggtgaagctcattcttcccatggcttattccctagtggatggcgcctcctctcacgtcttctcctttgtcttccgctgcatctccatgggggaaaatcaccattaaaggacctcattgaagctcanagatccagcctccatagaagccccacaagtaagcttccatcaccccttggataagatattagatgatgtgagatcccttaag

SEQ ID NO: 74124 - DNA, 346 bp, Glycine max
  unsure (1)..(346): unsure at all n locations
agctntatagtacaagcaaacaacttatagtgctatatattaaagaactgaaatataaaaattgaaattaanatgaccgaacaacaatcataanataattgaaaataaactaaaatgttcaagatgcacaaatttaaatgtcccgctcttgtggttgctcttgtgcatgctcattaagggccaatacttgagcatctagtgaatcctgagagataggctgctctaactcangtgctagtgcagatcgtgtggcatcatcaagtgtgggtgctggggatggctctgggatctggtctgtaaaaacatcctcctcctaagccatgtgtatacctgcatcaaaataaaa

SEQ ID NO: 74125 - DNA, 350 bp, Glycine max
  unsure (1)..(350): unsure at all n locations
tctattatattttaatattactagcattntgttttctagccgtgtatatggctatactattatgacatttgaacaatntagtatttcctttatttgcatggtatgattaaacaattatgaattatgttatatgactatgtgattnttatatatttgatctactcatgtttcttgcttcatgaatggtttatattcttcaatgaatgtctngtgaatgaaataatagtgtatgtatgtttatacttgttacacactttggccatttgttgatgccaaagggggagagaaatagggattaaatcaagaactcatataagtaattaatttaatttcaagtaaagcatanactc

SEQ ID NO: 74126 - DNA, 453 bp, Glycine max
atccttaagtcacctgcggcatgcagcttacttgacaccctgctactattgatcccatttcttccttgtattgtagccaatcggacattattggatgagttacaatccgccttcagcttcatttatttctagcagaactgcatcatacttctggaaagactaactttctgataaaactttcttcctatattgagtgggcttacggaccaagcggacaatttattcaaggaattgagagagatccatgaaagattcttaacactgctgattgcccttgttgcacgcaaaaacactgactcaggaaattctttattagaaaaacaccacaagctaatgatgtctctggttgtcaccattgtctatacttcttcctgtgcacgcttgggataatacttccacacataataccagaagcacaacatcttctcctatcatacatgtgtatgcttatgt

SEQ ID NO: 74127 - DNA, 475 bp, Glycine max
agcttgtccttaagggttaagtatctgataatactaatgcatagatccagaaaatcaaagatatggaaaaaggattctacaccaacaaccacccttgttcagaggcataaaatatgattattggaagcaacaaatgatatctcactttgaatccattcatattgacctatgggtgatggtggaaaatggaaagtgcattccatacgatgatcagttaaatgaaattcctagaagttggtggatggagaagcaaaaacttagattcttgctcgactccaatgctcaaaatgtgatgctatgtgctctatcataagaggagtacaccaaggtacatggcttatatagtgcaaacaaatatatgacactttagttgtacgtatgaaggacctacaggtaagaggagtaattcattcctcctcgaagatgaactttttatgaagaagaagactaaagatgttgatcttcaaccttctat

SEQ ID NO: 74128 - DNA, 292 bp, Glycine max
gagctcgatcggggctcaaatttatgcggggccttttctatacttgactgacagctctatcctcttctttccataagcattccaacaagaatgagagtggaaggaatctggaacctggaagtaaggacatccttgtaatcctcagcaatccagattgcagttctaagagtggcccacaaggaactcaagatgaagatatatggtaaatggtacatgatggaattgtctacttctgaaatgtagactagactttgttcctgctattagacataattaaatgctctaattagac

SEQ ID NO: 74129 - DNA, 524 bp, Glycine max
  unsure (1)..(524): unsure at all n locations
atctctaagtcacctgcngctgcagctatgcccattntaatactctaagattacaatgtngtntgataacttagcttctaatcttagaatgaattacaaagaanttgagtgctcgttcactcataaggttctctaacttcagcaagaaaaactttagttctcaacaacctttatccaaaagtaaatgttttgactgaatggccttcttattcttcttaattatntgtaggggaaggtatccaatanagcatttaatgaaaccattatgtagctcaccaacttgtcaaaatgatatgataaagtggcttgcttatcttccttattcgcactccatatcttgcattagaagtcaaatcacttgntgtacactcaagtacactacaatttgttntgacatgccttttgatggagtacgtagcttntttaagtgaactctttctcttttcttgtctntgattgatcctatgaanaataaaagaacattctctacataaacgatcaaatcctctaagcattaaacatgt

SEQ ID NO: 74130 - DNA, 466 bp, Glycine max
  unsure (1)..(466): unsure at all n locations
tcttctttcccatgtcctctntccttctttctctccaagtttctctcatctcttgagctataggcttgaagttctacacaataggagacttgttttctccctccaagagcattttaactaattattgctaggcgaacacctttatttttctcttttgatctcttatttcatttctctctttccaccaagaggctagcagatgggtatgacaaagttttgagtggtagatcccaaattgattagagcttattntagtgttggttagatcctcttctagttgaacttgcaaaaatagttaaggaaagaacttccttgaagcttcaagatccttcctttagttttctccttcaagaagatctcaacttagtgggtaggaaccttttcctttgaattatgatgtgtttttattggctaaaactatnngatttttactntgattccataaacgagatgatgaaaatgattg

SEQ ID NO: 74131 - DNA, 453 bp, Glycine max
  unsure (1)..(453): unsure at all n locations
agcttaagctccttcaattgcacaaggctattaatatttgaagagtatccttgtggaaccttcacccgacgaagacactgacaaaaacttatcttcttcttnttggacaaagtatggcaggctgggggcaagtaaattttcttcccatcagaccttggatgcaactatgatcatatgcccatatcaactagatcttgtcgggtattcaagccatccttcgtcttgccttgaatggtaaggagcatcccaatcacactgtcacaaacatntttctccacatgcataacatcaatacaatgtctaacatcaagatcagaccagtacggaagatcaaagaagatggacctcttcttccatatgcaactcttacntttatccttcttttgggtctttccaaatacagtattcaagtgttgaacccgctgatatacctgctcaccagtcaacggtatc

SEQ ID NO: 74132 - DNA, 468 bp, Glycine max
  unsure (1)..(468): unsure at all n locations
agctntgagccanaatcctaactcaccataaaccttgtatcagagtgagaatgtcaatccttaccctcgaaagcaaaaagaagagaatgataatttccaatcatagaaaaaaaataagagaaggaaaatttccaatcaaagagaaagcataaaaaaaaggagagaaggaaaacttccaatcaaaggaanaagagaggaaaggaaattcccaatcaaagagtgggagaaagcgataagataagaaagataattcccaaccaaagagtgggagaaagtaaaaggaaggaaagaaagctcctgatcaaggatcgaaagaaatcataagaaatgtgcagaaaggtctttggaccggacaatatctgaataatacagaattgtcaccaaatgaactaaaggaaggaaaggaaaccacgacctgaaagtggtcttcttcctatgattaccaaccanaatcttgtgcgtcagtga

SEQ ID NO: 74133 - DNA, 501 bp, Glycine max
  unsure (1)..(501): unsure at all n locations
agctngtacgttacagtgataatgatggcgctggagatgaacatgatatacaaagtaccaatggatctgtgttattgatggtgaatacaaccttcactctgtagaagcaagcttcatgatgatgaatcacgttgattcaagtagttctgatgatgacgaagatgatgacttatattcctcagaatgatttctagattgagtcagcaagttcaagatcaagattaactgtcagtgtcatgacaagaaatcaagatgattcaagaatcaagagaagtttgatttcatgattcatgagaagaaatcaagaagacttcacaagggaagtattgaaaagattcttcaaataacatacatagcacaattttgtttttcagaagagttgttctcacaatcttctaagttaccagagtgtntactctctggtaatcgatatccagttctatatcgataccagtggcaaggttgattcaaagctttattgatatgcacgttcaatttttt

SEQ ID NO: 74134 - DNA, 435 bp, Glycine max
  unsure (1)..(435): unsure at all n locations
gctttgcacttgtggatattcctatataaatgtgagcattagaagaattaatntgaacttataaatgtaagaatgaaagattagagattagagattagttcctctctctcacttgatgctctctttgtgaaaaatatggcaatgggattaaccaatatgttgtttgtatacagatggaagtctgagcacggtagaaacactggcttctacagctatttgcggaatcatacactcaatnttgggtggcagccactcctaatagtgggagttgctgaacccactatcattatgtacacctacctgtacaactatgccaaaaatagggattccttgggacaagaactctatctagcttgtgccggatggtaagaaaaacattctctacgtagcccaagtttgttgtgttgtgataccaatgtctaattgatatattac

SEQ ID NO: 74135 - DNA, 467 bp, Glycine max
  unsure (1)..(467): unsure at all n locations
gtctgttatgccttcaatatatccttttatctagtatgtataataaatcataatagatgtcatgatcgatcatctggtgttcctactaaatagtagtaaaacatgctttatttcttattntcgttggattccactggcacgcataattaatataggttcaaaatgcattatgccgtgtttgctgacatccaatattaataagagtaggaatggtaaaatgtactcgaatcttaaggatatcttcaaaagcatgtggaagcagagatgataattatttatttattggaagtgggaatggagattggtatttatcggcaaattatatgggaataaatgcattataggtaataaagtatccacctcgcacatatatatcatatatgttaaatattaatgtaattaaaaatgtacttaagctaataacctatattatatatatattataaaacatattttcttaatcttat

SEQ ID NO: 74136 - DNA, 349 bp, Glycine max
  unsure (1)..(349): unsure at all n locations
agtctttcaagagacctactcttagtgactggtntcatgagaaggtcttcttggttgcaaacactgaacacaaaggaccaacgttccttgtgttcattgcaagaagcgggagttgcttcttggttgaacactggacacaaaagaccaacgccttttgggttcattgcaagaagtgggtataacttcttggttgttatcattgaacacaagggaccaacattccttggggttcatagcaagaagtgggaataacttcttggttgtaatcactgaacacaaaagaaggaagtcctttgtggttcatcgcttgaaaggattttacaaggatagtggaaatcttaagcgggtt

SEQ ID NO: 74137 - DNA, 449 bp, Glycine max
  unsure (1)..(449): unsure at all n locations
tccttctcttccctataaataggggaaggagggaagaacattattgttcaaccctcctggtatctgagaatcacttaaaattagtgagaaaaattgtttccgtgaagaaaatcccagccgaagtgctttcgtaacgcttccgagacattttcgtgggtgatttcgcgaagattttcaaccgttcttcgttcgttctccggtcttcaaccggtaagttcccgaaatcgaatttttcaattcattctatatacccttagtggtcctcatttgtttcgcgtgcttttatttttatttcatttactttccgtacccctttttgacgtgctntagtcatttatttaagtcattttcccgcctaataaaaaataaaatataattccaccgatcattcgtattgtaacatcttntaatttctgctaagatgaaatccgaccgttcagtcatgccgt

SEQ ID NO: 74138 - DNA, 397 bp, Glycine max
  unsure (1)..(397): unsure at all n locations
cggatccttaagtcacctgcngctgcaagcttgatgcctattaatggagtttcaagaacatcttcagactgatcaacacttgcacagtggccaaagatgcatgggagatcctgataatcactcatgaaggaacctccaaagtgaagatgtccagattgcaactcttggctacaaaattcgaaaatctgaagatgaaggaagaagagtgtattcatgacttccacatgaacattcttgaaattgccaatgcttgcactgccttgggagagaggataacagatgataagctggtgagaaagatcctcatatccttgcctaagagatttgacatgaaagtcacttgcatagaggaggccgcagacattcgcaacatgagagttgatgaactcattggttc

SEQ ID NO: 74139 - DNA, 491 bp, Glycine max
  unsure (1)..(491): unsure at all n locations
agctagttatgcattngataggtagatgatgatcatgtatatattgatgcaattgttgaagcgagtcaatgggaattaagatgttatttgagaagattgttcgctaccttgctattgtctaattagatgtctatgcctcactttctatgggaaaagtcttggaaatatttaagtaatgatattctttccaacagagattaattcttctatcaataatgattattataattcatcttcttttcatacaatataattgctatatatatcattatggattacattctttatacataaatttaattatattttattgatgagacaaacttaccgttggtatatgaagagttgcagaatatcacactcatagaatacaaacttattacaagagaagcatacagttatatgaatttctctcatgatgttcaaaatggacatggctcttttctagctcaatttgttaagacttgcctgaaatgatataaatgctctat

SEQ ID NO: 74140 - DNA, 316 bp, Glycine max
  unsure (1)..(316): unsure at all n locations
tcaaacgaatataaanaagataaatagattgggagctgtatcaatttttctttgccttctcctccaacgtcctgcacgtaattccttctccttctatcatctctatggcgcactcatatgagcagaatacacgtggcgtatatcgcgtgcgtctancattacgactggagcgggtgctgcaagaccaccctgtggaacaccttgacgtagtattgcagcccaacagcagagcccacgaagacctgtgccaggccctataacttggagcccaggccacagtccgtgggaacacgatctctatgtcatgataagcatc

SEQ ID NO: 74141 - DNA, 297 bp, Glycine max
  unsure (1)..(297): unsure at all n locations
agcttggaacaagaagattgatggtgttctcaccatatttgtgttgagaaatgtatttctgaacatggtgtctatattaaaggagagactactgcnaatttaatcctattgcgcctctatgtggatgatctattgatcactgggagcaacatgtcatanatcaacaaagtcaagcagctgttgatgaagtaatntgaaatgactgacctgtgccaactatcctatttccttggcattaaattcaaggaaacttgagtaggtgtggtgatgcatcacaataaatacacaactgacatg

SEQ ID NO: 74142 - DNA, 417 bp, Glycine max
  unsure (1)..(417): unsure at all n locations
gtgctaggttccttgcacttgatggtccaattttatcagcatatactaatgaatcacatctagagagcttagcaaaaggtgttttaatcgtgttatcaatagatactaaatgcctttcaacaagattcgctcatcattttctgctcaaaatttgtacaaatacacttcattgtcagtctcagataaataaataggtgctattctatgttaaatggtatatcatatataaaaaaatcaatattgtctctgtaatattaagttattctgattcactatcctaaagaagcgttgatgacttatagtggtaaacaaaccatatgaaattattttcacatgatctaaatntccttttttaaaacaatatgaaaatctaattcttaaacagataanggtttgtacccttgtcataactatgta

SEQ ID NO: 74143 - DNA, 307 bp, Glycine max
  unsure (1)..(307): unsure at all n locations
agctnggacataagaaaggattatnttgtcataccatctactatgccaacaaagntataaatgatgcacagatgaattatgctaccacagaataagaaatggtggcaatagtctatgcactcgcaaagattaaatcttatatggtcggctcaagagttatcatctacactgatcatgcagctattatatacttgctcaacaatgctaattccaaaccacgattgataagatggatttttttggtgcagaattgatttgggatttacgataacaacgatcagaaatgtggacctgtcattgtcagata

SEQ ID NO: 74144 - DNA, 392 bp, Glycine max
  unsure (1)..(392): unsure at all n locations
atcttgagtcacctgctgcatgcaagctnganantgaacaacggatgccctcgagaaaatcttatgctcatatactttcacatggatattcgattcggagacataatatatcaagacactgtaaattgaacaacggaacctctcgagaaattcaaatggtcataactctttacacagatgttcgattctggcgcataatatttcgngatgctcgaaattgaacaacgaatgctctcgagaaattacaatggttataagtcttcacatggacgtccggtttaggtgcataatatatctagacactgcaaatngaacaacataacctctcgagaaactctaatggtcataactctttacactgatgtccgattagggacataatatatcgtgac

SEQ ID NO: 74145 - DNA, 257 bp, Glycine max
  unsure (1)..(257): unsure at all n locations
aatggctgagtgtaactgaaatcgaggcaaccaaaagtcacccacaacaggcaacaagtcagccaccatatggtctcacataatgctgatgcctangttgccaattgggcccttattacaactatgaactataacctatactatactccttatcaattgattaacccaaatcatatttttggtctgccaactttaccatgattgtgccattatttataccaactagacactctataaattgagacgtatgtatgacc

SEQ ID NO: 74146 - DNA, 401 bp, Glycine max
  unsure (1)..(401): unsure at all n locations
agctcgcctcanagaggtccaggaaggacaaggcggtctaacgaactatttccgctccggagtatgacagtcaccgctttatgagcgctgtacaccaacagcgcttctaggccatcaagggatggtcgtttctccgggagcgacgcgtccagctcagggacgacgagtatactgtatttcaggaggaaatatggcgcctgcggtggacatcactggttactctcatggccaagttcgatccacaaatagtccttgacttttatgccaatgcttggccaacagaggagggcgtgcgtgacatgagatcctgggtaaggggtcagtggatcccatttgatgccgacgctatcggccagctcctgggatatcctgtggtgctagaagagggccaggaatgtgag

SEQ ID NO: 74147 - DNA, 377 bp, Glycine max
tcagactgatggccaaactgttcgtaccattcagtcattggaggaccttttaagggcgtgtgtcttagagcaaaaaggaagtcgggagagttgtcttccattgatagagttcacttataacaacaatgttcactctaccattggcatggctccctatgaagctttgtatggtagaaggtgtgggacacccatatgttggctagagcccgaagaacggcctaccttatgacctgaagtggtacaacagaccacagagaatgtcaagatgatccaggacaacatgatgactgctcagagtacgcaaactagttatcatgataagaggaggaaagatctagaattcgaggttggtgatcatgtattcttaagagtcactc

SEQ ID NO: 74148 - DNA, 449 bp, Glycine max
  unsure (1)..(449): unsure at all n locations
atctcctagtcacctgccgctgcagctntataggtgaaatcaggtgcagccatntcccttatagtcctctcacgaggtggaggctgtgccatgttctgagaatgtgcaaaatcagaatgctcataatcaaaatgctcaaaattataatgctcaagatcaggatgttcaaaatcaccaataacagaatgcacagattcaccagttatggaatgctcagaatgtatcaaaggtataaaatgatgcctaactaatctatgaaatgtcctatctatctcangatcaaagggttgtaagtaagatggatggcctctagtcatacactacattcagcatgcacacaactagttgccttgtcatgtaaataaaggtgtaggtttgaactacagctaccctcaaatgatatccaaatgacttngaaatttgtgagcatgctgaatgtataataattg

SEQ ID NO: 74149 - DNA, 488 bp, Glycine max
  unsure (1)..(488): unsure at all n locations
ctgcagctaaggcctgtttccatattcaaatcanatcagtatttcgaaatgtgttcttttatcaagtccatgcaaagacatttgaattcatttggcttttgggaaagtccttcattgttttcattcttaatgttttcaaaaaaaaatcttttgttgtgttctgatccaaaaataagtttaaaaaatactggttgttgattctttccaaagcattttatgtaaaaaaaaaattgtttaagtcccaaaaagaaatctataactatactaacaaaatatcanagaacacataaatgagtcaaaataaacttgtgtaagntttttaaaaaattcaaaataataaataaggtaataaagtactttgaaattaatacagaatgataaataaacataaagacaagttcaaaattttttgagatcatggctgangagctcaatctccttgatgatcatgtgtgangagcttagtctnctccaatgaaataatcaac

SEQ ID NO: 74150 - DNA, 304 bp, Glycine max
  unsure (1)..(304): unsure at all n locations
aactcattgattngcctatataactaatggaaatacgagagtgtgtaatgacttttggtttttgtctagtatgaacatcctttggtaaaatgaatatttctctctatatgattaactntggattatgagtcataccttatccaaaactagacatacatgactntttatactggtaaagattataaaatcttgttatatgataagtataagttatgcaatagttgtataaatacactatagaaaaaaaatgtacacctgagttctaatataaattcttaatcagataaatatatttatgtatata

SEQ ID NO: 74151 - DNA, 459 bp, Glycine max
  unsure (1)..(459): unsure at all n locations
gccggatcttaagcaccgcggctgcagcttaaggttggaataattgttctacttcttcaatgttcaagtcttctttatatagctatggagatttgttattgatagagagagatggctntatcttcatattcccattcccattctaagactccacanatgcatgagaacatcttcacatttctccttcatatgtgtcttgattagagcatagagagacaaaacaattatctagtttattattaaaaaagtgtgttcatatttacagttcaccaggacctctacaatgattgtgtacaccacattacaaagattgattggtctaaattccttaaagaggtggtgtgatattttntaggagataagagcattaaagtttcaaccaaccttatatcaaattccttatttcataaactttctttactaggcaccatnacatcataccaacattgacccatcaca

SEQ ID NO: 74152 - DNA, 336 bp, Glycine max
  unsure (1)..(336): unsure at all n locations
ctgttaatgttgcatcatagttntgctatgtcatctacctttggtctcatctctntaccttacaatttagtcaattctatcattaccctctntcaatatacagaattagcaacatgcaaacatatctaatccaggaaattccaccactaatagtcngcctataatccataaccaatgaaatggcctcatatccgattattccatcttctaattntattgtagtttctgtagaattaaaataagcgttgggttctccgttcaacatanatctatggtttagtttataattcactcaattctgcctttagtcattntcaacatgcagaactatcaaca

SEQ ID NO: 74153 - DNA, 441 bp, Glycine max
  unsure (1)..(441): unsure at all n locations
atcctcttagtcacctgcggcatgcaagctngtagcanggttattattatggttaatagttggactacattgtgagatacattgcaagttgtctataacaatacgttttgtaagtataatataatattaatgtgatgatatgaagaataataataatctataaatgaattgcaaattacaaattacaaatctgtattaagtatcaccattaatagctgaatgttgtcttttttgttcttgcaaaatagttatcctacgcttccttcgttcaacatatatgtccatgagtaattgatttctgcaacaactgccttataattgccaaacaatacgataatcaaatgttgaaattgagttaaataagttgctgtagtaggctgactctacaatgataccaacattataagtatctgcatttgcttcaccgagtaaagggatatg

SEQ ID NO: 74154 - DNA, 384 bp, Glycine max
  unsure (1)..(384): unsure at all n locations
agctngccgcccagcttgcccaggcgagtcttggtgttttctccagaagcaacaaccttctggagggcccaagtgggcctggttgctatctacacccccatttttactaaatacacccgctgccttttttttggtgattctttttccgtaacgttacggaattttacgaatttcgtgacgatacttattttccttccgcaaggttacgaatccttatggattatgtatttactctnttatagctntcgaagaagtgacggaaacccacggattgcgcanaaacactctcttttgacttccaccacattacggaatttcacggatcgcgcaaacctggcttcttttgatttctgagacgtctcaggacttcatttactgtgcaac

SEQ ID NO: 74155 - DNA, 365 bp, Glycine max
  unsure (1)..(365): unsure at all n locations
agcttgtgtttgtaagctatggtagggttgctgaattttattnnttattttgcttggtgtgcggntatgcacattggagttaaattatacttgcgtcttaagctatagtagtgcatccttttgtatatagaatgctgccttatgggttatgcatatgagagtagcttcatgtacacgctacttaaaagagcttggggccaatctgtactggtttggtaaatataaaggagatatgagatgacattctgcatggttctcggtcctcaataataagagcacttacaaattgttagtgaaaacattgtctattctgtgtggtctggagatttatcggtgttatgattgtctgcatagattctggttct

SEQ ID NO: 74156 - DNA, 303 bp, Glycine max
  unsure (1)..(303): unsure at all n locations
tgctagagatgaggaagtgtataatggtgaaactctcttttttttattcgttgaccacagagtggtacctggagatatgtcgcgggggtcacgagaccttggngacgttaggtggngtgctattgtccaaaaccaagcttgaccaatcccgacccaacccaggcatattcagtcagtgagaacctgtgatgtacctaacaggcgaagctctgccagttcacagatataaggagcaaagactacaaagcacggaggcttgtgtggtggctggccagctattaactttgattgatatatgggata

SEQ ID NO: 74157 - DNA, 493 bp, Glycine max
  unsure (1)..(493): unsure at all n locations
agctagaatttagtatgttattctattattatatcataggcgctgaagtgtgtcttattgaaatanaaatctaccccacaggcaattgttatgtcacaagattcaattttctggtggtatgtctacattggttaaagatacagttaagatcactatgcctcagatcttaacataggccttagaattttgcagcttctcaaactattaatttttcttatattcaacgtgatattcccgaactcaaacgagataactataatatatggaaatagagaattctcttgcaatnggggtggatggacatatactatgtgtttacgccccggtgctactttgtattatggatgcgtaaatctaaccggcaggtgtatcgaggcgtgcatgtaataataaaactggtagaaccgagtatccatctcaaggaacttggttcatttggtgaactctcattcaatcaacacacacttgtacatagaatcaataatcatgaatc

SEQ ID NO: 74158 - DNA, 473 bp, Glycine max
  unsure (1)..(473): unsure at all n locations
atctcttagtcacctgccgcatgcaagctntgtccgtagatccctcatgtaagactaggcttatactaaacgtgattattggaacaacataattaaaaccaaaacttaacccgcagatccctcatgtaaggctaagtttcaatcctgcttcaatcaagttcaaaggcaacagtacattttccaatgctaaagtcacctaactgtgcatacaaatgggtgattagaccaaaagcatacaaacattaagcattgaaaggaagcattgaacacaaaaaacataatcaattagatattaggtatatacatcagttgttcattagaaatccccaactaaagtgtttagccagccattacaaagaaaccctaacaataaatgagattaatagcaaagaatgatagttccttacacaagaaggtggattcctccttctcttctcagcatctcaaactcactctctactcaataatctctc

SEQ ID NO: 74159 - DNA, 507 bp, Glycine max
atctctgagtcacctgaggcatgcacgcttagtttaagttagtctaaacctagaatggctgtctatattgtttctattccaacaagagggatctgaggacaaagcttggattgatctagtctaactagggatcgaggtttagtaatttacgctacaacatagaacataatagcatgattgattagagaaacatctttttatgcatcagctggtcttgtagaaaaaactcaacacttctacctactgcttgcaatattacttacttgcatcttttctgtttttagcctagacttagtttaatcctgttctaaatcatcaattatcaatgtttctttcaacaatgccttatttctaaatttaaccctgtcttagactagttccttgagtttgacactcggatcatccgtttaatttatatacttgagatccgggcgtttctggcaatcggttttcttgacattttgataaaaaattggccagagtactgctggaattcacaaatgttat

SEQ ID NO: 74160 - DNA, 420 bp, Glycine max
  unsure (1)..(420): unsure at all n locations
ctgcagcttttgcccaatacatgtgggacagattcgtatgttcctgtatggatnntttacttctggactacaatcgaagctctttcatcttcaatccatctacaggacttcataaatttgtagattggtcacctatttccaataatatgggtggatatggttttggatatgacccatcaaccgatgactactcgctggttcaagcatctacaaataaaaatcctactacttcaacctatatgagcgcgtgtaatctgtttggagtatttctcactcagagctaatgcttggaaagaaattgatcctatccatttgtcttaccacggctgctctgatcgtgtggctatggacattgagttggtcttcaacggtgttcttcattgattggcttcacgtctagatgtatcaaaacatgttatt

SEQ ID NO: 74161 - DNA, 470 bp, Glycine max
  unsure (1)..(470): unsure at all n locations
ctcagagtcacctgcggcatgcaagcttatgagcaattgaatgaggaaaaggagtaagagtctcgttgctttgtgccaccatggacgaccttaacaaggtcttgataccatataagagttctaacagatcataatagaagatattgggagagggaaaaactctagacagaagtgaaaatgattattagccactgaactaactcctaactaactaacttaactgagagtgcagntgaatactacaactctgtacaatactctaataagttcagtgggtaataatatgttcattgtctctgttctaaagctgttcttttctctcaaatattctctttagaattctggtagactacaatatgctttagtgtgttttccacccagcataatagtctacttatattcaagagcagtataaagataagttatgctatatcgaatttacaagagagcatactattttctaagacgca

SEQ ID NO: 74162 - DNA, 399 bp, Glycine max
gtgcaagcttcaatcataagtttctcaaataatcatcacacatcagaaacctagcaagactacccataatatctcccaaaaccccatacccacgaaaatcaagagggaaagaagtccacccaaacctgaattttcgaagtcccactcgtagccacgcacttcacgacccccgaaatgccctcctttctcgatttggagcagaaatgagtaccaaacggtggagctttgttggggtttcaatggagaatgatggaggagaaaatggcaacgtgagagagagagagagctgtctgaaaaagtgtggcggctgagtgatgagagagataagctctttggttttaaataaaaggatgtcctctttttttttctattatttattcaagctctgcccatgttcct

SEQ ID NO: 74163 - DNA, 421 bp, Glycine max
caagcttggagtttccaagtgccaattcgtcttcttctttagtccaggcttcttctggcttcaattcatcagtgggctttccttctgtgtccagcatcgtgagatgttcccagcccttgatgacagctttccaggttctgctattcagtgatttgaggaaggccaccattcttgctttccagtattcatagttggttccatcaagaattggtggtctgtacactggtcctccttctttctccatgttcatcagaatttatctccctagatctcactctgtgatttcgagtgttggctctgataccaaatgaaattctgatactgaggacagatgtcgtacaggatgtcacgacatcacgctatagaacatgaagcttatatgtgtctgtatgtacagattacacaagtaaataacacaaga

SEQ ID NO: 74164 - DNA, 379 bp, Glycine max
attatatactatatcctcattcgatagttcgaagaatatctgtgtcatgcgcttaattaacgcctgatatgtcaaaggtaatgaacgcattacatcgcttcgatagacagaaaatattcgaatctcatttctgtaaacgtcaaattgaactttatatgctgcaagagaaaattgactaaatctagtttataatcgaacgagcacgtcaaatatttaaaaactgttaattaagatctaagacgtgctagtcacactcactaacatgataaatcatgtcctgatcgtgagacattcactaaacagaatcttaacatatatgaccctcataactaatacttaatcagtatggtcatgtttattactaatatattgatctcta

SEQ ID NO: 74165 - DNA, 471 bp, Glycine max
  unsure (1)..(471): unsure at all n locations
agctngcaactaaacatgagatcgacatctcacactataataccatgagaattcatggcttccttccatagtggcatgaaaagacactacattttagacattgcatccaatntgcaagttctttgctttattttcccacaaacttaaggaaatttctcatgagaatcaaatctctaaaagaaaataacaacaactaaactaaacataaattcatgataagatgaagtatcaagtacttctattagccttcttgcactagtcttagacttagtgcacccttacaacaagtagacttatgcttggatgcataaaaccattccacctcatcatttcaatccaataaggttagcccttatgccatctagtggtgaaaacaacataatactattattctcatatctcanatccaagtccgaaattgataagtgtcataattaagttattattgggactanatgataacacttatct

SEQ ID NO: 74166 - DNA, 466 bp, Glycine max
  unsure (1)..(466): unsure at all n locations
agcttgagatgaggaagtgttgaagggttatactttctgcnntttattgtgaccacagagtggtacctggagatatgtcgcggnggtcatgagaccttgtggacgtcaggtggtgtgctattgcccaataccaagcttgaccaatcccgacccaacccgggcatagtcggtcagtgagaacctgtgatgtacctaaacaggcgagctcctggcagtcaacagataaaatgaaaacaagaccacatagcaaggaggcttgtggtggctggccagctgtgaattttgtgtaatatgtggatggtggcctctggtaaatcgataccaaaggtgggtaatcgattacaacgcttaaaattgacgacaggaggctaagatggtctctggtaatcgattaccaatgggtgtaatcgattaccacgctttgaaacgaagtcaggatacttatggagcctctgggtatcgatta

SEQ ID NO: 74167 - DNA, 334 bp, Glycine max
  unsure (1)..(334): unsure at all n locations
agctngcccagagagtcgtttgtctcttctcacgcttatcgatcccagctcactaagccaaatttcactaactcacgcttagcgagccaatctcgctaagtgagccttcagaatctgaaacatccatgagcctttaaaaacactgaagatggcagaaactagggagagatgagttgaaaaatagagccaagagagaagcccaagcgacagaaacgaagccttcaagagaagttaggttagtggagtgagattagggttctagaggttgaaggagacattctcaaccattcttagccattttcttacctcaaaatctatcctttgtgctggaagt

SEQ ID NO: 74168 - DNA, 314 bp, Glycine max
ccctcatatcacttacttgcttttgttgtacgatttgcatgacatgacaaactccagaggataaagatatgttctacgggtatgtcttgcctgctaactcgggcaagtaaatgtatatatgccttaaacccactttcgagcgggtatcgaacaaattggacaccaacatattgtactctaattctaaatgttatcacaaatgagcgaccatattagtattataattgtcatcatatggtcactcttatgtctgtttgtatataaactagaataacctctcttaactcagataccatcatttattgaagagagag

SEQ ID NO: 74169 - DNA, 414 bp, Glycine max
  unsure (1)..(414): unsure at all n locations
agagcacctgccgctgcagcttaccggatgacccgacgacattactactcgcgtctgcacatgtcgtcagggattgaatgaaaactcgttaggcgacactctcgcgtgaaggagcgaccgatatttttcaacccacattgcacaattctttttataaaaactcggtggacgactatgggctttttacggcagaagaagtttttttgtttggttgtgcataaaaaaagtacaatgtacttcggctagggttttcgtgcgagttccaccgacatttttgctcggccaggaaaacattatcccacctctgcaaaaaaaataattgctaacccgcttcatgcatatttcattcaacgattgaatagaanactcaatagccgacaacggtcgtgaaatagtcccgactgatanttttca

SEQ ID NO: 74170 - DNA, 342 bp, Glycine max
  unsure (1)..(342): unsure at all n locations
gcttatgagagagtccagatcnattgagagggagaataaagctatgctatacagccaacacaggcagaaagaaggttgtcnttcaacccggagattgggttgtgtgcacatgagaaaaagaaaggttcccgaacaaaggaaatcaacgcttcaaccaaggggagatggaccatttcaagtgccttgaaagaatcaatgacaatgcttaccaaagtgagcttgccggtgagtataatgttagttccacctttcatgtctctganttattctttttgatgcagatggagaatccgatttgaggacaaatccttctcaagagggagagaatgatgaggacatgtt

SEQ ID NO: 74171 - DNA, 462 bp, Glycine max
  unsure (1)..(462): unsure at all n locations
agcttgtagaatggctagacatgatacatgtcagggctttggnttggttcattgataaaagggatgccccacattatttccatgacacaaatgcaaaaatgatgatttggaaacttcatgcaaaacttgtcatgcatgcatctatgcggacactcaaatgtcaaacttttatggtcatgtgatgctagggctcaagattcatttcctctatttttaatcaacccaatgtttccaaaatatgttcttttatcaatatgtgcattcatccgagtccatttcgggcgtccgggaaatttcacagcattcacccttcaggcgtagacacatttcccaaaaattggttatggtcaatgtaatttttcaaagaaaagttggaaatcgtctcttttcaaaagcatgtcatatttagctagacaactgatgttcgtttttctccttcttctttgttttttatcaatatca

SEQ ID NO: 74172 - DNA, 479 bp, Glycine max
  unsure (1)..(479): unsure at all n locations
gagatgcccgaagaaactctcattcctagntaaccatgcattatgtaccatgttcaattactttgttnttaagtgaaacgggtttgtgatcccaacatggttggctcgtggtgcctgtcgcaacctacccttcggcgggagggcgacgcgagactcgcgggatgcgtgttccacgaaaggaatacgcgcggagtcgccaccaacgtttatttgaggaanacgtccgaaaagccggaaaagacgcggtctacgaaccttttagtgaaagggtcgggagttgtatttacgcacggggaaggtattagcaccccacacgcccgtcccaagggacggcagcctttaatcgaatgtgcaaacatgactntgatttttatggttccctttatgttcttatatcctttataccctctttatatatatttcttttttgtggtcgacnagggtggttctcctttgctctacgtattcctcaatttgcg

SEQ ID NO: 74173 - DNA, 432 bp, Glycine max
  unsure (1)..(432): unsure at all n locations
agcttctctaaagctaaggatgggaaggacttagatattntnttcagtcatccaactctcagcacgacacctgcgctaagcgagacatctcgctaagcccaaaagtctctctagaatggcaattatgctaagcgagaccatctcgctaagcaccaccccactactacatcctcattcatttaattcgttgagtgcgccatggcccgcttagcggaagtggcagaccaatcagagctgtagaactcgctaagcacgcatctacactntaagcccaaaaacctctcgggttcacattttagagaattgggctgagtgagtttgtctcactaagcgcttgaattcaaattctaaaaattcaaacatcatagtgcaaaacataaagggctgaggggtgtttcagattctactaanaggagacnatcatttgaactt

SEQ ID NO: 74174 - DNA, 422 bp, Glycine max
  unsure (1)..(422): unsure at all n locations
gctcgtctcgcggtttcggcagagaatgaagcccaatctgaccttcactgttntcttcaaggttaccgtgattctacgcttggtccttggtagattcagcttgtctttgcatcttttcttactttagaaccaccattgtttggttttacgcttcctttgaaaaaccctagagaaagagacttttgtaaagttatctttttatgaaataggtgttattttcgtgaccttcactgaaccctgatcacattggcgtgattggaattttaaaatgatgttccttttgtagaatccgagatgcccttagccttttcatgtagtgacatgggtatttgactcagaatatttgttntaactttatttctgaaatccatagganattcctttcgtttggtgaatagagacttgcgtggaccgacagcgtg

SEQ ID NO: 74175 - DNA, 475 bp, Glycine max
  unsure (1)..(475): unsure at all n locations
agcttccaccccatgttcatcatatattatttccacactctatcctcctttttacataaactccttcaaaagaacttgtgtatttagctgccattgtgagaatgtcccaacctctatagtcatgaaatacttcaaccagaaccaagaaaataacttaatatcttggataagcttgttactataaatgatgttctggtgaaaaagtataggttatgcgtgttctattaaatgcttggcaagtgtaccacatcgtccaagtaatattttaaaacgataagactgagtgtcaagtccacaaggactntgactgtatntagagttngtatatgcctaattntaagcaattaatgaattgaattgaatatttgtcaagtgatgacgcataaatataaattcgatgtaaattaaactacaaagaanagcatgtgcaagggtgagaanacaaacactcagagtagtgaagtgacgaaagatg

SEQ ID NO: 74176 - DNA, 484 bp, Glycine max
  unsure (1)..(484): unsure at all n locations
tacccatcacatgtggtactangnggcggttggtcgatggagcacaacaagntttccacatccacaatgcgcgcataaacccaccatcccctggtgcccacctccaactgagctcacgtactcccacgtagcccatatcctcgtttctctcaacaccgggtccccatcaatccttccaagcnttcccaacattcaattaatacaacattcaaacagcacaagctatcacagccaagccaaacagggcaaaggcagaaaactcttgccaaaacaccaaccaaatcacagctgttctcacttgaagaccccagtaacaattccttcgttccggttcattaacccgtggatcgactcgaaaattttactggacgtgtctagtacataagcctacattntgaccgttgggatctactagcaaacatccataactcattctgcactactctnntcacagccaatcacacacaagcatttttctgcactt

SEQ ID NO: 74177 - DNA, 297 bp, Glycine max
atttctggctatagcaagagtcatgtctaccaaggctgcaccactggcagcatctatcatacttctctccatattactgagtccttcataaaaatattggagaagaagatggtctgacatctgatggtgggggcaactagcacatagtttcttaaatctctcccagtactcattcaggctctctccatcgagttgtctaatacctgagatatccttcctgatggctgtggtcctggaagcaaggaaaattttttctaagaatactctcttaaggtcatcccaactcgtgatggacct

SEQ ID NO: 74178 - DNA, 460 bp, Glycine max
  unsure (1)..(460): unsure at all n locations
agcttgtaatggtaagaaaagagcaacacacacaatcatctaataagcagcaagtattaaaaaaaatagtaagtataaaataaaagtgtgtgctgccaattaaagaaaaagaaaagctaagtgcgggaaagcaagtaatagagctgggaataaaagaaaagggtgatctaaggatgaattgctctctagaacctaagcttttgcatcctagaaaaaccatgaattgtttgcagcccagcctcgttacaagcctacaaaagtccttcgaattcagtttgtgtgttcttgactgtatggcatgagatgaattgccagaatgagacttttgtagttgtggattgttgaataagcctaaacacttgtgcttganggaaacaatgactgtganggattggtaacgatccttcntgatatctgcatgcttaccagctattagctgggttcttataatcatgtcaca

SEQ ID NO: 74179 - DNA, 419 bp, Glycine max
  unsure (1)..(419): unsure at all n locations
cggcaagtgattgtcttcanatgtgttcaaactcatcaacagtagtctactttgcacattgccacacaattcctttaagttccttgcttttctattgcttaataaaatntttccaaagatgcaaggcataaaatctatgaggtgcaccaagcatgacttcttgcaaagctggaataagtccctgaaaaaataaagtagtccataacttatgtcattaactgcaattaaatccctaacttatgataataattgcaaatcatttcatgtcatancctttgcatgtctgacatgaaattccacccattctgtacataatccccaagatctttatgcaacaaagttaanaaacatttccaattntctttgntctccacgtctaccacaacataagcaataacaacgatgtgtgtattagcatc

SEQ ID NO: 74180 - DNA, 465 bp, Glycine max
  unsure (1)..(465): unsure at all n locations
agctntctccactaagttgcctgatgcctgaaatgtcttttctgatggcagtggtcctagatgcagggaagaatttctccaagaacaccctcttaaggtcatcccagctgaaaatggacctgggagcaaggtaggatagccaatcttttgccactccctccagagaatgaggaaaagcctttagaaagatatgatcttcttggacattagggggcttcatggtggaacaaacaatatggaaatccttaagattcttatgaggatcttcacctgtaagaccatgaaacttgggcagcaaatgtattagtccagtcttgagatcatatggaacaccctcatcaggatattgaatgtacaagctttcataagtgaaatcaggtgcagccatcntcctaaaagcctctcgcgaggtggaggttgagtcatgttctcagtatgaaaattagtaatggaatgctcaaaatc

SEQ ID NO: 74181 - DNA, 397 bp, Glycine max
  unsure (1)..(397): unsure at all n locations
ttcaaacacattacaagaggaagcatggcctaaagccctacatgaaccattttcagcaacctagctaggcctcatagtggttgcgaaaaaggaatcccgatgaaaccttgtttgcagcaaacactattattcgccttggtgacaaggtgaacctttagagggtacaatattaatatgtaacccccatagttaggtgaataattagagagttagttaggggctgagttgaaaaggacgtcagagggagattaactctttcatcttaacgccatcagtactcataacatttcatacaagctactgaaactaccaaaatctttcatcttaacgccaattattaaataaatcaatttactcatgtnattcanataatactttacaaccacatacttatata

SEQ ID NO: 74182 - DNA, 472 bp, Glycine max
  unsure (1)..(472): unsure at all n locations
agcttatgcgcatatntccttacaatcgttctcttgcacaagacaaaaaanaatgcacccatatacaatcaaggcagcttcgttacctagattatttacacgtacttccaaggtgtatttgttacttacatcacacacatctccttggctaaattcacatacatgcatactccaagcattttggggtaccaaaaattgcacctgtgcacatcttggtatttctaatacctatacatacacaaacttcatgatgaatcttgactatctacacaataaggtgctacatctcatgccttttttcaagtttttgctacctaaagccgcatgcaaattcaagcatatnttcctttgctgactaaaattgtattcaaattatatatatattttttggaaatgtctttnttacataacattcaacatatttatatatattttttttgtgagacagtttgactaccaaaaattatatata

SEQ ID NO: 74183 - DNA, 466 bp, Glycine max
  unsure (1)..(466): unsure at all n locations
cgtgaatcctagaaaaccatcatttgtgtcttcctaaccccatttctagcctatgaagncattnggattcattgtgtatgttcattgctgtatgatatgagatgaaatgcaaaggttgggacttgtgttagttcgttatgatggaatgagcctaaacacttaagcttgagtgaaacaatgactctgaggttntggttgatgatccttccttgaattctgccatcctaactagctttatttagttgtgactctaatacgtgtgttcctatctttgaaaagctgcatgtttgtgaaaagcaatttattgaagctttccatgatattcagttcatatggttgaatttctctatgaagcannacaccattttgggtgaccactgtaggttgccacttgaggacaactgaactgttctttcttacttgaggacagcaaactggtaaattggggaagttgtagtcgtctata

SEQ ID NO: 74184 - DNA, 443 bp, Glycine max
  unsure (1)..(443): unsure at all n locations
agcttgacatttgtgttgaatgcattaaaggtaaacagaccaaaagaaagaaattaggtgcatatagagttacagacatcttggaattgatacatacagacatttgtgggtcatttcctacaccttcatggaatggtcaacaatattttatatcattcatagacgattactctagatatgcatacttgtttcttatacatganaagtcacaatctttggatgtgttcaaaacatttaaagttgaagttgaaaatcaactcaacaaaagaataaagtgtgtcagatctgaccgtggtggtgaatactatggcatatatgacggttcaggtgaccaacgtctggggccttttgccaggtacctagaggaatatggaatcgtnccacagtacaccatgccgaggtcacctagcatgaatggtgtggctgaaagagaaacaaaactc

SEQ ID NO: 74185 - DNA, 363 bp, Glycine max
  unsure (1)..(363): unsure at all n locations
ctcagcttaggcccttatttgaagcatattngttattcctaatgtattcctgacatttctttgccttgaagttcaggaaatcaagtctgaaagagatacttgttccgccttatcgctttctgcaagcactttttcaatttcagtaagaaattctttggcactagttatatcatctaaaacaatgctcctaaagacctcaggaatgcgacgcttaatgatcataagactcatgcgatttgagtgatcccacttctcatgaagcttcctctgttaagagaatgtggaattcgtatgagaagggggtttctcaatccttaatgcaaggtctagatccatgcagccaagaacaatttgaatgttctc

SEQ ID NO: 74186 - DNA, 369 bp, Glycine max
  unsure (1)..(369): unsure at all n locations
agctntgcggatatggtcttcgccgggtnaaggatcaaagcgagtcagaaagaggcaaatttggtcatcctgctgtggctgccattcctatatggccaaggttcccaccaacccaacaatgtcattactcagccaataacaacccattttcttacccaccacccagttatccacaaaggccatccctaaatcaaaccacaaaacccacctaccacacgaccaatgctaaacaccacctttagcacaaaccaaagcactaaccaagaaatgagttgtgcagcgaagaaaaaacctgtagaattcaccccaattccggtgtcttatgctgacttgctcccatatccactcgataatgcaatggtagccata

SEQ ID NO: 74187 - DNA, 367 bp, Glycine max
atgaatgggttacactctgaatccaataacacaagttagggaatcccacttatgaaacatttacctaggattagatctttggactttgaagcttcggtactgttaagagtaaaaacccttcccgtggccctcggatgtccaatttggtctttcagacccctaccactctgctccatcttgggatatgagcaatctctcttgatatgcctcttttgtctgcagttgaaataggtcgtgtctttatcggcacaagttaaggagatgtgccctggcttaccacacttgtaataagtaatctaagttaagaaagtagtaggtttgctaccactaccaccagcacaccctgtagaaacaatcctctaattgg

SEQ ID NO: 74188 - DNA, 433 bp, Glycine max
agcttgccacccagctcgcccatgcgagcaatggtgtcttctccagaagcaacagccttctggggggatcttctggagggcccaagtgagcctgtgtgctatttgcacccctatttttactaaatacaccccctgcctttgtttggagattctttttttcgtaaagttacggaaacttacgaatttcgtaacgatacttgttttctttccgtaatgttacggaaccttgtggattacataatcatccccttctttgacttacggaatgttacggaacctcactatgtgtgcaacgatgctttcttttgatttccggtgtgtcatggaaccttactgattgtgcaccaatattttcttttgattttcggcacgtcacggaattcacaaattgctaatgatgggtgccaagcacctcataatgaccaaacacaag

SEQ ID NO: 74189 - DNA, 465 bp, Glycine max
  unsure (1)..(465): unsure at all n locations
agctctaaattacatagatgttcgtatctatgggatgaggntatatgccatanttgctttaagagtaacgtgccactggtaaaactaactttccaaatgtttgccttctcaggaatggccccgaggaagcttgcctcaaagaggtccaggaaggacaaggcggccgaaggaactagttccgccccggagtacgacagtcaccgctatatgagcgttgtacaccaacagcgcttcgaagccatcaagggatggtcgtttctccgggagcgacgcgtccagcttatggacgacgagtatactgatttccatgaggaaatatggcgccggcggtgggcaccactggttacttccatggccaagtttgatccacaaatagtccttgagttttatgccaatgcttggccaacagaggagggcgtgcgtgacatgagatcctgcgttatgagtcagtggatcccgtcgatg

SEQ ID NO: 74190 - DNA, 345 bp, Glycine max
  unsure (1)..(345): unsure at all n locations
cttaagcaccgccgctgcagcttgangaatatggngtatccatcacatgtggtacttgtgccgtcggcgaggtgccaacaagtttcacatcacaatgcgcataaccacatcctgtgccactcactgactagtctccataccaatctgtttctacacggtccataatcttccacttcccacatcagtatcaaatcaacgacagtatacagcacaacaggaagcaaaattgccaaaacaacaaaaagttttactaagaccagaacatctcgtcatcgtacgtgacactcaattatgagtttaccaaaccacttacgtggactacacaaatcaactattgactatttc

SEQ ID NO: 74191 - DNA, 381 bp, Glycine max
  unsure (1)..(381): unsure at all n locations
gctctgctttatagactcttcatgtctggtcaagacaaacattagaagagttatgactnttatgaaaacttatnaaccaatttgaaaaagtcaaaaactatctgaagaaaatctnttgattgtattcagaaacaatcactggtaatcgattaccaaaacagtataatcgattacacaaagcttttatgtgaaaggatgtgactcttcacattngaatttgaatttcaacgttcaaaggtactagtaatcgagtactgatcgaggccgtacccgaatcaaataaacatgaaaatgcagtaactaggaagtgatcctatgtcgtttcccgacgagcagtgacaagccaaatgttcataatatacttgcagtaacagtaacgat

SEQ ID NO: 74192 - DNA, 463 bp, Glycine max
  unsure (1)..(463): unsure at all n locations
ctgagcaccgcagctgcagctagcagaacaagtaataatggaattattgtcagaactaccttgaatntgaaggcaatcatttnccaatacacaatcaagagcttcggtatatctgttggatcaaaaactccttcctatgtaattaaaaatatgaaaccattaacatgatagctgatattatgtgtgtaaaaggaatattcacacatgatggtagatgtaatatgctctacctcatcaataattctctggttaatatcagccacaatctcatttatcagagcataacattcacgatctcagagtgtcaaaatggaagattcttgaggttgagctacactaacctatggcacagctggatgaactaagagctatacacaaaaataataaaaatgattccatcaaagttgttatttaggcatcatacaaggtcaacttactttggtatgtacttgcactttcatac

SEQ ID NO: 74193 - DNA, 450 bp, Glycine max
  unsure (1)..(450): unsure at all n locations
gctcgctgatctacattctccacctatgtgatgatgacaaccacctgtatgttagaagcatctacaacaagaaaatatccatntgtatatagttttactcccnctttgatntgcaatgtttgcttatatgagacagttgaagatttcatatataaaaagctgtctcataaagatttcatatatcttttatctatctctccccctttgtcaacatcaaaaacaaatcatgaatagataggagaaaaatgttaccacctggtgcaatgtatgagaatcaagtgataccaaaaggcattaaaaaatcattcaatattaatcaagcaaaaaacaagtacaataacacatcaatcaaatacacaattcaaaacaatcaacgaaacacaataaataacaattatcaaagacaaataatcaaatataaaatataatccatcaatcaaagtaacaaac

SEQ ID NO: 74194 - DNA, 454 bp, Glycine max
  unsure (1)..(454): unsure at all n locations
tctgagccacctgcggcatgcaagctcgaagacaagactatacgagggatcttccttgttataaatatatttctaagggctaccgaggctacatcttgcagactaatacactcgccctcagtcgagatgttgaagcttgtgaatacgcttcttggatngagatgaagaatagtgtagaagaacttcttatacctgctcaactacctcaagaagatgctgatgaagaagacccacgtgaaccaccttgacctgcaccactaccacaagatcaagaactatcatcaccagagtctactcctagacgagtaagatctttggtggacatatatgatacctgtaacttggccttactttgaactggaagctttgtagaagcgtcanagcatgatgtattattctaggcattggaagaatagatacatatgatccatgataacatcacatgggatgtagt

SEQ ID NO: 74195 - DNA, 423 bp, Glycine max
  unsure (1)..(423): unsure at all n locations
acatgcgaaattctgaggaactctatgcatncngcacttatctnttcactatatagcctttnttccagaccaaataaaaaggtgatcataacttcatacatccactactaactttctatatatcaatattctcaccttcaagcgaccaactattaagacacatccttttttctaacaaacccatgatcacacatttcttgaaaaatctattaaattcaaaaggttcatgagactgcattcattcaattctaacatgtgataacactgaatatagtgcccacgggtcagacatattcaatgagcataggttattacaacacaaaccttgttagcttctcccacaccaaattaaaccttactttgaattgaagaacactagcactgcgtatatcagtatactcttgtcctaactggcctgtgcaa

SEQ ID NO: 74196 - DNA, 480 bp, Glycine max
  unsure (1)..(480): unsure at all n locations
agcttcattntcttgacatgtgcatataatgtagtatttngactctttnttnttanggatgatatgaggggtatgatttaatatttttatcgacactgtctttgccaacttatccctgttttaatttaaccacaaaaacagtgggtcaaagtagatgtttcaaaacaaccctgcttgattttgtctccaaatatattcatgaatgatgctttatattatgaccatctttgttggtacatcaacatttcactagctgccaacttgccatatgtgctccatgtttatctgtgtgtagcaactttaggtgcaccgtatctntaatctntattctgtatattattataatggaacaccaatttntgcctacaagaaatgaaaaatgaattcccagccatctaccctttcctggggatttgagttggtgctaatcatataaaggaagtaactggatggcattgtggcatgtcagttgtgtaaaag

SEQ ID NO: 74197 - DNA, 421 bp, Glycine max
  unsure (1)..(421): unsure at all n locations
aattttgngttcttctccttggngtgctcacgatttgggctgtttagggaganaatggtggttgctttgtgttaggcattnggattgtgtttctaagtcaccaagtgaaaaaagaaagaaagaatgaggtagtgtgtgtcccttctctcattggcgagtgaaaacataactatgattaccaatttgaatttttacattgtgtaaccttgcacctttgaaatatttttgcaatagaaataaatctttgactagctttaggaattaaatctaaccaattaaattggtatcaaacataatacttanagtgtgaattaaataaatcctaatgatcaaatatattntatttctcttaaaaaagaataaatcaacaacaaaataatttgtggacaaacactcatagccaattactcacaaagaactc

SEQ ID NO: 74198 - DNA, 480 bp, Glycine max
  unsure (1)..(480): unsure at all n locations
ctctgaggcgtgatccctgcanatngataaatggtatctgagatcaactgtgccagatgaacactcacctgngtcaagatggcatagaccaactgacacttcagtaggggaaggtcagaattatgatcgctggggaggatgttgctgagaagtaatgtcatccagatctgcgtcagggtggtcattctagtgcgcatgatccgcacccgtcttcccatcacactccgtgcgaagtcttatcctggaacacacaacaactgacctatgacctcctcatcaaatcctgaggcctggctcctcctctgactgaacttgcaacgttgcccctcttccaagaccaacggatgccccanaaactaattaatggcatcttcatcaaaggggatccattcgccccgcacctangagcgcttgtccctcactcctttctttattggccatgtattagcataggactccatgactatntctggatcatac

SEQ ID NO: 74199 - DNA, 487 bp, Glycine max
  unsure (1)..(487): unsure at all n locations
ttctaacctcgaaattcaagaaagcactttgatttatgatgtttttgngataaatatggtcattgaccaatccctattctatgacttgacccaattatctagtgaaggtgtaccatttgaaggtacactgaatgatgattggaaatttgatttctctgtgcatgatgcctgccagttggtttgcaccaaccaagcggatgatcggaaggctgcttgccggttcattggcttttgaaagccgcatccttcactatcttattgtgcgcattttacttccaagatcttcaaaccttgcacaggtttctgaagaaaatcttattgtcatgtgggcttttcataccgaccgacaaattgattgggcacacttagtccgatatcgcatgcataaggcattgcgattaaatgctcctttgccctatcctcatccagtcactcttttttttcaacactttaacatccctcttgattatgaaccttatgttccaat

SEQ ID NO: 74200 - DNA, 471 bp, Glycine max
  unsure (1)..(471): unsure at all n locations
gcaagcttcaagctgctcaatngctccaggttgttgcatggaanggcaaaggtctgtatggtggtcatcaaaggagtacaaaccacaaacccttgcgacaggtacagatttcggattcatgctagctgggttaccaagttaaccaatgcatccagtttgccttcaagcttcttagtctcagatgatgcagttgagtttgtagctacctcatgcactcctctaatgactatagcatcatttctggcgctaaactgctgggaagtggaagccatcttctcaattaaattcctggcttcagtangagtcatgtctccaagggctccaccactggcagcatctatcatacttctctccatattactgagtccttcataanaatatnggagagaagctgctctgacatctgatggtgggggaactggcacatnagttcttaaatctctctagtactcatacaagctctctccactg

SEQ ID NO: 74201 - DNA, 456 bp, Glycine max
  unsure (1)..(456): unsure at all n locations
gagctaaatcctctattgtgttttccatgtatgtacttgatgtaaatacctgtatatctatntaatgatagtttatgtgttctctaagctatcagtacgtcatttcagtgtgctttttccttgatcacgtagatgcatgctttggtaggatcattcaatagtggaagctgatatgattcttataacttgataggacagggctagttatcgtattatctcgagggatcggggtacggtaacctacatgtttgtatgcttggcttaatgcggntctggtcgagtatagtcttgtcataccctaatttcgtccggggattataatttgatgatatacaaccatcgattggccgcttcgagatatttggcaccctctgttgcacactatgtgaagtcccgagacgtgccgaaaatcaatatgaagcaggcttacgcgatctgtgaaattctgtgatgtga

SEQ ID NO: 74202 - DNA, 470 bp, Glycine max
  unsure (1)..(470): unsure at all n locations
agcttcttcctgaccaaggagaattattttctgacctcaagtagatattggaagttggcagaaagctaaactaatccaattgtaacaagaccaaccatcttgtgttgtaagtgtggtcattagaatgcaaatgtcaaaattatgatatttcttagaggatcactagtaaaaggattgattagtgttntagaagagacgacataaggagaatattacctatatttaataggagatccacctatggatattgtgttctaattggagtcaatctctttaatggaaaacctcaaaaagcaaaatgtggttgcaaggtccagagctgaagcaaaatatcaagctatgactctcactacttatgaactaatatgtctaanaacaaaataaatgactcattaaagagaataaatcttgtgagggtggaactgagacatatttgtgataatcaagcacccttcatattacatctaacc

SEQ ID NO: 74203 - DNA, 472 bp, Glycine max
  unsure (1)..(472): unsure at all n locations
ntntgcanagaaagaagaagaagaataatatgttatcaaaggtttcttanaagttgttctaaagaattgttaaaaagttaagtcaaaaagttatcgaaatgcaagtcaaggtcttgcttttatagactcttcatgtctagtcaatggaaaccattggaagagttataacctttacaaaacctgaaaaccattagaagagttaaatcttttgatttttgttcaaagcttgtcactggtaatcgattatcaaatccttgtaatcgattacacaaagcttttatgaaaggatgtgactcttcacacttgattttgaatttcaacgttcagatacactggtaatcgattaccaatatcttgtaatcgattacacccntttgaaatcaattggaacgttgcannatcagttaaaagcttntgaaatcaaactntgtcactggtaaccgattaccagagagtnaaaactctggtaact

SEQ ID NO: 74204 - DNA, 442 bp, Glycine max
  unsure (1)..(442): unsure at all n locations
tgcaagctggatttggatatacagctgatgataacttgccaccttnccagccgcacctaagcttatattctaatatgaataaacgtacaatgcatctggcagtaaactaaattaccaagcttggctatatattataatagcgggataagagaatacactatgttcgctgaagccactacttgcatatgatatagttcttatatttaaaattcggttgctgctaacaagcaagggttttgtgaacaagcatgcgcatntaatcccggtggcttatctaaaaagatttatatattttctggattcaataaaatgatttgtataataaattcttaactaactcatctggttatatcataatttaagataaacagaagataacgtttaatttatcatatttgcaaatcataattaatccgttgttggggacaggatgacaaaaaac

SEQ ID NO: 74205 - DNA, 307 bp, Glycine max
  unsure (1)..(307): unsure at all n locations
gaaagacatacctagtntcaaaggaccctatcacacacatagtacctgagaactctccttgaggaaatctgtcttttcctataataatttgtaatgccttttataatctcatactcttcattaagatcactatatccgcttcaagtgtacgaccgcctaatgttatgagagactaaatccttagttagggtctgacaggcctagaaagtcaaaagatgtattgtatgcttcatatctatcaatgcaaacaaatgtttattttcctattatactttcttattctaaattcatggatcactcatcattg

SEQ ID NO: 74206 - DNA, 460 bp, Glycine max
  unsure (1)..(460): unsure at all n locations
atcctttgagtcacctgcggcatgcaagctntatctttcttctcaattctatccttccaaatttatttgaaatntattnttatctttttattcaattntaaaactcattgacctattttaacattgctaatttatcacaagaaactagacacaagatgacttatttgttttctttattattatgaaacttgctattatactttttttatcactatgtttaatgtcaaactatttattttattggagtattacattctttatttaaaatattttgtctctaaaaaaattgataaaaaatcaaaattataaagaaaaaaatattntttgtttaaaaataatatattaataaaaaatttaaaaattaagaatcggctttaaacaatataactcaatgtaattctacttttaaaaaatattagtttattaaaaatgatgtaatggatataagtaaatcaccaca

SEQ ID NO: 74207 - DNA, 469 bp, Glycine max
  unsure (1)..(469): unsure at all n locations
taagcttagaactaaaaagtacttatattagtatcatgctgggattatgaagagatcgaagaatnggtgtggtacaaacgataattattagtatttttattttaagcttaaataattgtttggtacctacaaaataagattatggttttggtatttaagccttttttaactgtaatatctgaatttttttattttaaagaaactacctattgtgataatgatttgactaccaaatcaataatttttaaatggtttggacttaatgtaacactcctccataagtcaccttattagttaaagaagattntctaacaacatatacctatntaaaaaataaaaaatgatcaggtatctaaataaaagagaataaaacttaagtgccaaaatcaaaacattctacttgataggtactaaaaatttatttcagaaaaaaaatgttttattaatttatagtaaaattattaaacat

SEQ ID NO: 74208 - DNA, 433 bp, Glycine max
  unsure (1)..(433): unsure at all n locations
agcttcttcccttatttgctataaatagtggggagatgtgaanaaganaagggntcagccccttagccacttctctctctttcgaatttgcttaagaaaattgtttccgtgaagaatatccaagccgaggcgcttccgtaacgtttacgtaacgtttccgtgagtaattacgcgaagattctcgaccgttcttcaagattcatcgttcgttcttcgttttcttcagtcttcaacgggtaagtacctcaaaccaagcttttcaattcattatatgtacccgtggtggtccacattgtgcttcatgtatattcattctcgtgttcatgtactttttataccccctgttgacgtgcttaatccatgtatataagtcatttctcgcttatcctaaaataaaattaatctctcccatcgttgaatcgttcatgcgttc

SEQ ID NO: 74209 - DNA, 449 bp, Glycine max
  unsure (1)..(449): unsure at all n locations
tanagtataatactaacatanntttttttatataaataataatcatatgtaaaataactaaatattaccttttcatgtgtgtaataactaacagtttacaaattaaaagtttctatattacttaaataaaataactaattaaggaataaataatttaaaagacaatttanaaatattaataaaataactaaaaatataaattacttttaatatttttagttattaaaagaatataaatgaattcctaaaaaaacataaccattatcctataactaagatcaacaatattggatttcagattagaaccaagagaaactntggattgaggttggaaccttttacatcggttaagagaaacctgtgcaaggccattaaaaataagccacagacaataacatattgaanagctcattatnnttttttataaaaaattaccataaaaaagtcac

SEQ ID NO: 74210 - DNA, 343 bp, Glycine max
  unsure (1)..(343): unsure at all n locations
agcttgagatgaggaagngnagtttgttgatacttcctgctnttattcgntgaccacagagtggtacctggagatatgtcgcggcggtcacgagaccttggggatgtcatgtggggtgctattgcccaaaaccaagcttgaccaatcccgacccaacccgggcatagtcagtcaatgagaacctgtgatgtacctaaacaggcgagctcctggcagtcaacagataaaaggaataaagaccacanagcaaggaggcttgtgtggtggctggccagctgtgaatcttgtgtgatatatgggttatggcctctggtaatcgattaccaagggtgggtaatcgata

SEQ ID NO: 74211 - DNA, 329 bp, Glycine max
acctatgaatctcagctttagccaatgaactacctttgtttatcctatatagcccttttagcctatatttctctttctttgattcgcagctcattacaagccctaagtgaaaaaccatgatatcaccttacccttaaggagatttggagctttggaattgtcttgggaataagctgggaataagtgtggggggggggggggcttatctttgatacacgttcaaagatcgtcactagtaattgatgttcttatactcgtcactatcattctcatccatctattaaagagtagactcttctacttgattatatattcatcgccaatacctc

SEQ ID NO: 74212 - DNA, 454 bp, Glycine max
  unsure (1)..(454): unsure at all n locations
agcttcaagaataatgacctcaacaaacttcttattttcagaaggaaattcaatcaatagacctccaatctttaatggagagggttaccactattggaaaattcgaatgcaaattntcattgaggcaatagatttaaacatttgggaagccatagaaataggaccttatatacccaccatagtagaaagaaccacaatagatggaagcacaacaagtggaagcacaacaatagaaaaacctanagatagatggtctgaagaagatagaagacgagtacaatataatttataagccaaaaaaataattacatctgccctgggaatggatgaatattttaaggtttcatattgtaagagtgctaaggaaatgtgggacactctacaagtaacacatgaaggcacaacagatgttaaaagatctatgataaacacagtaactcatgaatatgaacta

SEQ ID NO: 74213 - DNA, 483 bp, Glycine max
  unsure (1)..(483): unsure at all n locations
ccaagaaanagatggcctcagcatattccttatttccagaagggtattctatcaatagacctccaatctttaatggagagggttaccactactggaaaacccgaatgcaaatttttatcgaggcaatagatctaaatatctgggaagccatagaaatagggccttatatacccaccacagtagaaagagtttcaataaatggtagttcatcaagtgaaagcataaccatagaaaaacctaaagatagatggtctgaagaggatagaaaacgagtacaatacaacctataagccaaaaacataataacatttgccctatgaatggatgaatatttcagagnttcaaattgtaagagtgctaaggaaatgtgggacactcttcgataacacatgaaggaactacagatgttaaagatctangataaatgcactaactcatgagtatgaattatntataatgaatgcaaatgaaaatattcagagt

SEQ ID NO: 74214 - DNA, 483 bp, Glycine max
  unsure (1)..(483): unsure at all n locations
tgcagcttaacattcaatttcgagcgtctcgatatatttctatgcctaatcagacatncgagtaaaaagtatggtcctttgtattggatcagagcttcaacatttcaattcgagcgtctcgatatgttacaggactcaatcagacatcagagaaaaaagttatcgtcgttcgagttggctcagagattcaacattcaatttcgagcgtctcgatatgttacgggactcaatcagacatccgagaaaaaagttatggtcggttgaattggctcagagcttcaacattcaatttcgagcgtctcgatatggtacgggactcaatcagacatccgagtaaaaagttattgtcgtttgaatcggctcanagcttcagagttcaatttcagcgtctcgatatgttactggactcaatcagacatccgagttaaaagttatggtcgtttgaattggctaaagcttaacattcaatttcagcgtctcgat

SEQ ID NO: 74215 - DNA, 399 bp, Glycine max
  unsure (1)..(399): unsure at all n locations
agcttcttgccgtaaaagatatatcggcagtggttgtaaataatttcgcaatgtctgttgaanaatatccgncggngctatttaactaccgatgcggctattggttttctattccacccctgaattatatttggatgatgcctattangaaatgttcggtcggggtcatccggtcatgctntcttttgaggcctcgatctgtcgtctttcctagccggccgacgtcggctagcattnntttcgatccatatctgtgtgaatcatggtttttttttgccaaggagggctaatgttttcgtggccgacaaaatgagaacatgccagtgtcggccgaaacacaatcccgcacgaaaaaccctagccgacctacattgtattttnttcagggcataccgagcg

SEQ ID NO: 74216 - DNA, 433 bp, Glycine max
  unsure (1)..(433): unsure at all n locations
agctntataggtgaaatcaggtgcagccatttcccttatagtcctttcacgagggggaggttgtgccatgttctcagaatgtgcaaaatcagaattctcagaatcagaatggtcaaaattataatgctcaagatcaggatgttcaaaatcaccaataatagaatgcacagattcaccagttatggaatgctcagaatgatcaaaaggtataaaatgatgcctaactaatctatgaaatgtcctatctatctcaggatcaaagggttgtaagacagatggattgcctctagtcatacactacattcaacatgcacacaactagttgccttgtcatgtaaataaaggtgtaggcttgaactacagctaccctcaaatgatatgcagatgactcgatattntgtgagcaaccttactaaatgatgagaagatagca

SEQ ID NO: 74217 - DNA, 434 bp, Glycine max
  unsure (1)..(434): unsure at all n locations
tctctttcttattgattctttctccgagttttagattacgaacgtggtctgggtgtgtaatggaagtaaaagacccgccccagatggttacaaatttaatttcatcaagtctcgctgggaggtcattaaagtctgacatcaataaacgatattcatgaatttcatgccaatggtaagttgcctaaaggattaaaagcttctttccttgctcttattactaaaaaggtagatcttcttggcttggtggaatattgacccatttatcttattggaaatctatacaaaatcattgtcaacctcttggcaacaaggattcaaagagtgatgggtaaaaatgtgaatcctagaacaacaactttttttgggttggagaaacatatgggatggagcatgctaatgaggtggngataaaaagatgtcttactggatgaact

SEQ ID NO: 74218 - DNA, 393 bp, Glycine max
  unsure (1)..(393): unsure at all n locations
agcttccattggtatcttgaaacctaaggctaatgatttgcatctgttaatcaaatatgctgctggtgttgtagcttctccccaaaaggtctttcgcagtcctacacttattagcatgcacctcactctntccaaaatggtcatattcattctttctgccaaaccattctgttgtggtgtgtaagggactggtttgtgcctttcgatgcctattttcttacaagactcattgaactgctctgaaacaaactctgggccattgtcagtccttgaaacttttaatgttggaccatgttgatttccaataagagtatgccattctctgaattcttgaaaaacttctgacttaattgtcgaaacatacagccatattctacttgagaaatcatctat

SEQ ID NO: 74219 - DNA, 310 bp, Glycine max
  unsure (1)..(310): unsure at all n locations
cctgcttcttgcattttatttaggagatgngtgagtgctacatgaaggttatgttatggtttcttcaggaaccatgtctgttagcagtgataggagcagcagtatcattttcatcttagtttgagaacaatctagcatcaagaggtgcttttntttttttaaagagtaaataggcaatttactgtgtagcccttntgcatatttatccctagtttatggaaatgattaaaatagtatctatctttgcataagtattgcaaaatagtctttgtcgctatattctcaagtaacgccgttagtgaggtgcatt

SEQ ID NO: 74220 - DNA, 484 bp, Glycine max
  unsure (1)..(484): unsure at all n locations
tctctgagtcacctgcggcatgcacagcttatctttgcgatntcatggttgtgtcttttattntaaattgataacatttaaatttcatgtatgaaatgaaagaatataagggaataaaaggattgaaaaggatattactcatgggtcattttcgccaacgagaagaagcacatgatgtgtgttgtacttttattctttctttttcgaaccaaaagcatgacacagtgcactgcctccagctatgagacaacaatcatatcacaggctagcactaatctcataacagatacttttcataagtctataaaaggtaattcgatatcttatattcaataatggaacattctaagagaaaacgagcaaaagcatgtgaagcgaaatttgtcaagtcattgaatgatacattctgcacttaattagttcatccttcgcccaacaaagttattctttgtattcgagtntaattggttatccactctattga

SEQ ID NO: 74221 - DNA, 487 bp, Glycine max
  unsure (1)..(487): unsure at all n locations
gctcatcgagttgttagaagtgggacccatcagtggggtcatatccatgctcatanaataacttggttggactcatttaattagtacgtttaatttgaaagtttacgaggaatatgagttgttcattgatattgattaccgtgaaatattaatatgctagtgggggctttatatggtgtagtaatgagaataatgcaaaagaagtttatatataattcataaatcaagaagatatatattgggttctggaattaccttntcttntttaaggctgagcattttcaatcgtgcanacttgtgaaaaataaaaagggaaatagttgtttatttcttggaacattntatgggtatgttggntggcatttnntatttttatttntatttttngaaaataattttatttttaaaagattagaatctaaaatatgtttggttgatttcttgtttctggtttgtaaaataaaacacgaaaatttatatatattga

SEQ ID NO: 74222 - DNA, 478 bp, Glycine max
  unsure (1)..(478): unsure at all n locations
agctntgagcaaattcaaacaacaatatctttttactatatgtctgattgcgtcccgtaatatatcgagacgctcgaaatcgaatgttgaagctctgagccaattcacacgaacaataacttttactcggatgattgattgagtcccgtaatataacaagacgctcaaaattgaatgttgaagctatgagccaattcaaatgacaataactntntactcggatgtctgattgagtcccgaaatatatcgagacgctcgaaattgaatgttgaacctctgagccaattcaaacgacaataactttttactcggatgtctgattgagtcccgtaatatatcgagacgctcgaaattgaatgtngaagctntaggcaaattcaaacgacaataactttntactcggatgtctgattgagtcccgtaatatatcaagacgctcgaaatngaatggtgaacctatgagccaattcaaacgaca

SEQ ID NO: 74223 - DNA, 478 bp, Glycine max
  unsure (1)..(478): unsure at all n locations
actcagcttcacattaatttcagcgctagaatatttctgactcatcttcatccgagtaaaggtactgtcgttaaatntgcttagctctccagctctaaatttcgagcgtctcgatatatgacgggactatatcagacatccgagtaanaagttattgtcatttgaatttgcttagagattcaacattcatcttcgagtgtctcgttatattacgggactcaattatacattcgagtaaaaagttattgtcgtttgaattttctcagagcttcaacaatcaatttcgagcgtctcgatatattacgggactcaatcacgcatccgagtaaaaagttattgtcgtttgaattggctcagagcttcaacattcaatntcgagcgtctcgctatattacgggactatatcagacatccgagtaaaaaagtattggtcgttgaattgctcanagcttcaatatcaattacgagtgtctcgata

SEQ ID NO: 74224 - DNA, 348 bp, Glycine max
  unsure (1)..(348): unsure at all n locations
ctcatggacctctctaaggacaatagcatcatttcttgcactgaatcgttgggagttgaaagccatcttctcaatcgaattcctagcctcagcagaagtcatatcaccaagggctccaccactgacagcatcaatcatactcctctccatgttgctaagtccctcatagaaatattgaagagagagtcgcttagaaatctggtagtgatgacagctngcacacaatttcttgaatctttcacaatactcatacaagctctctccactaagttgtctgatgccttacatgtctnttctgatggcaatggtcctatatgaaaggaagaatttcttccagaacaccctctt

SEQ ID NO: 74225 - DNA, 316 bp, Glycine max
tctcctctttttcctataaatagggggaggtgggcagaacaaatttgttcaacttctcttggtatctgagaatcacttaaaattagtgagaaaatttgcttccgtgaagaatattcaagccgaggcgcttccgtaatgcttccgagacgtttccgtgggtgatctcgcaaagattgtaaaccgatcttcagtcttcaaccggtaagttcctgaaatcgaactgttcaattcattctatgaatcctcagtggtccccacttgttgcgcatgcttgtatcttcattctcatttactatacatacccgcttctgacatg

SEQ ID NO: 74226 - DNA, 465 bp, Glycine max
  unsure (1)..(465): unsure at all n locations
agcttctgcatgactagggttttctagatatagaaatgtccaagttccagagagtttgagagattntgctgtgtgaagacctgcacagaactgatcttgaaaaggaagctgtcctgagaactttagatgagtttgtgaggttctagaggtggaggagacatccccaacacttgtatttcttcaatccttcatctttctcttttctttggtgtaaaggaagcttcctagttgtggaaagctaaatcctctgttggttctttcttgtagatacttgatgtaaatacctgtatatctatttaatgatgttttgtgtgttcactgtgctatcanaacttcattctaccatgctntttccttgatcacgtggaaactggtcttgatcttataacttgatangacgaggctatgttatcgtattatcacgagggatcggcgaccgtaatctaagtgttgatgtttgtctaa

SEQ ID NO: 74227 - DNA, 440 bp, Glycine max
agctttgcatatgttgttaccagccgatttgaagaatatcactaaacctaagcggccatctatcaagaccctattttgtaagcatgtgttcattgttttatgccttgagcgtagtatacttgttgattagcttgagatctagtggttcacttcagttatgagtaatgctatggcaccaaataactccatcatagaactatacatccttcttcatggcattatggggtagtttctcacatctctgaaattctagaatattaaatctcttatctggggataatttaagaggtatgttaatgataataaactattactgatgcttgtgttaataacgtcttctcaagtaatagatcagcaattcctgcgaaacattaaaatatgataatagtgcttaagcacactattggattgatcgtgatcaggataagtatctaatatga

SEQ ID NO: 74228 - DNA, 462 bp, Glycine max
  unsure (1)..(462): unsure at all n locations
ctatcntaaaatggatagttatatatatttgttgcttaaagaggtatctaattatttcttcaaagaagaacagtggtggtaatttgtacgcactctggaattaacagcatttgggtagctaaccatatagcnatgaatacgaaatttcctaaacaattcattaagcaactttctttagaaatggtctcatacatatgattggatgtgtaaaaaatagcctaatagtatactctattaaattcgcttatatgtgggactaacatntagactttttttttcaaatgtccctgtcaaataaatagtaaaaatttgatgtttttattctaccttcctttcatctagtttcttcctctttattntcaattaccttgcacttatttgagaggagacgatttaaggagaaaaacaaanatttataatcttgtctgtgaataccacccaattttattcgagagtaatatg

SEQ ID NO: 74229 - DNA, 470 bp, Glycine max
  unsure (1)..(470): unsure at all n locations
agcntttgtaagatatnttcctcatccaaagttgtgcagcatcatctaaggaattcttttcaagatcctatgaactatgtacatcgttcttcttgaatntcttgattcttgacttggatcgtgctcatctttggcatcatcaaaacttcatatcatatatgcttctacagcccacaaatgattgttacattccccattttcaacccactgaatttggtgcacacattagctcatacacacaattgcttagtgtatcattagactattgtgtgacggctccccaacttttgaacctagatgagccctcccacctaaatgcccaaccaactactcaaattcatgttgctcaatatcatgctgaanacgggttgccaaataaagtatgtggagacttcaatgacaatgaatacangantctagcgatcaatgatgaatacaacatcaatgacaacgataatgacgtctatttt

SEQ ID NO: 74230 - DNA, 483 bp, Glycine max
  unsure (1)..(483): unsure at all n locations
cggcattggagtggttccatctaccgccctaattccttgatgctgttggtatctaagctnttaaccttgacttggtagaacctcttgccggtttgatttgttcccatgcttgctaaagtgagacaaaagctggtgcaaatcaaaactccgatatctcatggatggatgcatgaaggaatgcatataacacagatgcaatctaagaatgcggnggtccggggaattcgtccccttcttagacacaacgtctaggggtagcatagtgccccaacgtacgtttttaacaaggcgacacggaccctccgttggtttgtttacacaagggatcaagacagaacccatatgcgatgcctatgcaaaagacacaatgcgggaatgtacacagtaagacaatattcactgaacataagcaaaagggtatatgatacttatgcatggcagtgtgaaaaatggcacgcagcgtgtntgctcgtgcccctattt

SEQ ID NO: 74231 - DNA, 467 bp, Glycine max
  unsure (1)..(467): unsure at all n locations
agcttcctatatctgcatccgagcaagaatccagccatcgcgcttgtatctccggtgttggattcaactaattatcattcatggagcagatctatgctcacagcgttaagcgccaaaaataaggtcgaatttgtcgatggaagcgcaccagaacctttaaagaccgataggatgtatggagcatggcgtcgatgcaacaatatggttgtgtcatggattgttcattcggtagcttcttctatcaggcaaagcatattatggatggacaaagcagaagaaatatggcgtgattattatacatcctaaatgtaatatcatccccatagatctttggcactttcgaatgggtcatccatcttctgaaagattacaatgcatgcaatcttatttatcctttttgcgaaataataaaaattttacgtgtaatacatgtcattatgtcaaacacanaaggctaccctttactt

SEQ ID NO: 74232 - DNA, 454 bp, Glycine max
  unsure (1)..(454): unsure at all n locations
ctgatatcgaaataagaatgattgtgatagtgggtatataaagatctttggtaaggntatgttgggcgagagctgaattgttcctgaatgagtggcatgaacatattggccgttcggaagttttactgtgattgggttgattcgtctatgggagtgaaggttatgcaaggagctagtcacatgatctgtagcccctgaatctagtatccatgaggtggaaagcgcactggtagaaggtgacatacctacgtttattggagtattgacggtgcatgaagaaattgatgcaacctgtttgggttgattgngtgtcgtgttctcggcggatggctcctggattaaagcgagtagtgccttgtactgctcangggagaagcgaacgaactcatgggactcatgatgctgagcttgatcatcagtggctttgctttctactgtcactatcgtgttcatg

SEQ ID NO: 74233 - DNA, 159 bp, Glycine max
atacatatatatgcatttgaaaagaacacacattctcacgctcaggcattgcgtcaaaattacacttaactatgtcctaaatatttgctatcacaaactacctacacacactcgaaatatatataccatacaaactttcattggttcactcacacttac

SEQ ID NO: 74234 - DNA, 457 bp, Glycine max
  unsure (1)..(457): unsure at all n locations
ctctaactgtaggacactctacgccagtagcagntctaatttcttcttacctacatggtcctttagctataagcaacatcattctttagtacaataatttaccagtgtttggtggcacccaatatagtttgtcgatactgtcacaacatgcctctttgtgggcgagcgaggcaaggctcatgggtgcgcttttcaaaggtggaaagatgcgcggagtcgccaccaatgtttatttgtggaaaacgtcggaaaaatcgaaggaaaccggtcataaagaatattccaagttcgggagttgtatttacgcttgaggaaggtattagcacctctcacgtttgtctcaaaggacaacagccttattttttttagaattgtggaaattgtgttaccttaactttttattttntnnttatttttgaggtcgatcaaagcggggctttgctcctactaccctcca

SEQ ID NO: 74235 - DNA, 422 bp, Glycine max
  unsure (1)..(422): unsure at all n locations
agcttngtcaattggcaagcanaatagaaaaccttttccaaagacatcatggaaagcatcaagaaagttgcaattgattcacatagantgttgcagggctcaaaaaacaccctcattgaaagggtatatgtattacactatatttatngatgacttcaccagaatgtgttgganttttttctttcagttcaaatcagaggtggcttgaaatttttggaagttcaaagtcaaggtagagaatgaaaacggtctcaagattcanattttgaggtctgacaatggcaccgagtacacatctgcaaaatttaatcaattttgtgaggattatggcattgaacatcaacttaccagtttctataccccacaacanaatggggtagtgagaggataatagatatatcttgggagatgacagatgcatg

SEQ ID NO: 74236 - DNA, 493 bp, Glycine max
  unsure (1)..(493): unsure at all n locations
gctctatgagaatcctgtcggttcattgcacccctagaatttaagaatatgtgaanganagttatcctaataaaaatgagagcagactaaatagagcaattaggaataggaccatatcggactagttaaatttaatccctgaatgtcatcactgttggaaaggagaagattgtangaagtatttgagagaaatggaggaggagaaaatatttgaaagaaggctagttttatgacttaagaaatgcttttgttntggcttcttttggcttcgttgggtgctttacaaataacaacctctcccatgttcaagaaagattccacacacttcaaggtagagttctacatacttctcctaactacttagttctacacacttctttcaattaaatattacttctacttatttctacacttctctagaantttctttggagtagtagcacanacttaatgggcctaacactcgattaatgggctaaatcaagtttatatt

SEQ ID NO: 74237 - DNA, 472 bp, Glycine max
  unsure (1)..(472): unsure at all n locations
nnagcttcctcaacagtgtaggcagtgcaacctgcccattcttcaagcatgcacattgagggatgcaacatttatggtggggcccatgattcaagcatggcatggtccaagatgatatatccaaagaagtcaactatatgaccaatccacaccatcaagggtttccatcaaggaagacctccaagatacaatcaggggggaaatttctcttaaggccaaggttggagatcccacctcgggaataacttcaacagaaatcaaagagtttcatctaatcggcctcccaatcaaaggcctaatttatatgagaaaaccactaagctagaagacactctgaatcagtttatataggtttctctatcaaatcataagagcactgagtttgccatcaggaatctagaggtacaagtgagccaattagctaagcaattggctgatatgccatagacagttgtggggcaacactgagaaa

SEQ ID NO: 74238 - DNA, 496 bp, Glycine max
  unsure (1)..(496): unsure at all n locations
tgtcatactattcatcataacanaanactacacatttcanataagagaatacattattcatcagtgtcattcatgtatcaagaaatagttcagatggngcaagacgaannatgtatccaaccacttgtngcattttataattataataataaccctaatcagtgtgaagacgaaaactagtatagtaacgtagattccttttgtcatttgaatccaacaggttatgcatatctaataatggaggaaattaaataatccaaaccacaaatgcatatgtaataaatccaacaagctatgctcgaagtgcaccgatccagatacganaaacgcgaaaccaaaaccaccaagaacataaacttccttagtactgtgacttaagtaaacccttttggccttcannatcctttggcatattcaacgatgacattgttagggcaactcaacacatttaataatcacatttaaaagtcttacttaagtaaacccttaatactat

SEQ ID NO: 74239 - DNA, 494 bp, Glycine max
  unsure (1)..(494): unsure at all n locations
atcctctgagtcacctccggcatgcaagctntgcagcagatgccactctactccaaattcttgattgatatgttaacaaggaaacataagtatattcaccaagaaaacatcatagtggaaggaaattgcagtgtagtgattcaaaagatccttccacccaagcataaagaccctgggagtgtaactattccttgtttaattggagaagtcactataggaaaagcacttattgacctgtgagccaacattaatctaatgccactctccatgtgcagaagattgggagagttggagataatgcccactagaatgactntacaactagctgaccgctccattacgaggccaaatggagtaattgaagatgtgttggtcagagtggaaacatttatcttcccagtagaatttgtggtaatggatatctgcgaaaatactgacattcctgtaatattgggaaggccattcatgttgatcgcaagctgcacaattgatat

SEQ ID NO: 74240 - DNA, 441 bp, Glycine max
agcttctcctagatccctttgtggacaggcttaattagacagctttcctaggtttagactaacttaaactaagcttcatcctcagatcccgcttgttggactagactcaacttaaatagcttacaaaagtttagataaatttagcctaagctttttcctcaaatccctcttgttggactagacttagaccaaacaacatatttaaaaccaaaacttaatccgcagatccctcttgtgagactaagtttcaattctgcttcattcaagttctaaggcaaaaatcatttcccaatgctaaagtcatctaactaggcacacaaatggttgattagaccaaaagcatacagaatttaagcactgaaagaatcattgaacacaagaaacacaatcaattagatattagaataattaaatcaattggtatttagaaatcttcatcaa

SEQ ID NO: 74241 - DNA, 478 bp, Glycine max
  unsure (1)..(478): unsure at all n locations
atccttgagtcacctgcggcatgcaagctntcataagtgaagtcaggtgcaaccatttccctatgagtcgtctcatgatgtggagattgagccatgttcttagtatgaaaattattagccgaatgctcaaaatcagaatgttcagaatcatcaacaacagaatgctcagaatgcacaaaatacacggaatgctcagaatgctcaaaatgcatagaatgatcaggatgcacactatgcctaactaatctatgaaaggttctatctatttcaggatcaaagggttgtaaatcacctggattgcccctagtcatgcactatatgcagcaaatcatgtatttctatgaaagggaaaactaggggtaaaactacaactatactcaaatgatatccaaatgagctgaaaatttgtgagcaacaccctacaatcatgaaaagatagcacannaatttccagacaaaaattcaaagtctaactatg

SEQ ID NO: 74242 - DNA, 440 bp, Glycine max
  unsure (1)..(440): unsure at all n locations
actcaagctcgtaaactacgaatgtgatatagannaaatatccagaagcttcttcttcctcctcttaagntcttctcttcctctctaagctcaccctcgagctcgcattnttctctctgcgagtttcttaatctcccttagattcacatattcgtcaggaggttccctagccctcgaaagctaggtatcattggtgctttcattgacgcactctgtcgcaagtatggctgaaggaactagatcgaaagctctgtcatcggaaaaattggaggaattgnttgcgaagttngcagcgacattcgaggcgaagatggagaccctagcggaacgaatagcgcatctcgaagcanattgatataatccacaacanacacaacctgaggcgacttcgttctcagcatcangaatacacacaacactgcatcggatgaagctcgatg

SEQ ID NO: 74243 - DNA, 397 bp, Glycine max
agcttgagatgaggaagtgtagaagggtgttactttctgcttttattcgttgaccacagagtggtacctagagatatgtcgcggcggtcaagagaccttggggacgtcaggtggggtgctattgcccaaaaccaagctggaccaatcccgacccaacccgggcatagtcaatcagtgagaacctgtgatgtacctaaacaggcgagctcctggtagtcaacagataaaaggaacaaagaccacatagcacggaggcttgtggtggctggccagctgtgaattttgtgtgatatatgggttgtggcctctggtaatcgattaccaagggtgggtaatcgattacaaggcttataaatgaaagcagaaggctaagatggtctatgggtaatctatacca

SEQ ID NO: 74244 - DNA, 438 bp, Glycine max
  unsure (1)..(438): unsure at all n locations
tggacttaccttgaattaatttctttgatagcctcttttgagcctatttcccctttctttgttttgaagctcattacaagccttaagtgaagaaccatgatatcaccttacccttaaggaattttggagctttggaattgttttgggaataagctgggaataagtgtgggggggtatgtttcattagaagatatgatttttggccatgcttaatggtttaatttggccatgcttgatgtatatagatattgcctagttctttctttaatcttcaatttcgtattggtcaataaaaaaaaatcaaaaaaatgaanaataaaaaaaattcagttgctgcanattctgcaatttcgtactatttcaaanaagaagaagaagaagaagaanagaagtgaagtcgaataaataaggtcttgatatgagaacttgatttgggag

SEQ ID NO: 74245 - DNA, 304 bp, Glycine max
  unsure (1)..(304): unsure at all n locations
agctnggacgatctgaagaagacattcttcgacgaatgcgacgaagcgatgcagcagatcgagatcggcctgaccgatatccgatcgggccaaggcaatgacgaaactgtcaatgccgtgttccgcggcgtccattctgtgaagggcggcgccggcatcttcggcttcgaacagctcgtcgaattcgcccatgtcttcgagacggtgctggacggcctgcgcaacggcagccttacggcgacgtccgacaatctcgacgtgttgctgtcgtcgagtgacgtgctttccgatctggtacagatgt

SEQ ID NO: 74246 - DNA, 374 bp, Glycine max
  unsure (1)..(374): unsure at all n locations
tacctccattcanagtgcgcgacctcactgtgctttangctggtgctctcaaatatgatctccgtagccagcggctcacggtaacgctggtctttggtgataaccagttggctttctgcttggggttatcgcttgatactatctcgatacttcctccaaagtctgcgaacgacgacaagctgaatctcgctggcccaacgggcgttcagaatatttcggacctcggcccacgactccacttcgggcattccgtccagaagcacggtaaggtgctcaggctntctctgctttntgacgaattccctaaatgtcactgccgcggtccccgatccgtctatcgaaagatgaatggactgtccgccagccgtcaatgc

SEQ ID NO: 74247 - DNA, 420 bp, Glycine max
  unsure (1)..(420): unsure at all n locations
ctgcagcttgtagccaagcataccttcctttatatgtgagtgatcctaaagtttaaggtgttagttggctatatacaattcatccaatgagtataaagagaccaatgcactcttaagggatgactgaaagcatgatatagaagcatataatcagtttcctaccaaatgtgaatccatttaaagtggacagatttttcgatggctaaaacggctgccatagttttcgcaaaaattgtttaactgataccaacattgcaggagatagctccctcgaacagaagttccctctatttataaaaatcctaccgctaccagccataccggggcagccatgcactgccncattcgagttgtactaaatctagttggctctcggcggccttcaaatgacttgcttgatgggctggtgctgttgcggat

SEQ ID NO: 74248 - DNA, 386 bp, Glycine max
tgtcgagcgacacctgtgtggggagcaactcaacccttgtgcggtcgctggagaagttacaagaggtgtagaatgcaatctggctcgtcatggggatcatggaggtagaatatgtggcggacgtgtgggactctgacattgtgaagcacacgatgcacgatgtgggccccatagacgtcctgctgttgaattacaacatgttcatgttgcttcttcctaacataaatctaatggcaacattgaatctcctcacgctcgcgtgagggtttttgattatgggttgagattcttacttttagtgagtaatggtttacagaacgtgaaagaagggattggagattcggtttttcgcttataataatcataatcctttctatttaaaaatt

SEQ ID NO: 74249 - DNA, 446 bp, Glycine max
  unsure (1)..(446): unsure at all n locations
agctacagtcacgggccaaaacgcntttgaaccttatcttattttcctaaggttatagcttataataatttattagttagtttaatcaaattaaaaattagtttaatcaaaataaaattagttgatacgtgtatttattttagtaactctgagtttatttataagatattttaaccagcttttattttataaactattggctatttttatcttattagtttatatgattntgtaatatttctcctttattagatattgaattggttattctttattttaattaaaatatttgggaacaaaacaaaacctgataaaattcaaattataaagaagaataattattctttcttaaataatgatttttaaaaggtgttcaaaaatgtaaaatttaanatataagtttatctagttaaattatagatgtcgaaaaaaaataaagagaacat

SEQ ID NO: 74250 - DNA, 494 bp, Glycine max
  unsure (1)..(494): unsure at all n locations
cgatanatgtgaaactgtcaaacagggcatatataatgcacaatgttgttgtattgtgggagaatagtaagaaagcatctgcggaggcacatcttataaggattgaggtcatacgtggttaattaatgcatgcatcaatgtgactgatttttggatgtcagttgtatgaatgatcctaatgttatattcaaacatttgcatttgacaggaaaaattggacagaaacaaagccaagtgtgtagaaaacatgcaaaataaagttgcagaaattcatcgaacagcagaagagaaaagggcaatgatagaagcctacaagggagaagaattcctagaaatagaggagaaagcagcaaagtttcgtacccgtggctattcacccaagaaatatctaccatgcttcggcagttaaaggattttcagccaaatcacaaaaaaaattctcatatatgccttgctttatatatatatatacatatatatatatatatatatat

SEQ ID NO: 74251 - DNA, 343 bp, Glycine max
  unsure (1)..(343): unsure at all n locations
agcttanagataaattaagaataatgatagaatatcttatcttatattctgataatatattctatcaaatacaaactgattagttaggctaaaaatactgatataatatcttatcatatattctataactcgtaaattaccccacaaaaattatttacttcgaaatcttctagctgaaatttcttggacaaatttccaaattcaattgtaagcattattatcacagnttcngannnaacaaaaataacattacctctctactcttataatccatacgagaattatcatattaacgctatgcaacttcttctgaagtctttgttaccacttgaccaaccataaa

SEQ ID NO: 74252 - DNA, 331 bp, Glycine max
  unsure (1)..(331): unsure at all n locations
ctcagcttctattttatatacactagattatattacataaaataagtttctttggtgaacacatgcgaagaataatacagaaataacatatttaacattcaaattaaaggaaagattaccagactctgtattctaatgactaagacatgcaacaagatggggcaataagtggaggcattttcatgactaagacatccattataatatgagccaatggtacatcccatgacactaaaataagggggagatatactttagtatgatacaaaaatatcgntataattcccaattaaatagatcaagtgaaaactatggagtatagacgatggat

SEQ ID NO: 74253 - DNA, 351 bp, Glycine max
  unsure (1)..(351): unsure at all n locations
agcttctacttatgtggcagggtgggctttcttcatcttcttgtctccaacgcgaactttgaccattgttcttccttcccgcaatgcttcttttcatgtctgcctgagtgggcttatagcctaaaccatacttcccacgatttccttgagtatttatcaggctagttatgccgccgttgttttttcctaaacccatcccgggttcaaaaccgttccccaacataactcgggccatcattaccgctgcatcggacagacaaggttgcccaaagagggagtccacggaggaaatgctgaccacttcanaagactggaaagcagtctctaatgattcttctgcggcttccacat

SEQ ID NO: 74254 - DNA, 471 bp, Glycine max
  unsure (1)..(471): unsure at all n locations
cgcttgtggagcttctatggaatgctggatcttgagcttcaatgtagtccttcaatggtgattttccaccatggagatgcagtggaagacaaaggagaagaggtgagaggaggcgccatccactaaggaataagccatggaagaaggagctttgccaccaagagagtgccttggataagaggcttggagagggtgcttcaatggaggaaaagaaagagagagagagagaaagagagaggggggagcatgaaattgaaggaagaaaagaggaagagaagttgaactttgaagtttgtctcacaagactctcattcatcanagttacaacaagtgttacaaatgcttctatttatagactaggtagtttccttgagaagctntcttgagaaaacctccttgagaagcttctttgagaaaactttcttaagaagctagagcttagctacacacactcctctaataactaagctc

SEQ ID NO: 74255 - DNA, 328 bp, Glycine max
  unsure (1)..(328): unsure at all n locations
agctttcaacanacgtctacacatgatcatcatcactcattagagaactaacaaaactacccctcatatctaccaataccccatacccacgactatcaggatggaaagaagtcctcccaaacctgaattttcgaagtcgcactcgtagccacagcactttacgactacgaaaatgctctgctttcgcgagatggatcagaaatgagcaccagaggttgaagctatgttgggcaacaatggtggatgggagaaaataagaataacgctgtatgagagatagagagagaataggcttcagaatttctgctctggctgagtgaggagagag

SEQ ID NO: 74256 - DNA, 373 bp, Glycine max
actcagctaagtcatatggtgcattgctgcaacagtctgtggcttttatctagcaactggagcatgtgatgccttataatctatgcgcttttgttgatgatatcctctggcaactaatctagcctgatttataataatcatgccagtttcatctaatgtatttctaaacacccatgttgttccaatgattgagtagttcgcacgattctcaactaactcccacactttatctattcaaacaggcttaggtgttgcttgtcacatcgtgctcttgtgcgggcgagcgaagcaaggcttactggtgctgtattctaaggatgagagatgcgcggagtcgctaccgacgtttatgtgtggataacatctggaaaac

SEQ ID NO: 74257 - DNA, 416 bp, Glycine max
  unsure (1)..(416): unsure at all n locations
agctngaaatngcacaacggaagcactcgagaaattctaatcatcataactttacacacggatgtctgattcgcggacataactaatctagacgctcgaaattgaacaacggaactctcgagaattcgaatggtcataacttttcacacggatgtgcgaatttgggacataatatatcgagacgcttgaaattgcaccacggaagtactctagaaattcgaatggtcataacttttcacacagatgtcgaaatttgggagataatatatctagatgctcgaaattgaacagtgtaagctctcgagagatttgatggcataacttttacacggatgtcgaattgggacaaatatatcagacactcaaatgacaacggagctccaagaattcaacttctaactttccacggtgttgat

SEQ ID NO: 74258 - DNA, 329 bp, Glycine max
  unsure (1)..(329): unsure at all n locations
agcttgtgaaatgtctctcaatcaagttcctgtgatatgatagatagcagaatggcgtgataaaaatactgagattatngtgaaagtgtgcatagaagacgtgaatgctggaaataaacctcacaaccacttcactaagcttggttgggccaatattgcaaaanaagtcaataaggcaacaaatttgagatatgaatataagcaatttacacatatgtgggattctttgaaaaaagaatggcaattatggctaagcttattgggaaggacacacgtcttggctgggatggtgagaagaaaaccattgcagctagtgatgaatggtggga

SEQ ID NO: 74259 - DNA, 453 bp, Glycine max
  unsure (1)..(453): unsure at all n locations
tggagctatctccctagctgccagattcataatctcccttacatttaagagacaacaaggcctctgcataaagccttgggaccatcaagcccctatagcctcanagccattcagacattgtaatgtagaggatgattcaacaacatctttaccttttcttttatctctagattngttaacaactgtccaacaaccaccgtcttcaacatcaatgatattgtgaccttngtctctaattggagtcgtcaccagagtgctattcttttctgctttcggctggttatcaagatcaactntcttcggcttatgcttcccaatcttatgcttagcagctccatcacattgatgcccaattgtctggcacttctcacagaatattggcctccactcgtattcaataggttgctttctttttaaacccttattatctgtaatagtaatttcatcaagcat

SEQ ID NO: 74260 - DNA, 424 bp, Glycine max
tgaagcttatatatatcgatacgctcaaaattaaacatcggataacttttcacacggatgttcgattcgggcgcataagatgtcgagaggctcgaaattgaacaaccgaagctcatgagaatttcaaatggtcataacttttcacacgaatgtccgattcaggcttataatatatcgagatgctcgaaattgaataacggaagctcttgagaatttcaaatggtcataacttgtcacactcgggtccgattcaggcttataatatatcgagacgctcaaaattaaacatcggaagctctcgagaaattcaattggtcataatttttcacacggatctccgattctggcgcataatatgtcgagacgtgcgaaattgaacaacgaaagctctcgtgaaattcacatggtcataacttttcacact

SEQ ID NO: 74261 - DNA, 167 bp, Glycine max
  unsure (1)..(167): unsure at all n locations
cggacatccgtgtganaagtataaccatttgaanttctctatagctcccgntgttcaattnctaacttctcgatatgtgatgtgcctgaatcggacatccgtgtgaaaaagtataccagttgaatttctcaagagctttccgtggtcaattttgagcgtctcgatat

SEQ ID NO: 74262 - DNA, 478 bp, Glycine max
  unsure (1)..(478): unsure at all n locations
agtcacctgcggcatgcaagctngagccaaggccatgaactngatttcttttatggctgaattgaagttgggtctagaatcacttctagcctcaattggtactatatggacccaggtggaaactgagagttaggggaaactatgtgtagaaaataacttttagaaatcagttcagtattagaaacgcagatagtgaaatcagttgtactactttataaaatagttttgtattagacattgcagaatggtagttatgtgtagaaaataaccatcgatcattgtgtattacaagcatatatctgatagtatgttgtgtaatcagggagtgtggagttgtttgtaattcgaggacagagaatctctttgtaagagatttttgctctgggaccaaagtgtattgttgtatttatgtgtacgagactttntgttttattgttgccataatgaatgatcataattacgaatatgatctcaaaca

SEQ ID NO: 74263 - DNA, 448 bp, Glycine max
  unsure (1)..(448): unsure at all n locations
aaacttccttgagaagctagagcttagctacacacatctcctctcataactaagctcacctccttgagaagcttccttaagaagattcctaaagatgtttgagcttagctacacatacctctctaatagctaagctcacctncttgagatgagaagctaaagcttagctacacaccccctataatagctaagctcatcccctcgacaaaaacatgaaaatacaaaaaaaagtccttactacaaagactactcaaaatgccccgaaatacaaggctaaaaccctatactactagaatggccaanatacaaggcccagacgaaggaaatacctattcaaatatttacaaagataagcgggctcatacttagcccatgggctcgaaatctaccctaaggctcatgagaaccctatggccttcccttggatctctagcccaatctacttgga

SEQ ID NO: 74264 - DNA, 494 bp, Glycine max
  unsure (1)..(494): unsure at all n locations
cctgaggcatgcacgcttacatatattttatttttttatcaatatacaaattntaattttattgcttttataattntaattgttgtgtgtgttatcttattaaaaaatactttaagtgtattatcatagattaattgcatgttgatatagagagataaaaatttattaaatatgaatagaanaaagacataaaataaaataataacttcaacttatttataaaataatatagaataatataaaaaaattattacaagactgtaatcttttaaaatatttaagtcccttttagttgtgggtgtgtcgtcatacctccaaactatgctcagaactggccctgtataaaataatacgactaagaaatgtgtagtgtaagtgtgtaaccaaatgcatatatgataactattntttccaccaagtgaatgctatttaatggcctagcgcctcaggtacaatatatactcacttttaacagtgtcttgactcttgatctt

SEQ ID NO: 74265 - DNA, 387 bp, Glycine max
  unsure (1)..(387): unsure at all n locations
gctctctntcatagtaggaggagatgtgcctcttcctattggcactcttattatcattcaaatactctactggaggatccccatgaatccttcgttccctaacaagggaagtccaccaatagagggcatacccttgaaagctaagggtagccaatggaaaatttctctctntgctaatatgatgacaagcaaagagttgttcaaccttcatttcccaatctatgtanggctcaacattatctttttcatggaaatatgggaggctaatgttaacctcttgaggccgtctatcattntctcttctttgggaatggtggttagtatgtgaactatggtgtcctctataatagtcgctaagntcttcacttaaactcttgcaagagtcat

SEQ ID NO: 74266 - DNA, 442 bp, Glycine max
  unsure (1)..(442): unsure at all n locations
agcttccatcaagcgggntgcaccactcttaacatttatcataccacctatnttanggacttggttcctaataatacctattttgggcaccaacaaagcacaaggaattaagctcttgcgaaccaaaccctcatccaacaacttttttacttgaggaataaactcaagcccaagaggtgtggcaatgctagcaagtgcctttttacaaaagagaaaatgtggaggttgcctaagagggatagtctctttaatgtttgtatttattgtanaatgagtttccttcttagctaaactcttggaggagacactgacctccttacacttctctttaaccactaatgtgtggccttcttattggcggagaattctttactagattcttcccttatgcttttcactttactagggaaggtgaatagtacctcatctgctactataatgc

SEQ ID NO: 74267 - DNA, 396 bp, Glycine max
  unsure (1)..(396): unsure at all n locations
cgctgttgctgccccacgaagcccctcgaaactagtttcgacctctttcttcctttcggaccctctntgnttcccgttccaatgcttccgctgtggccacattgacgtctctcagttcgtcgcattatttttggacctttatagttgtcatcttgaacttttccttgactgtttgcgccctttcaagttctaccttcaaagcttgcacctcctcactctcctcaggggtttcagcctcttcctcactcgagggttttagcttcgggagacaatctagctcttgcatccgagcctttagccacttgtgatatctactgatgatcccatngctgcttcccttaagttctttatcctttcttagtgaccctttgaaatatccttgcattggggtcactg

SEQ ID NO: 74268 - DNA, 445 bp, Glycine max
  unsure (1)..(445): unsure at all n locations
agcttctgatcaatcacgtgcttatctttcttgttgtagttctcaccctgaccactataaattaaaacatcattatcctctgcatcattatcatatactcctgaagaaacaatgcttaaagccaccgtttcctcttgaagctcatccttgatagtcatgtagtcaattccgctcattgactgaccatgtaaacccacaagacacatttccatccgcaaaaagaaaatgtccccaatctcaaccccaggcactgctcctactctcctnctcatgtttgttcgaanagctttgcccgtcatcgcattgcttgctcttaaatccgcacgctngattaacattgttgtgttcaactccttggcatcnttcaattggcaaagccttctacgaagagaatcataagtcatgagcacaagaataaccacttcacgatcgccatcttcccttt

SEQ ID NO: 74269 - DNA, 476 bp, Glycine max
  unsure (1)..(476): unsure at all n locations
ctcttaatctcagctcttggtttattaggggatgaccttgtggatgattgngtggtgttttatgagaatggccgataatggctatgtattgacattgttgagctgacgaganaattggccatgtagggatgacagtcacaacatgggttccttcctgtttctcattctctccatttccctagtttttccattcatcaaagcaggataatcaaacttgcctcttctcagacccacttcaattcttttgtcgatgaaaactaaatcggcaaagtttgaaggcgtgtaacccaccatctttccatagtagaacactggtaatgtgtctactatcattgttataatctcccatgttctgtagttgcatcctatccagagccatatcaaaattatactgatactgcctatcgaaggcaaccattangtccttccaagaatggactcgagaaggtccaagttntataccaagtatatctgcc

SEQ ID NO: 74270 - DNA, 431 bp, Glycine max
  unsure (1)..(431): unsure at all n locations
agcnttgcagatttggtcttcgccagtgaaaggatctatgtgggtccgaaaagaagcaaatttgatcatcctactangacgactgagaaaactggggcaaataaagagggtgaggatgagggagaaacccatgctgtgaatgccattcctgtacggccaaattttccaccaacccaacaatatctttactcagccaataacaaactttcttcttacccaccacccagttattcacaaaggccatccctaaatataccacaaagtttgtctaccgcacttccaatgacgaacaccacctttagcacaaaccaaaaacaccaaccaagaagtgaattttgcagcgagaaagcctgtagaattcaccccaattccagtgtcctatgctgactngctcccatatctacttgataattaatggtagccataaccct

SEQ ID NO: 74271 - DNA, 240 bp, Glycine max
  unsure (1)..(240): unsure at all n locations
ctgggtaaagagaatgcactattgatgaccagttaggtaccaccctggatgatatcaactttggtggggcagaaaataattcttaccatcaatatcccaacaatttcaatcaaagacaaagcttcaagaaagtcaacggatgtataggccttcaaccatgccaaatcaaaggcctagacaagagaaaagaaaacctactcttcaagagaccatgcttncatatatgggccaaaatgatca

SEQ ID NO: 74272 - DNA, 425 bp, Glycine max
  unsure (1)..(425): unsure at all n locations
agctngactaggcgagttgantttagccttagtttcactttagttattagtcaattcaattaagaatgagaaatcccaaagagaaaacgtccgattgattnttcgctttattttactaaaaggtattttttattattatattattattttacctcttttttgatttccaacgtagttacggcacgaccgaacggtcggaattcattttaaccgaaattaacggatgatacaattcanatgatcggtggaaatttattnntattttagattaggcgagaaatgacttaaataaatgactgaagcacgtcaaaaggggatatagaaagcgaatganaatgagaataaaaatacatgaaataaaatgtggaccaccacgggtacatagaatgaattgaaaagctctgtttgaggtacttaccccgtga

SEQ ID NO: 74273 - DNA, 388 bp, Glycine max
  unsure (1)..(388): unsure at all n locations
tatccttatggctagcctctggacttcacttttcgngccaccccttaagatttaatccaagcccctactttcgaggggcagctccaaccttatgacgactattccgggcaagacgatgaggaaggagatacccatctcggtcctttgctccacctcaaagaatcggcccnccatgaactaccccaaccgaacatagtccggcatatcccagcttcacctacaccccgaaaagaatctgttcccgtcacggaagattagggaaagaatgaggcgcttgaagagaggtaagaagcagcgagggccttgacaattacccattctcggattggcggatttatgtctcgtgcccaacatcgtcatccctcccaagttcaaagtaccggacttt

SEQ ID NO: 74274 - DNA, 409 bp, Glycine max
  unsure (1)..(409): unsure at all n locations
agctntatccactaagttacctggtgcctgaaatgtctnttctgatggtagnggtcctagatgtagggaagaatttctccaagaacaccctcttaaggtcatcccagatggtaatggacctgtgagcaaggtagtacaaccaatctttcgccactccctccagagaatgtggaaaagcttttagaaagatatgatcttcctggacatcagggggtttcatggtggaacagacaatatggaactccttaagatgcttatgaggatcttcacctgcaagaccatgaaacttgngcagcaaatgtattagtccaatcttgagaacatatggaacatcctcatcaggatattgaatgcacaagctttcataagtgaaatcaggtgcaaccatctccctaagagtcctctcatg

SEQ ID NO: 74275 - DNA, 447 bp, Glycine max
cgccgcccagctcgcccaggcgagcaaggttgtttcctccagaagtctcagccttctggaggaatcttctggagggcccaagtgggcttgattgctatttgcacccacctttttactaaatgcaccctcctttctattgttgtgtaattctttttccgtaacgttacgaaactttacgaatttcgtaacgatacttattttccttccacaaggttacgaatccttacggattatgtatttactttttttagctttcgaagaagttacggaaactcacggattgcgcataaacacctcttttcgatttccgccacattacggaatttcacgaaccacgcaagcctgcttcctttcgattactgagatgtctcgggacttcattcattgcatgtcatcaagtaataatctccggacgaaattagggtatgacaacaataattaaacatg

SEQ ID NO: 74276 - DNA, 443 bp, Glycine max
  unsure (1)..(443): unsure at all n locations
agcttcctccacgttntcctccatacctagaacttctnaccttcgattctcactcaattcttcaccaaatcacgtcccgtaaagcccaatcttcctctntttcactcctctttcacttccaccgatcaaaatacaaaaaaacttcatcaaatggcagagtcatcaaagaagagaaagggatcatcctccaccgctaccgctgctgcccatcgccgtcacggcccatccggagcacccacaacacctattcctccttctttgtcatctgcaagatcatcaacactgttntcatccgatgatcaacgtctacggtacctttctcagttttcttctagaaataatctagaccctaagtacctagacgtagagttctttaatgatgaaacgtttgattggtatcaagtggttcaaaaatcttgtcctggtgacttcatgtcattaaa

SEQ ID NO: 74277 - DNA, 439 bp, Glycine max
  unsure (1)..(439): unsure at all n locations
ccttttataaaaagagaagttctgaaactcatcacgttgtctaanaaggccttgaggtggatctaagtgctctgataattcattagcatattcatgatttggtggcatgctcaccactgtttgtttctttaggaaactcaccataactaanaaagcanaaaggcacccctataacacccgatccaaaatcaagatggataacaaagagggagtgcatgaacagatgaaggccgacatgtcggctttaaaagatcagatggcttctattatggaagccatgctaaaaattcaaaaatcaatagaagacaatgctacgtcagccgcttccaatacagctagggaaacggaatcgatgctacaacccacaatgaacttantgccggacagaagcgcgacaggtttaaatcggaggtatagtcctcaagcctacccttatggg

SEQ ID NO: 74278 - DNA, 408 bp, Glycine max
  unsure (1)..(408): unsure at all n locations
agctntcaacaaatgtcttcactaataatcatcacacagcagaaaactaacaaaactacccctcatatctcccaaaaccccatacccacgaaaatcaagagggaaagaagtccacccaaacctgaattttcgaagtcccactcgtagccacgcacttcacgactccgaaaatgctctcctttcgcgatttggagcagaaatgagcaccaaaggttgaagctntgttgggcaacaatggtggatgggagaaaagaagaagaaggctgcgtgagagagagagagagaaaaggcttctgaatttctgctntggctgagtgaggagagagaacagcattttggttttaataaaaggggtttccctttttccattactttattcaagctctggcacatgttcctaattgattg

SEQ ID NO: 74279 - DNA, 480 bp, Glycine max
  unsure (1)..(480): unsure at all n locations
canagttcattatggatgcatatgctaataacattctgatggcttctaatctagcaattggagcatatgttttcttataatctatccccttntcttgattatatccttnggcaactaatctagccttatttataataattatgccattttcatctaatttatttctaaacacccattttgttccaatgattgggtagttttcaggtttctcaactaactcccaaacattatttctttcaaattggtttagttcttccttgtcacaacgtgcccttttgcgggcgagcgaggcaaggctcacgggtgcgctttccaaaggaggaaagatgcgcggagtcgctaccgacgtttatttgtggaanacatcgggaaaaccgaaggaaaccggtcaaaataaaaattctaagttcgggagtggatnntacgttgatgaaagtatagcacctctcacgtttatctcataggacaacaancctattt

SEQ ID NO: 74280 - DNA, 432 bp, Glycine max
  unsure (1)..(432): unsure at all n locations
agcttgtgcattcaatatccgaatgaggatgttccatatgttctcaagactggactaatacatttgttgcccaagtttcatggtcttgtaggtgaagatcctcataagcatcttaaggagttccatattgtctgttccaccatgaagatcatatctttctaaaggcttttcctcattctctggaggtagtggcgaaagaatggatgtactaccttgctcctaggtccattaccagctgggatgaccttaagagggtgttcttggagaaattcttccctgcatctaggaccactgccatcagaaaagacatttcangcatcangcaacttagtggagagagcttgtatgagtactangaaagattcaagaatatgtgtgcangttgtcctcaccaccagatttctgaattacttcttctgtaatattnctatg

SEQ ID NO: 74281 - DNA, 187 bp, Glycine max
  unsure (1)..(187): unsure at all n locations
cttcttctcacatgaaattcgtgggtgttgggtttttggagttatgatgggtagtttactaggtatttgcttagagtaatatttgtgaaggagttttgtngaaatcatgctaaacttgacatgtttgatgtgagccaaattacccattcttgattangcgtttatgatgatgccttgtgatatatga

SEQ ID NO: 74282 - DNA, 322 bp, Glycine max
  unsure (1)..(322): unsure at all n locations
agcttgagatgaggaagtgttgaagggtgagactttctgctnttattcgttgaccacaaagtggtacctggagatatgtcgcnggggtcaggagacctttgggacgtcaggtggtgtgctattgcccaaaaccaagcttgaccaatcccgaacccaacccggcatagtcagtcagtgagaacctgtgatgtacctaaataggcgagctcctggcagtcaacagataaaaggaacaaagaccacaaagcaaggaggcttgtggtggctggccagctgtgaactntgattgacatgtgggttatggcctctggtaattcgatac

SEQ ID NO: 74283 - DNA, 434 bp, Glycine max
  unsure (1)..(434): unsure at all n locations
agcttaatntattatgtcaaggactaatataaacttgtcaaaatcacggactaaaaaaaatattttaaattttaaggattaaaaaaaatacatcctacaaattcaaggattaaaacagtaattaagtctattttataaaactggaagtgaatggtcaaggtggataacatatgacttatatcaaactgttgcaataaaaaatattaacaagtgattatctctttctaggttagatcggntaacattgtttcttatttattttatattttatatttataattgatattgaatacattaactattttatccattgatggtgaaatattataattacttgattataaaacatggttaagtttttttttttcagataaaaaaattagtngattaatataaaaaataatacataatatttaattgcgttttttttttta

SEQ ID NO: 74284 - DNA, 423 bp, Glycine max
  unsure (1)..(423): unsure at all n locations
acatcagaatttagtaatgatccactaatctagaattaanatatcttaatgccaccaacctacggaattaaaagaacataatggctgagtgtaactgaaattgtggcaaccaaaagtcacccccaacagccatcaagtcagccaccatttggtctcccaaaaggccgatgcctaagttgccaattgggcccttattacaacttgaactaaaccaaactaaagcccttntagttgattaacctaaaacatatttttggtgggccaaaattacaaggattgggccattatttggacaaactaaacactctaaaattgagacaaagtggtgccatntaagtcctcctcaattgggccatgatacaactcacaaccttggactnttctccttgaaacttgngctcgtattcaaataatatggacaac

SEQ ID NO: 74285 - DNA, 413 bp, Glycine max
  unsure (1)..(413): unsure at all n locations
agcttagagttgagggagagaagaatggtgagatttttattacgtaagagaaagagagactntnttgacctttctttcctatctcagagagtctctaataaggataacttgcaaaggtactgttgtttcccctttttttagtgctttgcatctttgataggacaactcactagagggcatagtagtaagcaagtggcaccagactgtagacaaaggatcaagctgaatgttttgatgatgccaaaggatcacatgtttctcaaagctttattcaagacaaagaaattaaagatattcaagatggatgatcaagacagtctctagagtcttaggaagggtatattaaataggaagggaattcctaattgaactaggcaaagggttggccaataaattaaagtaaaaagtctttt

SEQ ID NO: 74286 - DNA, 484 bp, Glycine max
  unsure (1)..(484): unsure at all n locations
cgagatgaggaagtgttgaagggtgaaactttctgcttttattgtttaccacagagtggtacctggagatatgtcgcggtggtcaggagaccttggggacgtcaggtggggtgctattgcccaaaaccaagcttgaccaatcccgacccaacccgggcatagtcggtcagtgagaacctgcgatgtacctaagcatgcgagctcctggcagtcaacaaataaaatgaatacaagaccacaaagcaaggaggcttgtggtggctggccagctgtgaattatgtgtaatatgtggattgtggcctctggtaatcgattaccaaaggtgagtaatcgattacaaggcttaaaattgaggacaggaggctaagatggtctctggtaatcgattaccaaggggtgtaatcgattaccacggcttgaaacgaagtcaggaaacttanggagcctctggtaatctgataccacctctgtgttatcgaatac

SEQ ID NO: 74287 - DNA, 464 bp, Glycine max
  unsure (1)..(464): unsure at all n locations
agctngatgcatacaacctatatgctccttgttgatggggagagttgagatattatgtagattacagagatatatattaagagacatgatacgagttcganttagttatatcagaattgattggtatttatgtagatgagatcttttctatagtgtaattaggatcatatntctagtgccattgtatctttagatntacctctattcatgtatcctttttacagtttaatcaatccgaaatatacatacttcttcaattatttcctccagtctcagatataccatgttgagtgttatcagcaacaaattttcagtataataaagtattactagctatttccagtccagttctatcagaatggtaaagaaggggagttagttcttacaacagcaacaacaccatcatatgagttaagctcacatttgtcaaagagactcacatcaaatgcctctctgtctcttgt

SEQ ID NO: 74288 - DNA, 436 bp, Glycine max
  unsure (1)..(436): unsure at all n locations
tactcaagctcgccgcagctgctaatggcgatatagcctgtttcgtcattgtcattggtgagggagctgcttacgtggacatgtcgtcattgttggtggcgagaccggctgagtctggtgacgtggagagagtcgccaatgcttctggtgatatatagtgcaggagtggntctcgtcactggaaatggcgagactggtgtcggcggattctcttttcctttaaataggcagcctttgcctcgaanatttgtagtagtcttgataaaagaaagcacagaggagcgtgtttaatcaagaatttacaagccttactttcattatctctagatagcccagctcttgccttgaagtttctcattccatccttattttattgaagtaacaatttatattgttgttcagtcaataatttatcaggctggcattcattcttttc

SEQ ID NO: 74289 - DNA, 456 bp, Glycine max
  unsure (1)..(456): unsure at all n locations
agctntcataggtgaaatcaggtgcagccatttcccttagagtcctctcacgaggtggaggttgtgccatgttctgagaatgtgcaaaatcagaatgctcagaatcagaatgctcataattataatgctcaagatcaggatgttcaaaatcaccaataacagaatgcacagattcaccagttatggaatgctcataatgatcaaaaggtataaaatgatgcctaactaatctatgaaatgtcctatctatctcangatcaaagggttgtaagtcagatggattgccttagtcatacactacattcagcatgccacaactagttgcttgcatgtaaaaaaggtgatgtttgactacagctaccctatatgatatccaaagacttgaaatntgtgacaccttatatatgatgaaagatacacaaaaaattcagacaaaaattanagtctaactatgaa

SEQ ID NO: 74290 - DNA, 464 bp, Glycine max
  unsure (1)..(464): unsure at all n locations
cagatggacaagaacagagtgcgagcaaaatatggctcgcgttcttatattntatatgtaagtccaacatcggttgtcaatacaaaaccgatgttaaccaaatgatgttaactntaacatcgattttctggcaaaaactgatgttaacttatcatacgttaacatcggttttctgaaaacccgatgttaattaacagacgttaacatcgtttcttcaaaaatcaatgttaacgaattaatgttaacatcggttttccaagaactgatgttaatgtcagtacattaacatcggtttttcaaaaaaacgatgttaaggaatacacattatttacaattatgccacaacgtttatcttaacatcggttttgttaaaaaccaatgttaaatctacttnttgagtagtgattcattggtgttttgagaagatgtaatggatataagtgaatcgatgcacattcaatgga

SEQ ID NO: 74291 - DNA, 450 bp, Glycine max
  unsure (1)..(450): unsure at all n locations
agcttcaccacttccgactaaacttccagctggagctcatataccctcttgngcttggcctggtacgtataattnttcaaaanattgctgtctggttttttgtttgcatatcctgtntttaactggcatgttcttttcttctgtaactgcaaaaaaatatttacttgttgagtggcttctaactttaataatctttaacaacttttaattaaggaatgatgcccattgctgattgcatgaacaaatgaattggaatccttccaatcctttgaataacttctcatgctatcatgcatgaggaatatagtgcaattntattcatatgccgacatatataaattcttgacccaatcaaatatgttattaacttattatctattagtatgaagttctggtttgaatgttacatctcatgtagaagagggtggatctgagtattccagacacatg

SEQ ID NO: 74292 - DNA, 483 bp, Glycine max
  unsure (1)..(483): unsure at all n locations
actcagctctccgtctangatcttttggcttcctctcggactcgccatactangtcaccaggttgaaaggctcatgattgaacctttatattgtatcttttggttggcaaattcttctctaatccttgtcatttcttggactttatcaatgatttcaagttccaccctcatattttcttcattntgttgttgctgaaataatagtctccttgttgactattccccaccttctatggngatcatggtgtctgtgccatatgtaagttggtaatgagtttcgttggtggttgtttagggtgtacaatggtacgcctagagtatgttgtagagttcttctttccataggcctttagacttgtcaagtctagtacgcanggccctgagaatgactcgattagctgcctctgcatgtcccgtagtctaagaatgttcaacagaggtgactaagtgcttgatccctatncttgtcaagaagtcttcgta

SEQ ID NO: 74293 - DNA, 453 bp, Glycine max
  unsure (1)..(453): unsure at all n locations
agctttcaagagtagaagaggcggttgacaacagctccagtgttaattntgcccgaccctaagagaaccattgaagtgtattgcgatgcgagcaggcaaggcttggggtgcctattaatgcaggaggaaagagtagtggcttatgcttcacgccaattgcgtcctcatgaagttaactatccgacccatgacttggaactagcagcggnggtctttgctttaaagatttggaggcattatttatacggtactcgttttgaagttttcagtgatcacaagagcctcaaatacttgttcgaccagaaggaactcaatatgaggcaatgaagatggatggagttcctcaaggattatgattttgatcttctctaccatccagganaggctaatgtagtaaccgacgcgctaagtcgaaagggtcttacatgttgcgaccatgatgagtctggaaca

SEQ ID NO: 74294 - DNA, 475 bp, Glycine max
  unsure (1)..(475): unsure at all n locations
ctagcacaagaatattatgaatganaaatgantaatctctaaatctacacanaaacatgattcaagagtagatctacaaaatttgaaccacagaaatgcaagaacaagtgtagatctaagatttaatcagtttattttttttgaatctactctaaacatcaacaaaccacaagacaatggagaatatacatggagaataagatcaagaacaaggaattaaagagaattcaccgaacaaaaagatagaggaagcaaaagaacatcacctagatgaagatgctcttgataccacatgatgtaagctccatcggagcttgtaggcctaggatcttcttcatcaatggattcctttgcttcttggaagatgaatggcagcggaatggagaaggaagagagagaggagatgccacttcaaggagaagatgagtctagaagaagctcaccaccatatgaggccattgataagagcttggag

SEQ ID NO: 74295 - DNA, 58 bp, Glycine max
aaggggcctgtggagccccacttaatatccgtaggggcctcttacaccccatcacaaa

SEQ ID NO: 74296 - DNA, 302 bp, Glycine max
actcactgtaattaaaccgaattcgaatctatgaatgtacgtgacattatgttagattaaggaattggctaaccatactgaaccactgacaatgatacgtataacatcattgttaggcagagggacgattctatcataaacaagttgttaagatcgaaaatgacgaagggaacaagaaatatgaatgttcgcaaaagtggatgtagaaaggatcataccactggcagaataaacaccctgagggatgacaacattggtaacatgtctttctaaaatattcatcaattggctatattgttggg

SEQ ID NO: 74297 - DNA, 447 bp, Glycine max
  unsure (1)..(447): unsure at all n locations
ctactanggactctggacaacaagcattgcattttntctgttaaaatcatacattatgnncacattcatgggagctacacgcctagaaggtaccatcacatcaagatgcaaatattggaataaatctttaaacctcctatgttcaacaaaagagaatggaagatcatgctcaataatcatcatagatatcatctcaggtaccacactttgatcaaattttttatttcctaatctcccagcatgatcaagaataatatntccaacatcactattagaatgtgtcttcaaatatatatcacatttccccatatgacgttgtaaggttgaagtctcattcttattgtcaccgcccacataatctttcaacaatatttgcatgtactcctcactttttcatcactatgtataacagggttctcacaaaaaattcacacaagtgatgaataa

SEQ ID NO: 74298 - DNA, 442 bp, Glycine max
  unsure (1)..(442): unsure at all n locations
tgcaactgacaaaacggatgcatttggaaacacttcactattatgttgaaaatngtaaattnttgttattgttagggtttaagatttaatagataaaaataattgtctttgtttacttgtttgtgtatttcatatgcagggttgggtctactcattgggccttaaagagactactacataatagccttggagacctatgtagtgtttaggaagtcatgaacaacatgatcacgctgcaacacaccaaaattaaggcatcttttgagataagtacacatgtggttggacataattttaaagttatcttatacaagaaactacttggcatggtatcagggtatgctttaaaccagattgttgttgactttgagcgtgtaagttatactggtattgccagttctgttgggatgtgaatgagactactcatgatcttcggtgatgc

SEQ ID NO: 74299 - DNA, 443 bp, Glycine max
  unsure (1)..(443): unsure at all n locations
tctctacttccattccttgtgcggcttgtcttatgacaccatntnntttatatatatttgagtgatcattatttattctaaagtgtccacttgataactaatactgcctcaaattntattttacctttttatcggtttcgaattcaaactccataggcatctgaaaaatcgacaaaattatggcttgtgtcgcaaaacatgtttcattaaacacttatctnggtggctnggtggctgtcatgagaggatggngttgnttctgagttntgaagtgaaactaattattaaaaaatgtgatttagtttggataagttatataattcaaatctaaacaaaattaatatgattgttttcgaattagatcggaagggtattcagtctcaattcaatacatgaatttctttatggcaattctttttatttaagagataacactcattcaa

SEQ ID NO: 74300 - DNA, 443 bp, Glycine max
  unsure (1)..(443): unsure at all n locations
catgcaagcttaacctacctaagtaagtaaatgactaacgtactcatggacttattcctgctcttcacgaactgccactccttgattcaaatgaacttcgagctgggaagactcctccacgtcgtcgggtagaatggaagaacaacgaagtggggctacaaggtttgaaatatctaattattcactcaataacgatgaagaggggctagggttcaaattgtaacgaagagggggtatgaggttngaaatgtctaagtcttcactcaattacgacgaagagtggctagggctcaaattgtaacaatgaggggctagggttcaattgtaacagcaacgaagaggctagctagctgcttcaatgcaaggtgggaggttcagaagctattcncgcttttttttttgaactaaaacccaccgtaangtttatcacatataacattcta

SEQ ID NO: 74301 - DNA, 167 bp, Glycine max
tgggtgcggccgacacgagaacccgtcacataagccacggagaatctctaaacgggctaggtctgcagcgcgcgctcacgtgacaagccgtatctttaaccttcgcaagcggagctgtcatgtatcgccagaaagcctcattgtcattcattactcttgtcgtagct

SEQ ID NO: 74302 - DNA, 459 bp, Glycine max
  unsure (1)..(459): unsure at all n locations
tctaagtcacctgcggcatgcaagcttctcggctcatgctgngaacgcctctagctcatcacccgtgcagcctaaggcacccacccagagggaagctccccaagttccaactccgaacgcaactcgaccggccggtaattccaacacgacaaggaacttccctccgaggccgttgccggaattcaccccgctcccaatgacgtacgaagatcttctaccatccctcatcgccaatcatttggccgtggtaactcccggaagggtcctcgaaccccctttcccgaagtggtatgaccctaatgcaacttgcaagtaccatgggggtgccccggngcattccatcgaanaatgcttggcccttaaatacaaggtccaacatctaatggatgccggatggctgactntccaagaggatcggcccaatgtgaggaccaacccgctcgccaatcatggaggggg

SEQ ID NO: 74303 - DNA, 446 bp, Glycine max
  unsure (1)..(446): unsure at all n locations
cgccacccagctcacccaggcgagcagggttgcttcctccgaagttcagccttctggatgaatcttctggagggcccaagtgggcctggttgctatttgcacccccatttttactaagtacaccccccttttctattnttttggaactctttntctgtaacgttacaaaactttacgaacttcgtaacgatacttattttttcttctgcaaggttacgaacccttacgacttatgtatntactcttttttagctttcaaagaagttacagaaacttacggattgcgcaaaaacacctctttttgactttcgccacattacggaagttcacggatcgcacaagcctgcttccttttgatttctgagacatctcgaaacttcatttattgcatgtcatcaagtaataatccccgggacgaaatanggtatgacactttcacaaacaca

SEQ ID NO: 74304 - DNA, 401 bp, Glycine max
  unsure (1)..(401): unsure at all n locations
agcttgggttcctaggcctagaattgcattcgggctctcattntaaatccttcatgctgtccctatacatataaaacagtcccacaacccanagctcacaaaaccatgctcatatgtcgttgaggcatttcaccgagcacttggtgggcgcatgtttaggcacgaaaatcaagagaatggggacaatgtggcatgcgccattacttcagaatacgccctaggccaaggccatcccttacaacccctcaatccaacaaaaacaagcaacaatttgaggataaatccctcacgtttcttagcaaacacatgcaatttagagcaccaaaatacatcaatggaaagctagaaagcccaagaatgatgtacttactttgttgagacgaataatagagcanaacgga

SEQ ID NO: 74305 - DNA, 459 bp, Glycine max
  unsure (1)..(459): unsure at all n locations
tactcaagcttagcaagacatacaactttgcaccttcataatttttctccttttatctgaaattgaggggaagattacattaaattcattaggaaggcttctaatgagcacatatgaaaactaagctagaaatatttacaatcctaccaaaaataaccataaattgggagatctatatacattttggaaaacttttctatacaaaagttagtcataaaagacgactaacacatatcttgagagaattctttgcanagagaatcattagttgacccaaaaatgatatcatcaacaaagatatgtactaagagtatatcattcaattttattttaataaaaagggtagtatcaaccttacctcttgaaaaacccttttctaaaggaatntactcanacgttcataccaagccctaggggcttgtttanaccatataaagcctttttagnttaaaacatgat

SEQ ID NO: 74306 - DNA, 432 bp, Glycine max
  unsure (1)..(432): unsure at all n locations
caacttttnccagttaattaacatatggatcttatntatttatnagacgccgaaccatgttacatgatgcaactaatgtgacaacccaaagtattcaagtnttataatatatatacattataattgaaatatgatattacaacacataaaaatgtatatcatatagcaaaatagctacacactagtgcatggcaataccttcactaagataaaaacagaagccaaactcttacctgcaatcctcttttactaagtcgtttaactgcgacttcagttcttttggaggggtgctccgcacttcttatcaatcctcagtagacacacccaaacccaccctcttcgattataacagagcgactgagaatctttgtggctgatttcatgtcagatacaataaacactttgatgttgacggtctctgtacaaactggg

SEQ ID NO: 74307 - DNA, 408 bp, Glycine max
  unsure (1)..(408): unsure at all n locations
taatactacctaagtngcattatattattggaaatcgcnattttatttcgcattcactgcaacggctcttgtgtaatgacagaactctgaacttcaatagacatgtgtaaagtacaccagatgttatgtaatacgagaaattatttacgctggttacacttttattttgtttgaagtcagtaaataaaatgaataacttcattggtattatttgcaatcttattactcatctgagcactataactgagtgttacgtaaaaaataagaagaaaaaatattactcttttacttgatctgaagacatataacaatccttgttctatccacgacaataatatcagttagtacctaattaccgaaataagggttaacatcttacatcactgggcgcaataccacagtggtcta

SEQ ID NO: 74308 - DNA, 418 bp, Glycine max
agcttggagtttccaagtgccaattcgtcttcttctttagtctagtcttcttctggcttcaattcttcagtgggctttccttctgtgtccagcatcttgtgatgttcccagcctttgatgacagctttccaggttctgctatccagtgatttgaggaaggccaccattcttgctttccagtattcatagttgcttccatcaagaactggtggtctgttcactggtccgccttctttctccatgttcatcagaatttatctccctagatctcactctgtgatttcgagtgttggctctgataccaattgaaattctgatactggggacagatgtcgtacaggatgtcacgacatcacgcttccgaacatgcagatggtatgtgtccgtatgaacagattaaacaagttaataacacaag

SEQ ID NO: 74309 - DNA, 461 bp, Glycine max
  unsure (1)..(461): unsure at all n locations
cagcanataaataaagtgatggatagaaacatgtataaacacctatatttcatattaaatgtatagactattttgaaacattagaaaattaatagatgacaaatgcacaacaaaaagttaaaatcatatctataaatatgcacaaagaagataaacgtgaaacataccaaagtcaagaaacccaatatggccatcacgtagaagccacagatttcctgcatgaaccagttcacatgcaagcaaacttccaaatctgcaacattntataatgagatagacaaagttcttgttaaaaggagaagtataggattgctaactacaaaatagaatttcagagtcataccacacattgagagcagttatacggctggtttctgggatagaaactaatgaacttatggagtgtaggtgagtaagaggaactccatataagtctttgatagttaaaactttctttgtac

SEQ ID NO: 74310 - DNA, 423 bp, Glycine max
  unsure (1)..(423): unsure at all n locations
agcttaatccctggaanattgatggtaggatatttgttctggattcaactagggactactttccttagcacccttatgttcaatatgttggataaataaaaatagtttttttttcctatatgcatgagagtttcaatgctagttgtcacacaaatgtattacacaaaagtacctatcacataaagagtggctatgcaatttagaatgcatcaagaagttttagattgtgtggctacattctttggaaccaaaggcattgcaaggaaaaattactacatacccatanttaacgggaatntctattttcctgcttggcttttttgagggagatgtcaccacacgttatgcaggatggtggaagcgtcaatattggatcattatcatgattttgcaaagaaaatatactcgtgaaacagcagtcta

SEQ ID NO: 74311 - DNA, 163 bp, Glycine max
tttccaagctagacatacatgattttatctggaaagttataaaatggatatagaaagagaggtatgcaaagtttataaaactcttagaggaaagaaagaaacttggtataataaaattaaatcagaaaatttattataattggtgtggggatagatgaattaa

SEQ ID NO: 74312 - DNA, 445 bp, Glycine max
  unsure (1)..(445): unsure at all n locations
agcttattgctgtggattattgtttctntttatttgtgcaagagcgagtgagatctttttcgtatatatgcctcaattggttcaaaaccatcaaacttgaagaagttactcattctatcatcatcaaatggcgtgacactaaaatggaccgtactaacaacattactttaaaaattaacggaaggactatcttgcaatacttatgttaaagatagggactaatatgcaacaagggtacaaagtcagggactaaattgcctatttactcgctttgttatcatcaaatgacgtggcatcagacatgtacacgtgtcatgccacgtcatcctttagtgccacgatagtccacgtggcacgaaaattgacctcattaactgcgttactatacaatataacggaacgactactttacaacacttatgcaaagatatggactattttgaat

SEQ ID NO: 74313 - DNA, 383 bp, Glycine max
tcccttctaacagttcttatgaagataacatgaacaatacccagctgaaaagtgatcaccataagcgaattgaggatagagaaccaatgaactttggctcccttcatcttcaagtaagcgtcccatctagatggccacttgatatcactcttcttcaaggtgaccccataacgaaatgtaagaggctgcccttccttgataggcattgccaccgacgatggatcgcatctgataagtgatgcgtatttgttatacattttcaaccctctaacataatcagccttatgcataatactacagggtattaccttcaacccaacaaccatgtaaccaggcttgtcagatccatccttattcaatggcgggatcatcttcggcgcatc

SEQ ID NO: 74314 - DNA, 166 bp, Glycine max
agctttccatctggtgcagagttgttgagagtgacatccatatgtgtcccaactcttaggaaaagaaatgaggagcagaagagtttgcccttcatcatctatattcatatctaccttctctaattgattaacaatccatctgaagggcttagacgtccaccattct

SEQ ID NO: 74315 - DNA, 470 bp, Glycine max
  unsure (1)..(470): unsure at all n locations
gactcggacctcagtgtganaagttatgaccatttgaatntctctatagcttccgntgtttancttctatcctctcgacatattatgcgcccgaatcggacatccgtgtgagaagttatgaccattagaatttctctagagcttccgatgtttaatttcgagcgtatcaatataatatatgcctgaatcggacctcagtgtgaaaagttatgaccattgtaatttcacaagagcttctgttggtcattttcgagcgtctctatatgtgaagcgccttaatctaacatgcgtgtgaaaacttatgaccatttgaatttctaagagcttccgttgttaattacgagcctctaacatattatgcgcctcgatcggacattcgtgtagaaaagtttgaccattngtatttcacgaaagctgtcttagttcaatctcgatcatcttgacatattatgtgcgcgaatctgaccttc

SEQ ID NO: 74316 - DNA, 460 bp, Glycine max
  unsure (1)..(460): unsure at all n locations
cagcttcccaccaacccaacaatgtcattactcagcctataaacatatctcctccttacccaccacccagttatccacaaaggccatccctaaatcaaccacaaagtctgtctaccgcacttccaatgacgaagaccacctttagcacaaaccttnnntnntaannttnnttnnttttnnttttcccccaacaaaaaggaattttgcagcaaaaagcctgtagggttcaccccaaattccgttgtcatatgctaaacttgatcccatatctacttgataattcaaatgggagccataaccctagccaaggttcatcaacctccatttctccgaaatacaactcgaacgcaacgtgtgcttgtacggagaagcccggggcgtccattgacatggagggcttgaacgtaggtgcaggttaattatgcggctgctgaaattgagagaatgttgaaatctgaat

SEQ ID NO: 74317 - DNA, 349 bp, Glycine max
  unsure (1)..(349): unsure at all n locations
cgctctaattacatgatgttgtattatggaggaggtgtatgtcattttgtttaagagtagagtcccactggtaaaactaactttccaaatagtttgccttcgcangaanatggcccncgaagaagcttgcctcatagaggtccaggaaagacaaggcagccgaaggaactagttccgctccggagtatgatagtcaccgctttatgagtgctgtacaccagcagcgcttcgaggccatcaagggatggtcgtttctccgggagcgacgcgtccagctcanggacgacgagtatactgatttccaggaggaaataaggcgccggcggtgggcatcacttgttactcccat

SEQ ID NO: 74318 - DNA, 421 bp, Glycine max
  unsure (1)..(421): unsure at all n locations
catnctgaatctgggggacatgaaccttggaatttctttttcttcacanccaaccacattttcaatgtcagttacctcgaccttctcagaaattcaagacatttaggaacatatcatcctgcattcaccttgagcgtatggtcccgttgctagtcaaacaggtttggtctcttgcattatcaaattgagtgtaagttacaccaacctacttatgtggagatatcatagacctcagatctcctgttgaggaaaaggatatttctgatagctctcatacacagatcattcctgaatttgcaagaataaatcagccacaacagccacttcgtgtcatggattctaaagtgcacaaatttgaacacataaggaagacgtgtcctgcattctgactcagacatatgccagtctatagtcaaatata

SEQ ID NO: 74319 - DNA, 373 bp, Glycine max
tatgcgccatgattgcacctagcatttgatgtgcttctatatctcaattgtgaccgatggaattccagcaagtttagctatattccaatatttcagactgtatgtttatattctttgatgatgatgtattattctcttcaacccgaaaggcagagatattgactagcttcaggaagttattagttactcttaagaacttatttatgttatataacacacgcttgattcatgtaatgagtgagctttgttcatttgaatattatccaaaataatattcaatattctctctttcattacattcattcattcacgggaaatatgagatttatcatatacctacatagatatgtcatcactcaagtcatatatcact

SEQ ID NO: 74320 - DNA, 464 bp, Glycine max
  unsure (1)..(464): unsure at all n locations
agtcacctgccgcatgcacgcttctataatctgcanagaaacaaaccagagcatcttaagattaatcatttaccagaccataagcaaatcctgaggagaattttactagtaaagaacaaaccatttttccaagttagagagggaaaacaaaaacttaccctaataaaaattatccncagctggccacttctattcttattacctacaattcaaatcttgaggcacaaaatagagccaaagaaaagtgtatcaacttgttagaagaagtctatccacatttattatgcaaggaagagtgacattcagagagcaattagcagtaccttgaattgtaaacaaaactaatgggaggccacatcactagaagaggttgtcggttctagcttgtcctgagaagatgagctagctganaatacagcactctcattgacctcttgcaatgtagagaagtcagcatgataacc

SEQ ID NO: 74321 - DNA, 416 bp, Glycine max
  unsure (1)..(416): unsure at all n locations
cattataactccaagtgtctggttntactcctctagattatatntcatccatcttctgataagcttcttccacatgttcattcttacaaaggtgctttataatacaattgtatgtaaacacattatgcaaaaggttgtaccttctcattntatcaagaaccctgaaagctgattgcacatcatctgcatcacaatatgagtgaataaatattgaataagtaaaagcgtcttgctcgaactcttttgacaacatatcatngaaaataattttagcttcatccacacgacctcctttgcaaagagccttgtacaaattattatatgcaagcaaatccactggacatccttgntcaagcattgcttgaaacaggtcacaggctttctctgaatcaccaatctcaccccatccacttatc

SEQ ID NO: 74322 - DNA, 466 bp, Glycine max
  unsure (1)..(466): unsure at all n locations
agcttcatataaacttcatagcttcaatcctttgatataccctagctagccattgtctaatagcatgggtgctttacatgtggcacgttactgtgtagagaccacaaacatcttatgtagcatatcttcaaagaagtacaacttatcagtgccgccttttgcttggaactgacttttagtgtacaattcaaatacaacattaatagcacaggacaaaaggaataaaatatgtcaagacaagataatntaaaacttcccttttgtgcacaatggtactatgattgactaaaccatagacattactntctagtgataatttctcaattcttgaggatcgactaattgttccattacctttgaactatgagtcaagtgccaaagcacttgtcttctttgtactagacgctgaggtagtatcgcctattgactgataatttaaccatcattcataacctttcttctcatg

SEQ ID NO: 74323 - DNA, 405 bp, Glycine max
  unsure (1)..(405): unsure at all n locations
tcttcattttgatcttatcaacanaaagaagttgtatgagatatggggaaatgggtaaaaaaagattgggtttgggatcttatatggcagcaaagatggtttgaatgggtggatgcattggtagaaagtcttaaccaacaattgagaaatgctataccaaaagtaagtggtttggatagatatgattggaatgaggacattgatgaaaagtttctatgaattcaacatatagatcactacataaactacaagtggatactcatcaaaatgttttgtttctataatatggaagntgtgatgtagctccatgtggagcttctaggccttggatcttcttcatcaatgaaatccttntcttcttgaagtttaatggtagcagaatgaagaaggaagaanaatgattgt

SEQ ID NO: 74324 - DNA, 473 bp, Glycine max
agcttgtaagaaggctataactgatgattgtaatatctgtgctataacttataacaatctcacctccatgtgtcaagaagaggctacccttgctgaatgctacaaataactcttcttcaaagggatagaaagcacttcttaaatctcctaacagtggtgagtccttttgttttggggtaaaatgaaaaatatgttaatgattttgttttttacttttttcaagcaaaacaaaacatgtagagcaaattaatggcagcggacattctaactatatgtttgaatgtcacacacatgacatggcctattcgaatgcaaattgccatagagacaattactacattggcctatctccatacttctaacatcatccaccgtgatgtcaaaaccaacaacattctacttgacattaagtttttcgggtaagggagcagaatttgtgctttcaagaatgctccccaattatgtaattcatg

SEQ ID NO: 74325 - DNA, 460 bp, Glycine max
  unsure (1)..(460): unsure at all n locations
tgttcaataactgctggtaatcgatttctatatatgtgttatcgattacacagngcannatttgaattcaaattntaatagctgttgtaaatcatttttggccactggtaatcgattacatcctctggtaatcgattaccatagagtaaatctcttgaaaaagactttntatcttaaatttcttggccaaaccttctgctacttcagttaggaattcccttcctatttaatatacccttcctaagactctagagactgtcttgatcatccatcttgaatatctttaatttctttgtcttgaataaagctttgagaagcatgtgatcctttggcatcatcaaaacattcagcttgatcctttgtctacaatctccccctttntgatgatgaacatccctggaatcaagacaagctatatacaagatgatagcatggtcacacaacccttacttcccctatc

SEQ ID NO: 74326 - DNA, 472 bp, Glycine max
  unsure (1)..(472): unsure at all n locations
agcnttggcctttatgtggttcaccatgttgctcatgttgctctccctatctcanacaatgtacacatgcaatccataactctttttgaaatatataaaagttctcgtaagtataaatatctcttccatgcttctctaaacaacaatccaacttaagttcaagtaaagaataaagtgaatcattgtcaacaagtaattccttctgcctccgtgcttctattgtggaatcaaacctcatccaaagttcaaccaagaaacattaggattcaaaatgttaccatannaaaattccactttctgatcttgatgttgttctcaatatccctaccaaaaacatgtctctaaaataagtggatatccatatgcttcgaatatcatacatatgtgaaagccaatcattatntttaacttaaacctaaccattatagctttccatgttgattcaaaaatcagtggtgtctctgatccccaa

SEQ ID NO: 74327 - DNA, 451 bp, Glycine max
  unsure (1)..(451): unsure at all n locations
tactcaagctcgcagaagggcccgcctttggaggactccctttctaatcacttgtattaattcacttggcctaagtgcctgaatggttatattgttggagttggaagaaaggtgctcttgtacaatctacagggaaagtatgaacaaactttcagcagttagggtatgtatattaagtagaaaagaatgaatgaaagatcaattaataataaccaaagtcatcatttcactcaacgagacagcaaatcccaaagtatagaagataaaaaaaatagtaaataatgtcatcttgaaattttaaagtgacaaataaatagaaacaatattttcttcanaaatataacaaatgcactagtcaatgttttccaattaccagatcaccaacttcagaaccctctgagtggaagagaatannggcgacatcgttatcttcattcatcanacttgaatt

SEQ ID NO: 74328 - DNA, 473 bp, Glycine max
  unsure (1)..(473): unsure at all n locations
agctttcataggtgaaatcaggtgcagccatttcccttatagttctctacgangnggaggntgtgccatgttctgagaatgtgcaaaatcaaaatgctcagaatcagaatgctcaaattataatgctcaagatcaggatgttcaaaatcaccaataacagaatgcacagattcaccagttatggaatgctcagaatgatcaaaaggtataaaatgatgcctaactaatctatgaaatgtcctatctatctcatgatcaaagaggtgtaagtcagatggattgcctttagtcatacactacattcagcatgcacacaactagttgccttgtcatgtaaataaaggtgtaggtttgaactacagctaccctcaaatgatatccaaatgacttgaaattntgtgagcaaccttatnaaatgatgagaagatagcacacaaaatttcagaccaaaattcaaagtctaactatgaaag

SEQ ID NO: 74329 - DNA, 477 bp, Glycine max
  unsure (1)..(477): unsure at all n locations
cagatggacaagaacagagtgcgagcanaatatggctcgcgttcttatattntaaatgtaagtccaacatcggttntcaatacaaaaccgatgttaaccaaatgatgttaactttaacatcgattttctggcaaaaactgatgttaacttatcatacgttaacatcggttttctgaaaacccgatgttaattaacagacgttaacatcgtttcttcaaaaatcaatgttaacgaattaatgttaacatcggttttccaagaactgatgttaatgtcagtacattaacatcggttnttcaaaaaaacgatgttaaggaatacacattatttacaattatgccacaacgtttatcttaacatcggttntgttaaaaaccaatgttaaatctactctctgtagtagtgatttcattgttggttttgtagagtatgttaatggatataaagttgaattcgatgcaacattcaattggaacc

SEQ ID NO: 74330 - DNA, 431 bp, Glycine max
  unsure (1)..(431): unsure at all n locations
agcttagatagaaacattgaatagacatgaaaatatctcttaaatagataatacaaatatttacatcaagtactcggtagaaattcctaacaaaggattntagccctccattagaagggagcaactttcacaaataggagaagggtttcagagaaaataccaaattacaaagtagtggggatgtctcctccacctctaagaacctagaaaataactctaaaacctagaatctacctaaaagttaggacctttgcttccttgcacaacttttcctctgttctctgcacacaatttgcaatcaattcagacctctttcatgtcgtcacgctctcnncttttttttttctgtgcaaatcacgcttataaagggctttctgacctcaaggcatgcttagcgcattctccacttaacgcgagaaatgatatttggt

SEQ ID NO: 74331 - DNA, 325 bp, Glycine max
  unsure (1)..(325): unsure at all n locations
agaagaagaaagaaagagaaaatccaaactgaggcgcttctgtaacgcttctgtgacatttccatgatcaattccgctaacattcttcgccattctttgttcattcttcatcgttcgtcgatcttcaaccggttagttttcaatttcgaagctttgaattcattntatgcacccttgngggtccattcttgctatgtatgttttcatcttcatctcgtctactttcgagattctttttcttctgtttaaatgagtttcgaccgatcgtttgcattctaatctcatttaatcgcctttaaataaaaattaaccaatcgttatgttg

SEQ ID NO: 74332 - DNA, 243 bp, Glycine max
agctttgttttgtggtagtgataatactacaaattatctatttcctagagaaaagaaaactagattcatacattatgacggtatattattatattaataatacatatttatattatatttactataaacattactatctttttatttatactatacttttaattgtaaaattgatatatttttatcatctagttatattatcatttacttttgaatataataaatcttacatactataacaca

SEQ ID NO: 74333 - DNA, 337 bp, Glycine max
  unsure (1)..(337): unsure at all n locations
acattcacaccttntcataatgtatagtagatggtgtgtatttaaaggtngtagctaatacatgggttgctaacatatggtgtgatactgtcattgctgtatgaagattgaggctgtttgctgatactatgagttgtttttattttgcaatgtggcacacgatggcgccttcaggggaaaattctgattagattatacgtggtggcttgaatgaagttctgctagatccttgacaagcttggatggggactgtggtgactcgcctcacaaatgcttatttagtcttcaatgtgcgagagctaaagatgctctgtaattagtgcgtgaagctaggaat

SEQ ID NO: 74334 - DNA, 426 bp, Glycine max
  unsure (1)..(426): unsure at all n locations
tgcactcctctaatgactatggcatgatntctggcgctaaactactgtgagttggaagccatcttctcaattaaatttctggctttagcangagtcatgtctccaagggctccaccactggcagcatctatcatacttctctccatattatngagtncttcataaacaatattggagaaagaagctgctctgaaatctgatggtggtggcaactggcacatatgttttaaatctccccagactcataccgctctctcactgagttgctatacctggatatccatctgatggtgtggcctggagcaaggaatttttttttaagatactctctaangcataccactcgtgaggacctgagcacgaatcaacagtctttcactcctctatgatgcngaagccttcaaatattgatctcttgacattggg

SEQ ID NO: 74335 - DNA, 479 bp, Glycine max
  unsure (1)..(479): unsure at all n locations
cgaagtgngtctgagaagaggcaaatntaattatcctgctttgatgaataggaagcctanggcaaatggagagaataagaaagagggaggaacccatgttgtgactgtcgttcctacatgngccaaattcccaccacctcaacaatatcaatactcagccaatatcagcctttctcattacccaccaccctttcagccaagaacacccaattatccacaaaggccacccctaaatcagccacaaaacccgcttgctacacatcccataccatacaccacccttaacacgaaccataacaccaaccaaggaaggaattttccaaaaaagaagcttgtagagttcaccccaattccggtgtcgtatgctgacttacttncatatctactcgataatgcaatggtagccataatcccagcaaagaatcctcaaccttcattttcttgaggatacaactcgaatgcaacatgtgcttatcatg

SEQ ID NO: 74336 - DNA, 456 bp, Glycine max
  unsure (1)..(456): unsure at all n locations
gatactcaactttgtgatatcaaccttgtgctacaacaattgcaacaagacccactatccacaatgagagaacaagttgttgttaataccttacatcttgcatgaaagatgttctctctttgagttagggttaggttacaagattgactcccaaagagccttctcaccattagaagattaccttcttcataggtgtacacctcattaatatgctcatcacccttggcttcacccttactnntcattganganggagaagaagtagcctcctcttggctactatagatgtcttgactcctcatgatcgtggttttctttgtggngcattgagaagcaatgtggcctcttcaatacatttgaagcacttgatgtactagttctatcttgtgaactacctttggagtgattctctatgttttaccttatcatctttgcttagaagtggtctcctacaca

SEQ ID NO: 74337 - DNA, 476 bp, Glycine max
  unsure (1)..(476): unsure at all n locations
tcctatatctgtctnaagatagggggagtaaggggtgtgtgaacgtgatatcatcttgtatatagtttgtcttgatttcagggatggtcatcatcaaaaagagggagattgtagacaaagaatcaagccgcgccgatgttttgatgatgccaaaagatcacatgcgtctcanagaattattcaaggcaaagcaatgaaagatatacaagatatatgatcaagacagtctatagagtcttagacaagggtatattaaataggaagggaattccaattgaagtagcacaagggttggccaagagntttaagttaaaaagtctttttcaaccaaattactctcttggtaatcgataccagaggatgtaatcgattaccagtggccaaaactggattacaacagctattannaattgaattcaaaatttgcactgtgtaatcgattacacatatatggtaatcgatactagtagtttctg

SEQ ID NO: 74338 - DNA, 291 bp, Glycine max
  unsure (1)..(291): unsure at all n locations
cactggccttgctcatgttaacaaggaaagttggatgcaacggttgtaaaatgtgtgttcgttggctattctgaaagagataaagggtacaagttgtggaaattggaacctggtgagacaagatgcatcatcagcaaggatgtaaccttcgatgagagcagaatgacaatgctaaataaggagcagaatgataacatctctagtggtgagagtactaattntgaggtggagtatctgagatttatatcatggaagtggagctgctattgatctcactgatcaaggagaagc

SEQ ID NO: 74339 - DNA, 494 bp, Glycine max
  unsure (1)..(494): unsure at all n locations
atctaggtatctacnacccctcaatttagtggattttcaagctctgagaagtgaaaatgagaatggngtaaatttggagcaaactctcacctcacacaagtctataaccttaatctaaacttgctcaaactgccaccgaatcaaaatttgactcctcaacacccaatttaccctagaaatggctcttgtcttcactttggtcactcattntcctcctttgcacaacccatgctttctcacagtcctaaatgacatttcanactaggattacctcactctaacctccaattaccactaaatccagatttggctnttcaaatcctcagagcatcacacttttccactcatatcactacattctcacttgttaaccctaggttaactctacccttcatctctatcagtgtctcatcagccatttcagcacacaagcatcatcatagaaaccctaanacagaatgggtaagcttgactcatacccaaacatgacacat

SEQ ID NO: 74340 - DNA, 281 bp, Glycine max
  unsure (1)..(281): unsure at all n locations
atatttcttttgtagtttaagcttgtttggtagcttaatctgtaagccatattcagaaggcagtatgtgagatgtcactgtcatctctcctctctctcntgtttgtatcctatatatatgtaacattntgaatctaataaagctgtgagagaaagtgaggtnttgattccttctcaccttcatttcaagtatttcattaaanaattngaccctaaccggactcgttgactctggcctggaatcatgctgcattaagttaacgagtccacttcgagtctgta

SEQ ID NO: 74341 - DNA, 82 bp, Glycine max
  unsure (1)..(82): unsure at all n locations
tctanaccttatacaagaatgaagttctgatacacttgttggacatgtggtctcagatatcttaagaagngggggggggggg

SEQ ID NO: 74342 - DNA, 348 bp, Glycine max
  unsure (1)..(348): unsure at all n locations
gtttgtctttacatgcccaactctcttgagtggcattngtattgattggtgtatggtgtgttgtatcttagtctctatcaattcatacgtgcatcatgcatcatcatttaggagtaaggagaaagttataaagttagaaattntttgcagtagtcaaaactctttgttntaatggaatacaaccttacaataatcgattacacagagttgttttaagcttgcaaagaagtgtctcgtatcggtctaatcaattataagcttatcgtaatcgattacacaatggttttngagacaatgattgacttattcaggagtctctgctntaatcgattaccatgtgatattatc

SEQ ID NO: 74343 - DNA, 478 bp, Glycine max
  unsure (1)..(478): unsure at all n locations
cgtgcatccaataccctgatgaggatgtcccatngttcttaaaactgtactgatccatttgcttccaaagattcatggccttgcaggagaagacccgcacaaacatctgaaagaattccatattgtctgctccaccatgaaacccccagatgtccaggaggatcatatatttctaaaggctnttcctcattctctagagggagtggcaaaggactagctatattaccttgctccaaggtccatcacgagctgngatgacctcaagagagtattcttagaaaaaattttccctgcttccaggaccacgaccatcagaatggatattttatgcattagacaactcagtggagagagcttatatgaatactgngagagattcaagagactatgtgccagttgtccttaccaccagatatctgatcagcttctcctccaatatttttatgaatgactcagtaacatggagagaagtatgata

SEQ ID NO: 74344 - DNA, 338 bp, Glycine max
  unsure (1)..(338): unsure at all n locations
gtcttgtgttcctgaatgcattacaaggaacaactactaatgccatgcatcgcactctcccaaagtgctctaaccctaacactctaccaacaacatcaagaggagagagtcatattctcaactatgctttgagtcatcctactttcaattgtcctgcnacatgtatanaatgaatatanagtttaagattagccaatcctgaacaatgtactaaaaaacattcgtatagcttgctgttattacaataccatcttctttatagttaatatatatgcacactggactccagtttacactnataagaagagagaacatgactcttatagtaagtacatagg

SEQ ID NO: 74345 - DNA, 488 bp, Glycine max
  unsure (1)..(488): unsure at all n locations
acctgaacaagcaatcaatcctctntcagaaccatgctatgtgctcgcgactggtccctntcttcccttcgcaacttgagttcactattgctaccccatagagctccgcgaaatttgttccggccatattcttccttgcgagccctcttggtctctcgttcaagggctcttgcggtgattgcattctcttcccgtaacccggcacactccttccgaacgtgtgtagcagccaacttgaacttctccttggcgagtattgcctttcctaactcgcttttgagagtttggacttcctcgtcctcttgcggtgcttcaaaattctcttcgctgacgactcttaacttggcgagccaatctaaacctcgtatgcgaactttcagccattcgtggtacccaccaatgatgccattacgaatgcctctaagctcttgatctttccttaacggnngttcccatgccttatgganntcttgatagtcttggaattt

SEQ ID NO: 74346 - DNA, 400 bp, Glycine max
  unsure (1)..(400): unsure at all n locations
agcttcaacattcaatntcgagggtctcgatagatttctggactcaatcagacatccgagtaaaaaggtattgttgttngacatttctcaaagcttcaacattcaatttcgagggtctcgatatattaccggactcaatcggacatccgagaataaagttattgtcatttgtatttgctcagagcatcaacattcaatttcgagcgtgtcgatatattacgggactcaatcagacatccgagtataaagtattgtcgttgaatttgctagagcttcgcattcaattcgagcgtctnaaatattacatgactcaatcagacatccgagtaaaaaggtattgtccgttgaattttctcagaacttcaacattcaatttcgagggctttatatattacgggac

SEQ ID NO: 74347 - DNA, 448 bp, Glycine max
  unsure (1)..(448): unsure at all n locations
acgacaataactntntactcagatgtttgattgtattcccgaatatatcgagacgatcaaaattgaattttgaggttccgagctaattcaaacgatatataacttttactcagacgtttgattgagtcccgtaatatatctagacgctcgaaattcaattctgaacctttgagcaaattgaaacgagaataagtttttactcggatgtctgattgagtcccgtaatatatcgaaacgctgtaaattgaatgttgaagctccgaccatattcaaacgacgataactttctactcggatgtctgattgagtcctgtaatatatcgagacgcttgaaattgaatgttgaagctttcagcaaaatcatacgacaataactttnttactcagatgtttgattgagacccgtaatatatcgagacgatcgacattgatttttgaagctctgagc

SEQ ID NO: 74348 - DNA, 479 bp, Glycine max
  unsure (1)..(479): unsure at all n locations
agcttggtacaagaaagtatntntatctcagcccaatttcttgcagcactcttattttatatattacaagtgttattcatgtttggcatttgcatgtagttccctgcacctattgttgatgttccaccagtagcaaggaataagctaaacataacaagacccaaacaaaagaacatttcagacacatcaacagtagacgcacctgttgtggatggcccaccaacaacaccattacttttcatgccaataccgaccttcactgaaaggaaggtgataaagatctagtataanaatgaagaanagtgaagacccatcttnntgttatatttgttattaggatgtcgtagtggatatgaactaattttatttcgctactangaatttgtagtggaatatgtgtgacttatctattangattagtagtggaattctatagcttgacgatgaaacatatgatcttattataaagctgactatta

SEQ ID NO: 74349 - DNA, 319 bp, Glycine max
  unsure (1)..(319): unsure at all n locations
ccgatacgagatatactctgtangcttacttctatctttgtaatcgattactataagaatgtagttgattaaaacacagagttctatcttctgaagaaattntctaactttgaaaattttcttttcactcacacatgatgatgcatgatgcacanatgatatgatataaactaagatgcaacatttaatataacanataatacaaatgtcattcagagagttgganatgtaaagataaacttcttcaagcttcaaaactaagcttcatgttgtcatgttgctcctctatctctacataatatcaaggattttttatatc

SEQ ID NO: 74350 - DNA, 452 bp, Glycine max
  unsure (1)..(452): unsure at all n locations
cactaagtgtcacaaaccccagatggcactaagatccaaatatggngttaatccttaaacaagaagaaagcaacccattctttggcctcttgngatagcgtgnggggtttatgcgttgagcgtatgaaccccagccttgtgttgtgagaataatgaatgaattaactaaccaatgactttggaaacaccaatattngtaccttcacctntgagcttacatatggcaagtggtttatacaaataatatatagattgttgtgaaagtatacatacatatatacatacatatttgatcaattagaacttatacttggagagaacaacactaagaggttgttntnttgttatttaggagcatatgatttcttaaaatcttgaggggttgttctaaatgttgaangggtggatatcattatatttttattcatctcttgttataatatgatgatgat

SEQ ID NO: 74351 - DNA, 92 bp, Glycine max
caaccaacaaacatgaccaaatggctacacgtcataatggctacgacaactacccaggacctctagacacagcactctgcaagcactctgcg

SEQ ID NO: 74352 - DNA, 448 bp, Glycine max
  unsure (1)..(448): unsure at all n locations
gttcagttctattcttagaaatgtgacactaagcgttttgccataatgctcctgagtttgtattatcaattctacgcttagtaccacacaattatgcattaaaggattcaccataagaagctacagtatcaagtaaacatagattatcattaaccaagagtgaaccagttccaacaatatctgaattaaaagacaacctgaacacattgtttcctaatgaacacaagtaacccaatttgtccaaataagaaactgaaaccaaatttcatctaaatgatgatacaacaaaagtgtctttcanatccaaataaaaaccagtacataataataatctagagtgctctatagcttccacttctaccgattaccatctcaacatagaccatctctcagaataattggcttcggagctaggcaaccggcattgaacctgatgtagagtggacca

SEQ ID NO: 74353 - DNA, 312 bp, Glycine max
  unsure (1)..(312): unsure at all n locations
acacacactttttgctaggcgattactcacttaattttcccatctctccctttgggttttgagttatgcttcacttganattaagttaantacttatgtgagttcttgatttaatccctatttctcttcccctttggcatcaacaaaaagccatagtgcataacaagtataaaacatttatatactattaatcattcacaagacattcattgaagaatataaaccaatcatgaagcangaaacatgaatagatcaaatatataanaaccacatagtcatataacataattcataatttgtcaatcataccat

SEQ ID NO: 74354 - DNA, 395 bp, Glycine max
  unsure (1)..(395): unsure at all n locations
cactatgatactcagcttctaaggaggtganngctagtattagagggtgtgtgtagctatgtttagcttctcaaagaagcttctcaaggaagttttctcaagacagtttctcatggaagctacctagtctataaatagaagcatgtgtaacacttgttgtaactctgatgaatganagtcttatgagacacactttgaagttccacttctctccctcttttattccttcattttcgtgctccccccttctctctttcttttcctccattaaagcatcctcttcaagcttcttatccaaggcacattctatgtggtgaagactcttcttccatggcttattccctagtagatgacgcctcctctcacctcttctcctttgtcttctgctgcatctc

SEQ ID NO: 74355 - DNA, 406 bp, Glycine max
  unsure (1)..(406): unsure at all n locations
atagattcttttttgtttacatggtatngatatggtatgaagtaacttccgccgaaagctgtaactagtcttcgtcgaggacctcgagcgcatacaagatagatattntcatcctaacacaatntattccatacccaaggtccaactagaattcaaaccctagatcccttgattaaaggacacaagccgctatcacttgtgccaactgttgttggtaatttatttatagaattagtcacactatcattgtctgcctatatatgactatgagggatgcgtttgggaactattgatggagtagcatgtacctttctacaagaagcatatgcttcatgcaccaatgatgccataccaacacattcaaagcaataatccgcttccccatcagttatctctatgataacct

SEQ ID NO: 74356 - DNA, 410 bp, Glycine max
  unsure (1)..(410): unsure at all n locations
tatgtattttctcgttgacaatgtattagtattagaagagagaaaatggtaattttcaacattcattntanaaagttgttntattagaacaacgcctttgttctggggacgagataaaattatntngataatgacaaaggggtattaaaaaatttaagtcctagttacttgatgtngtttgcaagacataaagtgtttatgaccgaaagcggccatanaatatactttacttagaantataagcgtcctatatcttcttaacataatttgtccaatattntnttatataagccttcatatattgaaacaaccatacgggttatatatatatatataaagagtccagatcctcttagtatcataatgtgtattacagactntctttcctatatctnntggacgaagtatta

SEQ ID NO: 74357 - DNA, 363 bp, Glycine max
  unsure (1)..(363): unsure at all n locations
ttagtaaaataattaaatttaaaatttacnaattttactataatcaatacattattatacaaaattaaaattttaaaataaatatttaaccaaaaatatcttaaataaattaaataatataacaaaaataattaaatttaataatatcattttttaataaaaaaaattattaaataaatgttctaaaattaatttattaaataaatatttttaaaatctattaaaaataattgtatataataattntaattaaattctaatttataataaataataaataaataaaagaaagaccaaaaaaaagctgaagaacgaaagtcgaggtgggcaaacctgactttanagggaaaacaaaaacaaaaa

SEQ ID NO: 74358 - DNA, 378 bp, Glycine max
  unsure (1)..(378): unsure at all n locations
tctctgagtcacctgcggcatgcaagcttgtccacnnnaaatagggtttgaaagtntatcatttcagttttcttaccaagtaaaatggatcanttttaaggtccaacgccttataatgatcacttttcaagtaaaaagaatcacttgattcacgcataagaaagaactgcgtangtctgatttcctctccacaggagggtacgtaggagcaagagccccgcttttgtcgacctcatataataanaagatataaagttanggaacacaatttgcacaattctaaaaaataggctggtgtccttcgagacaaacagtagaggtgctaataccttcctcaagcgtaaatacaactcccaaacttagaaatttcattttgac

SEQ ID NO: 74359 - DNA, 377 bp, Glycine max
  unsure (1)..(377): unsure at all n locations
gaccacatagtggtacctggagatatgtcgcggnggtcaggagaccttgtggacgtcaggtggggtgctattgcccaaaaccaagcttgaccaatcccgacccaacccgggcatagtcggtcagtgagaacctgtgatgtacctaaacaggcgagctcctggcagtcaacagataaaaggaacaaagaccacaaagcnaggaggctggtggtggctggccagctgtgaattatgtgtgacatgtggattgtggcctctggtaatcgattaccaaaggtgggtaatcgattacaaggcttaaaaatgaagacaggaggctaagatggtctctggtaattgattactacggngtgtaatcgattaccaggcttggaaac

SEQ ID NO: 74360 - DNA, 396 bp, Glycine max
  unsure (1)..(396): unsure at all n locations
ctctaagtcacctgcngcatgcaagctngctaacccatggaagctcctaatatctcccacactttttgtggtgggccattcttggatggccttgagttttttagggtccacttggaccccatttctaccaactacaaaaccaaagaagactatattatctacacaaaaggtacacttctctatatttgcatagagggtgtttttcctaaggactgaaagaacttgcctgagatgtcctaagtgatcatctatgctcctactgtacactaaaatatcatcaaaataaacaactacaaatctacttatgaaatcccttaagacatgatgcataagcttcatanaggtgcttggtgcattagtgagcctaaaaggcatcaccagccattcatacaaacc

SEQ ID NO: 74361 - DNA, 460 bp, Glycine max
  unsure (1)..(460): unsure at all n locations
tactaagcttcgtacattntagctaaggtngagggcccttctccagacattggttganacattntgacaagcatttggatctctttcctttaacccacctaanaaacagctcagaatatggtatttgataattgcaaacatgaaatgatgcaatcgaaagcctcgtgatactcctccacatacccaatttgtcatattttcatcaactctgccatagggtcatcagaaacttcatcaaatctttctattaacaactgggtatactcataccaatcactaacaggaaaggaatggacaaatttcatgaatgcagtatgccattgaaaggctttcccttcaagatgaatgatagcaatcttgaccttgtaatcattcggtgtatgataaatggaaaagtaattttcaacttgacaaatccactgatgaaccttctcaccattgaatctaggaaaatcaatgc

SEQ ID NO: 74362 - DNA, 174 bp, Glycine max
  unsure (1)..(174): unsure at all n locations
gacgatgaacaaaggcccaacgaatgatttcaagaatgagtccacaagttcgagatcaagtttgatttcaagtttcatgagaagaaatcaagaagattcaagactctggagaagattgatttctagatntccgagaagatgaattcgggagtcgagagaagacatcaagaagac

SEQ ID NO: 74363 - DNA, 307 bp, Glycine max
  unsure (1)..(307): unsure at all n locations
acagatatgactaccgatctattcaagctcntctcctttattaaatgcttctactttactatttaattccttcttttttttcacattaattcccttatctacctcactgcattacttaaccatatatttctttcactcaccatattggttatactctctacttgcaatctgcacctccatctttttctaggccatcttacacatttgttgtcaaaccacctatcatatcttactccaactcttttgctctaaatacagatacttcctctttgatcttatggtccccaagcatgatacttcactaatg

SEQ ID NO: 74364 - DNA, 471 bp, Glycine max
  unsure (1)..(471): unsure at all n locations
aaggtaatcttgacacacctaagattgagggttcgactgctatttacgatgtctaactctctagctaggacactggtcacatcaagggtttcctattcaagctccaactactaagctaactctaatggttgaaactaaactcacaacaagattcttaagaattctacccatctcttgtacctcgaattcaactcctaaggttcccacaatatatcaaactaacgataatgcctccaaaacatgaaggtgaacaccatggctaccaactctagatcatacgtaggataaatcctttcatgagtcttgagttgtcgagaaaacataggccgctacttggcctcctacaagtactcctctaaacataaaacttactttggatatttactcactcaacnaggacctactcngctaaggtagcactcaactggtacaatgactaacttctctatgaaactcagagttactctctat

SEQ ID NO: 74365 - DNA, 437 bp, Glycine max
  unsure (1)..(437): unsure at all n locations
tcagagtcacctgcggcatgcaagctagtgcatgtttagaagagaaaatataatctttgtcggntacctatcaacagtgcatgtattatgacattcttctgatttctggccgctaatgatatatattctggaggttccgggctgcaacaactatcattgccctagggcggtacttgcaataatttggcttgcgaatgtatttgggttagtatatctataattatttattgaaataaatacttatcttaataaaataagtagttcttttattgttctagtgcgttcgtttatatggtgtcttcaaaagacttatataaanagtatttattctaaagttattttttaaaatttaaataaactcatcctttatttgattcatcttatggatgctaataccatcgcgtgggtaaccaccgaacgtgcttgataatatactt

SEQ ID NO: 74366 - DNA, 272 bp, Glycine max
  unsure (1)..(272): unsure at all n locations
tacaagctggtggagatcagtgtgcgaccacaatttctgtcgcgacatcgagatattcgggatttgtgtgaccacgatcatggctgaaccaaccgcgatttcgataatatgagagatcgctacaanagtcaacctgtgtatgtctgcaatttaaaagatcggttctatctatgcaacgtagatcgaggagcacgtgctttcgtcaataatgcacgctctgagactcgtggacatgatggaagataatataggtggaagaaagaaactaccgt

SEQ ID NO: 74367 - DNA, 184 bp, Glycine max
  unsure (1)..(184): unsure at all n locations
ttctgatcctctacacccaattctaactttcctttccncatatctactatacagttggtcgtggacatganaggacgtcccaagattatgggaatgtcaggatcctnctctatatccataaccacgaaatctataaggaatacaagctgcttgacctgaatcaacacatccttaatcactccat

SEQ ID NO: 74368 - DNA, 455 bp, Glycine max
  unsure (1)..(455): unsure at all n locations
cgcttgtggagctattatggaagctggatcttgagcttcaatgatgtccttcaatggtggattttcaccatagagatgcagcggaaggcaaaggagaagaggagaggggaggcaccatccactagggaataagccaaggaagaaggagcttcaccaccaagaattgccttggataagaagcttgaagaggatgctctaatggaggaaaagaaagagagaaggggggagcacgaaattgaaggaatataagagggagagaagtggaactttgaagtatgtctaacaagactctcattcatcanagttacaaccagtgttacacatgcttctattcatagactaggtagcttccttgagaagctttcttgagaaaacttccttgagaaagcctcttgagaaaacttccttgagaagctagagcttatctacacacacccctctcataactaagctca

SEQ ID NO: 74369 - DNA, 337 bp, Glycine max
  unsure (1)..(337): unsure at all n locations
cttcttatccaaggctcatcttggtgatgaagcttcttcttccatggcttattccttaatggatggcgcctcctctcacctctttntcctttgtcttccgctgcatctccatgatggaaaatcaccattaaaggaccccattgaagctcanagatccagcctccatagaagccccacaagcaagcttccattaagtggtaatcagagcacaagagcttcaagtaggtgctccttanacctccattaattntttgctttaccttctcttccgtggtggttcttcatttttctccatgatctcctacatgtcttgtgtaaatgttttaacatgattctt

SEQ ID NO: 74370 - DNA, 382 bp, Glycine max
  unsure (1)..(382): unsure at all n locations
cgtgtcacaattcattgtggcagtataatgccattcacttatcatttcacctaatgtaccatgagaggacaaagcacatagatgtgaaactacacttcatcagagatgtgattgaatctgagaaggtgaaggtggagaaggtttcaacagaagaaaacccgactgatatgttcacaaagtccctctctagtgtcaagttcaagcactgcttggacttgataaatcttgaagatgcctaaagcagattggtagaagtgcagccctgaatcacaaggtagacacttgctgatttagagtcaaggtggaaatttgtggtgtgtgactcanaatcacaaatggcacaagtgagaagactttatagtagtgctgtcataactggttt

SEQ ID NO: 74371 - DNA, 473 bp, Glycine max
  unsure (1)..(473): unsure at all n locations
cttaagtcacctgcggcatgcaagcttcgcttatgcgaggtgctgtaatccaagatctgtccatgctcagnngtgtctaatacagagcatgatgatgggaggcagaacaacaaatgttgtatataagataagaagctgcaattcgtcctttgcaatcacagctgtcctaagccaaatgaacaaacaaacaacgaaatttaaaaaatggagaanaggtttaagaataacaatgtccaagcaaatggttggacttatnggataagaacatggtagggaagaatgaacatataatangggaatgaggtccatagcatcaacttcatatcagatgaanagaagagagggacggtggaagattaagccanaaacgagaaagagagganatggatctactcatattacatttcgtaatggatgggagatattagaccttatattcatctaactatagagtgtnggtagtgcaacatatc

SEQ ID NO: 74372 - DNA, 112 bp, Glycine max
cattcttggatgagaccgtgaggctagtggccatctataacatgcgacttcatcaagagacatgagccttcgtccttagtcttactcatactatggggatgatcgctactga

SEQ ID NO: 74373 - DNA, 356 bp, Glycine max
  unsure (1)..(356): unsure at all n locations
acacaccaaatgattataatgatggatggctcanattctcacaaaggtaanatcatcactttcaaattgagcctttcaaactatcatgacatgtagagaagaatcaanggattcangtcacannatgtcaagaacttttattntcanaacaattacccatttcttgacatatncataattcanagataacatgcnagtcgtacgtcacacaaaatgacccaaatattaactgaaatccgacgaactaacacataacaattacacactacaaataacaaaccacaaactacaaaccaagacactccccccctactaacaccatgtctcatgtgccaatanagataaaacattaatca

SEQ ID NO: 74374 - DNA, 461 bp, Glycine max
  unsure (1)..(461): unsure at all n locations
ctcagctgaggatatggngacccatacatgtgactaggtggcggtcggtcgatggtgcacaacanngtttccacatccacaatgcgcgcataaatccaccatccnctgttgcccacctccaactgagctcacgtactcccacgtagcccatatcctcgtttctctcaacaccgggtccccatcaatcctcccaagcttccacaacatccaagcaaaacaacattcaaacagcacaagctatcacagccaagcaaaacagagcaaaggcagaaaactctgctcaacacaccaaccaaaatcacagcttttctcacttaaagaccccagtaacaattcctttgttccggttcatcaaccgttggattaactcgaaacttttactggaagtctatagtacataagcctacattgtgaaccgtgggatctactagcaaacatctagaactcattctacattactc

SEQ ID NO: 74375 - DNA, 408 bp, Glycine max
  unsure (1)..(408): unsure at all n locations
gagatatgttgctcattctataactttgtaantggattcanaacattataatcaattacactacatatgttgaactcattgctctcaagaaacttagagatgaatcaatttgtttaacaccttagaatcatattaataatgcataaaagaagacttaacctagaacaatcatcatgttagtctaaaacaatcaatacaaataccacatctattaaacttgtttgacattgtnnaaatattaaaccaaaactaagacctaaagacatatcttcaagggttttaagcttggtccaacaataattcttcaatcgaaaatatgttactactntntatattataaatgttaagccaaaatcattaataagaccattanaactcattatccttcttccataactaataatattt

SEQ ID NO: 74376 - DNA, 491 bp, Glycine max
  unsure (1)..(491): unsure at all n locations
ctcagcttctacatatgagagtttagagtgaaaggtccaagttccagatagtttgagagaatttgttatgtgaagatctgtaaagaccagagctggaagaggaagccgtcctgagagcttaagatgagtttgtgagtgattgtgaggttctagaggtggaggagacatccccactacttgtatttctgcaatctttcatctttctcttctctttgttgtaaaggaagtttcccagttatggaaagctaaatcctctgttggatcttccttgtaggtacttgatgtaaatatctaattttatctatttaatgatattttgtgtgttcactgtgctatcaggtcttcattctaccatgcttttgccttgatcatgtagatgcatgtgttntaggatcatcaatagtgaaactgtctgattttagaactcatggacggcctacttgtctatttcacaggatcaggtacgtaccttgtgtgatgttgtctatgcg

SEQ ID NO: 74377 - DNA, 337 bp, Glycine max
gccgatcttagcactgcgtcacttttttttcacagcaaaaattaaaaaactggagctataataactcagccaatattcaaccaaatcacaaagatactatggagttcagggggcagcaaaaagtattatgcaaatctcatcattttcttacagcacaccgtgaccacagatgcttcgcattaacaactgtcaaaggtgatctggatgaaggagatgcaaatattgactctctctatgctactctgcccacttgtcataaagtttaggacggggtgtacgaacctgcgttcaccacttcactacaaaaaaaattattatattcacgcagataaattag

SEQ ID NO: 74378 - DNA, 308 bp, Glycine max
ttctcatgcatttttatcttttatctattatatactactatatccttatgacttatataaattcactaaggattatttacaaactcataataatatgatatttatataaccactatcgagactacaagtgggaacatgtgtgcaaaaggaaaatcatatacaagactctataaactttcacttatctcatatattgagagagaagacacaatctgcaaaaatataaatgataaagtactcatgtgctctaatacagtaagacttaccatattcatcaactgacatagataattatatcaaaacatatg

SEQ ID NO: 74379 - DNA, 384 bp, Glycine max
  unsure (1)..(384): unsure at all n locations
agctacataagcagcaactgataaagaagtcatcagtgcatagggagctccaaatttgtatgccagtatacctgctaccatagatatctggatggatacatgttacatctgctgaagttgttcaacacataagagcaagcaagagttgcgatgacaacatagttttcaaagatcattaaaaataatcatcgacaacaagaattcacaagcanaactgcagatcctgctgaatatattctatgcttaatagtgagcaactctcggggaatcataagcacaagaaataactgagactaccttaatatgtgggtctacttgacaccatgacgaagatgaattattcacgatacacgacaatatctactaatcccagttctcactgga

SEQ ID NO: 74380 - DNA, 443 bp, Glycine max
  unsure (1)..(443): unsure at all n locations
tctcagagtcacctgcggcatgcaagctantaatgaaaatcatacttgngatctagttcctctgcctccacacatannaaccaatgtctgtaagtgggtgtntagagtgaaagaaaatgcatatggctcaatcaacaagtacaaagctaggcttgtggcataaggtttaaatcaagttgctggctttgactattctgagactatctcccctgnggtaaaacctgttaccgtcagacttaattcaacattggctatcactaatcagtgatcctaacctcatatcttggtggtcccacaagcagcaacttgttgctagatcccatacggaggcagaatattcgagcttagctcagattgctgcagaaatcatgtggatgcagacattgttgactgaactcacagttcccttcaacactcctattgtcttctgtgataatcaaagt

SEQ ID NO: 74381 - DNA, 417 bp, Glycine max
  unsure (1)..(417): unsure at all n locations
gatggatattctnttcgtgatgtatttatttcctcatggcttttcttagcttatctaagaataattaaccgtccaatcaaaacattatgaaactctggtttaagggccattcatgcgcatccgtacgtgtaaacataggagttataggtacatcttgtgctaccttttttttttttgtaaggtgttcggaactctgttgatgcactatcaaacactaatcgttgatgcattttgacccaattagatctataataagcacatagcattttattgatatgatgctattctttttcgtttcacacgtgccctttgatccgaaagttgactctaataataacggaattattgggaatacaacatattaaaactcgactgtttgctgcctactaaacatctttttttttcataaatatataa

SEQ ID NO: 74382 - DNA, 349 bp, Glycine max
  unsure (1)..(349): unsure at all n locations
gccggatcttaagcacctgcggctgcagctttcgttacagacaganaagtttatcttgtaccactcgggtatttccgcccgtcagcgtgactcanaagtcagtatgacagatcttgtgagcgcggaagatgacgtaaatcaccgcgtgtaaacgggcttgtcggccgcgattgacgaatggcgcagaagacgacgttagtctctgcgtgctattagccttttcgtcttacagacagcanaatggttatacggataaccactctggtatttccccccgtcagcgtgactcanaagtcagtatgacagatcttgtgagcgcggaagatgacgtaaatctccgcgtgtcaac

SEQ ID NO: 74383 - DNA, 389 bp, Glycine max
  unsure (1)..(389): unsure at all n locations
ccatggagatgcagccggaagacaaacgagaataggtgagagaggcgccttcactanggaataagccatggcagaaggagcttcaacaccaagatgagccctggataagaagcttggagtggatgctacaatggaggaaaagaaagagggagagacagagagaggcgggagcacataaatgaaagaagaaatagggagagacgttgaaatttgagttgtgtctcacaagactctcattcattanagntacaacgagtgttacacatgcttctattatagactangtagcttccttgagagctntcttgagaacatgtccttgagaagcttctttgagaaaacttgcttgagagactagagcttagctacacacacccctcttataacta

SEQ ID NO: 74384 - DNA, 330 bp, Glycine max
  unsure (1)..(330): unsure at all n locations
gttgtctgcctctcatcaataagaccagatatcacttgtctcaatctatttgctaataacttagctatcaccttgtacatacatccaatcaaggagatgggtctgtagtcatcanatgactggggatgtnntaatttgggaatgagagctatgaaggaagcattactgcctctanggaaactgccatgtacatggaattcatcaacaaatcttctgaagtcagctttcagcatatcccanaattctttaatgaagttgaagttgaaaccatcaggtccaggacatntgtccccatcacaactccatactgcttctttgatctccaaatct

SEQ ID NO: 74385 - DNA, 465 bp, Glycine max
  unsure (1)..(465): unsure at all n locations
agctntgtcctcagatccctcttgttgactagacttataccaaacaacattattgtaacaacatatataaaaccaaaacttagtccgcaaatccctcttgtaagactaagtttcaatcctgcttcaatcaagttctaaggcaacaatacatttcccaatgctaaagtcacctaactatgcacacaaatgggtgatcagaccaagagcatacagaatttaagcattgaaagaagcattgaacacaatgaacacaatgaattagatattaaagtaattacatcagctgttctttagaaatccccaacaagggtgtttagccagccattacagaaaaatccctaacaagaataagaatacanaacctangtatctctgcanaagctgctcctcttactgnnnctcagagcttttccccagataggactatggagtgtctggaatgtgtaaattctctgtaaaatctat

SEQ ID NO: 74386 - DNA, 459 bp, Glycine max
  unsure (1)..(459): unsure at all n locations
actcagctgtccatcgtgataccttatcaccggcacggcattccagtactcttcattntagttntcaactcctctacctgaatatagttaatatttaattccgtggcttcatcatagatatcgtttatgtggagtggtttaaaaacttaaccaaagtagcaaaagagcattaatatcaacttttggaattccactaggagtaacaccagaaatgctttgcgcatgaaacaaggccatcttctatatacaactaataaaatagagatttggaaatggaaggaaggggtatttgggttgtcataacagaaatgttgagactcgttntggaattccaattcaagtggagttattagataggcattcatgataacttacttaagctgtttcttcagggtaagctttaggcttgatggctgctntgttcataggagatnntctagcctttttcatatctatagt

SEQ ID NO: 74387 - DNA, 358 bp, Glycine max
  unsure (1)..(358): unsure at all n locations
atgtgtaacacttgttgtaactctgatgaatgagagtcttgtgagacatctttcaaagntccacttctctccctcctttattctcttcaatttgtgctcccccctctctctntctctccctctntcttttccttcattgaagcatcctctccaagcttcttatccaaggctcatctnggtgggaagctcttcttcatggctatatctagtgatgggccgctctacctttctctttgcttcctgatctcatggggaaataccataaggactatgaactcaaatcacctcataaactcacagcagctcatatagtacactatcttgctacgtactatgcgcanctatatctatacatact

SEQ ID NO: 74388 - DNA, 471 bp, Glycine max
  unsure (1)..(471): unsure at all n locations
ctgatgattcatacttgtcntttcgagagcacacaatttcaaataacttgtcttcatgatatgnctttatcttcatagttctattatntcaatcttgtcactgatctattgtggataaactcgtcgggtcgccacagtggtttccatcacaatactcattgcgcattaactcgttgcccttaaagggtcttagcattaacttgttacccttaaagggtcttatagtcgtgtgattgtacatttcatagctcataactcaatgcacacaacatcttaatgcacacatgtatattgcaagtcatacatactcaattatcacatatattcggtctcaatcacaatggaattgatattctcaaagtgcatgtatcacacctatgaatatacacacttaccatgaactataatcacacactactaattgtttcaagcatttacctcgacactgcaaaaatcgccgttccacatgat

SEQ ID NO: 74389 - DNA, 341 bp, Glycine max
  unsure (1)..(341): unsure at all n locations
atctctgagtcacctgcggcatgccagcttgatcttgngaggcagtagaaataactatgatgttcctaaactacctttagatccaatggtggctcagatgaagaatcacagagaaaggaagaccaaaaaggctaaggctaataattgccttttcttttgtgtgtcaaaaattatttttacaagaattatgaacttcaagtctgccaaacagatttgggattatctcatattagaatatcaaggctgtgaaagaaccaaaggcatgcaagtactcaacttgngcagagaattcgagatgcanagcatgaaagagactaaaacaattaaaggctacgctgacc

SEQ ID NO: 74390 - DNA, 389 bp, Glycine max
cgttcgaagatcctcgagacgttataaaggggccaatctttcagataagacttttaagaaagttttgaagatttctcttgatgaaaactataacctgcatccttttgagttcaaccattcccacttctgcaccatggggtttgttacctggtgggagaaatattattcgacccgttcagttggagatactacgatcatgatctccagacttgaaagtggttttacacaaccaacggtcgagaatatccgctcaaaccttcaagctcgaggtattaaattacttttgactttctaaattgatatgtattcttgccttttctaatattcttactttcaggcaaaacaatcatgacgaagaaaagcgctgatacgtctcgagctgatgtgag

SEQ ID NO: 74391 - DNA, 359 bp, Glycine max
  unsure (1)..(359): unsure at all n locations
agctntacagcagaatttagtaatgacccactacttatatataaaatacttaatgccattaacctagggaattataacaaacttaatggctgagtgtaactgaaattgtggcaaccaanagtcaccctcaacagccaacaagtcaaccaccatttggtctcccaaaggctgatgcctatgatgccaatagtgcccttattacaacatgaactatagcccttttagtcgttaacccaaaacatattgttgggcagccaactttacaaggattgtgccattatatagacaaactaaacactctaaaatatgaatagagtggtgtcagttagtcctccttcattatggccatgatacaacta

SEQ ID NO: 74392 - DNA, 405 bp, Glycine max
  unsure (1)..(405): unsure at all n locations
ctacagcagaatttagtaatgaccactaacctataattaatatatcttaatgccattaacctagggaattaaaacaaactaaatggctgagtgtaactgaaattggtggcaaccaaaagtcaccctcaacagccaacaagtcagccaccatttggtctcccaaaaggctgatgcctatgttgccaattgggcccttattacaactcgaactagagcccttttagttgattaacccaaaacataattttggtcagccaactctacaaggattgngccattatttagacaaactatacactctaaaattgaaataaagtggtgtcatttagtcctccatatgngccatgatacaaatcacaaccatggacagcacttgttgaagagctaacttggtttccttgctct

SEQ ID NO: 74393 - DNA, 395 bp, Glycine max
  unsure (1)..(395): unsure at all n locations
ggagcaaactctcacctcacacaagtctataacatcaatctaaacttgctcanactggntntacgcctaanattctgccgaatcaaaattngactcctcaacacccaattntaccctagaaatggctcttgccttcactttggtcatttgtttttctctcttgcacagcccanactntctcataagtcctanatgacatttcaaactaggaataactccctttaacctccaaataccactaaattcagaattggccttcaactctcanagctcactctttntcactcataacactacattctcacntctaaccctangcaactatacccttcatccctagcagtttcatcacaattcacacaaaacatacaacatattataaaacctaaactgat

SEQ ID NO: 74394 - DNA, 378 bp, Glycine max
  unsure (1)..(378): unsure at all n locations
cagatgctctcgagaattcaaatggtcataatttatcacacgtaggtccgattctggcggatagtatatcgagaagctcataattgaacaacgaangctctcaagaaattcaaatggtcataacttatcacacggaagtccgattaaggcgcataatgtatcgagacgctcgaaattgaacaacggaagcactcgagaaattcaaatggtcataacttatcacacggaagttcgattcagacgcataatatatcgagaagctcgaaattgaacaacggaagctctcgagatattcagatgatcataactcttcacacgaaagttcgattcaggtgcataatatatcgagaagcttgatatgaacaacggaagctcttg

SEQ ID NO: 74395 - DNA, 221 bp, Glycine max
  unsure (1)..(221): unsure at all n locations
taatggatatggntangagtatgctaatcaattaaactttacccgtatctttgtggatgtatgcctcgaaaactgccatgtatattgtgaatagggttcctagtaaggcagttccaaagacatcttttgaattgtggacaaataggacacctagtataaggcacctgcatgtttggggttgcaggtagaaataagaattacaatccgaatttagaaaattg

SEQ ID NO: 74396 - DNA, 330 bp, Glycine max
  unsure (1)..(330): unsure at all n locations
atcgcttagcgtgcatangtggattgtgtcttancgcgcttctctcgcttagtggatgagctgaagcggtgcgcttgatgacctggagcggtgcactcagcgaacctgatagctcatcttcttctggattcttcctcgtgcttagccactgagtgtcgcgctagcgaatgctcgctaagccaatntactggcttagcgagaaggtganaatagcattgttgcaatttgcctcattaacctgaaattgagagaaattgattataanacacacaanataanagtattaattatctattacctatatttaacatatagtacttataatattat

SEQ ID NO: 74397 - DNA, 483 bp, Glycine max
  unsure (1)..(483): unsure at all n locations
gacttctcanactatttatcttcctctcanagaggctctctaactntctagctttctcactctaagaagtgaattcactcttgtcttggatggttaagaatgaaggctcctnacccttattatactactcctcctncacaatgaatggtggagattacttgtatcctagggtggagattaattctctagaatgctccacacattctangagtctctacactcttctactcccttccatatcctttcatactcttccatanggttccacacatatccagaatattctagaggtttccacanacttccacaagcttctagagagttctacactactctagagttctttaggacgttctagaaaattctacacttttctagaaagctctagaatttctagaacctcttaattaaggagggatcccaacanaatgaaacanaataagagtgtaaattttttatttgtaccctttgtgatgacaaaat

SEQ ID NO: 74398 - DNA, 181 bp, Glycine max
  unsure (1)..(181): unsure at all n locations
ttatccaactggcatgcatcacttatgtgacactcaacatcaagttttatggcatgtacactanggctangattattttcctatcaagtcacccgtgttccaacatgctctgataattatgcttatctagtcatttggcgtcagaaattttacacattacccttgtggtcaccatttaaaa

SEQ ID NO: 74399 - DNA, 482 bp, Glycine max
actaagctcgtatttatgcctaataattacatataaatattgttattttttgtatgagaaatgtcatgtgaaatgcgagaatgcccatttaatagctgggtccagggccccaaactttgaaagtttgaaagagggaattggaaacggtggtagcagcacagtgaggtttagggtttctccttccattcttcagtgtttacagagagagaaagagttagagagagcaatgagagagatcatcgtcgattccatccacgtcaaccactaagacggcgtcctcaagggtcacgaaactgccgacctcaacggcgaagtcgttgccaccctctgcggcgtcgtagagcacatcaacaaacttgtctacgttcgcgcgttacgctccaagtaaatcttccttcttagctactaaacttctcagccttattatttctgttattatcttcggtaatggaataatgtaataactcgtagatataaacctg

SEQ ID NO: 74400 - DNA, 251 bp, Glycine max
  unsure (1)..(251): unsure at all n locations
ttattttgccttgcgctaagcgcctcactttngcactaagcgttattcattgcggtttgtataaagctaagcgagacttgctcgctaagcccaatagcgtctagtagtcgagtcgcgctaagcgagcacctctcgctaagcgcatggttaaaactgtntttccctgagctaagagagtgcctatctcgctaagccaattatgcagaanagattntctgtcataactcgctaagcctatgagttatttctca

SEQ ID NO: 74401 - DNA, 246 bp, Glycine max
  unsure (1)..(246): unsure at all n locations
tctagtgtggaaagatntctctttgggtatcatttagtggctgcatctgacttcccaagagccttctcaccattagcatatcaccctgcatagcttccttctcaagctcttcttccacttcttcttcaccgatttcagattcattgttgatttctccatctgccttcaggatcatggtcctcctgattggacattcagaagcaacatgtcctctgcctaagcatttgaagcatatatgtttctggt

SEQ ID NO: 74402 - DNA, 214 bp, Glycine max
  unsure (1)..(214): unsure at all n locations
actgtattccgtgtgacaagttatgaccatatgaatttctcgatagcattcgttgttcaatgtcgagcgtctcgatatattatgcgcctgaatcggacttccgtgtgacaagttatgaccatttgaatntgtcgagagcatccgttggtagatttccagcgtctctatatattatgcgcctgaataaacatccgtgtgacatgtatggcatatg

SEQ ID NO: 74403 - DNA, 300 bp, Glycine max
ctattgacccactctaattatattatttcttaaccatggacaacactactcaatcgtcaactatttactgtccctatcttcaatggtgaaaattatgattcctggcgtgttataatggaaacatatctttcatctcaagatttatgggacatagtataagaaggcttcaccatctccgcggatacttcagttctaatgcatctcaagacaatgagttgaagaaaaataaacagaaaaattcaaaggcggtgttcaccttggaacaagccgagactgatccatttttcccaataattatgg

SEQ ID NO: 74404 - DNA, 230 bp, Glycine max
gatatgggctacgtgggagtacgtgagctcatttggaggtgggcaacaagggatggtgtggttatgcgcgcattgtggatgtggaaaacttgttggcaccatctgccgaccgccacctattaccacatgtgatgggtaccccataatcctaccagcttgagatgaagaagtgttgaaaggtgatacttccttgctttattgttgaccacagagtggtacctggagatatg

SEQ ID NO: 74405 - DNA, 477 bp, Glycine max
  unsure (1)..(477): unsure at all n locations
atctcaagaatcttgttgaaattagccaattgttcagtggttgttcttgactctgtcatcttgaaggtgtacagttgttgcttcaagcatagccgatttgcaagggactttgtcatatacaatgactctagtttcagccacattgaggctgctgtcttttctcttgcaacttctcttatagctttatctccaaggcatagaatgattgcacttcttgctctatcaatcatctntgatttctcctttgagcttagagattcagacatcatttcttctcctttaagagcttatgcacaaccatgttgaatcaagatngcttccatcttgattctccataacccanagtcantttcccctgaagacttctctatatcatnatngtgtgttcccatctttcttgatcttgatctatctcccacagacagcgccactttgtggttctttgtaaaagttccgcaactcttaaacctgcacaag

SEQ ID NO: 74406 - DNA, 363 bp, Glycine max
  unsure (1)..(363): unsure at all n locations
gtcacctgcggctgcagctaaaaaacaagaaatgaattgaatgtctcggattctaatacttacccgttaaagaatgaagaacgaacgaagaaaggatgaagaacggtgaagaacgatgaagaatntccacagaaccgcttacggaagcgttacggaagtaccttcgacttgattttcttcacgaanaccgtgttttgcccaaaatagccgaaatgcatagccaaaggtgtctttgaacatttgaaacagctcccccctcccctatttatagaaaanaaaggaggtgcttgccgccaaagacttaatgaagaagaattctaagcgcacccgaattactatagttcaccccctttttcgtattta

SEQ ID NO: 74407 - DNA, 475 bp, Glycine max
  unsure (1)..(475): unsure at all n locations
tgagaganatgattattaaactcactatatgataatactaagtatttattacctatacttaacagaaaatacttataacactacaaaataaccatagaatgggagagtttgatacaatntatacaagttntatacacaaaagttaatcgttttcaccgactaacaactcccccaaatttacaattntgattgtcgtcaagcaaaaagagaacaactcacttgtcctcaagtgacaatgacatgcagtgactatatacaaaggtgtatgcaacanaagttactgattgcataataagagaatggagtaaaatgccctcatcacttgtcttatgacaggtatgcagttatccaaagagaagaataaaatgtaacctgaacaaatagatgggagtaggcataagacatatatcaaggaaagtagcttaaaccacagtctcacgggtactggttcactcaagcacaagtggttaagcta

SEQ ID NO: 74408 - DNA, 438 bp, Glycine max
  unsure (1)..(438): unsure at all n locations
atccttcagtcacctgcggcatgcaagctctggatctntgtgaggcagtaaaatataactatgatgtttctanactacacttagatccaatggtggctcagatgaagaatcacagataaaggaagaccataatggctaatgctaaaagatgcctcttctttgatgtgtcaaacattatttttacaagaattatgaacttcaagtctgccaaacagatntgggattatctcatattagaatatcaacgctgtgaaagaaccaaaggcatgcaagtactcaacttgggcagagaatacgagatgcatagcatgatagagactaatacaatnaaaggctactctgaccggctgataagcatggcacatatagtgaggcttcttgtgaaagacttttctgatgaaagaatagtgcatataatcctggtcactatacccgaga

SEQ ID NO: 74409 - DNA, 349 bp, Glycine max
  unsure (1)..(349): unsure at all n locations
cgctcgaagatcctctagacgttataagtgcgccaatctttcagatatgactnttaagaagtttttgaagatctctcttgatgaaaactataacctgcatgcttttgagttcaaccattcccacttctgcaccatggggtttgttacctggtgggagaaatattattcgacccgttcatgtggagatactacgatcatgatcttcagacttgaaagtggttttacacaaccaacggtcgagaatatccgctcaaaccttcaagctcgaggtataaaaatacttctgactttctaaatgatatgattcttgccttcacaataatcttactttcacgcaatacaatcatga

SEQ ID NO: 74410 - DNA, 498 bp, Glycine max
  unsure (1)..(498): unsure at all n locations
agctgtggctagagctatcntatatgcctttatgtgatatccacttggaatcaaggggtacaacgcttggaggatggaaccgggtgaaccaaagtgtatcctctacagagatgtaatctctgatgaaaccagaatagctatgaagcacgctagcaattaaggcaacaacttagacattaatgaagttgaggtggagctaccaactcanagtggtcaagtcgaggaaacaaataatgatcaacaactctaaactgtagtttatgaatacaacttggctaaagacaaagttagaagatacattgtgccttctatgagatatgaacaagctaatctaatctacctcgctttgacaattgctgaagagaatcaagctactgaacctagatacttcagagaagcctgacaacaaggaaagtaagaatgatctcaccatggaagacatattattctctgagaaaacaaaactagatctagttatctacaacaaatagagaatgt

SEQ ID NO: 74411 - DNA, 84 bp, Glycine max
ccgcgtacaccagcgttaaggccaatactgcttaaaaataccccccgctgcctcatgagactgtgtattataacatttgcgcat

SEQ ID NO: 74412 - DNA, 96 bp, Glycine max
ttagacccgtccttcttttcgctatggagcgatacatcacggcgcgtcacacgtctgacgggaaaccctgcgttaccaactatcgcttgagacata

SEQ ID NO: 74413 - DNA, 212 bp, Glycine max
atgtaccatccatctcacctcccctttttgtgtttattttcacaaacgaacaatggtgcaatgataccttaaaaataaacggttctgctaaaatgcgggaggtattttccaacagaattacttttttttattggcggttacgagcattcgaacccatcctcaattgaccccgtttatcacattgttgcggtctgggcgacctcttatcaaat

SEQ ID NO: 74414 - DNA, 475 bp, Glycine max
  unsure (1)..(475): unsure at all n locations
gcttcttcaactgcacaaggctcttatatntaaagagtatccttgtggaaccttcacccgacgaagacactgacaaaaacttatcttctcctttttcgacaaagtatggcaggctggtggcaagtatattttcttcccattagaccttagatgcaactgtgatcgtatgcccatatcagttagatcttaacgggtattcaagccatccttcgtcttgccttgaaatttaaggagcatcccaatcacattgtcacatacattnttctccacatgcataacatcaatacaatgtctaacttctagatcagaccagtacggaagatcagagaatatggaccttttcttccatatgcaactcttactatatccttcttttgggtctttccaaatatagtattcaggtgttgaacctgccaatatacatgctcaccagtcaactgtatgggcgcaatatcgtgctcttgaacttcattaa

SEQ ID NO: 74415 - DNA, 264 bp, Glycine max
  unsure (1)..(264): unsure at all n locations
gagtggtacctggagatatgtcgcggnggtcaggagaaccttgggatgtcaggtggggtgctattgcccaaaaccaagcttgaccaatcccgacccaacccgggcatagtcaatcagtgagaacctatgatgtacctaaacaggcgagctccttgcagtcaaccgataaaagaacaaagaccacanagcanggaggcttgtgtggtggctggcagcaatgagtcttgagtgagaattgggatatggcctctggtaatcgattac

SEQ ID NO: 74416 - DNA, 450 bp, Glycine max
  unsure (1)..(450): unsure at all n locations
ccgtgatgcatgtntgtgccagatcattgacaatgtttcataatgcagaataatttattcttttgcagcattgtgaattttcaatcacacttggatttggataggttccaattaaggcaaaaattatgatatttgcttgatcaactaaaatgttctttgtaccatattttctgtgtatataatattaatttatgtatatctaaatnttaatatttctattatttattngtatngtatttntttaattatcatgtgatgtctngngtttaattgttanggttttttatcattctaatcacattggtgatgatgtaattaactgggatttattttctgacctgtataaatgaataaaatgacttggatgatcaatcaatcatattacctatatggatatatgttgatgaaagattgttcataatactgatgtgtgcaccatccatgaatata

SEQ ID NO: 74417 - DNA, 404 bp, Glycine max
  unsure (1)..(404): unsure at all n locations
gctctctcatagtcctcatgacatataaggtangttaactcactntatcctccatntaccacagaatctagatntaaccttccaactctcaaggcttcactctnttttccactcataacaccacattctcactntctaaccctaggttaactctacccttcatctctaatagtttttcaaaagcaatttcagcacatagacatcacaagcatcatcataagaaccctaaaactgaatgggtaagcttaactcatccaaacatggcaagttcaacatgctttcaacaaatttcttcacaaatagctatcatgaagcagagaactagcaaaactacccatcatatctcccaatacctcatacccacgataatcaagagagaaagaagtccacccaaacctgaaatt

SEQ ID NO: 74418 - DNA, 140 bp, Glycine max
  unsure (1)..(140): unsure at all n locations
tatattatgaattcaacgataatactntcgatgcattnntaattaattatttattaactctntntaattgaaagtaataatatagttcgattatatttaatatatacatgttntgtgccactgtaatattaacactctat

SEQ ID NO: 74419 - DNA, 415 bp, Glycine max
  unsure (1)..(415): unsure at all n locations
tctcccctattntgctatatataggggaagaagtaagaagaaaagggttcatacncttaggcacttctctctctttcgaatttgcttaggaaaattggttccgtgaagaatatcccagccgaggcgcttccgtaacgtttccgtgaagtaattacacgaagaatttcgaccgttcttcaagattcatcgttcgttcttcgttatcttcagtcttcaacgagtaagtacctcataccaagcttttcaattcattatatgtatccgtggtgggtccacatttgtttcatgtatttttattctcattntcatttactttttatacacccctttgacgtgcttaagccatttatttaagtcatttctcgcttaatctaaaaataaaataaatttccaccgatcgtttgaattggatcat

SEQ ID NO: 74420 - DNA, 434 bp, Glycine max
  unsure (1)..(434): unsure at all n locations
gtggtatcagagcacaagaagcttaagtatgtgctccttannaccgccaatttcagctntaccttctcctccattgttnntttcttcattttctccatgtatctcctcacatgtcttgtgctgaatgttgttaacatgaatttttagaatttccaccaattaaacttgctatagaagctgattngattntctatggttcanattccttgttcttgttcttgaaccatgaattgtgttgagtttaagttccttttgagtttgattgcactntttggctgnacctnaccataaattttacaaaacattaagtgaagaaatctaaaaactgagtgactgtcacctatgtagtttgcataaagcatgtcagcatgnacttgcacgtatgatgtactcatgtgacttgangcctgatctattataatgatcctttgtta

SEQ ID NO: 74421 - DNA, 404 bp, Glycine max
  unsure (1)..(404): unsure at all n locations
gaagattgtctgatgtccatggtggtgacaagtagaggggtgacaagtttgtcgagcccttgagtatggacaagcattgtccggtgtcgagagtggtaacctcaacaggtgtgagaattgtatgtctgtcaagcttgtcaagcccttgtgcttggcaagtgttgtctangctacatctatcaagttgtcccaggtggacatgcattcagttttccatgctatgtctaacatatcatgtgaggggaatctctatatttgacaaccctgcccttttctgaccatnggaggttgtattgaaaataaatattaccgtatgtctgttgcccctgtgtgcgcggcgcacgtgcaatactcttgcatatgtgtcactcatgcagtggacatgtattggagtcgagattcat

SEQ ID NO: 74422 - DNA, 356 bp, Glycine max
  unsure (1)..(356): unsure at all n locations
tcgaccggatcttaagcacctgcngctgcaagctgtattagtgatattccaatgtggtgccatactttanaagaactagaaaatcatccnctttgatataaacattgtggcggtagggactaccagcgacaatgtatcatcaaagagaaaaactctagatgaggtttcactgtcatcaagcaagtcgacgacttagcatgatcacagattcaccttcacttcctatgttcccatggacccaagtgtaaggcccttaatatactcacagtgtgtgcaaaagtgcaggtgtcgtgtatgcataanatgaacaaatatttatcaatgcatgtattaaataaacaactacacacaatata

SEQ ID NO: 74423 - DNA, 261 bp, Glycine max
  unsure (1)..(261): unsure at all n locations
gacttcctttccgttattggtggtaccacctgngccgccagatccctacacctattgtgcgtgttctttgaatgatccgacccactttctgcacatgttctgttagtgcctcctatccggaaccatatcataatgtgactgatactgcctatcaaaggcaaccataacgtctttccaagaaagaactctggaaggttccaattagtgaccacgtacaaccaccccattagaccttcttggaagaatgatcagcattcctat

SEQ ID NO: 74424 - DNA, 397 bp, Glycine max
  unsure (1)..(397): unsure at all n locations
agctntgagccaaaatcctgactcaccatatacctttgcccagggtgagaatgtcaatccttaccctcggaagcaaagaataaaggagagaatgataatntccaatcaaaggaaataaggagaggaaaggaaattcccaatcaaagagtgggagatagcacaaagaatagaaagataattcccaatctaagaatgggagatagaataagagaatgagaagaacgaaggaatgctcctgatcaaggatcgaaagaaaacataagatatgtgcagaggggatctctggaccatacaatatctaaacaaatacagaattgtcaccaaatgaacataagatagagaaggagaccataacctataagtggtcttcttcctgtgataccaaccagaatcctgt

SEQ ID NO: 74425 - DNA, 386 bp, Glycine max
  unsure (1)..(386): unsure at all n locations
cctgtggtgcattaatgcttgcattaaatgcacatctgttcgcaaccggcatgtgtaccggatcgcacaagtagtataatactgtaagaaccgagtatcgtattctcgaggaactcgtgttatctagaaagctatttcgataaataggcgtctggtatggaaatatgactgtggttatgaacaggtacttaaactatctatgcctgaagatagattatcacgcaagagatatactgtgtagaaacaagtagagaatgcatcggtctttctcataggttcctaatactaaaaaagatgttctctatataacaatgctcatgcgttcctatgttgtctcctagactgctagaccncgattcctcatgaatttctagcctagtcttgat

SEQ ID NO: 74426 - DNA, 437 bp, Glycine max
  unsure (1)..(437): unsure at all n locations
agctngtngagcaatatattgtgtaccttagttgctgctngcaatccaccaaatgcaaaagagaatgccctcaccaatgtgaaaagggaattcataatacanaagagacatagtatagcctgcaccgttaattatcatctcaaaacanataagagaactacattcaatagtagttgatagtctaggcaaaagattatgatattgttaattgttaatttactacaaatggtttataaacagtgagctaagaactttcaatactgcgtaatactgagattatctgaattactattagcttctgttaactactccattctccaacatgatatttacagggtgaaagtggtggatcaanttctgtcttttttctttcagtagattagaccttataanactaagttcttattagaaaacactcctagcattactcagagcta

SEQ ID NO: 74427 - DNA, 421 bp, Glycine max
  unsure (1)..(421): unsure at all n locations
gatgtacaagtgatgtgggaaatgctacagagaaccgaaggtgaagttatataataccaccataagcgcatgcatgttcccttctggaggatctntgtatggtccaaccatactcaatctgcatatcacgcttcaagttaaaaccagacacatgtttcaagtttacaaataaaaccgcttctgcagctggcaagccacactccttttatcttccattgccagcatcatgattcttctcttcatcttcttggcttctaaaacttagcacatgtcgtgttcaactcaaactctactaccctgtcacagtacagtagtagtatatatgtaaatataccaatagtttcacacccaagagcctttggggaatagctactggttctctaactgcaaagcangtagatttcatgtctcactgacattg

SEQ ID NO: 74428 - DNA, 217 bp, Glycine max
agtgaaaatgataatggagcacataggccactagctatgctttcatagcataatcgtaacatataaacacaacgggattcgaaaggttgttatctcgattatgtaatcgatattaagaataagaggtgtacataggcggaagtttcatattaaataacgcagggcaaagggtcaatttagaatggaaaaggttaatgaagcatgtgttagtggagga

SEQ ID NO: 74429 - DNA, 391 bp, Glycine max
  unsure (1)..(391): unsure at all n locations
cacctgtcagtcatgtgagggcgaccatgatcaacacaaccgaatatactactacctaatactataatntatagcgctctcttgaacaaagaatgggtgcatttgaataataatgattacaaaagtatctcataaagaagattactgcttctccatagatcgtatttagtgaactacatgtaaagtatgccttgaacaaaaggggctaggccagattctatcataggaaattgacgatgatctcaatctcaatgctcataggatgttcacaatgtacttataaaatattcaccttgatcaactatggccaaatgaatgtttagctaaagataacaaccagtatggactctatggatctctatgaggtacaagtagaatactatgtcttata

SEQ ID NO: 74430 - DNA, 425 bp, Glycine max
ctgatctgaatcagatctcgaatcaatattcctcatgaaccttgaaatgttcttgattcaatcttgaacatctagaactcattctttgattcttgagatcatcatctttgttatcatgaagtgttcttgacctttgagcttttcgtcatcacctttgttatcattcacacttctttgaatcatattcgattcatcacgaagcttgcttctacacatagtgaatttcatttttatttgtaggctgattttagccatcaccagtgcctgaaatcatttctttccttgtgaactcaaattattgaccatatgctaaggaaatcattccaacattctctttatcaaatcactgaatatttcaggccacgcctacattcttccggttcaatcttaatgtattcaagatccgcttatgctcttgtccaata

SEQ ID NO: 74431 - DNA, 159 bp, Glycine max
cctggagatatgtcgcgagggtcatgagaccttggtgacgtcatgtggtgtgctattgcccaaaaccaagcttgaccaatcccgacccaacccgggcatagtcggtcagtgagaacctgtgatgtacctaaacaggcgagctcctggcagtcaacagat

SEQ ID NO: 74432 - DNA, 404 bp, Glycine max
  unsure (1)..(404): unsure at all n locations
acttgttgtgattgatccgagcaagattggatgaggtgaagtgtgattttcgaaatctgcacttatgcataattttgctgcaaaataggtgcaacaggattttatcttggtgcataacattgctgtgtgtggttggctgtggaatgagtagtacaaaatgattcttgatgtttgctagtagatcaccacggtcacattgtangcttatgcactatagactttcacgaaaagtttggagtctattcaaccgttaacgaattggatcgagggaatagttactgtggtctctaagtgagaaaagctgtgattttggttgatgtgatgagcagagatttctgcctatgctctgtgatgcatggctgcgatagcatgtgctgattgaatgtacgtttggatggatgttg

SEQ ID NO: 74433 - DNA, 222 bp, Glycine max
gtgggagtgtgtgagctcaacttgaaggtgggcaactagggatggtgtgcttatgcctgactggtggaaatgggatagttgatttgtgccatcacccgatcgccacctagtaccacatatgacgggtgccccataatccaataagcttgatgcgagaaagcgtggaagagtcagtctttcttactttgtttgttaccacagagtggtacctggagatatgtc

SEQ ID NO: 74434 - DNA, 412 bp, Glycine max
  unsure (1)..(412): unsure at all n locations
agcttatagttcagatccgaagaccatcttttgaatgctgactatctgcctagagatatgagtttttatttctcagcttattaagttcattattaacaaggatgcattctttntaaagcaagaatttttgttaagcatttccttgtgtccttattctgaatcatcaagagttgtgattaacgattttccctttctctcaagtcttgagaaaccttaagaagagttcttatccactagataccttttctccaataatgtttgacttcacacaacagaggatctatacactctaggtaggtggttctatacaaatcaactagtgacttgaaagcttctgaaacattattaatttctataatcttaaaagcgagcnagatgatagagtgatggatcttaataactcacttagatc

SEQ ID NO: 74435 - DNA, 349 bp, Glycine max
  unsure (1)..(349): unsure at all n locations
gcatgtgaattatgaagcatcaacaagaatcaagccaaggctattgtgcaagcaatcaatggggcaaaacacaccaaatgattatgatgatggatgactcaaattctcacataggtaaactcatcactttcaaattgatctttcaaaactatcacgacatgtagaggagaatcaagggattcaagtcacaaaatgtcaagaacttttattttcanaacaattacccatttcttgaacatatcctataattcanagaataacatgcaaagtcatacatgcacatcaaattgacccanaatattaaactaanaatccaacgaaactaacaacattaacaaattaacacaac

SEQ ID NO: 74436 - DNA, 461 bp, Glycine max
  unsure (1)..(461): unsure at all n locations
tggctacctgaataattcctgatgcctttttagcctngtatccctttccttggttngaagctcactacaagccttaagtganaaaccatgatatcaccatatccttaaggaattttggagctttggaattgttttgggaataagtgtggggggtttttgtttcattggataacatattttgttggctatgcttcatgatgtatattgggccacacttgatgtacattgtatattggttaaatgttggacatgctgaatgagatgctgtttctcaaaggctacaaagcaaaacataaaacataaaatataaaaaaatatatcgaacaagaaaaagataagcaatatagttgagtgaataagatcttaaatgacaaaagaatgatgagactcttggctctactctctatgtttaattntatctttggttcttttaattctatctcacttttcttattatgcac

SEQ ID NO: 74437 - DNA, 150 bp, Glycine max
  unsure (1)..(150): unsure at all n locations
acctctatggtagacaaagaaggacgtgaagtaggtgcagtcatggttggaaaggtcatatgaagatngtgggtgaggccgaatngacgagcaacaaattaagagttgtataaagagaagtaggtttgacttcacggagcagatctatag

SEQ ID NO: 74438 - DNA, 445 bp, Glycine max
  unsure (1)..(445): unsure at all n locations
taaagaactgaaactcagctgggcangttggagatgaaatgactaatgttgtggacaaaagagaagaagagtatgcaaagattgaagcacatcaagaaagtattcttcatgttaccacaatccatcatcaattgattaacgaagaagaaaaggatgaagcctccagtactccagataatccttgcatggcaactactggctatgttgtaggtacagataaagggtgattggaactcagtgtggaggatcaganaatctcttttgacctctttgaagccatgaaacactcagatatgggtaatgcctgttttcaagaagaagaggtggagcaggaaataacatcatcagcttcaaccatgatattacattttcctttggaaaaagaacctggttatgtggtagactgcttagtttgcgatgaagagcctgatgatccaaaaaacaa

SEQ ID NO: 74439 - DNA, 217 bp, Glycine max
  unsure (1)..(217): unsure at all n locations
ctgcagcttgtnngcctgatcttcttatcaatggagttctttgcttctngaagatcaatgacagnggaatgcagaaggaggaaaggtgattggagatgccacttcaatgagaagagagtctagaacaagttcaccaccataggaggccatggataagagctcgattgttggagaatatgagtggagggagagggatagaatgggcacgaaatttatg

SEQ ID NO: 74440 - DNA, 240 bp, Glycine max
ctaagctctagccaatggacttaccttgaattaattccttgatagcccttttgttctctcgtttacctttccttgttgtgaagctcactacaagccttaagtgaaaaaccatgatatcaccatatccttaaggaagtttggagctgtggaagttgtttgggaataaacgtggggggtttttgtttcattggacaaccttgttgttggctatgcttcatgatgtattttgggccatacttg

SEQ ID NO: 74441 - DNA, 459 bp, Glycine max
  unsure (1)..(459): unsure at all n locations
gctctccctcattgaacaaatactccttattcaatataatncatcttgngcctatttcccacaactctcatatatgggagagaaacgctcatctacagcatacaagtccctaatattatcatatcctacaatctgagctcctatggagcaaaacaatgtgtgtctcctagagagggcatcanctaccacacttaggtttcccttcttgtatctgataacatatggaaattgctctacgtactctacccatattgcttgcctcttgttaacttgctgtgcctctatgtacttaagtgattgacatcactatgaatgacaatacctggaacaacgaatgtcccatgttgatggcttataatgcataactcttatattgtgggtagtgggtggactataatgtcacaaataacattgttgcacttgtacatacattcactccactcatagctcatatctact

SEQ ID NO: 74442 - DNA, 471 bp, Glycine max
  unsure (1)..(471): unsure at all n locations
cttggtgatgatactgccgttctactgctaattatgattaatctctggtcagnatcatcaagacaatcaagatctctggcagaggacgcctnttttcatccttcaattatgtccataagctattattcatttgagcactgctttgccatctatacggtttggccatgaactcttctctataccttatatgttatataggacggcttctttggattgatacacttgacctatagatgattactccatattcatggtcatctatacattttggcatgctttattaggaatgcggattatgcatctgacatgattcttgtttaatttgacaagatttcatcatacatgtaagaagtaaatattaagagaatggaagaaccatggtttccatgaatagattcatttatggaagctgaattgatgttctcttagcctttattgaaagtgcttactctgtcttatgtaacaatatta

SEQ ID NO: 74443 - DNA, 359 bp, Glycine max
  unsure (1)..(359): unsure at all n locations
agctngcctgtccgatgcagcagtaatgatggcccgtagttatgttgggaacggntacgaacccggaatgggtttaggcaaagacaacggcgacataactagcctgataaatgccaaaggaaatcgtgggaagtatggtttatgctataagcccactcaggcggatatgaagagaagcatcgcgggaaggaagagcggtggtcaaagctcgcgttggagacaagatagtggaggaagcccgccctgccacataagcagaagctntataagcacgggtctcggagacgaaggtcaagtggtcgcgatatacgaagatgatgttccgagtacattagaattggacgactatgccctcctga

SEQ ID NO: 74444 - DNA, 469 bp, Glycine max
  unsure (1)..(469): unsure at all n locations
ctcgcttgtgcagcaaggttacttctgattgaagcaagcagctcacctgggcgagctgctatgcaacctccacccctcagtgatctcatgtattcttctacgaatagcacataaattatagttntgctgtatagctagtgatattntgtctctttagagtaatgcgtcactttttaatgcatacgttggggcgccgcaatgcctagaacgtagtattaaaaagatggatctttntcggtctcgcatatgtaaattaccacttgtttttcttttcgtttcatgcatgcgcattgcatcattcatatcggagcctttgattcacccctttttaggtaaatgatggngacaaatcanaacggaacaagactctatcaagtcaagaataagggcctagatgtaccagccttaaggagttatggacggtgatgggaccccttcaaggcaagccttcgcaagtgacggaatattt

SEQ ID NO: 74445 - DNA, 345 bp, Glycine max
gcttctagagaaagctacatgaagctgcctcggtaaaaacactgcccagccttcattaaccgttggatcttctctaaatatggtctacaactctgcaaaacaatattccaagatctgaccgttgggatctttgagaagatgtctggagtgtgctagaagcctcttaatgaagcttctggaggaagcctcttaatgaagcttctatagaaaactacctgtagctgcctcggtagatacgctacccagctcttgttaaccgctggatcttctcgaaatctggtttgcaacttacaagacactctaccatgatttaaccgttgggatctttgagaaaatatctggagt

SEQ ID NO: 74446 - DNA, 405 bp, Glycine max
  unsure (1)..(405): unsure at all n locations
tttcgaccatctcgattttaccggactcattcgtacatccatgtataaagntattgtcaattcaatatactcagggcttcggatcttaattttgagcgtctcgatatattacaggactcattcagacatccgagtaaagagttattgtcgnttgaatttgatacgagctaccgcttacaatctggagcatctatcgataaattatgacactctgtcgggcatccgagtgaaaagtaatggtcgtttgaatcttctaagaagttcctgtttcaatttggagcgtctcgctatattacgggacttaaacgaacattcgtgtataaaggtattgacatttaaatttgctaaaagcttctattctaactattgagcctctcgatatattacacgattaatcggacattc

SEQ ID NO: 74447 - DNA, 180 bp, Glycine max
gaccggatcttaagcgactgagctgcagctttaagaactcctactataatgagctgttacctgtgaacttgagatgaagcttggagaacaactaagtcaactctttcttttcttcttaatttctgctccccattttttctttcatcttcttttctccattgaagcattctctcaagcttc

SEQ ID NO: 74448 - DNA, 493 bp, Glycine max
  unsure (1)..(493): unsure at all n locations
tcaggctgctcaattgctccaggttgctgatggaagggcaatggtctgtattgtggtcatcagaggagcacaaaccacaaacccttgcgacaagtacagatttctgattcacggccagctgggttaccaagttgaccaacgcatccagtttgccttcaagcttcttagtctcagatgatgcagatgggtttgtagctacctcatgcactcctctaatgactatggcatcatttctggcgctaaactgctgggagttggaggccatcttctcaattaaatttctggcttcagcaggagtcatgtctccaagggctccaccactggcagcatctatcatacttgtctncatattactgagtccttcataaaaatattggagaagaagttgttctgatatctgatggtggnggcgactggcacatattttcttacatctctcacagtactcatacaggctctcttcactgagttgttaatacctgaatattcttct

SEQ ID NO: 74449 - DNA, 301 bp, Glycine max
  unsure (1)..(301): unsure at all n locations
tgctcggcaaatactatctaagtgctactaacatattntataatatgggaagcaattcacaagaagataattcgatgtatatatattgttaagttttaatatatgtattacttactaccagtatctntttgtttaagaagaacaatacattagatatccacacgccatgtacatcttgtcacaataagatatttcatgggtatcattcaacttcatctattcatcgtgtggtagattataagtgattggatgtagttcgacgcaaccacattaagattccattataattaatttcgggacc

SEQ ID NO: 74450 - DNA, 277 bp, Glycine max
cttgcttacagcaccgtctatatcttctgaagtcgaagcccgcggcgatgggatatatatacaacatatttactacaagcttgcgagctgatgctctctgaaaataacacttcagatttgctttcattcttatgtgaccaaagcacagctccaaatctggcaactatagatgtatcacgcaatctaattaggtgctactgccaaattgttggagatcaggaaagctactactgttccttgatttatagcagcataaattgtctgggaagatacctat

SEQ ID NO: 74451 - DNA, 524 bp, Glycine max
  unsure (1)..(524): unsure at all n locations
agcttgtatgggaagtggtccttaacgtggtattgataacttaagcaattggtggtggagctgcagtggagcaacaaagattaaacttctgaccacttggtgacaaaggctctctagccaagttaagaaccaactctcctttaaattcaagctattangtgcagttgaatggttctatatttttaaaaaaagttgtactntattcgcagtngaatgacttccatgtaagcttgtacccctgaatattacannaaaattgaatactaagagagatgatctaataggtgtcattatntaacattatatagttattcaataatgactntgaatttcatatatgcttcattctttcctaatatgtnggaggtcattctcttgacttctgagaattgtatcttttttgtctacactccatgattttaagaatgcttaatgtcttgacactctttgtggtcaacacangagaccatctcacagtatgtaagagacatatacatcatatatattgtaatgctgagcatcta

SEQ ID NO: 74452 - DNA, 451 bp, Glycine max
  unsure (1)..(451): unsure at all n locations
ttgcactacacttggcagtaacagtgacaaagatgatcataagtacgtttacaacttggacatcaaatttacttgagaatttatagtttctgatacttggtttacttggacataacagtggggagcaattgatggaagatgaatctcatattgctctaaggagaaggaagaaacttgttcttgatggtgatttggaaagacaaatcanagatctccatgagaagtaggtttgagcagatcaaactnttgtctgaactttggagcatgatttaaattagagccttgtcaaaaagaaattcagtctttcttgttttttacatcattggtacaaacattcttaaaaggagtgagcaagatagatcaattcatagcttttcaatattgtgttggaattcatttattgtactggatttcaatcatagctgttcttgactaattaacctgagttata

SEQ ID NO: 74453 - DNA, 414 bp, Glycine max
  unsure (1)..(414): unsure at all n locations
ggatccttaagcacctgggctgcagcttaatgaacttctcatttatattgtggatgtatgttgaaactagatttataatgatagcatcaatggtgaagctaaaagcattcgagagatatgtattcgtcatgatggtatgacatcttacatgattttacaaccatgattagacaaagttacttagcgatgcaagaaataatttacactcaacattgatggttgttttctactcttgattaaaggactaattttctaagacttgttctactacatcataattaagaagttttatttagaactctccctttctcctgtttctatagtattaagcctatcatctaanactattacaaaatgggtttctctcactttataccgngaataattatgctcagattcttagttcanatatat

SEQ ID NO: 74454 - DNA, 386 bp, Glycine max
  unsure (1)..(386): unsure at all n locations
ctcagcttctaaggaagttntctcaagagaattctcagggaagctacctagtctataaatagaagcatgtgtaacacttgttgtaactttgatgaatgagagttntatgagacaaacttcagagttcaacttctcttcctcttttcttccttcaatttcgtgctcccccctctctttttcttttcctccattagagcatcctcttcaagcttcttatccaaggcacattcttgtgggtgaagctccttcttncatggcttattccctaggggatgggacctcccctcttctcttctcctttgccttccgttgcatctccatggtgaaaaatcaccgttgaaggacctcattgaaactcaaagatccatcctccatagaagctccac

SEQ ID NO: 74455 - DNA, 289 bp, Glycine max
  unsure (1)..(289): unsure at all n locations
gtcttctaccctaatgttcataaccaaanataaagtgtagagttaagaaaacttacttggattgtagagaaaatgagcaagaggaaaacacgagatgcatatggcacaagtgaaagcacaatgcagatgcgagtgcacagtgagtgaagaatgtgtatgtaaatgcacaaaagtaatttcttaaggcagttaaaccttatttttgatagtttcgactgcctcgcttagcgcgggtgactcgctaagctagcactcaatgacttttgaatnttcagaattcaaactcatg

SEQ ID NO: 74456 - DNA, 408 bp, Glycine max
ttctgacccatgaaccttaatgagcataccttgaattgcattatagcgtcttctgaagttgatagagttatggaacaaggccgtgttattatcaccttccctgagccatttgattctagatatttgtctcaagattgattcatgagccaaagatatctcccacaattcctgctgtatagacttcatggtctgcatttcatcattccccaagggtctgtcctgtgctgaaatatcaatttgatgtagctgctgcttcaattgttgcattttatgtctagtaatatccccaaactcgagactctcattttttatgctggatgttaagaccttcaatttatttttcaacacaatactcccccatccaggttgctgatcaccacaccacactatcttgaccagagcttggta

SEQ ID NO: 74457 - DNA, 474 bp, Glycine max
  unsure (1)..(474): unsure at all n locations
atctctgagtcacctgcggctgcagctgaactagagaaagcttanatgtttgcctttacatgcccaactcccttgagtggcatttgtattggttgttatattgaatgttgcatcttaatccatatcatatcttttgtgcatcatgcatcattatgagtaagtgagacactactagaaaaaatgttnttaacattagttatnttagacattcaacatcgattttgaatcgatgttgaaacaaccgatgttaaaagtatcaacattaacattggttataaaaaccgatgtaaaataactcacaacattgtatttttctaaaaaatgatattatcgacaaaaagcatcggttttactaaaaccgatatgagttggtatctataaacttttaattggtctaaaaaaccgtgttgaagcattacatgtgatctacatactnttacatcataaaaaacgatgtgaaagcattacacatca

SEQ ID NO: 74458 - DNA, 364 bp, Glycine max
  unsure (1)..(364): unsure at all n locations
gtatactgaaagcatctatatattcanttttcttcacattctcaaatgcattcttatacaaatgccaaccacacaaatgatatattgcttttggaaacatttcttttatgacctccctcaaagctccatcaccattagtcacaagtgatntaggttacttgttgttcattggtttaaaaaaaaatgtttgtaatacccatttatacgtcttagtggtctcattagccaaaataaccaccaatgatagtgatctaggaataatgattgcatccaaaacaaatgacaagtggattattggatctagtcttcttgtaagtggtgtcaaaggcaagtgcatgactgaagcattcataatccactttac

SEQ ID NO: 74459 - DNA, 277 bp, Glycine max
  unsure (1)..(277): unsure at all n locations
tgaagtctatgatatcattagaaacatcaatattaaaataatcaatgaatctagaggctagcacaacatatggaaactcataatccactaatcgatgactcttcaacatgatgtctntaatcagaagtacccaattcatttgaatacctaattgtagaccatacacaatntgtanatcatcgttagtcacctggtgcatggtgctagacctcagtgtgacaatgtaggttatgaggtacacgatcattctatctttagcagttaaaccacttacacc

SEQ ID NO: 74460 - DNA, 379 bp, Glycine max
  unsure (1)..(379): unsure at all n locations
atagtagatactggtaatgtgtctactatcattgacatcgntttttttcatcattgaggtgccacttgagctgccaggttctccacccttgggcgtattctttgaaagatctgtgcccccctttctgcacatatttngtagttgcatcctatccgaagccattatatcgacactgcctaatgaaggcaaccattatgtcctcccacgaatggactcgggaaggttccatgttagtgtaccaggtaacaactaccccagtaagactatcttggaaggaatgtatcaacaattcctcatcttttgcgtatgcccccatcttccgacaatacatctttagatggttcttggngcaagtagtccccttgtactcgtcaagtct

SEQ ID NO: 74461 - DNA, 372 bp, Glycine max
  unsure (1)..(372): unsure at all n locations
taagtcacctgcggcatgcaagctnggcctccaagtnggcttcttgcactaagcaaattgtagactctcagagcgcagttcttcaaccctcttccaagcctcctgttgtataatnttacaaaananatacaacanaaaacactataaattaactaattttaacatctactggataaaaactcagaagaagctaaattcttaatgttttaacacgaaagaacaataaataaagagaaaaattacataattattatgtgatntacatattcanatgactaatgcataacaattatcagtaacagttatatagactagaataaacaaataaacaaacataaaataacagaggatatcatacacataataccaatg

SEQ ID NO: 74462 - DNA, 351 bp, Glycine max
  unsure (1)..(351): unsure at all n locations
acacttactctaaaagcatagttgtagtgaaagttgatataaaattttcaactcaatgcatgagttatatattttcattntagtccaagttggatgtgcatatgacgtgttctaatgttgttgcaaacatggcaattatatgacactntcactntaatcttccatggcaagttgcacccttcccatcctgttagctaggctatgatctattctggtggaatatggngaagttgtgctatgtaatatagattgtttacaaactcttccctcttgatcaacttttctgttttctttccgattctctatgcagagaattagtgttggatatgttttggtttgtctatgggttta

SEQ ID NO: 74463 - DNA, 509 bp, Glycine max
  unsure (1)..(509): unsure at all n locations
agcttaagagttntcaatgtctctaaacgttttcatatggaaacacaactaagaataactgcaagctaactagaaatatgataaaacaataatgtttttcttaagctttcattctgctattgaagataaaaaatttatatatggaatgattaaataatgaatacaaactcagcanaatcatgttcggctgcaaaaagttaaaacaaaaagaagttcaatccacatgtgttgaagtaaaggaactacatcagattcatagaatatgttcagaaattcaagtgttgtttgtgatatttctgcacacaggtataaagcaacanagagtngtaaanttcatgcttcaatattgattagatacacaatagtatacagccagtagagcttatgttgactattctacaatacgattcaagaaatggatggagaaaacatacatggacaaatacacatccaatgaaggaatgaaaaagtgaagacaangagtacgaggagaacaactcatgttgacc

SEQ ID NO: 74464 - DNA, 469 bp, Glycine max
  unsure (1)..(469): unsure at all n locations
tactccgcttaacatcagaccacttccagggtgctggactacttcacatggatatgatggngcctatgcaggttgaaagccttggaggaaagaggtatgcctatgttgctgtggatgatttctccagaattacctgngtcacctttatcagagagaaatcagaaacctttgaagtattcaaagagttgagtctaagacttcaaagagaaaaagactgtgtcatcaagagaatcatgagtgaccatggcagagatattgaaaacagcagattcactgaactctgcacatctgaaggcatcactcatgagttctctgcagccattacaccacaacagaatgggatagttgagaggaanaacaggaccttgcaagaggctgctcgggtcatgcttcatgccanagaacttccctataatctctgggctgaagccatgaacacagcaggctacattcacaacagagtcacact

SEQ ID NO: 74465 - DNA, 296 bp, Glycine max
  unsure (1)..(296): unsure at all n locations
gccggatccttaagcacctgcggctgcagcnntgtgaaatgccatgttgatgagtaaacatacccannttctgtttagggttttgtgatgatgtttgtgatgtttctatgctgaaatngcttatggaaactgttagagatgaagggtagagttaacctatggttagaaagtgagaatgtggtgttgtgagtggaaaaagagtgaggctttgagaagtggaaggttaaatctggattctgtggtaaatggaggttaaagtgagttaatcttagcttgaaatgccatttagaacatgt

SEQ ID NO: 74466 - DNA, 377 bp, Glycine max
  unsure (1)..(377): unsure at all n locations
gatcatatgtcatngaggatttcaccgagcacttgtttggcgcacgtatagacataaatngcaagagaatgggagcaatgtggcatcccccattgcttcagaatacaacctatgcctaaggccttttcatccaaatcctcaattcaagaaaacaagcaccaaagcaaaccaaaattgcctcacaaatataagcatgttctcacaatttaaggcaccaaaagatgaagaaagcacatcaatgggaagcaaaaacatcaaggatggaatacttaacttgtggagtgaatngaaacaccaaaaatgaaagcaaaaggcaaccaaaagtggcttgagggggcaagaaccgcaagccttcgtgttctttctttcttgaatga

SEQ ID NO: 74467 - DNA, 428 bp, Glycine max
  unsure (1)..(428): unsure at all n locations
agcttaaagaataaataagaataatgatataatatcttatcttatattctgataatatattctatcaaatacaaactgattagttaggctaaaaatactgatataatatcttatcatatattctataactcgtaaattaccccacaaaaattatntacttcgaaatcttctagctgaaatttcttggacaaatttccaaattcaattgtaagcattattatcacagtttcagataaaacataaataacattacctctctactcttataatccatacaaaaattatcatattaaggctatgcaacttcttctgaattctttttaaccacttgatcaagcataattaagatatccaatatccaatgtcaatggattaaaacatgtagaatggtagtataattctacatgtctttatccattgatattaaa

SEQ ID NO: 74468 - DNA, 386 bp, Glycine max
  unsure (1)..(386): unsure at all n locations
tctacttttattataccactagtattatgtatcataaaatatgtactctttggggaacacatgtatagattaataacgaaataaaataataaacattcaaattaaaggaaagattaccaactctgtattctaatgactaagacatgcaacaagatggggcaaaaagtggaggcatttccatgactaagacatccattataataggagccaatgttacatcccatgacactaanataatggggagataatactttagtatgatacaaaaatattgttataattcccaaantagatagatcaagttaaaactatggagtatagacgatggatcctttgctagacttatttaagagggtatataagagactatgctacgagtacatact

SEQ ID NO: 74469 - DNA, 385 bp, Glycine max
  unsure (1)..(385): unsure at all n locations
agctngccacccagctcgcccaggcgagcaggttgcttcctctataagcaacagccttctggggggatcttctggagggcccaagtgagcctgtgtgctatttgcacccctattnttactaaatacacccnctgccttnttttggtgagttcttttttcgtanagttacggaaacttacgaatttcgtaacgatacttgttttctttccgtaatgttacggaaccttgtggattacataatcatccccttctttgacttacggaatgttacggaacctcactatntgtgcaacgatgctntcttttgatttccggtgtgtcatggaaccttacggatggtgcaccaatattntcttttgattttcggcacgtcacggaatttcac

SEQ ID NO: 74470 - DNA, 313 bp, Glycine max
  unsure (1)..(313): unsure at all n locations
ctttatactaagctgctctaattacatgatgttcgattatgggaggaggttatattgccattttgctttaagagtaacgtcccactggtaaaactaacttttcaaatgtttgccttcgcaggaatggccccgatgaagctggcctcatagaggtccangaaggacaatgcggccgaatgaactatttcccgcccggagtacgacagtcaccgctatatgagcgttgacaccagcagcgcttcgagccatcaagggatggtcgtttctaccggagcgacgcgtccagcttanggacgacgagtatacctgattt

SEQ ID NO: 74471 - DNA, 270 bp, Glycine max
  unsure (1)..(270): unsure at all n locations
aaatataagttcacatagcanatatatctagagaactaattatgttacatcttttatggtcttaaataatattgatgatatgggatgaagttggagaagataagctcacaaataaggccacctctgagcgtgtagggttgctagcataggatctccatggtgaaatacaacaattaatcactgcgggagttgatgattatatgacttgatatgttgggaagagagagaatacattgaagactctaatgatgtcaatcctaaggtatatat

SEQ ID NO: 74472 - DNA, 346 bp, Glycine max
actagctccgcgtccgctattgttccaacccatgcttctttcgtgccgagtctggacagcttctcgggaagaatacggcttctgttcggtcccgctgatgcgactccgcgtcgacatggcgcggaccttgctccggccggttcgaaagttcgaatcggactgccacgaccggccgaaccggtcggagtcgttggagaataccggcccccactgcttggagcccgcggagagtctaccatagttgactaagacgctgtcgttattaccgattgcggcggcgtcataagaggctggatcggcggcaaagagctcaatcgaggagactaccggaggatcagtggcgaag

SEQ ID NO: 74473 - DNA, 442 bp, Glycine max
tatggatacatcaagtatgccccatccaataaacgtaacaggtgtgaatgaagcccaatgagaaaccataagatagtataacgtgtatatgaagcccaaacagaaaccaggataagtcaataattctaattgactatgcatatagtccgcatgatgaatatcatgcttaattaacaagaaagagaaagaaagttaggaatatggacaataacactattaaaaaaggaagatcattcgctccccataagtatcaactccaatacttgttttacgcccgcttctacacacaaattcgatcatatttaataattaatacactactactattcatatatgattacactacacattctcattaattagcaatatacaactatattcttgaatatattatgttataatgcatgtagccctatccatattattgacgagcccgtaaatg

SEQ ID NO: 74474 - DNA, 495 bp, Glycine max
  unsure (1)..(495): unsure at all n locations
tactaagctcggagttacacaggtgatagaggacactagtgaggatcaaacctattcggattaatagtatatctgatatccagtttaacttgctctacatgaactttgagatcaaatccaatgagtcactgcgaactaaacataaaaagaatggtgaagatgctcttgcaaacttcattttaccaccaatgctgatttgctatagatatccagacatgcatgcgctaagactnttatataaaagtcacaccagagggacatattatcattagatgatgatctagattagtagatttgtaggaggattcaatactattcttaaaaccatattatctatgtttaggtgttaaaaatactttaaccttaagtatatatatatatatatgataggtggtggtatatatatatatatatatatatatatatatatatatatatatatatatatagcggcgagagagagagagagagagagatagacagagagagatagag

SEQ ID NO: 74475 - DNA, 383 bp, Glycine max
  unsure (1)..(383): unsure at all n locations
gatccttgagtcacctgcggcatgcaagctntttatgatctttatccttgaacagggcttctcatccctggagtagttaacaagctctgacatttattttctgctagacatgtcctcattgaagtagagcttgaagcctttcttcttcctttcatcatagttgggaagtcttgtgcagactctgtaaggcaccatctagatgttagtgtatctagttggatcgagtggcctctgaataattaagaatgggggggtgaattaattattcctacacctttactaattaanannattactcttctaaggcttttactaaatcggtaagagaatgaggagtataagagatacttaacaganagtaaaagcggaattaaatgcacagc

SEQ ID NO: 74476 - DNA, 360 bp, Glycine max
tcatcctcagatccctcttgtgactaggcttaatttagactgccctcgtaggtttagactaacttaaactaagcttcgtccgcagatccctcatttaagactaggctcagcttacatagcttacgaaagtttagactaatttaacctaagctgtgtccgtagatccctcatttacgactaggcttagatcaaacaacattattgtgacaacatatttgaaaccaatacttaatacacagatccctcatttaagactaagtttcaatcctgcttcaatcaagttctaaggcaacagtacatttcccgatgctaaagtcacctaactatgcacacaaatgggtgatcagacaaagagcatac

SEQ ID NO: 74477 - DNA, 221 bp, Glycine max
aactttgaagtatgtctcacaagactctcattcatcaatgttactacaagtgttacacatgcttctatgtatagactatgtagcttccttgagaagctttcttgagaaacctccttgagagcttctttgagatactatcttgagaactatacttactaccacacgccttcatactaactcacttctggaagctcctttaagatcctaagaagctgagttac

SEQ ID NO: 74478 - DNA, 489 bp, Glycine max
  unsure (1)..(489): unsure at all n locations
tactaagcttctttagcctggttaaaatgtgcgtcaaagaaagaagaaattcaaccaatcatagattggagaanagaaaaaagataaaaattgtaaggaaagaaagaataacatacagagaggttctttgtaccagataatgtctaaacaatgtgcaaaattgtcaaaagcgaataaagaaagagatggtagtattaacttggttaaaacctgagggatgcgtgaagtaatcacctacttagttacaagccaactctttgtgtccactcttgctccgcatcaaaccagagagaaaaaagaaacagaaaatgaaaaggccaaaacacccaaaagccaaatttcccaccaaaattcaacttcctaaaagtcctattgatccatgatggcgcatattatctttgatttgacgggaaatgacttacaaagtcaaatcatgacatgtntgtagtttggagttacgatgaaatactcgcctgtgtgagattcata

SEQ ID NO: 74479 - DNA, 193 bp, Glycine max
atgcatacttgttatcttgtgacagggacaggatcgttttaagcaatagtcaaatactgagcctaattcaatatagagactgaattaggtaatcggtaacacggccacgaattgctacgcactgtcatatcctactttcaagtacttgggaatgggcacgagtggaggctaagcccatgatcaacagatcgtc

SEQ ID NO: 74480 - DNA, 322 bp, Glycine max
  unsure (1)..(322): unsure at all n locations
taagcttcctgagagcagtgtacacccttccattagtaagctcaccctatgctataatacatgaacgaagaaagctttcttgagaagtttccttgtgaagctctcttgaggagcaagtgttacacctcctcattagctatgctcaccaccatgccatattacctgatggaagaaaacctccgttggcatcangtgttacacctctctcatagntaagctccaccacatatgaacacacactccttcaatagctaggctcactcccgcccccaatagtcatgaaaatactgattaggtcttacttccaagactactcaaaatg

SEQ ID NO: 74481 - DNA, 432 bp, Glycine max
  unsure (1)..(432): unsure at all n locations
ctttntctcatatgtctgattgcgtcccgtaatatatcgagacgctcgatattgaatgttgaagctctgagccaatacacacgacaatagactcttactcggatgattgattgagtcccgtaatatatcaagacgctcaaaattgaatgatgaagctatgagccaattctaatgacaataactctttactcggatgtgtgattgagttccgattatatcgagacgctcgaaattgaatgttgacctttgatccaatcaaacgagataacgtttactcgatgtctgttggtcccgaaatatcgaacctcgaagtaatgtgagcttagcaattcacgacatactttacttgatgctgatgagccggattttaaacctcgaatgatgtgaccatgaccatcaacacatactttatcggagctgatgagccgatta

SEQ ID NO: 74482 - DNA, 335 bp, Glycine max
taacattcaatttcgagcgctagatatatgactggactcaatcatacatccgagtaaaatgttactgtcgtttaaatatgcttagctctccagctttaaatttcgagcgtctcgatatatgacgggactatatcagacatccgagtataaagatattgtcatttgaatttgcttagagattcaacattcatcttcgagtgtctcgatatattactggactcaattatacattcgagtaaaaagttattgtcgtttgaatttctcaaagcacaacaattaatttcgagcgtctcgatatattacgggactcaatcatgcatgcgagtaaaaagtta

SEQ ID NO: 74483 - DNA, 353 bp, Glycine max
  unsure (1)..(353): unsure at all n locations
atggatgttcttctttttcttgtagtcttccttacatagcttcatgtgaattttggtgccgctattgatctttacagaaaaccagataatgctaagccagttacaagttcttgccgctgaatacatttcttggggaccaggtacattacccagtctgatgccaatttacttgtctatatctgggtgcattgcgtcctacccataaagtaataatgaataactgcttgatggcagcctgcacacttctattctangatgctattgaggtaaaataaagttgaactaaagaagagaatggagtgtgtatgatttacttattataggaggtcgtttgctaataagatttatctact

SEQ ID NO: 74484 - DNA, 454 bp, Glycine max
  unsure (1)..(454): unsure at all n locations
tgtggcatctaaagggaatatgctaagattgtttggcatattcttggaatattccttntagattcacatganatggaaatgaaattcacacaagtgaatttcacttagttagtgacttaggctataaatagaaacatgtgtaacacttgtcacaactttgatgaataagaaacttgtgagacacacttcaaagttcatcttctctctctattctccttcaatttccacacctctctctctctcattttcttcctccattgaagcttcctctctcaactntttatccaagtgatttggataaaaggaaaaaataagataaattatacaagttgacaagaaaacaagtgtcaaaactagaggtttcttgagtctttntttntatacgttntttactctactatagagtcattctagggttctctttgagtcctagctcggttttatgtggttttca

SEQ ID NO: 74485 - DNA, 389 bp, Glycine max
caagcttgatgctctattcaatggagttgacaagaatatcttcagactgatcaacacatgtacagtggccaaggatgcatgggagatcctgaaaaccactcatgaaggaacctccaaggtgaagatgtccagattgcaactatcggctacaaaattccaaaatctgaagatgaaggaggaagaatgtattcatgacttccacatgaacattcttgaaattgccaatgcttgcactgccttgggagagaggatgacagatgataagctggtgagaaagatcctcacatccttgcctaagagatttgacatgatagtcactgcaatagaggaggcccaagacatttgcaacatgagagtagatgaactcattggttcccttcaaacctttg

SEQ ID NO: 74486 - DNA, 428 bp, Glycine max
  unsure (1)..(428): unsure at all n locations
tctaaggaagctacctgaagccgtcttgtaaaagtgccctcctgctttcattaactggtggatcttatcgaaatttggtctggaggttaaaaggacagatgtccatgatctgaccattgcaatctgcaatatgtcttctggtgtgtgagaaacacttcttttcccgagagcagaaacacttgagtgtttcaagtcttatttttcgtgtagccttggaaaacagccattcctttctccttctttcttccanagccgttccccaacgtcccaagcttcttcttcaccacccacaaccaccagtatccaccacataccaccgtagttctctattgaaaccccacaccgagaggaacccttcaatcagagcggaatcttctaaacttgtctcgcagtttcggtaaagaacgaagcccaatctgaccttcacg

SEQ ID NO: 74487 - DNA, 287 bp, Glycine max
  unsure (1)..(287): unsure at all n locations
acccatcacatgtggtgctntgtggcggtcgggcgatggncacaacaagttntccacatccacaaatcacgcataaacccaccatccgctggtgcccacctccaactgagctcacgtactcccacgtagcccatatcctcgtttctctcaacaccgngtccccatcaatcctcccaagcttccccaacatccaggtaatacaacattcatatagcacatactatcacagccaagagaacaggggataggcagataactcttgccaanacaccaaccaaaatcacagc

SEQ ID NO: 74488 - DNA, 350 bp, Glycine max
  unsure (1)..(350): unsure at all n locations
atgtctatttaagacataagcctcatcttatagttcaagtcatccatgaatcttangacgcgtgacactaccatatggaataaggatcataaacctttttaagaaactggaagcaaaacagacaagtttggtccaatggattttaatgctcataccattttacaacaacaaattagtttttcatattctcatgtcatcgtgcatcatatcattgcattgcatttagtcccttataaatctccttggcctatgggagggatttctaacatagaacatgaaagtatcaagttcacttcttacatgcaaaccttattttaagtacagtacctacctcacacattttactttca

SEQ ID NO: 74489 - DNA, 251 bp, Glycine max
gagtgtgtgagctcaactcgaaggtggcaactatggatggtgtgcttatgcctgactggtggaaatgggatagttgatttgtgccatcacccgatcgccacctattaccacatatgacgggtgcctcataatccaataagcttgatgcgagaaagcgtggaagagtcagtcttcctacgtttgttagttgaccacagagtggtacctggagatatgtcgcggtggtcatgagaccttgttgacgtcatgtg

SEQ ID NO: 74490 - DNA, 389 bp, Glycine max
  unsure (1)..(389): unsure at all n locations
agcttcttagtntcagatgatgcagatgggcttgatctacctcatgcactcctctaatgactatggcatcatttctggcgctaaactgttgggagttggaagccatcttctcaattaaattattggcttcagcaggagtcatgtctccaagggctccaccactggcagcatctatcatacttctctccatattgttgagtccttcataanaatattggagaagaagctgctccgaaatctgatggtgaggggcaactgcacatagtttcttaaatcgctcccagtactcatacaggctctctccactgagttgtctaatacatgagatatctttcctgatggctatggtcctggaagcacggaanaaatnttctaagaatactctctta

SEQ ID NO: 74491 - DNA, 350 bp, Glycine max
  unsure (1)..(350): unsure at all n locations
tgtcggactaaggcacacaagcgcagacctctttgggttgtatcgtaatggatgccatgacctttcctttntccattccgcctctgggcatgctgatgcacagttctcgccaccactattgtgaccattgccgcttttcttattattctgcctcagtgcatgcttctccttcggcctcaaggtgttcacgggtgaacaatacccgacaatactacgggccttcgttggctgtcgccaagccatgtttattgggctcaacaacaattgaaatcatctttcgtctctaatttggttatcacaattgtgacaagcttggcccatatgtaactaatgtaaatcctatttgctca

SEQ ID NO: 74492 - DNA, 493 bp, Glycine max
  unsure (1)..(493): unsure at all n locations
tcctcggngccatntcctgcanggcaaacattggaaagttagttttactagtgggacactactcttanaacaaanatgacatacaacctcctcccataaatacaaacatcaatgtaaatttagagcaagcttatgcgcatatttccctacgtacgttcacttgcacaagacatcctattaactaagagaaatgcacccatatacaatcaaggtagcttcattacctagattatntacatgtacttccaaggtgtatttgttatttacatcacacacgcctccttggctaaatttacatacatgcatactcaaagcatttcggtgtaccaaaaattgcacatgcgctcatcttggtatttctaatacctatacatgtacaaacttcatgatgaatcttgactatctacacaataaggcgctacatttcatgctnttttatttttttcaagtttngctacctaaaccacatcaaattcaacatattttctttgtg

SEQ ID NO: 74493 - DNA, 402 bp, Glycine max
  unsure (1)..(402): unsure at all n locations
acttcagacaacaaacatttataaaaaaatntaagaaaaaatccatacggattagtgattcgtatgattcatatggattcacaattcgtatgaaccatatagatcattgatccgtatggcacanaacttcanataaaaattaaaaaaaaattgatanaaacaatacggatagtgatccgatggacacaanatttaaaanataattatttaaaaaaatntccgtaaggacttanaaaaagtatacttaaanatatctaataacttanaanaatcatacggacattgatcgattcatcagacagaatctgatgaccaacngatagtgatctatgggtttcttgcacaaaacacaattcgatagctacgaaatcanacacacacacctcanatgtcacacatcat

SEQ ID NO: 74494 - DNA, 413 bp, Glycine max
  unsure (1)..(413): unsure at all n locations
acataataagcttatgagatcaaaacatcacacagaagtgaaagaatgcttctaacaatataattttcacgctaatctagtaaatctagtcncacacacaaacgaattatacataaattcttctcacaacatggggagtaaaacccctcaacacaatttcacatactcatatcaaaatcataggttcaaaaacacgaaaactccaagaccactcaatngtagacaccaattngcattagggcatcaattggtccttcaaacataacaatctcatgattataatcataaaggtagaattataataagtatacatcccataataaccctaatttgatgctcttaggattcctacatatgttcattctaaatccaaattgcgataactcatcacttacctataagtgggttctcgt

SEQ ID NO: 74495 - DNA, 301 bp, Glycine max
  unsure (1)..(301): unsure at all n locations
tctaatcttacaatctatgtaattaaacaaatgagaatttgaggagtgtanggtatatattcatatatgtgaagatcaaatttgcataattctaagcaatcatttctgaaattaatcggttcaaaacaaatattggagtgttttttcaactataacagaaataaggctctagacaaatgttatcggcctatatttcgtgcttttcttttaaggcattttgtcatgtatcacaaatacactattttatgaagtgttcgcttttatgttagactatacctttaaactcgtgatattacaaact

SEQ ID NO: 74496 - DNA, 470 bp, Glycine max
  unsure (1)..(470): unsure at all n locations
tgtaccttcatatgatnntctatcaaacttacctaagntggttttcccattgtttaacacaaaacacttgcatccaaaaacatgaagatgagaaatngttggttttcttcctttgtacaattcatatggtgttttctttaagataggtctgattaaagctctattcattatatagcatgcagtattaacaacttcaacccaaaaataagtaggaagatttgtatcatttagcanagttctggccatttcttctaaagacctatttttcctctcaacaactccattttgttgaggggttctaggtgcagaacaattatgttcaataccatnttcatcacanaataattcanaatcttttatttcaaattctcctccatgatcactcctaatggatataatggtaagatttttcttggtttgaatgagtntagcacgtntcttaaaagcatgacaagaatcatctttatgag

SEQ ID NO: 74497 - DNA, 335 bp, Glycine max
  unsure (1)..(335): unsure at all n locations
caacgcactaccttctcttccattgatgtttcttcatatttctccatgcatctcctcacatgtcttgttctaaatgttgttaacatgattctttagagtttccaccgattaaacttggtattgaaactagatttgattntctatggatcaaatctctcgatcttgttcttgaaccatgaattgtgnntgagttagtttcctttgagtattgtcttggtattttttgcggctgaacctaaaccataaaattcttacaaaaatattaaagtataagaaaacctcacaaatctagagtgacttgttcacctattgtagctttgtcatacaagtcatgt

SEQ ID NO: 74498 - DNA, 359 bp, Glycine max
  unsure (1)..(359): unsure at all n locations
ctttataacatganaaaagtataaaaaaataaatacaaaaccaaaatctgttggatcgagtggcctcagaataataaagaagggggggtgaattacatattcttaaatctttactaattaaaatttactcttctaaggctnttacttatgttgttaagagaataaggaatagaagagaaacttaaccaaaagtaaaagcggaaattaaaatgcacagcggaaagtaaaagagtagggaaaaaggagacaaacacacaagagtttttatactggttcggcaacaacccgtgcctacatccagtcctcaagcgacctgtggtccttgagatttctttcaaccttgtaaaaatcctttacaa

SEQ ID NO: 74499 - DNA, 396 bp, Glycine max
  unsure (1)..(396): unsure at all n locations
gctcgagattcgaagccgtcttcccatgcatggcttangtctgcaacatttaatctcttatatgtgtgggaatgttaacttgcctcttgngaattgctgtttgaaactctnttatgctatcctcactgctggatgtatcagaaactcacccttccaccagcaggaagtgcgcacgatagtgttcatgcaattaggcaaaacagaggaaccaatatgcgcangttaacaatcgtgcgcacttcgccggagaggaatcgccgacggagagtaacgagaagagcgaggcgcgaatattggaactccggcggagaaaaagtggtgctggcgagtgagattcttgaatgtgaagcgacggcagaagcgccagagaatcgcctgatgtcgcggcgattgtga

SEQ ID NO: 74500 - DNA, 350 bp, Glycine max
agcttcttattataactttatctgtgaggaacacagatatctcaggtccatccttggtaagaattcctatagaaacccaaggcatgcccttggtaagcttactcctttggaactacgatgagcataaccaaaggtccaggttaaaacactcgtccttgaataagaggtttcacaaggcaaaaaatagatacccccagactggttagcaagaccttcaatcaggtggaaaccaaactaagtcctcataagccttaggtgagaagctccgcaaagtgaaaggaagcatcacccagattgattggtaagacctttaaccaggtcaaaatcaaacccgggatgatcttatgtca

SEQ ID NO: 74501 - DNA, 489 bp, Glycine max
  unsure (1)..(489): unsure at all n locations
ctaagctcgctntctacacggcgtacatagccaccgtcttagaaagcttgctttcattgttggtgcctacataagcactgtcttagaaagcttgttgttttctaagacggtgtgttcttacccgtcgttgaaaggatgctgttttcaacaacgttagtttctacgatgatcgacgaccgtctttgtatgttgttttcgaccgtcatagaaaacgacttttttagcaatgtctatcaaatgaataaataaaacattctttttctaaggacatatatttattttatttaccttagactattattttaattaataaaattatttctccttatttatttaattataaaaatctcattatttttctaaaactctatatatgtttaaataaatgtttttaaaggctatttacaacaagatagggtggtacacttcacactgaagatatagtaagtctaggggttaaacttcatgaanatctgccttctgaaactg

SEQ ID NO: 74502 - DNA, 322 bp, Glycine max
  unsure (1)..(322): unsure at all n locations
ctcgagttttccacttattggcatcgtccttattgagttcaacccttttctttcatcaaatcctgtcatttcacagttggtacctttgtttcaacatgtgaaacaatcaatggacactccaataaataactatagagaaaaagacagaatacgatatggcgtcatagaacctangaagatagatataaaagaaataataaatgttaatagcatatttggtatataaagatatctatattatatcaaagatcctattcatcgggtcctgtgttttctgatcctcatccatctgtttacccatgtatcccttgtttctcgtcta

SEQ ID NO: 74503 - DNA, 426 bp, Glycine max
  unsure (1)..(426): unsure at all n locations
gaaactaagctcgctattcgggatgtgcattaagttttntcgtccaaggattcttattgtttctacgtccaaatttgaatacaatgtagtactccagaagtcgagtcctccaacccatgaacaagaggaatcagacgagaaaaccctcttacaatcattgtaatttcgtaatcatgatcacaaatttgagtggaccagagagcaggtcacacaatgggcatctgacttagctgctctgcacaattacaatgtggagtntggtggagtcggtggttctgctgatgttgaacccggctatgcttcacagnatgctgtgtttaaaagggatgggaaacttgaagatgatgtactatagcatgctgatgaacaccattatagtataatatgggaatggaatagtacactagaataaattctttgtaacta

SEQ ID NO: 74504 - DNA, 420 bp, Glycine max
  unsure (1)..(420): unsure at all n locations
acaacgaacattatacaaacttatgagagagagacagataacctacgagcccgagtaagactagccaagcaagactagtcctacgattcgttagcgacgccctctcccaattcctctttctctctctaacacacacacttgttaatataattccctctatcgcaatttatttgatatatcgaaggttgcgttatatctcacttagcattgaaatattttgttgtaggcactgattgtctagttntttgcattgtgataacgacattcgttgttggacactgtactactcatgatcatagggacgaacagttttcataaacttttgatacttacatttgtgcgattggttttgtacgttgttggatgtcattaatgtancttgctttacatacaactcttgttcatcatgagtgaacctta

SEQ ID NO: 74505 - DNA, 427 bp, Glycine max
  unsure (1)..(427): unsure at all n locations
tgcggcatgcaagcttctctatgcacgttcacttccaaaaatatttatttcttttattttataaaacaaaacccagatccaactaagtgccccgatttcacaagagaacggngggttccaacctaagactcataaaaataatttcctccacaaaaaatcgtaattctatgcaaaactatcaatttggggttgataccacacctaattacatgactagccatgttaaatccttcaaagcctataatagaatgtagtccaaccattgtggcatttcgccgaatacttggtgtgcacacgtttaagcatgcanaaatgaggatntgagcataatcaaacaatgcanaagggtaaaacaacaagaatgacctactataattcaaaccaatacacttttacacaaacggaaacaacaaacagccatcatatg

SEQ ID NO: 74506 - DNA, 201 bp, Glycine max
cgtttcttgattccaggatataagagagcttcctaatatgtggtttgtcttatttgtgcttttccaatctagtttgcaccctgcataatcagaatctgaaaagccggtttgggataccacaagccaacattggttgtgcccttaaggtacttaatgattcttttaacagatgtcaagtgagattgatgcaatcctaccccg

SEQ ID NO: 74507 - DNA, 434 bp, Glycine max
  unsure (1)..(434): unsure at all n locations
agcttctggtgggacatcttgacttgctttctctttttactttcaccacagattctgccttcttctattttcagattgnggatgcctctaacagcacctttgtcaatgattttcttcatgcctcttaagtgcagatgtccaaatctttgatgccatattctgacttcatcttctttggaggatagacatgtggaggagtagctggtttcttggggtgtccataggtaacaattgtcctttgatctgctgcccttcattagaacttcactcttctcatttgtcaccaagcattctgactttgtgaagtttacatngaatccttcatcacacagctgactgatgctgatcaagtttgcagtcagtcccttcaccagcagtactttgttcagactaggaagtccatcatgaantacctctcccacttccaatgatct

SEQ ID NO: 74508 - DNA, 474 bp, Glycine max
  unsure (1)..(474): unsure at all n locations
ctagcagtctatctttttgtttagtcaaaacttctaatgctcttaatctctcctcatctaaatcaaccaactcatctgacatcattttccaataatggtcgattggaatgtccatttgcttttgtaccctggctgattgcaaatgtatttcgaccggaagtacagcatcatgtccataagtcagtcaaaatggggtagtattagttgattccttaagagaatttctacatgcccatagaacttgatctaacgttntattccaatttcttggcttttgggcaatgtgttntttaatcaagttaattacaatcttattggctgcttcgacctgaccatttgcttgcgcgtaatatggtgttgaggttaataattgaaagccagttntttgggcaaattcttgcatttttcgtccagtaaaaactgaaccttgatcagtggtaattgtttcaggaataccatacctataaataatat

SEQ ID NO: 74509 - DNA, 413 bp, Glycine max
  unsure (1)..(413): unsure at all n locations
agctnttcacacgcatacctgatgtatatctcccaagtagtgtgacaagaacaataacgcctcagtcatattatctgtaagatcagaaaccaaaggcataaaagaaaacatacatgtgaaaatccctctaaagttattcttagcaaaaaaaaaaaaaagttaaatacctacttaaatacttacatctccgatcagatgtcccctctttgtaatgcatgagttgagaagtgaaattnttcacagcacctgcaacacacatatcctcaacgccatgggaatcatggcagtcccctatggtaacaaaaaggaacaaaattttgcatcaatattcanaggtttaatgagagcacatgataagattaattactagatagaagtaatgcttacttgaatactgaaaagaacaagcatta

SEQ ID NO: 74510 - DNA, 276 bp, Glycine max
  unsure (1)..(276): unsure at all n locations
ctgaaacatataaatcaagattaagaagttatgtatcttcctttanggacgtgaaagttactaagaatttactatctttctatcagctccagaggctatttatatgtcggagaatatgattgaagtccaaccgaaacatttatgacttataacaagtgtcgtatttattcatttaaaatgatatacttctgaagaagaaaaaanatacataagtttgccaaatgccaatggtccaactatatcccgtgcatgatttctgcaacatcataacataaa

SEQ ID NO: 74511 - DNA, 399 bp, Glycine max
  unsure (1)..(399): unsure at all n locations
ttttatcacanaactgtttgattttgtttgtcngatcgnatgaaactgagtgttgggtggtaaaaagccactaacaaaataaactcaatgtagcatagatgagaatgttatgttggataagtggacatattatacaagataggattaaaatgaatgcattataaagaaagttgagaacttgagatagcatctgttgtcgaaaaaaatggtagaatctcaccttatgtggtttgggcatgtatgtagaagactagtagaagccccacttaagaggggtagcctgtattcctatgtggggaagttaggctgaaaaaaattatagtctaaaccatttagaggttaatggcttctccatggacatgatttgtaataaaacactatggcaccatttatatcatg

SEQ ID NO: 74512 - DNA, 497 bp, Glycine max
  unsure (1)..(497): unsure at all n locations
ctaggatcaactctattctctatgtttctctcaactattcttcattcttcttcctctnttcactatggatcttcctttctcttgcacaaaatttgtggctgttccattgngaatgatcatggaaagctaaaaacttaatcaatccaaggatccactccaagcaaggctgaatttgagtttttcttccatcctatttgcaattttcatgattatgattatgcttangaatgaaaatggattgngttatggattcatttcctaatttcaaaatttaatcattgattgtttggatgattttccaacctaatttgtgatctcaaacaatgtangaattgatttgattgaactatatctaatgcatttgactgaactctcacattctgaacatcattcatagtaactgtgataattcgaattgcattggtttggtgagttggattgatgttattaaacttgattcatattctaatttggtctggtatgcttattcatctttg

SEQ ID NO: 74513 - DNA, 344 bp, Glycine max
  unsure (1)..(344): unsure at all n locations
gcttccttcattcatcctgctctgtattaatgtcattttcttcactngacaatctcatnntttttcgtgccctangtaaaatggtctcattttggttcagtcacttatagtttctctatgcaataacactttttcggcttgaactactcaaccagagcttcaagtttattgcgtcaatgctactgtgggtgttgcttcatgtttcaagttttccttttccattgatgtctactattattgcttcaatgttagtttcaatccttanaaattcacaaagtcatcactactatcaaaatgacattttacgatgcaggtcttacgattgatgtataaaaaccgatatt

SEQ ID NO: 74514 - DNA, 482 bp, Glycine max
  unsure (1)..(482): unsure at all n locations
actcagctcggaggatgcttcaatggagganaagaaagatagaganatagtgtggtgggagcacgaaattgaaggaagaaaagagggagagaagttgaactttgagttgtgtctcacaagactctcattcatcaaagtaacaagtgttacacatgtttctatttatagcctaggtagctntcttgagaaacttccttgagaagctntcttgagaaaacttccttgagaagctagagcctagttacatacacccttctcataactaagctcacctccttgagaagcttccttaagaagattcctaaagaagctagagcttagctacacatacctctctaatagctaagctcacctccttgagatgagaagctagagcttagctacacaccctctataatagctaagctcacccncatgacaaaatacatganaatacaaaaaaaattcctactacaaagactactcanaatgcctcgaaatac

SEQ ID NO: 74515 - DNA, 324 bp, Glycine max
  unsure (1)..(324): unsure at all n locations
agcttganatgaggaagtgtggaaggttgattatttcttatttttattcgttgaccacaaagtggtacctggatatatgtcgcggtggtcaggagaccttggggacatcaggtggggtgctattgcccaaaaccaagcttgaccaatcctgacccaacccgggcatagtcagtcagtgagaacctgtgatgtacctaaacaagcgagctcctggcagtcaacagataaaagaacaaagaccacaaagcaagggggttcgtgtggtggctggccagcaatgcatcangagtgagatttgagatatggcctctggtaatcgattac

SEQ ID NO: 74516 - DNA, 460 bp, Glycine max
  unsure (1)..(460): unsure at all n locations
tataacagcaccaaggctctagtttgactctctcctctcctctctctgctntagttntgagttttaggcttttcttcttcttttagacactttttcgttttgcaattgcagttgttacttttctttttagcaataaaatttcgttctctattgattaatggaaggctaagtctccagcgttgttttctcttgaggatcaagcacagttctctntgagggtctattattgctattaaaatctgataagtttttcctcttcactaattactctgtatttgttgctattaattcatgcatgcttagtgcttgattaattgtctctgcgcttaatttacgttcatgcttaatgattgtntatgattaattggtgtatgtgttgcttaaacacataatgaatgccttatgttaaatnntcgcgtagtaattaatntatggttggattaagtggttgaacctgata

SEQ ID NO: 74517 - DNA, 349 bp, Glycine max
  unsure (1)..(349): unsure at all n locations
atcttctttgatcctctcttgtgtcatacaaatcaaagaagcaacctactacttctatatcataatcacagacagagtatcaggcctcgacaatcactgcttgtgaactccaatggctaagctatttgctcattgatatgcatcaacaaacttctctgtcgcatacaaaaactaaagccctctctattcctattgnttcttccctcgcgtccaagctgaacatcatgatattcatgggccaacttgaggggggcctgtaatatatatcattcacggcaatgtgttgttagtatgtttagtacaactggtagtaagttcaagtacaattnttagcatagctgtcaaatga

SEQ ID NO: 74518 - DNA, 366 bp, Glycine max
  unsure (1)..(366): unsure at all n locations
agagctgcgatatgaatctggcaatataattcaagcgtcccaggaaacctcggacttgcctctctgtacggngttccggcatctcaaggatagcctttaccttttcggggtctacctctatccctttctagcttacaatgaaaccaagcaatttccctgatttgaccccataggtacactcggcggtgttcaaccttaattgatatttctttagcctttcgaacaacttacgcatgttgacaaggtgttcttcctcggatttagatttagcaattatgtcgtccacgtagacctcgatctcttgatgcatcatatcatggaacatagctaccatggcccgctgataatgtgccccggcattcttga

SEQ ID NO: 74519 - DNA, 263 bp, Glycine max
  unsure (1)..(263): unsure at all n locations
cactcaaaaagactcttcattcatcctccgattngcaggatcctggatgataagatgcaaatgcatgccatgttatgattgaacgttaaatgcaactattaaacaggtgttattgtgttcaatattacttaaacgcttacggcacctcgttgatctagccagatggctccggattcagtgggaaagattgagaatgtatgttcttaacgacaattanagcaaaagacacacattagaggtgagatgctatcattaccaacatt

SEQ ID NO: 74520 - DNA, 413 bp, Glycine max
gacggagcctgctattagcagtcttcacttatttgttgctggaacgccatggtgaaaaagcatcaatgagagacctcattgaagctcatagatccagcctccatataagctccacaagcaagctatcatcacaaacagatataacttttgactcagatgtcacatcggtgcctaagatatatcgagacactcacaactgaattaagatacccctcacaaatcgaaacgaccataactttcgagtcacatgcctgattgaagcccataatatatctagatgctcaaaattgataaaagaagtgcatcacaaattcaaactgtcataacatttgatttggacgtctgattaagcccataatatatcgagacgcatgatattggaaatgaagcccttcgcaattcaaacggacata

SEQ ID NO: 74521 - DNA, 396 bp, Glycine max
  unsure (1)..(396): unsure at all n locations
acaccaattagtgctgctaaagcttcgtcataatactggcccaaaatattgcatcttcaagtgaaaagatacccttctttgtcctttcttataagtatctttttcaagctggtttttgcattaaattaatatnttaaacccagaataccctttaattacttttaccagtaatggtatgcactaaaaagataaatgcatgatctctcttantaggattagataagaaactagtcacataattggcgggaagtaatagtgaaaaagaagctgagcccatatctaagagtttggtaaaaaaacaatgttacaaattaatgctctaactattaactaactttttaaaggcatgaatagtaaagagctatatttaggaaaaagagtattctttccaaaaca

SEQ ID NO: 74522 - DNA, 433 bp, Glycine max
gtcgacctgcggctcgcaagcttgtaatcgattaacgtaatggtgtaatcgattttcatttatataaaattcaaatttcaagtctaaagagtcacaaatcttcagaaactaactgtgttatcgattaccacttttatttaattgattaccaagtaggaatttttgaaaataacttccaagagtcacaactgttcaagaaattttgtatgaccatctaaggcctataaataggtgatttgggatacaaaattttttagagtgtttctgaacaaaattgtcttatcctctcaaaaccaaattgtcttatcactctcaaaatattccttggccaaacacttgcaaattcaataaggaatcttgagggagcttcacattgtaatatccttctcttaaagagagaaacttctttttctttttattcaatggaaattgt

SEQ ID NO: 74523 - DNA, 481 bp, Glycine max
  unsure (1)..(481): unsure at all n locations
actaagctcgtntgtgagttgattagccttggtttcactttggttattagtttattattattgaaactttcaaagaanaaacgtccgattgattntttcttgattattttattattattatttttttaagaatatttgattattttattattattttggtttttttttaaccgaggttacaacgtgaacgattggttagattttgttttaacagtgattaaacgagattacaacacaaatgatcggntgaaattcattttatcatttattatgtgagaaaagggcttaaataaacgattaaagcacgttaaaaacgaaagaaaagataacaaaagtgaatgtgatgaagatgaaaacaaacaaaacaagaaatgagttgaaagtctcggattcaaacacttaccggttgaagaacgaagaacgaacgaagaacggaggaagaatctcacagatttgctcacggaaatgtctcggaagcgtt

SEQ ID NO: 74524 - DNA, 378 bp, Glycine max
  unsure (1)..(378): unsure at all n locations
acctgaggcatgcaagctttanaagtatgattttgcttgctctcgcaccattgctatttggttttttgatgnnnngatacacatcaaaactccacggagaagagtntaagaaatacctagatccatggagttcgatcaaacaaacacagttgttttccttcacaactttgcatgaaaggttttttatgcgagaccaacaccgtttttaaagatttctttggtatttcaatccgatcagattatggaagtttaatataacttaagttcccatttctcttcatttcattgatatcttgactgtaccaaatagatcctttgagtgttaaatatatcattgtgattcattgtagaacaagttcttgatatatcattgctatt

SEQ ID NO: 74525 - DNA, 451 bp, Glycine max
  unsure (1)..(451): unsure at all n locations
agctntatacaccttgtgcagntctcctctgttcggttggactccagngttncttctaatgttcttttagaaacgaaatgcanatttcctaaatctcgttggtggttatgataaattatatctacatactttcattccccattagtcacattggttattgaaaaaaatatgtgttcttctgatcggtntggtggtacttttatccctcctaccattttttctttcgttcctatattattatttctctccttcactacttctttatctctttctctctcgtccattttgtccatccactctctcgctttccgctctataatactttattcttctcatcctagattcttctcttttcttccttcttttaacttctcctactcttcttccttttcacattttatctgtcccccccccccccctcccttctatgtaatttatttatttttattat

SEQ ID NO: 74526 - DNA, 290 bp, Glycine max
  unsure (1)..(290): unsure at all n locations
cctatcactaagctcctgatactttgacctgaataatgcttcagtctatgtttgttggccaactataccttctaacccctactaagcatttctntgttgaagtagaccttgaagtccttcttcttcccttatcacaaatgagtagccttgggcaattctattaggcatcatcttgatggtagtgcatttgttgatgtgaagtccanagggataagcagtagcctgatcacgcatgtatatttctttaagatgcctcctatcatgttaagatcttacttagaggctaaagc

SEQ ID NO: 74527 - DNA, 331 bp, Glycine max
  unsure (1)..(331): unsure at all n locations
ctgcagctttgagtcacctattggaccnacattttttatttttatacatcgaaaataaaatcagtaagactaattgatcaacacgataatagtctatgcataaataacagtttcatcgaaaataaaatcctttttggcagtgttctctatcactgcaatatttaacttggacatcctagattccatattccttttgtntagaatagcagcctgttagattgtacaatcagtaagactaattgatcaataatgcagagataaaagacccattgatcattacctggagttccttatctttttcattgcataatgataaaagttattacagtca

SEQ ID NO: 74528 - DNA, 503 bp, Glycine max
  unsure (1)..(503): unsure at all n locations
tactaagcttaacatcgaatcttgtaaagcttcttggctgttgcattagatgataatatataatactagtatatgaatacatggttaatggcagcctttactcctttgtttttggtatgtaatgtgaagaatgctttgattagatgcactagtgttattttttttaacttcagtcacatttaatttaccagcttattaatcttgattaacttatttgctttgacaataaanaacagaccanataaaaggtaaatttctatcctacacatctttttttttttaattntccagccccacaacctggcatggtttcattttcctgagcacaacacaatagtgccctcatttctcagacaaaccaaaacaacataaggagttggctttattattttgaagaagagacaatataaggaaaggtttcacagaatcaacagtgaacaccgaacaattgagagacgaggttcaagacaaagcagaagatgacataatatgacaaaataaat

SEQ ID NO: 74529 - DNA, 360 bp, Glycine max
  unsure (1)..(360): unsure at all n locations
gcaagctngcatccactataagaganagaacatgttattgatttatgactganaatgttagtcagnnggtcagattgattgtgatggaatgcattgactatatncctgggagagtgtgatccttaaattttgagagaaacgactatcatttagtacggattcttgcatgaatctctgaagtatggattgaatgcctgaaattgaggatgatgaacgccatgtttgattgtgatagccacttagccaaaaagctgaccacgtgcttgaatgaattatcccttgcacccacgttgagctgaatgaattattgattgagtgaaccttgaccccatacagtgttatctttagctaccttgtctt

SEQ ID NO: 74530 - DNA, 440 bp, Glycine max
  unsure (1)..(440): unsure at all n locations
gttggactacccgtgaagatcaagacgattatataattatgatgaacgtcgaagaacggtcgaaaccttcgcgaaattcctcacggaaaacgttacggaaatgtttcggaagcgcctcagcttatattttcttcacggaaacaatttttccaagcaaattcgaaagagagagaagtgcctaaggggctgaacccttntccttcttgcttcctcccctatntatagcaaaataggggagatggttgccgcccagctcgcccaggcgagctcagctcgcccaggcgagcatgagttgcttcttcagaaataacacccttttggaggaagttatttaatgcgcactgtgccgttatgtctttttactactaattacacctttctcgttctctgttcattttactatagacgccctatcttatgggtcttccctcgtaaataaa

SEQ ID NO: 74531 - DNA, 414 bp, Glycine max
  unsure (1)..(414): unsure at all n locations
agcaccgcagctgcaagctgctgggggctctatggaggtgttcttgatcttcaatgaggtcctttaatggtgattctccaccatggagatgcagcggaagacaaaggagaagaggtgagaagaggcgccatccactagggaataagccatggaagaaggagcctcaccaccaagatgagccttggataagaagcttggagaggatgcttcaatggaggaaaagaaagagggagagaaagagaaaggcgggagcacgaacatgaaggaagataaagggagagaagttgaactttgagttgggtcttacatgactctcattcatcaaagatacaacaagtgttacacatgctgctatatatagactangcagctccctgacacgcaatcctaacagcacttccatgagaagcctct

SEQ ID NO: 74532 - DNA, 299 bp, Glycine max
  unsure (1)..(299): unsure at all n locations
aagaggatgggnggggggggaacaagcaacgcaagacaacttcaaagctcctgagagtgcgccttggtgatggatctgtttcatcccttcttgatcaatcagatcctgtaacaacagacagctcagaaggtaacaatgatgacgttggaggagggccttctgtgcgaggtgtttgcgaacagggggaagtcataaacttttccctagttttgcttaccgtgactttgaaacgtgaacatcatacgcagtgaacttgctggtaaagccatgttgactgcatataacatgaattggttttt

SEQ ID NO: 74533 - DNA, 429 bp, Glycine max
aagagcacatgtcagaagccctttgtggtataaagtgatcttcaactgagtataaagggtttaacctacttcctttgttaatgcttgcatcttcatgtattctttcctcgttagactttcgcgatctgtttgatgatgaacctcctttacaacaatctcaccattttcccaccccagctcaaagaaatcattgtcattactgaaataagtatatcaccttcttagattaaaatcaaataatgaaaagatagcacggatgaaacacccttgaatatattatacacatatttgtactaagaattcaatacaactagtacttacatggaggctacatgggaggagcttcttgtcataccacaacgggtggagtaaacatcttctgatcatcatttgcttgaggagataattaagttaacaattgagctgaat

SEQ ID NO: 74534 - DNA, 330 bp, Glycine max
  unsure (1)..(330): unsure at all n locations
aactaatagtactcatatcttagacatattcataaataaggataaagaaagatgacctaaaattacaggatcatattagcatcatcccttagaaagggtgacatgttcgaagcaaccaatggcatatccacctctatgttagcaacagtttgcttcgaagctaccatacttatcgtgtgggatccattccatatagtanggctttgagtctccatatccatatgcattgcaagcgtatttattcttttcatctggagaaagattagtagagactccattattagccagactagagttggtcgaggatcccaccatcactacttacaaaat

SEQ ID NO: 74535 - DNA, 308 bp, Glycine max
agcttagccaccttgattggtgcttatctccatgaacttcagttctggccataaggaattgcgcttggcgacactgagtcgtgattagcccaggataaggtgtcacttagcggtttggctgtcgcttaaccgaattcagatcgaattcgattaggctcagcttggccttggcttagcttagcggaatgaatcagcctaagatgaaggggttaggcgctaaacgctagacactcatggcttagtgcatgaataatgatgcgcttagcgtgaagattggttttttatcaaacaaagtcttctaagttatt

SEQ ID NO: 74536 - DNA, 446 bp, Glycine max
  unsure (1)..(446): unsure at all n locations
actcagctctatccaggctcatcttgagggtgaagctccttcttccatgtgttattccctagnggatggcgcctcctctcacctattctcctttgtcttccgctgcatctccatggtggaaaatcaccattaaaggacctcattgaagctcatagatccagcctccatagaagccccacaagcaagcttccatcaccaatgcgttgtgagtaagaagagatgatcttccgggatcttgtgcctgtaaaatgcatttgtgtcatgcatagcataaacattccctcatgcattcatcatatttcctccatgataaggtgtcaaagtattaatcaacaaagttgttcattctagcaaacatgggatcaaatcaagtaccctctttgaaacaaggtttatcatgtaaaatcaaagcctataatagccactttcaagactagggagcggat

SEQ ID NO: 74537 - DNA, 194 bp, Glycine max
  unsure (1)..(194): unsure at all n locations
atcgccttgctcagtgcatacctccattttcacaacttcataccagtccctcgccactccacctctggtactgcacanatccagttcaccccatcatcgtatgaggaccctgtcngtgccctgttcaaactcactcagacnggatcagtgctaacatacctgaaggagtttgaagacttggctaataaaattat

SEQ ID NO: 74538 - DNA, 262 bp, Glycine max
cgcgtcttaaacgtttacgtgggtgatttcgtgaagaattttccgcatctatcgttccgtcttcatcgttctatcgcgtctgcgggctcaaccgatagttcccgaatcaacttttaattcatctatgaccctggtggtcccacttgttcctcttttatttcattcattacttctgatccctttagcgtgcttatcattattaagcatttctccctaacaaaaataaataatttcccgtcattaatgtacattgtaatttgta

SEQ ID NO: 74539 - DNA, 298 bp, Glycine max
acggcctctggctttatcggttacatggaccgttcaaaagcataaaatcaacatgtaactttgccgcttatgaaagaacctacgtaggtctgattcctcatcgcaattgaggatacgtaggagcgaaatcctcgttttgtcgaccaccccaagagatcgttaatggtccaacaccttaacatttctctccttaccaaaacaagagatcgttaatgggtcaacgccttaacgttctaaaacaagagaatcgtaatggtccaacaccttaacgtttctctcctttcaaaagaatcaaaag

SEQ ID NO: 74540 - DNA, 411 bp, Glycine max
  unsure (1)..(411): unsure at all n locations
agctatctgatcgggagactagtgacctctagatggatgnngtgnttgngttatgccttttccttaacaagcccttttctctggcttcatcangtatgagacaaacgtgtggctttatcttctagaaagggtgctgaggaaatatggacatgtttagtgcatcccatgccatccaccatagtgtctcacgtatgaggcgtctgatacagagtgggtagagtggtagcaacatgtcatttaatgggcgatngctgtgccacccagggtccttgggattgcacccctgactatttgccttggttttattgtcgttcccactcctatgccattccatcagacgagggagagccaccacgtcatttttgccattaacctgctatcctaatacagctatctgtctaatcaatcact

SEQ ID NO: 74541 - DNA, 421 bp, Glycine max
  unsure (1)..(421): unsure at all n locations
aagatacgtgaaagcanagcatggccaagttaaaggcatgtagatttcaaaatcccaaaaccaccatcactctttgatatacacattntctcccatgagatccacttaattccccttgtatctctttttccaaatcttcacccaaaataattcatcataacttgaagttcatctccaagacattgagagatcaatttagatgcaacatttatctaaattcatattaaatagtatttcaaaataaatttagatgattcaacatgaatacaaaagtgcaatccatagtgtgttttctaagactaataactaaatgtacaccttagatttcgagtgtatggttgaaagtcagaaagagataaagaacaaatacttataagagaacaaaactccgatattataatggataatgtcataagaaatg

SEQ ID NO: 74542 - DNA, 56 bp, Glycine max
  unsure (1)..(56): unsure at all n locations
atcattttantcttgccccaccacccaccttcctgtcttattaagtaatataattg

SEQ ID NO: 74543 - DNA, 107 bp, Glycine max
ttatgctaagctcgcatccagtcaaacccgtgatacgaccattttacaaaataaataaactactcactgcctaccattaaaagttacttaaacatgtccaatgctta

SEQ ID NO: 74544 - DNA, 475 bp, Glycine max
  unsure (1)..(475): unsure at all n locations
gcgagcttgcggatntatttgttgttgtctatagaattgaagtaggtttgaggaaagggaaatctaattatgttgcttctatgaatcctggtaatggcggactcgagaggagtagtgaaaggaagaaggagggagaacctcatgttatggctgtagtacctacgtggctaaactttccactagccccttataatcccatgttccaatatcctccgcagcaatatcactactcacccaatatcagtcctgcccattgcccaccaccctaccaaccaaaaacaccatgtcagccacaaaggccacccctaaatcggtcacaacatccaccggcggcacatttaagaccaaacaccacccctaataccaaccaaaataccaatcatggaagggaatttccagaaaaaaagcatatagaattcaccccaatcctaacgtcatatgctaacttactcccttatctgctccataatgcaat

SEQ ID NO: 74545 - DNA, 298 bp, Glycine max
cctagcaagactactcatcatatcttcccaaaccccatacccacgaaaatcaaaggagaaagaagtccacccaaacctgaaatatcgaagtcccactcgtatccccgcacttcacgactccaaaaacgccctcctttcacgagttggggcagaaatgatggccaaaggttgaagctctgtgtggagcttcaatggagaatgaagaagaagaaatctacgtgagagagggagagaaacggcttctgaatttctggtctggctgagtgaggagagagataagctttttggtcataaaaaa

SEQ ID NO: 74546 - DNA, 389 bp, Glycine max
agcttctcaaggaagcttctcacggaagcttctcaaggaagaatctcaaggaagctacctatgctataaatacaagcatgtgtaacacttgtcgtaactttgatgaatgagagtctcgtgagacacacttcacagttcaacttctctccctctttatgaagtagctccatgtggagccttgaggccttggatcttcttcatcaatggattcctttgcttcttgaggtttgattgcgatagaatatacaaggagaaagatgaatggagacttcacatcaagtagaagatgggtatacaagaagctcaccaccataggaagccatggataacagctctaaggtagaagaagatgaatgaacggagaggaagagaagagcatgaaatctact

SEQ ID NO: 74547 - DNA, 336 bp, Glycine max
  unsure (1)..(336): unsure at all n locations
cccganngatatgnnccgcatccatcaaccacctccatatttgacctcctagggactccttcaactaacaccatcatgggcaacaaccattgtcgtcatcactccatgccacattggacctcatgcctctgtacaaacattaactccctaaaagcactctacaccttctttctcatccacgacccccttactacaacatcctcttcttcgtcattttcaaatcctacaccaaattgtgctaaaggaagtagccgacgatgggagagatgtgctagatccaaatgaaacgttaccgaaggccctcaaataacaccatatgcttgactttgctgtagt

SEQ ID NO: 74548 - DNA, 338 bp, Glycine max
cgattaagcggcactgtcctgcgaatgagctcagcttaccatccgcagactgatggtcaaactgaggtgctcaatcgagtgattgaacagtacctgcgtgcgtttgtccatggaagaccaatgaatttgggaagattcattccttgggtagagaggtctcattactcaatcttggactgtgggttccgggtctacaccggatgagattacctatggtaggaagccgtttgcatttcccgaatatctcttgggcacttcaagaattgatgctgcggaggaattctctggggacacggatacgacttttcaatccattcggaagaagcttattcaaacac

SEQ ID NO: 74549 - DNA, 383 bp, Glycine max
  unsure (1)..(383): unsure at all n locations
agctntcttgagaagctagagcttagctacatatccttatattagctaagctcacccccatgacaaataaacatgaaaatacaaaaaaaatcctactacaaagactactcaaaatgccctgaaatacaaggctaaaaccctatactactagaatggccaaaatacaaggcccaaaataagaaaacaatctattctactatttacaaagaagagtggacccaacctnggcccatgggctcaaanatctaccctaaggttcatgagaaccctaagggccttcttatcaactctagcccaatcctcttggagcctctggctcatggctctggtaactggtcctttcctaaggaggattgcatcatctaatgacctgatcactgcac

SEQ ID NO: 74550 - DNA, 485 bp, Glycine max
  unsure (1)..(485): unsure at all n locations
cggttcggtacttacccgttgaagatcgaagaacgatgaagatctattgatgaacgtcgaagaacggtcgaaaccttcgcgaaattccttacggaaatgttatggaaacgtttcggaagcgtctcggcttagattttcttcacggaaacaatttttccaagcaaattcgaaagagagagaagtgcctaaggggctgaaccctttttcacttcacttctccccctatttatagaaaattgggggagaagcttgccacccagctcgcccaggcgagcagggttgcttcctccagaagcaacagccttctggaggaatcttctggagggcccaagtgggcctggttgctatttgcacccccatatttactaagtacaccccctgcttctttttggtgattcttttttcgtaaagttaccgaaacttacgaatttcgtaacgatacttgttntcttttcgtaatggtacggaaccttgtggattacata

SEQ ID NO: 74551 - DNA, 387 bp, Glycine max
agcttattcaaacctcagaggcatggaggcttatttttcgcttttcgctcagccgccaacaaaataccaaaagcctcaaacattctgacctaactaaactaactcgctgagcacggcatgccacctatacaagtttatacaaacttagaagtaaaactggaaatttaaacactcgctaagcctaagcgtagtggcttagagagtcatatagaaaagcatatattcaatatatatgatgaacaagcttagcgggacagggccggcctaacgagttcatcaaaaaacccagaaattcatccaaaatggatgaactcgcttatcgagttcatcgagatttccagaaaaaatggggcttctaagcccttactatgcaaccactttcaagcc

SEQ ID NO: 74552 - DNA, 488 bp, Glycine max
  unsure (1)..(488): unsure at all n locations
ctaagctctatccagagacaaagatataagtatcattcaaggttatgcttttggtctcaagagctngngactatacaattcatggccttcatcatgttctgagttatacaaatcattctagaattcagagatttatgcaaagatcattattcacaattagtcgttcactcacagagtaaggtcacactctcaacggattttggttcaagcttttctttcacaatcagtctgtctagtgactaactattctattataagttcgcactcttgttatttctttgttcaacatgcatatttgctcaaattcatgaaagtaaacacacatctcatcataagcatgcattcaattaaaacaatgcatacgaccagtttcacagaataaataaactacttcactgccataccatcacaagttaacttatacatgttacaatgcttcaagatgagcaactatactactcatgcacaagacttacataaagtaacta

SEQ ID NO: 74553 - DNA, 374 bp, Glycine max
  unsure (1)..(374): unsure at all n locations
ctaaaaagaggcaaatttaatcatcttgtttgaatgaatgagaaaaaactgcggcaaatgaagagggtgagaatgaaggagaaacccatgctgcaattgtcattcctacatggctaaacttcccaccaaaccaacaatgtcattactcaaccaataacaaaccttctccttacccaccatccaattatccacaaaggccatccctaaatcaaccacanagcctggtctaccgcacttcaatgacgaacaccacctttagcacaaaccaaaacaccaaccaagaaatgaattntgcagcgaaaaaacctgtagaattcaccccaattctggtgtcctatgctgacttgctcccatatctactngataactcaatg

SEQ ID NO: 74554 - DNA, 435 bp, Glycine max
  unsure (1)..(435): unsure at all n locations
taggggagaagngaagttattatgttgttcatccccttaggcacttctctctctntcgaatatgcttggaaaaattgtttccgtgatgaaaatccaagccgaggcgcttccgaaacgtttccgtaacatttccgtgaggaatttcgtgaaggtttcgaccgctctttgatgttcttcattcgttcttcatcgntcttcgatcttcaacgggtnagtacctcgaactaagcttttcgattcattctatgtacccgtggtggtccacattgtgtttcgtgtattttattcttgtttcatttactttttatacccnctttcgacgtacttaagccattntatttaagtcatttctcgcttatcctaaaaataaaataaatttccaccgatcgtttggattgtattatccgttaacttcggttgaaatgaattccgacc

SEQ ID NO: 74555 - DNA, 354 bp, Glycine max
  unsure (1)..(354): unsure at all n locations
aaaagggatgccccacattatntccatgacacanatgcanaantgatgatttggaaatttatgcaaaactggtcatgcatgcacctatgcggacactcaagtgtcaaaattttatggtcatgtgatgctagggctnangatttatttcctctattttaatcaacccaatgttcccaaaatatgttcttttatcaatttgtgcatttatatcagtccatttcgggcgttcggtgaaatatcacagcattcacctttacgtcgaacacgttattttcattccctcctccccttatctccattttccttcgctttcattcaattcctacttcttgcattcatgtttattcccacccc

SEQ ID NO: 74556 - DNA, 245 bp, Glycine max
gctcgatgaggatagtgtgaaggtgaaacttttgtctttattgttatcacagagtggtacctggagatatgtcgcgagggtcaggagaccttgaggacgtcaggtggtgtgctattgcccaaaaccaagcttgaccaatcccgacccaacccgggcatagtcggtcagtgagaacatgtgacgtacctaagcaggcgagctcctggcagtcaacagataagttgaaaacatgaccacatagcacg

SEQ ID NO: 74557 - DNA, 451 bp, Glycine max
  unsure (1)..(451): unsure at all n locations
ttaagcaccgcggctgcagcttgaggtgtgtaaccaccattttttcatatataacaccggtcacgtgtctactatcattgtgataatctctttctctgtttttgggggtgctacttgagttgccaagcctctccatctttgggcgtgttctttgaaagatccgtccccccttttgcacacgttctgtagttgcatcctatccgaagacattatactgacactgcctaacgaaggccaccactaggtccttccaagaatggactcgggaaggttccaagttagtgtaccaggtaacagctacccagtaagactttctcagganaaatgtatcagcagtttctcatcttttgcgtatgcccncatcttccgacagtacatctttagatggttcttggagcgagtagcccccttgtacttcccaactccggcacgttgaacttgggaatgacat

SEQ ID NO: 74558 - DNA, 488 bp, Glycine max
  unsure (1)..(488): unsure at all n locations
ctcgaanaggcgaagccattntacaagttgctcaagaaaactgattccttcctatgagacaagacttatgaacaagctntcttggcttttaagaataccatacgcatactcctatatctctcagtagctgatgaagccgttagctcaacccacgtacaagaggaagggaaacattagtttcctaaaactttcaccagcaacatactctataacgccgagaagtgctaccatagccacaccatactctataatgtcgggaaacattagttcctggctttcaagaataccatagccacaccaccaatagcactcattacctcggctcgacgacttaagccctactttcagagtcatcaagtggtggtcaaaacaaactacagttagagataggggagcaacatgaagacttagccttgaagcttgaagaagttntgttttttacatgcccaaatctctttagtggaacttgtattgagtgttatattgtg

SEQ ID NO: 74559 - DNA, 420 bp, Glycine max
  unsure (1)..(420): unsure at all n locations
ctgaaaagacaacgctgataaatcataattatagtttgttattgcagtatgtattattgagctcatcacctcacgaacgaattctattaattaatttaatgcggntaattctttggacataaaacataataacttgcatttgaaggatcaaatcagtataaagtaaaataaaggaggtaaataaggagaaatggtttacctttgaanggcataatgagaaaatgttaagaaaataatcanatactactgcccagttagatactttgacttggtgcccaacagcaattagagtgcatcgacaatttctattttgacttagtgtgcatgtgcaacagcaattatagctttcaacggtcaaggttctcactgccacattaactattgttgcccaagtggcacttatatatctacaatagtatt

SEQ ID NO: 74560 - DNA, 418 bp, Glycine max
  unsure (1)..(418): unsure at all n locations
ttttcttccttcatatgagtagggatgagagactccatanagcggcaaacaacatcaaccacatacataatatctagccttgtacatattaagtacctcaagttacctgcaagactctntaacgaattaggatcttctnntatttcaccatcaagccttgacaatatcaagttaccttccatcggtgtgttcagaaaagttgtaatcaaactttgaaatttctttaacacctttccatagctctcttgagaaacaaaaatgtcattctccatttgcttcatttctagtcccaagtagtagtccataagccctatatctatgtcatctcaaaataacaagacatatacctgaaatcttacacacacttgactatcgtcaatagagatatgatcatccacattaagaaacaagaaaatat

SEQ ID NO: 74561 - DNA, 87 bp, Glycine max
cgaagaacggatgaagaacgatgaagaacggacgaaaaccttcacggatatgcttacggaaacatctaggaagcggtacggaagcac

SEQ ID NO: 74562 - DNA, 385 bp, Glycine max
  unsure (1)..(385): unsure at all n locations
agtcacctgcggcatgcaagccttccagatctgatcatggaaagacttggcaacttgttcttattatgcattaccagtacaatacggatatggctcccgatcggaaccagcttcagagtatgactaagagagagcatgaatccattaaggaatatgcccaaagatggagagatctcacagcccaagttgtcccgcccatgacggagagggagatgatcacaatcatggtagatactttgcctacgttctactatgaaaagctgataggctacatgccanctaactctgcgaatctcgtctttgccggagaaagaattgaatcaggactgagaaaaggtaagttcgaatatgccttccacacggctcccaataacaacaggagagc

SEQ ID NO: 74563 - DNA, 450 bp, Glycine max
ctaggatgaactcactctatcctctctatacccctaaatccagatttggccttccaactctcaaagactcactctttttccactcataacaccatattctcactttctataccctaggttaactctacccttcatctctaacagttttccataagcaatttcagcacaccaacatcaagagcatcatcataaaaaccctaagactgaatgggtaagcttaactcactcaaacataacaagtttagcatgctttcgtcaaatctcttcacaaataactatcacaaagcattaaccaagcaaaactgcccatcatatctcccatagccccatacccacgaaaatcaagtgagaaagaagtctacccaaacctgagattgcgagggcccacacgtagagatgcgcttcacgactccaaaaatgccctcctttcgtgatatggagcagaaatga

SEQ ID NO: 74564 - DNA, 282 bp, Glycine max
  unsure (1)..(282): unsure at all n locations
agctgggttcgaggtacttacccgttgaagatcgattatcgatgaagaacgaatgaagaacgtcgaagaacggttgaaatctttgcgaaattcctcacggaanacgttacggaaacgtttcggaagcgcctcggcttagattttcttaacggaaacatattttccaagcaaattcnaaagagagagaagtgcctaaggggctgaccccttccttcttgccttcctcccctatttatagcaaaataggggaggtggttgccgcccagctcgcccaggcgagca

SEQ ID NO: 74565 - DNA, 468 bp, Glycine max
  unsure (1)..(468): unsure at all n locations
tctaagctcgagccnantcctgtcaccatataccttgacccagggtgagaatgtcaatccttaccctcggaagcaaaaaaagaatagaggggaaatttccaatcaaagaanaagagaaggaaaattnccaatgatcgtacttttatgataagaaggaaaattccccaatcaaagagtgggagaaagcaaaaagaaaagaaaggaaaattcccaatcaaagaatgggagaaagtataaaaaggaagaagaagaagganagaaagctcctgatcaaggatcgaaagaaaacagaagaaatgtgcagagaggtctttggaccggacaatatctgaacaatacagaattgccaccaaatgaacgaaaaaagaaggaaagggaaccacgacctanaatagtcttctcccttngattaccaaccaaaatcccgtgcgctatgcgacccttttttctcgccccgcactaaacaaa

SEQ ID NO: 74566 - DNA, 168 bp, Glycine max
  unsure (1)..(168): unsure at all n locations
ctagataacaagtaataaatgaagatngatactatatgaattaattatctcactaactaactaactaactaactaactaacttccactaatgtatataccgactactcatgagaaagggaagcgccctgaatacgcccatctatattacgctaataaactaatcacac

SEQ ID NO: 74567 - DNA, 356 bp, Glycine max
ctctcccagactacaataagactctctgctacaacctgatacatatatctgatattaataagaaggtactgcacgatgtttgatcattcgaagcggtatttcattcgttactattagtaaggatgaccactttcctcagaaaaggggcgtggatctgtacctatctatctatctaacaaaccactcgtcgacaatgaataatagagactgcgctacggcacgttatggaggaagaccgctattgaacctcatacataatgcgcacacgaatccttccttgtatatatgcctacccgtctttgtacacgctagatcttgcttacaaccggtgtggctcggtactttacactattata

SEQ ID NO: 74568 - DNA, 393 bp, Glycine max
  unsure (1)..(393): unsure at all n locations
gctncatgatgatgaatcaagnngantcaatttgttttgatgataacaaagatgatgacaganagcccaagataatgatttcaagattgagtcaacaagattcaagaatcaagagaattttgatttcaagaagacttcacaagggaagtattgaaaagattttcaaaaaacaaacatagcatagttttgtttttcaaaagagtttttctcaaaattttctaatttactagagtttctactctctggtaatcgattaccaattacctgtaattgattaccagtagcanagtttgattcaaaagcttttaatgaattacaacgttccaattgattcaaaatggtgtatcaattcaagatattagaatcaataccaatgatctgaacgtcaaattg

SEQ ID NO: 74569 - DNA, 479 bp, Glycine max
  unsure (1)..(479): unsure at all n locations
gctcctaataactgaaccattttatcaataaacacaagtttttntttttcatataattagagntaatctctattatcttagtgagagtgattctcctaaattcttgagtgattcaagaacaccttggctgtatcaaaggactttcacaacctttgtgtgttgccctcgctggaaagagtgattctttccttcctttcatcatcacccttgttctttcaaaccacaattccaaaaaatacacctctgcccagaattatctcgtggccataactcccattttacgcactcaaattaagtgattcttgagcctaaattgaatttcaaaacgagacctttcacctcgttttggaatcacctcatttggagccctgtagcttcagttattgccatttctatatttctgtccagccaccacttaacctacgttttaccatcccattcatccatgttatgccatgaaccactctattaagacccac

SEQ ID NO: 74570 - DNA, 395 bp, Glycine max
  unsure (1)..(395): unsure at all n locations
agcttcaacattcaatttcgagcgttccgatatatnactgtattcaatcgaacatccgagtaaaaaacttattgtcgtttgaatttgctcagagcttcgataatcaatttcgagtgtctcaatatattacgtgactcagtcagacaaccgagtaaatagttattttcatttgaatttgctcagagcttcggtatcaatttcgagcgtgtggatttattacaggtctcaatcagaacatcgagtaanaagatattgttggttgagatgctcacagcttaacattcaatatctgagcggtttgatatattacgggactgaatcatacatccgagtaataagttactgtcgtttgaagtggttacacgtatgctttcagatcggccgcttgattattc

SEQ ID NO: 74571 - DNA, 466 bp, Glycine max
  unsure (1)..(466): unsure at all n locations
atcaataaagacaagttgtagtttattcataaaattagagnttatctcttttatcttaatgagagtgattctgctaaattcttgagtgattcaagaacaccttggctgtatcaaaggactttcacaacctttgtgtgttgccctcgctggaaagagtgattctttccttcctttcatcttcacccttgttctttcaaaccacaattccagaaaatccacctctgcccagaattatctcgtggccataactcccattttacgcactcaaattaagtgattcttgagcctaaattgactttcaaaacgagacctttcacctcgttctggaatcacctcatttggagccctgtagcttcagttattgccatttctatatttctgtccagccaccacttaacctacattntaccatcccattcatcccatttatgccaagaaccaccttattaagacccacgaaattaac

SEQ ID NO: 74572 - DNA, 403 bp, Glycine max
  unsure (1)..(403): unsure at all n locations
agcttatctctgaaatacagggcatcattgttcttatattatctgaggacaaaacagaaaaatatcagaataaacttccatatggattttggtcacagcccaacaatacaccatcttgaaccaacatgcatataacacacaaactgcaccctccatacacacatgattntaaccccaacaatcaacattgagcaagcttaagcagtgatcaaacttgctctgtggaactagctatgagacaatattaacatgattgtgcagagtgtcgatcttatgaactttgattcttctttctgaccgaatgaagcgatatctaacatctatatgcttggttctatcatgatgaaccttgatcttggcatgtatatagcctaaggctatcacagtgatttatcatactctt

SEQ ID NO: 74573 - DNA, 389 bp, Glycine max
  unsure (1)..(389): unsure at all n locations
acttagcatatcaccacagggaccacgagaggacaaaacacatagatgtgatactacactccaccacagatgcgatngaancngacacctcgcccctggagaaaggggcaacagaagaaaacccggctaatatggccacacagtccctctccagggacaagttcaagcactgcttggactcgcaaaactccgaagatgcctacagcagattgcgagaagtgcagccccgaatcgcaagacaaacactcgctgatatggagacaaggcggagatacgcggagtgagactcaaaaatcacacatggcacaagcgggaagactctaagaggtgccgccacaaccgaactcagcattcaaaccgaaccggtctggcaccacagcacacccaga

SEQ ID NO: 74574 - DNA, 310 bp, Glycine max
  unsure (1)..(310): unsure at all n locations
agtcacctgcggcatgaagctttatggggctgatcttgagcttttctatttccttcattggngattntcaaccatggagttacaacggaagacaaaggagaagaggggagaggaggcaccattcactagagaataagccttggaagaagaagcttaaccaccaagagagtgtcttggataagatgtttatagaggaaacttctatggaggaatagaatgatggagagagggagagagagacacacctacatataaagatagttgcctggaaagttgaagtaagaaagagagagatgttgaactttgaagt

SEQ ID NO: 74575 - DNA, 386 bp, Glycine max
  unsure (1)..(386): unsure at all n locations
aaggggacgtagtgctatgatagagtcccacggcgcaaagaatgacatnagagcgtgcccctccctcttcgagagacgttgnagcgggaggagggcatgatggagatgagccgggggcataaccgcgggaagggagaggaggtaccaccaactatcaattctgatgtgctacatggaaacggcagcgaaanacgcgcgcggtcagcggatgaagaagcatgttcaataagggtgtgtgaatcatagactaacacacaataagtgagcctagtgctcaagcggaagctcggatcctgagagccaaagacacagaaggccgatggacatgccctcactgtccgacgaacgccatgggacctgaagacaaatcgaacgcggcaagcgca

SEQ ID NO: 74576 - DNA, 298 bp, Glycine max
ggggacctccaggaagtatagaatgactgaaaaggccctcagaagagcatatcctctctactatgaaggagctatgaacagtcccaggctagataaggagacgaatgttaaaagttttgcacaatggaatactctttagaagttgattaggaggaggaacaccttgtggctggttcttatggactaaatcgagtaaggacaagtaactcctctatagaccataaacctacctcttgctatggttgctcacttaaggagcctccgcaaactaggttacttgttccaattaccccccccc

SEQ ID NO: 74577 - DNA, 309 bp, Glycine max
gggggatcacggttgtaccctcccccaccgaaatggtggcgttaatggatttcattcaccacttgtcatctcaagtacactatgacttgttattgacacacatgtgtaacttggtaattaaattgggactacaatgacgtaagtatcttgaagatgcttttgaacttataatttgttaaagatatttcaataaattggagctaaataaacccagatctttcagttacacacggtatctttgagttagcagaacagagatatgctgtagtaaattgataatatccacagtctagctgatatgatcaatga

SEQ ID NO: 74578 - DNA, 250 bp, Glycine max
  unsure (1)..(250): unsure at all n locations
gatatattatgcgcctgaatcggacatcttttngtttagntatgaccacnngaacccctccgagagctttcgttgttcaatttacagcgcctcgctttattatgcaccagaatcggactctcgagagacaaggtatgactaatcgaatttctcgagagcattcgatgtggaattgtaagcgtctcaatatattattgcgcctgaaacggacttccatgtgacaaggtatgttctttgtatttatcgagag

SEQ ID NO: 74579 - DNA, 383 bp, Glycine max
  unsure (1)..(383): unsure at all n locations
agctattaaacttggtcgtgtactctccatcatattgcttccgtgtttcaaatcctgaaattccctcgccttccgcttccttccatctcgtggaaagtaattctccagaaatntgtccttgaaggcattccaaggaatcacgcctcccgttgcaacaaatgaaggcttcacgaacttccaccaattctcggcctctccttggagcataaatgtcggataagggaccttatgctcctcgaggcaacccatcgccttgaaaatcttctccgtctcagctaaccacaacctatcaccttccggatcatagtctccactgaactttggctggtggttcttacngaaagccatgagctcccgatactccgtccgcttcacatcacgtt

SEQ ID NO: 74580 - DNA, 484 bp, Glycine max
  unsure (1)..(484): unsure at all n locations
tctcaagctcccagagaaggagtccacggaggaaatgcttaccacctcanaatactggaaagcggtttctaatgattcctctgcggcctccacataaggcatagaggatgggcagctcgccaagatgtcttcttcgcctgatacgatgaccagatgcccatccactacgaatttcaacttttggtggagtgtagagggaacaactcccactgagtggatccacggacgccccaacagacagttgtagggggggttaatatccattatttggaaggtacctagacaagtgagagggcctatgtgctctgagagatagatctcccctcttacctctcggcgtgcgcgcgcaagcgctcaacacactatagatctgctttatgtgtgaagcatagtatataaatatttctaagtgcgcttggcgtctctnttncaactggaaccattatcgatgacactttgctacgatatggtcatacactcactg

SEQ ID NO: 74581 - DNA, 320 bp, Glycine max
  unsure (1)..(320): unsure at all n locations
atgaatacatgattnggatgacgccaaaagaagaacaaacaggcttattttgttcaacgataaatacaagatggttcaaacaaccaaagccttgattcaagatttcttcaagataaagccttgcctcacattgaaaagggttcaagtcattcaacgcacatgtaatcgattaccaatacatgntatcgattaccaatggtntgaaagtgtgtaatcgattacacatcatatgtaatcgattaccagagactctagnacgtgtgaaatcaaatattagatgaagggtcacaactgttcaagaaaaacaactgtgtaatcga

SEQ ID NO: 74582 - DNA, 488 bp, Glycine max
  unsure (1)..(488): unsure at all n locations
agctcctatttaccaatagatggactaaactaagaacagagtttgtattgttctaccaatgttgatcccaagaccaaggattatagatgtctgtgatacaatattcttgtcaagagtagagtggaaaacctccaaggccttgtcaatgcatttacactnggcatacatgtcaatgagtgagnttgcaactatagcataagagatgagccctgtctgcctggccacctcaagaagttcatccctatgtctaaattacataaacaagaacaagcagagaatgcaatggctatggtgatttcctttggcatgatactttgtgctttcatcattntaaatgtatcaatagttntttgaggcatcaaacaattctcataagcgaatatcattgtaatccatgaaatcttgtctctattangcattttgtcaaacatcagccttatgacatgaacacgaacctctatacctctctctgaagtgtgaactggacc

SEQ ID NO: 74583 - DNA, 167 bp, Glycine max
caaactaatggagttgatgatatgctgtttaggtagggtggcttcatatatgttaagtcccctaattcttaccaagttccataatgtctggctaaaatttcaagagaaatgataatatgtttgtttgtgtataaaacataatgcctttcaacatcaataaacgtttt

SEQ ID NO: 74584 - DNA, 135 bp, Glycine max
tggagatatgtcgcgggggtcaggagacctggtcgacggcaggtggggtgctattgcccaaaacaaactggacccaatcccgacccaacccgggcatagtcggtcagagagaacctgtgatgtacctaaacaggc

SEQ ID NO: 74585 - DNA, 439 bp, Glycine max
  unsure (1)..(439): unsure at all n locations
aagtcacctgcggcatgcaaacctctctgttccgaagtctctgttctttaattcctttctctttgattattcatctttgnttctttctttgttctctctattcctctatattctgatatttgagtctctctttctgtgtttcgagcctattattcctgttttttgagtctgtatgttctccaagtctgtgtttttttcttttacctctgttaagtgtgtcatttatgctcgttctgcagttttcttagtatagttcttgtatgtattattccttactccgtttccattccatgcttctgcatatatcttacactattgctatttgctttaccctatttgtctttttctctatctctatctcataccctctacttatcattcatttaatcattcaattacttttttatgtccccccccccccctctcctacttttttttc

SEQ ID NO: 74586 - DNA, 265 bp, Glycine max
  unsure (1)..(265): unsure at all n locations
taagctccacaggctatctatgccttaagcaagctcctagagcttgggttgtttactataagaactgattctcaagctggattntcaatctagcaagtgtgatccctctcttcttgctattccaaaggatcatcaactggttgcatgctgatctatgttgatgacactaatatcacacgcaacaatccaactttgctgcagcactcatttccaagcttaataatgtgttctccctcaaagatcttggctgtctgggactatttct

SEQ ID NO: 74587 - DNA, 377 bp, Glycine max
  unsure (1)..(377): unsure at all n locations
atgaagctgcctcggaatttattctgcccagcctacgntaaccgnngaatcttnttgaaatttggtttgcaacttcacaagacactnttccatgatctgaccgtgctagaagcttccgttcccgagagcatttcttatntaagcacttcagcctttggtttcgtgtagcttaagaaaaacgtcatttcttcttctctctttcttccaaagccatatctaaagttccaagcactttctccatcacccacagccaccattagccaccacagaccatcattgttctccattgaaaacccacaccgagaggaacccttcaaccgaagcggaatcttccaactcggcttgcggtttcggtagagaacgataaccctaatctg

SEQ ID NO: 74588 - DNA, 476 bp, Glycine max
  unsure (1)..(476): unsure at all n locations
ctcgnagataaacaacatctatatattggtagtatttcatgtctcacgtaaccacaagctgcaataatgtgtgaacatggatagtgaagcgcagaatactcttcgcattgacaatgacgaccattcaagtttactgcccacttttgtccaccacgttgcgttatagggttgaagctctcctctacttcaaaccttgtggagtggatatcatacacgcgaacgatgtgcatacaagcttggtcttgatttttcctcagctctttaacaagctttgaacaatatacttggccttcatataactgtctgtgggcttggcggacacgctcaacatagtactttcgacacctattgtatgttgatttcaccaatgttgttatgggaatgttgcgacaatcctttataaccttattgatacattctgagaggttcgttgtcatgtggccatatctacgtcgcttatctatcataagccatcg

SEQ ID NO: 74589 - DNA, 96 bp, Glycine max
tctatactagctatttgaattctttattcctgaatgtacaaccttcaaattgttgctcgttcccctctttgagaatgaggaggatcttcataggac

SEQ ID NO: 74590 - DNA, 342 bp, Glycine max
  unsure (1)..(342): unsure at all n locations
ataagtgcggggctgggagacgattttanattggtcgcgacacgngaagacgacgcgccaagtacctcggattnggtccgaccatgccctcctgatttccagctgggaaattggcgggtggaggaacgccccggtatttacgcaacaagcataatgcaaacctttacggttataaaagctctatagttgggcctacgctttagagatttcttttgttaaggctctgtgtcttctgtctttgaatttataatacaaggatctttcttcatctgtcctggtctctacccatactcattcatatgcatggttactttctttttctgaaacggcagattcgatgac

SEQ ID NO: 74591 - DNA, 433 bp, Glycine max
  unsure (1)..(433): unsure at all n locations
aatgtatgtatacatgattctgatgatgtcaaaagaagaatcatacaaggctcattntgtttaaagattaatacaagattgtttcaacaaacaaagccttgattcaagatttcttcaagatcaagccttgcctcacaatgaaaggtttcaagtcattcaaggcacatgtaatcgattaccaatacatgtaatcgattactaatggtttgaaagtgtgtaatcaattactcatcatatgtaatcgattaccagagacaatgaacgttgggaattcaaattttaaatgaaggttcacaattgttcaagacaaacaactgtgtaatcgattacactaattctgtaatcgatactagagaggactttcaggaatatcgccaacagtcacatcttatcattnggatattgaataatcatcacaggcctatatatatgt

SEQ ID NO: 74592 - DNA, 228 bp, Glycine max
  unsure (1)..(228): unsure at all n locations
aagatatcttgtgtagctaaaaaaaataggtttttctcctcatggctntgataggtagttggagcattgtcttgaggtaagccctctgaaggcacaactccattggacgctaggagggttacattgatgtgttgatctccatggtgtgtgcatgtgcccttcccttatagtccaacattgcttttgcctcaatttaagtcagctcttcatgccaagccacttcttttt

SEQ ID NO: 74593 - DNA, 370 bp, Glycine max
  unsure (1)..(370): unsure at all n locations
tactaagcttatgtgacaggttcggagttgttttatctttntttattatatattttgactgaatgaaaggtcatttaaggcattggaccattaaacgatctttcgattcttttgaaaggagagaaaacattaaggcattggaccattaatgatctcttggtttctgaaagaggtgacaaagcttatgtgttggttttaggtctttaaaatccacgtttaaccaataaaagtgaaaaggaccatttcaaggcgttggaccttacaaatgtgtttttacgtgatgacaaaggcttggtttatgaattgactttagccttactttcactttggttattatccaattcgtataataaagaaaattcctaacata

SEQ ID NO: 74594 - DNA, 135 bp, Glycine max
  unsure (1)..(135): unsure at all n locations
cttaagcgacctgcaggctgcagctgaatgagaagtgagaagggaattctttgtttttattcgntgaccacagagtggtacctggagatatgtcgcgggggtcacgataccttggggacgtcatgaggggagctc

SEQ ID NO: 74595 - DNA, 378 bp, Glycine max
  unsure (1)..(378): unsure at all n locations
agctcctcaggagctacctagtctataaatagaagaatgtgttacacttgnntgtaaattgatgaatgagagtcttgtgagacataactcanagttcaacttctctctctttttcttccttcaatttcgtgctccccctctctctttctctccctctttcttttcctccattgaagcatcctctccaagcttcttatcccagtctcatcttggtggtgaagctccttcttccaaggcttattccttaatggatggcgccgcctcttacctcttctccttagtcttccgctgcatctccatggtggataattgccattaaaggacctcaatgaagctcaaagatccagtctccatagatgctccacaagcacgttccat

SEQ ID NO: 74596 - DNA, 206 bp, Glycine max
tatcccttttattatcttcttgtctttactatttatcaagcatccactattaatataatcttttattaatcccaacatattactcctttatatactatcataaacctgtacttattcatctactgtctattaattaacttctgtcgtctttatttttaacccccgccccctccccccccgtttttatattatgtatttactaattg

SEQ ID NO: 74597 - DNA, 206 bp, Glycine max
  unsure (1)..(206): unsure at all n locations
gctgttagctttcattggggagtncgatcttctttgtttctctaaatngngggagtgtgctcaaatatatggggcaattttgatttgttttcttgcttgattacgttgaattatggggtggtatgagatggccctatgcctataatgcattttgaaacaataagacatgccacattgtccccgttctcttgctattgatgcctaaa

SEQ ID NO: 74598 - DNA, 488 bp, Glycine max
  unsure (1)..(488): unsure at all n locations
gctaagccccgtgcggggaagaatcacatgttgcncatctaaaggttatattgtgaatgtatgtatacatgattntgatgatgtcaaaagaagaatcaaacaaggctcattctgcttcaagattaatacaagattgtttcaacaaacaaagccttgattcaagatttcttcaagatcaagcctcgcctcacaatgaaaggtttcaagtcattcaaggcacatgtaatcgattaccaatacatgtaattgattaccaatggtttgaaagtgtattacacatcatatgtaatcgattaccagagactctgaacgttgggaattcaaatcttaaatgaagggtcacaactggtcaagaagaacaactgtgtaatcgatttcactaattctgtaatcgattaccagagagggatttcatagaatatcaccaacagtcacgtcttatcatttggatttngaatggccatcaaacgcctatatatatgtgtgac

SEQ ID NO: 74599 - DNA, 404 bp, Glycine max
  unsure (1)..(404): unsure at all n locations
agctnntgataattttatatatgcaatttgaatatagtttgtcttatntatactagnttttccctaacggattntgtcattntgtgccaaggagaatccatatgcaattattggataatcaaaatttgattacactgtcccccaatacctaacaattacaactaattggcaatttggtgcaattcggtcactaaggttagcttcctccctatgatattgcattagacatagtcattgcggtaagaagaccttgtgagggtcctctntgtcttaactggtatctgcacctcttggttctggttctgcacccctgattgtgtgtctctactgctacttgctcctttcttcgtatcatccgttggtccatggagatttcaccttgtctcaaggtgatagtcctcaca

SEQ ID NO: 74600 - DNA, 409 bp, Glycine max
  unsure (1)..(409): unsure at all n locations
gagcaccgcagctgcagctgaagaaacttgatgccttgttcaacctattactcagctngccatgaatcaganatctatacctgttacaagagtttgtggtctatgttcttctgcagatcaccatatagatctttgtccttctttgcagcaatctggagtcaatgagcaacctgaagcttatgctgcaaacatttataataaacctcctcagcagcaaaaccaacaacaacagaataattatgacctttcaagcaatagatacaatccaggttggaggaatcatccaaatctgagatgggcaagtcctccacaacaacaacagtatgtccctccttttcataatgttgctagtccaagcaagccatatgttccttcttcaatacagcagcagcaacaacagcagtcacaa

SEQ ID NO: 74601 - DNA, 494 bp, Glycine max
  unsure (1)..(494): unsure at all n locations
tactcagctcgcgccacggagtttccgactatgctcttgtgtggtggaacaagctacaaaaggagagagcanganatgaagagccaatggttgatacatggacggagatgaaaaagatcatgaggaagcggtatgtgccggctagttactcaagggacttgaaattcaagctccaaaaactaacccaaggcaacaagggggttgaggagtatttcaaggaaatggatgtgctcatgattcaagcaaatattgaagaagatgaggaggtaactatggctcgatttcttaatggtttgactaatgatatccgtgatattgttgagctgcacgagtttgttgaaatggatgatttgcttcacaaagcaatccaagtggagcaacaattaataaggaagggagtggctaagaggagttttaccaactttggttcttctagttggaaagacanaggtaagaaagatggggctgctacttctagtagttccacacctatc

SEQ ID NO: 74602 - DNA, 288 bp, Glycine max
  unsure (1)..(288): unsure at all n locations
actagaagncaatatcaatctatctattaacatgatctgggacactgtgtatanaactcattctccatgctgatgcctagatcatgatgatgcatgtgtccttaagaccattcaacaggtgaaactagactgattcttataacatgataagacggagcgagttcatcgcattttcacgaagacatcgggtacagaaacctaccagtatcatgttgcttaatgcgggctgccgagatagtacccaacaaaatatgcgatgatgctaataagacacgctactatcatgag

SEQ ID NO: 74603 - DNA, 330 bp, Glycine max
cttctgcgatttatatgaatacacacatcatacggcgatgtgtagaggccgctgattaaacttatagtagaagagatgagttgccttcgctttataggaacctcagtatgttagatagatatataaccaccttatctagtcttacacgaagatcacctctcttccagatatactttggcccttcaaaccccgcatctattaagtcataaaactctattgtctccctgaaggccctcacacccgcggtgcaaggcttagaggaccctcttgtccgattagattcatacataattgagtggaagtctccttgtgataccctaatctctttcg

SEQ ID NO: 74604 - DNA, 286 bp, Glycine max
cgcactccagacatcttgtcatagattctaacggtcacaacatggaatagtgttctgtgaacttgcagaccaaatttcgagaagatccaacggttaatgaatgttgggcagcgtttttacagaggcagctacctgtagctttctctagaagcctcattaagacgtttcctctagaagctctctcgtggcttctttgagaagctttctcaagaggctttttgagaagctacatccttatctatccacccctctattaactaaattaacttccttaaaaaatattacg

SEQ ID NO: 74605 - DNA, 360 bp, Glycine max
  unsure (1)..(360): unsure at all n locations
taggtaataggtatgacattctaggatcatncttgattgtgtttcttgtaagaattcttaagccaagaactgattcttattntntgtttctcctangagggtctctgacatggtggtataatataaggattagaaatcttgtgaaatcattgtatgtatccatccttaaatacagtgttacacatgcaattgtgacttatatggatcaacttgagtgaagggtatttctgtctattcacataaaatactggtgcacctagcattacccaatttattacgggctagtgtacttcaagttgggcttggcccaaattgagaggtgacagccgagcccatggagcccaggagcatgagtagcaa

SEQ ID NO: 74606 - DNA, 455 bp, Glycine max
  unsure (1)..(455): unsure at all n locations
ctactgccatntgaatgtggtgctttgtgttttattgaatgcccaaccaaaatagggntgtcttgatgctcattntcttgacttagatcagccaaagtctcanggttgtcatcatcaccaagctcatacagatgcagcatttcttctttagaaatggtcctatgcacctgctgtctatcaaccaccctagcagcaagtccctccttgttacctagtgaaatcatttccacaagttagaaaaaattggcaaatgaacaatagaagcacatcatgttgtattacctggcgctnatatatcttctcctccatagttccatgagccagcaatcgataagcaaacacaggctttttctgcccatacctataaacatgaaaattatttngatntcaatcacatngtctgtcaattgttacaatataaataatttgtacatgagcaaatataaagcatgtat

SEQ ID NO: 74607 - DNA, 182 bp, Glycine max
  unsure (1)..(182): unsure at all n locations
agcttctccctcattttcctatgcatagggggaggagtgtaatttctttatgtncaaccctcctgggatctgagaatcacttagaattagagagaaaaattgcttccgtgaagaaaatccaagccgaggctgcttcgtaacgcttgcgatactgtgttgggggtgacctcgcgaacattctc

SEQ ID NO: 74608 - DNA, 500 bp, Glycine max
  unsure (1)..(500): unsure at all n locations
ctaagctcccggctttatttattgagacaatggagactaatgtgatctgtttgatttgtctacgaggcctacactaacatggaccatctntataagtaattcaaaatgaatcattaatatagattaatctaaatccacattattatggtacacctttcataatatattgtttctccctcactgccatagtcttgtcaatcaacctacagcctcctaccttctatgtccgaccccatcctctaatttttattttttttatagatgcacaacaaaaatatctgacttagaaaaacataattttttttagttgattcaagtcttcccttgttgcaatcatccaatctaagctttaaattgatttctcttttctacattgcatcacttgaataatttaattcttcgtatttgactatagacaaatattgtttctcaatcgtgcttcataccttgagcacctttagattcatctctgtttcatcttctacagagacaatcatagt

SEQ ID NO: 74609 - DNA, 404 bp, Glycine max
agcttactcggagccatttcctgcgaaggcaaacatttttatttttgtttaccagagggatactattcttaaaacaaaaatgacatacaacctcctcccataaatacaaacatcaatgtaaatttagagcaagcttatgcgcatattttcttacaaacgttctcttgcacaagacattctattaaccgaataaatatgccaccatatacaatcaacgccgagtgttacctaaatagggaacgtacttactggtgcttaggttcttacacgccacctgatgggtgaatcacatacacgcatcatctagtggctgaggcccagaaagcccatttccatctggttgtttcatcctaacaacgcaaacttatatgatctgaaatttacacataagggttctccccccc

SEQ ID NO: 74610 - DNA, 372 bp, Glycine max
  unsure (1)..(372): unsure at all n locations
aaacaacttaaaggctgattgtaactgaaattgtggcaaccaaaagtcacccccaacagccaacaagtcaaccaccatgtggtctcccacaaggctgatgcctacgttgccaattgggcccttattacaacatgaactacacctaactaaagcccctttagttgaataacccaaaacatagtattggtcagccaactttacaaggattgggccattatttagactaactaaacactctgatatagaaacaaagtggagacactcagtcctccttcatctgngccatgatacaactcacaacctcggacttttcttcttgagacttgagcttggattgaaatagtatggacaacacttgttgaagagcttact

SEQ ID NO: 74611 - DNA, 457 bp, Glycine max
  unsure (1)..(457): unsure at all n locations
atcttaagcaccgcaggctgcaagctgaatgaggatgttgataatgngtgttagcttctctactggaaacgntgaagggatggaagaagatgatgaagttgaagatcaacatgagcctacagctcaatggagtcttttttagtctcttatgattcagaagatggatgctatgctccacctccatcaagagcactcaacanaagttcatagctctttggagaatataactcccaggctaaaaaaaacatagagactaggctcactcttagtaacttccgaaaccctaatgaggatgaagcttagttgtgttttaagcgtctgcttctgctgtttggtatcccttatgcatgtctctataattttcacgttttcctgtcggctgttatgtttcactcacgatatatcactttgacgttctccatctcttttttccccaccccgcccccccccccctcct

SEQ ID NO: 74612 - DNA, 369 bp, Glycine max
  unsure (1)..(369): unsure at all n locations
gctcgatttagttagaacatgatggatacatgatttggacttgtangtttngtttcgngcaagattggatgacgcgaagtgtgtgtatcgaaatatgctctctgtgcagaatttgctgtaaaattgcgcagcagaattttgcacaagtgcagaaaaatccatgtatttgctggatgtggaaagagtaatgtaaaatgagttctggatggttgttattagatcccaacggtcaccatgtaggcttatgtactatagacttccagtacaagtttggagtcgattcaacggtaaacgaatggatggaaggaattgttactggcgtctttatgtgagaatagttgcgaatttgtctaataagatcttcctata

SEQ ID NO: 74613 - DNA, 461 bp, Glycine max
  unsure (1)..(461): unsure at all n locations
agcttaatcctcacggccactatttctctcataagaataattgtttaaggtaattcttcaaattaacaaccaacacaagtctcaacttttgcacttcatctcattccatacaatcacaaatatacaaaatgaatccgaaggactttcttgccttgtaatgaggcagggctacaaacaattcatggtttttctaggatataaaacttaagttctaggagaccattcatccttagatcacctttttctttaattcccagcttttattgatatgccacaagtataatcgacattaagctcaagcaacaacacataanacttcaattatttctgaaattttcatcttttttatttatttttattttagcagtttatgattactgctactntcatatagttnctgcggctgntgctnttctccccgcactcaaaacatccaaactaattttttaaatttggaatat

SEQ ID NO: 74614 - DNA, 259 bp, Glycine max
  unsure (1)..(259): unsure at all n locations
gctgtacgtttgcaatatcgcaacggcgatgccgctattgcatcagttgtacggcgaggagagaggagatagtaccctcattggngctcgcacgacaggcagagagaagagacccgtcattggcactgacggtacatgcctacgtcgacagttcccccattggagactattactctctctgcgattcgtgatgctcacatcatgcactttgagtccgcggtagctcatctcgctgcttaacttaaaacactttcacgtg

SEQ ID NO: 74615 - DNA, 307 bp, Glycine max
  unsure (1)..(307): unsure at all n locations
agcttagctccaaactctgtgggtggaggattaatgttcttcgcttggcaatgacattcatggggctccgaataaaagnggagaatggagaattggcgtatagagctaggcaatcacattccgcggggctccagactcgaaggtggaggacacatgaacagcgctaggcaatgacaatcattgcgctccgaaaataagtggagaatggaggatngcactaaaggtgccacacttatgcaatcatgaagcattgctcaaaacacgaaggtggaggacacatgaacagcgctatggaatgacattcatg

SEQ ID NO: 74616 - DNA, 489 bp, Glycine max
  unsure (1)..(489): unsure at all n locations
tgtagcaattacttggtgaggccaaacggatctgtgaggagtatgctctatagatgctcggntgtagaacattggctacttaaatggcctgattcttcacatcaagtactccacagggattattctgatcactatccaattattttgaaaacaaagctggtggattggggcccgaagccatttatggtgatggactggtggcctaaaaataaagagtatcatagactggttatagaagtgtggtgtggtgaccaacaacttggatggtggagtattgtgcttaaaaacaaattgaggaacctaaaatccagcttgaaacagtggagtatagagaatggggatgtcaataacaacaaaattcagcatctgatctacttgagtagtatttttatctattcctgagttgtcttatcaagtgcattagtcaaaacaaacatctctatagttaaagattatttcagagggcatgagctaattctagctctctgc

SEQ ID NO: 74617 - DNA, 385 bp, Glycine max
gtaaacgtacctgactatctgtgcgccattcttcgcacatatgtcatgcttatgcattgggatccaaatcaccttccaaaccatgtcggaaatatgtagaaattacaattattctacctacacaacatctcctcatctaattatttcttagaattatatatatatatagataaatatttaattttagctcgttagctagtttttgtacaaagagaaattaaaacttgatctattaaatatcatatgaaatattaataataaaggtattatcagaaaaataattatatttttaaattttctcgaaatgaccatatgtaagattaataaaatacttacggagacgaataattcagatggaagacacacccaactctgagtaattata

SEQ ID NO: 74618 - DNA, 369 bp, Glycine max
  unsure (1)..(369): unsure at all n locations
taacaaaggctatactgcacaatcaagatatattatgattacgctgaacctatacttttgaccatacgcatgctcattcttaatgatcctaataagtgcaattgtattcaaaatctataataatgagggaaattataatcaaaatgaaacttggcttatgttaatatgatatgacatgcgtaaaactacaaactattcaatagaataaaaaaggttaaattagtttttggtcttttaatttagtttttacgttcgatttggtcctctatcttttttcaggtttaatttgatcttctaatctttaaaatcagttcaatttggtctcccatcntaaataatctgagtgattntgctgtctaaatttggcct

SEQ ID NO: 74619 - DNA, 322 bp, Glycine max
  unsure (1)..(322): unsure at all n locations
ttaagtcacctgcggatgcgcttcaaaattaaacaactctctatacacgtaatatgcatggnttagagacatttgttccttagtgaacaaaaaatgaaaattattctctttataaatgatttcaagaaaggaatgagattctataaaaaaaatntatttttagtaatgtataagacatatgttcttaatttggatctgtagaattgtaattatatatttattatcttttataatttttatatatttctaaatatgtatgttacacatatcctgtcttatatattctaaaataattactattatcgcattggacatgtatgat

SEQ ID NO: 74620 - DNA, 436 bp, Glycine max
  unsure (1)..(436): unsure at all n locations
gctcatcttctggatattgtacatgaataactgtattatttattccattatctngccngnnngagaggttttctaaagatccatcataaccttgaccctcttgatattgcacataattacccgatgcatttaagccattattttgaacttcactaccaggcttcacctcagtacttaaattatcatacacattccncgtaaaatccccagactgatcttccaactcactgaaaaagtcaaaatatgatcccaacccgtcaactccattcaaatcagcgtgaaaagaattccaacccacctccttaatctcagaattaccgactgtatcgctcgtgcctacagctaaagcggatgtgacttctgatcccaccccactcccattctcaccgggatccaccttactatcatactcaactgaactcatggcgggcactga

SEQ ID NO: 74621 - DNA, 204 bp, Glycine max
tattggcaatgcgatactttcgtagatcgtctggaatatctgatttttcatctgatagtcatctatcaatttgttttggccatctcaccgctgttttcactttatcgattctacacttatgtattgtgtagcttcgatatatcctatctaaaatatactttctcgctttatttattcacgcccccccccctccgctattatatt

SEQ ID NO: 74622 - DNA, 217 bp, Glycine max
aagcagcaaaaaaattacactatgcaagcaaagagaacagaagcaccactcaggccacaaacaggggccagtgaccacaacaacgggaaccaaccgacaaaagaagaagaaaagtgcaccacaaaaaacacagggcgaacaaggcgccaaccaaacggcaggaaagaagagaccacaccacaacaaccgccaaccccacaaaccgcaaataaaaaag

SEQ ID NO: 74623 - DNA, 356 bp, Glycine max
tacacacacagactctaccctgagccctctatctactcttatcgatactgactctctcactgtaacattggctgtgcaactgtgagaggagcaatggatgaccttgatctggtaacaaagacactctaataggctggattatctcgatacacgttctacattcactgtgaaggagctccgtatggtctcatgctgtctttaggacaacgtcggattcttgatatgtcactattatagtgagcaattttccgaagctattcttgagtttattgacacgcaacatacttatagatttatgcatcgtctattcattatgcttcgtgtgcgaataaagttacttataaaaactgagtact

SEQ ID NO: 74624 - DNA, 409 bp, Glycine max
  unsure (1)..(409): unsure at all n locations
gcttctcggctcatgctgngaacgcctctagntcaattcccttgcttcctaaggcacccacccagagggaagctccccaagttccaactccgaacacggctcgaccggccggtaattccaacacgacaaggaacttccctccaaggccattgccggaattcaccccgctcccgatgacgtacgaagatcttctaccatccctcatcgccaatcatttggccgtggtaactcccggaagggtccttgaaccccctttcccgaagtggtatgaccctaatgcaacttgcaagtaccatgggggtgcctcggtgcattccgtcgaanaatgcttggcccttatatacaaggtccaacatctaatggatgccggatggctgactttccaagaggatcggcccaatgtgaggac

SEQ ID NO: 74625 - DNA, 432 bp, Glycine max
  unsure (1)..(432): unsure at all n locations
caaaggcagaaaactctgcccaaaacacaaaccaatatcacagctgttcacattcagataccccagtaacattctcttcgntccaattcgctaaccgatggatcgactcaaaaagtttactggaagtctctagtacataagtctacattttgaccgttgggatctgctagaaaacgtncagaacccaatcggtgctactctttccacatccagcaatttcatgaacatttttgcacaaagccaaattctgttgcacctagttgacagcaaaattctgcataagtgcagattttcgaaatcacagtttccctcatgcaatgttgcccagagtgaatcctacaagttccaaatcatgtatcaatcatgtctaaaccaagtacaagcttcagaccaaagtaactcacaatctaggcatctaatacccctcaatta

SEQ ID NO: 74626 - DNA, 269 bp, Glycine max
  unsure (1)..(269): unsure at all n locations
cgcagagcagctnataaagcgaccgggacaaaacactgttggttaacaaaanaagcagcctcacgaggagaggatccccaaacggaggaccagaaccccgctggacaaagactcccaccgcggggtgccccgcggaagaggacacccgccacaccgccccgcgtcaacccaagccgaaagcaccccgccagaacagcggggccaaccccggacccccaaaggaccggccaacgaccaaaagacccacccgggggacacgcgcgggcccg

SEQ ID NO: 74627 - DNA, 317 bp, Glycine max
actaactttccaaatgcttgcctccacaagatatggccgcaatgaagcttgcctcatagaggttcaggaaagacaaggcggtcgaatgaactatttccgctcctgagtatgacagacacccgcttatgagcgttgtacaccaacatcgcatcgatgccataagaggatggtcatttctccgggagcgacgcgtccagctcatggacgactagtatactgatatccaggaggatatatggcacacgcggtggacatcactggttactcccatggccaaatagatccaaaaatagctcctgagtttatgccaatgcttg

SEQ ID NO: 74628 - DNA, 398 bp, Glycine max
agctacaaatctgattttggacccaaaagggttgttggttctttacaaaaatacagcccagaaatgaaataaaataaaattggacgacaaataatatcgtctactctcttcaagtccaagccggttcagcccaattccggatccaaacccaattgcttataattctcctgaaattaaattaaaacacataattagtcaagtaggcccaaatgataaaactgcataattaatttgacaattaaggctaatcaataattaaaatggtgacagataggggtaagcaataggagaaaataatgatacattagtctgagattgacattgtttatgtcactcaaaagctaataaagggaagtgccttggcagactatctagctcaatgactacgagcccatgca

SEQ ID NO: 74629 - DNA, 151 bp, Glycine max
  unsure (1)..(151): unsure at all n locations
agagagatncgactgatataaaatctatgagatttgactatttgtgcttagttcagtcactgttctctccattcaaataaaaagctaaattcagcacacaattgaatagcatatttattattcatgcttatagcccaaaatgttcttacgt

SEQ ID NO: 74630 - DNA, 353 bp, Glycine max
  unsure (1)..(353): unsure at all n locations
cggcgaaggcgcacaacaaagttttccacattcacaatgcgcgcataaacccaccatgccctgttgcccacctccatctgagctcacgtactcccacgtagcccatatcctcgtntctctcaacaccgggtccccatcaatcctcccaagcttccacaacatccaagcaaaacaacattcaaatagcacaagctatcacagccaagcaaaacagagcaaaggcagaaaactgtgccaaaacaccaaccaaaatcacagctnttctcacttaaagaccccagtaacaattccttctgtcccaattcgttaaccgtggatcgactcanaaatnttactggaagtctctagtactt

SEQ ID NO: 74631 - DNA, 331 bp, Glycine max
  unsure (1)..(331): unsure at all n locations
tatgtataaaacaagtttaaggtcttttgtaggattaaagttactttggatatgtaggatcaagtggcctctgaataattaagaaggggggttgaattaattattattgaacctttactaattaaaaatgtacccttcttaggctnttactataatgttatgaaagtaaataacagatatggaaacttaaccaaaagtaaaagcaataattaaagtgcacaacggaaaataaagagtgtanggaagaagaagacatacacaagagttttatactggttcggcaacaacccgtgcctacatccagtccccaagcgacttgcggtccttgaga

SEQ ID NO: 74632 - DNA, 362 bp, Glycine max
  unsure (1)..(362): unsure at all n locations
agctntctgcagggaagctaagngagaagtattttattcnttcataggatnggcgctgcaaactgggtacccaccaatcatacttccactgttgccacaggtttgggtaaatttctgtatgctgttggaaccaagtccaaatttaattgtggaaactatattcttgaccaaactgttaagcattcagaatcttttgctgtcaaattacccattgccttcccaactgtattgtgtggcattatgttgagtcaacatcccaatattttaaacaacattgactctgtgatgaagagagaatcggctctgtccctgcattacaaactgtgtgaggggacacatgttccagacattgtctcgacatc

SEQ ID NO: 74633 - DNA, 331 bp, Glycine max
tactaagctgttaacggagaaagaaaccgaaatgaacgattgtaaatatttctaaaaaaataagaaatgaattgaaagtctcggattcaaaaacttacccgttgaagaacgaagaacggtgaagaacgacggaaaaccttcacggatttgctcacagaaacgtcttggaaacacctcagcttggattttcttcatggaaacaattttttttcacccaaaacagctgaaatgcatagccaaaggggttagggatattaggaacaacctcccttcgcctatttataggaaaaagggggaggacgttgccgcccagctcgcccaggcgatctgg

SEQ ID NO: 74634 - DNA, 391 bp, Glycine max
  unsure (1)..(391): unsure at all n locations
acctgcggcatgcaagcttctctcctctcaattccaacatggnggtgtctttagtgtgtgtttctccctnggcttatttgtccccctcgctccatctttttcctcccctcactccatcttcttcctagngggctttgatttctccatgtctgcaagtgacagttcttctacattntctggntgaaccattcgccaatgccaccatgaaagatgtgcagttattcgaactgcaagaacaaggaggaacccaggaaggttattctatacttgtgcattgccccaaacagacccagataactgacaattttttcaatgggttgaagaagaaaaccaagtttctaatccttcttctatcacaagagaatcaatgatagtagatgatttgaaacta

SEQ ID NO: 74635 - DNA, 486 bp, Glycine max
  unsure (1)..(486): unsure at all n locations
gctcatcccaagataacaagantacccaattgggggctagtcataaatttattttttacccacaaatggagagatctcgggttgatatgtagatggacatgataagtagaagaaaacaccatagagataaagatagatgtcgtcccccatagatgtcgtccnccatagatgtcctcatgagagaaacgaaacaggaagaagtcatgggtcagatccaaaacttgaacagtgcctatacaagcccataatctttggagtctagccgatatgaagttgaggttcactnttttacccattaatttcactaacaggggatgcttccaataaccacaccaacgctcatattgttcaacattaacttctatctcagggaaaggattaatgggctttactntctctatctcattatcatccataanaggagtaggacagatttcctctatcacgacattaatgatctcatcagcagtcatactctcttcagtc

SEQ ID NO: 74636 - DNA, 396 bp, Glycine max
  unsure (1)..(396): unsure at all n locations
tcacaacaccaagtgtctccccttatacactntgcatcctcactttgaaccaacatatttgtactcttgtgatgtcttctcccctatctcgaacctgtgtgtgctcctaaccatagctctgatactattggtgggtaattaatgccctcacaaataaaattacccacactcacaaggattgtgagaacacaacaaagactagaccgtatgaaaaataataacatacacaagaatntaacgtgatttgcatctcttgctacatccatagaaccgtctcaaaaatatttcattatcacaaaatgattacaagattgaacccaccctatataatgatcactctacaacctgagtacctattcatgccacacgacacgaactgcttcataaaaaacaatt

SEQ ID NO: 74637 - DNA, 435 bp, Glycine max
  unsure (1)..(435): unsure at all n locations
gattntcactcctaagtctttaaagctacaataactaggatttttggaatttttctggatataacattgaattttctgattgaatttgtcctatggtgttgcaggtgcaccttcacaacagaatagaggctctaaaggatcaacatggggcaacttacagtcttgagaagtgcatcatatcaatctgcattaatggaatctacataagagtagaacttggaggacaattgggttactatattgatgtccttgcatgctccacgaaaaacttgtctgaaactctaagagtcattaatcaacttataatccctgcaatccaaagtgtttgccatgggatcaccttgactgaaaatgtcataagacctgtatgtgtgagaaaactgacaccctctatatacatgaaaactcatattgcttacatgcagcaacttatac

SEQ ID NO: 74638 - DNA, 413 bp, Glycine max
  unsure (1)..(413): unsure at all n locations
cagctgcagctgngttcctaggcctgaatcgattttgctctattntaaatccttcacgctgtccctatacatataaaacagtcccacaatcccaagcttacaaaaccattcccatatgccattgaggcatttcaccgagcactcggagggcgcatgttttggcatgaatagcaagaatgggggcaatgtggcatgccccattactccagaatgcaacataggcctaaggccatcccttacaaccccctaactcaaaccaatcaagcatgaaaacaaaccaaaattgccccacaaattagagcacattcccacaatttagagcaccaaaagaagaccaacatagatcaatggaaagcttgaaagctcaacgatgagatacttactcgttggagtgagtctgagtataaaaaatg

SEQ ID NO: 74639 - DNA, 464 bp, Glycine max
taagctctgtcaaacctgaaaaaaggaatgcaattactctatattgttcattaaaagataatacgacaggaacctgttacatgtctatgtgatagaatgttctgcactcccataaaagtagaattctgtcaagaggctgaaatattcctcatgaagaaataaatacaatgacgaattaccttgaacaaagtcaaaaaatgattgtcaatatccaacatatgatcataatgtggagatatcatttgctgtttcccacatgagatatatggggggaaaaaagtatttgggacgcgaaattgcaaggaagttatatcatgatggcaaacataaggacctaaggctatcagtagggatcatggtctcagaatgactatcctgatatagactgtcatagcagcaatcaggattactaagtataatgatctttactggcgccacagctactttgacagaagtagtgagta

SEQ ID NO: 74640 - DNA, 484 bp, Glycine max
  unsure (1)..(484): unsure at all n locations
cctgcggcatgcaagctntgttctttccttctacacatttataacactatttttattnnnccttnngactcccttttctatttactttttttcccttttataaatattntcaacctactcctctttttcttatccttctcacaaccaaaaaaaggatttagagagcatgacagaatattggtcaaacacaattgggtattntcttcttctatgttntttcttctatgaagngtgtcctaacttccttgaaccttcttgcttgtggcagatcttgtgttaaacaccagattctagatcagaacaataaatctggcattgggacaaccaaatacaaggagtagtgatgtgtgcaagtaacattcacatggcagcacanagctttggccacanatgcgagtaatagttaaacctgctttatgtaattgctttaccaacactggacgcaaggatgacttntatcatntgaaatatatatgtgagtata

SEQ ID NO: 74641 - DNA, 469 bp, Glycine max
  unsure (1)..(469): unsure at all n locations
gctctatgcacagcctttccttactgtaatgaaatcaccattttctattttactctggaaacaatggttntgtcaagttctttacagaggttcaggtcattggtcatatggtttgtgcagccgctgtctattaaccatgaatcactggaactattgcttgtggcaaaacatgttgcgacaaagagttgctcatcttcttgttcctccgcaaccacctttgcnttctctganttggacttgcatattcgctctacatgtcccatattgccataatttctgcacttgatatctagcctccaccaacattttctttcaggatgatttgtctttntgcaatgcagacaaggaggagaggtctcaccttgctgctatttggagccttctggttttttggtcctccatttgatgntcttcttgtctctgccacctcttgaattatgtgctttcgtatgaaacaaaccttgtacca

SEQ ID NO: 74642 - DNA, 456 bp, Glycine max
  unsure (1)..(456): unsure at all n locations
aataactgtcaactcggatgttctanataatcccgcaanatatcgagacgctcgaaattgaatacagaagctctgagcagattcaaacgacacttactttttactcggatatgcgaatgccttccgtgttatatcgagatgctcgaaattggagacagacgctcatagcaattgccaaccgacaatactattaactcggatgtgcgatataatcgcgataatatcgagacgctcgcgatttgaaatagaagctctgtggaaattcaaacgacaataactttttactatgatggctgaatgaacaccgtcgcatatcgagattctcgatattgaatacagaagctcatagcaattgcggaccaccttatcttttaacacggatgtccgtataaggcccgtgatagatttagacgctgacgattgaatcgaaagctctgagccatactaactacaata

SEQ ID NO: 74643 - DNA, 505 bp, Glycine max
  unsure (1)..(505): unsure at all n locations
atccttacatcacctgcggcatgcaagcttgtaatctttggttccttgaatttatcttaactctttctttgcaactgtccagttttctattcttggattacnttgatatctcctaagcattccaaccacaaaagcaatgttaggtcttgtacacacctgtgcatacataaggcttcctacaatggaagcatatggaatgtttctcatttgttccctttcaagctcatttttaggacattgattcaaattgaatctatcacctttcacaataggtgtcatgttgggtgaacaatctttcatccgaaagctttctagaactttattaatataggccttttgagactagccgagaatcccttgagatcggtttctatggatctctatgccaatgacatatgctgccctactcatatncttcatgtcannaaaattagaaacgacattgcttcacttttcatgtaacatnccaagatcatttggtgcaagaagtatantcatcacatat

SEQ ID NO: 74644 - DNA, 435 bp, Glycine max
  unsure (1)..(435): unsure at all n locations
cctaagaaactcagctngaggatctccgtggcggcatcaaatatgctctttgtaattgcttttgtggcccncattagggactattnggaactgatggattctacggaggtgttagacaacatcgtagaggaagtgggagacaaagatgcaggttttcgcgaagtgattatgttcggtattgtgtgtgaccattcagaagtagtggtggtggtaatgactganacgacatcatcttcattggcctctagacgctgcgtttttagctcctggagacggaggtctatttgtttctcttgcacccctgctaatatattcatctttagataatcttaattgtgttgcgtgatgcactttgtgtgtgcttgcgttcacaatggacatcatcataattgattntactttcacgctaatgttattgtactacaaaaggatgcc

SEQ ID NO: 74645 - DNA, 468 bp, Glycine max
  unsure (1)..(468): unsure at all n locations
gctacgtctcaaccanacacgttgaagccagtaacagaaggaaatttatcttttatgttttatcccgcagcaactggcactaattcttttacagctgatatgaattcttcttggttatgcgatttcatgccaaaagcggctcttgaaatgatattatatattgataaaactactatttcagcgatgatgatagaaagacctttatgtgaatgaactgacacgtattttggttggaaggctccacccgtgcaaatttgtaattatctgtctccaatttagaccgtaaggtgccgtgataatacttgttgattcataagccaatatatctgcaactatgagagcgatgcctcgatgcacagatgagatcatgggttttcattatctctctagcatattctgctgacgaaacaatgattgtgaaacctccccaagatgaaatgcatcatggtcctatatttggctaatctc

SEQ ID NO: 74646 - DNA, 182 bp, Glycine max
gcgaaagacgcagacatctcttcttcttctttaagagcttctgcacagccatgctgaatcaagatagcttccatcttgattctgcataacccgaagtcatttccccctgaatacttctctatatcgtactttgttgttcccatctctcttgatcttgatcctttctcccacagacggcgcca

SEQ ID NO: 74647 - DNA, 313 bp, Glycine max
cttcataaactcaatcatgcacctaagagcataaagatcaatgtgcctattgcgtcctatatttatatgcaacaataattatcctcttctcataattttgttcaactaaaatactcgatgcatgctcatttatttaagtgtctgataaaaataataatgatcgtaacgtatagttagagttcatgtgttccttgtaaattagaacttgataaacttcaccttctttcaccaatatttggaactatatctatgactcggggtcctcactccgaatatgtataatacaagagaaataacggagctgatgctggac

SEQ ID NO: 74648 - DNA, 482 bp, Glycine max
ataatcaggccatttaaagagtaaggaaatttttttaatatatttggaatataacctataaggtcatgctctacagcgaataacatggtaagacactaaaacgctatgtaaagaaaatcatttcaaaccatccatagtgctacgagtaaagaacacagacaaaaagctaccaacaaatttactatacaatataatatgcatgggaaaatttgggtatccgttaaaatctcatggcacacacatagcatacatttgtgtggaaattatgtgcatataaagcggtatacacttggaaattgagcagcaaagctacataagctgtcaagtaatacaataaaactgagataaagtttcgcaactttcgaagaggctcgaacctaatgctctggccatatgaacaaatgccgtttggaaaacaatagacaataataatccacaggaagcggtacagacctcatttgatacacgatatgagaagagat

SEQ ID NO: 74649 - DNA, 455 bp, Glycine max
  unsure (1)..(455): unsure at all n locations
acttgataactactcttcatcacctttgtttttttcataactgaaggaatcgattccaaatggtatattcattgacgtagagttgctttgaagatgatgatgaagttttctgagttatactaagtttagtcctatgatccatttgtcaacttgagagtgagaccttctgattatagttagctgttataagtaaattatttgagaactgaagggcagcctccatctttagaatacaaaaaaagtatacatgattacacacacaaaattaagaatgttacctgtcattcgntgacagattatggtctcatttttgcagacttcatacaacccatatattcaccaacctgatgattttatgatctcattgtccacagcgcgttgaatgtatatcataaaataaatgttgccccatcccatcacgatttccttcagttatggatgatacatatgtatat

SEQ ID NO: 74650 - DNA, 488 bp, Glycine max
  unsure (1)..(488): unsure at all n locations
ctaagctcgacaatatatggactgcacaggacttgaatcctggatnntttgtctcggtttcttgattcatattgcatgtgaaaagtttctcgtcaggcagtagattatgatgatctggatttgtaagggtaagagccaaagtgtttgaatcattctgaattgattgttggagtcctttcaccatgtttgaaatccagttcatgaatgagctatcctgtttaacatacgaattgaaaccagacgattcttcaatttgctttttgactcttttactcccaattatcaactgttgttgaaagttacgtctcttcttacctgttgaaaaaaagccagcactgttacagctctcaacacttgaatgactgtcattctcctccctcgataatattacatttgcatccncatctgataaggatttttccttgcctctgtttattgccatatgaattctgctatcacatnggagcatcatttcattgtcctgaaat

SEQ ID NO: 74651 - DNA, 384 bp, Glycine max
  unsure (1)..(384): unsure at all n locations
cctgcggcatgcaagcttaggtttgtaagctcactttttgttattattatttgacaatncctttncttttcatctctattgatatttcaaaatagtaaattattgtggagaccaaagataaaaaaggtccacacacctgtagcttagcttggctcacagctgatcatgtcaccggtatccagattgcaaatgttgacatagatgtcattcacataattctcacttgtcttaccttagaggtgactatactttgtttgcaaacactgatatttatcctgtttgatgctttcaatatggcttccattttagttgtttaattcatatcacgtgcaagtatatatttataatatatgcaccaagatactgatttattaatattatata

SEQ ID NO: 74652 - DNA, 490 bp, Glycine max
  unsure (1)..(490): unsure at all n locations
actaagcttagtaaatntcctgcagaagacaaacaaactatccaatatcatttttttatngaaaaaatagtcctaataaataaaccatattnttattcaaaacttaacaaaattcaacacaaaactaattgataatgtctatttcaagaaatactttatcatttcattaattatagagatgaattctactagtcattaaaatttggtgattccctcctatatgtgtccaattggaattcatcttcaattggccattcttttattactcatatggggtggcttctactgccattntacatntgttcttctttattttctctgtgcaaccttcatgacagctctgccactccaaatgattttccgcggcggcctctttgttcatctnttcctcccaaaacagaatcttggaaanaaccgaacagcattgtgtgagtgggatggagtcatgtgcgacacaatgtcagctgcagtaatcttgatgtcaactcca

SEQ ID NO: 74653 - DNA, 405 bp, Glycine max
  unsure (1)..(405): unsure at all n locations
agctntgaatcccagcccaatctctagacatgttttttcttgttcgtgctcgtgcgcttagcacaattatgaaccgcttagcgcacattagtgaatcttggcttagtgcgtgcctttctcgcttaggggatggactgaagcggtgcgcttagtgagatgaagcggtacgcttagtgaacctgtacaactcatcttcttctagagtctccctcgcgcttagcccatgagtgttgcgcctagcggactctcgctaagccagcgaattggcttagcgagaacgcgaaaaatagcatttttcaatgcttgcctaattaacctgaaattgagagagaatgattattaaacacacaaaatggaagtactaagtatttattgcctatacttaacagaaaatacttataacac

SEQ ID NO: 74654 - DNA, 369 bp, Glycine max
  unsure (1)..(369): unsure at all n locations
ccttcagaaactgctnggaatctattacctttatatgtgaancgannacacagtgcaaactntgaattcaaattttaatagctattgtaaatcagttttggccactggtaatcgattacatcctctggtaatcgattaccagagagtaaatatgttgaaaaagactttntaactaataattcttggccaaaccttttactacttcaattggaattcccttcctatttaatataccctttctaagactctagagactgtcttgatcatccatcttgaatatctgtaatttctttgtcttgaataaagctctgagacgcatgtgaaactttgcatcatcaaaacattcagctttgatctttgtctacaatc

SEQ ID NO: 74655 - DNA, 219 bp, Glycine max
  unsure (1)..(219): unsure at all n locations
gcttctcgatatattatgcacatgaatcagactnccttttgttttattangagcatttgaatgtctcgagagcattcgttgttcaatttcgagcgtctcgatatactatgcaccagaatcggacttccgcgtgacaagttatgaccattcgaatttctccagagcactcgatgctaattttccagcgtccggatatattatgccgcctgaatcagacct

SEQ ID NO: 74656 - DNA, 471 bp, Glycine max
  unsure (1)..(471): unsure at all n locations
ctcaagctcganatcacaagggaagctctcgagaaactcaaatgatcataattttatttacagaggttcgattcaggcgcataatatttcgagacgctcgatattgaacaacgaatgctctcgaggaattcaaatgttcataacttgtcacacggaggtccgattcatgcgcataatatatcgagacgctcgaaattgaacaacgaatgctctcgagaaattcaaatggtcataatcttgtcacacggatgtctcgatcaggcgcatcacatatcgagacgctctaaattgaacaccggaagcgctcaagaatttcaaatggtcataagttttcacaccgaagtccggttcatgcgcataatatatcgagacccttgaaattgaacaacgaatgctctcgagacattcatatggtcataacttgtcacacggatgtctgattcaggcgcattatatatcgagacgcttgaa

SEQ ID NO: 74657 - DNA, 476 bp, Glycine max
  unsure (1)..(476): unsure at all n locations
cctgctatgcatgcatggtagtatactcatgggattttcagttcattttaccagggnaccattggggcgcctcttcttttgaacatttaagacatgacagagaaatccaagctgaggaaatatataaccataaagaacagtttataaggtagaatctctgcttatgaaaaaaaaatacaaggtagaatttctaaatattgtttacactaggaacacaataatgataatgtatttaagtttcacttcttacttataggcatgatggaccaataattcatggtttattattttcacttgataaattgatcggatattatattatatatccaccttcctcgttccaatattccatctcccctttatctattcttttcttctttcttcattcttcatatcatttattatatttattattttctctttttccttattacaaactacattttcattctatcacactattcctttcactcaca

SEQ ID NO: 74658 - DNA, 475 bp, Glycine max
  unsure (1)..(475): unsure at all n locations
tctcctaaggactgtcatgagagttgtttctatttgatttaaggcaattcaaaaacaacaaccncagttcagaccttaactntatagctaagagcagagaaacacggaattgaggatcaaggtccacaaaacccaagtagagtaaaacaaattcccaggaaccagaacctcagcttcaaaattgaaactttccgctttctagataaatactaagatacccagagccggccaaaacttataagttatcaataagaataaagggtagtgccagatttgaggagattctaataaagctactangcttttcttttctactgctctatgcagaanaaataccagcagaatccaagggagggaaacagntaaagcataaatagacacacacaagaattcaaagagaaacaggaaacaaacaataacaataggagagactntgattaataacacagatgattaagtgttgtggttaacatac

SEQ ID NO: 74659 - DNA, 289 bp, Glycine max
  unsure (1)..(289): unsure at all n locations
gcaggaaaacgacgccagccagaacgtaaagcttcatccccaaacggactgtctctgattcaagcttctgcagattatgacatccttcaagaacatatnggagtcccagatcagtgtctccagcaaaggcaactgacagcgtcctaatcaacttcccaatcgtcccaatgtagttaaaagcccgatctggcatcaaccagacacagcaagccgagtgagcttcttgcagttcataacaatggcaccacaaccctcatccatgggttctagcgactctgggtctggccta

SEQ ID NO: 74660 - DNA, 415 bp, Glycine max
  unsure (1)..(415): unsure at all n locations
gacaanaagcccacaggtcaagaacacttcatgataacaaagatgacgatctcaacaatcatagaataagttcatgatgttcaagattgaatcaagaacacttctaggttcatgaggatatctgatttctagaaacaataatcaagtttcaagattctagttgcacaaatcaagatcaagattcatgactcatgattcacgaatcaagagaagactcagtcaagataagtatgaaaaagtgttttcaaaaactgagtaacacatgaattattctcagaacttggttaccaaagaagttctactctgtggtaatcgattaccagattgatgtaattgattaccagtagcaaaatgttcttgaacaatgtttctactgaatctacaacgttccaattgatttcaaaagttgtattga

SEQ ID NO: 74661 - DNA, 325 bp, Glycine max
  unsure (1)..(325): unsure at all n locations
ctcaacancacatcttttcatttggctcttgaatggccatcacaagcctatatatatgtgacttgagacacgaatttgctaagaagtcttcagaacaaaaagatcttatcctcttaanaagcacaatcgctttatcctcttacacattccttgtccaaaacacttgtgattcaataaagaattatttgagtgctcatattgtcaatctatctcttcaagagagattcttcttctcttcttattctgagatggatataagaccgagggtctcttgttgaaagaaatctgaacacaaagaaggttgccttggtggtcagacttgtat

SEQ ID NO: 74662 - DNA, 390 bp, Glycine max
  unsure (1)..(390): unsure at all n locations
cgcgcatttattctttttttatataaaaaacncgggcaggcctgtanagtataaaaaagctctcacaacactatgagcatactgagagagaagactacatgttgattgcctatccttcggtcagatgatcatagaaatagtcggtgcgcaataaataaaacaaatttttctgtgaattgcatagagccactagtggcttggttagacatagaataaggagttgtatcaagctcggatcgagctctatttgtagagctagaagcggcagcgcataatacttgtcacaattcgtgataagtcggcggcacttggtgaatgttcaaaattagatgtatctcggggttgaaacgaaccatataattcccctgtcgttttgtgcttgtctcttca

SEQ ID NO: 74663 - DNA, 260 bp, Glycine max
gcgcggatacacaaagcaataggccgagaaaaaccaaacgaccctctctctctcttagctagacatttcgctcaagcgcgggccatcgaagatagcttggataagagctacatcagtatatcgacaagcttccaacgaagaggacacgtgtgggatactggacaaacactctcttatccttctccatctctcatgcaaacatgctcccaatcttgaatatgcattctgtgagtgcagattagtaccttgctccaacgata

SEQ ID NO: 74664 - DNA, 436 bp, Glycine max
  unsure (1)..(436): unsure at all n locations
ctaagcacgggtctgngagacanaggtcattcgttcgttatatgttatgatgatattccgagtactttggatttggtacgaccatgcnctcctgatttccagctgggaaattggcgagtggaggaacgccccggcatttacgcaacgagcataatgtaaacctttacggttttaaaagctctatagttgggcctaggctctagagtttttccttttgttaaagctttgtgtcttttgttttgaattataatacaaggatctttcttcatctgttcctggtcactacccattctcattcatttgcatgtttacttctttntctgaaacggcagatccgatgacgagtcccccgaaggtactaatacctgngacccgcctatcgacttcgagcgagaaatgaatcaaacggatgatgaatgagatgacgatgttggac

SEQ ID NO: 74665 - DNA, 500 bp, Glycine max
  unsure (1)..(500): unsure at all n locations
ttaagtcacctgcggcatgcaagcttgctgtatcagctcccaattaacccagggctatgcttactaattcctcctttcatgggaatggngctgcaaactggattccagattcaggagccagctntcatgtaactggagaatcacaaaacatttcagcaagatttgagatactcagagacaaactcaatgtgaagagtctttcttctgaaaactcttccccttgagtttgaggggcgatattagaatattagagcatgtgttgcataactgtataaacagttttgtaattttgtgtacttgaaagggctgttagcctttgctaacagcacttctctagcattagacatctgataacagattagntagttcagttagtttgttagttaattcaagtagcctttgttggttagtagaatctgttgctgctagtgtaaangttcagaggtctatatatacctctcaatgtaccaactcagattacttttcatctagtaatatat

SEQ ID NO: 74666 - DNA, 424 bp, Glycine max
  unsure (1)..(424): unsure at all n locations
gattataccttaaaatgggtattttcttatatntagcgcaatattagcaaggaaaataaacaagcattgattgatgaaccgaagctttaaaatgccaaagatttcacaaaacaagtttcatgatgacacatgatgttagttaaaaattaagagcattatttacattcaacaaaatttgagaattaggaatgattagtgaggtatatatacatatatatatatcgtatgttaacatacttcgaacatgacgttccttgggaggatattccacatgattggtagcttttacaattgcaatatccaactccttcataaacaaaatgaaacacaatcaatcttaataatagagattcatttgtatatgccatgcatgttacgcatataacataatggagaaatcaaatcaccttgtattcgctattga

SEQ ID NO: 74667 - DNA, 320 bp, Glycine max
agcttggaggcattgctggtgctgagttctttctatggtatacgatacgaatatattcccacaccacgagccagcaccgaggacaatggacatgaaaacgtgtttcgaattgtgcttttacttgcattgaagttaaacctatatgtaatgctactaccaaaattatcgtggatcaaacatggcgctttgaaaaagatttttttttctttcttcacatattcatgccgtctttttgtcgtatataacccagacaaatatgtaaatattagaaagttcttaattaacttatcgcctttgtagaaaccttatacatatacttc

SEQ ID NO: 74668 - DNA, 444 bp, Glycine max
  unsure (1)..(444): unsure at all n locations
gagcttgtcgatgggtatgcttcaccacgtcaccgttcttccttaatctcacccacccctccaccttccatgtatctagatctcctacctgcattgntgccgactcatagaattccaacattccttattgtccgtacaatttcttaaatcagaaaggttttcaaaaaagtaaatgtatttatatcataatttcttttcgcatcccttttttaagcactccccactttgtgtttgtcaaattatatatcaatcatgtcctcgtacacatgattatctcgaaactattttacatactattggaaatgaattcttggaagggttacacattcccaaaaattataatttagaagtgttaattttctttatcattntcgacaactaaattctggaagtgataaccctaatcacctcccacacactatgggatccttctcttttcatctt

SEQ ID NO: 74669 - DNA, 444 bp, Glycine max
  unsure (1)..(444): unsure at all n locations
gacttacgtgttacccaattgtatcatatcttacgttatactcaccacctttatcagatctaataattttgacctttgtgtctaattgcctttctacttcattcaagtaaatttctaaggcatccactgcctgagatttctaatgcactaagtagacataatcgtgacgtgaatagtgatcactaaaagagataaagtatctttcctttcccaaagagttaacatcaaaaggtccacatatatcagtatgcataatctcaagaagctgtgtgcttctctgagctccttgctttgtatgtcttgactattttccctggatacaatccacacaaatattgagatccataaaatctagatgacgaagaatttcatgctctattaatctntccatcctttctctagaaatgtcgaacattccaatttttcggaataaatttaaaagct

SEQ ID NO: 74670 - DNA, 465 bp, Glycine max
  unsure (1)..(465): unsure at all n locations
tcactcgaccgcgatccttaagcaccgcggctgcagcttgaggaatatggngtacccatcacatgtggtactaggtggcggtcgggcgatggtgcacnaacaagtttccacatccacaatgcgcgcataaacccaccatccccggttgcccacctccaactgagctcacgtactcccacgtagcccatatactcgtttctctcaacaccgggtccccatcaatcctcccaagcttccacaacattcaagcaaaacaacattcaacagcacaagctatcgcagccaagcaaaacagagcaaaggcagaaaactctgctcaacacatcaaccaaaatcacagcttttctcacttaaagaccacagtaacaattccttcgatccaattcgttaaccggtggatcgactccaaaattntactggaagtctatagtacatacgcctacattatgacccgtgggatctact

SEQ ID NO: 74671 - DNA, 416 bp, Glycine max
  unsure (1)..(416): unsure at all n locations
acgagataacagtaatagtattgatctttagttaccaaccaccatgagtacaactaacatctagaaccgaagatgcatatatcagcttacatgctcttgaactaatgcaattggaaattccttatcaactccatgtgtgatctttgcaagaacaaggtccatagctgcttttgcatcatctagacaacaattgctgataaactataaatataatatcaatatgttccatttctgtttttcttctatctagccacaatatgcttgcgcaagtnntgatgatgaaatatcttaaatntaaatttaaataatagacaagcacaagtgcacaacaaagagactgtgcattcaagacaacaagattcctccacaggagtggctaagtggtaatttctcataataatgcttcatatataaat

SEQ ID NO: 74672 - DNA, 60 bp, Glycine max
agcttcttatccaaggctcatcttggtggtgaagttctttcttccatggcttattcccta

SEQ ID NO: 74673 - DNA, 282 bp, Glycine max
  unsure (1)..(282): unsure at all n locations
tatcatttttgtgatcgtcattgaggtgccacgtgagatcccaggtctctacagctttgggcgtattctttgaaagatctgagccccctttaggcatgttctattgttgcatcctattcggaaccatatcaaaattggactgatagagccttatgaaagcgaccattacgtcctttcaatagtggactctacaacgttccacgttacngtacctcggaacgagttccccactgataggttcttataaagaatgtatcatgagttcctcattttttgcgcatg

SEQ ID NO: 74674 - DNA, 253 bp, Glycine max
ataccatctatgaaacatggacaactctatataccatggtgcgtcatgggtgacacgaaatctgcactgatacgtcgaataactatagttgcatccttatgatgtacactattattgttaaactacgcgtctataacattaatgccataatgactagcaaacgtttaaatgtctcgacgggaatcgtcaccttgcgtctgcgcggcacaaataatcacactttgatatttcataacctctcacagaatgataa

SEQ ID NO: 74675 - DNA, 358 bp, Glycine max
  unsure (1)..(358): unsure at all n locations
ctaaatataanattgtcatgatagtgtaccctgatacttcttagattatcttcacacactcatcaaacaattcgagtgcaaacactgatgggcatgagcaagccacaatcttttctagtaatcagagagaaactacagctgggtatgagcaaaagaacgaaccttgacagggatattcgtaatggagttggaagattggtcattcatgagggaaggagttcatgggtatgtgtgagaatataagaagaaaaattgtcaatcactttataccaatctatcaacgcaacagatgtgaaacatatttattccattatcgcggtgtngtgagatatacaatgcaggtcacgacgatctcatg

SEQ ID NO: 74676 - DNA, 471 bp, Glycine max
  unsure (1)..(471): unsure at all n locations
agctngactaggcgagttngatttagccttagtttcactttagttattagtcaattcggttaagagtgagaaatcccaaagagaaaatgtccggttgattttccgctttattttactaaaaggtatatttttgttattatattattattttatctctttttgatttccaacgtggttacggcacgaccgaacggtcggaatttattttaaccaaagtttacggattatacaattcanacattcggtggaaatttattntatttttaagttaagcgagaaattacttaagtaaaatggcttaagcacgtcaaaaggaggtataaaaagtaaatgaaatgaggataaaaatacacganacacaatgtggacccccaggggtacatacaatgaatcgaanagcttggttcgaggtacttacccggtgaagatcgaagaacgatgaagaacgaatgaagaacgtcgaagaacggt

SEQ ID NO: 74677 - DNA, 428 bp, Glycine max
ctcatctagccaagattatacacaggtgttacaaaagaacctaacgattcctaattatatgggccatcaaatctgttagtgcttagctctactggagtttaaaagaatgtgctaaaatttgttaaaacataagcacttatacaatgaaggaaagctggagttgctgcacatgatgtctaacattatgtcaaggaatcagatcgggctgcacaatgcacaaggcaagataaaatgtcaaatgaagaattgaagctgcaggatccacgatgtcggatacaatgtccaggacatcctgcccgaaaatactggacacataaatctgttatacctttaacagattaatgtgcagtcagcaacagattatgcgatctatctttaggaacgaattaaaagataagtaaagttcgaattacaaacttgaatagttc

SEQ ID NO: 74678 - DNA, 492 bp, Glycine max
  unsure (1)..(492): unsure at all n locations
agcttcacacagtttattttctcaaacttgtagtttggaagaccaattactaagtctttcctaactagatgatttaaatgatacatattaatgtgtccagccccaaccatgaatcgtttattntactcaccaagcaacttagctcattaaaagatgcatgctcaacattcagcatatagatattacctattctcttaccgatgtggacaactttacctgatatggcttcacttataagataacaattnttgttgaactctatcttgaaactntatcacanagttgactaatgcttagaaggttatgctntagtccatccacataaaacacattctttatctgagttntgtgttgattccctatatttccttctcccatttattttcctntgttattgtcttcacacgtgacatatcctncatcttttgacacaaagtcaaagaagttggacttgtcacccgtcatgtgcctagagcagccactggtcaagta

SEQ ID NO: 74679 - DNA, 459 bp, Glycine max
  unsure (1)..(459): unsure at all n locations
cggcatcatctgaaggagatgacaaagtctgaagaaagcatatgttaagggggagttttatggttgtttctgccctgaaacattttattttgtacttaaaacacattttcttgaggtgaaaatctttatatgaataaaaaaatactctaccaagaaaccgcccatgttcagaggtatgaagtacgactactgaaatgagcgaatgaaagctcattttaagtctattcagattgacctatgagacatggtagaaaatggaaatcatgttccatatcatgatgagctaaatgaaatcccaaggagccaatgaacgaaggagcaaaaactcagattcctgcttaactccgaggctnggaacgttatgtngtatgccttatcagaagagaatacaccaagtacacaattntatgagtgcataacatatgtgagacattatagctataacttacagagaaacat

SEQ ID NO: 74680 - DNA, 470 bp, Glycine max
  unsure (1)..(470): unsure at all n locations
agctngcctnctttagatgagaagctagagcttagctacacaccccctataatatctaagctcacctccatgccaaaatacatcaaaatataaaaaaagtccctactacaaagactagtcaaaatgccctanaatacaaggctaaaaccctatattactagaatggccaaaatacaagcccaaaagaagaaaaaacctattctaatatttacaaagaagagtggacccaatcttggcccatggactcaataatttgatgatatacaaccattgattggccgcttcgagatatttggcacccttttgtgcacaatatgtgaggtcccgagacgtgccgaanatcanaaggaagaaagcctacgcaatccatgaaaattccgtgatgtgacggaaatcgaaaggaggtattnttcacaatccgtgaagtttcgtaacttcttcgaaagctaanaaaagagtaaatacataat

SEQ ID NO: 74681 - DNA, 453 bp, Glycine max
acttgtgtcatcaagagattataaatatgtgaccatgacatgtatttaaaagattgatctatctttcattatctatcgttcaatcttctctcaacatctttcaacaatatatctttcaacttttttctacagaattttctgattcatttctcttcatatttctaaaagtttttgttcaatactttctctttgaagaaaagttctttgatcaaaaacttgtgttattcatcttttttattctcttctccctctgccaaaataatagaaggactaaccgcctgaattcttttgtgtctcatttctcccttacaaaagattccaaggactaaccgcctgagaattctttgtcccaacacattggagggtacatcctttctggtacaagtagagggtacatctacttggagaatgtacactgagaacaagagaagatatctcttgggatcagtcaag

SEQ ID NO: 74682 - DNA, 480 bp, Glycine max
  unsure (1)..(480): unsure at all n locations
agcttgaccaatcccgacccaacccgggcatatgtctgtcagtgagaacctgtgatgtacctaaacaggcgagctcctggcagtacacagataaaacgaacaaagaccacaaagcaaggaggcttgtgtggtggctggccaactgtgaactttgatttatatgtgagatatggcctctggtaatcgattaccaagggtgggtaatcgattacaaggcttataaatgaagacaggaggctaagatggtctctggtaatcgattaccaaggggtgtaatcgattaccacgcttgaaaacgaggtcaggtagctaggagagcttctggtaatcgattaccagaggatgtaatcgattactcacgcttcaaagggaactgggagattgtggaggcctctggtaatcgattaccagtctgtgtaatcaattacacagaggaatgggtcactgtaatcgattaccangtatgtgtaatcgattaca

SEQ ID NO: 74683 - DNA, 495 bp, Glycine max
  unsure (1)..(495): unsure at all n locations
tctatatgaagctgaaccatttatcaataaacacaagttgagtgttattcataacattagagtttatctcttttatcttagtgagagtgattctcctaaattcttgagtgattcaagaacaccctggctgtatcaaaggacattcacaacctttgtgtgttgccctcgctggaaagagagagtctttccttcctttcatcttcacccttgttctttcaaaccacaattccagagaatccacctctgcccagaattatctcgtggccataactcccattttacgcactcaaattaagtgattcttgagcctaaattgaatttcaaaacgagacctttcacctcgttttggaatcacctcatttggagccctgtagcttcagttattgccatttctatatttctgtccagccaccacttaacctacgttttaccatcccattcatncattnntatgccagaaccaccttattaagacccacgaaagtaaccacctta

SEQ ID NO: 74684 - DNA, 314 bp, Glycine max
  unsure (1)..(314): unsure at all n locations
agcttgactgcaacaacggaagcagagaaatctctatctagttacattggagtacttgtcagacagctccttaccatctctcacacgagccttcaacatatatatctcctctgcggagctatccaggttcgtgttcaactgtttaatctcttgtactcgagaagataaatagtcgacagattctctcgctttttcgagggtgtgtcggaactcgtaaccgctgcgagtgatttcacgagcctctttcaacaacgtatcccgcatcagctacagcgaacggntctgccattactactcacacacacccgtggaat

SEQ ID NO: 74685 - DNA, 243 bp, Glycine max
  unsure (1)..(243): unsure at all n locations
taatactgattttctcatttatccaaccatataaatctataaaacactctctcgaaaacaacacacgcatagaacaccacgttcttataaataaccctcataattnttgcctctgcatctacctcctgaagtacgactgtggcccacaaatcccaatatcttactagatctgtattcacttcaatccatttcaatccactctgaatccgtttaaaaggattggtttcgtatcgcaattcaata

SEQ ID NO: 74686 - DNA, 433 bp, Glycine max
  unsure (1)..(433): unsure at all n locations
agctntcataagtganatcaggtgcatccatctccctaagagtcctctcacgaggtggaggttgagccatgttctcagtataaaaattagcagtggaatgctcaaaatcagaatattcagaatcaccctcaacagaatgctcagaatgctcaaaatgcacagaatgaccaggatgcacactatgcctaactaatctatgaaaggttctatctatttcaagatcaaaggtttgtaaatcacctggattgcccctagtcatgcactatatgcagcanataatgtgtttctcaacaagcacctaacaagggggtaaaactatagctatactcaaacgatatcaaaatgagctcgaaatttgtgaggaacaccctaaaatcatgaaaacatagcacacaaaatttcaaacaaaaattcaaagtctaactatgaaaac

SEQ ID NO: 74687 - DNA, 407 bp, Glycine max
  unsure (1)..(407): unsure at all n locations
tgatgatgggagaaaacggaatggatatgagacatttatccttatagtggaagaagaaagcaataagagctactgatgttggaggatcatcttacaatgatttctataagttaataaaggagggttttcattacagngttctttaagtccttattatataatcacgcgtattaagggttattagttatataaaaatacctttcttaaattataatgggatgacaaacatgatgcaattggtntggcctaattactgctagtttaaaatggtttcatttatatttatcatgtcacgtgtactaaaattttaatattggaactctttgtgtaagcatccatgattgttaaaaaaaaatatatgatctactgtatctagtttatatatgtngagtttaagaactcaaaag

SEQ ID NO: 74688 - DNA, 454 bp, Glycine max
tagctttgatctacaacgacataattgactcaactcaatatttcctctcaatcatcttcaacaattgatggagctgaaataaaatcaatccataagaaaagttaacaaaatgaatgaatttcaataagaataagataatttataaccaaccaacatcataacaataagaaaatggaataaccccaccagcaatcaagctttttggtgtcaaggtgaacaacataaaaacaacaaaaaataaaggtgtggctaggggaaggaaatcattaattaagcattgatatatagagagaaaattaccatgcataaaagacaaaaaggcgcaagaaaagaattctccttcttgtatgtgcataagaaggaaatgcaatgttggttgagaagggagtgatatgtaagggcaaattgagacagatgcaatagggcatccaaagttcaaaacaaataatatttc

SEQ ID NO: 74689 - DNA, 470 bp, Glycine max
  unsure (1)..(470): unsure at all n locations
acaattttactggtaattatttcagaatcaaattcatttttattgatattatttatcaataaacacacagagacatttactattagctatatatatatatatatatatatatatggataaaaaagaaaatcccattactggttgagcattcttttaaaatattcttcagttttggatcaaagaggtttcatatatgtatttacgataataatgataatgatgatgaattcatatgtatttgcatacttatagaatatttgctgaattaatgtttccttgattgcacatattcatcattgagacgtggctgagttgttttactaatttcccgatctattattgaacggcctttgcaggaattatgcaacatgtcgcgcttgtgttgtcagaacacttgatgacacatgtcggaaaatttgtagctaccagacagaacatatagagaanaattcaattagtcatatatactg

SEQ ID NO: 74690 - DNA, 449 bp, Glycine max
  unsure (1)..(449): unsure at all n locations
agctggtggtgtaaccaattctgtttctnttaaaaccaaatttctggcttttaaaaaacaaaanaatataaatgattntaaaaacccactatgatagaaagaagtgtgttaagaagaaaacattttccactcaaaatcttggtagtaatgcttatgactaacggatcaaatttttgtctacattgtacagaatgacaaagtcgtgtcatacacccactatgtacagcatatttagtctcttggacacaccataatcttcaatctactagatcatgcataatacanataaaagtaacaaaaaatgactactntgtcataaaatcaaactttctaatattatgaaatntagcagatgacacagcctctgggattctcttcgtaacttgagacatagtaactntgagtatactgtgatgtcatatgataataaagggggatagggtcatgga

SEQ ID NO: 74691 - DNA, 448 bp, Glycine max
  unsure (1)..(448): unsure at all n locations
tctatggtcaaacaaaccaaaaacagaagatgaagatnngagaaaaccataatttgagacttcaaaaatgaaatagagatgttaaaccaaaattttcaaaattgataataaaaaggtaacaaatacaaaaaattgataataaaaaatgtgtgcaagtgggcacaaatgctatctcgcaatatagaaggaaaattataataggggcacattntgatagatgaatgggacaaccatgtttgcttaagttctctgactactatctgcattgcaactttntgattctgataggagttgttctcaccaccaacaatttagttcacataaattattaaaatttatttcatgttaattttcattaatttatacaaaacatggttatttaattaattancaaaaaatgcgacgaggagataaataatgaagtactagtatatgcattgcatgtgta

SEQ ID NO: 74692 - DNA, 444 bp, Glycine max
  unsure (1)..(444): unsure at all n locations
agcttcanaataacacatagaatagtcattgtgacatttcatcaaatagttggtgtgcgcatgttaaaacatgtataaatgagggataaggaacaacatgccatgcaaattcataaaagaaccaaggataggcctagagccatccattacagccaccaatccaagcattttaatcatgggtttgcacataactcatctcacaaatattgttaagaaaacaacanacanagcaccaaacatcacaatgaanaggtaaaattagatggagatggcacttacttgagtgggatgaaaggaatgcaagaataaatgacacaaaggtgcataaaaagcttgaagatgctgctgctaatggaattctcgtgagtccttatgtaatggcttttgattttttggggaagatggngtgaaatcttgattcacccctncttttatnnttttcgt

SEQ ID NO: 74693 - DNA, 523 bp, Glycine max
  unsure (1)..(523): unsure at all n locations
ctttagcgacctatgaaactcagcttttatccaggcaattcttggtggtgaagctccttcttccttggcttattccctagtggatggagcctcccctatcctcttcgcctttgccttccgctgcatctccatggtgaaaaatcaccattgaaagacctcattgaagctcaaagatccagcctccatataaactccacaagcaagcttccatcaagtggtaatcagagcacaaaagcttcaagtaggtgctccttaaacctccattcaatatttttctataccttctcttccattggagntgcttcatttatctccatgtatctcctcacatgtcttgttctaaatgttgttaacatgattctttagagtttccaccgattaaacttgctatagaaactagatntgatgttctatggntcagaattcttggtcttggtcttgaaccatgaattgtgttgagttaacgtccttgagttttgcttgtatatttttggctgaacctaaccataaattctacgaaata

SEQ ID NO: 74694 - DNA, 315 bp, Glycine max
gaaatagatataaataaatgtttaaatatgctttcaatccatctaaatatgtggaactttagttttattatctgacaagctttttggacaggtatagtcctgagaaatataatgttcttaagatgattactatcgtagtctagagataacatgggcatgacatgtgtctagacatgtctcattagctatcactctgagatggcatgcttcactatagatctagatgcatgttacgtcatcaataaatggtgataaagaatttttacaagacttctaaatttataagaatcacaaccaataaagaaattacctaac

SEQ ID NO: 74695 - DNA, 302 bp, Glycine max
  unsure (1)..(302): unsure at all n locations
agtgatctcagtgatcataatttcnttcatanggggagtaaacgtaaattntatatatatacaattggttggtgctcgctcttgaatcttgatntcaggacttgtattgtcatcatctaaaagggggagattgtagatgcacatgcctttggtgttttgatgatgatcatgatgatatgatgcaattgatgcaaatgggcttgttctagttttcaatccaagacaatacttcctgaatacatgtcacaacatcaagatgatcactagtgtattacgaagggaattcctaattgaattagcaa

SEQ ID NO: 74696 - DNA, 450 bp, Glycine max
  unsure (1)..(450): unsure at all n locations
agcttaggctaaactagtctaaactntcgtaagctatttaagctaagtctagtccaacaagagggatttgaggatgaagctggctgtctaattgagcctagtccaacaagagggatctgaggacgaagcttggattgatttagtccaactagggatcaaggtttagtaatttatgctacaacatagaacaaaaaagcatgattgattagagaaacatctttatatgcatcaactggtctgttagaaagacccaacacttctacctattgctgtcaattttacttactagcattnttactgtttttatcctagacttagtttaattctattttaaactatcaattatcaatgtttctttcaacaatgccttatttctgaatntaaccttgtcttagactagtttcctgagttngatactcanattcatcntgtttaattntaaatacttga

SEQ ID NO: 74697 - DNA, 483 bp, Glycine max
ttagtaatgaaccattaacctagaattaatataacttaatgccattaaactaaggaattaaaagaatttaatggctgagtgtaactgaaattgtggcaaccaaaagtcacccccaacagccaacaagtcagccaccatttggtctcccaaaaggctgatgcctaggttgccaattggacccttattacaacttgaactaaacctaactaaagcgcctttaagtgattaatccaaaagatatttttggtcagccaactttacaaggattaggccattatttagacaaactaaacactctaaaattgagacaaagtggtgccatttagtcctcctccatttgggccatgatacaactcacaaccttggacctttcttcttgaaacttgggcttgtattcaaatagtatggacaacacttgttgaagagcattcttggctttcttgctctaacctgtcataagccctcagtcctcagtgatcttgc

SEQ ID NO: 74698 - DNA, 425 bp, Glycine max
  unsure (1)..(425): unsure at all n locations
agctngacatgttcaggtgcaggtgctgctactggtggagacacnttgaattggttgccagacctcaaggtgatggcactcacattnttcggattctgcacagtttgtgaaggaaatttgtcaatatttgggactgagcttggttcaactaagtagccatctgccccatctgatctgtcagactctgaaaggaggctcttgtttcttgctgaaattgcatattctggatggtcatttgcctcactaactcttctaaggaaggttgaggagggagcctcagttgcttttgtctttgttgtgaccgttgttgttgttgctgctgtattggaggaggaacatatggctttctttagacaagcaacattctgaanaggagggacagactgttattgttgtggaggacttgtccatctcagatttggata

SEQ ID NO: 74699 - DNA, 423 bp, Glycine max
  unsure (1)..(423): unsure at all n locations
tatccaaattctagtttagatattcgtgaatacaacctggctatgtgaaagtttctattcaatggcaaaacctccctccaagcgaaaatagttgggaatctgtggctaaattacaagaggtttttccgacttatcaccttgaggacaaggtgagtcttttaagaaggggtattgatatgcataagcataatccacacatcaccaaggtgtacactcgcgaacaacgagcgatagatacaataaccatggaccaccagcagcaaggcgcacaacactccaagtgtgcaaaccacccaatagttacaacccatccaaagggtgtaaaccacctaatagttacgattcacccacagaatgcaacgtcagaagatgcgaatcaaggtgacatgaccctngnngaacagcacaatcaacccgtatgat

SEQ ID NO: 74700 - DNA, 489 bp, Glycine max
  unsure (1)..(489): unsure at all n locations
agcttcttatccaaggctcgtcttggtgatgaagctccttcttccatggcttattccttagtggatggcgcctcctctcacctcttctcctttgtcttccgttgcatctccatggtggaaaatcaccattaaaggacctcattgaagctcaaagatccagcctccatagaagccccacaagcaagcttccatcagaaacaacactaggaatntagccttccataagctcaacaaaagcagaaacgtaaatgaagctaaaggcaganaacataaatgaaagcagaagaaggaacaaaaaaacgaaattgcaattgaaagaagaataatggaaaatgccttaatgtgaacagtaatccanagctaanaacgtaaaaccctaaaaccctatgctctgaataatggaataacagaatagcccnctacatgaatcccaaggctactatntataagggtcactcanagtcactgngccctattacattattctgg

SEQ ID NO: 74701 - DNA, 462 bp, Glycine max
  unsure (1)..(462): unsure at all n locations
taagaagccaaaagatgtattgtatgcttctattaatgtaaacaagtgttntcttttctattatcctttcttattttaatttcatgtatcattcatccttgcttcatctctaagagttaggcgctcgaaaaaggataatccttattaaaaatacaaggaaggttttatacgcatcaattttagggattattcgctcgaaagagagtaatttctaatataactcaaacgaaggggtttcttaataaatcattgctagacatatagtgattgcattatgctcatgtatcaaagcaaacatctagaattataacttcatgcatnttatctattgagtctttgcaaagacattnggcagaaagataggtaagataaatttgtcatcatgagatattaaggacaagtattctaatagatgtgggtacgaaaaattcacctaattaatagagaacaatctaaataatg

SEQ ID NO: 74702 - DNA, 314 bp, Glycine max
ccggatctctaatcactgcagctgcaactgagccagtgtgggggggggttttttttttcttctaccacatcaccacttatcaactaaccatctctatcttcatatatacaactacaatcttcttctactttatattattaatccatctttattaacatttacttaatctactacatctctcttatatctcatttctaaccacactcaacatatttacacaaaatcatactatataatccctctatatttcatctttttaatttcaaatctctctcacattcatataacatcaaacttatttttcttttctctct

SEQ ID NO: 74703 - DNA, 384 bp, Glycine max
  unsure (1)..(384): unsure at all n locations
tcagcttgtgaagctcctgttcagctttacctcgatttactcaaccatntgaagttgaatgtgatgctagtggagttggcattggggctgttctgatacaaaacaaaaggcctatagcttatttctcggagaaatcgggaggagccagattgaactattgcacctatgacaaagagtactatgccattgagagagctcttgatcattggaatcattatttgcgttctaatcactttatattgcattcagaacatgagtcattgaagtatatcaatgggcagcagaagttgagtccaaggcatgctaaatgggttgaatctcttcaatcttttaatttctcttcanaatacaatgatggtacgagtaatgtggtggctgatgcac

SEQ ID NO: 74704 - DNA, 228 bp, Glycine max
tatataatgctcaagctctgagcgaattcaaacgacaataaacttttactcggatgtctctatgtctctcgtcctaggtcgagaagcaagatatggagtgcctgtgctctgaactagtgcaaaccacaattactttctactctgatgtagtatggagtcccatagtaatccgaacgctcgagatctaagagcgaagctgacacctaattcaaacgacactaacccttt

SEQ ID NO: 74705 - DNA, 379 bp, Glycine max
  unsure (1)..(379): unsure at all n locations
agcttatacggcctangatgtggttntgtgactaaattcaatttagacataagtcttgcacctgccacattggtacaactccctccatcaatgatcatcatgcaaactttgccattgatcaaacatctagtgtggaaaatgttttctctntgactttcctccatagacttcnntngatgtgcctagtaccgtctaatcatcaacaattctccctccgatgttttctccacttcctcctcgtcatcctcactctcttctaacnnnncaacttcggaatcactaatgcactcttcgtctctaagaatcatggctttcttgttaaggcactcatatgcataatgtcccaagccttggcaccgaaaacacttcacatcttgac

SEQ ID NO: 74706 - DNA, 465 bp, Glycine max
  unsure (1)..(465): unsure at all n locations
gacctatgaaactcagctctggttgngtagaaacgttggtttttgtaaaaagggacatcaatggagacnagcttttttttgtagggaagtaacatttgtaccccttttgagttggggaatacccaacaaagacacattttacagctccaggatctattttatctctagtgggagtggaatcagntatggaattttaagtgtatgcagtcttggatttttcttttaaggaataaacccaacatgcccttgaatgatcatcaatgaaggttatgaaccagagtgttctagaaatattgttaacccttgaggggccccaaatatcactatgacttgattaagaagagcgagtttgtttagccaaaatgcaagtttcacactagtgttcttaaaagtcggctattgcggtgcaataacactatagtgtagcagggttcattgggaaggtgatcgtggtgaacgtgtgtt

SEQ ID NO: 74707 - DNA, 451 bp, Glycine max
  unsure (1)..(451): unsure at all n locations
agctnntaatgaacttcaattttgctngagggcatatcctccccatccactagggtggaaattgctccatttaagggtcaccatttcctgaaatcccttgtcctgcagccaccaatccatgaccttgaaaggcttangaccccaatcaacacttttggatcttagaaggatagggcgatgatctgaaaaatctctgtctagtacaaactgtgttgtgtcaggccactgaaatgatcctttgctaccctgcaatgagacacacacagatacacaaacacacacacatagagacaaacacacgcagacacaaacacaaacacaaacacacacacacacacacataangatacacacacacacacacacacacaaagtcatgaattcccatgggtatggagtatcagaagattcatgcttgccncantgatngcatactctacaggcatgaatt

SEQ ID NO: 74708 - DNA, 367 bp, Glycine max
  unsure (1)..(367): unsure at all n locations
aatctgcatctgcacctattgcaagagtctgtggtctatgttcttctacagatcaccatacaaatctctatccttctttgcagcaatttggagtcaatgagcaacctgaagctattgctgcaaacatttataatagacctccccagcagcaaaaccaacaacaacaaaataattatgatctttcaagcaatagatacaatccaggttggaagaatcatccaaatttgagatgggcaagccctccacaatagcaacagtctgtccctcctttccagaatgctgctggtcaaagcaggccatatgttcctcctncaatgctgcagcagtaacaacaacaaagacaacaagcaactgaggccccttctca

SEQ ID NO: 74709 - DNA, 355 bp, Glycine max
tcaactatcagtatcattaaatgacaaacttttgaaagtcttcggattcttataacataataaataaaataaagtactgttaaggtgtattgtaagtgacagactatcgatgattatctatactattttatgacattatgagtaacgggatgacatgacatacagtgcttagaaagttcactacatgtgacatatttgtcatcccatagatactcgcgctaacacgactatgcaatgagattgatacttccaatgaaaagaatgtattgtaaacactatttcagaaaatataaatatttctcgttggctatattaagataaaccatctctaatccatacactgtttaatattatg

SEQ ID NO: 74710 - DNA, 163 bp, Glycine max
gaccttatcatttgacatactagatatttaatacttcagaaaataagatgttagtatggcgctaccattctaaaacttctgcttaaaaataagatttgcagatttataattttagaattaaatcagtagtgtacaatgtggcctttcctgctataagaaccct

SEQ ID NO: 74711 - DNA, 485 bp, Glycine max
  unsure (1)..(485): unsure at all n locations
agcttcttatccaaaggctcatctggtggtgaagctccttcttccatggcttattccctagtggatggcgcctcctctcacctcttctcctttgtcttccgctgcatctccatggtggaaaatcaccattaaaggaccttattgaagctcaaagatccagcctccatagaagccccacaagcaagcttccatcatttactctctggtaatcgattaccagaaggcagtaatcgattaccaatagccaacattcttttcaaactggattacaaagcagtaatcgaataccatgagcatgtaatcgattacctatgttttaaaacgttagatttcaaatttcaagagtcacaacttgtgataaaacagtttcaaacttggtgtaatcgatacacaatatatgtaatngattactagtgtttctaaacgatggctttcanattaaacatgaagagcacatcagttgatgtgaatcgatacactacaat

SEQ ID NO: 74712 - DNA, 426 bp, Glycine max
  unsure (1)..(426): unsure at all n locations
tctcagctgaacaacctttgtgttgggctgcccacctgacttgtcttggaggcctaactatcgtgctactattgaggcctgngaaattcctggagaagattatgaatttgatgaagaatagtccatgtgtttgtaattacattctggatgacctccttgtttctggttttccaaattatccaacaagcaaccataaacagaagacaatggtccgacgatgcatgagtttgaagccaatccaagatagagatgtcaccattgtgatggcaaacatctagctgtaaagagctccaccttcccgccaccttatagcagtgttagtcaatgaatacgactaacttttgtgtataaaacctgtgtatactgtatcaaactttcctaatntatttagtgtttgtaatactataagtactttttcgtaaatat

SEQ ID NO: 74713 - DNA, 433 bp, Glycine max
  unsure (1)..(433): unsure at all n locations
agcttgaagctntgatataatattgtgcaacttcctgtcgcaacctacccttcggcgggaggacgacggagggctcacgggtgcgtcttccaagggagaaaggcgtgcggagtcgccaccaacttttatttggggaaaacgtcggaaaaaccggaacgtttggtctatgaaatttaagtgtgaaaggttcgggagttngttttatgcacgagtaatgtattagcaccccacgcatccgtcacanaggacaacaacctttaatcaaatgtgtaaggtatgacttcaaatntatgtattctccctctttttatgtttctaggctttntatgggtcattttatatctttttatctttttgtggtcgacaagggtgtttccctcgctcctacgtatcctcaattgcgatgaggaaatcagacctacgtagttctttc

SEQ ID NO: 74714 - DNA, 494 bp, Glycine max
  unsure (1)..(494): unsure at all n locations
tctgatccacccaggaggaatacatacatgttagagctcgccggtgtctatcaacaaacagccatagccttgcagagagagtaagatnttgtgagaacttatctgttatgaaaatgaagtttttgtatgaagaattttaaattagattttcactgcacgtgaggagggaaaagataagtgagagaatgaagtttcttcaagatcttgtacctggatgcagccaggtggcttctaagtttgaacccagaaaattcactatgtcatattggtatttgtgtttatgtatcacatccttttaacattgttatttttactttctatgcttttacgtcactggcaaggcagtaatgctagatgaaatcatcaactatgtacagtcacttcaacgacagggtgaggtatggatgaaaagcttatcttcctattgccacatgtgattcttaagtcatgtaactgatttgccctgtatgttctgggtctgcaactcaatgcaa

SEQ ID NO: 74715 - DNA, 498 bp, Glycine max
  unsure (1)..(498): unsure at all n locations
atcccagagtcaccgcggctgcagcttggtatcatacctattggaatcgataccagtgtttgtttctgaaaaatctaaagatgtaactcttcanaaaggttttgactntctcaaatgggttttaagtttttctaaaagttataactcttctgaatgaccttcttgaccaggcatgaagagtctataaaagcaaggctntgttttgcattntaatcattctttccaacaacaatcttgaatacctttgcttttccaatcaatcctttacaagcctngaaatctctntgaagttcttcttcttcttcttttgtaccanaagctttctgaagttttctggttttctaaaccttgaaaacttgtattattcatctntttcattctcttctccttctgccaaaaagaattcgttaaggaactaaccgcctgaatcttttgtgctctcttctctctttcaaaaagaacaaggataaccgcctgattcttttggtctccttctcc

SEQ ID NO: 74716 - DNA, 391 bp, Glycine max
  unsure (1)..(391): unsure at all n locations
ngaagtgaggaagtgtggaaaggtgagacttcctacttntattcgttgaccacagagaggtacctggagatatgtcgcggtggttatgagaccttggggacgtcaggtggggtgctattgcccaaaaccaatcttgaccaatcccgacccaactcggacatattcagtcagtgagaacctgtgatgtacctaaataggcgagctcctggcagtctaccgattgaagaacaaagaccacatagcaaggaggctcgtgtggtggctggccagctatggatcttgagtgatatttgggatatggcctctggtaattgattaccaacggtgggtaatcgattacaatgcttaacagagaagacaagaaggtatgatggtctctggtaatcgatta

SEQ ID NO: 74717 - DNA, 419 bp, Glycine max
  unsure (1)..(419): unsure at all n locations
caagcttgcggatttggtcttcgccggtgaatggatcaaagtgagcctagaaagaggtaaatctgaccatcctgcnttgatgaatgtgaaaactagggcaaatgaagaggatgagaatgaaggagaaacccatgttgcgactgtcattcctacatggccaaacttcccaccagcccaacaatgtcattactcagccaataacaacccttctccttacctaccacccagttatccacaaaggtcatccctaaatcaaacacaaaacccacctaccacaacaccaatgctaaacaccacctttagcacgaaccaaaacaccaaccaaggaaggaattttgcagcaaanaaaacttatagaattcaccccaattctggtgtcctatgctaactngctcccttatctacttgataatgcaatg

SEQ ID NO: 74718 - DNA, 446 bp, Glycine max
  unsure (1)..(446): unsure at all n locations
cgtaagtatntgttagtataatntgcctgttccattangctcttatatgtctctagaggttacttcctcgttgacatcttttgttgtgaatggaattgccataacaggattgttgttactgtctttgatatttggtagatgatattgggttgagggaggtaattccgattggattaactcaccatccttcacttgccaatttgttatgacatttgttgtaggatcacctatgatgtcttgcttccaagggtaatctatatcctttatgatggcataagcatgaaaccaatcaaagaaaaagacattaattttgactctttcgacaaatacgtagaacttgtcttggatctgtttctgtttgtacccttgtaatgttggaaaaaccatctnctctgaagtcattttgcggagaatataaatcttttctaggagtttcttatcaatgc

SEQ ID NO: 74719 - DNA, 467 bp, Glycine max
  unsure (1)..(467): unsure at all n locations
agcttaactgtganacttatngaaatcagatgtttctataatataagacaaaactgtctttgacaagtttatctggcatttttgttttcattagttaagcaagcaattgaaatagatataaataaatgtttaaatatgctttcaatccatctaaatatgtggaactttagttttattatctgagaagctttttggtcagttatagtcctgagaaatataattctcttaaaatgattactatcgtgagttagtgataacatggtcatgacatgtgtctagacatgtctcattagctatcactctaagatggcatgcttcactatagatctagatgcatgttacgtcatcaataaatggtgataaagatttctacaagactttaacattataaaatcaaaaccaaaaagaaattacctaactaaaccaaaattaccatatattgtaggattagaatatataaaccataa

SEQ ID NO: 74720 - DNA, 453 bp, Glycine max
  unsure (1)..(453): unsure at all n locations
ctattagcaccttaaaactaagcttataaactctgagatcaagtgatctcaagtgatcataaattccactacatatggggagtaaacgtgaattntatatatatactattgtttgatgcttgctcttgaatcttgatttcaggacttgtattgtcatcatcaaaaagggggagattgtagatgcacatgcctttggtgttatgatgatgatcatgatgatatgatgcaattgatgcaaatgggcttttcgagcttatatacaagacaatactccaagatacaagtcacaacatcaagatgatcactactgtattaggaacggaattcctaattgaattagcagaacgtttggccaagtaaattaaattaaaagtgtntgtcataggatttactctctggtcatcgattaccagaggatagtatggactaccagtggccaaatatgctttacaa

SEQ ID NO: 74721 - DNA, 475 bp, Glycine max
  unsure (1)..(475): unsure at all n locations
agcttctttttttttcaacagatgtntttatgtcactgggtctttgaatgacattagaggaagtcattccaaggccccaacagaacctagctactttgttgttactcctttattagatgctttgatgcttgaacttatttgctcttctctagaagtatcgactagttttttgaagtagatgtatataatcatttgatattattttagacaagagtcatagaaacttgcgtcttctctttttatgaaactcanagtatcatcccaaattcattagtccaaagtaggttggcaccaatgaagaagagaatcctatgcctcaatcccacatggtattattaaaagaataaaaaagagaaaacgaacaaacaaacaaggtagggaccaaaccaaactcaccattaggaaaatctatagctgcgatgggtaatttgaaatacatcannagttttggcatcatttctttcaaaaacagatg

SEQ ID NO: 74722 - DNA, 452 bp, Glycine max
  unsure (1)..(452): unsure at all n locations
tccgttcccgagagcatctcttatntaagcatttcagcctttgctttcgtgtagcttaggaaaaacgtcatttattcttctttctttcttccaaaaccatctctaaagttccaagaaatttctccatcacccacatccaccattagccaccacaaaccatcattgttctccattgaaaacccacaccgagaggaacccttcaaccgaagcggaatcttccaacttggcttgcggttccggtagagaacgaaaaccctaatctgacctttcattntctttcgaggtaaccatggntctattcttgtttcttgctagtttcatcttgtctttgcatcttttctgactatggaaccgccattgcatgtcttatgcttcctttgaaaaaccttagagaaagagactntgtaaacgttatcctttcatgaaatgcatgttattntcgtaacctacac

SEQ ID NO: 74723 - DNA, 471 bp, Glycine max
  unsure (1)..(471): unsure at all n locations
agctngcctaattaacctgaaattgagagataatgattattaaacacacaaaatggaagtactaagtatttattacctatacttaacaaaaaatacttataacattacaaaataaccataaattggggaagtgtgatacactttacacaggttttatactcaaaagttagtcgtattcatcgactaacaactcccccaaatttacagttttgtttgtcctcaagcaaaaagagaacatctcacttgtcctcaagtgacaataacatgcaatgactatgtacaaaggtgtatgcaacaaaagttactgattgcatgataagagaatgaagtaaaatgcactcatcacttgtctttcacaaggtatgcagttatccaaagagaagaataaaatgtatcanagagagtatctctattggttcttgtatctaagaagtctattctttataacgaattatcctcaacttatcaatc

SEQ ID NO: 74724 - DNA, 455 bp, Glycine max
  unsure (1)..(455): unsure at all n locations
tcctcggcgccatttcctgcgaaagcaaacatatggaaagttagttttaccaagatatgctactcttaaaacgaaaatggcatacaacctcctccaataaacacaaacatcaatgttaatttagagcaaactcatgcacatactcccttacgaacactcactcgcacaagatattcttctaactaagaaaaatgcacccatgcacaatcaaggcagcctcgtgtcctagatcacttatatgtacttacaaggtgtatgtgctgcctacatcacatgcattttcattgctaaatttacatacatgcatgctcaaagcactttggctaccanaaactgcatacgtgcacattcatgtatttctaatacctatacatacacaaacttcgtgatgaatcttggctacctacacaataaggtgctacaattcatgctntattcaagtgtttctgctacct

SEQ ID NO: 74725 - DNA, 464 bp, Glycine max
  unsure (1)..(464): unsure at all n locations
agctntgttctaacaaattagaggaactcgtaccttgtggtcctaacatagttnttagtaagtntggatttttcatacaagctaaggcatattctacgtcattgtcaaaagtttttggttggtctaaaggtttcaaatgataattacattatctcaaaaagattttcactattcccccccccccccttttgtttcaagataatcatattgngatgttgttaggggtttatttcacgttagatttaacttataggccaagtgtaacccaatcaggatgtagtaactgaactatcatccagatcgtctttcaaaggaataaatgagggagttcatgtaattatttaactaagaagtaatnnttttgtatttttgttntgtgatggtcatgacataaataacaaaataaattataatataaattaaatgacaataaaaaaattaagtaaagataccaaacttggatg

SEQ ID NO: 74726 - DNA, 436 bp, Glycine max
  unsure (1)..(436): unsure at all n locations
cgttcagaaacgtgcatttgtgtgcaatacacaattcccgatacactcacaacaaaatggtgtatcagaaaggcataatagaactctaatggatatggttaggagtatgttaatcaattagactttacccgtatctttgtggatgtatgccttgaaaactaccatgtatttgttgaacagggttcctagtaaggcagttccaaagacaccttttgaactgtggacaaataggatacctagtataaggcacctgcatgtttatggttgccaggcagaaataaggatttataattcgcaagaaagaaaattggatgcaagaacaatcagaggatatttcattggttatccagaaaagttaaaagggtatatgttgtattgntctaatcatagtatgagaaatgtcanaactggaaatgcacggttcattggaaatgat

SEQ ID NO: 74727 - DNA, 469 bp, Glycine max
  unsure (1)..(469): unsure at all n locations
agctntgtgtaatcgattatactggattggtaatctattaccagnggttgttttcgaataaatcaaaagatgtaactcttcaaatggtttttgactntntcaaattggttttaagtttttctaaaagttataactcttcaaaatggttctcttgaccagacatgaagagtctacaaaagcaaggctttgttttgtattttcaatcaatctttctaagcaatctttctatcaattcatctcaatcatttctttcaatcatctttcaatattttctttcatctctttcaacagttgttctgtttcatcttctcttcatctttctaaaagttnttgttcaaaactttctcttccaagaaaagttctttgttcanaaacttgtgctattcatctttntcattcccttctccctttgccaaaaagaattcgcaaggactaaccgcctgaatctntntgtgtctctcttcttcct

SEQ ID NO: 74728 - DNA, 432 bp, Glycine max
  unsure (1)..(432): unsure at all n locations
tccacaacatccaagcaaatcaacatccaacatcatgaactatcaataaccaataaaacagggcagaggcaaaaaactctgcccaaaacacaaaccaataccacaactttccttactcaaataccccagtaacattctattcgttccaatttgttcaccgttggatcgactaaaaaattttactggaggtccctagtacataagtctacattnttaccgttgggatctattagaaaacgtccagaacacaaatatgtacaaccctttccacaaccagccatgcataagcattttctgcacaagcacaaaattctgctgcacatttcaacagcaagattctgcataatagtgcagaatttcgaaatcactcttgccctcantccaatttgcccagaatggatcctacaagtcctaaatcatgtgtaaatcata

SEQ ID NO: 74729 - DNA, 481 bp, Glycine max
  unsure (1)..(481): unsure at all n locations
agcttatgcgcatgtttccttacgaacgttcacttgcggaagatatcctattaaccgaaaaaatgcacccatatacaatcaaggcagctttgttacctagattatttacacgtacttccaaggtgtatttgttacttacatcacacacatctccttggctaaattcacatacatgcatactccaagcatttggggtaccaaaaattgcacatgtgcacatcttggtatntctaatacctatacatacacgaacttcatgatgaatcttgactatctacacaataaggtgctacatttcatgccctttttcaagttnttgctacctaaagccgcatgcaaattcaaccataatttcctttgctgactaanattgtattcaaattatatatatattntttggaatatgttgtctttcatacaacanttaacatatntatatatatattnntttttgtgagaacatttgactaccaaaatatat

SEQ ID NO: 74730 - DNA, 389 bp, Glycine max
  unsure (1)..(389): unsure at all n locations
tctcanagaagccacgaggaagcttatggaggaagcctcttaatgaagcttctagagaaagctacatgaagctacctcggtaaaaacgcttcccagccgttaaccttggatcttctcgaaatttggtctgcaactttaaaagacacttatccatgatctgaccgttgggatcttggagaagatgtctagagtgtgctagaagcctcttaatgaagcttttggaggaagcctcttaatgaatcttctagagaaaactacatgaagctgcctcggtaaaaacgctgcccagccttcgttaaccgctggatcttctcgaactttggtttgaaacttcacaagacaatttttcatgatctgaccggtgggatctttgagaatatgtctggagt

SEQ ID NO: 74731 - DNA, 490 bp, Glycine max
  unsure (1)..(490): unsure at all n locations
atcctctcagtcacctgcggcatgaagcntgatcggacatccggtgaaagtaggacctttgattctctgagcttccgntgttaaatttcgagcctctcgacatattatgcgcccgaatcggacatccgtgtgaaaagtcatgatcattngaatttctcgagagtttccgatgtttaatttcgagcgtatcgatatattataagcctgaatcggacatccatgtgatatggtatgaccatttgaatttgtcaagatattctggtgctcaaattcgagcctctcggcatcttatgggatcgaatcggacatccgtgtgaaaagttatgaccatttgaatttctcgagagcttccgatgttgaatttcgagcgtatcgatatattataagcctgaatcggacatccgcgtgataagttatgaccatttgaatttctcaagagctttcgatgttcaatttcgagcctctccacatattatgcgcccgaatcgga

SEQ ID NO: 74732 - DNA, 345 bp, Glycine max
  unsure (1)..(345): unsure at all n locations
ctcagctattattattgtatgctcgaaataaacatcggaagctctcgagatatttcaatggtcataactnttcacatgaatgtccgaatccggcgcataatatgtcgagaagctcgaaattgaacaacggaagctcttgagaaattcaaatggtcataacttttcacacggatgtccgattcacgcttataatatatcgatacgctcgaaactaaacatcagaaactctcgcgaaatttaaatggtcataacttttcacacggatgtccaattccggcgcataatatgtcgagaggctcgaattgacaacggaaactctgcaaattcaatggtcatacttttcac

SEQ ID NO: 74733 - DNA, 347 bp, Glycine max
  unsure (1)..(347): unsure at all n locations
tatctagctaagcttgcctaaagagatttcaatgattatacaatattctcacataaaataaaggtatctctaatagtaatttcatatgaataaggtaatatggcgacagcatatcatagttgggggaaccagtagctgtaataaccgtgttgacaatcaaaaacaaactctccagntataaaatgaacaagatgatccaataaacatttaaaagagtaaactgaactctttcagacactacttgtggagcaccatctacccatgcatacataactgttgacccatcatacttctcactgcacactgtcagtgcagagaaacctggcangatcattgaatcttactat

SEQ ID NO: 74734 - DNA, 455 bp, Glycine max
  unsure (1)..(455): unsure at all n locations
agctataactntacaaattatcaagtagctatacacactaactngttgctgctgataatcctgctcaatatatatggacaaagggtttcattgaacagattggtatctgttatcttccgattgcaaaactgaagccctaagccgcgattcagattgcgttgctatccattctactcgtttcttcagatccctgcaaattcaacanaaaatatatcaaggaataaatatgtatgcacaatnttggaaaanaaaattgaatgtatgttgtgaaaaatacaagatctcatcactaatcataccatccatatattcataatagaatccaataatccatcaagctcttcaagagacagcacatttaatctagagatgcacccatgaccaaagatnttgttttaacaatagtttatggcagactgaataaatattggctgagtcgcgacaatatctgtttc

SEQ ID NO: 74735 - DNA, 450 bp, Glycine max
  unsure (1)..(450): unsure at all n locations
tctcccagacactgcaacgactaaacatgcatctgcctttcatgttatgctcttagtttctgggtcttgcacactctagaactaagttccaattagcagtggacaagccaattatgattcctaatgcagactactacaaggtctaagagaatattgttgatcatttggcaagtgcaccaaaatgtccaagtagtaatactcagaagtccgagtatcgattttacaaggactntgtctgtactttgcgtggataatttcaatttatagaggaaagatgaagaggtcaagagagctaaagaaaagtactatatatagatttatatagacaaaagatattggaattctgaatgaaatgtagatctactgctattgctaaactatatttagattttcttatcatcagtagtttctactcactattatatacttctctgtgctcacagacagcta

SEQ ID NO: 74736 - DNA, 510 bp, Glycine max
  unsure (1)..(510): unsure at all n locations
acctgcggcatgcaagctcgcacacaagaatctccttgcttgacacttcatatacctttggttgggtcatatagatgtcttcctttagatccccatgcaagaatgcatgtttaacatctaactgctccaagtgaagattctttgcagctacaatactcagaataactctgatggtagtcatctttacaactggagagaagatctctatgaaatcaattccttggttctgctgaaaccctttcaccacaagtctcgccttgtatcttcttctaccgccagattcttcatttatcctatagacccacctattctgtaacgctttctttccttttggcaatttagttaaagaccatgtcttattcttctgaaaggatgtcatnctcatcttcatcgctagctntcactcaatagtgtcattcccctgcgtagcctcactgaaacattctagctcaccaacatctagtaactacagataatgcaatgaaggggaatacctatctggtggtactg

SEQ ID NO: 74737 - DNA, 471 bp, Glycine max
  unsure (1)..(471): unsure at all n locations
tatctgtggcacactcggttgtccatcttttggtaagaattttccacccaactacattntctccatctattagactcgaacttaagaccttacttaaggaaactgaggtcactatcactcagactaacgactcattggcaatgtaattaacaaaatttattggttattaaagtctaattttaattctttgttagtgtatatattcttacaccatcaatcaaatagaaagtattttaaatacgacatttaaagtaatataaaatacaattatcctaccatatgtggttatccataattggattagaatgtattttctttntacataatgttactcaacaataataactattggtaaacttaccctcttgaatactctaacatgtaaatttataattaaatataactatatgttatttactatgaaattaagttatataaattgatgtcacaatcttgctaacatatatatat

SEQ ID NO: 74738 - DNA, 293 bp, Glycine max
agcttgccacccagctcgcccaggcgagctcatctattccaggcgagcagggttgcttccttcagaagtaacagccttctggagggcccaagtgggcctggttgctatttgcacccccatttttactaagtacaccccattgcccttttttttgtgattcttttttcgtaaagtacggagacttatgaatttcgtaacgatacttgttttctcttcgtaatgatacggaaccctgcggattacataatcatcccctttttgacttacggaatgttacggaacctcactaatca

SEQ ID NO: 74739 - DNA, 469 bp, Glycine max
  unsure (1)..(469): unsure at all n locations
atcctctgagtcacctgcngctgcagctgaacaatatatgatagtgttctctttagatntgttaaggatgtctgcaagttgatcatttgagttgacaaacacaataacaatttctctggacataaccttctcatgaacaaagcgacagntaatttttctctgtttcctcttctcatgaaacactggattggaggcaatatgaagaattacttgattagcacactacaacttcatttgtttgacatcactgtgaatttagggactgctggggagataaaacaataggagaggaagaataattcttgtatattattcacgaataaaagatttacatatatatgcaagaatgccaattacataataaatgctaaaaggaaagtaaatataaatggatcagatcaaatcctagagatttgattctgacccataataataatcagatccggaataatctgatctcgatcctaat

SEQ ID NO: 74740 - DNA, 507 bp, Glycine max
  unsure (1)..(507): unsure at all n locations
ccttgaaactaagcttgngacagctcgtgatgggtttctctccagtgtcaccaatgtatatttataactccgatgaatatgggcgagaataagaactgtgaaaatatctcataccattctacattaaatgattatacatgcacgacattaataattgagacacagtggtaatacacagtggattggaggaccaatgggaacatcccacctgatcaagtactagccgtaaaagtgcacctgatgcttcacgaagtgtaaccaatttactctgatacaaatacctatagattcaaagcagatgtcatgagagacaagggaatgagacttaataattattgagccttcatctcaactcctatgaccatgatatgtggaaaatcttctatacatatacatcacaaatatcagaatcaatcttcattgattcttctgataatattcattggggaatgatatatattcacatatattaaaaagatactccccggactaacacatatacactta

SEQ ID NO: 74741 - DNA, 485 bp, Glycine max
  unsure (1)..(485): unsure at all n locations
agctntannaattgaattaaaacgttcaatatctgctggtgattgattaccatatatgtgtaatcgattacacagtgcaaatattgaattcaaattttaatagctgttgtaaatcagttttggccactagtaatcgattacatcctatggtaatcgattaccagagagtaaatctcttganaaatactttttaacttaaatttcttagcccaaccttttgcttcttcaattggaattcccttcctatttaatatactcttcctaagactctagaaactgtcttgatcatccatcttgaatatctttgatttctttgtcttgaataaagctntgagaaacatgtaaccctctggcaagctttgagaaacatgtaaccctttggcatcatcaaaacattcagcttgatcctttgnctacaatctnccccttgttgatgatgacaatcctgtaatcaagacaagctatatacaagatggagtacgtca

SEQ ID NO: 74742 - DNA, 399 bp, Glycine max
  unsure (1)..(399): unsure at all n locations
tgtctcagcgtntgtgcgagacggagaccaacatgctagctatcatctccaagtaccaagaagagttaggtctagccgcggcccacgagcatatgattgcggacgaatatgcccaagtatacgcggaaaaagaggctagaggaagggtgatcgactctttacaccaagaggcaaccatgtggatggatcggtttgctcttaccttgaacgggagtcaagaacttccccatttgttagccaaggccaaagcgatggcagacacctactccgcccccgaagagattcacgggcttctcggctattgtcagcatatgatagacttaatggcccacataattagaaatcgttaggaaacttgtatggtctctcagaccttgactagatatgactntccttttg

SEQ ID NO: 74743 - DNA, 478 bp, Glycine max
  unsure (1)..(478): unsure at all n locations
agctntgaatcaataagctcttggttgaacacaagccatgaggttgtcttcaatcatcaacatcaaagacctcaatgttgttgatcttcatcatcaatctttgaaaacccttctaataacttcctctcaatgagtcataaatttaaaaatcattttggaagcatatgggctcaatataagatgagctatntataaagaatatgttatatagtagctttgatctattatgacacttttgtaattggttaaatcattntatacaaacatggattttcaatgaagaacaatgtaaccgattaccaaaaccttgtaattgattaaattaatcttacaaagccatctatgaaaattagaagcattgtaatcaattaccaaatagttgtaatcgattatttcgatcaaacatatacttnctattctatgagaagcgatgtaatctattaacacaatgttgtaatcaatttaattggttattttc

SEQ ID NO: 74744 - DNA, 483 bp, Glycine max
  unsure (1)..(483): unsure at all n locations
cttgatgtttgtgttgaatgcattataggtaaacagaccaaaagcatgatattatgtgcatatagagctacagacgtcttggaattgatacatacaaacatttgtgggccatttcatacaccttcatggaatggtcaacaatattttatatcattcataaacgattactccagatatgcatacttgtttcttatacatgaaaagtcacaatctttggatgtgttcaaaacattttaaagtgaagttgataatcaactcaacaaaagaataacgtgtgtcagatctgaccgcggtggngaatactatggtagatatgacggctcatgtgaacaacgttcgaggtcttttgccangtacttagaggaatgtggaatccttccacagtacaccatgccggngtcacctatcatgaatggtgtggctgaaagacgaaacagaactcttaaggatatggtaataagcatgatttgtcattctaactta

SEQ ID NO: 74745 - DNA, 476 bp, Glycine max
  unsure (1)..(476): unsure at all n locations
agctngttggacctcagagttatgttagaaggcacgagtcatcattagctcatatggctagctntggaattattgcagaagggcttaatagttgggtgcaacttagacacaaagagacccaggaagaggaatggcaagggtggcaaagaccatcgagnttttgttgtattgttgtattattagtatattttgatgtattatgcacaactattggtgttntgatctttttttagtttacattgtggttgaattactttntttttttttgcattcaacaactatttaaacaacacacgcctagtaacaagaattgtttctttagttgattaataaaacaaacatcaacatgaacaactaaagaaacattgataatacaaaatnttcttttannaaaatcaaacgtatgatttttatannagtaaaacaaacatgactacattagattatcacgcatcagaacaatgatctcatcaaca

SEQ ID NO: 74746 - DNA, 470 bp, Glycine max
  unsure (1)..(470): unsure at all n locations
cgagaattgtaaggactacttaatagcatgaaattcgtcttagaagggaggattttctaagacggttatgatgatgaaaccatcttaaaataactctcattctaagagggttatctactcaaaaccatcgttgaaaaggactcattctaggctctctatggntttttttttttttttatgttttagacctagtaattgtcttacaatgggagctattctaagatgattntcgtgtcatagtcatcttatgtaacacccttattttttgtaaaataaattaaaacagattntatttaaaaataaatagggtttaggaaaataatgaggtttntgtaattaaataaataaggaggaataattttattaattaaataatggttttaaggtgaataaaataaatatatattcttataanataaaaaactggttatctatttatttaatagagagtaaaatagagttctttttat

SEQ ID NO: 74747 - DNA, 464 bp, Glycine max
  unsure (1)..(464): unsure at all n locations
agcttgtgaagcatggcgaccacattggtctggtgatgttgatatgtctntgtntgaggtgtcaaagggcatataaaagtttgtggttaatctaaaagaacatacatgttcttgtagaaaatgggagttaattggaattccatgcactcattcaatagcatgcatgtggattaatggtgtcgaacctgaacttagtgttatttcttattacaggtcttggtttctgttattcctatattgttgattttggagtgtttttggtaattgtcttgaattgaatatctttcgattgcatttgacaagacatctactatcttgtcaacatattcatttattatcctttcatgtaatggaccaaacttatggcctccttacanagaccagtcatgcttctgtcaatgaggaggatggcaccttgaagaccatagaatgcataaattagagaatgatgagcctatgacaac

SEQ ID NO: 74748 - DNA, 465 bp, Glycine max
  unsure (1)..(465): unsure at all n locations
tagacgaccttgttngagtcgagatgactntattatttattnggacatagttgaatatgatgtagaagaanatgaatgtgagccttttacccctttgaaaggcttctatttaaaaaatgttttaaaaatacttttaattaatatttgaatttttattcctttattagtatatatgtgatgggtagaggatgtcacagacataatgccattaagtgcctcgacaacaatattaaaaagaagaagtgataatggatctccttgcctaagtcctttctgaggtatgaactcagctgtaggactcccatttaccagaatcgagacagaatgctgatttaagcatccctccatccactgaatccatntagagcaaaatcccatccttctcaacatataaatcaagaaatcccacgagacaaaatcatatgtcttcttataatcaacctttaagacaatgcatgacttttg

SEQ ID NO: 74749 - DNA, 488 bp, Glycine max
  unsure (1)..(488): unsure at all n locations
atcactcgacncgngatccttaagtcacctgcggcatgcaagctnganaggaaacaccattgtcgntgtgaacaatgtgatccattggaaaaataaaacctaatgtggagttcacaactgtctgactgcttgtccctcccaagaatgccatagttttttgtaagaagtgggttacgactgaaacttgtggttttttacagtgttaggttgtgtcatatatatagatgagttttaatatcagtgctgcattttntaaagaataaaaatatgcatgcacatgctttctgtatgtgttgtcaactacaccaatgacatngacatgtttagcttgcatcaaatctgcatgtgtagtcacgctgtgcaaggtcctttcacgcgctntatgttaatgcagacaacaatttatcatacacattntttcataatgtgtngtcaactcagacaacgatatatcatacatgnttttttagaaaataagtaataatttg

SEQ ID NO: 74750 - DNA, 511 bp, Glycine max
  unsure (1)..(511): unsure at all n locations
tatctatctctatgagatagaagcagannacatgaacagaaaggctctggacgatagcaaaagtatcaattattggacaatattgcctcaacgtctagtcctgagaagacaagtgctttagcacttggctcgcagtacaaaagcaatggccaagcttagccaagaaacaaggtggtgctttgctttctgatgattgttttcattactttgaaacattattgcgtcatgtatatgttgatcgtntaagcaaagaagaaaaaactctgctagatcaaatgataaaaaacatagtcaagcctagccaaattnttttgacaatcaaagatcaagaccaaacaaatgtgaccaccatcaaaaccaaaaataatacatgccagaaatatcatggagaataaaggggtccaagcatcagaatgcaacatctcatgaacttgatagaacatgatgaatatgttcatcgatatagaaaggtagacactcaagatagtgtgagagatatattatggtctca

SEQ ID NO: 74751 - DNA, 433 bp, Glycine max
agcaccgcagctgcagctctgagctggttgaaaatagtcattttctttttaatggctatgagagaggaacggttgacatatcactgtattgcacaaactatgtatgtttcagattctattagtgatagtatatttggacaacatcatcttcgatgctactaatgaaatgctctgtgaatattcttcctagctgatgcagatagagtttgtaacttgttggacgtgaacctgaagtttttcttaaactcaataatgcaaacaaccaagggatatctcattcctacaccagtgtggatagaatactgataaattaacattacgatcataagaatgaaacttcatgatccatgcatacttggtgagtgagaattgcaggtggcgagccatcaaacatgatggtactggtattcatgagtagctgttttagtaaggt

SEQ ID NO: 74752 - DNA, 426 bp, Glycine max
  unsure (1)..(426): unsure at all n locations
agcttgccgccacggagttntccgactatgctcttgtgtggtggaacaagctacaaaaggagagagcatgatatgaagagccaatggttgatacatggacggagatganaaagatcatgaggaagcggtatgttccggctagttactcaagggacttgaaattcaagctccaaaaactaacccaaagcaacaaggtggttgaggagatatttcaggaaatggatgtgctcatgattcaagcaaatattgaagaagatgaggaggttactatggctcgatttcttaatggttngactaatgatatccgcgatattggtgagctgctagagtatgttgatatggatgatttgcttacaaagcaatccaagtggagcaacaatttaaaaggaagggagtggttaagaagaatttaccaactttggttct

SEQ ID NO: 74753 - DNA, 415 bp, Glycine max
actcagcttcacattcaatatcgagcgttgcgatatattacgggattcaatcggacatccgagtgaaaagttatatgtttttgaatatgttgagagcttcaacattcaatttcgagctgttcgatgtattacgggactcaatcagacatccgagtaaaaagttattgtcgtttgaatatgctcagagcttcagtgatccatttcgagcgcctcgatatattacgggactcaatcggacatccgagtaacaatttatagtcgtgtgaagttgctcagagcttcaacattctattgtcagcgttccgatatattacgggacttaatcggacatccgagataaaaggtattgtcggttgaatcttctcacggcttcagtattacatttagagcgtcgcgatttattacgggactcaat

SEQ ID NO: 74754 - DNA, 525 bp, Glycine max
  unsure (1)..(525): unsure at all n locations
tgatcactcgactcgngatcccanagtcacctgcggcatgcangcttattccaggacaatntattatcatgcacaatctgcaatagttggctcataataggccaatcataaatatggagcattttcttgagcaagtagcctagcctaaagctcaacttccattggtgagacccaacgaagctgctctgcctgagcccacacctgtgcgggttgatccagagccagctgacacacaatctccagtggtgaattcactatcttctcctgagcgtgaagtagttcccccatctccacctctgnnatatatcttcgatgcatcatcagatgaagcggctgcccctcctgattcaccagcaggagaaacagttgaccttcctacttccccaggtggaggaatttccgatcttttccgttcatcatctggagaaagtcgtgctctcacttgattccccagttagacaatgttgacaattttgaatctgatgaaacctttggtttttggttattattataatatggtttaga

SEQ ID NO: 74755 - DNA, 447 bp, Glycine max
  unsure (1)..(447): unsure at all n locations
atcctatctccgacagccaatgggtgagtcccatccaggtagtctcgaagaagaccggcctcacagtgatcaaaaatgagaaggaggagctgattcctactcgggtgcagaacagttggagagtctggattgactataagaggctgaaccatgttaccaaaaaggaccattttcccctgccattcattgaccaaatgcttgaacgcctggcaagtaaatctcactattggttcccttaatggcttttctggttatatgcaaattactattgctcctgangatcagganaagaccatattcacctgccccttcggcactttngcctatatgaggatgcctttcggcctgtgcaatgcccctggtaccttccagcggtgcatgattagtattntcagtgatttcttagaaaaatgcatagagcgtgttatggatgaattcactgtatat

SEQ ID NO: 74756 - DNA, 420 bp, Glycine max
  unsure (1)..(420): unsure at all n locations
agcttgccacccagctcgcccaggcgagcatggttgcttcctccagaagcaacagccttctgtaggaatcttctggagggcccaagtgggcttggttgctatttgcacccctatttttactaaatacctgccttttttggtgattctttcttcgtaaagttacggaaacttacgaatttcgtaacgatacttgttttctttccgtaatgttacggaaccttgcggattacataatcatccccctttntgacttacggaatgttacggaacctcactaattgtgcaacgatgcttccatttgatcttcggtgtgtcacggaaccttacggattgtgcatcaatattntctnttgatttccggcatgtcccggaacttcacaaattgcctaatgatgggtgccaagcacctcacaaggacca

SEQ ID NO: 74757 - DNA, 429 bp, Glycine max
  unsure (1)..(429): unsure at all n locations
ntccttcggagcaagtgttacacccctccaatagctaagctcacccctccaaaatacatgaaaatacaaaagaaagtccctaccacaaagactacttacaatgtcttgaaatacaaggctaaaaccctatactactatggtacccctaacttgtaaggtaggttgcccttaatttgtanggtaccttacaaacttaaaatgaccaaaatacaaagcccaaaagaaagacaatatattctaatatttacaaagaaaagtgggtttatacttagcccatgggcccaaaatctaccttaaggctcatgagaaccctanggccttctcctacatctctagctcaatcttcctagagtcttctatccaacgcccttggggggtaggaattgcatcaagtggacataagccaccgcatgtgctatactgagactc

SEQ ID NO: 74758 - DNA, 469 bp, Glycine max
  unsure (1)..(469): unsure at all n locations
agctntacagcanatgccactctatgctaaatntctgaaagatatgctaactaagaagaacaagtacacccacagtgacaccatagttatggaaggaaactgtagtgctattattcaacgtatccttccatcgaagcataaggatccaggcagtgtcactataccttgttctatagaagaagtttctataggagaggctcttattgatttaggaagccaatataatttgatgcctctctccatgtgccggagacttggagagctggagataatgcctactcgaatgaccttatagttagctaatcgctcagtcaccagaccctatggagtaattgaagacgtgttggtccaggtcaagcatctcatctttcctgcttattttgttgtaatggacattgaggaagatgcggatattcctgtcattttgggacatccatnntatgtcactacaagctgtgtggtggacatg

SEQ ID NO: 74759 - DNA, 423 bp, Glycine max
  unsure (1)..(423): unsure at all n locations
tgaatgaggaagtgtagaaaggtgaaacttcctgcttttattctgtgaccacagagtggtacctggagatatgtcgcggnggtcaagagaccttggggacgtcatgtgggatgctattgcccaaaaccaagcttgaccaatcccgacccaacccgggcatagtcagtcagtgagaacctgtgatgtacctaagcaggcgagctcctggcagtcaacagataaaaggaacaaagaccacaaagcgaggaggcttgtgtggtggctggccagctgtgaactttgattgatatatgggatatggcctctggtaatcgattaccaagggtgggtaatcgattacaaggcttaaaaatgaagacaggaggctaagatggtctctggtaatcgattaccaaggggtgtaatcgattaccangcttgaaa

SEQ ID NO: 74760 - DNA, 437 bp, Glycine max
  unsure (1)..(437): unsure at all n locations
acgctttggagatcagccctcttatgaggtacacgtggaagacactctgctaatggaaccccacacccatttgcacccccatcagacccaatcaggcattgtgccaagtgatagatcgggcccactatggataaatgaagagagtaataaggatggctacacttatgtagcccaatcccctaatgaaaagcctgaataatactccaaagtctacagaagacaaagagtgtctcactacaaagcctcccagcttgaacccgtggcagaagaaactcaagggctagaaagagtcanaaatatggtcatcacacctgttattcaaaatcaaagtacaacccacaatcaattagaagcagaaggataaattaaaagtaaaattggttgcaataatcatntggtggaagaggccaagcaatatgggaattgtggcacatatg

SEQ ID NO: 74761 - DNA, 451 bp, Glycine max
  unsure (1)..(451): unsure at all n locations
ntcttatatgaccatngccttaattatatgataagaaatcataatttcgcaagtttagttttttttaagtatctagcttgtttagtttattgaatgttcatgtcacagagaatggtttcaaaactttaatcactacaaggcgcgacgagttaaaattattntgagaacaattgagaagtcgtgtgttttgcatagatcatagataaagtttgtgtgttaaaatgttttctgggttgaactcgaatcaggagggaggccctgatggactcttaagagtctacgccttgcgaataaatacactcggtttgagtgttcctctaagtctatgttaatcccatatggttagagcattatcgcaaaaaactatgaccataactggtctgcctatgattntacttagtaagagtgacctgacttacccattgtgtgacatggtttatcatgtactctt

SEQ ID NO: 74762 - DNA, 412 bp, Glycine max
agcttatgagcctaaacttgtaacttcaatgcaatgaaacatgcttatggctaggaatccacacatttggtttatgattagaaaagcatgaaaatatggactcgtttgtaagaatttgggctgacccatgattggcactttgcacctaagtaacgtgggagatgctcttcaatggtgtgtaggtatatgtgtaaatatatatggcataaaaatatgttgcaaagggtgtaaatatatatgtcataaaaatatgttgcacagtgcgtaaatatatatgtcataaaaatatgttgcacagtgtgtgaatatatggcataaaaataccttgcatagtgaatgaatagtaaaaaatgcctttcaaaatatgtatatctgtggataggtagcataagaagctcttaataaaaaatgt

SEQ ID NO: 74763 - DNA, 310 bp, Glycine max
gggctcttcttctgagtccaacatctcgcgatgttcccagactttgatacagctttccacgttctgctattcactgatattatgaatggcaccattcttggttggcactattcatatattgtttcatgaagaataggagggccgttcactggccctccttgttgttacatgctcatcatacattatctccctagagctcactctgtgagttcgagtggtggctctgataccaattgaaatactgataccagcggacagatgtcgtaccggatgtcacgacatcacgcttcataacatgcaaattatatgt

SEQ ID NO: 74764 - DNA, 417 bp, Glycine max
  unsure (1)..(417): unsure at all n locations
agcttcagtcccatcaaacctatcacgtggagtggtttataattattattattatatacaaaactgtatggttgatttatgggaaaaaagtgtaagaaaagaaaaataaggaaggaaaaggaatagaaaatatataaatgatatttttttttcaaattgtatgataaaaaagaaataaaagataacaaaattaataaaaactgtgtttaaaattattaaaaacattataacanaagagataaaaaaaaattagaanaaatttgtgccttgaaccctagcttcagtgccatgtgcatgagaataattngtaattaaatcacatgcatgactcggaaatcggaaattatatgcgtcgcttaaacacacaaatgagatagtgtttaaaaatctagcanattaaaacgcaccaggtggata

SEQ ID NO: 74765 - DNA, 452 bp, Glycine max
tgggggtactatagctgcactaaattgttgttgtggtaatcaaatgcagatgcaatgcagtagaagggggtaaagacaatatattactacaattatatgaaatttagtaggtaatactaagaacagaaaaccattgcacgcaatcaccattataggaattgtgattcattatgaatcacagtagcatgaccgaaaataaaatagccgctgtgtaaaatagcataacaattgtctcaaatacaggagaaaaaatactcctacgccatcattagccatttttagttatcgctctctttaaaaaaaaatgttgcccatttctttcgaattgtggtgatgatgtcgatgtccaacggtgtgtcattagcaaaccactgcaagtattcataattgtaagttagtactgcaaatataaaaattcagttccaattgcactgaagtttatgcataccatg

SEQ ID NO: 74766 - DNA, 453 bp, Glycine max
  unsure (1)..(453): unsure at all n locations
tagcttgaatgctctattcaatggagttgacaagaatatcttcagactgatcaacacttgcacagtggccaaagatgcatgggagatcctgaataccactcatgaatgaacctccaaagtgaagatgtccagattgcaactcttggctacaaaattcgaaaatctgaagatgaaggaggaagaatgtattcatgactttcacatgaacattcttgaaattgccaatgcttgcactgccttgggagagagaatgacagatgaaaagctggtgagaaagatcctcacatccttgcctaagagatntgacatgaaagtcactgcaatagaggaggcccaagacatttgcaacatgagagtggatgaactcattggttcccttcatacctttgagctangactctcggatagggctgaaaagaagagcatgaatctgtgcgtcgtgtccaatgatga

SEQ ID NO: 74767 - DNA, 493 bp, Glycine max
  unsure (1)..(493): unsure at all n locations
tcggttntcaatttcgatcatctcgatacattatgtcctcaaatcgaagatccgtgtgaaaagttatgaccatttgaatttgtcgagagcatccgttgttcaatttcgagcgtctcgatatattatgtccccgaatcagacatccgagtgaaatgttatgaccattcgaatttctcaagagcttctgttgtttaatttcgagcgtttcgatatattatggtcccaaatcagaatttcgtgcacaaagttctgaccattcaaatttctctagagcttccgttgttcaatttacagcgtctcgatgtattatttccttgaatcggacatccgtgtgaaaagttatgaccattcgaatttctcgagagctttcgttgttcaattacgagcgtctacatgacttacgtcctcgaatcggacatccgtgtgagaagtatgaccattcgaatgtctcgaagcttccgctgtgcaattcgagcgtctcatatattatgtc

SEQ ID NO: 74768 - DNA, 368 bp, Glycine max
  unsure (1)..(368): unsure at all n locations
gcatgcagcttgttggaaaccccttgattctttgtagcaccgtaactctangaggaggccaagaactactggatagaattccttttttccttggtcgtgttcttgatatgtgaatctcacttaaatattgagcttaatatgtggcatgcattgtgaatcacatttataatctttatcagctaagtggaaatgtatatgtaatttgtacggcctttcaaggagaaacctatcaatgaccttataatctgatagctcaaaatcacatataattttcacatatgtcattgaatcattgtgtaatgtactcgcaaattatgccattctacctaacattaccagcagtagtggctgtaaaatgatgtttttct

SEQ ID NO: 74769 - DNA, 499 bp, Glycine max
  unsure (1)..(499): unsure at all n locations
ctaatgtgttctcccttgtagaactactaactgcagtaacagttgcagcccaactatccagtagtgatgacaatagaatcaatgccttcacctcatcctcaaatntaatctgcacagattccaattgggcaagaatagtattaaactcattaatatgatcagttacagagataccttctcccatcttgaggttgaacaaccggcgcatcaagtatactttgttggctgctgacagcttctcgtacatatctgataatgccttcattaagcctgcagtagtcttctcgttcacgatgttgaacgcgacgttcttggctaatgtcaatctgatcacgccaagagcctgtcgatctagcaagttccattcttcttgcttcatgtcttctggcttaacccctgataaggggctgatacagcttttctgatatagataatcctctatctgcatcttccagaagctgaaatctctgccatcgaacttctcgatcttcaccttccc

SEQ ID NO: 74770 - DNA, 249 bp, Glycine max
actagaaagattcagataatataacgtgcatttaagagtgacagaacatttgaataacacttacttctgctcagtatattatatatgtgccccacccgatatccctgcaagtaagatgtagcattcgttcccccagaccattcccgaaacaaaatagtactattcagtgccaagataatggccactgtatttgggccagaaaaagttgatccaaacatttcttgttacccactttacattaggcctgtt

SEQ ID NO: 74771 - DNA, 477 bp, Glycine max
  unsure (1)..(477): unsure at all n locations
agcttgcagctatgccaactgtcactgggatcagcatagccaggtacaaagatgttctgaatctgaatcaaagcaatatcttgaggattagagtaaaagactagaaggatatctccacttaagaggttaaaacatcaaatgagaacaatcttgacatgagttactaagcctagtttgagttggcaaacatgaatcagctttcatcaacatacgtttcagagagtactcttttgaaaacaaaaaagattcttagtgaatcagaaaagactaagatgaagagaatatgtagagtaatttgcctcaatttctgatcgtataccagatggttttgcttgaacgaatntcatccattagttaatcaagcaactataaaattttgcacttataattctgggtccagaataaggtctattatcttcaagttctgaataatctgtcccagnaacacgcaagtatgcgcttatgtcattactaaca

SEQ ID NO: 74772 - DNA, 414 bp, Glycine max
  unsure (1)..(414): unsure at all n locations
atcaccaaaaacatctacgttccaagatttgtgggaagccttcaagttctttaatgtttgcttgagaataaccatttaattaccatgaaagggctgcttacagacctcctcaataaatctcaacaatctggatgctcataccatatatccaaaaatttaaacaatgatttacgaggaggtctacctttatccagcaccagcaattataggaaattgttagatttaaagtgaactanggaactacacgacattgagtcacaaagattgaaacaatgttgattgcattaggcatgatccaatcttaaatcgattatgtgagcaccaacacaaacattagtccaagtgaattcngctcctctaaagtggangtgagtgatggttgagagaatgctccaatcgaagaaatcatcacta

SEQ ID NO: 74773 - DNA, 269 bp, Glycine max
accgcagcatgcactttgcgaatctatgacgatctccacacatctttgttactgacccttgggcgaggaatatgtaccgttacaccaacatcttggactgatagttatgacaaatattcccttcttgaatgagaaagggagggtactcttgtcgtttcataaatgaacacttcatttcattcttgcatatgcatgttattccatctccataaatttaccgctacccttacactatcataacacttgttctgatttctgatcagactcca

SEQ ID NO: 74774 - DNA, 458 bp, Glycine max
  unsure (1)..(458): unsure at all n locations
ctaagcttcatggctaatgagcacgggaaatgataatcaatcaacaattaaagataccctcttctataggagactattgtgatgaatatttatgtgatataatccctatggaagcagggcacatnttgatgggtagatgatgtagctccatgtggagcttgtaggccttggatcttcttcatcaatggaatcctttgcttcttgaatatcaatggaagaggaatggagaagatagatagatgattggagatgccacttcaaggagaagatgagtcaagaagaagctcaccaccatagcaagccattgataagagcttgaaggaaggagaatatgagtggacggagagggagagaanggagcacgatatttatgcctcanatgaggtctgaactttgaagtgtattctcaaatgatcaaagttganataatgcacacacatggtctctatttatagcct

SEQ ID NO: 74775 - DNA, 456 bp, Glycine max
  unsure (1)..(456): unsure at all n locations
agcttctagtcgtccatagacctcctctgtggtacggtctatcaaacgttgcatctgtgcattcatcgcatccactaacagacgttgagcgccgtccaactgatggtactcgtcaccaccaccacctgctccagccataattcaacaggaaaaaaaaatgtgcaataaaaattattaaggtttcaggacctcacaacactctactcacgtctcttagatggtagtacactcgtgtttaatgctctcaatnaggctttgtgtaatgtattccctcttgcctttaccactcgtgntcctctaagttcctggatggccaaattagacacacanggaatataaaataaaaggaaagaaatatattgatcaccacagattgattgtgataacaactgacttgattgaaatatatataattggattgatacaggtgacttaattgggaacaattgatacaat

SEQ ID NO: 74776 - DNA, 399 bp, Glycine max
  unsure (1)..(399): unsure at all n locations
actcgaatgtctggatgagtcccataatatatcgagacggtcgaaattgaatgttgaatctctgagcacattcaaacgacaatagctntttactcggacgtctgattgagtcccgtaacataacgagacgctcgaaattgaatgtggaacctctgagacnattcaaacgacaataactntttacgcggatgtctgattgagtctcgtcatatatcgagacgctcaaaattgaatgctgaagccctgagccaagtcatacgacaatcactatatactcggatggttgattgagtccgcggatatatcgagacgcctcgaattgaatagtgaagctctgagccaattcagacgacgagtaacttttactcggatgtctgattgagtcccgtcatatatcga

SEQ ID NO: 74777 - DNA, 482 bp, Glycine max
  unsure (1)..(482): unsure at all n locations
agctngacataataatgtctaacaactattaagaggtgacccattcttttgctggtggatgacaatgtgtggaccacaacacatgaagccctggtattggacatcgatctgtcaaatgtacctgcataacataataaaaaatatagtcacaatgtgaaagtctactttataatatgtcaggacttttagcataacaaatggtttacctaaacaaaatgattcacattaacatgacctatgcatatgatacgatgcataaaactatctttatgaggttgaattctgagagggaaaaaattgatgttntgcttcagtgacaacaaaataagaactacattataccgacttgcaataacataccacatgtcgggtacaatcatccacttatccacaccaacatgtttaaataaaaaacatcgaattcatatggtgtgaaagctaaatcaaacatgttatatctctatgtaataacacactaacca

SEQ ID NO: 74778 - DNA, 436 bp, Glycine max
agcttggcaaaggaagaagaagaagaagtttaaagagatgcatttgttgttaaggattgtattgtcaaggttgttcaagataattgaaatgaataacaaagctctgcttttatagactcttcatgtttggtcaagagaaccatttagaagagttatgacttttagaaaaacttataactaatttgaaaaagtaaaaaaccatttgaagagttacatctttgtgtattcagaaacaatcactggtaatcgattaccaaatcagtgtaatcgattacacaaagcttttatgtgaaaggatgtgactcttcacatttgaattgaatttcaacattcaaaggcactggtaatcgattaccaaaacattgtaatcgattacaactctttgaaatcaattggaacattgtaaattcatttgaaaactttcttcacattcatt

SEQ ID NO: 74779 - DNA, 416 bp, Glycine max
  unsure (1)..(416): unsure at all n locations
agctttttgaatcctagaaaaccatgaattgttggcagcctaaccccattacaagcctagaaagtctttcggattcatttttgtgtgtccattgttgtatgatagaagatgaaatgcaaaggttggaacttgtgttggtcgtttatgatggaataagcgtaaacacttgagtttgagtgaaataatgactgtgagggtttggtcgatgatccttccttgatttctgtcatgcttactagcttatttcagctgtgactctaatacttgtgctcttatctttgaaaagatgcatgcttgtgagaagtgattgatttaagcattccatgatattcagttcatatggtggttgtccttgatgaatcanacaccattttctttttgatggccactgtctttgcacttgaggacaaatgaac

SEQ ID NO: 74780 - DNA, 475 bp, Glycine max
  unsure (1)..(475): unsure at all n locations
nggagatgatgcttcaatggagganaagacagagggagagaaagagagagtgaggagcacgatattgaatgaagaataagggagagaagttgaactttgagttgtgtttcacaagactctcatccatcanagttacaacaagtgttacacatgtttctatttatagactangtagcttccttgagaagctntcttgagaaaacttccttgagaagcttctttgagaaaacttccttgagaagctagagcttagctacacacacccctctaataactaagctcacctccttgagaagcttccttcagaagattcttatagaagctagagcttagctacacacacctctctaatagctaagctcacctccttgagatgagaagctagagcttagctacacaccccctataatatctaagctcaccccactgacaaatacatgagaatacannaaagtccctactacatagactactc

SEQ ID NO: 74781 - DNA, 485 bp, Glycine max
  unsure (1)..(485): unsure at all n locations
agcttgttgaatatgatgccttgttgctggaccgtttccttgacattcttcaggatttgcatggcgatgatattagagaaacggttagtttcatgccttcaccacaccactcttttctttgttttttgttgttatgtttaggtttgtggggttatgaaaaagatcatttttttttttgcttagtagtgatggatttctgatgcccccacttggaattttatggaatggtaaaatgtaaagatggtagctttggctaactttgatggattcctgaaacccctcttttggtatttgttaaatggtaacgtttttggtattggaacattgtcatttggtggaaagagggtcaaaatttgtctggtgtatgtatgcactctggaatgggtgtgttgaattattcttttatgggcttatgggtcctgaattgttcgtctgcgtttcttatcattctgatcattcgaattntgagttaaaagttcaatatt

SEQ ID NO: 74782 - DNA, 450 bp, Glycine max
  unsure (1)..(450): unsure at all n locations
cgttntcattntcactatccagtgaagccaagaaatggctacactcattcaagggcaacagtttgaagacttgngatgaggttgttgaaaaatttctgaaaaagtattttcctgagtcaaaaactgcagagggaaaggctgatatttcttcattccaccagtttcctgatgagtcattgagtgaagcgttggaaggattccgtagcttgctacggaaaactccaatccacagattctccaagcctatccagattaatatcttcattgatgggttgaggccacaatcaaagcaattacttgacgcttctactgnggggaaaattaaattgaagaccccagaagaggcaatgaaattgattgaaaataggcctgctagtgatcacgctatcttgcgtgacaagacacacattcccaccaagagaaagttgttagagctttcatcacaagaca

SEQ ID NO: 74783 - DNA, 464 bp, Glycine max
  unsure (1)..(464): unsure at all n locations
agccttccaaagcctcctccatccaccaccactcatcaccaacatctttccttaaacttatgtatgccaatgcgagatataattcgtcacattgacttattttcccactcaaacacttccctcctccattcaaacttccacacccaacccccttccctccaatgtcccacgttgtttgtacactcattntgatgtttagaccaactatatagcctacgacacataaacgctaaactctcttcccccacccaattattaaaccaaaatatagctggatcaccttcctcaatttttcacttcaatctcctatcaaaccatccgttattcctctactccgacaagacaatttctaatctcttcaccaaatagaaatatgtggactatcttcctccctcacagatatataattggtatgtaatgtgatttatacaatgagagactgttcacttgttctttctgtacac

SEQ ID NO: 74784 - DNA, 458 bp, Glycine max
  unsure (1)..(458): unsure at all n locations
gggtaagtgaaaggatgattcctaataagcaagatcgttcagtcattccagcctcccaggtgaatggcacatagaagttggccatagtaaatgggtaacaggcaaaatgtgacattgatcactaaatgggtagtcacttaatgcatatgacaaaaagatacatacctgaatggctataaatgcatccatgcaaatgcagttccctatcatgcacaaaactccaagatgaaaattgtcaatacccaagttctgtaagccaccaattaaccatccacatggctctggctgacctctggcacttatttcattatgtgttacatgaccgagttcggcatatcctatcaaagctggaccacgatacanaaccataaatatggcaccagagacacagataatagttcctccaacatttgccagaccatcatatctgagtagttcactctttctgtactgcatga

SEQ ID NO: 74785 - DNA, 431 bp, Glycine max
  unsure (1)..(431): unsure at all n locations
agctngccacccagctcgcccaggcgagcatggttgcttcctccagaagcaacagccttctggaggaatcttctggagggcccaagtggccctggttgctatttgcacccccatttttactaagtacaccccctgcctttttttggtgattcttttttcgtaaagttacggaaacttacggatttcgtaacgatacttgttttccttccgtaatgttacggaaccttgtggattacataatcatcccctttttgacttacggaacctcactaattgtgcaacgatgcttccatttgatttccggtgtgtcacggaaccttacggattgtgcatcaatattntcttttgttttccggcatgtcccggaatntcacaaatngcctaatgatgggtgccaagcacctcacaaggaccaaacaaaagttgcacgt

SEQ ID NO: 74786 - DNA, 418 bp, Glycine max
  unsure (1)..(418): unsure at all n locations
ttgagccanaatcctgactcaccatanaccttgacccaaggtgagaatgccaatccttatcctcggaagcaaaaaaagaaggagaaggagaatttccaatcaaagaacaagagatagaaaatttccaatcaaagaaaaaaaaggggaagcaaagaaattcccaatctaagagtgtgagaaagaaaaaaaggaaagataggaaattcccaaccaaagaatgggagaaagtaaaaagagaagaaagttctagatcatagaaactagaagaaatatgcagagaggtctttggaccggacaatatctgaacaatacagaattgtcaccaaatgatacacaaaaaggaaggaaaggaaaccacgacctataatggtcttctccctttgattaccaaccaanatcctgtgcgtcggtgacttgt

SEQ ID NO: 74787 - DNA, 469 bp, Glycine max
  unsure (1)..(469): unsure at all n locations
agcttgcccagagaaggagtccacggaggaaatgcttaccacctcanaagactgganaacggtttctaatgactcctctgcggcttccacataaggcatagaggatgggcagctcaccaagatgtcttcctcgcctgatacgatgaccagatgcccttccactacgaatttcaacttttggtggagtgtagagggaacaactcccactgagtggatccacgggcgccccaatagacagctgtagggggggttaatatccattatttggaaagtaacttgacaggtgtgagggcctatctgtactgngagatcgatctctcccctaacctctcggcgggtgccgtcgaaggcacgaaccaccatngaacttggctntaagtgggaggcattgaatggtaatttctccaaagtgctcttangcatcactgttaaactggaccattatcgatgagcactttggctacgatat

SEQ ID NO: 74788 - DNA, 426 bp, Glycine max
  unsure (1)..(426): unsure at all n locations
taacaccgttgatatcgtagggcattaacggttcaagttttttttcatgatggatatgatcattgcgcaatttctagaattccttgttagcattgtttataatacataatagtagaatataataatgattggaagatcaatttaataacagcaaaaaaaaaaatatattggaaagtggccaaatatgaacacaaattgtgttttgtgtgcctagtgaatatcatatcgatatttttaatcaaatgatatgtgaagtatatatacaccaatttttttaaaataataatgtcatcctgcataactccattnttttaacgtggtctttnttgtaaaataaggatgatgtttgtttgagccaatcaagcatatgcaccactaattgatatatttgcacgatngacataagttgaattttttcatagtcac

SEQ ID NO: 74789 - DNA, 405 bp, Glycine max
  unsure (1)..(405): unsure at all n locations
agcttgcttgtggagcttctatggaggctggatctttgagcttcaatgaggtcctttaatgggggttttccaccatggagatgcagcggaagacaaaggagaagaggtgagaggaggcgtcatccactatggaataagccatggaagaaggagcttcatcaccaaagatgcgccttggataagaagcttggagaggatgcttcaatggacgaaaatatagatggatagaatgagagaggggggagcacgaaattgaaggaagaaaaagggagagaagtttaactctgagttgtgtctcacaagactctcattcatcatagttacaacaagtgtcacagatgcttctatttatagactacggtagcttcttaagaagctntcttgcaaaactntcttgagaagctt

SEQ ID NO: 74790 - DNA, 173 bp, Glycine max
  unsure (1)..(173): unsure at all n locations
gaactaattccgcttcggagtacgacagtcaccgctttatgaacgcttgtacaccaccagcgcttctaaaccatcaagggatggtcgtttctccgggagcgacgcgttcagctcatggacgacgagtatactgattttcatgaggaaatanggcgccggctgtgggcaccact

SEQ ID NO: 74791 - DNA, 481 bp, Glycine max
  unsure (1)..(481): unsure at all n locations
agcttcctcggggccatttcctgcgaagcaaacatttggaaagttagttntaccagtgggacactactcttaaaacaaaaatggcatacaacctcctcccataaatacaaacatcaatgtaaatttagagcaagcttatgcgcatatttccttacgaacgttcacttgcacaagacattctattaactaagaaaaatgcacccatatacaatcaagggcaaacttcgtacctagattatttacatgtacttccaaggtgtatttgttacttacatcacacacatctccttggctaaatntacatacatgcatactcaaagcatnttggggtaccaaaaattgcacatgtgcacatcttggtatttttaatacctatacatacacaaacttcatgatgaatcttgactatctacacaataaggcgctacatntcatgctcttttcaagtttttgtacctaaagccgcatgcanattcaagta

SEQ ID NO: 74792 - DNA, 363 bp, Glycine max
  unsure (1)..(363): unsure at all n locations
tgaagagttttcttcatcactaaagatatgggtatcataattttaaacttatgtgaaaggattatcaagaaaaacaacaggaaaaaaagtgtctttctttttcaccacaaaatacatgtcacatgatgcagcaccctgacctcctaaaccacagccatgcacagganaaaggggagagagaaattgataaagaccaacaaaggggactgggagtacacacagatatttcaaataattcacctataaaaaaagaacagggctagcattatgaagacagaaagttaatagtattcatatatcgaccataaaaggtagaaantttatgtaacagcatgaaggtgggcacaataataatacctgcac

SEQ ID NO: 74793 - DNA, 491 bp, Glycine max
  unsure (1)..(491): unsure at all n locations
agctntactaaaccaatcacacacatacacacgcgcgtgtgcaggcacacgcacacgcacacacacacacacatgcatacatagcatgaaattctatgattcaaaatatttaactactaaaattaaattcatgcatgcacaaatgacacaacatggaattttctttgttagtctaagttttatattttcagggtgttacaactctaacttattttaattaattcacatcatataactagacactttaattagtcaccaaataattaaactaaaattctatctttaaactaattgtatggtgatttacaaaaataccctccactttaaactcttatgacttaattacccaatttctaattccatgatatctagatcaccattaatcaaccttaattatccccacttaatttctaaccttacattaattactaatttcttctttcaaacttctaatttctatttctagaccaaaatccaattatttacatcta

SEQ ID NO: 74794 - DNA, 516 bp, Glycine max
  unsure (1)..(516): unsure at all n locations
acctatgatactcagcttcattttatctanacaggtgttgttttttattctttgactatgttgtagttgtttctttgtttctcacaatacaaaagcttcaatttttttgtgaacctcagccttctctgatgtcccactttttttttgggttttatgatttttcgcaagacaaaagctntcattcttttgggtgttctccctttattttgtttcctgagttctcgcactgcaaaaaacctaatttttttattcttgagccttctacaatttgcgtagcattttgggtttatatttggatcattgggtaacttgtttttntggttttttatttttcgcaacccacaagcttaaattnttttgggtgttctgcctttatatngttttctttaatactagctgagttatatcaatggattatatttgtatatatgttcaatccctttgagtatacaccttcagctgtgaattcaaatatatgacatgctntatatcacatatatgtcatcctttatttat

SEQ ID NO: 74795 - DNA, 454 bp, Glycine max
  unsure (1)..(454): unsure at all n locations
tcactcgacacgagacctcagagtcacctgcngcatgcagcttttatccaggcacattcttgttagtgaagctcattcttacatggcttattccctagtggatggtgtctcccctctcctcttcttctttgccttccgttgtatctccatggtggaaaatcatcatngaacgacctcattgaagcttaaagattcaacctacatataagctccacatgcaagctttcattaagtggtaatcagagccaagagcttcaagtatgtgctccttacacctccattaatggtttgctttaccttctcttccatagttgtttcttcaattttcttcatgtatctcctcacatgtcttgtgctaaacttttntaacatgattctttagagtttccacctattaaacttgctatagaagctagatatgaatttctatgggtcaaatatctggttcttgttc

SEQ ID NO: 74796 - DNA, 427 bp, Glycine max
  unsure (1)..(427): unsure at all n locations
acactatcactactcaagcttgctcanacttacattgatgttngtatttatgggaggatgttgtatgctcattttgttctaaaagtagtgacccactggtaaaactcactttccaaatgtttgccttcgcaggaaatggccccgaggaagcttgccttatagaggtccaagaatgacaaggcatccgaaggaactatgttctctcctgagtatgacagtcaccgctttacgagctctgtacaccatcancgcttcaggccataacggatggtcgttcttcgtagctacgcgtccagctacggctacgagatactgatttcagtatgaaangccccggtggggcatactggtactccatgccacattgaccataatctccttagtttatccatgctggtaacagagaggcggcgtacagagacctggt

SEQ ID NO: 74797 - DNA, 453 bp, Glycine max
  unsure (1)..(453): unsure at all n locations
agctttatctagccaagatcgtacaaaaggtgttacaacagaacctaacggtttctaattatatgggccatcaaatctatctgtgttggcagtaattaattagctcgtgaatttcctttggggctgaacacacttcggcgatggcccttgctntggctagtagtcacgggaggtcttgacttccatttaaggtcaagtcaaacctatccatccacatgngtgcttcttgatgcaatgcatcaatcactctccctcttgcttccttttcggcgtacgcttgtgcgaaatcctctactagttnttgttcatgggtcanagactggtttaactcttccttgtactgtcctatgatagctagcatgcttcgctccatggcttctaagtgttgagccaaactcctcttggatcttgagcaagcaactaactcttcctttaagatcatgccatgtactc

SEQ ID NO: 74798 - DNA, 238 bp, Glycine max
  unsure (1)..(238): unsure at all n locations
ggcccagagaaggagtccatggaggagatgcttaccaccttanaagactggagagcggtttcgaatgacccctccgcggcttccacataaggcatagaggatgggcagctcaccaagatgtcttcctcgcctgatacgatgaccagatgcccttccactacgaatttcaacttttggtggagtgtagagggaacaactcccactgagtggatccacgggcgccccaacagacagttgt

SEQ ID NO: 74799 - DNA, 443 bp, Glycine max
  unsure (1)..(443): unsure at all n locations
gagcttgtccattaaaaatatgctgtatgaagttgtcatttcattttctcactaagtaaaatggatcattnttaaggtccaacgccttataatgatcaccacttaagtaaagaatcgcttgataaanaagaactacgtangtctgagttcctcattaaggatacgtangagcaaaagccccgctttcgtccaccaccccaagagatcgttaatggtccaatgccttaaacgttcttcctttcaaaacagagatcgttatggccaacgcctaacgttgtccctttcaaatcaaaaacgtttatggtcaaaccatgatgacctttgtcaatttaactatttgcaaaaagacaaacaacttacaacacttgtccaaaaactcgtagttgatttctatccaatgaggatactagagcaaggaacccctgcgacccaaaagaaatata

SEQ ID NO: 74800 - DNA, 423 bp, Glycine max
  unsure (1)..(423): unsure at all n locations
tagagtataaacagccgtttgcactcacttactttggagtatctgtgatggtgatctatttgcccatttcagtattcagaaagtggatatgtagcttactgagaattttgtttagaaactgtcacgaggactacacattagttagcacttccactggacttgacgtcccttttaaaatcgatggcgttgtccgagggccagagaccaatctataaagtagtttgattactgatgaagaaatcatagaaagagaagaatgtatgccttcggtcaagaaagaggaagataaatgtnccttgcttgcacanagttgtgagagtagttcatggaacactgccaagtgtggcttgtacctcactccaaccatggttgcacaagaggtaacaagatctcatttaaatctcattctttaccacaaactct

SEQ ID NO: 74801 - DNA, 482 bp, Glycine max
  unsure (1)..(482): unsure at all n locations
agctgggaatgaggtttgntgatcatgaatggattatggctggagagccagcagttggaaactctgaacagacggaagaagatgctgaagctgaagctcaataagagcctacacatcaatggagtccttgtgattcacttatgattcagaagatggatgttatgctgcacctccatcaagagcactcaactgaagttcatagattgttggagaatacaactacccgactgganaacattgagactacgctaacccttaacacctccttaaccctgatgaggatgaagcttgtgttttaagtgctttcttttgctatctaattctcctttctgattatgattaattatgtttctgagtctttgatcacttgctttgtgatgtttggataagtaagtatgctttcttataacagatgtaatggtttttatgcaatatatgttatgatcgttnttccctattcacatcatatttgtttttgttac

SEQ ID NO: 74802 - DNA, 458 bp, Glycine max
  unsure (1)..(458): unsure at all n locations
ctgacaagtgtagcttgtcaccttctcgctaagccaatccgctggtttatcgagtgtctgctaagcgcaacactcattggctaagcgcaaggaagaatctggaagaaatgagttggcaagttcgcttagtgcaccgcttcatctcactaagtgcaccacttcactccatccgctaagtgagaaaggcacacgctaagccgaaattcactaatgtgcattaagcggtccagaattgtgctaagcgaatgagcacgaacaaggccacctatntaagcctaaaattagattctgtgaagagagtgtgggctgggattcacagctttgcatgtctagagactctatagagagaaagggcctagtttcacagagttttgagagattctgatatgtgaagatctgcagagactatatcttgaagcaagagtcgttctaagagcttgagatgagtctgtgagtga

SEQ ID NO: 74803 - DNA, 477 bp, Glycine max
  unsure (1)..(477): unsure at all n locations
agctntagatacaagataaataatntatgaatttatatatntatattataaanatataaatataaataatttattcataattaagaaattcacaattgaaaataataagtcacggtctaaattaataatacccccaattagactgaatagggaacgataatgaacagtgatagattgaatagacttctaaatgattggattaatggactccaattatattaaatgctaactgatntttcttttttgagacgatatctagttcttgatagaacattatggcggaagttgatccatgtagccgaccccacctagtgngataaggcgttgttgttgnntgtgttgttgagacgatatctagttcttgtactacaattatacaatacaacctatgcacttgcagattgacaatacttggcgagtatttaggtccttcaaaatacaacaaattctctactttgactaagactaacacataac

SEQ ID NO: 74804 - DNA, 479 bp, Glycine max
  unsure (1)..(479): unsure at all n locations
ctggctttanagattcaggatcaatattgagctagaccacagatagaatagaagaagttaatgaattaaaccagttatattatattatacacacacacacatatataagtcagcaaggaattaagaatnttgcaaattagttcttcgatatagatatttcactcacgcgttttttccgaactcgagggcacaagtacaaatccaaacaccgttcaaagcagtctttcatagcattctcatatgcaggaatgctcctcatagatgcaaacctgatcaagtcatatttattagttcaactgtatacaatgggagcagcacaaatgtttgccctgaatacacggtacctttgtggaataaacttggggcggtcttcctcatacatcaatngataagaatngatctcttcttgggttggaatgtactctagaagaggattatatgactcatcatggcctaagaaagcaattaaattattaaca

SEQ ID NO: 74805 - DNA, 438 bp, Glycine max
  unsure (1)..(438): unsure at all n locations
agctggcctcatagaggtccaggaaggacatggcggtcgaaggaactagttccgccccggagtacgacagtcaccgctttaggagcattgtgcaccagcagcgcttcgaagccatcaagggatggtcgtttctccgggagcgacgcgtccagctcanggacgacgagtatactgatttccatgaggaaatagggcgccggcggtgggcaccactgggtacttccatggccaagtttgatccagaaatagtccttgagttttatgccaatgcttggccaacagaggagggcgtgcgtgacatgagatcctgcgttatgggtcagtggatcccgttcgatgccgacgctatcagccagctcctgtgatatccgatggtattggaagagggccacgaatgctagtatgcgcagaggaggaaccggtctgatgggtacgatg

SEQ ID NO: 74806 - DNA, 492 bp, Glycine max
  unsure (1)..(492): unsure at all n locations
taagctccttcaactgcacaaggctcttaatattcgaagagtattcttgtggaaccttcacccgacgaagacactgacgaaaacttatcttcttctttttcgaccaagtatgacaagctgggggaaagtaaatcttcttccgatcagaccttggatgcaattgtgatcgtatccccatctcagttagatcttgacgggtattcaagccatccttcgtcttgcctttgatgttaatgagcgtcccaatcacattgtcacatacatttttctccacatgcataacatcaatacaatgtctaacgtatagatcagaccagtacagaagatcatagaanatggacctcttcttccatatgcangtcctacttatatgcttctttttggtctttctaaatacaatattcacgtgttgaacccactggtatacctgtcaccagtcacatgttctgtcaatatcgtgctctgacttcatttgaagcttttttaatcatt

SEQ ID NO: 74807 - DNA, 473 bp, Glycine max
  unsure (1)..(473): unsure at all n locations
agctngccaaaagtctaacaagtntctagcgccgttgnntgggattgtcaagctaagtctcagacttgcctggtaattctcctagagtgttttgttttctttgcacacgatgttgggtcttggactcgcctcgcgcactcgaagatatttgtcatattcataataggtggatatgaaggatattcaaccaataaacaaaaccaaatataaaaatcaattcaacacgaaatttntttttcctagagaactatgtaggtctgatttcctcattgcacctgggagtacataggagcaagggcaacacccttgtcgattcaagaaaataacacaaaaaattcgccgctcttgngaaaataaataattttgaagtcatattatttctattgcatactcgattatacgctgccattctttgtgatgggcgcgtgggttgtagcaccttcctatgcgtaacaactccccaaccctttgtt

SEQ ID NO: 74808 - DNA, 420 bp, Glycine max
  unsure (1)..(420): unsure at all n locations
cgtgctacattttcgttacgaattaatgtttttaagacctaagctttctgagacacctcatcgaaatatntgggcaacaatggttcacactggagcttaggctcgctgcatcacctcttttggccaacataggtagatgccatcatttggcgagaatatgaaagagaaacgactctaanaggtgttagaacactacactagctattgtagaaagataaacgaagtaacggcaattgatgtaatggttctgggtttatttcttcattctcatggtatttatagaggaacaaagtcatacatggctatgccactaactggccagtagtgttgctaatcactactacaataactaaatnggttgtaacagtaatgggatatgcgcataactgaattggttgtgggagacaacggaacatgttg

SEQ ID NO: 74809 - DNA, 483 bp, Glycine max
  unsure (1)..(483): unsure at all n locations
agcttataccanagtccanaacattcacattattttcccctttntcaaaatatgaaactacttattaaattattataattattctttggttttttatcgtaagaattaaagataatattaagatatttataacacttatgcaccatgttgaaccaactaaattatacctcatttctaattatttttgtttgatatcaagtttttaatcttaaactatattctaattcttaaattgattattaaatatatcatatntataaaacaaatctccatacattgagtcaaattcttaaataataaatttttatctttcaatatattagtttctcaacctcaactaagataacatggtcacctattttttcttatataatatgaaaaataattaatactttatcaaactaatttaacttgtgccattttgagtggattctttttaaaataatacacaanttttttattataccacatttattaaaagat

SEQ ID NO: 74810 - DNA, 457 bp, Glycine max
  unsure (1)..(457): unsure at all n locations
atataatgcctcattccgacacgatctttgtattnnttttttccctctaaaacaatctattatttatatatttaactgagaagtgtaaaagcaactacttagccgtagaaaagataaagtggcgagtggccacagaatttcacggcatctcccatagagattatgctttgccctcgtttaccaacggaacacaacaacatgaaacagacgataaaggtcgtcgtcgttcgctgttatgccataatgtagacacccatgttgttcattgccacgcacattaatcctcattganacagtgataggattactcttacttacgtagtaacgttacaacccaagaagttcctctctcttatttctttttgttgctttccgtaagaattgggaaacaaaccacgagattatggtggtgactaggaatatagcaagagtccaaatcactgaactatatattact

SEQ ID NO: 74811 - DNA, 472 bp, Glycine max
  unsure (1)..(472): unsure at all n locations
agcttgaaggtgtgtagtccaccatcttttcatagtataatactggtaatgtgtctactattattgtcatcantttttttccgtcattgaggtgccacttgagctgccaggttctccacctttgggcgtattctttgaaagatccgtgccccctttntgcacatgttctgtagttacatcctatccgaagccattatactgacacagcctaacgaaggcaaccattaggtccttccaagaatggactcgggaaggttccaagttagtgtaccaggtaacagctaccccagtaagactttcttggaaggaatgtatcagcaattcctcatcttttccgtatgcccncatcctccgacaatacatcattagatggttcttggggcaagtagtccccttgtactcgtaaaattctggctcgtngaacctgggaagggtgatgatgttgggtactangaacaactcttctatgtag

SEQ ID NO: 74812 - DNA, 433 bp, Glycine max
  unsure (1)..(433): unsure at all n locations
ngcatacatggctaaccaatagtcattntgttaccttggtaggaagtgtttgngttcgtaaacattgttggattaagagaacctttgtctaacgcctatagactagtgagtgcctttttccttatccacttgatttctggattaaaccttcatgttgtttttttgcacagcaaaaatcagataatattataaatgattcactactaagtgtactgaagataagctgatatagataccaaggcagagaactgccgaacccaactacataggataaaagcacagtagttggagggttaagtcgatagaataattctgctgagtactcacttggttttttcttttgctcatcaaaaatagataatatatatcgatagagtaccagtggtacgaaaatacaatgtactgggtagcccactgcagaggatctactaca

SEQ ID NO: 74813 - DNA, 434 bp, Glycine max
  unsure (1)..(434): unsure at all n locations
cagctacattaagagatntaagcaagataattcgaagggttaaagttgtatcctctctttccaataaggagctaccacatttgattaactctatgtgcttcatcataaaacatactgcggtgttagtgggttcagtaggttgggctgatgaagctacagtcaatgtgtataaactttactgtcttaactccagtgtgcagggaatgttgtgttttttatggttcaagaaaatttgagactaacgacgtgttccatgatagagatgtctttctggaagactataaagaaatgaataggagcttaaagatatatgtttatcctcacagggaagacgatccttgtgcaaatgtgtctttgcctgtggaatctgatacccgtggcaattataccagtgagagatacttcaaaaaggtacttatgaagagccatttcat

SEQ ID NO: 74814 - DNA, 349 bp, Glycine max
cgatccatctctgtgaataatattatttgccgagatgggcaaactgccagtttcggccgattaaatgggataatgccagtctcggccaagaacaatagtccgttgggctctcaccaaataacctatccgacctacatttaaatttttttgcaacaccacaactagaaactttctgtgctccaaaaaaaacattcatgataccagctgtttgaaaacaaattgccaccgtcggtgaaatatcagtcggctttttctaccatgtggctttggtttcatcatcctcacaattactgatgtcgcagatagtcaacgctcctctctgagcctttttagccgacatcacttctga

SEQ ID NO: 74815 - DNA, 383 bp, Glycine max
  unsure (1)..(383): unsure at all n locations
atgacgccgatcgaacatttcctaaccgacgtcatgcttatntcgttcatggatggaattgaaaactcgttaggcgacatctgtcgtgaagtaccgaccgatatttttcagccgacattgcacaattctttttagaaaagctcgctggtcgataatggtctttttacggcagagtaagttttcttgttttggtgttgcataaaacagttacgatgtactttggctaggtttttcgtgcgagttcaaccgacattttgttccgccaggaaaacattagcccacctctgcaaaaaaaatatttgctaaccgtcttcatgcatatttcattcaacgattgaatagaaaactcaatagccgacaacggtcgtgaaatagtcccgact

SEQ ID NO: 74816 - DNA, 395 bp, Glycine max
  unsure (1)..(395): unsure at all n locations
agcttattcttttanatntgaagttgtaaggaaatgatctatcatntctttgtgattccaggttggcaatgtgttatcaaaagattacaaagctcacaaagggtttaagtttgaaccagtggatatattatctcatgttcgcattattttttgcttgatcaggttctgaaggtaatttcaggagcttccattcccatttgttaaaagcccaagatggttttccctttactgntgtaaaatctttgatgctttgatctacaatggtcaatattcttgccttttgctgatattatttgccttccttgctggtaaacctatatacacaaaatgaatcagatctagcaattaaaaggagcatcaatgccatcatacgaanatgctacccagctcattat

SEQ ID NO: 74817 - DNA, 349 bp, Glycine max
  unsure (1)..(349): unsure at all n locations
tgttcatttagttaaactagcccaactaaaagcttgggtttgacttgtcttaaaaaactaaagcttgaacttgacttatttagtcatttataacttaattattttttattttgtaaaaaaatgtcttataaagtttttaactgtattaatgtagtatttaacaaaacattntaatactatgtgtaataatctaattataaaaatatggttaaacaagtagtatgatattatggaatctatgtaaacgagttgctcaagagctattaatgctgagcttgtataacttgcgtttggttcattaaataattgagtgcaatctanaacttgagttcgagtatataattaaaca

SEQ ID NO: 74818 - DNA, 418 bp, Glycine max
  unsure (1)..(418): unsure at all n locations
agcttgccgctggagctgacccatcaacttccttaactctcttagactggtgatccctaggctcttgaccttgacttgatagaacctcttcttaagtgaacgcttttgacttgatcacatgttttactaaagtgaaacaaaacccagtgcgaatcataactccaacatctatcatgggtggaatggatgaatgcatgaagaaatgcatatgatacagatgtaatttatgaatacggcggcccaggaaattgtctccttcttagaatacacgtcttgtggtaacacagtgcccgacgtatgtatgtaagaaggtgacacggactntccgttggtttgcccaagagaagggattaagacagaacctccgcatgatgtatatgcgaaaggtacaataccgggatgtcatagtatgacaata

SEQ ID NO: 74819 - DNA, 506 bp, Glycine max
  unsure (1)..(506): unsure at all n locations
tgttacacatcgntcgcgtgtatgatatccactcacaaggttngaagtagaggagactcttaatcctataacgcaacgtggcagacaaaagtgggaagttaacttgaatgaccattattgtcaatgcggaaagtattctgcacttcgctatccatgttcacacattattgcaacttgtggttacgtgagcatgaactactaccaatatatagatgttgtttacacaaatgagcacatcttaaaagcttactccgcacaaaggtggcctcttgggaatgaagcagtaattcctccttctgaagacgcatagacacttattcctgacccaactacaattcgtgcgaaaggtcggccaaaatcagcaaggataagaaatgagatggattggctcgaaccatcttatcaccgacacaaatgtagtatatgttgagcagaatggcacaacatgcgtcgatgtccaatgcaatttgaccatgggaaattgtcatttaattgattatgtatgt

SEQ ID NO: 74820 - DNA, 211 bp, Glycine max
  unsure (1)..(211): unsure at all n locations
agcttaagaaaacattattntttntatcatatttctagttagctngcagttaatcttagttgtgtttccatatgaaaaagtttagagacattgaaaaatcttaaacttatgttttcaatgatcaagtcaataatatcaaggagggagcctttatgctttcttcaagaaatgacaactcattntgtaagtacaatggcctttctaaagggta

SEQ ID NO: 74821 - DNA, 402 bp, Glycine max
  unsure (1)..(402): unsure at all n locations
ggaagctcctaatagctcccacactntntgnggtgggccattcttggatggccttgattttctcagggtccacatggaccccatttctaccaactacaaaccctaagaaaactatattatctacacaaaaggtacacttctctatattttcatagagggtgtttttcctaaagactgaaagaacttgcctgagatgacctatgtgataatctaggctcctattgtacactaaaatatcttcataataaacaactacaaatctacctatgaaatcctttaagacatgatgcataagcctcataaaggtgcttggtgcattattgagcctataaggcatccctatccattcatacaaaccaaacttggtcttgaaagcggttttccactcaatcacccttttca

SEQ ID NO: 74822 - DNA, 321 bp, Glycine max
agagagcacagatatgaagagccaatggttgatacatggacggagattgaaaatatcatgaggaagcggcatgtgccggctagttactcaagggacttgaaattcaagctcctaaaactaacccaatgcaacaagggggttgaggagtatttcagtgaaatggatgggctcatgattcaagcacatattgtacaagatgaagaggtaactatggctcgatttcttaatggtttgactaatgatatccgtgatattgctgagctgcaggagtttgttgaaatggatgatttgtttcacaacgcaatccaagtggagcaacaa

SEQ ID NO: 74823 - DNA, 383 bp, Glycine max
  unsure (1)..(383): unsure at all n locations
agcttgntatgagcggaagagaagataattgtttgttaacgagatgaagatgaatgcaaacactacgagaaatgaattgaatgtcttagattcgaacacttaccggatgaagaccgaagaacggatgaataacggtgaataacgacgaataatattcacggatttgctcatggaaacgtctcacaatcgttacagaagcacctctggttggatattcttcatggaaacacgttttttcacccataacagctaatatgcatagcatatgggtcacggatccttgaaactcagcctccccctatttataggaggattgaggaggtgcttgccgtctagaggcttcttgaggaagattgttgagcgcaccccaagtactaagatca

SEQ ID NO: 74824 - DNA, 379 bp, Glycine max
tcctgactcactctataccttgacccagggttagtttaccaatccttaccctcggaagccacatagaatagatgggaaatgtccaatctaagcaaaagagaaggagaacttccactgtaagcgcacaagatatgatcgataattcccctattacagagtgggagatagctgagagaaaagaacggtaaattcccaatcacagaatgtgagaaagtcagacatgaataagactaaggatataaagctcctgatcaccgatctaatgataccataagaaatgtgctgagaggtcttttgaccatacgatatctgaacagtacagaattgtcaccctatgaacaaaaaggaatgaaaggaaaccacgacctataatggtctt

SEQ ID NO: 74825 - DNA, 510 bp, Glycine max
  unsure (1)..(510): unsure at all n locations
atcctctgagtcacctgcggcatgaagcttatngattttattaactgaaccctgaactntatatgattatctcctaataccttgtttagattctaggagagcatacggttcaagacaaatttactctaaatttggggggaaaaagttgaaaagaatgaaaagaaaaaggttaagcatcagcacacacaacaaataagttgtatgtcaaataagaagaagaaagaaaagaatanattgtgctgctacaataaggtcaaaagcaacttgagaggaaaagatagtgagaaagctactagaataatacaagaccattgngataagccaaggatttgtgctctcttagaatctaaaccttngaatcctagaanaaaccaatgaatttttgtagctaagcctcactacaagcctgagaaagtccttctgattcctgttatacatntctgacttgatggcatgagatgaaatgcacagatataacctcctgtagttggtatcaatgaatagcttaaa

SEQ ID NO: 74826 - DNA, 374 bp, Glycine max
  unsure (1)..(374): unsure at all n locations
ntgagccanaatcctgactcaccatanaccttgacccagggtgagaatgtcaattcttaccctcggaagcaanaaaaggggaagaaggaaaatttccaatcaaagagaaagcaaaaagaaaagaaaggaaattcccaatcaaagagtgggagaaagcaaaaagaaaagaaaggaaattcccaatcaaaaagtgggagaaagcaaaaagaaaagaaagaaaattcccaaccaaagaatgggagaaagtaaaaaaaggaaggaaagaaagcccctgatcggngatcgaaggaaaaacagaagaaatgtgcagagaggtctttggaccggacaatatctgaacaatacagaattgtcaccaaatgaacaaaaaaaga

SEQ ID NO: 74827 - DNA, 476 bp, Glycine max
  unsure (1)..(476): unsure at all n locations
agcntctagctctatggtatcatattgaaagatgaaataactaagattntattatttatctttaattataaatgtacaataaatatataaagtacataagaataataaactctaaattatntattaaattatctataagttaaatttaaatatttatataactctaatttaaatttaccaataacttgaatttaaattataatatacaagaagtattctgcaaacaatacctctgacaatccgcatcaccaacaaaattctccaatcatgtganatccaacaactttgtacacatttgctccaagaaaccatctttttagacatagcggaaccatttgggagggttttcaaaaacaagagctntgtgctgacagatngaacataagggaggagggactaattcgcgggcttctcanacataagcctcacttgcanatgcacaacacagaatatcacattatcacactggcattcat

SEQ ID NO: 74828 - DNA, 380 bp, Glycine max
tgtacgcacatcgttcgcgtgtatgatatccactccacaaggtgtgaagtataggagagcttcaaccctatcacgcaacgtggcggacaaaagtgggcagtaaacttgaatggtcgtcattgtcaatgcggaaggtattctgtgcttcactatccatgttcacacattattgcagcttgtggctacgtgagcatgaactactaccaatatatagatgttgctgataccaacgagcacatcttaataagctactccgcacaatggtggcctcttgggaatgaagcggctattcctccttctgatgacgcatggacacttatccctgacccaactacaattcgtgcgaaaggttggcctaaatcaacaaggataagaaatga

SEQ ID NO: 74829 - DNA, 425 bp, Glycine max
  unsure (1)..(425): unsure at all n locations
agcttganaagactntntgaaacaatactcgggtagatagtctatatagaggcttagagaatactaaggcataggtgtaacactatggattttttaatttatgttaagtgcttgataaatactacaagaagaaattaaatttaggttcatgatatctacaaatgaatttcaataaatatattttgtgttatgtgccataacactatcgataaactttgtgagtgtttggcctanagtgtgggttgtgagactgttggattctatatgtgagtttcctctagttgtagaanaaaaagtgtccttataagaaataaaggggcaaatagccaaactcataacattntccaagcttttaaacattggaagctctccttaattcatttcgcaattctcctccttctcttcttcttcttcttcttcttctc

SEQ ID NO: 74830 - DNA, 498 bp, Glycine max
  unsure (1)..(498): unsure at all n locations
tgcatgatttacatctccctatttctcaagcaaattcttcttgatatcatcaaaatcttcatgatttacattctcccgctttttgatgatgacaaccacctgtaggttaggagcaacaacaaagaaaatatctatntgcatatagtttactcccccttggttttacaatgattgcttatatgagacaattgaagatttcatatttttcatatataaaaagttgtctcatataacaatagataatttttcttactatattatctcttatctttctctccccctttgtcaacatcaaaaacaaatcatgaatagaaaggagaaagatgttaccacttgttgcaatgtatgagaatcaagtgataccaaaaggcattaaaacaatcatttcatactaatctagccatacaagttccatacacatcattcaacacaatcatcatcaatatttagaatcaattaattaattaacatcaactactatacacatatttctatatt

SEQ ID NO: 74831 - DNA, 487 bp, Glycine max
  unsure (1)..(487): unsure at all n locations
agcttctagaggaagcctcttaatgaagcttctagagataactacatgaagttgcctcggtaaaaacgctgtccagccttcgttaaccgttggatcttctctaaatttggtttgaaacttcacaagacaattgttcatgatctgaccgttgggatctttcagaagacgtctggagtatgctagaagcttccgttcccaagagcatctcttatttaagcattctagcctttgctttcgtgtagcttaggaaaaacgtcatttgttattctttctttcttccacagccatttctaaagttccaagaactttctccatcacccacagccaccattagccaccacaaaccatcattgttcttcattgaanacccacaccgagaggaaccctttcaccgaagcggaatcttncaacttggcttgcggtttctgtagagaacaaaaaccctaatctgacctttcattntctttcgagagactngcatggaatc

SEQ ID NO: 74832 - DNA, 496 bp, Glycine max
  unsure (1)..(496): unsure at all n locations
ntataagcgcgggcctgagagacgaatgtcaagtggtcacgatatactaagatgatgttccgagtacattggatttggtacgaccatgccctcctgatttccagctaggaaattggcgagtggaggaacgccccggcatttacgcaacgagcataatatccgatgacgagtcccccgaaggtactaatacctgngacccgcttatcaacttcgagcaagaaacgaatcatatggaagatgaagggaacgaggatgtgggacttcccccataattagaaaggatggtcgcccatgaggaccaagaaatggggcctcatcaagaagaaacagaactagtagactngtgaattggcagtggaagaagggaagtaaagataggcacaggtattaccgcacctatccgtgaagaataataatcctgcttaaagactaccaagacatccttgcttggtcataccaagatatgcncggnttgagttctgacattgtacagcac

SEQ ID NO: 74833 - DNA, 422 bp, Glycine max
  unsure (1)..(422): unsure at all n locations
agnctttctttcacaatcaatctgtctactaactaacaattctaattgcaagttctcattcttgttctttctttgcctaacatacacacttgctcaaactcatgaaaagaaacacaaactcaatcacagtcatgcattcaattcaaaaccaaatcatacaccaattttcacacaaagataaaagtggtttattgccatatcatcaaaatcaagtcaaactgttccatatacttcagaataagcataccaactacccataaataaaactagcagtgtatacaaacataaaagaaatactgtactgaaaccgtaatcataataataataatccanaaagcaaaaagcatcatcaggaatcaacaatgtcaagagtgtataaattagggaataagtgagagcaacaacttcttcagatgacgaat

SEQ ID NO: 74834 - DNA, 412 bp, Glycine max
  unsure (1)..(412): unsure at all n locations
cggagaggatgcctcaatggaggataagaaagagggagagaaagagagaggggggagcacgaaattgaaggaagaaaaagggagagaagttgaactttgagttgtgtctcacaagactctcattcatcaaagntacaacaagtgttacacatgcttctatttatagactaggtagcttccttgagaagctttcttaagaaaacttccttgagaagcttctttgagaaaaactccttgagaagctagagcttagctacacacaccaatctaaaaactaagctcacctccttgagaagcttccttgggaagctagagcttagctacacacacncatctaanaactaagctcacctccttgacaaaatacatgataatacaaaaaaaacgtccgtactacaaagactgactcaaa

SEQ ID NO: 74835 - DNA, 429 bp, Glycine max
ttttgagaaaatggtggttccatgaagtgtatcgccagttcaagtactgcactatgaatcacaacaaagagagaaaaggttagtttgtctaaaagaaatcatggtgcggtaagccaacaactttgttttgtcccggtgagttgtgtgaaacttatttgtgagagaacgtctattttctatttcccgacttttatcattcttagactgttagatgaattacatgacgtggaaatgatccaggccaagtttcttcttattttcagccacttaaccaaaaagccaacctttgatgataatttatcccttgcacactatttgtgcccaatatgataatcattgttttttttgtaaacccttaacctactctattatctcctaccttgtttaggttaaaagacataagaatttagtcatatatcccctatttgg

SEQ ID NO: 74836 - DNA, 478 bp, Glycine max
  unsure (1)..(478): unsure at all n locations
agcattctcccatccttctttgattattgatggaaaaaagggttctaagagccatgtcgttttaaaacgaattttcctatagaatggtttcttacaanttgcatcaagcaaaagatggatgggtgagtgatttaacttgaaggctattaaattccttagcttgacatttggaagcatattaagccaatcaaagcttgtcattgctctgtcaagcctttcttctatggcattatgtttccctttgctttttgaccatgtgaaaccgtagccttcatggtagatcatggaggccatcatcagttatagcatctctgaaacctttcatgagccagtttgggtggtcttagaaagccaatttttgatctatagaaatgagatcattgatatncctanagtgcacctgcgcagggggaggaagtatagagaattataatgangtcccaagaatcccttcttttgtccctctcangataaccat

SEQ ID NO: 74837 - DNA, 472 bp, Glycine max
  unsure (1)..(472): unsure at all n locations
agctctactcgatcgaatcgttcaataacaaatgaattggttaataatatttattgcttaaacttgaactttactcagctaacattatatgatatatctgagagcacacaaagaccaaacctgaagatgccattaatgcagcaggtgtagaacaacggtggttgcagagcttctttgtggtggctgacagcagcgacgctgtcaacgcagggttgcgcaacagcatcaacgtttattctccgacttcaaaaaagcgttatctatgtcgggaaaaacaaggtggttccattccgtgaccgattattataggtgtttgttttttttgcaattgaatcatcacaactttggaaaattgcatgaacccaacaatatcacacatggcatggcantttgagaggagaacgtgtcgcatatatacgaatattatagatatttgtatgtatttatgaagaatcattcatagttatttctt

SEQ ID NO: 74838 - DNA, 480 bp, Glycine max
  unsure (1)..(480): unsure at all n locations
agcttataacacatttaaagaggtttctcacgttacttaactcaaattatatattaatgagttatcattttntactttatttttatataaaaaaaaacatcgtattgctctcctgtaattttaaaaataaggtattccaaaaatataaacaatataattatctaaatatttaaatacgtcatttaacctatgttaatattaaagggggaaaataacttttttatagtttgaagcatcttcctaatttattgagtgaacaaaaatgataatagaaacaattaaaaatctctttttttttaataatccaaataaagggttaaagcgcaagtaaatggctccattcagaaactatntntgtagaaagggcaacaaatatgtcaaccgtttaggtattttgtacatgcgtacatatagtaattgattagccatgatttatnttgatattcaattaatataatacattgaaaggtgtaattggat

SEQ ID NO: 74839 - DNA, 468 bp, Glycine max
  unsure (1)..(468): unsure at all n locations
cgtatataacctacatgaccaacatagtagcacacactccttaataacttaccataagtaaagtggcatcatttccagtcatgatatagtagagaaatgaattntttaccatctccttgtaacttccagatgcatgtttcttcttcaagacatcaataaaatccatggcataaaggtatggcatgtttggcatccctacaatcagataggaaatgaataagctataattaatgtctttatctgatataaacatagntctggattgatgatttttacacccttagataattttattttatgcaactatattcatattaaaatttaccttcttgactaaagtatgaagggtcataattagaacccaagaaagaanaanagtctttaggatctgattnttatgtnttttacttaaatcattgaactaatagaaccggaataaaacaaaattcattcttgactcaccaagta

SEQ ID NO: 74840 - DNA, 462 bp, Glycine max
  unsure (1)..(462): unsure at all n locations
agcttctctatggatcaagctggtgaagaaataaagttgcaactaagtgagttagatgagatccgcctagaagcctatgagaatgccaagttctacaaagaaaagaccaagaagttccatgatagcatgataattaagaaggacttcatggttgggcaaaaagtgttattgtataattctaagcttggactcatgagtggtaagttgaggtctaagtggattgcgccttttgttgttactaatgtttttccttatggtacagntgagatcaaaagcgactccacaaacaagagcttcaaggtcaatggacaccgacttaagccattcctcacanacccttctttagtgaacgtagtggtggaagagacnttcttactccaccctactcttcctcttccatgactgtggggaggtttctatccctatctccttctttactcttattacactttctccactcta

SEQ ID NO: 74841 - DNA, 493 bp, Glycine max
  unsure (1)..(493): unsure at all n locations
gcttgagactccacccatatctggccttcacattaaccacacttaacaccttcgacaacaatgttagtgtttagctctactgagctntaaaagaatggctaagattntgttaaaacataagcacttagacaatgaaggaaagctggagttgctgcacatgatgtccaacgttatgtcaaggaataagatcgggctgcacaatgtacaaggcaagataaaatggcaaatgaagaattgagttgcangatccacgatgtcggatacaatgtcctgacatcctgcccgagaatactggagttgctgtacaatgcaagataaaagtcaagtgcagaagtgaagctgcaggatccacgatgtcggacacgatgtcctgacatccggcccgaanatactggacatataaatctgttatatctttaacagattattgtgcagttagcaagagattagaagatctatctttanngaacgaatanaagatcattaaagttcg

SEQ ID NO: 74842 - DNA, 353 bp, Glycine max
  unsure (1)..(353): unsure at all n locations
gctttatcttcaatcttcgcaatttctccttccataactntctgctgantttggacttttggagctctaagtcagaataacttgtttttgctataaaaaactatcaaaaattcattaaaaataactaagacataaaattctacctaagacaaagtaaaaattgaatttaaagttattttgattcaaaataaggcctacaaataactaatatgccacatatatgtcacaaaacacgtatgaaaatccagtaaatttgacgtttatcanactgtcagaggatgggatcttgataggttcctttggggtcaaggacttcggttcaactcttggtttgctcttctttagaaaggaag

SEQ ID NO: 74843 - DNA, 512 bp, Glycine max
  unsure (1)..(512): unsure at all n locations
cgatcctgtgagtacacctgcngcatgcaagccttatatcaattttgcaaaactaccaacaacctttttcagacgaaaattgacaacatcctctgccgttgtnttctttcttgtcactatcacctccattaatgtatgaaaatactcaattcctcctcatttcattccctacttgtcactaccactatattcttaaaatgctcaaacctttccttcaataccacaaaacacttncattgtgttccataagcctcccaatagttctagtctcaaacctttccttcaatctcaatgccacaaggagataaatgatagttatttataaaatgtcaaaaagagacaacaaaaagatgtgaagagagtatttgatgtgctcaaaccttgcattgcaattacatacttacaatatacatacaagagaagttcatcaacaatntcaaacaaaccaagtgaaacataattaagaaagattcgatcattaaaatataaaaaatacaaattttaactcaatg

SEQ ID NO: 74844 - DNA, 421 bp, Glycine max
  unsure (1)..(421): unsure at all n locations
tgagtaccatacgtataaatagctatgttaagtcaagtgtcttctcttcgcctcattttcgnttttctcttttctactctgaaaaccctctgtttttcccgtagaccaccaaacctgtctcacaaaaatgacgatctcggatttgttcaccgctggatcgttgtgaaattaaagtaccaggttcgaaacccaattacgagaaatctcaccgttgggaatttcgatatcatttntgatctgagagaaataccattcgcatcgtagtcttttcctttcccgcagaaatccaaaatggtctcagtaaaactacgatccctatnttgttaaccgttggattttcatganatcttgatatgtggttcgcgattcatttccacacacatttaccgttgggatttgtgatataatattcacagagaaa

SEQ ID NO: 74845 - DNA, 424 bp, Glycine max
  unsure (1)..(424): unsure at all n locations
agcntactatgcagagaatatccaaggaaaatacctttatctgacttagcatcaaattttcctaagttatcttttccattattcaatacaaaacatttacaaccaaagatatgaagatgagagatggttggttntctgccattgaccaattcatatggagttttctttaaaatgggtcttattaaagccctatttaaactgtagcatgcagtgttaacggcttcagcccacaagtattttggaagaggagtatcatttaataaagttctagcaatctcttccaaagatctatttttcctttcaacaacaccattttgttgaggggctcttggtgcagaaaagttatgcttaatcccatgcttatcacaaaataattcaaattcttattttgcaactcacccgcatgatcactcctaatagatat

SEQ ID NO: 74846 - DNA, 363 bp, Glycine max
tcctcgtggcttctttgagaagctttctcaagaagcttctttgagaagctacatccttatctatccacccctctattaactaaattaacttgcttataaataattactgctgaaaattacgcgacacataatcaaacatctaacataattactaataatatatagatatatatatcatggcgttacatcctcgccatcagagggctacacgtccttgccttcacatgactacacgtgcttaccttcagagggctgtcatcctctccatctgagggctgcacgccctcaccattggaggactacacgttctcaccatcatatggctacacgccttcacctttagaggactacacgtgctcacca

SEQ ID NO: 74847 - DNA, 474 bp, Glycine max
  unsure (1)..(474): unsure at all n locations
ctatgaatcctatcattctatgggtcacttaattactagaagatgatcactaacacccttaactaataatgagagtgatcaattccaatatagaagtgaaagctatagcaaaatacaattaaatgaataacatcaaataaacattattaaaaagagaaagtagaatatatgagtacaactatatcacaatccgagttctaagggatttagctaaccatagtcatagaataactaaacaacatgcaatattgcattgaaaataaaagagatagaaaacatgatcatagaataactaaacaacttgccatcttttctcatgatacttaccattagtttcaagatatatggcctcactaaaaaagaatgagaaatattatntgtacaacaattcagacaataatttgtaaaatatcttgtgttaattttcttttgaataccatntatcgcatgtcataatgatggagagagatagac

SEQ ID NO: 74848 - DNA, 214 bp, Glycine max
cctttgtaatctggtatagctgttcctgtgtgacaatgtatgcggtcacaatagcatcatgtatattaacctgaagcgtaaagtgttaagcctgtggtgcctcatgagggaactaacttacattgattgcgttgtgctcactggccgctattcatgagggaaacatgtcaagccaggtgcattgattaattggacgactcgaacgacttgtggc

SEQ ID NO: 74849 - DNA, 402 bp, Glycine max
agcttttgtaatgctgcattctactaatatatggagtttgccactgcttcgtctgaggatgacaattgctatgccataacaatgctacaggcggtaaaggacaacggtcttttaaataaacctgttgtacatgcaaaaaaaaaaaaactcaatcgtccacaactgattgcataaatataaaaaaaacactttatatctagaatgtacctgcacaaaatgattgtcatacacgtgacccgatacaaatatacgatgcactaaagaatctggtggtgggtgacttctaagaggaaataatgtcatgctttgttgttgagaccaggatacaaagattacattatactttgatgcaatgacatatcccatgtcggttatatccatccacttatccatagtcacttg

SEQ ID NO: 74850 - DNA, 492 bp, Glycine max
  unsure (1)..(492): unsure at all n locations
cgaacgaaaccagtattctttgtcctaccaagtcactggtggctctatacagatccaaatatttcttgtttatggactaaaaactgaaatttctaaaagtttagagagtttgactgaccaaacaaaagttttgggactaaaaagcttaatggaataaagttaagggaccttgaccagttaaaattttgtttagagactaaaaatgaaatttcaaaaaagtttagagggctcttgctctctcatctaaggtccattcctctttaggtttgcctattaccagtcaactctcagttgtttttgttgttntgtaaggaccaatctctatgatgtcccacaaagaanaaaacatcttgtgattccaagaacaacatcattctacctttatagtagtaaaattcttgtacatcaaagcctcaaggtcagttggttgaagcaccttcaggtatgactatagttggaacttngtcannaatcgtctctcacgctatcaag

SEQ ID NO: 74851 - DNA, 408 bp, Glycine max
  unsure (1)..(408): unsure at all n locations
agcttgtgaaggagtgtgaaacaatgcttaaccaccttttcccggngaacgatccttcgacttgtggcgaggcacctcctcaagctgaggagggatgtgatgcttcaacttcaaccagcacaaagagtagtgatgatctgctgatgcctaaggagttagcagcagccaaccatcacattgagagcctttatatgaagagtaccatttcagctttgcatgttttgcaggaaattcgaaagggaagctcaacagttagcatgttttcattgccaccattgcagataagtggcttggaaaaacatggaacaaaatccctattctggaacaaacagccaagtaatgtgcttgattacattgnggattgaaaactaactagttntagtggctcgggagtttcacctctatttt

SEQ ID NO: 74852 - DNA, 349 bp, Glycine max
  unsure (1)..(349): unsure at all n locations
tctaatgtctatttctagaccaaaatccgattattaacatctaggtcattaatgagttgactattatttgcccaaagaattttccctgagttatccttattctttctagattntaacttaaaaacttaagaggtcgtgcttaggtatttatcataccctaatttcgtctggggaccattgtttgtcggcatgcgaccttcgcttgaccccttcaaaatgtttaatatccattgccatggaatntgtaaagttctgggacatttcagaaagaagacaacaaagaataaacaaaatggggtgaacttatcaaacacggcgagtgcgcttaggaaacttcatctagaacact

SEQ ID NO: 74853 - DNA, 413 bp, Glycine max
cctatagaaactcaagctgtcacaagagtcttcacaaataaccatcatgaagcagattactaacataactacccatcatatcttccaaaatcccatacccacgagatttaagagagaaagaagtccacccaaacctgaaatttcgaagtcccactcgtagacacgcacttgacgactccgaaaatgctctcctttcacgatttggggcagaaatgatggccaaaggctgaagctttgtttggagcttcaatggagaatgaacgagaacagaatggcaacgtgagggagagagagagctgtctgaaaagtgtgggggctgagtgaagagagagaatagctttatggttttaaataaaaaggcgtttctctttctttctattatgttatttaatcaatggcacatgtatccattt

SEQ ID NO: 74854 - DNA, 455 bp, Glycine max
  unsure (1)..(455): unsure at all n locations
aagttgtctctctntttttcctttctatctctcttttctccttttaatataccttgttttcttcctccttgtgttttgaccggtgccttttttttctcaacgtctttctctgatcacacacacttctctctctctctctcactgattccttctccacacacacctcatgatcaaaactctgtcgctntccttcaacctcattggaaggtgtgcttctcccttctaaccttcacttttttttcttcttaacccaatgttaacatgtgtgtgtcattnttttttntctttgtactgggtattctccacttggaaccaacatatacactttctttgtgtgttagaagcatgaaattcaacaaaggtgtctttgaaaattttgcttcctgnaacgggtctctgtcttatgttatcactctttatgctttattgtaaagaattacacttctgttttcttt

SEQ ID NO: 74855 - DNA, 399 bp, Glycine max
  unsure (1)..(399): unsure at all n locations
gatgagaggtgaccgtgaagacaactaacggacttaaggtggatgacaggcttaggcctcgggaaggagatcgttcagtgcttcaccaatatcagttcttttttattctcatactgatacacatacaaggtttccagtttttcatactgatacattattaatattaggaaacatcacttttctccctcagatcttgtctacagcataacagatgttgaattatgtgtctctcagaactgtataacatccgtgttttgtcgtttttcatagaccatcatcatcattgtttagagctgagatttattactcacatgttgcattagggcaggtggatcaaactaccatctatngtagtactaatcatgcgcctggggtgctcacatcatgtctgcaaacact

SEQ ID NO: 74856 - DNA, 414 bp, Glycine max
  unsure (1)..(414): unsure at all n locations
agcttcatgaganaccattggttggagggtaaggttgtatggtgaagttgatgtgtgagagtcataatcatgaattggtaaagtcattagttggacatccatacgctatgcgattgattaaggatgaaaagacaattattgttgatatgacaaagtcaatggtgaaaccaagaaacattttgctaacgttgaaggagcacaatgccaatagttgtacaacaatcaaacaagtatacaatgcaagaagtgcataccgttcttccattggaggaagtgatgttgaaatgcaacatctaatgaagcttcttgaacgagatcaatatatntcattgacatagattaaaggatcaatatattcttgaatgtgatatcntttggtgtcaccctgatacagtgaaagtatgcaatgcttat

SEQ ID NO: 74857 - DNA, 237 bp, Glycine max
gtggagaactcagtgcgcgatcaagtgcatgatgcgcgcttgtctgcgtggctagcttgcgcgattgtcatcgtcccacacggggagatagtacaagcgggcttgatgatgatgatccaagcgatcttgatgatgccaaaggcctttgtgatggagggccgacttgctgatcaagcttgatgaataccatccaccattcacgaatcaatgatgatatagccagacgctactactctt

SEQ ID NO: 74858 - DNA, 493 bp, Glycine max
  unsure (1)..(493): unsure at all n locations
ttgaanagaaacaccttagcgtcatggagcatagctaggagctaggtcaagaaatgagggatttcgacgagtgagggatttcatgtttgaaacaatgacaaagaccaccatgacgtgattagctcagcagtccagcacgacagcgatgacgacaaccaccacgacgcgagtagctcatcgagagtcattttgggagtagcttgaacaaggtagagtgagtgagtagagagagtcgcgagagtcattttcggcggttggtgtatgacgccgtttcgagtttacataaactcatggactcggagcatactcgcgagcctacccaaacttgtccgagtctacgcaaaatcggatgagtctactccggtttcgattctatttccgatgtaactcgtcaaccctcagtataatctgaaaatcatggtaatcgagagttaacaaccatgggtgtcaacccctgtattatatctgattctcaccgatgaggatatatata

SEQ ID NO: 74859 - DNA, 500 bp, Glycine max
  unsure (1)..(500): unsure at all n locations
tatcctgctcttcagtgtaaacttccgggtttgtaccttctggtataacaatatctacttcatctntntctttacttgctgactcacgaagaggtctctcagcatagttaattagtaccagactcattattctgcaaaccaatgaaatatttcagatatatctaaaagatttactgagacatcatgtcaacacaaatgatgaaatgtgataatgactaatgggcatataaataatgctcatttatgtttagacaagacttatccacaattcctcaagcaattctatgttcttcaatcaaaactagagtttcacctttaaataacaataacaaaagtttgcattgaagttcagcatatattaccaaagtaaaactccgattctaattganaaaacaacaccaaatctactttaaaaagtgtatactagcttaaatacaaaatccctaatattaaatntcanaacactgatatacaatatcttagcctagccatgttcacgt

SEQ ID NO: 74860 - DNA, 494 bp, Glycine max
  unsure (1)..(494): unsure at all n locations
agctngcaaaccanatgctcaccactactagaggagaagccttcaggttgttntataaaaacctcctcctctaaatcaccattaagaaaggaagttttcacatccatttgtttcaactcaaggtcaaaatgagcaactactgccaagataatatgaagagaatatttcttagatataggagaaaaagtctttgtgtagttgattccttctttttgagtaaatcccttagcaatgagtcttgtcttgtatctctcaatgttgcctaatgaatcccttntggtcttaaagacccatttataaccaatggcctttgtcctattangaaaatctacaaggttccaaactatgttactctgcctggaattcatctcatccttcatagcatcataccataaaatttactctttacaactcatggcttgatcaannagttcaggatcattntcagcacccatattatagcgagattcttgcaaatatacaatataatcact

SEQ ID NO: 74861 - DNA, 504 bp, Glycine max
  unsure (1)..(504): unsure at all n locations
cgacactatgatactaagctaatacanaagtgngtcactctcaaaagagactgttcgattaagctgagaatctagaaggggggttgaatagattctntgaaaatctttacctattcgttcttaacaccgattaanaacatccccttaaatcaatcaaagtttcttcaaaaattctttagaaataagaaactattatttgggcccttaagatcaattccacaaccaatatgattacaaaactcagagntatagagaatatgagaaatacataagactntatactggttcagtccaatctggatctacatctagttgttctaaatccttttagaacttccactatacagaaaacataagtacaaacattnttcacacacaattctntaatacaaaacaaatctttctcttgaatcctacgaganaagatttagcattgaaaccctatcaattctctaacatcagtggcaccctaaccaaatatcacaatctanaagaaaaaaagat

SEQ ID NO: 74862 - DNA, 493 bp, Glycine max
  unsure (1)..(493): unsure at all n locations
gcaagcttgacctctcaaataagagaagaaagaaaactattggtgctctcaccttaagaaattaaagaaagatgaagaatttagctactacttctacaagaagttggacacatgaagaaagagtgtccaaggtagttgcatggtggtaaagaaaggtaaattccttgctcttgtttattctaaagttaatttagcagtaacatatccttcccatttatttgtatatctagtatttttttaattgaattaatcgatgcactatattgctaaagtaatcgctagtgtgaaaattgatttgattaaaattacatcgatatcaatataaaattatttatgcgaattgtgttcggcctaaatgaatacataatttggccaaataatattgtacttgtgatgataaatgtgtgacaattataaaggtgttttcatgtgaacaatagtcaatccaaagaaaggctattatntgatagaatttattatcaatatttgatca

SEQ ID NO: 74863 - DNA, 448 bp, Glycine max
  unsure (1)..(448): unsure at all n locations
cacctatactgaatctcctatgctgtccctacatatataaaacagtcccaccatcctaatgttacaaaatcatattcatatatcattggggcgtttcaccgagcacttggtgggcgcacatttagacataaattgcaagaggatgggggcaatgtggcatgccccattgcttcacaatacaacataggcctaatgccttctcacacaaatcctgaactcaacanatcaagcataaaagcaacccaaaactgccccacaaatatgagcacgttctcacaaattagagcaccaaaagatgaagaaaatacaccaatgggaagctaaaaactcaaggattgaatacttacttgttggagtgagtagaaacaccaaaaatgaaagcaaaatgcaaccaaaagtgacttgtggggcaaaaaacgcaagccttcgtgagttctctcctttgaat

SEQ ID NO: 74864 - DNA, 491 bp, Glycine max
  unsure (1)..(491): unsure at all n locations
gcttccgactactcaattgtcttctagcgcttatttttcattaacacgttctcaacaatgaagaaaaatacgggtgaaattaattaatatctttatctttctgtgatagcctgtctcatggctctgacattgtgaaggtttcatggccttagccatgtcctaattcagccatccaattggacatttgaattataaattaaaccttcatggccttatcttatatttccatatgagctgttcagctaagtcaaactccacaaaatcatgcactacaatagccttataaacaacttcctatggacaattacaagttctcctcatttcagtctagaaccgaatggcangttgcaaccaatggcatcaacccagaagaagcataccttgaataatgtactcaaacttcaacatgttatcattgtcaagatctttcacaatgccagaagcatcatagtatgttgaacacgtctntagtaccatctcagctgctcttt

SEQ ID NO: 74865 - DNA, 357 bp, Glycine max
  unsure (1)..(357): unsure at all n locations
ctcagcttatagtagcgatgtgtgcttaaataagtcagtgatgttccgcttgagttttatttacgtataaatgtaacaatttctggtcctaacatgttgaanatttgaaacgctcgtcagttttggaagccacattgaatggctgttaatgtgtggccatgacccactaatgaattatgagtggtaatggctactaaatgcattcttgatggtagaatgcctatatatatagcacatgtatttggtacctgagcttgaacgaaccacaaaaagacaactcttcatggcaattgctggaggtatgatttatttcttattttttatttttcacattnntgtaatgacttgtgtttctaa

SEQ ID NO: 74866 - DNA, 394 bp, Glycine max
  unsure (1)..(394): unsure at all n locations
actcagcttgtccattanataaggttttgaagttcatcatttcaatttctcattaagtaaaatggatcattttcaaggtccaacgccttataatgatcacctcttaagtaaaataaagagtcgcttgataagcaagaactacgtaggtctgatttcctcatcgcaattgaggatacgtatgagcaaaagccccgcttttgtcgaccaccccaagagatcgttaatggtccaatgccttaacagttctctcctttcataaacaagagatcgttgatggcccaacgccttaacgtttctcccctttctaaatcaaaagaccgattaatggttcaacaccttagatgaccttttgttcaataaaaacatatcttgcaaaagaagataaaaacaactt

SEQ ID NO: 74867 - DNA, 387 bp, Glycine max
  unsure (1)..(387): unsure at all n locations
ttctcattaagtaaaatggatcattctcaaggtccaacgccttaacatgatcacctcttaagtgaaaaacagagtcgcttgataagcaagaactacgtaggtctgatttcctcatcacaattgacgatacgtaggagcaaaagccccgcttctgtcgaccaccccaagagatcgncaatggtccaatgccctaacgattctctcctttcataaacaagagatcgttaatggcccaacgcctctacgtttctcccctttctatatcacaagacctgttcatggttcaacacgcttaatgaccttttgttcaataaaaacatatcttgcacaataagataagaacaacttaaccaaacactttgttccgagagaactacgcctgtctga

SEQ ID NO: 74868 - DNA, 479 bp, Glycine max
  unsure (1)..(479): unsure at all n locations
ngaagacaagactatacgaggtatcttccttgggtatagcaatatctctaagggctaccgtgtctacaacttgcaaactaagaaactcgtcatcagtcgagatgttgaagttgatgaatatgcttcatggaattgggatgaagaaaaagtggagaagaacgttcttatactcgttcaactacctcaagaagaagatgaggaagaaaacccaggtgaaccaccttcacctccatcacaacaacaagaagagatggagtatccatacagaaaaatttgcaccagtagctcgtcttaataagacaaagctcaactctgatggcaccatacagaaacacaaggcgaggctagtagctaagggttacttacagcaacccggaattgactacaatgagacatttgcaccagtagctcgtcttgataccataagagctctaatagctcttgtgtcacananaggatggagtatccatcaactagat

SEQ ID NO: 74869 - DNA, 414 bp, Glycine max
  unsure (1)..(414): unsure at all n locations
agctntagccacttcatcaccttcaactctgtgggatttcttcctagacacaccaatgtcatcatgccttttcctcatgggaatgctctttccagttgccatgaagtaaaacgttatctaatccaacaactatgtcttcaataaaagacaatgtagcatttccaccgtcagtatttgaggcctaatattgcctaactttctaaggttggaaacggtctcaggtggttatttaactatcaattgataggtcaagccatgagaacgaaggattggtgtgttttttcactcttttgtatcatattgggctaaaatactctctgcattggttaccttaaaaaatattttttctcaatcatgaggtggctcataatanatatgtaatgagagagggggtgagagaatgagaaaagtgca

SEQ ID NO: 74870 - DNA, 371 bp, Glycine max
tggctggactacatagagaaatggtttttctcggaattcagaacactcatggttctaggatagcactcactaattccctacttgctgaagaagcacccactctttctttgctctcccaccttcttatttacatcacaaagattgacggcacatggatgaggatctttgatatgaatactctttccggttatgatttctattcctataagcatcacaaggcacattgctgttctgtgacaactatgtgttacacacataccactcagaaatgggaaaaatatggctcatatttacgaggataaaatcaatatagaaaattatatgtgaatgaaattaatattattcgtagttacatggttctcaaacatatt

SEQ ID NO: 74871 - DNA, 469 bp, Glycine max
  unsure (1)..(469): unsure at all n locations
agcttgtcatgttttatgtgagctaaatatacccattctgtcttagagtntataatgatgctttgtgatgcttgtgtgctgaaatcgttggtagaaaactgatagagatgaagggtagagttaacctanggttgaaaagtgagaatgtagtgatatgagtggaacagtgtgatgctttaagggttngaaaagctaaatctggatttagtggtaattggaggttaaagtgagttaatcctagtttgaaatgtcatttangactgtgggaaagcttgngctgtgcaaaggagganaatgagtgaccaaagtgaaggcaagagccatttatagggtaaattgtgtgtggaggagtcaaattttgattcggtagaagtttcatcgtaaaaccagtttgagcgagtttagattaatgttatagactttgttgagatgagagtttgctccanaattactctattctcattttcac

SEQ ID NO: 74872 - DNA, 270 bp, Glycine max
atacataaagattagtcgttttcaccgactaacactgccaggtctcttcaccttggggtgtatttttaaaagattcgcgcccctttgcgatatgttgtgatgcgcctcctatgtggatgatatcaaatgtgctcgtgatactgcctgaagagggccactcatgggttcttccaagagtggactcgggagggttcctagttagtgcaccaggtaacagctaccccataaagactttctgggaagatatgtatcagtagttcctcatctttt

SEQ ID NO: 74873 - DNA, 223 bp, Glycine max
ctcgctatcttatcactctagcatttgggagccactttatgatgggagccactcaatgatgctggtggattatttattacttatagatagctgattcattgtctatcaagacctatatataataaaatgtgtctatcagctattatgaccttttctatttctatgatctctaccaaaaagattgagttacttactgctaaactctctagtgttcaagtttatg

SEQ ID NO: 74874 - DNA, 497 bp, Glycine max
  unsure (1)..(497): unsure at all n locations
agtcacctgcggcatgcaagcttccaagttttaagttcttcctcaaaactgttctaagcaaagttcccaaagtcctatntaacaacttccgttgcccatcggtttgtgggtgacaagtggttgaaaataacaatttagtgcccaacttgctccacaaagtcctccaaaaatggcttatgaacttagagtccctatcactaacaatgctccttggcaaaccatggagtctcacaatctccttgaaaaacaaatcagccacatgggaagcatcatcaacttttttacatggaataaaatgagccattttagaaaacctatcaacaaccacaaaaatggaatctctaccattgcttgtttttggcagccccaaaacaaaatccatggataaatcaatccaaggatactccggaattggaatggagatacaatccatgaggcttaccttgactttgcttttacatacaatgcaatgtcacanattctgacattcttttata

SEQ ID NO: 74875 - DNA, 427 bp, Glycine max
  unsure (1)..(427): unsure at all n locations
tacccatcacatgtggtactaagtggcggtcgggcgatggtgcacaacaagttttccacatccacanaatgtgcataaacccaccatcccctattgcccacctccaactgagctcacgtactcccacgtagcccatatcctcgtttctctcaacaccgggtccccatcaatcctctcaagcttccccaacatccaaggtaaacaacattcaaacaacacaaactatcacagccaagaaaacagagcaaaggcagaanactctgccaaacaccaaccaaaatacagcttttctacttaaaaacccagaacaatcctttgtccaattcgtaaccgtggatcgactcaaatttactggaagcttagacataacctacatttgaccgtggattactacaacatcaaactatttgactgtcttccacaacac

SEQ ID NO: 74876 - DNA, 450 bp, Glycine max
  unsure (1)..(450): unsure at all n locations
agcttgctcttgattnttcctcagttctntaacaagttttgaacaatatacttggccttcatttaactgtctttgggcttggcggccacgctcaacaaagtactttcgacacctactatacgttgatttcaccaatgctgttatgggaatgttgtgacaatcctttaaaaccttattgatacattctgagaggttcgttgtcatgtggccatatcgacgtccttctctatcgtaagccatcgtccatttttcctttgagatgcgatcaatccatgttgctatagctggactcagttcacaaaatttttctataatttgataaaaaatgtgcttgcatggagtgtaggctgcataaaattagttatgaataacaactttaagtataaatganagtaaaataaacgtgaccatcaaatatgaaatcttacccaatntcttcaacatttcttt

SEQ ID NO: 74877 - DNA, 487 bp, Glycine max
  unsure (1)..(487): unsure at all n locations
tacccatcacatgtggtactaggtggcagtctggcgatggtgcacnaacaattttccacatccacaaatcgcgcataaatccaccatcccctgttgcccacctccaactgagctcacgtactcccatgtagcccatatcctcgtttctctcaacaccgggtccccatcaatcctcccaagcttccccaacatccaggtaattcaacattcaaacagcacatactaccacagccaagataacagggcaaaggcagaaaactctgcccaaaacaccaaccaaaatcacagctgtttctcacttaaagaccccagtaacatttcctttgttccaattcgttcaccgttggatcgactcgaacattntactggaagtctctagtacataagcctacattntgaccgttgggatctgctagaaaacatctagaactcattctgcactactctntccacaaccaaccaaatatagcatttttctgcacttatg

SEQ ID NO: 74878 - DNA, 400 bp, Glycine max
  unsure (1)..(400): unsure at all n locations
gcaagcttanggtggttctttgagaatactctatttcttttgatggagtgttgcatccattgtgaaattggaatttaacatttaattgttcaaaagtggagggaaaaagggtaaatagatgataaaagttgggtgggattctgttcttgatatttatgtgatggctttagactatagaccaggaactgaataatgggtctataggtttatgtgatgtcccaaaattgtttttaatggtttgaggcaatttctttgtttacatcaatgggnggtttctttaaaccatagttttggaatttcgtttaaattgtttgccttttgctacattgttggttttgcatgtctggtcttcttattcaaaaccacgacttgtcaagatangtttaggtattataaccct

SEQ ID NO: 74879 - DNA, 467 bp, Glycine max
  unsure (1)..(467): unsure at all n locations
ctgcttacacattcagaggcatacatctattcatgtgttgtgttggcaaaacaaattctacctaccctgaatctaatattttatgagtagcttctgaagcagtatacaacattatttttgtatgattattatcaaaaaataattntatacaaaatactataaaaggataatgtttgctctctacaaagcttcttgaagatgatactctaatatatctttagaacttcagaaattgatacccccctcccccccttctagtgaccttctggtccacttcagtttggaaatcacgttagtaaaaaatgaagaaaataaaattcttcttaagtgacaatattatcatatgtttagggactaaaatgatagtaagtggttaacgttaaggatataaatgaaacaactaaaaatctcaatgacttatntcaactattcttaatttcaagaacaattgtgacaacattataaac

SEQ ID NO: 74880 - DNA, 473 bp, Glycine max
  unsure (1)..(473): unsure at all n locations
gcttctgagaattccaagctttataagcaaaaattaaaaatctatcatgacaaanagctatcataaagaaattntcagcctagtcaacaactattgttatttaattctcgattaagattgtttccaggtaagttgaaatccaagtggtctggaccattcatcatcaaagaagttatgccatatggagcagtgatactagaggacccaacaaccaanaggacatggactgtgaatggtagcagaatcaaacactacctaggtggagatttcgagaggataatcactattgtccaactgcaagatctggaagcaaagctttccaagtttattttgatgatgccaaagactcaagtcaagaatcaagagtcaagcaagtttcaagaatcaaagagtcgttcaatcaagaatcaagattcaaggtaagattcaagagaagactctagatatgctagaacttcaagaaaagcatcaag

SEQ ID NO: 74881 - DNA, 496 bp, Glycine max
  unsure (1)..(496): unsure at all n locations
gcatggaaatacctttcaatggtatgtatatatgtgtgaatataggtagcatggaaaacacctttcaatggtatgtatatatgtgaatataggtagcatgaaaaatacctttcaatggtatgtatatatgtgtgaatataggtagcatggaaaatacctttcaatggtatgtatatatgtgaatataggtggcgcggaaataccttgcagagtgtgtgaatatatggcataaaaataccttgcaaagtgtgaatgagtagcaaaaaatgcctttcaacatatgcatatttgaggataggtagcattaggagccctttataaaatgtacccatgtcanaaatggcctgaggacgcttcccaaatgaatatatgatgtggagttgtccctcaaatgtatatagatggcatgaaagttccttttcaaatgcaagtatgtacatgacgtgagaatagctcntccatgtgcatatatnntataataaatgtgaatgaaaca

SEQ ID NO: 74882 - DNA, 485 bp, Glycine max
  unsure (1)..(485): unsure at all n locations
gtgagaaagtatggaagagtcaatcttcctacttttattcgttgaccacagtggtacctggagatatgtcgcgagggtcaggagaccttgtggacgtcaggtggggtgctattgcccaaaaccaagcttgaccaatcccgaccgaacccgggcatagtcagtcagtgagaacctgtgacgtacctaaacaggcgagctcctggcagtcaaccaataaaagaataaagaccacanagcaagaatgcttgtgtggtggctggccagctatggatcttgagtgatatttggaatatggcctctggtaatcaattaccaagggtgtgtaatcgattacaaggcttaaaaatgaagacaagaagttaagatggcctctagtaatcgattacaagggtgtgtaatcgattacaaggcttagaaatggatacagggagttgagatgacctctggtaatcgattaccaagcttagaaatggaaatgggatatt

SEQ ID NO: 74883 - DNA, 487 bp, Glycine max
  unsure (1)..(487): unsure at all n locations
cctgccgcatgcaagcttgaactatctgaagatcttttagtacattnggttttgatgtctcttcttgtgcaatatagtcaactcacggtaagctataattgccaaaagacaaaacggactcttaatgggcttatatcttacattgtgcatgaggagaaaaaatgaagcatcataacactaacaatgttaatttggcaagcacctctacgggaaaaggcaacacaaaaagaagaagaaagagacttgaggttgcaagtggttcacatcaaaagaagcttatcattgacaaggataagtgtttctttttgtaagaaatttggacatcaaaagaaggagtgccccaggtattatatatggtgtttaaagaaaggtatacctcttactttggcttgtttgaagtaatctagttcagatctaaaaacttggtggtgattctgtgcactactcacaaaggttctatcggatacttgatactgaaccactatgt

SEQ ID NO: 74884 - DNA, 449 bp, Glycine max
  unsure (1)..(449): unsure at all n locations
cgtatgtggtcgagatagcacagagatcatggtttgtgttggattcacagcttaggttctaagagagcattcattccacatattcttgacaaaccataactcattctccacaggcctaagcttattgttatgctacatttaacaacacacaggatttacttggcacatagttgcttctagctcctatttctcacaatgccaaataataattttgtctttnttttttctacaattgacaatgataccggagaatactacaactcacattacttgtgtgttgttattattgtccatgcaacaaaaattacccaagacactcccccacatttggaggaaatttgtcttaatccataagtgttctcttataacctaagatagggtagttacaacatcaatttcattcagctcagggttcacaacacattcatccatgaacgcggttgacgttg

SEQ ID NO: 74885 - DNA, 246 bp, Glycine max
  unsure (1)..(246): unsure at all n locations
cctaaaaccaaactcttcatgaatattcatatgagacacaagttatattgattcattatgtgacaaactacttgtttccaccaaagatagntcattaaaatcctcagtgatggtatccaattaccatgacatataactaagagacaactttacctcacaaatnaactnttagaattgagtatggtaaaaacataagttctataatgattcaaatttattctatacgttgcatagattgtcagatat

SEQ ID NO: 74886 - DNA, 469 bp, Glycine max
tctagaggaagcctcttaatgaagcttctagagaaagctacatgaagctgcctcggtaaaaacgctgctcagccttcattaaccgttggatcttctcgaaactttgtctgcaacttcacaaaacattttaccatgatcggaccgttgcgatctttgcgaagatgtctggagtgtactagaagcctcttaatgaagcttctggaggaagcctcttaatgaagcttctagagaaaactacatgaagctgcctcggtagaaacgctgcccagccttcgttaaccgttggatcttcttgaaatttggtttgcaacttcacaagacactttaccatgatttaaccgttgggatcgttgagaaaatatctgtagtgtgctagaagcttccgttcccgagagcatctctcatttaagcatttcagcctttgctttcttgtagcttatgaaaaatgccatttcttcttctttctttc

SEQ ID NO: 74887 - DNA, 484 bp, Glycine max
  unsure (1)..(484): unsure at all n locations
ctgcaagcttgaatcggacacncgtgtgaatagttatgaccttgtgaataacacgagagcttccgtcgccgaatctaagatgtaatgaatgtgatgcgcacacaattggacaactcgagtttaagtgtatgaccatttgaattactcaagtgcttccgatgctcaattctgagcgtgtcggtatgtgatattcctgaatcggacatccgtgtgaaaatatatgaccatttgaatttctcaagagctcttgatgttcaatctcgagcctctcgacatattatgcgcccgaataagacatccgtgtgaaaagatatgactcatttaatttctcgagagctttcgatggttaattncgagcgtatcaatatattataaggctgaattggacctcggtgtgaaaagttatgaccattttaatatcatgagagctttcattgttcattttcgagcgtctctatatgtgatgcgccctaatctaacattc

SEQ ID NO: 74888 - DNA, 399 bp, Glycine max
catatatatcgacatgctcgaaattaaacattgtaagctctcgagatattcatatggtcataacttttcacacggatgtccgattctggcgaatcacatatcgagacgctcataactaaacaacggaagctatagagaaattctaatggtcaaaacttttcacactgatgtccgattcatgcgaattacatatcgagacgctcgaaattgaacaacagatgctctcgagatattcaaatggtcataacatttaactcgaatgtccaattcaggcgcatcacatatagggacgctcggaattgaacaacggaagctctcgagaaattcaaatggtcataacttttcacactgaggtccgattcacgcttataatatatcgatacgctcgagactaaacat

SEQ ID NO: 74889 - DNA, 486 bp, Glycine max
  unsure (1)..(486): unsure at all n locations
agctntcacagataaatctnttatatagaatcaaagattctttataacactcagagagtggatntataataaggtttgtatttctcaccgatactttgtatacaccaagcatgggctatcttangctcagcgtgtttctcaacgaatgttcttcttttctctcgttntttaattcatggctctttgtctttatatgtacgttcatcagagttattcaatctttgatgttgtatttataggtagagagacgctcgtaattctggagagtatcttggaatttgaatggtatgaccgctgtgcaaattgatccctgtttcctgaattaagtggacactacacgtttcttatctaatacgatcagaactttccatttttgtcattcataattcaatatgtttggtaatcacataaaaagaaacaaaggataatntcgcatatatgttccttttaaaatanaatcatacaacatgaaatanatagataatt

SEQ ID NO: 74890 - DNA, 485 bp, Glycine max
  unsure (1)..(485): unsure at all n locations
cttgaatgcactattcaatggagttgacaagaacatcttcagactgatcaacacttgcacagtggccaaagatgcatgggagatcctgaaaatcactcatgaaggaacctccaaagtaaagatgtccagattgcaactcctggctacaaaattcgaaaatctgaagatgaaggaggaagagtgtattcatgacttccacatgaacattcttgaaattgccaatgcttgcactgccttgngagagaggataacagatganaagctggtgagaaagatcctcagatccttgcctaagagatttgacatgaaagtcactgcaatagaggaggcccaagacatttgcaacatgagagtagatgaactcattggttctcttcaaacctttgagctangactctcggatagggctgaaaagaagagcaagaatctggctttcgtgtccaatgatgaaggagaagaagatgagtatgaccttgatactgatg

SEQ ID NO: 74891 - DNA, 281 bp, Glycine max
  unsure (1)..(281): unsure at all n locations
agctttagtgactatgagcatctccagantttacattgagtgtcctcattgatatgttctacagtcgatnttgcataaatttctaattgtcatagcatatgattcgtggatatgatttaggctctctttctttctgtacattttaagccattggccaaaaagctatcccaatgtatattatttttgccatttgcaagccctttgagccaaacaattgatattttgttggaacactaacctaggataaaagtttcttaccttaccttatgttaggagagcaa

SEQ ID NO: 74892 - DNA, 420 bp, Glycine max
  unsure (1)..(420): unsure at all n locations
tgtggccaaggtcactcncaataggaaggtatatattatattgaattctcttgttactcgaatgaaggcaacacgcattttactattctntactacccatcatggtatgatgttgcatcaaatcgatttaaaaagtgtgttcctcaatggtcttattaaggaagaattctatgtggaacaaccccttgggtttgagagttttatctaccttaatcatgtttctaaacttaataaagctttgtatggttgatagcaagctcctcaagcttggtatgaaaaattaagttctctcttaagtgaaaatggcttcatcagatgaaaggtacatattactatatttcacacagattatggagatcaattcataatcatccagatatatgcggacgatatcatattggtgctactaatgaatctatg

SEQ ID NO: 74893 - DNA, 382 bp, Glycine max
  unsure (1)..(382): unsure at all n locations
agcttangaatctttaataaagatagcatataaatgtgtaaggctgttaagactgaaataatgaggggtattctacctcccattgatagagttctntgcttccattttgtaagtttagcctcgcattagctaataatgggctgccacacagacctattttatagctgacccctacaggaatttcaaggttagacaatggaatatccatttgactacaattgagagaagatgctgcctccttacaccagtcctcggatgngcccaaacacccaacatttctcttattgtagtttatcttaagaccagagaccaattcaaagctggtcaggatacactttataatgttccncgtatcttctccatatgcaatggccaccttcac

SEQ ID NO: 74894 - DNA, 465 bp, Glycine max
  unsure (1)..(465): unsure at all n locations
tgtgantattttactatatatgtgtgtgtcttcgnttatctctacctgtntaaaaatgtgataattcactcatcatgtgttggttatgtttggatcatgtgatgatcttaaaccttgtgtttgtgagagcaaatgactatgtgaattactttaagaaaccttgtgatggaggactctgagacacaatattttgataggatgtaacattggaacaagagtttttattttaattgcatgacgtatcaaacatgtcattttactttatttgataaacttgaacagtcttgttgtaagtcataaatatttctaagaaattttatttggttacaagtgaagcgaatgtgaacattacccacgtggactgatttacgattttattgaataaaattgatttaattagattccgcatcctatattatgtgtcttcatatatatgtatgttggagtagaaagacgacttctagt

SEQ ID NO: 74895 - DNA, 429 bp, Glycine max
agctatattcttggtgatctgtgagggatggagaattatggtcataaagaacatggaaaaagatgtgagcaaaaattgaataatattgtaattagacgacccttggccgctatggtgtggatgtagcaagccaaaacgtagtcagatgctaatacccaatttgagcccttgttgctggagagggttgctttggcgactgcgacgactaggtcgaagtctttcttagtaggatgcgaggtttatgcacgacaatgatgtggaaccaaactaatacataaatgataagagaaggccttgcgagcgacagcatacgctgatcctagagcaccgctcaagtggttgcttgagatccctacacggagagtggataatgatgttcttatagagtatatggagatattattaatatagtgcacatattctaagact

SEQ ID NO: 74896 - DNA, 478 bp, Glycine max
  unsure (1)..(478): unsure at all n locations
nttcanatgggtaaaaagctcacattcactttcttctacatcatattcgaacttgtccaaatgaataataaagtcatctcgactcaaaggaagtcatataagtctcatacaattaatataacacctatatcctaatgtcacatcctatcagagcgtggtgttcccgtgtcctctagcatgaggatcttcatagtcatgcacctattcatctgctccctcgaacacgagttcaagatcatcacaggatccaaacacaacaacacacagggagtgagttatcacattcctagctaatagagaaacaagacaattaaatatacatattatataaatgagataccacttgcttaaacatagctcacgtaacttcaccacttcgtcattcagaattcactgttcaattatcaatcacattacacaagaatcccacacttcgatcaagatataataacacatcaattagcacgcatatgcgata

SEQ ID NO: 74897 - DNA, 438 bp, Glycine max
  unsure (1)..(438): unsure at all n locations
agcttgttgatgatgcagtgtttntagtgtggacattgctctcanacttgtacaaagatttcaagcttccttttaatcaatggtcaaatcacatcagagaaggttttttgtgttatgtttcagtggctcttattaagagctgtaccagatctttgttttttgtagccatgctatggttcctattcaaactgcattagttttctttggaaccatgagtatggctctatctctgtatatatttagtacctctggtagctatatcaatatattatatttttgctgataaaaaacaacctaatatgacaaagggaaaagtcatctgagcacatcatatataatactactgatgtctgctgtgcannaaaaaaaaaaccatacaagaacaaataatgctattcaagaaattgaggcagctaccagaattttagaacatacaac

SEQ ID NO: 74898 - DNA, 465 bp, Glycine max
  unsure (1)..(465): unsure at all n locations
tatacttgcccttcatttaactgtctctgngcttggcggccacgctcaacanagtactttcgacacctactgtacgttgatttgaccaaggctgttatgggaatgttgtgacaatgcttcaaaaccttattgatacattctgagaggttggttgtcatgtggccatatcgacgtccttctgtatcataagtcatcgtccatttttcctttgaaatgcgatcaatccatgttgctatggttggactcagttcacgaaatttttctaaattttgatcaaaaatgtgcttgcaaggagtgtaggctgcataaaattagttatgaataacaattttaagtatatatgaaaagtaaataaacgtgacatcaaatatgaaatcttacccaatttcttcaacattatcttttgtttggcattattgaatttccgattgaaagtgcttgctatgtgtcgcacgcaatagacat

SEQ ID NO: 74899 - DNA, 487 bp, Glycine max
  unsure (1)..(487): unsure at all n locations
agcttagttctctgcaggtcttggcccaacaaaatctctcanaactctctggattcagacccttctctctctagaatctctcacatgcagaagctcttcgagaaattggccaaaatcttctccaaaatctaatttcaggcttaaataggtggctttgtttgtgctagcacacttagcgagactatggacgctcaacgcgcattagtggattttggcttagtgcatgcttttctcgctcagtggatggactaaagcggtgcgcttagcgggataaacccttgctcaacgaacatgcacatctcatccttcttccagattcttcctcgtgcttagccaatggaatggtgtgctcagcgaatggctcgcttanccagtagattggcttagcgagcagatgaaaatccgcacttcacaaacttgcctaattaacctganattgagaggaaataaacacacacatggaagtctatgttttatacctatatta

SEQ ID NO: 74900 - DNA, 507 bp, Glycine max
  unsure (1)..(507): unsure at all n locations
ctcagcttatgtggttcggaacggatagcganatggaagagctcaccgatgctataagatacggacttccctttatatgtaagagactgtgcaaaaaccctaaatcacttttttatgttttttctccttctaattgttcttgcaattaaaaaccccacatgttttgggccaagtagactcgagtacttaagacccattatccatcataacccagttctatagtatggacctacggaattacatcctgcactctctttgttgcttccggaaccccgaaaagaccaaaatggtcaaaaatacctttgccgctcccaagcaagccccacctccctccaaccacccaatactaccatcgcaaccacccaatactgtcacaaccacctaacaccatcgaaggtaagttntgcttcgtctctattctttntcaatatgtcttttgctttttcttggtgccttgggaatggaaatatattccacaatgcatgtgctaaaagtaaatattccaaa

SEQ ID NO: 74901 - DNA, 445 bp, Glycine max
  unsure (1)..(445): unsure at all n locations
gctttctntgtgggtcgatgggatttgtcnagtatattggcgtgatcactatctaacttattctcaattagctcagttgcttcttctggggtcttcagctttatatttccccctgcagaagcatctagcagttgcttggtttgttgtctcagcccatctatgaacatatacaattggattggctctgaaaacccatgggagggagttcttctcaataaacctttgaacctctccaatgcttcactcatagattcatcagggaactgatgaaatgaagagattgtatctttcccttccgtagtcttggactctcagatgtatttctttagagaattttcaacaacttcttcctatggttttagactattatcccttaacgagtgaagccacctcttggcctctcctgccaatgagaatgataataggctgagtcttatatcttcat

SEQ ID NO: 74902 - DNA, 392 bp, Glycine max
  unsure (1)..(392): unsure at all n locations
actcaagcttcttagtttcagatgatgcagatgggtnggtagctacctcatgcactcctctaatgactatggcatcatntctggcactaaactgctgggagttggaggccatcttctcaattaaatttctggcttcagcaggagtcatgtctccaaaggctccaccactggcaacatctatcatacttctctccatattactgagtccttcataaaaatattggagaagaagctgttctgaaatctgatggtgagggcaactggcacatagtttcttaaatctttccagtactcatacaggctctctccattgagttgtctaatacctgagatatccctcctgatggctgtggtcctggaagcaaggaaaattttttccaagaatactctct

SEQ ID NO: 74903 - DNA, 409 bp, Glycine max
  unsure (1)..(409): unsure at all n locations
agctnttaatacactnntttcaagatagcttggccggttccgcggtagtttggtacactaatttggaagcttcccgtatccgtacttggaaggatctaattactgccttcctaaagcaatatcagtataattccgatatggctcccgatcgcactcagctgcagaatatgttcaagaaagagggcgaaacctttaaagaatacgcacaacggtggagagacctggcagcacaagtggctcctcccatggtcgagagagagataatcactatgatggtagacacgttgctagtgttctactatgagaagctagtaggttacatgccgtccagctttgcagacctagtgttcgccggggaaaggatcgatgtatggttgaaaagaggaaagttcgattacgtttcctccac

SEQ ID NO: 74904 - DNA, 485 bp, Glycine max
  unsure (1)..(485): unsure at all n locations
tgatgatgttggtctataccgacgaaaggatcanagtaggtcgtacaagaggccaatctgatcatcatgctccgatacatgccaaanaaactcgggcctatgaagagggtgagaatgagggagaagcccatgctgtggctgacattcctatacagccaagtttcccaccaacctaacactgtcattactcagccaataacaacccttttcattacacaccacccagtcatccacataggccatacctaatatctaccacaaagcctacctaccgcacgttcaatgacgaacataaccttcagcacaatccaaaaacaccaaccaagaaatgaattttgcagcgagaaagcctgtagaattcaccccaattacggtgtgctatgctgacttgctcccatatctacttgataattcaatggtagccataaccccaaccaagctcatcaacctncatttgtacgagaatacgactcgaacgcaacgtg

SEQ ID NO: 74905 - DNA, 432 bp, Glycine max
  unsure (1)..(432): unsure at all n locations
gcttatggtttagtaacttgttaatgtatgaaanaatatatatgttttcaattctccttgcanaggttctttcaaaatagggaatgattgtgtatactactatgaaatgagctaaagatcaaaatgacaaaaatcatgtgtcctcatactactgtgaaaagtatgaataacactattaacggtttgacaagtgtaccaaatgtccaagtagtaaagtactcggaagtccaagtgtcaatttccacagggactttatttngtacttatgttggataattttcaatttataagagaaaaagataagatgatgtataaaaaataaatttaaaagaacatggtataaaataataactattaatagaaaacaaaagaaatagtagggaattcaatggaaatgttaggacctaacatgtcttatttgctaaaatgtta

SEQ ID NO: 74906 - DNA, 514 bp, Glycine max
  unsure (1)..(514): unsure at all n locations
tagcgaccttgaatctcagctagtattggtgggagaatactcgccaatgcctagaggctgaaggtctagatgtgacctgagatgtcttcaagagggtatttttggagaaatactttcctggggatgttaggaacaagaaagagatggagtacttggagctcaagcagggaacatgatcgtggctgaatatgcagccaagtttgaggagctggtgagatactttccccattatcaaaggagagatggtgaaagttccaagtgtttaaagtttctgaatggcttacgacttgaagtgaaacaagctntgaattaccaaggtgttcgtcagtttccattcatggttaacatgtgtcagatntaggatgaagactcttaagacagggcgagctattataagagtataggtccaatgaagaacanaaagaatggacctcaacatcggggaaagccgtacttgaaccctcctaagcaatatggtaactgccccaacaatcanaagattgtgccatgggat

SEQ ID NO: 74907 - DNA, 293 bp, Glycine max
tggatccataggacaggcactcatggatgtggtctgatcaccctcatcacacagacacacacacacacgctaatcacagccacgcacatacactctgcttattccacgacacacacacacacacattgtctatgggtttcgcttagaggcataatgcggaccttataatgacaagagcaagattgatagcttgggcgacatgttactatcgaagaaatagaatacggcgttacgtcatgatacaagatggctcacttgggaattgtgacagagaacaatggacgtgttctgca

SEQ ID NO: 74908 - DNA, 473 bp, Glycine max
  unsure (1)..(473): unsure at all n locations
tgactgtgagataagctaaacaatgcntttaggattgtcattggtcactttcattggcctaaattaaatcaaacttatttgatgtttactcttatattttcaatcatgtactgctgactaatgtttttttgtctgcactctgcagatttctgttgacctcactgtctagtgtggacgtacctgtcttatgctctcctgtgctatttcaaaattctgctttgtcttctcttgacgtatgtccttggcttcattttctttccatttaatttctcatgttctttgattctgtaatttgtcaatttaagttgattattgaaccttttattctttctttggagaatattgcctttatgaaaactcgaactaaatggttaatctagctatgtgttaatcgaaagctactcgctatatgtgattntccatttgttgaagataacaactaaacacgtgatggaattgctcgaaacataatc

SEQ ID NO: 74909 - DNA, 319 bp, Glycine max
tcaacaagatctaagatgcaggagatgtttgcattcactattgaagagaagatgacttcccgattctcgagaagagatcaagaggacttcgccggggaagtattgtaaagattgttcttaacacactaacatagcacaattgttgttttcaatagagtttttctcacaattttctaagttaccacagtgtttactctctggtcatcgactaccagtggcaaagctcgatttcataagctcttaactgaatctgaacgttccacttgactttaaatggtgaatcgatcccagtgttcttacgttgaattctattcatctg

SEQ ID NO: 74910 - DNA, 374 bp, Glycine max
  unsure (1)..(374): unsure at all n locations
anagtgccncaacgcatgttntaagaaagcgacacggaccctctggtggtttgtttacagaggggatcaagacagaacccatatgcgatgcatatgcaaaagacgcaatgcgggaatgtacatagtatgacaatattcactgagcataagcaaaagggtatatgatacttatgcatggcagttgtgaaaaatggcacgcagcgtatatgctccgtgccccctatttaagggacctataagggagagaactaactatgcatttagtgataaccccccaacgtagtcatatctctcttgatggattctagaggtattatccccttcgaagaacatacagtagcagtacggactactatcaacaatattgtttcaaa

SEQ ID NO: 74911 - DNA, 423 bp, Glycine max
  unsure (1)..(423): unsure at all n locations
catgcatctttgatactagaaaaactattatntctttggttgtccaatcatgttacaagcctaatatagtccgtagtgatccacattgagcatgtacatatcattgactgagatgatgtgcataggtgggaattttaatattcagttgttataattcaaacactcttaccgagacacttatgggattgagagaaacactatccttgtgggtaaaattaagcccaggaaagcacgcgaattgaggaaagaagggctaattaataatagaagactaattgatgaaagaatggctaattaaggaatatagaatatttaatgacattacgctaattaacgaaagaatgactaattaagggaaatcatatttattcataagtccactaatctgcacctatataagaagatgagagatatgtgagaaga

SEQ ID NO: 74912 - DNA, 488 bp, Glycine max
  unsure (1)..(488): unsure at all n locations
taccaatgtcattaactgcttcaaattgtactctccatttagtcccatatctgctaatgcctcaagtgtccttttttctcacctcaaattgatgaaccttctttaccaatagcacctcaagttgcctaaaatccacagccttaattccacttacactctcaagcaccattacaccaaaactacctagtcttgggcagcacaaccttaaatccacagctcctacccttaattaaaatccacaacctcaagttgctcctattgttgattacatgatggctatgctcattccttgacaaaaattcagccacaacaaaactacctagtcttggggtcatgtcacgttcaagagtcactgctgaagaggttatgttcctgtgaatgacttcgtcatcccattcctcatgcagatagagaagtgcagatgcaaggcantttactatgttatacctatgatggtcaagttggtgactgagaccacacacacacac

SEQ ID NO: 74913 - DNA, 509 bp, Glycine max
  unsure (1)..(509): unsure at all n locations
atcctctgagtcacctgccgcatgcaagcttagaacaaactcaatcttaatgattaaaccatcttctagtgtttggataagcatctntaattctgtagaagattttttagaanaaaaaaaaagaaaaagagaagaaaaacataaaatggatttttctatacataagacggtaatttataaaaacactcataattttgtttaaagatgatttttaacttatgcgtaaactatttatcaattgacttgaactaattatattttaaaggacgatatattttttttaaagcttcagcaagcacctcccttgttctgactagagttgtctcaagaaatttgacatactctcaagatgaaggagggttatcataaacatccatggccatattatcaacagtaggggcctcatcatcaggattcacctcttcaacgatgggttatacttgatgaacgaatgtgaaagtggagtgtggaagctaacaatgaatgaaaattatgttagatacaaaaca

SEQ ID NO: 74914 - DNA, 453 bp, Glycine max
  unsure (1)..(453): unsure at all n locations
tacagaggaagcttcngtggaggagaagaatgagagagagatggnggcatgaaattaaacgagaataagagggagagaagctgaactctgaagtatgcctcacaagtttcacattcatcaaatctatgacaagttttacacatgtttctatttattacctaggtcactaactaaatgaaagcctccttgataatcttccttgggaagcttccttgagaaacttccttgagaagttagaacttagctacacacacctttctaatagctaagttcacctccttgagaagctntcttgagaagcttccttgagaagctagagcttagctacacacagccctctaaaagctaagctcatccccatgtcaaaatacatgagaatacaaaaaagtccctactacaaagaccactcaaaatgccctgaaatacaaggctaataccctatactactagaat

SEQ ID NO: 74915 - DNA, 464 bp, Glycine max
  unsure (1)..(464): unsure at all n locations
agctntacaagtatatatatattatgtatataagagtttataatatacaaagntgagtattatcttgtgttatttatcatatatacggtattctnttgcatggcgtacgcagaactaagtaaaccacaacgctactcctcatcgtgtcgagggtttagatgaatcaacacgccacagttgtgcctggtgatattttcaaattgttcattanggttcatctcaatactgcacctgatccaacactcttgttatactctccctctcaaccgaacttaattgcatagcttcttgcacgatggttaactcttgcagacactgttatctcgcataaactgtttcattgattctattgaagaaataacagaaggtgtcatatcttgtgttcaataactgtttcaagtgatggttttgctctaccctcctcttctcctttgatctaacacgagagatccttattgttgaat

SEQ ID NO: 74916 - DNA, 437 bp, Glycine max
  unsure (1)..(437): unsure at all n locations
tctctccttctctcnagttactcactctcacgtcacgtctcgatcgtgtttatataacataagatgttaaatacaatgcttcttcgtgtttatccttttcctcaaaaaaaaaaaaagacagaaagaaaagtttgttatgacgataacagattaatcgtattacagtggtcgtgagttgcattaactctggttgttttgatcggttaggtctatccatgtgtatgagccatgcctgacattttatttacttagaactagcgcagaaacgttctcccactatcatatgtggaagcatattattcaaccggagtttcaatggaaatcgtctacgccgtcgattccctatgccagaacggataatactttattgagacatggcttcttacagcagttcaagaatcctacgattnttctcacgatttcttgcgatggagact

SEQ ID NO: 74917 - DNA, 473 bp, Glycine max
  unsure (1)..(473): unsure at all n locations
agctgtaaatatacttgcaggccaaagggatgctaccagtgggcatatcattctcagntgttggcatatggtacacagcctgaaatgtccaggaacaacttcccattacttttcaatggataagtgaacttcaggcaaaacaaaataagacaaaccgttctaacctttctaaaataaggaatatgatacaaggtttggagtagagaattcatataacacgtagctccttggttcttaagcccaacatagccagtctccttctttgaatcataagtccagtaatcaacaatcctacgaacaagaacctcagcttcgactataagagtatcatgcacaagataccctctactaggatcatacaattcaccaagaggcatgaaggatgtganaccccaatcactttcacgtgcattaaactggtgctgtgtgtctgcattagtataaataaaataagcttgaccaacgtcatagat

SEQ ID NO: 74918 - DNA, 468 bp, Glycine max
  unsure (1)..(468): unsure at all n locations
ctgagggtgcgcaacccaccatctnttcatagtagagtatcgattatgtgtctaccatcacgattatcgtctccctttccatcattgggggtaccacctgagccgccagatccctccaccttttgtgcgtgttctttgaaagatccgtccccctttntgcacatgttctgtagttgcatcctatccagaaccatatcaaaattgtactgatactgcctaacaaaggcaaccattaggtccttccaagaatggactcgggaaggttccaagttagtgtaccatgtaacagctaccccagtaagactctcatggaaggaatgtatcagcaattcctcatcttttgcgtattcccccatcttctgacaatacatctttagatggttcttgggacaagtagtcctcttgtacttgtcaaagttcagcaccttgaactcgggaggggtgatgatattgggtactangaacaac

SEQ ID NO: 74919 - DNA, 489 bp, Glycine max
  unsure (1)..(489): unsure at all n locations
atcctctgagtcacctgcngcatgaagcttaacatcagaccacttccagggtgctggaactacttcacatggacttgatggngcctatgcaagttgaaagccttggaggaaagaggtatgcctatgttgttgtggatgatttctccagatttacctgngtcaactttatcagagaaaaatcagacacctttgaagtattcaaggagttgagtctaagacttcaaagagaaaaagactgtgtcatcaagagaatcaggagtgaccatggcagagagtttgaaaacagcaagtttactgaatactgcacatctgaaggcatcactcatgagttctctgcagccattacaccacaacagaatggcatagttgagaggaaaaacaggactntgcaagaggctgtagggtcatgcttcatgccanagaacttccctataatctctgggctgaagccatgaacacagcatgctacattcacaacagagtcacact

SEQ ID NO: 74920 - DNA, 481 bp, Glycine max
  unsure (1)..(481): unsure at all n locations
tacacacatactgtaatcgattaccagaggaagttttcagataacattctcaacagtcacatctttntattcgtttcttaaatggccatcaaaggcttatatatatgtgacttgagacacgaatttaacaagagtttttcagaacaaaaaggtcttatcctcttaaaaagcaaaatcgttttaccctcttacaaattccttggccaaaacacttgtgattcaatatggaattatntgagtgctcaaattgatcaatctatctctttcaagagagatttcttcttcttttcttctntattctgaaaagggattaagagacggagggtctcttgttgtgaaagaattctaaacacaaaggaaggattgtccttgtgtgtttagaacttgtaaaagggaattacaagatagtggaactctcaagcgggttgcttgtggactggacgtatgcacaagggtgtgaccgaaccagtataaatctgag

SEQ ID NO: 74921 - DNA, 383 bp, Glycine max
  unsure (1)..(383): unsure at all n locations
agcttgactnntgcgagttgatttagccttagttttctttagttattagtcaattcaattaagaaagagaaagcccaaagagaaaagtccgactttgatttttcggtttattttactaaaagatattnttttgattattatattattattttaccgctttntggtttccaacgtggttacgacatgactgaacggtcggatttcattttaacagaaattaacggatattaccattcaaatgatcggtggaaatttattttattntttgattaggcgagaaaatgacttaagtaaatgactaaagcacgtcaaaagggggtaccgaaagttaataaaacgaatatatatgtacgcgaaaaaaatggggaccaccacgggtacat

SEQ ID NO: 74922 - DNA, 441 bp, Glycine max
  unsure (1)..(441): unsure at all n locations
ngcccgtccgatgcagcagtaatgatggcccgagttatgttggggaacggttacgaacccggaatgggtttaggcaaagacaacggcgacataactagcctgataaatgccaaaggaaatcgtgggaagtatgggttaggctataagcccactcaggcagatataaagagaagcatcgcgggaaggaagagcggtagtcgaagctcgcggttgagacaagaaggtganggaagcccaccctgccacataagtaggagctctataagcgcgggtctggnggacgaaggtcaagtggtcgcgatatacgaagatgatgttccgagtacattggatntggtacgaccatgcccttctgatttcagctgggaaattggcgagtggaggaacgccccagcatttacgcaacgagcataattaacctttacggtntaanagctctat

SEQ ID NO: 74923 - DNA, 477 bp, Glycine max
  unsure (1)..(477): unsure at all n locations
agcttcatacaattaatatagaacttatatcctaatgtcacatcctatcagagcgttgtgttcccgtgccctctagcatgatgttcttcatagtcatccacctattcatctgctcccccgaacacaagttcaagatcatcacaggatccaaacacaacaacacacagggagtgagttatcacattcctagctaatagagaaacaagacaattaaatatacatattatataaatgagataccacttgcttaaacatagctcacgtaacttcaccacttcatcattcataattcacttttcaatcatcaatcacattacacaagaatcccacacttcgattaagatataataacacatcaattagaaagcatatgcaatagttatgctaagactcaatcctatatgcaatgtggtaccatgtcagtgaaaaccaccctgnggcgcttatgagtacataacaagacacaccacacaatgg

SEQ ID NO: 74924 - DNA, 464 bp, Glycine max
  unsure (1)..(464): unsure at all n locations
taagcttcctcggcgccattcctgcgaaggcaacatttggaaaggttaatttaccagtgggacactactcttaaagcaaaaatggcatataacctcctcccataaatacaaacatcaatgtaaatntagagcaagcttatgcgcatatttccttacgaacgttctcttgcacaagacattctattaactaagaaaaatgcacccatatacaatcaaggcagcttcgttacctagattaattacacgtacttccaggtggtattgtacttaatcacacacatctccttggtaaatcacatacatgctactcaaacattttgggaccaaaaattgacatgtgcacatcttggatttctaatacctatacatacacaacttatgagaatttgactatttacaaaggtgtacattatcctttttaagttttgtacctaagcgatgcaattcacatatttctttgtgat

SEQ ID NO: 74925 - DNA, 482 bp, Glycine max
  unsure (1)..(482): unsure at all n locations
agcttggaaaaacaagaagaggcctntacacatttgtgcacatgcttgcattcacagacacacacaccacataagagaatctgctatagaatataatctcatgcttcaaaatcacaagaccaaggtgcagtttttatatctattaagagtgtcattatctttcataaacatacttagacaacatttgctaatttcattcaaaccatcagttctttagtttccagagtccatataagctactactaaatttatcaaatataatctacctgaatatcacagttaaatgatggtgtaataaaaaaagaagcaagagataaaaagttaccaaaaatctatggcaaaattacagatgcagtagcgttacacatgaaaatgtttgttgagactaatatttcctctctttaatgaattacattctttatccaaaaaaacttgcctgatagacacacagcttaagcttcttattcacattnnttgtcatg

SEQ ID NO: 74926 - DNA, 486 bp, Glycine max
  unsure (1)..(486): unsure at all n locations
atcacatnntaaatgtaaaagttataattattagcttcttattattataaaagaaattatattagaaaagtgaaattaaacatgcattaattatctttaataaaaagaataacttcagacatgtgtnttatcattgaattatatttaataggtgtaggagtattagaactttaacagggaataatatttttttatctaatacattacaataaaaacaaattagaatattgagcagatgaaacaaagaatcaaattgtattattcccaatataggaattgtaagtgaagttaaatcaagcctaattctaccattntagcaaattggattacatccttttattatgtatgttggtatgttntctttaacattgagacgcagagaatagaatggatcgagagagatataanaagagaaatctacccacatagaaaaggaggaatacaaagatcaacaaatactttacaattcagatgcagcaacttttg

SEQ ID NO: 74927 - DNA, 381 bp, Glycine max
gctcgcctcaaagagatctatgaaggataaagcggctgaaggaaccagtttcgctcccgaatatgacagccaccgttttaggagtgctgagcaccaacagcgctacgaggccatcaagggatggtcattccttcgggagcgacaagtccagcttagggacgacgagtataccgacttccaggaggagatagttcgccggcggtgggcatcactggttacccccatggccaaggtcgacccagacatagtcctcgaatattatgctaatgcttggcctacagaggagggcgtgcgagatatgcgatcttgggtgaggggtcagtggatcccgttcgatgcggatgctctcatccaggtcctgagataccctttaatgctgga

SEQ ID NO: 74928 - DNA, 488 bp, Glycine max
  unsure (1)..(488): unsure at all n locations
agtagaaacatgggaccaactcattntatttcanacaaaatgttgtatctagtcaaggtctgagagaccatacaagtttcctagcgatttctaattatgtgggccattaagtctatcatatgttgacaatagccgagaagcccatgaatctcttcgggggcggagtaggtgtccgccatcgccttggccttggctaacaagcggagaagttcttgactcccgttcaaggtaagagcaaaccgatccatccacatggttgcctcttggtgtaaagagtcgatcacccttcctctagcctctttttccgcgtatacttgggcatactcgtccgcgatcctatgctcgtgagccgtggctagacctaactcttcttggtacttggcgatgaatagctagcatgtggtctccgtctcgcataaacgctgagacaaagctcttttggaccttgaacaggcaactaacttctctttcaagaacatgctatgggc

SEQ ID NO: 74929 - DNA, 392 bp, Glycine max
agcttctggcagtaggacacttattaaagatcttctgtcggtgggcgaacattcgacgcaattctaatatgatttgaccatgaaatggacacttgcagtcgacaaggatggtatggacgacactgtctgtgaaatatactgcattatcaaggagaaatgggtccaggtttgttagacccgccgagatccctcgtgggaggtatgtactttctaatttgaattttgtccactaaaaatacagttcttataatagattgaaaaatcatcttcattaatgtgtataatttacaggatgtgcggaaaaaaacaccggccatccataagctaaacaccgccccacacatgtcgtcttgtgagggtgatgattatttagaacagacgctgatggatga

SEQ ID NO: 74930 - DNA, 348 bp, Glycine max
aaagtctcacgaatgtcacatgctgatgcaataattgttacgcgtgactatacgagacatactgccgaacaaagtcaggctagccataactcacctgtgctcttgttaccatgccatatatagcatagtcattgatcctgtcaagtttgatgagctacacaatgaggccgcaactatactgagccatctggagatgtatattaccgctgctgtatttgacatcatgatatacttgatagtgcatctagtcagagaaatcagatgacgtgcgcctgtttatttgcggcggatgtacaccggtgagtgatacatgaagatcttaacatggcatacaaataatctatatcg

SEQ ID NO: 74931 - DNA, 503 bp, Glycine max
  unsure (1)..(503): unsure at all n locations
ctattatgtgacctattaatactcagctcgcnacaatgtatggctcatcatattaactcagagctgacgcttatgtagttcaaggaaggagatctcatctagaaagcttgaggtgaaacccacaagaactcatcagaatgtaagttggctgctaactgtgaaagaccctttcgggtttggcatagcctatacaatgaagactgcaagctagaaaaaatatctgggaaagccattccttggacatggaattctactcactgcgagttttatttcagttaagctatgtaatgggtggcgtactgtgtttcctaccttggttgttaatccctataaaattatgacagtattattgctgaagaggatgtacaacgcaccatgtatcatatcactattactgaatacgttcttcatcatattcattacacactatgactctcacggatgaagtgctagttaatagtgcttctcaatacctttttggctaggctgatattacattcact

SEQ ID NO: 74932 - DNA, 219 bp, Glycine max
agcttatgaaccattcaatttctcgagagctctcgttgttcaatttttagcgcctcgatatgtgatgatcctgaatcataaccttcgtgtgataacctatgaccatttgaatttctcgagagcatccgttgaacaatgttgagcgttttaataaatgatgtgcctgaatccgacagttcgagtgaaaagttatgacaatttcatttactcaagagcttg

SEQ ID NO: 74933 - DNA, 349 bp, Glycine max
taacaaccacataggtagaatgatcgttgtcttccatcccggagattggagttgcgtgcacatgacatacgagaggtatcctgtgcacatgatatcttatcttaaacccacgggagatagaccatttcaagtgcttgaaagaatctctgacaatgctcactaagttgatctgccctgagagtataatgttacttccaccttcaatgtctctgatttatctctttttgatgcagatggagaatcctatttgctgacatattcttctctatagggatagaatgatgacgacatgttcaatagctcagtcaaagatccacttgaatgacttgcacgacctatgaccctgtct

SEQ ID NO: 74934 - DNA, 486 bp, Glycine max
  unsure (1)..(486): unsure at all n locations
agcttagaacaaactcaatcttaatgattaaaccatcttctagtgtttggataagcatctttaattctgtagaagaatttttagaagaaaaaaaaagaaaaagagaagaaaaacataaggtggatttttctatacataagacggtaatttataaaaacactcataattttttttaaagatgagttttaacttatgcgtaaactatntatcaattgacttgaactaattaatttttaaaggacgataatgtttttttaaagcttcagcaagcacctcccttgttctgactagagttgtctcaagaaatttgacatactctcaagatgaaggagggttatcataaacatccatggtcataatagcaacaggaggggcctcatcatcaggattcacctcttcaacgatgggttatactcgatgaacgaatgtgaaagtggagtgtggaagctcaacaatgactgaagaagtatgttagatacaataaca

SEQ ID NO: 74935 - DNA, 453 bp, Glycine max
  unsure (1)..(453): unsure at all n locations
tagagaggaagcttcaatggaggacaagaatgagtgagagatggtggcatgaaattaaaggagaaaaagagggagagaagttgaactntgcagtatgcctcacaagtttcacattcatcaaatttatgacaagttttacacatgtttctatatattacctaggtcactaactaaatgaaagcctccttgataatcttccttgggaagctaccttgagaaacttccttgagaagttagaacttagctacacacacctttctaatagctaagttcacctccttgagaagctttcttgagaagcttccttgagaagctagagcttatctacacacagccctctaaaagctaagctcatccccatgtcaaaatacatgataatacaaaaaagtccctactacggagaccactcacaatgccctgatatacaaggctcanaccctatactactataat

SEQ ID NO: 74936 - DNA, 477 bp, Glycine max
  unsure (1)..(477): unsure at all n locations
agcttgcatttggaattgcgaaagccccactccatctttatgattagtacctgacatctcaaacaaacaaatcaaacgtaacaagacaattatagttgctgtttgaatacctcacccactcaagtgtatcacacaattatggcttttctctaatgaaacactcttgccttttaccactctaattccccttgagttcttaggcaattcaagagaatatggccacaacaaagaacaattcaccaatatgtgtaaggtaaggctagagagacaaggataagggtaaccaagaaaaaggctaacaatggttntaggcacacatgaaggaaataaaattcagaaattatgaattcaagaacaatccttcatgcaaccatatattaccttaaagagattttnttaaagttcttcangcatgaaccattcagcccaatnnnttttttntttttaattgtgcttatacgaaattcttcttctttt

SEQ ID NO: 74937 - DNA, 453 bp, Glycine max
  unsure (1)..(453): unsure at all n locations
tgtaggattatggggtacccatcacatgtggtactatgtggcggtcgggcgatggtgcacnaacaagttttccacatccacaatgcgcgcataaacccaccatcccctggttgccacctncaactgagctcacgtactcccacgtagcccatatcctcgtttctctcaacaccgggtccccatcaatcctcccaagcttccacaacatccaagcaaaacaacattcacacagcacaagctatcacagccaagccaaacagagcanaggcagaaaactctgcaaaacaccaaccaaaaatacagcttttaccactcanagacgcccagtacaatccttctttncaaatcgnntaccgtggatcgactcaaatnttactggaagctctaatacataacctacatttgaccgtgggactatagcaacatccgactcatctgactgtctttcacaac

SEQ ID NO: 74938 - DNA, 414 bp, Glycine max
  unsure (1)..(414): unsure at all n locations
agctnnttttatagatatgatctacatataagcttgttctatcttacaagtgcttatgtataagcttattttgtgataatttaataccaatatatagatgattatttatgttagattctataaaaatcgaatctaatttatttatatgatataagtatatctttaatgtctaatctcacatttataacaacttatttaaaaatatattttgtaattaaaagacacaaattatgttntaataaacttaaggttgactttttatataggttaccatgcttaacgcttaaaaagataaatataaaactctaatatattataataaatttaatattataataacacaaacaacaaatataaatatttattttntaaatagatgggtttgtaggctcacaagatntttttattgacaca

SEQ ID NO: 74939 - DNA, 468 bp, Glycine max
  unsure (1)..(468): unsure at all n locations
ngtcaacaacaatctanaagctagtttctgatgtggccaagcacaataactatgttcccaacatgaagggaaaatgattgttgagtctttgaattctacctanaaaggtttgtctggattgaatctcctctttataggcagataacatcattctaagttctagcctataatttgatgattcctagtcagagaaattcagactagcttctggatcaaccaataaaatatcttcagtctggaaggtcacgtcagactaagaatgatcttagggaagaacaacattagatgtgcatagaagacttatcaactgttgtaaattcatggtagtggagaaaggtgtattagtagatgcaactnttctacttttccagatgatcgcgctaggaggataaaccttgtactttgttggcaaatgctcaaagataatgttgttgggattgngaactgtagtctgttaaggaggaagca

SEQ ID NO: 74940 - DNA, 447 bp, Glycine max
agtcacctgcggcatgcaagcttggctgaataaatagaagtttttctaggataaatgctctcttatgaccctaattcttgagatcccagaagaatcataatttctttgattagtcaggccacattacaagccaataaaggtccttagtgatccaccaagtgtaagcaagatagctttaactgagataaagtgcagaattgggaacattaattgcatgtcgtaggaattttaaacactcatacaagacacttgtgcatagagagaaacactaaaaccttgtgaggaaaactgaggcaaaccaagctgatttatttctgctactaaccaattctatctcaatgtttgtttatgcttccattgtaagatcatggcaaatgcaagaagttccagctaatggaatttgaaaatggcagttattacaagtgttggagcattcgaagtctactc

SEQ ID NO: 74941 - DNA, 232 bp, Glycine max
  unsure (1)..(232): unsure at all n locations
tccttcacanataatcatcacacagcagataactnacataaccacccatcatatctcccaaaaccccatacccacgaaaattaagagagaaagaagtccaccccaacctgagatttcgaagttccactcgtagccacgcgcttcacgaccccgaaaatgctctcctttcacgatttggggcagaaatgagcaccaaaggttgaagctatgtgtggagcttcaatggtgaatg

SEQ ID NO: 74942 - DNA, 490 bp, Glycine max
  unsure (1)..(490): unsure at all n locations
agtcacctgccgcatgcaagctcgttagtgtgtgtttaaatgtctaanataaaagataaattatgtaatatatgtttctttgaagaaaaatttatcagtgaaaataaaatattttgaatatngaatttgtagtatttttttaattagattaggttggtgttaatgatttattagtgtgttaataattcatgaacgtttcaactttcatttaaaaaaattagtagatcatatttatttgaagaaagtattttgagtatgaaatttattttaatatgaagttgtagtatttttttaattagattacgttcatttttttgtgttaaaaattgataagcgttcaagttgaaagtgttatttgatgatgttntgttgtttcttgtatcatatttaatttaatatatttgtagtaattttgtaattacctatttttcatttgaagttattattgttaagagtaattatttntactacctaacttcgtcatgaatta

SEQ ID NO: 74943 - DNA, 492 bp, Glycine max
  unsure (1)..(492): unsure at all n locations
ttcgattcattctatgtacccgtggtggtccacattgtgtntcgtggtattttattctcgttntatttactttntatactcccntttgacgtgcttaagccattttatttaagtcatttctcgattaaactaaaaataaaataaatttccaccgatcgttcgaattgtattatccgttaacttcggttaaaatgaattccgaccgtttggtcgtgccgtaaccacgttggaaatcaaaaaagaggtaaaataataatataataatcaaaaaaatatcttttagtaaaataaagagaanaatcaattggacgttttctctttgggatttctcattcttaatcgaatngactaataactaaagtgaaactaaggctaanatcaactcgcctagtcaagctcgtccataanaataggtttttgaagtttgtcatttcaatctcttactaagtaaaatggatcattttcaaggccaacgccttanaatgatcacct

SEQ ID NO: 74944 - DNA, 394 bp, Glycine max
  unsure (1)..(394): unsure at all n locations
tatttgcaatagaagagaatagattcaaatatgcaatgataaagctgaacactacatcaccaatggattaaaagaaaaagttccagataaaaatatagaagagatatgtgatcatcattgcaattggagtaaagtagtgatctttctgctcttatgtcttggcaaaaaaatgcatttggatttttttgcgaggccttcaaatatctgattatacattntggtgtgcatgacttacattgattgaatatattaagtcttacaagaaggatctttctcaaatcattctcttgagatccttcattaaaattatttcactagatcatctcatcctaacctagaggttctntatctagctagatacattatacatatatatgtatataagaaaatatca

SEQ ID NO: 74945 - DNA, 483 bp, Glycine max
tttaacacattgttggttagtgtgtagttaatcttagtcgtgtttccacaagacaagtttagagacattgagagaatcataggtctttgtattcgttgatcaagtcagcaatattagggtaggagcttttatgctttcttcaagaattcatcaccaaatttgtgaatatatgacttccctaaaggtatggtagagtagaattgcatgaacaaagtggacttatcacttgcaacacgcattagaattatgtacatgaaaaaattaccaccatatacatcatggtatatgtggcctggtacattagacattcatgtctcttgtattttcttttcaaatagaaactgtcatgttaaacattattgataaatccacacagatattgtatttatgtatttgctaatctctcacatctgtcatattgaaccgaaatataagaatggatgaagatctatctattatcggaaaaatcaaatatactacgat

SEQ ID NO: 74946 - DNA, 397 bp, Glycine max
  unsure (1)..(397): unsure at all n locations
gcaccgccgctgcagcttggctcattcnagtcttgatgtggcttgtatatccaaatttgttaatttccggccatgctcacgtcagcaaaaactacaattaagcacgatcatctcaattaagcagcanaagctacaattaagcaggatcatctcaagcaaaaactaaaatttggtggtacatatctctttggaggtacatttcgttgtcactatgttaaaataaatactctaaacgtgagactatcttgttctaaacgtgctcaccgacgaccatacgttaaggtttgagttgttctcaaaacctttgaattagtatgagtctaaagaacgttgatatataaaagaatatatgaaattgtgcttataaagacaaaagaatgaatactcttgatatatt

SEQ ID NO: 74947 - DNA, 481 bp, Glycine max
  unsure (1)..(481): unsure at all n locations
gacagtgcgttcttacccgttattgaaagttaacactctcaacgacgttagcttctacgacagtcgatgaccgtctntgtatgtagtttatgaccgtcgtagacaatcattgttttagcaatgtatgctctgtcgctttttatagtttagaaaagacctaatgactatatttcccatacatatctatttttgttcgtaagcgtttctagtaattgcacaatagataatattcttccaagaggagatagtccttatataaggagaaaatgatctacatggatttagttgtaataaagagtttatttgtttataaattatcagtctagaacttttataccgtctactaattaagattatttaaatatgatttttacaataatcatgcaacatctaacagcattttcatacgtgtcagtttatgattgaataatatgtatatatatatgtagcgagtgtgttgaattaaaatcttattaatata

SEQ ID NO: 74948 - DNA, 496 bp, Glycine max
gcttgcttgtgggacttctatggaggctggatctttgagcttcaatgatgttctttaatgatgattctccaccatggagatgtagcggaagacaaaggagaagaggtgagaggaggctccatccactatggaataagccatggaagaaggagcttcaccaccaagatgagccttggataagaagcttggagaggatgcttcaatggaggaaaagatagagggagagaaagagagaggggggagcacgaaattgaaggaagaaaaagggagagaagttgaactttgagatgtgtctcacaagactctcattcatcaaagtttcaacaagtgttacacatgattctatttatagactacgtagcttccttgagaaaacttccttgagaagcttctttgagaaaactttcttgagaagcttctttgagaaactttcttgagaagctagagcttagctacacacacccctcttataactaagctcaccttcttgataact

SEQ ID NO: 74949 - DNA, 464 bp, Glycine max
  unsure (1)..(464): unsure at all n locations
ggattgtaagagaatggatgggaaagtattcaagattattgtaatgcanaacaaagccttgcttttatagactcttcatgtctggtcaagaaaaccattagaagagttatgacttttagaaaaacttaaaaaccaatttgaaaaagttaaaaactatttgaagagttacatctttggattgtattcagaaacaatcattggtaatcgattaccaaattagtgtaatcgattacacaaagcttttatgtgaaaggatgtgactcttcacatttgaatttgaatttcaacgttcaaaggcactagtaatcgattaccaaaacattgtaatcgattacaactttttgaaattaattggaacgttgtaaattcaatttgaaaactttntcaaaaataattggctactggtaatcgattacaacaatctggtaatcgattaccagagagtaaaaactctttggtaacat

SEQ ID NO: 74950 - DNA, 462 bp, Glycine max
  unsure (1)..(462): unsure at all n locations
agcttgtagaatggctagacatgatacatgtcagggtttggtttggttcaaggataaaaagggatgccccacattatttccatgacacaaaatgcaanaaaatgatgatttggaaactntatgcaaaactggtcatgcatgcacctatgcggacactcaagtgtcaaatttttatggtcatgtgatgctagggctcaggattcatttcctctattntaatcaacccaatgtttccaaaatatgttcttttatcaatttgtgcattcatccgagtccatttcgggcgttcggggaaatttcacagcattcacccttcaggtgtagacacattttccataaatgggttatgaatcaatgaactctttttggaaatcgtctcttttcaaaagcatgtcggttttagctagacaacttattttctttttttctccttctgttgtctttatcgttttatcataacat

SEQ ID NO: 74951 - DNA, 448 bp, Glycine max
  unsure (1)..(448): unsure at all n locations
agcttatagagtggatgttatatgtccttcanaaagaatatcaccctcgacaagatgtntttaaacaagtaaggaatcatcttgctatgaataagttaattgtcttgttatgaatcctctatccctcccaagtataaaagaaaattaanagcgcatagattgaatcataattgtaacctgcaaaatcaaattgcataatgcagtaaaatatatcaaacttgtatttgacatgctaaccattggaatgcatagttcttaattatattaatgtctcatanattcattttaatttaatccttaggttgagaaaccacattcactcaaggcttaaccttactnagtattaggattggcctttggattaagttaactatagtgagtagggccaattaatggggaaaaagaagagagagagacctaatngagtgaaaaagacttgagataagag

SEQ ID NO: 74952 - DNA, 465 bp, Glycine max
  unsure (1)..(465): unsure at all n locations
ntgcacccatggttcacgtgttcaagctntatttcagttctgaanagcctaagcctgcacctatggtttacgttgatggctttcacggtctgcaccctgcaatgtttagttttcagttctgaaaaggctatactatatagcatgtgaacgttaaaaaaaattgaacgttggtgtttaattnttcagctataaaaaaaatgttgaactcattctttacgcttacacagcttactttgctttctctttctttcttcttgagtntgagagattattagtgttgtgttgtgcttgctgtagctgtttgtgctttcatccttcaagtgccctttaagtgcccttaaattcctggtatgtattctcaaagtaaatatgttaatatatattataagtttaagttagntagtattagtattaacaaatattctaagttagctagtatgtaaatagtaggttagttattattaa

SEQ ID NO: 74953 - DNA, 429 bp, Glycine max
agcttgtaacctattatgacttttatgaagagcaactcttatcctatggccactgaatttttttccttatcttccagtgctgcctttactcttaggccttggccaaaagaatgagtatcatatttatatgtttgataataataataataattttattttttttcttgatacatgttaaagacaacaacataacataagttaaaaagatttaatttcagttgattgagatggatatatgagctataataagctttttaattgtcactgattaaaaaaaataagagaactaacacaaacttttatatatgcatatcaaattgaaacggtaacataatgactcctttttcttcaatgtgcttttttcatgagagatcatcatcaattgacatggaatcatgtgtgcctccaggtattatattcatcccacag

SEQ ID NO: 74954 - DNA, 477 bp, Glycine max
  unsure (1)..(477): unsure at all n locations
ntacaagtaggagaaagaatgatgtannaaaaatgagataaagagtttaagcgaganatcaaacttgcgtatcgatattntattccctacaatttacctaattaactcaaggagacactattgtacttttatggtttcaaattatgtttttctattntaacttcagcacgttaaaaatgaacacaataaaaactcttcatttaataaaatatagatgatttgaaaataaaatacatgaatgctgtgaatttgtacaataaattngttgagagttattttttatttttntaaaaagagaaaccttgttctggacatggtttcggcttcaattttttatttttatttttacaaaaaattatacatctggctggtttaagttatattatgtgcaacttatcctttaaaaattntaagctaattaaatctctcatttganaataaagcaaatttgattatctagcaaccttttttttaatc

SEQ ID NO: 74955 - DNA, 410 bp, Glycine max
  unsure (1)..(410): unsure at all n locations
agctntgtcagattggtcttcgtcagtgaaaggatctatgtangtccgaaaagaggcaaatttgatcatcctactatgacgactgagaanactggtgcaaatgaagagggtgagaaagagggagaaacccatgctgtgactgccattcctatacggccaagtttcccaccaaacccaacaatgtcattactcagtcaataacaaacatcctccttatacaccacccagttatccacaaaggccatccctaaatcaaccacaaagcctgtctaccgcactttcaatgacgaagaccacctttagcacaaaccaaaaaacaccaacaaaaaggaattttgcagcaaatagcatgtatggttcacctcacattccgttgtcatatgctaaactngatcccatatccactcgat

SEQ ID NO: 74956 - DNA, 488 bp, Glycine max
  unsure (1)..(488): unsure at all n locations
tagaatgcagaagaagcaacaacaatcaatntaataatgttctataaacatgcaaggcaaaattgattgcaataacataaatgagataagggaagagagaatgcaaacacaactttatactggttcggccacttcccgtgcctacatccagtactcaagcaacccacttgagatttccactaacttgtaaattccttttacaagttctaaacacacaaggacaacccnttcttttgtgttagagattctatacaacaagagactcacagtctcttaatcccttagagaatgagaagaagaagaggaacaaatctctctagaaagagatggattntacaaattgagcactcaattaattccttaatgaattgcaattgaattggccaaggaattcttaagaggataaaatgaaatggctctntgagaggataaacactntgttgttctgaacatctctaagcaatttcgtggttaagtcacatatatat

SEQ ID NO: 74957 - DNA, 418 bp, Glycine max
  unsure (1)..(418): unsure at all n locations
agctnttctntctcaatcaacctgtctattgcctaacaattctaatttcaaggtcgcattcttgttctttctttgtctaacatacatacttgctcaaacttatgaaaagaaacacaaactccatcacaatcatgcattcaatccaaaatcaattcataacaccaattttcacaaaaagataaaaatgtttcactgcataatcatccaagtcaagttaaactattccatatgcttcaaaacaagcatactagctatccacaaacaaaanagcagtgtatataaacattaaccaaaataactaagacactaaactgatatataataattatataaaaaatatccaaaaagcacaatcctcaggaatntaanatccctgagacaggtcctgtgtgtcctgtgtctgagcatcctcctcatc

SEQ ID NO: 74958 - DNA, 487 bp, Glycine max
  unsure (1)..(487): unsure at all n locations
cttgcatcctaganataccaatattntagtagcccagcctcattactagccaatataagtccttcttattcaatctgtgtatttctgactgtatggcatgagatgaagcaaaaagattggacctcttgttagttgttattgctaaatagcttaaacacttgtgcgtgagtgatgcagtggccatgagaatttggttaagtatctttccatgaaatctgtctcctgcctagcttcatttagttgtgttgcttactaacatgttctcttctctgaaaaactgcatgccttgtgaaaagcaattgataaaggcatttttgtttcatttgttatcatgtaattaatattttgtgaaccatacacctttgtacagaatcactgcattttttgtcacttgcggaccaatgaattattctttatttgcttgaggacaggcaaagctataaatttgggggaaagttgtagttggtcaatacgaactaactttatg

SEQ ID NO: 74959 - DNA, 468 bp, Glycine max
  unsure (1)..(468): unsure at all n locations
agcttctcgatatattatgtgcctgaatcggacttctcgtttgaaaattattaccatntgaatttctcgagagctttggctgttcagtttcgagtgtctcgatatattatgcgcctgaatcggactttngtgtgacaagttatgaacatttgaatttctcgagacctttcggtgttcaatttagatcgtctcgatatgtgatgcgccagaatcggacttccgtgtgacaagttatgaccattggaatttatcgagaccttccggngttcaatctcgagggtctcgatatattatgcgcctgaatcggactttcgtgtgacaagctatgaactatggaagttctcgagaccatacgatgttcaatctcgagcgtctcgatatactatgcgcctgaatcgacttctgttagacaagttatgaccttttgaattatcgagagcttcggtgtcaattagagcgttccatatg

SEQ ID NO: 74960 - DNA, 409 bp, Glycine max
tctcgatatattatgcgcctgaatcagactttcgtttcaaaagttatgacgatatgaatttctccactgtattccgtgtgacaagttatgaccatttgaatttctcgatagcattcgttgttcaatttcgagcgtctcgatatattatgcgcctgaatcggacttccgtgtgacaagttatgaccatttgaatttctcgagagcttccgttgttcaatttcgagcttctcgatatattatgcgcctgaatcagactttcgttgtacaaagtatgaacatatgaatttctccactagattccgtgtgacaagtgatgaccatcttaatatctcgatcgcgtttgttgctcaatttcgagcgtgtcgatatattatgcgcttgaatcagacttccgtgtgacaagttatga

SEQ ID NO: 74961 - DNA, 480 bp, Glycine max
  unsure (1)..(480): unsure at all n locations
agctnggcatangagtagaaactgtctgagatagatttccatctgtgcaagaattgcactacacactgagtcacatngtaatttatctctatgtgaggtttactctaagtacatgtacccctagggagattagcataataatctaggaagttagcacactaatctagatgtttaagataagaattatcaattttagcaaaagcattaccattttgcttaagtctactttatccatttctggttaaaaaattcaaaagcaaaaatacccacttatagcaacctttgacacgttcaccatgaccatcanatggtcattcatgcttgtcaaattgatctcattactagccttaagccatatctctccattctccaaaanatgaaaacatggaacctncattcttcaacctcttgcacgagttcttcaaggaagcaaagggatccatttcattcttcttccaagctacatactaatggtcttga

SEQ ID NO: 74962 - DNA, 475 bp, Glycine max
  unsure (1)..(475): unsure at all n locations
tcatntatntagaattttatatatatatagatcataattatnttgttcaattaaatcaattgcatcttgtaatcactactagaaaaatagttatttacgatgcactaattatgacagttgctcgaaaatgttgttaaaagatacgtggtgacaatgttgtaattttgaggaatatgtatgatgacggctttcaaataaccgtcttcaaatggcgagtttaacaacgtctatttgaaaaactgtctntgaacatggagtacaaaaaagggttgagaaaaaaccgtcgtagttgaattgttagtacaaagacgattttacctaacttattctcaccattcctttgccactaaccctcctctcacttgcgcataaccttcttctctgctttcatttgtcgttgtccaagttgtggcttccctcgaagggtagaattgaacgactccctcaacttccncttagttttctatttctcttc

SEQ ID NO: 74963 - DNA, 458 bp, Glycine max
  unsure (1)..(458): unsure at all n locations
taagtcacctgcggcatgcaagcttgngctgaataaatagaagttntttctaggataaatgctctcttatgaccctaattcttgagatcccagataaatcataatttctttgattagtcaggccacattacaagccaataaaggtccttagtgatccaccaagtgtaagcaagatagctttaactgagataaagtgcaaaattgggaacattaattgcatgtcgtaggaattttaaacactcatacaagacacttgtgcatagagagaaacactaaaaccttgtgaggaaaactgaggcaaaccaagctgatttatttctgctactaaccaattctatctcaatgtttgtttatgcttccattgtaagatcatggcaaatgcaagaagatccagctaaggggaattgaaaattgcagttattaaaagtggtggagcattcgaagtctactctcatttt

SEQ ID NO: 74964 - DNA, 461 bp, Glycine max
  unsure (1)..(461): unsure at all n locations
ccttcacaaataatcatcacacagcagataactaacataaccacccatcatatnctccagaatctcatacccacgaaatttaagagagaaagaagtccacccaaacctgaattttcgaagtcccactcgtagccacgcgcttcacgaccccgaaaatgctctcctttcacgatttggggcagaaatgagcaccaaaggttgaagctttgtgtggagcttcaatggtgaatgagggaggaagaaaagcaacgtgagggagagggagagagagagcttctgaanatgtggcgctgagtgatgagagagagggttgctttttggttctaataaaaggggtttctcttttttctattatattattcaagctctgccacatgtccctattttagtggagcaagaagggcccactntctctttttgactgtgacccatactcagtcacaaaagtgaggaanatctga

SEQ ID NO: 74965 - DNA, 491 bp, Glycine max
  unsure (1)..(491): unsure at all n locations
agtcacctgccgcatgcaagctngtttntctnntgctgaaataattaattagttttgctattttaatattacttagttattattaatttatggtttagtgttaaattaattctggtaaattattattttgtgttttagaataatagtgtttagttattattaatttacagtttaggtagataaattattatacatgataaattaattctcttaaattattattttatgttttagaacaatagtgtttagttattattaatttaccgcttagttagataaattattatacatggaaaattaatttttttattaaattattattttatgttttagaataatagtgcttagttattattaatttacgatttagttacataaattattatacatgttaaattaattttgtaaattattattctgngtgttagaatattagtgtntagttgtagcatgaacggttcaatanacagtggtcactctcgtgaaattat

SEQ ID NO: 74966 - DNA, 159 bp, Glycine max
aaccactgataaaacaaatgaatcattcgtggcctgccgcgatccaaatgctgaatcttgtgaagaccgggcattggtacttccaagacctgtattgcgtgatgccagaacaatagcacattggttgcctggattgaggtctcatgtatgctcgaaaaa

SEQ ID NO: 74967 - DNA, 360 bp, Glycine max
  unsure (1)..(360): unsure at all n locations
taagaagtatattgaaattaatcatgttatgacgttatattaattntataggtttgatgcagtttcaaaaatctatgttcctatgttttcagatatgtttttccctctcattntttgaatatcaaaatttgatttcgatcttgtttaaatagtagtgttttgcaaaaagtctacaagatagttttcaaagttcatacacatacacatactaatcaatcccctttgtagtatgtttcttttatctcaaaagtattctcaataaattaaacaacattgtatttcacaagttgtaaagtatacgatctgaaattcagacatatgtgtgtcggtgtggcaagtacctaattttggaatatgaca

SEQ ID NO: 74968 - DNA, 480 bp, Glycine max
  unsure (1)..(480): unsure at all n locations
acaaccttagtcgcaatagctacaagactcacataacacctgctatgttcactttgttcttcagaagcaataatcctttaattattcttctaagttcttccctctaatctaaagggatggacactacaccttttgagatgctctctattgagacttctggcacgaacatgtttatagacactcttacatatttaattttactttgactccatctagagtgttntggctaaagaagattcttgttcgtggagttagccctagtgaccaatccatttcagactatatatggtatcgagatattggtttatatattttatatacatgagacatgtcaactattatgttattagttctatagcataataatagcctaatgataagtgattcgttcaatggttaatcaagtgagacttgattgtgagaattattgaacaatgaaacattgtccaaaagtatctatagtcatgtactactggtgac

SEQ ID NO: 74969 - DNA, 421 bp, Glycine max
  unsure (1)..(421): unsure at all n locations
agctntataagtgcgggtctgggagacgaaggtcaagtggtcgcgatatgtttatatgatgctccaagaactctggatntggtccgaccatgccctcctgatttccagctgggaaattggcgggtggaggaacgccccggcatttacacaacaagcataatgtaaacctttacggttttaaaagctctatagttgggcctatgctttagagttttcattttgttaaggctttgtgtctttgtctttgaatttataatacaaagatctttcttcatctgttcctggtctctacccattctcattcatttgcatgtttacttctttttctgaaacggcagatccgatgacgagtcccccgaaggtactaatacctgtgacccgtctatcaatttcgagcaagatatgaaccatacggaagatg

SEQ ID NO: 74970 - DNA, 501 bp, Glycine max
  unsure (1)..(501): unsure at all n locations
gcttgcccaggcaagctgatgcttagccctaaagaaatgagctcgcctatgcaagctggtttcttatgtatgaagctatttcatggctcaggtgagccagatgctagcctgngcgagctatggtctagaaagatccaaaaaagaccattttgcccccttccttggtatgtttttgttttattgatcaaaacactgagtgattccttgcttcacactgtaactgacgccaaatatcgtaatttgactagcaagaatcaaaatatcatatcaaatgatattccccggacaaaattanggtctgacagttgtccctctttacttatcttttattgaaaatgaaaaggtaagtaaagataaggacactaatttcatcagagcgatcttgctattcgaaaccggacaccagagaanatagaggaagtgaaatcgaaaaagcataaagacattgacattganatatcgaaagcatctagcanaagacatcgcagtctttgtaaacat

SEQ ID NO: 74971 - DNA, 452 bp, Glycine max
gcttttatgcaggctcatcttggtggtgaagctccttcttccatggcttattccctagtggatggcgcctcctctcacctcttctcctttgtcttctgctgcatctccatagtggaaaatcaccattaaaggacctcattgaagctcacagatccagcctccatagaagctccacaagcaagcttccatcagagaggccctgacagactcctcacagtctaggccttcggggtaaatacactcaatttgagtgctcctttaagtctatgtctatccacatgggtggagcattctcacaaaatagagagacctcgattgggctccctataatttcacttaatgagagtgacctgacttacccattgtgaggccagtcttgtcatgtactcctatgtgtccaacgagattttccactgaaatgataccacatgatgtaggctgagtctagatat

SEQ ID NO: 74972 - DNA, 469 bp, Glycine max
  unsure (1)..(469): unsure at all n locations
cctaaaggcaaaagcataccaagcttaactatcaagagtataagctacacacgatgcttaaccactcaagacagcagcaaaccaataacagtgcttaaccaccatataggtagaagcaacatagcttaaccatcgagagtagaagctaaacatggcgcttaaccactaagacagaagcaaaacaatatttgaatgcttaaccaccataaaggcagaggctacacaccaatgcttaaccaaaggcagaaatttgacatcaatacttaaccaccatggacagaagcaaatgactgttttttttataaaaaaaaataaacacctaaaacctcttgatgaatggaggggacagcaatagtnaacagagaatatatatacagcagaggcaacacaccaatgcttaaccatccatggcagaaatctgacatcaatgcttaaccaccataaaggcagaggcaacacaccaatgctt

SEQ ID NO: 74973 - DNA, 495 bp, Glycine max
  unsure (1)..(495): unsure at all n locations
atcctctgagtcacctgcggcagcaagctataaatcaaatctttttcttttatattctaactgctcttcctttctcttgcataaatatcatggttcttccattggtgataatcatggaaggctaaacacttaatcgattcaaggatctattccaagcaagatcgaatttgagttctagtatatttctagtttgtgtgaatgttcatctttntcttcaattctattatttattttcatgattatgattatacatacaattgaaaacggattaggttatgaatctatttcctaatttcaaaattcaatcacagattgtttggatatttttcaacctaatttgcgatcttaaacaatttagggattgattccgatgaactatttttaatgcattngactgaactttcacaacatcattcgtagtaattgtgataattcattttgcattgatntggtgaattgaattgatgctattaaacttgattcgattttgtcttg

SEQ ID NO: 74974 - DNA, 379 bp, Glycine max
agtgacctatgaaactcagctcgacaatgtccctcgtggatcatcatataaggatgtggcgaaacggttttcgattgcctgaagcagcgccggccatgacataatgaagccgtttctgaacatccactggaaccagctgagtgccggtccatcgacgtagaaagaggccacggtaatgcgctcctcttccggcgttccctgatattcgaagaactgtgatattttgaagatccaaccaagtggatcgtggccgtcaaatcgagggacgtcgagcttgactggcggtctggaagggtatgaaggttgagttgccatcggagtgagggtggtgaattgcgaaaggcgttcacacatagcctcgactatgttggcgaggtct

SEQ ID NO: 74975 - DNA, 472 bp, Glycine max
  unsure (1)..(472): unsure at all n locations
agctagaaacatgtaaggaagggtttcgctntcataccatggaggttgntcaacataaacttcctcttagattaagccatttagaaatgtgctttttacatccatttgatatagcttcatattgctataagcttcaaatgaaagtaagatgtgtattgcctctaaatgagctacaggtgcataagtttctttgtagtctattccttcttggtgtgagtattctttagcaactaaccttgctntgtttttcacaacctttcaattntcattcagtttggtttgaaagactcatttctctccaatagctttctttctttttggaaattcgactgactttcaaacatcattcctctgagactgatcaaagctacttngcattgctntaacccaattgtcatcctgcattacatcatcaatgtgtttgggtttcatttcagaaatcaatgcaatacggccttatgttctgagtgat

SEQ ID NO: 74976 - DNA, 422 bp, Glycine max
  unsure (1)..(422): unsure at all n locations
gtggacctagccacaattgatgctttccttgcatatcaccatagcacggagagcccggtggtagctatcttggcggacttatttgatacattcgactgaaggtgcgagaagaacagcacacggattgtctgctgtttacccgctctntgtgtgtgattggtttcgcacctattacaacaagacataaggcacccatgtccactccaaagttatcgctcgtgcatggaatacagacgagtagattgcgaccaatactaggctgggataggaggcagcacaatccactggtttcctccatggaatgaaagaaaggagggagttctcttctcatgtgaggattacccaaacgttccgttgatagggacaaggggttgtattaactataatcctgcactctccataagacagatagggtaccccat

SEQ ID NO: 74977 - DNA, 384 bp, Glycine max
tagcttcttatccaaggcacattcttggtggtgaagtcttcttcttccatggctgattccctagtggatggtgcctcccctctcctcttcttcttttccttctactgcatctgcatggtggaaaatcaccattgaaggacctcattatagctcaaagatccatcctccataaaagctctacatgcacgcttgcatcaagtggtatatggttttagccttgtatttcaaggcattttgagtagtctttgtagtaaggactatttttttttgtattttcatgtatctatggaatgggggtgagctatcctactatagggggtgtgtagctaagctctaacttctcatctcattgaggagagcctatctattagagaggtgtgtgta

SEQ ID NO: 74978 - DNA, 456 bp, Glycine max
  unsure (1)..(456): unsure at all n locations
tgtacctctttcanacctattgctatcaatatctatgccaattattcatgatgcaccaacagcttttgcgtcctctgcaacctgtaagtgtaaattctgagtcataactcatattggaagccacaagaccaagcaaaaatttgtcaccctggtaagaaaaaaatatttaatcagctgcatttaacaagtttctcttgaccacactatgcgttcccacatgcaaatggaacaccattgtccactagcatttcatgacttgcttacaggctatgaacagtgtcaaaatgatgcaaagaagggataagcactttatacttaacatgcaatgtctcaatacaattttcatattacanaaggacataacttaccagttggaacaccacatccaaagagacaaactttgtccaaaggagctttgggatcgatcttagctacactaacatcatgaacaacagt

SEQ ID NO: 74979 - DNA, 379 bp, Glycine max
agcttcttatgtcatgacatctttcaaccttcaagtttttgaatgtctgacaggagcataaggggtgttactcctgttctgattttgcactctgaaatgatcacatccttgctgaaacaaacttcagcagattagtaccatggagatataccaggagactcttctcttgctaactgaagaaggtaacttctatgtccatattcatgcattgttttcacataggcattgagatgctgcatgttgtataacgtaccagcaaatgtttccaactttcgcacgcatgatatgtgttctactttcacgtttatcttcctggaccaccaatgaagaatcagaaactgtcggtgaatcgattttgctatttcgtttcctgttgaca

SEQ ID NO: 74980 - DNA, 440 bp, Glycine max
  unsure (1)..(440): unsure at all n locations
ctgagactaacctatctntagaacttgacatcgattgaaacaatttcttaaaatatatattatagcatatattattggcgttcccattgtgttaagtgtttaaagcatttagaatttacataaaataaacagatttgagtaaaaagataataattaactactatcatgttgaagcattttttatgtgtgcgtgcatgttgaagttctaaataaacatatacttcctgcggtctggttataagagacacataactatattatgttgattaaaaaaatagttaacttcataaaattgtgccaatcttaattaaaaatagatgtattaactcttcatttgtcagattgaataagataaaagtatttcaaatttgctatgtgtaagaccacgatctatgattatgttcttataaaaagactggaagtgaaataatgtaaaatct

SEQ ID NO: 74981 - DNA, 321 bp, Glycine max
  unsure (1)..(321): unsure at all n locations
agcttattcagcctcccattaatagggccttcatatataagtattgtatgccaaggcaggcacaacagcatggtcaggcacagcagcagccagccgcagatgcaccgctgccacctctacgacaaccaccatctctggagtccatctctgctcacatgcggaggatagagctccagatgcacgcatatatgcagcatgtgatcgactagcaggcagccaatcataggggtcagatacaactgaatgagagcttttaccagtacaccctgcatcagcagtgccaggaccncagtccttacccatggcctactcccgagcatt

SEQ ID NO: 74982 - DNA, 385 bp, Glycine max
  unsure (1)..(385): unsure at all n locations
tcacaaatgaagactagaatgtgtgagtcttaanatctcattctacatcattgtttntgaaagcttgaaagtaaaaatacaagggtgctatttatagataaaacaattattactacctataatcgattaaattggcaatgtaatcgattgtcttgaagaagtaatccattagattctcatttcaattgattaaagcattcttcccaaaacctagaaagctttcaagaacaatgtaattgattagattattgatttaatcgattaaagtgttcttgatcacttctgggaacactttcaagaacaatgtaattgactactatacccacataattaattaaagcagagaccctatgaaaatagacatggtctcaacanaactatgtaa

SEQ ID NO: 74983 - DNA, 481 bp, Glycine max
  unsure (1)..(481): unsure at all n locations
agcttctaaaggtctaagggaggcgttatataattatggttacaacatttggagaaagaaagtgctaagactcattaagtgtaattntgttcacacaatgaaaataaaaagtgtagaaagtagatgttaaagtgccgaaggtaaattgcctttgaatgacccaatgccttactatttaagtagattttattaaaagtggtgatgtgacctattttcttaaaaacctaacctctgaacttagtgcagatgaactcaactcttatttttattttctaagcctaaaagctaacaccctgttagggtgagtctatcataacagacatataacaatcaattaattaattaactaattatcagaacacataatagagcataatcataattcagaccatttatacgtttttaataaagtcaatcatgataaacagtcaatgatcacatattaaagtaatcatacagaacaatgttaaaataattaaac

SEQ ID NO: 74984 - DNA, 438 bp, Glycine max
  unsure (1)..(438): unsure at all n locations
tgagatgtccctaaagatgagagaagaagtgaataagtaattcgacgctggctctctggctgtctctgggtacccgggatgggtttgcaacatcgttccagtccctaaaaaagatgggaagatccgaatgtgcgtggactatcgggatctaaaccgagccagtcctaaagataactttcctttgccgcagattgatatccttgtagataacatgaccaattttgccctatattctttcatggatgggttctcgagctataaccaaataaagatggcaccagaggacatggaaaagatgaccttcgtcaccatgtgcggaactttntgctacaaagtgatgtcctttgggcttaaaaatcaagggcatcttactagcgggctatggtagcattattccacaacatgatgcacanagagattgangctacatggatgata

SEQ ID NO: 74985 - DNA, 332 bp, Glycine max
  unsure (1)..(332): unsure at all n locations
cacctgcggcatgcaagcttcanacttctcataaaaaagaagacaaagtaaagaaggtgtgtctcctagctctaagaggtgagttcaaatccttacatatgaaagaatccaagtccattntcgattatttgttaagaattctcattttttcaaatcaactaaaaagaaatgatgagaaattataagatgtaagaattatggagaagatactacgctcgttagatttcaaatttgagcacattgttgtgacaattgaggaaaccaaagatttagaaactatgatgatataacaacttcatggatcactacatgcactacgaggagcaagagat

SEQ ID NO: 74986 - DNA, 481 bp, Glycine max
  unsure (1)..(481): unsure at all n locations
ttgcagctagctgataataattctataggccaaatacctcanaatgtttgcctcggcggagacttgaaatactttactgcggtgaataacaatttcactggccaaattcctgagagtttgaggaagtgctacagccttaaaagactcatgcttcagcaaaaccttctatccggagatatcacagatctttttgatgtacttccaaacttgaactacatcgatctgagtgacaatacatttcatggtcacatttcacctaagcggggaaagttccatagcctcacaagcctcatgatctccaacaatacattgtcaggtgttattccaccataactacgtggagcgttcaacttacgcgtacttcacctatgctcaaaccatcttacaggaaccattcctcaagaatatgcaacatgaccttcttgtttgatctctcgatcagcacaataatctctcaggaaatatccctatagaaatatca

SEQ ID NO: 74987 - DNA, 454 bp, Glycine max
  unsure (1)..(454): unsure at all n locations
agctngcaagaggattggtaaaggggctttcatccaatgcctctatgtcttatatctcaaggacactcttgnatgcaaatttacttttcctattatcaattcccattcaaattccattccttgtaaaaatgctcatatttggcattctagatttggtcatatctcagacaaagttttcaaacatttgaataataaaattggtatgcacctttctcctaatttctcttcttctaattgttttggttgtcctctcgctaaatttagaagattatcttttcctaactctaaccatttatctaaattaccatttgatttaattcactgtgatatatggggtccctatgctcaccctacgaatgagggaaggagattnttccttacattggttgatgattgctcaagattcacttgattatttctgcttaagaacatatctgaagcttaatctatgtgc

SEQ ID NO: 74988 - DNA, 468 bp, Glycine max
  unsure (1)..(468): unsure at all n locations
attttcactattaattaatcaattaataattatcttgtatatgattcttaaagattttattctatacttacgtatgtatatgtacaatgttattaaacttacgtatgtatatcttttactgcaacgccacttaacttatgtatatgtacaatgttatttaaagcttgctgcccatgaagatattacatggcattgtatgaacgcatgtgcacgtgtattttttgcccttcaccttttttttatgttgattgtcagatgggctgcagcttctaatgatatttcactaaatgcaatgatttttccagttgctttgtatttntggcaaataccacactntatggccctaacctatttgtgtcgtgatgacctgctggaggccagggtatgttcttatatctttgtttatagtgacannattttttcatacagactatttcgtgctctgtaatattcaatatctgcctaaag

SEQ ID NO: 74989 - DNA, 328 bp, Glycine max
  unsure (1)..(328): unsure at all n locations
cctattctgctatgataggtggagaagtgattaagaaaaggtgtttactctctttgcacttctctctctctcttganatagctgatgaaaattagttctgtgaatataattcacgccgaggcgctttcgttacgtttacgtaacgtttccgtgagtgatgacgcgaatattctcgggcgttcttcacgattcatggctcgttctttgttttttcagtctttaacgggtaagtacctcacaccgagcttttctattcattatatgttcccgtggcggtccacattttgtttcatgtatgtttattctacgtttcatttacttttaatac

SEQ ID NO: 74990 - DNA, 419 bp, Glycine max
  unsure (1)..(419): unsure at all n locations
ctggtgcgacatcttgactcgctgtccagtctgacattcaccacatatgctgccttcttgtatantcagattgtgaatgcctctaacagcacctgtggcgatgattttcttcatgcctcttaagtgcacatgtctcaacctttgttgccatattctgacttcatcttctttggagaatagacatgtggaagaataacatggtttcttgaggtgtccatacgtaacagctcgtctttgaactgctgaccttcattagaacttcactcttctcatttgtcgccaaacattctgactctgtgaaattacattcaatacttcatcacacagctgacatgatgctgatcatacctgttgtcagacccttcaccatcagaactgtgtccatactaagaagtccatcatgaactatcttggccatt

SEQ ID NO: 74991 - DNA, 395 bp, Glycine max
  unsure (1)..(395): unsure at all n locations
tatttattattagtattatcatacatgagggcgatccctggtgcagcggtaaagttgtgccttggtgacttgtcggtcatgggttcgaatccggaaacagtctctctgcatatgcaagggtaaggctgcgtacaacatccctcccccataccttcgcatagcgaagagcctccggacaatggggtacgaacgttattaatattatcatacatataattaaatacttatatgggtatgggtttctattgtaatagatgtttatgattttgtaatgttatatgacatgacctcgacagatattattatgttgtaattagagaatattattatttaatgagattgtgtgctgagatgttgatgtattgagtngngagctatgaactctgcaatcacac

SEQ ID NO: 74992 - DNA, 444 bp, Glycine max
  unsure (1)..(444): unsure at all n locations
ctaatatattttttctttgcttattgaatagttatattttttttcaactcctataataaatttctactaaagcagtttattgtgttatgtggttattgaaatgactaatagtagttaattgtgccttagaagtgattgatgttaaccacatcagtagttgttgtggtgaaagtcccacatggcggaagagctatgaggaaaaatgaggcatgttgaagtttcacatcaaatgaagatagtgtcgagataaactatataagtggggagtaatcctcaccttacaaaccggttttgtagggttgagctaagctgatgaaaaacttactatctacatggtatcagagtctatcctaaatggatccctatggttctctangcaggtagtcttgagtgtgaggggagatgtggtgaaagtcccacaattctcaccttacaaaccgattt

SEQ ID NO: 74993 - DNA, 325 bp, Glycine max
ctaacttgaatgccactgattaatccacgccatagaacttaaacctctttgagaaactccatgacgtcctgtttgaaagcacagcacaggacttcgaaaccttggaatccttaccctttggtcagagcctcatactctatctctgttctctctctcccacctggattatgtgccaacatgatcacatcgatgtgaacctcaccttttgtggacaaactagagtctggagccactggaagaatgctttctgcaccatttacacttccatcagtgtggaagagtcttatagctgttcttcaaaaactaaaagcagagctcatcactc

SEQ ID NO: 74994 - DNA, 489 bp, Glycine max
tactcacgctcgtgatctgacgaatgagttctcacaaattccttactatgtatatcattctcacgcccgtctcagtactactcactgtcatttctttctcacagaatattatgtcctatgttgtttcacttaattgatctgcattacccggcgactatcatctataagggtcactttgtgcattaaatttctgcgcaacatgtactatggaatatgtgagagaatgcatttgacgattatcatatttctgcttacattgcagaggactagttgtttccttcttaacatggacttcgctagatatacatgttatcctgagagaatagagaatatacgggaattatgacctgtggtatttacatgatatcaatgacctcttaataagctccgaacttattggagcttagaagactactgtcttgatcacttgtttgcaaaggcacttcatgtgcaacatcttatgctgtcatggtttacatctcattgata

SEQ ID NO: 74995 - DNA, 382 bp, Glycine max
agcttgcatgtgcatgctgagctgacatgcatagtatatttggcttaagtgaccacacgctaagcctgcaaatgcgcgcttaacgcacatccacgataaatctgacttccagcttggcttcttgcactaagcatgcactggcgcgctgagtgtgctgctccaattcttcatacatcttccattcttctggtgatgcatctaaaaattctacaaaataaaacaaaacattgtataagtaccaactttagcattcttaagataaaaactcaaaataaatctaaattcctatctttctaagtcaaaagaagtatcaaaagagaagaaattatattatttctatgtaatttaagtgacaaactaagtatgaataacaactatcaat

SEQ ID NO: 74996 - DNA, 405 bp, Glycine max
actaagcttgtatcccaggaggggattcgagcttaatgctgatgggcaccctttgaagaatttgaggaagaacatgaccactctagctcagacatggagcattctttccttttctaacctcattcctacctcccacacatctgatgtgaccttggacagagccaaattgatttatggtattattatgaagatggatatgaaattggggtacctcatctcccaccagatctctcagattgcacagcatgatacatccagacttggattccctgcctggatcacaactctgtgcaaggccagaggagtccagtcagattctagatccctggagaacttgagccctaccattaacttgacatatattaagaagaactgttggaatcttgatgatccaacagtgacatt

SEQ ID NO: 74997 - DNA, 404 bp, Glycine max
  unsure (1)..(404): unsure at all n locations
gatccttaagtcacctgccgctgcagcttgctgatcacattcntcccctttgtcaagctaattcntttttatatcatcaaaacctgcatgatttacattctccccctttttgatgatgacaagcattatccaaggcttgatctttttgacatcatcaaaatcttcatgatgtacattctccccctttttgatgatgacaaccacctcgtggttaagagcaacaacaaagaanaaatgtctatctgcatataggttactcccccttggttttgtaatgtctgcttatataaggcaatagacttatacattttggaagccgtagaaatagggccttatatacccaccacggtagaaagaacccaatagatggatcacaacaatagaaaacctaagatagatgtctg

SEQ ID NO: 74998 - DNA, 442 bp, Glycine max
  unsure (1)..(442): unsure at all n locations
tcatggtgaatcanaggtgattcacaggtgtgttgatgataacaatgatgatgacaaaggtgatgacaaaaagctcaaagatcaatcaaagaacaactcaagtgaatcaagaacaattcaagagttcaagaatcaagaagaaagcctagaatcaagaatcaagattcaaggttcaagaatcaagatcaagattcaagactcaagattcatgaatgcagaanagactcaatcaagataagtattaaaaaaagttttttcaaaactttgaatagcacatgagtttttgacaaaacctttaccaaagagtgtttactctttggtaatcgattaccatatagttgtaatcgattaccagtagcaaaatgagtctgaaanaagtctcatactgaatgtacaacgtntgaattattttcaaagggctgaatcgattacagtggtttgg

SEQ ID NO: 74999 - DNA, 138 bp, Glycine max
  unsure (1)..(138): unsure at all n locations
agcttcgtctgcatatccctcttgtaagactangcttaacttaaacagcattatcatcacagcatattcagaaaaccaaaaccccaacaatacatccctggtaatgtggttattcagtcctgcttctatcaagttcta

SEQ ID NO: 75000 - DNA, 246 bp, Glycine max
ctttcctttgtttgaagctcactacaagccctaagtggaaaaccatgatatcaccatatccctaagggaatttggagctttggaattgttttgggaataaatgtggggggttttcgtttcattggataacatgtttttgtggctatgcttcatgatggatttgggccatacttgatgtacattgtgtattggttaaatgttggacatgctgaatgagatgcttgttctcaaaggctacaaaaaaaa

SEQ ID NO: 75001 - DNA, 497 bp, Glycine max
  unsure (1)..(497): unsure at all n locations
gatccttagagtcacctgccgcatgcaagctnntataattgaattaaaaccttcagaaactgtttgtaatcgattaccatatatgtgtaatcgattacacagagcaaactttgaattcacatttaatagctattgtaaatcagttttggccactggtaatcgnatacatcctctggttatcgattaccagagagtaaatatgttgaaaaagactctttaactaaaaatacttggccaaaccttctactacttcaataggaattcccttcctatttaatataccctttctaagactctagagactgtcttgatcatccatcttgaatatcattaatttctttgtctgaataaagctgtgagacgcatgtgaaactttggcatcatcaaaacattcagctagatccgttgtctacaattctcctctttttgatgatgacaantccctgaatcangacangctatatacaagatgatagcaacgtcacacaacccttact

SEQ ID NO: 75002 - DNA, 451 bp, Glycine max
  unsure (1)..(451): unsure at all n locations
tatgtgtttctgcaagaatgccttgtaatgaganaaagatatgtttttagagaagctgttgctccgtgggataaagaagttatattcgaccncagcacacccaagcctaacctagatccatttttatacattcctgaaagaaagtctgatgtgagtgtttttctcccaccattgaaaacttggatctccctatgttatatgctgtgattaaattagttgtatttctcttgtgctacagcattattttgaaatgcaagatggggttattcgtgtatatccagatagagatggtaagtaacaggaatctgttattgacaaacttggtaattttatcaccactcaaggtgggatcttatgcatgcttgtctattacttgcagaanaagaagagctgtttcctgtagctgatgcaactacatttgtcactgatcttcatcacttacttcgagtca

SEQ ID NO: 75003 - DNA, 480 bp, Glycine max
  unsure (1)..(480): unsure at all n locations
tgcaagcttgaaggcaaactggatgcattggttaacttggttacccagctggccttgaatcaaaaatctgtgcctgtcgcaagggtttgtggtttatgctcctctgttgaccaccatacagacctttgcccttccatgcagcaacctggagcaattgagcagcctgaagcttatgttgcaaatatttacaatagacctcctcaacctcagcagcaaaatcaaccatagcagaacaattatgacctctccagcaacaaatacaaccctggatggaggaatcaccctaatctcagatggtgcagccctcagcaacaacaacagcaacctgctctcttcttccaaaatgctgctgacccaagcagaccatacattccttcaccaatccaacaacagcaaccaccccagaaacagccaacagttgaggctccttcacaaccttccctcgaagaactngtgaggcagatgactatgcagaacatg

SEQ ID NO: 75004 - DNA, 479 bp, Glycine max
  unsure (1)..(479): unsure at all n locations
gtcgaatgagactttctgatctccacacccaattctaacttgcctttccctatatctactatacagttggccgtgcacatgaaaggaagtaccaagattatgggaatgttaggatcctcctctatatccataaccacaaaatcagcagggaatacaagctgcttgacctaaatcaacacatnctcaatcactccatatggtctagcaatggagcaatcagccaactggaggatcatgcatgtgggaattatctctatctctctaagtcgctggcacatggaaaaaggcattaaattgatactatctnccaaatctatgagagctgtacccacaacaacctcactaatagaacacgatatagtgacacttctangatctctgtgcttcaggggaaggatacattgaatgactgcactacannataccttcactactatggatatactagttcttcttggtcacatgtctttaaaaaattt

SEQ ID NO: 75005 - DNA, 369 bp, Glycine max
  unsure (1)..(369): unsure at all n locations
attcgagatcacttgaaattagcgaacaaaattgttttcgtgaagaaaatccaagccgaggcgctttcgtaacgcctccgtaatgttatacggggtgatttcgcgaagattttcaaccgttcttcgacggtcttcgttcgttcgtcgtcggtcttcggtcttcaactggtaagttcccgaaatcgaactattcaattcattctatgtacccttagtgggcctcatttgttttcacgtgcttntaatttcatttcatttactctttcgaccccctcttgacatgctttagtcatctacttaagtcattttctcgcctaatcaaaaaataaaatacatttccaccgatcatttgaattgaatatcccgtaa

SEQ ID NO: 75006 - DNA, 467 bp, Glycine max
  unsure (1)..(467): unsure at all n locations
gagatggcgcttagcacaagggtagcgcctatcggatatttatctgagaagttttctaagtcattntatgcttatctcttcacacataatttaaaaaccctttttgttcattactaaacaagctgaaataaatcacaatcacaagcaagatgtcctaactacatgcaagaaatagaattgaagatagagaagggaaagaanaactgggttgcctcctagtaagtgcttctttaaagtcactagctggatgcatcatcctantatctgggatctaataaagttcccacttcaaggaccttcttctcaggtcttctttcctccatcacatgaactntanaacaaacattccgggcaggtggatctttatcttcatgaaatagatcannagtgattttctgatcttctatgcctattngcaacgtcttcttttccatatctactacacaactggcagtagacatgaatgg

SEQ ID NO: 75007 - DNA, 442 bp, Glycine max
  unsure (1)..(442): unsure at all n locations
gcttattaagaggcttcctccagaagcttcattaagatgcttcgagcacactctatataacttctagaagatcccaacggtgagatcatgataacgtgtcttgtgaagtggtagaccaaatttcgagaagatccagcggttaacgaaggctgggcatcgtttntaccgaggtagcttcatgtagctttctctagaagcttcattaagaggcttcctctagaagcttcctcgtggcttctttgagaagctttctcaagaagcttctttgagaagctagatccttatctatccacacccctctattaactaaattaacttcctttaaaataattacagattgaaataacgcaacaaataatcaaacatcaaacataattactaataatatatagatatatatatcagggtgttacaccgtgtggtgttagctggaatatggatg

SEQ ID NO: 75008 - DNA, 488 bp, Glycine max
  unsure (1)..(488): unsure at all n locations
ctcagctgatgatatagggacccatacatgtggactangtggcggncgatctatggtcacaacaagttttccacatccacaaagcgcgcataaacccaccatcccctggtggccacctncaactgagctcacgtacttccacgtagcccataaccctcgttctctcaacaccgggtccccatcaatccttccaagctttcccaacatcaaagtaaatcaacattcaaacagcacaaattaccacagcccagaaaacagggcannaggcagaaaactctgcccaaaacaccaaccaaaatcacagcttttctcacttaaagaccccagtaacaattccttcgatccaattcgttaaccggtggatcgactccaaaattntactggaagtctatagtacantaagcctacatttggaccgtgggatctactagcanacatncagaactcattctgcactactctttccacagncaaccacacacaagcat

SEQ ID NO: 75009 - DNA, 522 bp, Glycine max
  unsure (1)..(522): unsure at all n locations
cacctgccgcatgcaagcttctgtccccagagtttcaatcttctatagagcatctgattcattntcttcctacaacttgtcaaaccttgatgttttcaacaacatttcctgttactataaaggatntcaaggatatgtatcttcaaaatttatagtggaaatatgaagagcttgacttgttgcctttgcttgttgtataaaagtaaaatagaaatatattcttatttcctcattggtagtatttaagtatggctactggttattcttttcatggaacagaaatttntgaagcccgttgaagggatgggatttgaggatctctcntaatatgggtcataacacatattgaaagaaatatttagtgattatgtggngaattcagaattatccaaaaaccatatttaaatgtcaaaccagacactgcattcaaagacgggtattacataataaccgtctctgaatgttgaaccagatgtaacaatcaaagacggctattatgtactaaccgactttgaatgtgga

SEQ ID NO: 75010 - DNA, 340 bp, Glycine max
  unsure (1)..(340): unsure at all n locations
taaagatacaatcttggcagatgaaaatgcttcagaaactctaagaaagctagcagatgggcctaaaagaaatgttataacttggcaagcatatgacataaacaagtattcattttacacaaaagcacaagacaacaaaagtacaatgcanaccaatggggtcaccctaagagctgaatctgaacaccttgtagtgtgcatgacgccaatccctggtgagcttccatcccttactttgggttcattgatgaaatttaggagcttaactatngtgaaattactggttgcgtttcaaatgtaaatgggttgacaacaacaccaatgtgtgcaccgatgatat

SEQ ID NO: 75011 - DNA, 475 bp, Glycine max
  unsure (1)..(475): unsure at all n locations
tacccatcacatgtggtattatgtgtgcggcgggcgatggtgcacaacagagtttccacatccacaaagcgcgcataaacccaccatccnctggtgcccacctncaactgagnctcacgtactccacgtagcccatatcctcgtttctctcaacaccgggccccccatcaatcctcccaagctttcccaacatcaaagtaatacaacattcaaatagcacaagctatcaacagcaagcataacatggcaaaggcagaaaactctacccaaaacaccaaccaaatcacagcttttcacacacaaataccccagaaacatttccttcgttccggttcaattaaccgttggaatcgactccaaaatttactggaagtctatagtgcataagcctacatnnttgaccgtgggatctactagcanacatccagaactcattctgcactactctttccacagccaaacacacacaaagcat

SEQ ID NO: 75012 - DNA, 478 bp, Glycine max
  unsure (1)..(478): unsure at all n locations
agctatctcaaatataattatatcttttattctttgaatgtaaaactgtgagttgggccaaattttctcacgcattcgtgcattnttatgcagcagaacttcataacattctagctctgttggtgccttactattatgagatggatgtgtataattgatcctaagtgaacaattataattgaaattaaaactccatcttcattgatcaattgaaattaaaatnttataattatgtattaaaattatactaatacataatacatgttatagagttataaaattaaaattacagttatatttcatttcctgccagttaaacttgcagtaggctatcgtttgtatgtcaaaaatataaagtgcaattcaggtagggctattatatttaagaagtttttagaacgaaaaatatttttttgcattctgtctcacatggcttgatgatgagaaatatgctattgtatgtataagaatgtataat

SEQ ID NO: 75013 - DNA, 265 bp, Glycine max
agcttgagatgaggaagtgttgaatggtgaaacttcctgtttttattgttgaccacagagtggcacctggagatatgtcgcgtgggtcaggagaccttggtgacgtcaggtggggtgctattgcccaaaaccaagcttgaccaatcccgacccaacccgggcatagtcggtcagtgagaacctgtgatgtacctaagcaggcgagctcctggcagtccacagattaaggaaatcacagccaccaagcaaggaggcttgtggtggc

SEQ ID NO: 75014 - DNA, 129 bp, Glycine max
tctggagctggctactccacaccttctactagtccctctgaaagttctagagatctaagactggctactcctcctttatgtactactctggagaggtggtactcccccctttctactcccctgcaaact

SEQ ID NO: 75015 - DNA, 432 bp, Glycine max
  unsure (1)..(432): unsure at all n locations
agcttcntttaattgaagtcatacgcatntttnnttttattaaacggtaaggtttcttataaggacataaactatatatgaaagggcatgtctccaagaaataaattgttgaagaacttgaaataggcatgtctccaagaacgcttgagttagattgagccaaacaccacccaaaaacttataacaaatccaaatgttttactcatgtaaaattcacgattgaaaagcgaatatttatcctcatgaatttcaacantttggtctggtgctgtcccccatgaatacacaatttctcaagtggtggcccacagagataaaaattatcttcataactcgagatattgaaactctgtaattgtgtgttagttggaatntctctagctagatgattatgtgacaaatctaacatagtgagtcgatcaattngagtaa

SEQ ID NO: 75016 - DNA, 449 bp, Glycine max
  unsure (1)..(449): unsure at all n locations
atgcacccatatacaatcaaggcagcttcgttaccaagattatttacacgtacttccaaggtgtaattgttacttacatcacacacatctccttggctaaattcacatacatgcatanctcaaagcatttggggtaccaaaaattgcacatgtgcacatcttggtatttctaatacccctacatatacaaacttcacgatgaatcttgactacctacacaataaggtgctacatttcatgctntnntttcaagttttactacctaaagccgcatgcaaattcaaacatattttcctttngtgactaannattgtattcanataaaagggatatattnttttgtaatatgttntcttcacataacatgcccacatattatatatnttttttgtgagacattttgactaccannaaatatacatatatacatccaagtattttgctatcat

SEQ ID NO: 75017 - DNA, 397 bp, Glycine max
  unsure (1)..(397): unsure at all n locations
gaccttatatactcagctcgctcatagatgcatcttggctatggcatcttagattctatcacttatatttggaggcttaagtttgctatcaaaggagaagatggtgagaggactatcctatattaaccaccctgatcaaatctatgaaggatgtttacttggcaagcaattcagaacgagttttccaaaggattcaaactcaagagctaagaagccactgaagctaatacatgctgacgttagtggaccaatcaagccaagctcactanggtaaaataactatttccttctttttcattgatgatttttcaagaaaaatatgggtctatttcttaaagcaaanattagaagtcttttccgccttcaagaagttcnaagctgcagtggagaaagaaag

SEQ ID NO: 75018 - DNA, 476 bp, Glycine max
tgcttagaggggttgatggtgactttgcgctgagaggatctaagagaaagctacgtacttgcacatgagctaaatttaatggtgggcgactggggatggcgtgcttatgcttggctcgtggaaatgggataattgatttgtgccatcgcccgatcgtcacctatgaccacatataacgggtgccccataatccaataatctcgatgtgagaaagcgtggaagagacagtctctctacttttatttgttgaccatacagtggtacctggagatatgtcacggtgcgcaggagaccttgtggacgtcaagtggggtgctattgccccaaaacaagcttgtgcaatcctgacccaacccgggcatagtctagcagtgagaacctgtgacgtacctaaacatgcaagctctggcagtaaacaataaagacaaaagtcatgaagcaggatgttgttggctgtggcactattatttggtgta

SEQ ID NO: 75019 - DNA, 399 bp, Glycine max
  unsure (1)..(399): unsure at all n locations
ctatatacctcagctcgccgaatatctngaggtctcatatgcacttctaatttttatatgtgtgaaggaatctaagatcaaaattcanagatagtatcaatagttgcaaaaaagagctaaatgagcttaggcataaagatgataatgaatctgtcaaaaaattcaaccgtattaaggatgagctttcaaggtaggtagttcgtgaggaagcattttggaagtagcggtctaanggttattttgcctctgtgatggagacaaanatacaagttctttcatgcctccactactagtagaaggaagcacaactcgttggagaagctcaccatagatgatggcattgttgttacctctcanaaagggattatagcaacgtgcgaggactacttccaaaattta

SEQ ID NO: 75020 - DNA, 230 bp, Glycine max
agcttggttttattcaacatgttctgtgggatcttgtctgcacaggtagccgaggtatctttgtagtaagtgttcactatgaaacacaatgtcaatggccattttgcatatgcaattatgcatacttggcttgtgttaatagcgatgggagggatggatgggagattcttactctcttatggccatgtacacgctactcgtgcccttatgggaagcattgaagattgttt

SEQ ID NO: 75021 - DNA, 502 bp, Glycine max
  unsure (1)..(502): unsure at all n locations
cactcatgtttatgggtaanactnttaaatattcttacctcttgctctcatcgaattaaagtcccaagtaattaanaatattatatgaacttaatattcaattggttcaaaagaaaacatataatatcccattataaatagaanataaaagctaanatagaaacatagtcngttttttcttttcgagctttccctctcttctttntctcataaattccatttgccatcacaggaaacaattccgacatnatttgtcatttgaatttagatcagagcgatgttngatcttcttcttcttggtntgtactttcgataaaaagtttagtgaactcacggagaagatccacatggcccttgtaacattcagcaccttggagaagtcaacatatatgatcaatgagtgtctaaagaatcacatgactttantagagaaaaagttannatanaatagaaaaatattggaacatanngcatggtataagcattgactctctttatatga

SEQ ID NO: 75022 - DNA, 460 bp, Glycine max
  unsure (1)..(460): unsure at all n locations
agcttccttgagaagatntctaaagaagctagagcttatctacacacacctttctaatagctaagcgcacctccttgagatgagaagctagagcttagctacacaccctctataatagctaagctcacccccatgacaaaatacattaaaaaacaaaaaagtccctactacaaagactactcataatgcctcgaaatacaaggctaaaaccctatactactagaatggccaaaatacaaggcctaaacgaaggaaaaacctattctaaatttacaaagatgaatgggctcatacttagcccatgggctcgaaatctaacctaaggctcatgagaaccctacggccttcccttggatctctggcctaatctacttggagtactttatccaatgcccttgcggggcaggattgcatcactatatatttaaatctattgtnttataaagatctgcatacgggt

SEQ ID NO: 75023 - DNA, 364 bp, Glycine max
  unsure (1)..(364): unsure at all n locations
cccatcagtgtccttatatagactatcttgaatatgaccgtgcaccttgtcttcgaggtcaaggagatttgttgctcctaaacataagagacttggaggctaagaagatccattgtgagttgtctctatcacatatatggttcctcccccttccttagctggaacaacttggatacaactttgaatttcaaattttgtgtgtgggtgtttgttgttggttcataactcatgacttctcctttattccatctcaacccatanggttactacttctttagaaaagtgagttttctacataatggtggttattcattnntttactgctataaactatgaatgactactnttcttcttcatggtacct

SEQ ID NO: 75024 - DNA, 230 bp, Glycine max
ctcgcttctacactcgtaagtggaactggaagtggagtcgctgcttatttatggtttattgtctcctcagctcctttatgcatttcatgtgtcgatgtattgctaactctatctgggaattaacattcatataatatcttgtgcataatcttaactttttgtctgtgtcatatgagcttgttaggtaatctatatgggagatatcttattgtgcatatcacagattgaat

SEQ ID NO: 75025 - DNA, 303 bp, Glycine max
  unsure (1)..(303): unsure at all n locations
tgataccctctgtatgagaagttgaaacaaaacctgttttgtgtgccctatgttttcatcccagagcaactaaggctcttaaaaaggagnttcgttcttgtaacaaaatantcttcggtaatgtgtatagtcggcgtaaagtagttcgagattgtcctaatgatatccataagcttcttcatttgaatggtttcccggatggatcgcatgaccaataagtgagtgccctaatggagtaacaacaaaccttattatcttaggaaatgttttggaagaaaaaggctcgtgttcaatggcatcatt

SEQ ID NO: 75026 - DNA, 497 bp, Glycine max
  unsure (1)..(497): unsure at all n locations
ctctcgtgtcacacaatctctactgcatcttatgttctcaatccggcagttgaaccgcttgccatcctgtatcataaatgggacaatcacaaccccnctcaactatcagtcctagtccaatggactggtttacagcctgaagacgcaacttgggagaattggactgacctccaaggtatctaccaccttgaggacaangtgtttcangaagcagtaaaagatgatagcgcagcagccacaaggccgagaagaccatgaaaggcctctgagttggaaaaaacatccactaagcttatcaacagcagagcagcagagggacaatntatgaaacttacctttgagtgctgctggccttcctcatcgtgcgtgcggcttgcaccatcgtnttgctnttcccccgcgggtagcaattagttatggctagtcccctgtgtgctggcaagaaccgtaggaataatatctatccttttcatttcaacactataaatatatgtaat

SEQ ID NO: 75027 - DNA, 366 bp, Glycine max
  unsure (1)..(366): unsure at all n locations
gctngagtataattcattctttgtgttgtgagcctacgtcagaatagttttgattactgatgtntcttacataatcaaacagttgttaacatctncacctgngtttacactgtggtcatgttttcgtttatagaattcattcagaatatttggtggtgattatcgcctcctaatcaatagagtgttcattttgttattggctgctcaatcttcaatcatgtcttggcaaactacttgataatctgtcatgttgttacttctattatgaatagagagagacattgctcttgtaatcacattaaggtgtttcgagaggaaaatacttgagtangcatgatccttgttcctatagatgaaagcaactta

SEQ ID NO: 75028 - DNA, 385 bp, Glycine max
  unsure (1)..(385): unsure at all n locations
atccagataattatctccttattgttcttcacatgaagaagataaacaaacttctaataattaagttttttcaaaggtaaaaacaaaatagaaaaagaagcttacccatcacactacctttagaattgttgaagaagatggaaatcacaaaaggaggataagaagagggcataagaactagtgactagatgtcgaagatttaaggggatttctagaaaaggaaangggaaaatgaaagaagaaaaatcattcttctcactatgaccgacaacaacaataactcgatagttagggtttggccaaggtgctattntctangaattttttggcggaaatgaataatagaatgtgagaaaacgtttaatcgatntactttntcaagatg

SEQ ID NO: 75029 - DNA, 483 bp, Glycine max
  unsure (1)..(483): unsure at all n locations
atgataatacttcacagaaagaggaatgtgtaacatatattgaaattttgaaaacattatagaaagaactgagaataaagagaacaaaatatgaagaactaagaagaaagaagtaaggatagtggagagagatataaagtaagttatgtgagttgtagtgcttcaatttggttttctcagttctcagtcaggtgaccaaattgtgctcatccctataagcaccattaggctcatcatgaactcaattcatgatttccatcattttaattattattnttatgtaattctcaccctctcaagtcttatgatgagttttcagtcctaagtcttcaacaagtaaagggtctaaggctntatcaaacacttactaactccatcattatattattcacactcagtgttaattcactattcttcatagtgaacatattactcattagaactagcttctattctcantaatgcactcacactagagtccac

SEQ ID NO: 75030 - DNA, 432 bp, Glycine max
  unsure (1)..(432): unsure at all n locations
atatactatgttgtttcttgnattctactctgataacattangtagtgacaaactcaagttgatattttttttttgtaaggattaatttaatggttgtgtatttttgtttgaatttcatactttgggtaaggtattgtcacattaaaaatttcatagcaataaacaaattatgtgtattaatcaatattatgtctattattatgtttgttctaacttatgcttngttttctattcttttaagtattattggaatgttatgctcgcaacgattaaaaaaggagaaaagataaacattanattatattctagataaataactatttttgtctctgaatgtgtagagcgttgacaaatttatctttatatgtgttacgcagatattttcattaacagtaacgaacgagaactaatggacagataaagttatcaca

SEQ ID NO: 75031 - DNA, 491 bp, Glycine max
  unsure (1)..(491): unsure at all n locations
agctnggcattgattctaatatgattaatcccctgttatacatcattcttaccagcccatnttttagttgtatttacaatagttntcatatgtaatatgatttaaagaaaacaaaagttatgtatatatgtgattgtattataatgatttagttattggtgcgtttgattttgtttggatcagactcttgaggcattttcagccccaacagggaaaaccagcactatgggagctagattcagatcaacattacactgtcaagttcatggtctgtatttagcaagtgatagcattagataaagagtggattattgagttgcaccagtaccgttttgtccttttcatttaatgaagcattaaataatttaatttcaagaatttaattggtgtatatgaactcttcattatttgtcaaatatcagttgtatacttctttatttaaatctgtctttaactttgagccataattctaaacctaaaatattggacac

SEQ ID NO: 75032 - DNA, 499 bp, Glycine max
  unsure (1)..(499): unsure at all n locations
caccttctcctaagccacctgntggctgcgagcgttcgctaagcgcaacactcctgggctaagtgcanagaagactctggaagaagatgagatgtacaggttcgctaagcgcaccgcttcatctcactatgcgcaccacttcagttcatccactaagcgagaaaggcacgcgctaagccagaattcactaacatgtgctaagcggtccataagtgctctaagtgcacgagcacaaacaaggccacctatttaagcctgaaatcagaatttagagagagagtttggactgggattcagaagcttgcatgtctagggtttctggagagagaaaggtccatgttccagagagttttgagagaatttgttgtgtaaagatctgtagagaccagagcgtgaagcaagagccggttngaaagctngagatgagtttgtgattgatggtgagatcctanaggtganagagacatcctcaccacttatattnttgcaatctttcatc

SEQ ID NO: 75033 - DNA, 326 bp, Glycine max
  unsure (1)..(326): unsure at all n locations
agctngtatnntaaaatgttnntaaaatacttntaatttatatttgaattgttattccttaattaatatatatgtgaggngtagagggtgtcacataaaggggatacggaaaacaaacgaaatgaaaataatagtacgcgaaacaagtggggaccactaagggtacatagaatgaattgaaagattcgatttcgggaacttaccggttaaagaccgacgaacgacgaagaacgattaagaacggtgaagaatcttcacnaaatcgctcatggaaacgtctccgaggcgttacggatacaccttgctggatgtttctcgggaaacat

SEQ ID NO: 75034 - DNA, 476 bp, Glycine max
  unsure (1)..(476): unsure at all n locations
tctatgtacctgtggtggcccacattgtgttnngtttgtctattctctcttcatttacttttatacccngctttgacgtgcttaagccatcttatttaagtcatttctcgcttaacctanaaataaaataaatttccaccgatcgtttgaattgtattatccgttaacttcggttaaaatgaattccgaccgttcggtcatgccgtataccacgttggaaatcaaaaagagggtaaannatatataataatcaaaaagcatctttttagtaaaataaaagcggaaatcaatcggatgttttctctttgggatttctcattcttaaccgaattgactaataactaaagtgaaactaaggctaaaatcaactcgcctagtcaagctcgtccataaaaatagggttttgaagtttatcatttcaatttcttactaagtaaaatggatcattttcaaggtccaacgccttatatgatcac

SEQ ID NO: 75035 - DNA, 485 bp, Glycine max
agctgtcttgagaaaactttcttgagaagcttctttgatataacttccttgagaagctagagcttagctacacacacccctctcataactaagctcacctccttgagaagcttccttaagaagattcctaaagatgcttgagcttagctacacatacctctctaatagctaagctcacctccttgagatgagaagctagagcttagctacacaccccctataatagctaagctcacccctatgacaaaaaacatgagaatacatatagaagaagtccttactacaaagactactcataatgccccgagatacaaggctaataccctatactactagaatgggcgaaatacgaggcccagacaaaggaaataactattctatatattactaagatgagccggctcatactttattcatgggctagaaatctaccctaaggctcatgagaaccctagggccgttccttggatctctagcccaatcta

SEQ ID NO: 75036 - DNA, 362 bp, Glycine max
  unsure (1)..(362): unsure at all n locations
gacctatagttaacgtcaatccanccactgngagtgatcaagccctcataaagagaagtttcatagttatctagtgagtgtagcatgagagaaaattcctattgtccactccaattggaatgttgtaccagaaactttaaagaatcttatatgggataacattttggtaagtccttatttaagttgacatttgtatatgatttcatataataattntaaaaaaatattatatntcactaantggtacttnnacattttgtttggagggcaaatttacatccccagggtgcaatgtaaaaacaagtgatgcaacggttgtactcgaggaggcaattaagtctcctaacataaatatgttattt

SEQ ID NO: 75037 - DNA, 354 bp, Glycine max
  unsure (1)..(354): unsure at all n locations
agcttagtattggtgggataatactcgccagtgcctatatgctgaaggtcaagatgtgacctgngatgtcttcaagagggtatatttggagaaatattctcctgacgatgttaggaataagaacgagatggagttcttggagctcatgtatggaaacatgattgtggctgaatacgcacccatgtctgagaagttggtgaggtactttccccattatcaaggtagagatggtgaaaggtcctaatgtgtgaagtctttgaacagcttgtgacttgaagtgaagctagcattgaataccaacgtgttcgcagttccactcttggtaacatgtgtcgatttgggatgaaactcccc

SEQ ID NO: 75038 - DNA, 425 bp, Glycine max
  unsure (1)..(425): unsure at all n locations
ttaagaagattccttaagaagctagagcttagctacacataccttataatagctaagctcacctccttgagatgagaagctagagcttagctacacaccccctataatagctaagctcacccccatgacaaaaaacatgaaaataacaaanaaaagtccttattacaaagacaactcaacatgccccgaaatacaaggctaaaaccctatactactagaatggccaaaatacaaggcctagacgaaggaataacctattctaatatttacaaagataagcgggctcatacttagcccatgggctcgaaatctaccctaaggctcatgagaaccctagggcctttccttggatctctagcccaatctacttggagtcttctagccaatgcccttgcggggtaggatngcatcattacttttcactc

SEQ ID NO: 75039 - DNA, 474 bp, Glycine max
  unsure (1)..(474): unsure at all n locations
agcttctatcactaaagctttatatcctaacttaacttcctacaactaagagaaagcgaaatcatctatcctatggtttgagaaataacaatgcaaatgaacgatgcaagagaacttacttggattatgtctgtgcaaggaaatgaagcaagcagatgcaatgtatgatttggaagcaagaaaatgcagtagcagaggtagaggtaactttgggtatcacccaaagtgcctcatcctttggcttttttataaaaaaactgaaatctgatggcgcgcctcagagctttnttcttgnataggcattgtggtgtgctctgacttctatgtgtgatgtgtnctctggattgttgcctaattctacataagacaggctntaatacgctctgaatctgcgatggtgcgcttagcgccaccctcgcgcgtagcgcgagtaagtggatntgagcttaacaccagtcatgcactgagcctgac

SEQ ID NO: 75040 - DNA, 362 bp, Glycine max
  unsure (1)..(362): unsure at all n locations
acatggagaggagtatgattgatgctgacagtggtggagctcttggtgatatgacccttgcagaggctangaaattgattgagaagatggctttcaactcccaacacattagtgcaagaaatgatgctattgttcttagaggaatccatgaggcagccaccgattgatcatcatctatttgaaatataaagctcgaaggaaaactngatgccttggcaacttggtaactcaacttgccatgaatcagaaatctacacctgctgcaagagtctatggtctattgtcttctgcanatcaccatacagatcttttgccttctttgcagcaatctggagtcaatgagcaaccttgaacttatgatg

SEQ ID NO: 75041 - DNA, 404 bp, Glycine max
  unsure (1)..(404): unsure at all n locations
cctctaagacacctgcggcatgaagcttgatgtttttaataatcaaatataanatcctgtgttgataaaaaataaaactaaactctaccaatctataggaattaaagcaatagcattaaggattaatgaaggtcaattaataaatatgacgttcgtgttaatattaacatagcttgagccatgaaggtcaatgtattcatttactatatgttatattacacgtcctaactataaaaagacaatagaagaaaaggcatgttagtgtatgtattagatattaacatttattctaaacaaatcgaaacttgtaaagagaacatataacatgccgtgaaactatgctcgcgtgtgaaagataaaaaaaataaaagaataacattgttgatactacgcttcaactcaca

SEQ ID NO: 75042 - DNA, 385 bp, Glycine max
  unsure (1)..(385): unsure at all n locations
tattatatatgagccgcggtgactnttactcttctgtcattataatcactgtagctctatgattcccctttnttgtgtgaacactgtcataaaaacttacactagagtatattagaacaagctttacgatacgtgcaccctaaaaagcacgaacatatccactcctttttctatggtaaaaaggagctgtggaccataagaagcaacacataactaccaaaaggagttaaataatactagcatggagcaccgtacagcatcttcaaaaatcaaggatntgggaccctcaaaagcaactgatagcctctgctctggggttgaggcagtaatatgccaactatcaaccaatctctcttcaaccgtgtattaacttaaccatccaatc

SEQ ID NO: 75043 - DNA, 418 bp, Glycine max
  unsure (1)..(418): unsure at all n locations
agctctntatccaaggcattctcttggtggtgaagcttatccttccatgggttattccctagagcatggtgcctcctctaacctcttatcctttatcttccgctgcatctccatgatggaagatcaccatcgcaggacctaagtgaagctcanagattcagcctccatagaagcttctcaagcaagctctcatcaagtggtatcagagcacaagagcttcaagtaggtgctccctaatcttcaggtttaccttctcctccattgttggtttttcctccatgcatctcccacatgtcttggtctaatggtattaagaggactctttagagtgtccaccgattaaacttgctataaaagctagatctgattatctatagtccaaatgtctcggtcttcttcttgaaccatgaattatggt

SEQ ID NO: 75044 - DNA, 383 bp, Glycine max
  unsure (1)..(383): unsure at all n locations
tatggctggtatttcttgcttttattttaactacagttaatatcaaaattaatattnttttagttacaggttntaggtacattcactacntaaaattattgatttagcatcccaagattaacattggttttcgacaaaaccgatgtaaacaaaaatacagtggcattgtcataaataacatgactttatntaacatcaattttataaaaccaatgttaacaatcgcatgtttaaattggtttaccaanaaccatgttaacatatttaataatatcagttctaacaactgatgtaagtggaggggtaacattggttttgaaaaccgatgtaacatgggatgtaacatcattttttaaaaaatgatgtgtattttaataaataaa

SEQ ID NO: 75045 - DNA, 385 bp, Glycine max
gtctgtatacacgatcttgatgatgtcaaaagaagaatcacacaagactcattgtgcttcaagattaatacaagattggttcaacatacaaagccttgattcaagatttcttcaagatcaagccttgcctcacaatgaaaggtgtcatgtcattcaacgcacatgtatatcatttcccactggtgtgagagtgagtatatcgattgcacattcatatgttatctgatcaccacagactctgatcgttgggaattctaaatctagatgaacggtcacaactattcaagaacaataacttgtggagtcgatgacactaattctataatctattaccagagatgatgttcagtgaatatcgccactgtctcatctatcatttggattt

SEQ ID NO: 75046 - DNA, 217 bp, Glycine max
  unsure (1)..(217): unsure at all n locations
gctgggttcgaggtacttacccgttgaagatcgaaatcgatgaataacgaatgtataacgtcgaagaactggttgaaaccttgcgaacttcttcacggaaaacgtcacagatacgtttnggaagcgcctcggcttagattttctccacgaaaacaatctttccaagcaaattcgatagagagagaagtgccaaaggggctgaatccttttcttcttc

SEQ ID NO: 75047 - DNA, 434 bp, Glycine max
  unsure (1)..(434): unsure at all n locations
ggatagaagcctctagaggagggaggagattctgaaactattaaatttcacatgaagagggcccaggatagaatgaaacagctggcagataaacatagatctgagaggcagttcagtgttggcgatatggtctatgttaaattgcacccttaccggaaaatttccgtagctgccagaagcaatgtgaagttgtcccccaagttttatggcccatttcaggtattggaacagattgggggcatggcctacaagatcaagcttccttcgggttcaagtatacatgatgtattccatgtctcttagttgaagaagcatgtaggtgaagcagtaacttctttgagtcttctaagtttagtagaaggagatcctctattcanagagcctgaagctattttggatcgcatgacagtaaagagaaaggggtcgagctgtac

SEQ ID NO: 75048 - DNA, 327 bp, Glycine max
  unsure (1)..(327): unsure at all n locations
gtctcgatatattacgggactcagtcagttattcntataaactgtatcgccgcntgaatcggctcagaggttcaacattcaatttcgagcgtctcgatatatctcgggactcaatcagacatccgagtaaaaagttattgtcgtttgaattggctcagagcttcaacattcaatntcgagcgtctcgttataatacaggctctaactatcattccagaaaaaagtattgtgcgttgaatggctcatagcttcaacatcaatttcgagcgtgttgatttattacgggactccatcagacattcgagctaaaagatatcgccgttgaat

SEQ ID NO: 75049 - DNA, 458 bp, Glycine max
  unsure (1)..(458): unsure at all n locations
cgaggtacttacccgttgaagatcgaagatcgatgaagaacgaatgttgaacgtcgaagaacggtcgaaaccttcacgaaattcctcacggaaacgttacggaaacgtttcggaagcgcctcggcttagattttcttcacggaaacaatttttccaagcaaattcgaaagagagagaagtgtctaaggggctgaacccttttccttctcacttcctnccctatntatagcaaaataagggagctgcgtgtcgcccagctcgcccaggcgagcaaggttgcttcctccagaagcaacatccttctggaggaatcttctggagggcccaagtgggcctggttgtctattgcacccccatttttactaagtacacccnctgccttttttttggtgagtctttttttctanagntacggaaacttacgaatnttgtaagatactgttttctttcgtaatgta

SEQ ID NO: 75050 - DNA, 401 bp, Glycine max
  unsure (1)..(401): unsure at all n locations
attgcctaaacgttaataactgctggtaatcgattaccttatatgtatatcgattacacagngcanattntgaattcaaattttagtagctgttggtaaatcagtttggccactggtaattgattaccagagagtaaatctcttgaaaaagactttntaacttaaatttcttggccaaaacttttgctacttcaataggaattcccttcctaatttaatatactctttctaagactctagaaactgtcttgatcactcatcttgaatatctttgtcttgaataaagctttgagaaacatgtaaccctttggcaagctttccctttggcatcatcaaaacattcagcttgatcctttgtctacatgaagttgttcaacatcttttttagatggatacataaa

SEQ ID NO: 75051 - DNA, 378 bp, Glycine max
  unsure (1)..(378): unsure at all n locations
gattccttaagcctcagtctatacattatgcanatatagttattaagaangccaacattacattgaaacatgggtcaacgaatcacaatgacaaatgtacttaagaccttacctgaatcagtaagtgaaattaatgttgtacagtggaaaaaattttcgttataagtacctaattatagtttttcatcttcagggcacattgacaacttggtgttctgtgttcaccggacaataatggtggtaggtttgttatttgctaagaagcctgatgttacatcaaggtgcagtaataggtatttttaattatactcattatgataccaatatactgtacacatattttatttatatcgtacatatttggactctgaagaaaca

SEQ ID NO: 75052 - DNA, 463 bp, Glycine max
  unsure (1)..(463): unsure at all n locations
agcttctaggngaaaaatattcatgaatgaatcanaatcataattcatgagatagattcataagactatgtaagtatgagattctatcattgattataacttatttaaaagaattaattagtactattggcctataccaacaagatgtattttttttgtagtttattacttaaaaaatttatatctaagtgtggttaactcgaaacaattatgagattaatgactctcaaatttgttcttcaaagaagcatatgagtaaagatattacactctaaaaagtctcatgttgatctatgaggataatcaataatcttgaaagtagtagattgtaacaagtggtatgatatcagaacaaatctctctcctaactagtatgatgggatcaagaatgaacaaatagaagtagtggtatgtaacatctatgcactactaggcaggaggatatcatacaaagagatgagac

SEQ ID NO: 75053 - DNA, 491 bp, Glycine max
  unsure (1)..(491): unsure at all n locations
gactgtatatagattgctgtagtatgcactctatgtgttatttccttcaactgagaaccccattggttggtccatacaaacattcttctctaaatcttcattcagaaaggaggttgtcacatntatttgatgtagctccaagtcataacgggctactaatgccatgataatcctgaaagaatcctttcgagaccagtaaaatgtctctttataatgaatgtcatatttctgagtaaaatccttagcaacaagtctagccttngtacgttcaaggttgccatgagagtcacgtntagtctngaagacccacttacaaccaactctcttacaaccccttggtaattctacaaggttccaaacaccattantgtccatggaatctatctcttctttcatggcatttaaccacttctcagaactatcacaacttacaacttgtgaaaacanaacttgatcattatcattaatgctaaagttnngttctgttcatg

SEQ ID NO: 75054 - DNA, 472 bp, Glycine max
  unsure (1)..(472): unsure at all n locations
agtcacctgcggcatgcaagcttgatcctcnaatgtgtgaacccaaacaacgtctctaanaagatgaacatagtgcattgnaagagaaatgtaaagacttgntattattgcatganaagaagacatccatcatataaatgctatgttaggagatttgatgttcctagaggaatatgtatttggattccaaaagatttatttgtgaacattaaccccattggacccaacttaagttgggtaccacctctctctaattggatttgacttgtagttgtgcctaaaagcaagggactcactatggtacttggatagtggctgctctangcagatgacaggtgacaagtccaaactcatagaatttgtgtcaaaggaagggatatgtcactctagagacaacntaaagggaaaattatgggagaaggaaatttggaaatcaataaacacatagataaagaatggtctanatgttgat

SEQ ID NO: 75055 - DNA, 379 bp, Glycine max
  unsure (1)..(379): unsure at all n locations
tcatcaagagattataaatatgtgaccatgacatgatttcaataattatcaatcatctgtgaatcgtctatctttcaatctttttttcaacatcatctctcanacatctttcaatcaagcttccaatatctntctacagaattttctaattcatttctcttcatctntctaaaagttgtttatcaacaccttctcttcaaagaaaagttctttgttcaaaaacctggggtattcatnctgttcattctcttctccctttgccaaaagaatgaaggactaatcgcctgaatttctttgtgtctttcttctcccttacaaaagattcaaaggactaactgcctgagaattcttntgattcttcccttccccttaaaccaaa

SEQ ID NO: 75056 - DNA, 426 bp, Glycine max
  unsure (1)..(426): unsure at all n locations
agcttgtgcagatggaatgtactttctatctggagctattgaanatcttctatacctatgcatgtgccgatntggaaggtaatttgttttctactgttaatggttgatgtgccattattttctcctatntcttaaccctttttgcaccattttaattactgattagtcataattgtcaaattaattatgcagttttatcatttgggcctactggattaattttgtgttcttaatttaatttcaggagaattataagcaattggggttcaatctagaattttggctcggacttgaagataactagactatttattctaccaaattctatcttatctagatattatntagatttgatctcatctagatattatntcatctagatcctatcttatcttatcttatctagattnntatttatctatgggc

SEQ ID NO: 75057 - DNA, 340 bp, Glycine max
  unsure (1)..(340): unsure at all n locations
gttgtaatcataacaatatattggtaatcgattaccagtgtatctgaacgatgaaattcacattaaattgtgaaaagtcatatcttttcataaaatgctntgtgtaatcgattacatggttttggtaatcgattaccagtgacaagttntgaataaaaagtcaagagatctaactcttccaatggttttcaggtttttctcaagggtataactcttcccatggntttcttgaccagacatgaagagtctataaaagcaagaccttgacttgcatttaaaaacaacacttacaactttntagaacaacttttgagaaatcttcanacctttgctacttatc

SEQ ID NO: 75058 - DNA, 411 bp, Glycine max
  unsure (1)..(411): unsure at all n locations
agtcacctgcggcatgcaagcttggaaggtagtcatacctcacanaatatatgtatgcgtgtttatgtagtgaanaataccttagatatgcatgtatgtaatttaggtagcaaacaactacctcacaaaatatatatatgtatgtttaggtagcaagataccttggatatgcatgtatatagcanaagtacctcacaaaaatatacacatgtntaggtagcaaaatacctcatgagaaaaaaaggaaaaaanaacatcaactaacgagaaatagaaatgaaccaattgaaaaaaaagagacaaaagaaaaatagttatctagctaaaaaccaacatgcttttgaagagataacttcaactttctttgaaaaaaatcactgatcataacaattttgaaaaagtgatcacctg

SEQ ID NO: 75059 - DNA, 409 bp, Glycine max
  unsure (1)..(409): unsure at all n locations
cccggcatagtcggtcagttataacctttatgtactctaagcaggcgagctcctggcagtcaacagataaaaggaacaaagaccacatagcaaggaggcttgtggtggctggccagctgtgaactttgattgatatgtgggttatggcctctggtaatcgattaccaagggtgggtaatcgattacaaggcttaaaaatgaagacaggaagctaagatggtctctggtaaatcgataccaggggtgtaatcgataccaggcttgaaaacgaagtcaggaaactaagggagcctctggtaatcgattaccagcctgtgtaatcgattacatagagggatgggtcactggtaatcgaataccacgtatgtgtaataattacacagtgcaattttgcatantttcatgtctg

SEQ ID NO: 75060 - DNA, 494 bp, Glycine max
  unsure (1)..(494): unsure at all n locations
cctgccgcatgcaagcttataggaggtanggtattgtgataaaaatgtctttccaaacataccttangggaattggataagagagtagtggattattgtttgcaacaaagtacttggttgttggataagatgcaaacataacttcctgattttgaatccatgcccaagttttaattatgacaaatcattactaaaacaaattataaagatgattgagaaaagctatgcaagctaacaaatctactaagtattttagttgaaagtaaaagagagcatatcattacaagtattctgatgagatcaaaggaagctcataaaagatgtctttacactacattgaaatagagtatcagaagattgaatgaaacttcatcagaatgattatttacagcttccttcgaagatctcaatctaagtaagttgcaaaggacataaataagacctcacatactcagaagaaaattagagggattaatggaataacatgaaatgat

SEQ ID NO: 75061 - DNA, 473 bp, Glycine max
  unsure (1)..(473): unsure at all n locations
catcagaaatggcagcaagtccttcatattgatcatgttatagtcattcagggcagcagtaagatattccccagcaggggtagtcttaactctctcggaaccagatttaactaaagcaacagtgccatcattcttatctatcatcaaagatgaaggaagaacatccacagaacgagctctagcagtggtgctagtgtcattcctgtttgaatacaacgagaataaagccaatatccataagcttaaaaacaaaatataactgtaaaacatataggatataaagtaaaattataccttccaatatnttgaggctgaacattaactgatcccctagataatggacttgactgctgaaaataaattgaaaatcttaaaacaacatatacaccacattgacagcctagaagcatgcantacaaataatagtcacagtactttagaatcttcatctatccttctatatgtagcatata

SEQ ID NO: 75062 - DNA, 458 bp, Glycine max
  unsure (1)..(458): unsure at all n locations
ctgcggcatgcagcttgttgttgattagggggctctttgggttattgatgttttggtgaagggtgcgggcaatgacaagggctgatattggcttagcatngatattgttgagctggtgggaaattcggccatgcatgacatggtagtcacaacatggattgctatctccttctcattctctctattatccccacggctcttatgtaattaaataagataatcgaatntgcctcttttcagactcacttcgatcctttcgctagtgataactaaatagcaaagcttgcacgtgggaacccaccaccatctcatattagaacacccggaacgtatcttctatcattgctatcaacctcctcttcttatagagggtgctactgaactgcagattcctccacctttggcgtttctttgacgactcatgctcttcttgcacaagtttgatctgcttctatctt

SEQ ID NO: 75063 - DNA, 414 bp, Glycine max
  unsure (1)..(414): unsure at all n locations
ctccgccgattaggnttttctggcaaaggattattntnnctgattatgatgcaaattgatcatcctactttgatgaatgggaagcctgtggcaaatacagaggattagaatgaggaaggaacccatgttgtggctgccattccaaatttcccaccagctcaacaatgtcattactcaactaatatcatcccttctcatttacccaccatccaaccatccacaaaggccatccttaaatcaaccacaaagcctacctgccacacatccaatgccaaacaccacccttaacacataccaagacgccaaccagggagggaatattctagcgaanaagcctgtagaattcaccccaattccggtgtcctatgctaactttgctccatatctactcgataattcaatggtagccataac

SEQ ID NO: 75064 - DNA, 245 bp, Glycine max
  unsure (1)..(245): unsure at all n locations
agctntatgttccaactcaacaagtatgtgacaagatttgccatagaccaattagaagggagtaagtcatgtaggagctntgtatgctgctttgtatgcccataaagctacatctagtttttgggaccaatccttccttgattgagcatatgtgttttctaagattttcttaacttccatgttagagactntagcttacccattggtttgagggtggtaaggcgaggctaccttgtgtttgactc

SEQ ID NO: 75065 - DNA, 404 bp, Glycine max
  unsure (1)..(404): unsure at all n locations
ccttcacccgacgaagacactgacaaaaacttatcttctccttcttggacaaggtatggcaggctgggggcaagtaaatnttcttcccatcagaccttggatgcaattgtgatcgtatacccatatcagctagatcttgatgggtattcaagccatccttcgtctttgccttgaatgttaaggagcgtcccaatcacattgtcacaaacattnttctcacatgcataacatcaatacaatgtctaacgtcaagatcacaccagttcagaagatcaaagaaaatagacctcttctccatatgcaactctgactttatccttcttttggtctcccaatacagtatcaggtgtgaacccgtgattacctgctaccatcacggatcgcgcatatatgatctgacttca

SEQ ID NO: 75066 - DNA, 402 bp, Glycine max
  unsure (1)..(402): unsure at all n locations
gacagccctaagctagctgaaaatcctgnttgcttaagaagtcaagtccataccatctaagttgaaagagtatgatgactacggatgtcaatatggcaccgatgaaccttgaatgagaaaccaaaagcccgaaggaagatcacgacaaagctagtttgagggcttattggcagcaatagtgagctcaactccgaaagtgaaagaatatacggtcaaggctgacttgaagacactaaggttgcttagtcaaagaatttgtccacagtaacagactgagggattgggccgctcatgaggcaaaaactaatctacgggactacacaagctaagagatcccagatatacaaagcaacagggaaggtatgtctggcccaagcacaaggacgccgttgtttcttgaag

SEQ ID NO: 75067 - DNA, 412 bp, Glycine max
  unsure (1)..(412): unsure at all n locations
gcttgtanaataaagttctggtcactgccacagcttataattctgtgctattgattttcttatgacaataggaccaaaaatttaaaaatacgatctacattatgcttgtcaacagtgaattatcaagagaattaaaccacactaaagaaaaaaattattccaggtgtctatacaggtgtctatacagttctctaactgtatagacacctagaataatttgtaagttcaaatatatttgacaattccactcatgtagaaacatatttaactcatcttctttagcttggatattcaacctttattttggctatggccattcactcatcccatgctcgccattaattgtgtactntattgtttgcgaaactaaacatggaatattatcatgacatatctcgaacctttttattga

SEQ ID NO: 75068 - DNA, 392 bp, Glycine max
  unsure (1)..(392): unsure at all n locations
tgttgcccaagtttcatggtcttgcaggtgaagatccttataagaatcttaaggagttccatattgtttgttccaccatgaagccccctgatgtctaggaagatcatatatttctaaaggcttttcctcattctctagagggagtggcaaaagattggttgtactaccttgctcccaggtccattttcagctaggatgaccttcagagggttgtctcggagaaattcttccctgcatctatgaccactgccatcagaaaagacatttcangcatcangcaacttagtggagagagcttgcatgagtactangcatcangcaacttagtaacatggagaggagtatgattaatgctgccagtggtggagctcttggtgatatgacccctgctg

SEQ ID NO: 75069 - DNA, 404 bp, Glycine max
  unsure (1)..(404): unsure at all n locations
ttagactntcccaaaatctagaagtaaatctaggatctctattagacactatgctagatggcacaccatgtagtctgagaatctcactaatatacagggaggctaacttctccaatggaaatttgatattaattggaataaagtgagtaggcttggtcagtctgtcaacaataacctagatagaatntaaacctatgagggtcctagatagtcctacaacaaaatcatggaaatactgtccatcttccactgtggtatctctaaggattgtaacttacctgaangtctttgatgttctatcttnaccttctgatagactagacatgcatacacaaattcactaacctctctcttcatgtggtgctaccaaaacattgtctttagatcttgatatatctcggtag

SEQ ID NO: 75070 - DNA, 424 bp, Glycine max
  unsure (1)..(424): unsure at all n locations
tcaagactcaagagtcaagaatcaagatatgaattatcaagataagtatgaaaaagttntttcaaaaactgagtagcacatnggattttctcanaacctttntaccanagagtttttactctctagtaatcgattaccagattattgtaatcgatttccagtagcaaaatggatttgaaaagttttcaactgaatttacaacattccaattgatttcaaaatgttgtaatcgattacaatggtttggtaatcgattaccagtgtgctngaacgttgaaattcanattcaaatgtgaagagtcacattctttcacaaaaaagctntgtgtaatcgattacactggattggtaatcgattatcaataatagtttctgaacaaatcanaagatgtaactcttcaaatagntnntttttttttacttt

SEQ ID NO: 75071 - DNA, 394 bp, Glycine max
  unsure (1)..(394): unsure at all n locations
tgaacctagcctatgatgaatctttgatgcctgagcttgactctatattctattaaaggctcttatcatgattcggcctgacttttttaaaagcctgacatgacctgatagtctgtttataagccttatccgccataaatattcaatactttatggagtaagagaaagtcttcgcaaaagagaaatcaaatctcaatcattaagaatataacatgactcataactcacaccntaattcgaattaaagtcttcgcctacaggaaatcgaatatcgaataataagtttgatagtttaaacacacaaattaattgcttcccaataataatattatatatcggtaccccaacaaaaatataggactcatctatatctatatatatatatatatatata

SEQ ID NO: 75072 - DNA, 344 bp, Glycine max
cacccacacagtataacaatgaggtcattctatgtgctacagacggccgctctcaatgaagtcatatcacaacaatgaatatccatattacctttaattattgcacatcttactgaaacaggtgtttatacagaatatggcaaaaactccataaaggctctttccatgtaatgcaaacactctgtcattgagtgatactctttgaaacatatattgattttaatctattcacatttatatagaatgagacaatatatttcttcctcagaagagaaaccaataacaaaggaaaattatggattattccatcttctttgtatcactgatctgctaatgtgtaaata

SEQ ID NO: 75073 - DNA, 435 bp, Glycine max
  unsure (1)..(435): unsure at all n locations
gtcacctgccgcatgcanngctgacagaggctcanaaactngtatctcatatgagtttgcgaaagttacttgcatttctacaaaattgttggtgacgcatttccaattttgattgaaatgaagccaccctatgacattttctactatctagggttgattaattttctagacgactaggtctatctcgtcgttatgctagtagaaagctcaattccataactcataaaattgttagatctaatagaaaatattcgtcaattttcaaaaaaaataaatcttatgttacatgtgtttttctcctcattataaaatggtatactacaattgtggttagcaaatacaaagtctcgtgaagaaagcaatccaacaatacgagaantttgaaggcacgtatataaataaatctacctttcacttctacaacctaacaaaaca

SEQ ID NO: 75074 - DNA, 405 bp, Glycine max
  unsure (1)..(405): unsure at all n locations
gcatgacttatgcctaggaatctaaattttggttcgaatgttgaaaggcatgaatattangacatgcttgaagggttttactagaatttggctgccccatgaggaatactttgcacctaggtagcatggaagatacttttcaatggtattatatatgtgtgaatataggtagcatggaaaacacctttcaatggtatgtatatatgtgaatataggtagcatccaaaaatacctctcaatggtatgtatatatgtgtgaatatangtagcatggaaaatatctntcaatggtatgtatatatgtgaatatatgtggcgcagaaataccttgcagagtgtgtgaatatatggcatataaataccttgcacagggtgaatgagtagcaaaaaatgcctttcacatat

SEQ ID NO: 75075 - DNA, 372 bp, Glycine max
  unsure (1)..(372): unsure at all n locations
agtcacctgcggcatgcaagctnttggagtaaaaacatggtgaccaactcatttatttannaaaggaagtcgtatctagtcaaggtctgagagaccatacaagtttcctaacgaattctaattatgtgggccattaagtctatcatatgctgacaatagccgagaagcccatgaatctcttctgcggcggagtaggtgtctgccatcgccttggccttggctaacaatcggagaagttcttgactcccgtncaaggtaagagcaaacccgatccatccacatgtgtgcctcttggtggaaagagacgatcacccttcctctaagcctctttttcgcatatacttgagcatactcatccgcgattctatgctc

SEQ ID NO: 75076 - DNA, 409 bp, Glycine max
  unsure (1)..(409): unsure at all n locations
tcctgactcaccatattccttgaccctttttnanaattctatccttaccctcggaagcaaanaagaatagaatggaaatttccaatcaaaaaagaatagaaggaaaatttccaatgaaagcaaaaaaagaaaagaaggaaaattccccaatcaaagagtgggagaaagcaaaaagaaaagaaaggaaattcccaatcaaagaatgggagaaagtaaaaaaggaagaagaagagtgaaagaaagcttctgatcagggatcgaaggataaacagaagatatgtgcagagaggtctttagactggacaatatctgaacaatacagaattgtcaccaaatgaacaaaaagaaggaaaggagaccacgacctanaatggtcttctccctttgattaccaaccaaaatcccgtgc

SEQ ID NO: 75077 - DNA, 451 bp, Glycine max
  unsure (1)..(451): unsure at all n locations
tgccgcatgcagatgttatatagctgattattttatcaataaattctttgagtttatccagaacaatagagtgtatctcttctatcttacagagagcgactctcctcacatcttgagtgaatcaagaacaccctggctgtattaaatgacattcacaacctttgtgtgtttgccctcgctggaaagagtgattctttccttcctatcatctccacccttgttcttctaaaccacaattcagaaaatacacctctgccctaaatatttcgagaccataactccactatacacactcaaataagcgattctgagcctaatccgcattaaaacgagactttcacctcgttggatcacctcatgtggagctctgacttccgctattgccttntatattctgtcaggcccacttacctacgtttacatccatcatcatttatgcacaacccctata

SEQ ID NO: 75078 - DNA, 393 bp, Glycine max
  unsure (1)..(393): unsure at all n locations
gctcgctcggacatccgngtganaagttatgacgcattgtatttctcattgcttccgcagntcaattntgagcgtcttgatatgtgatttgcctgaaaaggtcatccgtgtgaaaagttataccagttgaatttctcaagagcttccgttggtcaatatcgagcttctcgacatactatgtgcccgaataggatatccgtgtgaaaagttatgaccatctgaatttcgcgagagattccgatgcttaatttcgagcgtatcgatataatataagcctgaatcggacatccgtgtgaaaagttatgaccatctgaatttctaaagaactttcggtgttcaatattgagcttctcgacatattatgtgcccgaatcgatatccgtgtgaaaggta

SEQ ID NO: 75079 - DNA, 471 bp, Glycine max
  unsure (1)..(471): unsure at all n locations
agctntganacaagtgatatgatcaagttatatgcatatgatatgcataaatattcttcatgaaggtagaaatataattcatttgaacccaataaagggatatacaaataatcaaatctcattgattatcaacagtgtcatgtcaatctaattatatcaactatattgtatgattgccattctgattcaattgaaaacataatcccttgcattttttgctttggccactgctctcgatgaaaccaaangtcaactaaaacaacctcttgtctagggaaagtaccttactacgacatccttcttgctgacccaaaataccaatgatctttatttacatggngactnttaaaggattgttaaataacacgacatctannggccttcatagacttaaataattgaaataatatcgatatcatcatcacaacgtgaaacaaagttgaatgaaacatctactttttttatctgcat

SEQ ID NO: 75080 - DNA, 436 bp, Glycine max
  unsure (1)..(436): unsure at all n locations
tgaagatgtccaatgaagctagacaaatattttcacctctacataaactcctacaagaattaactccaattnttcattntgttgtcttttgggcttgaatccttattagcccatagttttaaatagagattntatgttatagcttanggttccaaatgttgtgcatgaaaaggacaagggatttgagatgttgcatgatggctntgatgcttaaggattcatcttccattatttctccatcaattggctcttcccccatgggtgtgaatggctgcgtttgtaatagcccgtttcctttgtttgttaatataaaataatgaataagaataaaaattaggtcattagatttctcactatatatnaggaactttaacccataacagcttttacaaatattntttattcctttttttctacgctcanaaccctaacatac

SEQ ID NO: 75081 - DNA, 467 bp, Glycine max
  unsure (1)..(467): unsure at all n locations
agctctagcttctttatgtatcttctcaaggaggtgttcttagttatgagagggctgtgtgtagctaagctctagcttcccaaggaagttatctcaaagaagcttctcaaggaagttttctgaagaaagcttctcaagaaagctacctagtctatcaatagaagcatgtgtaacacttgttgtaactntgatgaatgggagtcttgtgagacacaactcaaagntcaacttctcttcctttttcttccttcaatttcgtgctcgcccctctctctttctctccctctttcttttcctccattgaagcatcctctccaagcttcttatccaaggctgatcttggtggtgaagctccttcttctaaggcttatntcctagtggatggcgccgcctcttacctcttctcttttgtcttccactgcatctccatggtggaaaataaccattaaaggacctcattgaagttc

SEQ ID NO: 75082 - DNA, 396 bp, Glycine max
  unsure (1)..(396): unsure at all n locations
actctcaatccttatacacaggagcgtgtgcttgtggaaagactcttgtccaaggtcacgaatcatgtcctccaaccaatctcccatttctacatcaaacggttcagattgggacccactctgcatgtctgtgacttcaccatgcaatatccacgtcgtgtaattcttcttaatcccatcacacaatagatggtctcgtatgtcatcgagtagttgtcatcttccattcaaacaagtgctgcaaagacaataatattttccttcttcattcggtcgacctctttttgaagcatattgcaagaactgttcgacgtcatccttaatatttgggctcatgcgactttcattcatccaacttcaatccatctaagcaattccatgcatganaatctcact

SEQ ID NO: 75083 - DNA, 322 bp, Glycine max
  unsure (1)..(322): unsure at all n locations
aggacacatgaactataacacaattcatggcgctccgaacaaggtgttgagaatggagaattacactaagcaatcactacgcatagctccaaactcgaaggtggaggacacatgaacgataacgcaattcatggggctccgaaaagaatgagaatggagaattgcactacgcaatcactacgcatatgctcaaacccgatagtggaggacacattaacgaanacgcaattcatggtgctcctcaaagagtgagaatggagaattgcactaagcaatcactacgcatagcttccaactcgaaggtggaggacacatgaacgat

SEQ ID NO: 75084 - DNA, 482 bp, Glycine max
  unsure (1)..(482): unsure at all n locations
agctntatatactntganaccaccatctaaagagccatttctagacacaaaattagctccttntaaagcattagaaggagggatagctctactacgatcacgaacctgagaattgataattggatatagaatatggaaattccacagaccataaggtgcaacataatcgcanaccttgcgagtgatgtggtcggtggagaacatcacacaaggcactgtgcataatccttccttcaaatggaatccaaatatgattccaaaaatctaatgtcccaccaccaatattccaacataatttctttagaacttggtcaaactactgcatatacccttccaaagattagagccccggaccgattagagttaatgttagaaataaaagaatccccataacattcacccattcttcatcataaaagttgtattaaacttcattgaaattgtaagacctatacctcgaaatattttaggcttacaagtat

SEQ ID NO: 75085 - DNA, 421 bp, Glycine max
  unsure (1)..(421): unsure at all n locations
gcgaagtcatcctgcaataatacagcgaanaagtaaccggttacaaaagctcacacacacatganatctctgaacctatcaaataaagaaattaactcacacccatgataacattgccatcacgttgcaccctggattcaaattactataactagtatgtttacaattgacgatgtcaatcagaataagagaaataactcaattcacacggttgcgtaacagcaacattaacatgagagtgataacagggtaagaagtgagtgaaagctacagcatacacgaaagagagaacttactttgaagggaattataaaattgaataccaaatcgaggcattctatataccgactgattttccaggctgagaaccaatctgggtctgtgataatatattatacatgttatataaaacttgagttgg

SEQ ID NO: 75086 - DNA, 477 bp, Glycine max
  unsure (1)..(477): unsure at all n locations
gctgcagcttaagaacaagagcaaactcnaattcanattgcttgctgaacaagcaatctcccgcttagcactctagctcgaaaagcctanaatcaatagaacagtttagaaggagaaattgtgaaaattgaagataaaagctaggaaaatcaagagcaagatatttttcaaggataaatcagctaaagaagacgataattacttgaattaattagagactattattgtttgtaatttcttgtgaatcnttccttaattacatctagcaacaattctataaataggaggctagacattcattgtaacagtgtagaagtcccgggcaattcttagaattantatttagactttcactaactagacgcctacactattccattagacattctaggtttcattgtatgagtaccaatcccttcacctacgagaggaaaaaatgaaccttgtttcgctttaattctatcaatcaatacttca

SEQ ID NO: 75087 - DNA, 475 bp, Glycine max
  unsure (1)..(475): unsure at all n locations
agctaacatttctaactccttgtgaaacttgtgcaccccanatacgatggcttctntggatcacttctctatttgtcatacaaaggtgcatgttcttgttgaaaatagtcttgtccaagatcgtgaatcatgtcttctatatgatctccaatgtcttcatcaatcgtctcagtgcgagaaactgttggcatgtctggcaattccccatgccatatnncattttttgtaattcggaatgaccttgtgacatataagatgtgatcttatttcatttactgactagcatctcccattcacacatttaacacatgggcagaanaatttcccctcaaaactntctgcattatgttctgcaaattgtacgaatngttcaaccncattttcatactcgtcactgatgcgtgatgctttcatccaactacaatctatgtntgctctgntgtgcanacttcattaagttattccgcatgcatgc

SEQ ID NO: 75088 - DNA, 426 bp, Glycine max
  unsure (1)..(426): unsure at all n locations
tgcaagcttatactttgagagaggaagataactcaattatttatatgagcacaaactcattgtagcaatcagacaagacanacaaataaaattttgttagtcgtcatataaacaagttaattgaaaggaaagtttcaaccaacttaatttaaaagataatggttttgatgttacattnttcatgatntaagtgcttagatctttaaagatggaagtcagaatttttctttttgtttaatcttcttgagagatgatctcatcgctctcatagtccttggatagaaagttgatctccttcttcgaaccatcagatgagtcattgtcatcctaagcaatatacgctctcttggatcttctttcttcatagcttttcttctcattcttttctggccatgattcatttgagggtgatgtgtcaatattttc

SEQ ID NO: 75089 - DNA, 477 bp, Glycine max
  unsure (1)..(477): unsure at all n locations
cctcattaggtggtgcaacatatttcttggcctaataggaactccattggttttgcagcttctaatgttatgattggtttggccacaccttccacatgtaaagttaggcaatttcctctttagcctatgtcctatgacattgtctttatctacaaatctccttctatttttcttaagccttcctctttggacctttntatgtggtggaataggttgtgcatactgtgtctgggcccaatattgtggtccttcgaatgggtcaatanaatggtggtatgtcttattataagcctctattgacagccactcatgacacatgtcctcaggcttgcctcccttgtgagttattggtgcaatggcatgtcagcatgacatccctacatcaannagtgtaaatcagagacatgtaggttagggaatgaaanaaaactgtaagaacacacctgtagttgcatactctacactgcagtcatcagc

SEQ ID NO: 75090 - DNA, 485 bp, Glycine max
  unsure (1)..(485): unsure at all n locations
ctgcgctgctgcttactcattgcaacgttcaaagttttttatggtgaatcgattcaatatattggtaatcgattaccagtgtatctgaacgttggaattcaaattcaattgtgaagagtcacatcttttcttaaattcattgtgtaatcgattacatggttatggtaattgattaccagtgacaagttntgaataaaaagtcaagagatgtaactcttgacatgatttctcaagggtataactcttncaatgattttcttgaccagacatgaagagtctatanaagcaagaccttgacttgcattcaaataacttttgaacaactntntgaacttctttgaacaactcttgagaaatcttgaaaccctttctactcatctttcttcttcttcttcttccttttgccaaaagctttcccaagtttcttgtttccaaacctttgtcttctacagaaaacaaangagtgctatatcctttcattctct

SEQ ID NO: 75091 - DNA, 407 bp, Glycine max
  unsure (1)..(407): unsure at all n locations
gagttacatgaatgcttaaatgtttggttcgaataggtctagttgttggttaaacttgttgcactatgatgggcacattgcacctaaattgttgtaggatgttaatttctttcttttgaaataatgtgcactgagttgtgatttgttttattagttgcacggtaacacatgcaattagcaaaaaccacacaaagttgattaacttcttgcttgctatacttangataactaanataatgggtacgtatttcatgcaaactaactttttatggatgtgtcgtcgtaggcaatggctccaaagaagcttcttactaaaagggctaggaaggacaccgcaagggagggatccagtgtatccncacaagtggagattgagttgacngacaccatttctgaagcgaggagca

SEQ ID NO: 75092 - DNA, 438 bp, Glycine max
cattctatgtacccgtagtggtccgtattgtgtttcgagcatttctattctcgttgtggatactttatatacgccgtgttgacgtgcttaagccattttacttaagtcatttctcacttaacttaaaaataaaatcaatttccaccgaacgtgtgaattgtattatccgttaacttcggttaaaatgaattccgaccgttcgggcgtgcctgaaccacgttggaaatcaaaaagaggtagaatatactatattattcaaaaaaacatcttttaatagaatatagcgaaaatcaatcggacgtcttttctctctgggaattctcattcttaatcgagtcgattaataactaatgtgaaactaatgctaaaatcaactcgcctagtcaagctcgtcaacaaaatatggctttcaaagttgtcatttcaatttctcactaa

SEQ ID NO: 75093 - DNA, 363 bp, Glycine max
  unsure (1)..(363): unsure at all n locations
gttaanaccgagctcgatggtggtgcgagtcttttattttctctgcgggaagcgatgggggaaatcgacatttccattcagataggcccccacacttgcaacgtggtgtttcaagtaatggatataaatcccgcctatagctgcctcttgngaagaccttggattcatgccctgtgagtggtcccttcaacgcttcaccagaaattgaagntcgcagtgggtggacttttaatgatagngtcnggtgaagaggatatgttagtgagctgcccctcctccgcaccgtacgtagaagtggcggaagaatcattggaaacggctttccaatcctctgaggtggtgagctgcgcctctgtggaacca

SEQ ID NO: 75094 - DNA, 477 bp, Glycine max
ctgcagcttgaggtgcgagtcaccatctttcatagtatagtatcgataatgtgtctaccatcacgattatcgtctccctttcatcatagggggtaccacctgggccgccagatcccttcaccttttgggcgtgttcttttgaaagatccgtccccctttttacacatgttctgtagttgcatcctatccggaaccatatcaaaattgtactgatactgtctaacaaaaggcaaccattaggtcccttcaagaatggactcggggaaggttcaagttagtgtaccaggtaacagctaccccagtaagactttcttggaaggaatgtatcagcaattcctcatctttggcgtattcacccatcttctgacaatacatctttagatggttcttgtgacaagtagtccccttgtacttgtcaaagtccagcactttgaacttgggaggggtgatgatattgggttctaggaacaactcttt

SEQ ID NO: 75095 - DNA, 393 bp, Glycine max
  unsure (1)..(393): unsure at all n locations
ttgaatacaaggtcattaaattgccgcaaatatttatgcaaacaattntaataaacacgcatanttttaaaatataatcatataaaagatcatgattaaaattctgcagcaaaatttcggtagaacaacttaatgatcgatcacatggactggctgttactggatcttggctcatttgacaacactaccagtctacttactttttacctaaatttctagccttacctactttttttgtctgtgaaaagagaattacttttcacttcatgttaattccctcttaatattgttcccctgatgtgatcaaaagtgaatatgccatgagttgatcatttgaatcaaagaanatagaggcacgccaagcaccccagaaccagttacgatcatgataac

SEQ ID NO: 75096 - DNA, 459 bp, Glycine max
  unsure (1)..(459): unsure at all n locations
gcaagcttgaaactgganattcttgatcaacactgcaatttactatggtcaacatactaatggctgaatatgctatacacttaaagtgaacttgttgtcttcatgaagcgatgaaatttaattatcaaaaagtaaaatgcattccaattaccaaaacatcatttgcacaattcattcccaactactattttaaaagacaaccatctttaacagatgattcttttgaaatataaattatttgtaatgtgcaacaaaaactatatatatctctattctacctagaataatcaaacatgagattctgtgtagataaccatccagcctactcaacagcttccttcagaaactaagatgtaggactaaagtatacataagtccatatctgaaaattcataggaccaacgtaggtgattcacatactcttttttgtttcacaagtcctaatagcacaccatacat

SEQ ID NO: 75097 - DNA, 487 bp, Glycine max
  unsure (1)..(487): unsure at all n locations
agcttgcaatagtgaaagtatctttagggtaagtgttatatttaaaattctctttttccgtaaaatgcatgcctaaatatgcattccatacttcaaattagcctggtgttttatatgaacgcataattggttcccttctaaactatagatacggngacccctccagcattaataagattgaagcatttgacattgccataaactaatctgatgaattatcttgttaggcttggggtgctatgcctctgcagctacatcacccttccattatatgctctngttactcangtactatatgcctttcgtttcctgattttcttgtatttgatcggagccaatnttgaatgactaaattccaataattaattgctatcagaaaactgagagatgcannatagttcaggttgatgatgccaaagctcatatagctcaaagaatagcanaggacatccatgaaaataaccgatttgattaatatgatgaaaga

SEQ ID NO: 75098 - DNA, 344 bp, Glycine max
  unsure (1)..(344): unsure at all n locations
atattgtttacatttttatattattaaatagcgaaatcatacaggaatggaaaccaatagggttaggatggattgtccaataaggaggccacactaacaagtaacaaggtgacagccagaaacaagctatatgtccattcctaagcaagacgatgggggttcctataaactctntttttttccttttttnttntctggaaacctcctataagggtgctgcatgcatggtctttaagggagggtgaaagagtattcactgttaaattatcaaaaagggaaagggaaagctaatagctagactntgtcagaagcaattatttgactattttgcactattacgtaca

SEQ ID NO: 75099 - DNA, 425 bp, Glycine max
  unsure (1)..(425): unsure at all n locations
agcttcaacctagaggagacggaccattccaagtgttgtagaatatcaacgacaatgcccacaagtntgacttgcctagtgagtataatgtaagtgccactttcaatgtgtctgatctatctctttntgatgcagatggaggggccttggatttgaggacaaatccttttcaagaaggagggagtgatgaggtgatatgaatcctcatggcacaagggctgacttangatcgtctaggaataaaccttgatggaaaatgcggaaatngattaaggaaaggatgggaaataacgtggctaattctgtgggtcttaataaggtggttcttgcatataatggatgaatgcgatggtaaaacgtacgttaagtggtggctggacagatatatataaatggcaataactgaagctacagggctccaaatg

SEQ ID NO: 75100 - DNA, 370 bp, Glycine max
  unsure (1)..(370): unsure at all n locations
aagctaacaatgctttaagaaagttataggtcatttcattggcctaaantaaatcaaacttatttgatgtttactcttatattttcaatcatgtactgctgactaatgtttttttgtctgcactctgcagatttctgttgacctcactgtctagtgtggacgtacctgtcttatgctctcctgtgctatttcaaaattctgctttgtcttctcttgacgtatgtccttggcttcattttctttccattaatttctcatgttcttngattcttgaattggtcacattaagttgattattgaacctcttattctttttttggagaattntgcctttatgaaaactcgaactaaatgggtaatctagctatgt

SEQ ID NO: 75101 - DNA, 462 bp, Glycine max
  unsure (1)..(462): unsure at all n locations
agcttgtatgattatggngtacccatcacatgtggtactatgtggcggtcaggcgatggtgcacaacaagttntccacatccacaaatcgcgcataaacccaccatcccgtgttgcccacctccaactgagctcacgtactcccacgtagcccatatcctcgtttctctcaacaccgggtccccatcaatcctcccaagcttccccaacatccaagtaactcaacattcaaacaacacataccatcacagccaagaaaacagggcataggcagaaaactctgcccaaaacaccaaccaaaatcacagcttttctcacttaaagaccncagtaacaattccttcgttccagttcgttaaccggtggaatcgactcgaaaatttactggaagtctctagtacataaacctacattntgaccgttgggatctactaacaaacatacataactcattctgtactac

SEQ ID NO: 75102 - DNA, 354 bp, Glycine max
  unsure (1)..(354): unsure at all n locations
ggctgcagcaccggctccgttttcctaactgtactggaggcggntgcggtggctttatcctctatggntttctggagttttaacatgacatccgagatggaagccatttgatctttaaggccgatagatcagccttcatctgttcctgcacgccctcttcattatcccattttctggatcgagtggtatangggtgccttggcgttttcttagttatgatgaaattcctaaagaaataaacaatggtgagtatgccaccaaaacatgagtattgcaatggatgattggagcacttggattcaccccaagattnttagattacgtaatgagtccagaacttctcattttataaaa

SEQ ID NO: 75103 - DNA, 470 bp, Glycine max
  unsure (1)..(470): unsure at all n locations
tatgcacccatggtggtccacatagagtttcgtgttcttttatctcattatcatttacttttatacccctttgtcacgtgcttaagccattctacttaagtcatttctcgcttaacttataaataaaataaatttccaccgaccgtttgaattgtattatccgttaacttcggttaaaataaattccgaccgttcggtcgtgccgtaaccacgttggatatataaaagaggtagaaaataatataatattcaaaaacatctttttagtaaataaagctgaaatcaatagacgtttctcttgggattctcattcttaatcgattgactaaactaaagggactaggctaaatatactcactancaagctcgccataaaataggtttgagttttcattaattctactaagaaacagatcatttaggccacgcttaaagataccttttgtaaaacgatcactgtaagaagacta

SEQ ID NO: 75104 - DNA, 176 bp, Glycine max
tatttctttaattacctcatagctattgaaagctcttcacgagttccaatagtattcacgatatctacatgaacaccaattatgataaatctattgtctgattttcgtgaaaatacatggcaagtactcactaagtgcattatatctcatgtgacttgattcactactcaaaaata

SEQ ID NO: 75105 - DNA, 417 bp, Glycine max
  unsure (1)..(417): unsure at all n locations
cttgcctatgtattcatttcataatagggaacaaattcatagtaaccctcgagtacaagaccgagatgactatagagtagtattccctcatatttgatttccccatttccaacaacttagtatatgttntattttcatttgaaaatgttgtgacatgtgtttcaataaatccaacgaataaaaacaaaataaatgttaaaacaaggattcttttgataaattattttcacctcaaaccgtaatttataacatgttcttagttaagtacgaggctttccaccttttgcttgacaatggcaaaggagatgcacattcagagtaactagcgagctagctaanaaacctctcgtgacatttgaccagnggaaagaaacatgatgtccaaactctggggcacanaatatcaacatatatatc

SEQ ID NO: 75106 - DNA, 428 bp, Glycine max
agcttgaagaaagtttggcttttacatgcccaactctctttgagtggctatgtgattggttggtgcatcttagtatatatgatatctattttgcattatgcatcatcatggttattatgaagaatagcttctaagttaggagaatttcttcaaaggcaaaaactctctatatttaattgattacaaagttgtcgtaatcgattacaacaagttgtctgaagcttacaagagttaacgtctcatattatgttaatcgattatgatactatcggaaatgattacattattttttgagacaatgactaatatattcaggagcctctactttattcgattaccaggtgggataatcgattacttgtctcttgtgtgagtgtttagaggtgaacaagaatactttaatcgattacctagagcaattacttgac

SEQ ID NO: 75107 - DNA, 400 bp, Glycine max
  unsure (1)..(400): unsure at all n locations
gtcatgctgctgatcctggctgaagacacatgctgcgcttagcgcaatgatatcacgcttaacgcacgggcttgatgctgaagctgcgcttaacggtggatgcgcgcttagcccactaatgaactaagctcaactgtcacttgtggcactttatgactagagacagctttatccataaaacaaaagttatttacctgaaattgacatatgtcatcattatatccaatggacatattctagagacaactntatccataaaacacatattaattacctgagattgcacatatttcatcattaattcctatggacatattctagagacaactttatccatataacaaaaattagtttacctgaantgcacatnattcatcattaatttcaatggacataatct

SEQ ID NO: 75108 - DNA, 441 bp, Glycine max
  unsure (1)..(441): unsure at all n locations
gcttgtgcgcaacaatggtggaggaagaagaaggtgantagcaacgtgaggtatatggagagagagagctgtctgaaattgggctgagtgaggagagagagagctgctctttagtttaaaaggctnttttcctcttttattattatattatttaagctatgccacatgtctcgatttgagtggagcaagaaggacccactttctcttttgattgtgacccatactcagccacaaaaagtgagaaaaatctaacctttgatacgcttaaatcttgcctcggtttgcgtgccatttctctgattccagttcctcgcgtttctctgcgtccattcgggccagttttcgaaagtaagcaatatatatatcanaacgctcagaatataaccccgagcgtggttcagaggttggtttctgttaatttaagtcgcacgcacaacgatg

SEQ ID NO: 75109 - DNA, 301 bp, Glycine max
  unsure (1)..(301): unsure at all n locations
gagactcctactntattcgtttatcacattggtacctggagatatgtcgcggnggtcatgagaccttgtggacgtcaggtggggtgctattgcccaaaaccaagcttgaccaatcccgacccaacccgggtatagtccgtcagtgagaacctgtgatgtacctaaacaggcgagctcttggcagtcaacagataatagaacaaagaccacaaaggcaggaggcttgtgtggtggctgccagctgtgaactttgaggttatatgggatatggctctggaatcgataccaagggtggggatcg

SEQ ID NO: 75110 - DNA, 488 bp, Glycine max
  unsure (1)..(488): unsure at all n locations
agcttatcgtaatcgattacatggttgggtttgagactatgattgatttattctggagtctctgctgtaatcaattaccgtgtgatataatcgattacttctctttctataagtgtttcagaagtgaacaagaacactttaatcgattactttgaggatctaaccgattacgtttttcttgagttgtttccagtttttggaataacactctaatcgattaanaagataatctaatcgattactatattgaaataatcgattacattgtagatttattcgattacaggcggttataactgttttttctataaatagccaccttgtgttctcacttatgtgtacaagatcattaagtgtgaaattgcatgagctgaaataagtgaaagaagagaagaaaagtgcttagaaatagtgaatcataacttctaatctcttgattatgaagatcnttctgtgataagtgagatgtgatattttcttaagtcaag

SEQ ID NO: 75111 - DNA, 466 bp, Glycine max
  unsure (1)..(466): unsure at all n locations
agacgtattntgagttacctaaatttgttcattgctcgcgtaatcgatgcctaaggtggtaatcgattataggttcagatagagagtaaggctttctgtcttcattgaaataattgattgcccaagttggtaatcgggtgcaggatatgctaatcgattatcatgcatgctaaatcaaaattttccagaattaaacatgctaaaatgggttttatgaatgttaaatggtacagaatacaaaacacatgtccaaacaaacaagctaactaaagataaatgcataactatatgaatgagttctccctaattggcttaagttagattagacttacttagaatgccaagttcattatgaaagtggaagaacctatcccttgctaaagggttaatgatgatatcagctagtcgtgaatctatatcaacanactctatatcacaatcacccttgtgaatatgatccctaatg

SEQ ID NO: 75112 - DNA, 272 bp, Glycine max
  unsure (1)..(272): unsure at all n locations
tcaccattttgtgtangtatgctttttattaactgtttatagcaaagctacaaaactgcacaacaagttaatatacgcatatcagtacactcgcagattctaaccacctatgatatcattcttttttatgataaatcatcagaaacacgaggaaaataactaaattttgggtgtgaacttcagttgccagaacatagtctgcattacattgttaagatccttacaaataacctattgcactgacttaaaatacacaccacttagttctgaat

SEQ ID NO: 75113 - DNA, 355 bp, Glycine max
  unsure (1)..(355): unsure at all n locations
cgcgcaaatcagcgttggtcactggttatccattacatccctctggctaatcgattaccaagagaagtaatattcgtntgatncaagaactntctaactttatacattctttgaacacaactcttcttgcgtacttcatattggcaatactccttcactatatatatataatctctttcctaaaactcctcagagacttgtctcggatccatacatacttggaatatctcataattacttctgcttgaataaagctttgagacgcatgtgaaactttggcatcatcataacatttagcttgatcctttgtccacacaggcatctcacaaatgtcaagtgctgattcatcattatg

SEQ ID NO: 75114 - DNA, 496 bp, Glycine max
  unsure (1)..(496): unsure at all n locations
agcttgtcatttcatccacatcanactccttattcaatctctcatcaacaacatccaaaacattcccttccacatatagttgccacacccagctcacaagaggcacatgatattccccatcttggtaagtcctccttccacatgcaatttcaagagccacaaccccgaaactataaatgtctgattccttgctagccctaccatcgttgatattggtggtagtttattagatgatagttgatagttgataagtttagagaaatgttttagaaagaacgctatgtcattgatttcttggatggatcaattacaacataccaattgcctattataggctcaagtcactaacctctcaatggtgatgaatggttctacattactttaggtctttctagaagtntcatgatagattagtatcatgatagttctagattcttctatcttatacatacanctatagttctagaatgggtgaccatattcatacacattatag

SEQ ID NO: 75115 - DNA, 498 bp, Glycine max
  unsure (1)..(498): unsure at all n locations
gttctctttttattaggtgaagactatattgtgttattcaagataaatatccttactggaatagaagcaaaggtgcaaaccattttttgctttcgtgttatgattgggtaagtccatttattatatagtatatagtatagtagtatttgattttcagtagctaaattctattgataggcccactattaattgtttaattttccacttattatcaaacacaataatggtggtgtactcactnatgaaagtgatagataaaaatgtaggaaggtaaataagaagacattatgtaaaagctgttttcataagtggtattttccccctctaaaatgttctaatgattgtttctttaagatgcttatatgttatatctctggtaagaagtgtgctctattntaactcttaactntgtggtgaagatgaagacgggatgtgtagctctagtattatgttaaacattaattgtggactgaatttatatgactgatntatattata

SEQ ID NO: 75116 - DNA, 360 bp, Glycine max
  unsure (1)..(360): unsure at all n locations
tctgttcgtgtgtatgatatctactcgacaaggtttgaagtagaggagaccttcaatcctatcacgcaacgtggcggaaaaaagtggacagtaaacttgaatgaccattattgtcaatgcggaaagtattctgtgcttcactattcatgttcacacattattgcagcttatggttacgtgagcatgaactactaccaatatatagatggtgttacacgaatgagcacatcttanaagcttactccgcacaatggtggcctctcaggaatgaagcgacaattctccttctaatgacgcatggacacttatccctgacccaactacaattctttcgaaagggtcggcanaatcaacaatgat

SEQ ID NO: 75117 - DNA, 459 bp, Glycine max
  unsure (1)..(459): unsure at all n locations
agcttatcatatttgataaatacaggatccanaaacatataaagagaacatagttntataaggattaaaattaaccatttgaaatatttaagagtgttgctacgtgggccacgatgagacaaataaataaaattagataaattattttccaaacaatgataaacttgatgagtcgccaccaacatttatttaagaaaaacgtcgagagaacacacaaattaaggaatagtctacgatttgaggaaaaaagaattcatgagtttgttatgtacggagaactatgtagtactctacaagcccgtcatgaagacgaccacctttaatcaagtgtgctaaaacataaagcgatattttaattattatcttcgtttgagaacatcaatcgtgtttgttatattcttctttagaaaagaaatcacatctatttttaaaacagaaaagattttattcttggatgtt

SEQ ID NO: 75118 - DNA, 330 bp, Glycine max
  unsure (1)..(330): unsure at all n locations
actgagctttcgagagaaggggtgcttatcttaataacgacggactcaatctcctcactcttcagtagtatttctttatgttcggaaccccctgttggaaactgcnaacttaccatagtttcaaaataatactaagtgcgtaaaattggagatctttaacagtgcaacggatatgtgtcactgggtgcatgacagtacaacgtaacaagattttggagcttgcaacccagtttgggactcattaacatcccacaagacgaaccttttaatacaggtgcaatacatctaatgcagatcatgccatccataacttgagatgcgtatggtact

SEQ ID NO: 75119 - DNA, 444 bp, Glycine max
  unsure (1)..(444): unsure at all n locations
gcttgtcggngaagagagaagagaagaagctnttgcttattatactcagtgaanaagagagaatgctgtcgatagatggaananatgctctttattcttttacatgaaagggcaaaatngaccctttcattgaattgctgggtgcatcagcaatattactgggtgcacctagcatatcccattatctagcctctcccttggcctacttgcgtgaaataatatcctttacttannattttttttctatctcattattactttaccatttttgacctagatttctttatcaatttattacatccttttaacatttgtaataggatttgctaattgactctagtaagttaaataatttcatctccattaatcaatcaataaaaattagacaatnttcttaatcctaaaatttattattaantgtataattattacatttaatggatc

SEQ ID NO: 75120 - DNA, 480 bp, Glycine max
  unsure (1)..(480): unsure at all n locations
ggttaatctatacaacttaatcatatttgactatcaattcttttagagaaaatgaattgattttcaggagtctatgctntaatcaattacgaggtgatataatcaagtacttttcttttaaaagtgtttcagaggtgatcaagaatactttaattgattacattgttcttgaaagttttccaatttttgggaagaacactntaatcgattgaaatgataatataatccattactttctttgaaatagtcgattacattatatatttagtcaattacaggcggttataactattttttctataaatagccaccttttgttctcacttctaacaacttataattagctagaattatgagctgatattagtaaaagaaagaagagaagaaaaaagtgcttagaaatagtgtgactcacaacttctaatctttgattatgaagaatatcttgagaanaatgaagtgtgagtttctcttaagttc

SEQ ID NO: 75121 - DNA, 158 bp, Glycine max
tatgaaatggattgaatgattttgatatcctgtgataatacaaaggtatcaacctatcgatacttttttgatttgaattaacgtaaagttggatgatcagatggaatatgccattaaacttaacttaaactaatgacttgaattaatttcattaacat

SEQ ID NO: 75122 - DNA, 377 bp, Glycine max
  unsure (1)..(377): unsure at all n locations
tgatttttcttcgaaacaancgattacattgattatttatttttcacaggtggngctcgtcatcttttatgactcaatttttgtatagaaaagtttccaaaatgtaaataaatctcccaatttatggttaatttttggtaggatagtaaatatttctattttagttttcatttgtgctcaatagaagccttcttattgaatttaatgtaaatntcacttcaatttcaggtaaaagggagaaaattatgaaggttcaaaaagtgttgtctcgctaagcttgaaccatgcgcttagcgagaccaaaccgctaagcgagacagtagtggcttagcgcatgagcataagcctgaagaaaagtcttccacgccagcacacac

SEQ ID NO: 75123 - DNA, 379 bp, Glycine max
  unsure (1)..(379): unsure at all n locations
gctgcagctttttgaccaagtctccttcctttcctctaaagcatcttgagttgatagtaggaagcttatctttcttatactaagtgtgagatggctaatgttgctgaaatgattattttggttaanaaagccaaagttaagcatttgattgtttgagttttggattgcggtttttgattattttgattgaataattggatgaaaaaattcctaattttgnnaaggnaatttttgatggtggtttaatgtattgggaanttgatagaaaaatggggttggatttgttttgagatgatttgaaaccgtcacagataattcttagaatttcaaattctacatacttcgcgtccaatgaccaaggtcacgcccaatgatcaag

SEQ ID NO: 75124 - DNA, 241 bp, Glycine max
cctcaggagatcgtaatgctcgattagacccagatcagtttataagcatatctacttataacaaagtgaataaataagatcttacacctcagaagggatgcataagtcttatcttacgaacttgatacacagagaagcttaactagggttctaaaagtttgtctctcgtctgatacactctgctttaaacatctaattctcatttgagtgatatagaaagacctgatggggagttcgatga

SEQ ID NO: 75125 - DNA, 486 bp, Glycine max
  unsure (1)..(486): unsure at all n locations
ctttanataaagtttttgggttattcaattgtcgtattaagaattgctaaatattatagctagcacaaaggaacgagggtgaattgtctatcttcttatctgtgtntgtgtgtgagaaagttactgcatgtgggaatatttggtgtaagggaaagcggtagaatccaaagaggcaaaaaaccttttattatagagagaccccacacaagaatttntttcttttcttttcctttcttcgntttccgctgggttggngtctggtcatgtgaggcaaaattaanagttgcatacgaccaatactcaccgacactagatgttactgtatttntgtagcgtattgcattttatccccccacctcttcccctttttcaggatgatgttactgacacgtaacactttctagtatttcgttcgtcanacatttattttattttttctagcanttattcattattaagggtgccccgttacttatgtgagaatat

SEQ ID NO: 75126 - DNA, 396 bp, Glycine max
  unsure (1)..(396): unsure at all n locations
cctccggacttcacccnccgtgccaccccgatatattaatcaagcccctactttcgaggggcaactcctaccttatgaagactatcccgggcaagacgatggggaaggagatacccatcttggccccctgctccacctcanagatccgtccccgcatgaactaccctaaccgaacatagtccgtcataccccggccctcacccacacccgtaaagaatcttgttcctttgcggaagataagggaaagattgaggcgctngaagagaggttgagagcagtcgagggccttggcaattacccattcttnggattagtggatntatgtctcgtgcccaatatcgtcattcctctcaagttcaaagtaccggactttgataagtacaaagggacgacatg

SEQ ID NO: 75127 - DNA, 497 bp, Glycine max
  unsure (1)..(497): unsure at all n locations
tagatcttcacacagcanaatctctcaagactctctggaacttgtacctttctctctctaaaatctctagacatgcaaagctctgaatcccactccaaactccttatctaanatctgatttcaggcttaaataggtgaccttgttcgtgctcgtgcgcttagcgcaatattggaccgcttagcgcacattagtgaatttcggtttagcgcgtgcctttgtcgcttaacggatggacttgaagcggtgcgcttaattgagatgaaagcggtgcgcttagcgaacctatacaactcatcttcttccagattcttncttgcgcttagccaatgagtggtacgcttagtgggcgctcgctaagccaatggactggcttatcgagaaggtgaaanacaacactcttaanagcttgcctaattaacccgaaattgtcagaaaatgattattaaacacacaaaatggaagtactaagtatttattacctatacttaacataaag

SEQ ID NO: 75128 - DNA, 334 bp, Glycine max
  unsure (1)..(334): unsure at all n locations
gctatcatatctagaatattctctttgtgaagctggctaaaaagggaaacaagtaacaagttcttttaaagctaanaatgttttttccacttctaggcctttagagcttctacaccttgatttgtttgaaccaaccataactgcatccccctctagatgtagatatggtctgggtatgatggacgactacacccgatggagatgggtanggttctaacccacaaggatgagtcttttgatgccttttataaattctataaaaagattcaaaatgaaaaaggcatttgtatctcttcaatcagaagtgatcacgagggagaagtttgaaatgatc

SEQ ID NO: 75129 - DNA, 504 bp, Glycine max
  unsure (1)..(504): unsure at all n locations
gcacgcatgcaagctnttacatgcatgtgtctaccatatntactatactttgatcaactgatacaatctatntgattgaaaagataatttatactactcttctaatgtagtggacaactaaaatcaaaataatataatagaaaatactgcttaagccattcaagtcaagtcattttgaatctcaccattactatcatgcatgccaaagagaaggagaatcaggcatcgtaatgcataacacaacaaaacattaaaagaaaacatgctttctaaagccaaccaaggtaaaagtgtattcatattacgtgaactctttcaaaactataagacacatattaccatatataataacatggtggaacaatctcaccacatgcacaacacagaccacacattatttcagaatatgagtggtaaggaaaaataataaagcattggtaataaaaccgtacgtgcactaagataacaagggtgtgatgacatacggaacacattgcgattttg

SEQ ID NO: 75130 - DNA, 396 bp, Glycine max
  unsure (1)..(396): unsure at all n locations
ctgtttaggtttgagtttatagtttttttgtgtctgaggctcgtgttttggaagagaaactataagaacnaagtttgcgtttacgtgtatgtttctcttcatagagtttggccaacgaaattnttctgaggagtcatgtangtgattgtgcaatgacatcccttctgatatcangttttaatcctcccacacagcaatccaatagagcttcttgtgtaatccttgtactcgattaactaaagccgtgaactgcacgtaatatgactgaactgaaccaactttagcgagtntaaacaactgagatctangacattcatacggtgatgggccaaattctgtctctaaggctcgcgtaaaagcaatccatgtnttgaatgaattttcacgagtcatcat

SEQ ID NO: 75131 - DNA, 462 bp, Glycine max
  unsure (1)..(462): unsure at all n locations
agtcacctgccgctgcagctagcaagcccgaattgtctattctaggttcattaactcatccaacaatatgttactagacttaacatctctatgaatgacgggcctctcacacccatgatgcagatactccaaccctttcgctgccccaacagcgatntcatacctggtttcccaatcaagctccatctttctactcgtgtgaagccggtcccacaagctcccattgggcaaatactcgtacaccaacaagcttgaatcctcgctgggtatgctgcaataaagctncacgacatatacgtgctctatggagctcaaggcctgaacctacgcgtcaaactcctttgacttcccagcagcgaacttatctccaagcatgggagtgctgctccacgacgactttcttctggcggtgacatcggtgttcaaatatgcttcaccgcgagttctttcccgttggaaagc

SEQ ID NO: 75132 - DNA, 437 bp, Glycine max
  unsure (1)..(437): unsure at all n locations
agtcaccttcggcatgcaagtctctgaatgggngcgtattgtatttatttgtaacttagtgngcatgattaacatctatgctccagcttaatgcggagagttagagtcatttatgttagagctcgttagaataaaaggggtttagtatgtatatgggcttggcccaagtgcttgtatatgcttaacctagtattatatatatgagggtagctacacattgtagagcnacacaatcatagttactcatatgctctatctctttctctcttccttatctccttctacaataatgaatgaaatatcgaacttgtgtaatgtttaatgtaatactacttttcacctgtataaaaatttagggtgtactatcggatggcactgtagtaacagttaagcagctttctactangtcaacgcaagggagtctggaatttgtaatg

SEQ ID NO: 75133 - DNA, 294 bp, Glycine max
  unsure (1)..(294): unsure at all n locations
ggaaggactacccacacaggtcagaatggtcgaggcagatcatagtcaagagggaaaggtcagagaaaatttcatagtgacgttacttgctggaattgtgacaagagaggtcactttatcaatcattgcaggcaccatagaagtcaagtcgcacataacaagagcgcgatgatgatgaatccgcaatgctcaactgataacttgatatgcataatttcagntggatagcctgtgattctggatatggactanggcgcgtcctactactccttaaaaatattgctaactatgttt

SEQ ID NO: 75134 - DNA, 420 bp, Glycine max
  unsure (1)..(420): unsure at all n locations
catgcaagctngtcttccnctaaatgaccagtattcttcctgtatgatatgctatactagcttgcctttctttcatatagtcaggccttgtaattgcactcttggccttgctttctaattgcacctttgtttctgcaacttgcttatttgctgcactatcactacttggcccttgcagaatcaccttgtcctcaaggtgatagtctcttcgcaattgatcccattcttcctatgatgtgtcatccggggataactcttgcattgcaccagactttccaagactttaactgatgacaagacttggagaatcaaatggcatngagaatgatgggctgatcacataaatcgtgggaattgaccgcttattgattccgtgatctcaaatgacttacactgacaaggaagacaggattacaactt

SEQ ID NO: 75135 - DNA, 420 bp, Glycine max
  unsure (1)..(420): unsure at all n locations
catgaagcttgtctcacanaatgagaaggatgtaganacttcaagactccatacacgatatgtatcatcacgtaaatatttatataatgtcaccccttgattcttttgatagggacaaaaatgtatgattgaaatcaattacattatatctatctcatttgttntttacttgctntccctgatcagcacccatccttgagagatcaagcagcgagaaattaagggactcattcctcaatacccttatgaatctaacaactagtaatgtttgaccatatgttttctcattgtctgcatgaaaaagaagtatattntatatttcacgttggtcttgattatattntatctctatccaatgcagagatntctaaactgaagatacctcaaatatagatgataaacacatactagaaaagcatg

SEQ ID NO: 75136 - DNA, 443 bp, Glycine max
  unsure (1)..(443): unsure at all n locations
gcatgcaagcttcgtctttgagtggggtcccgcgtattccagatctctacaagaattttcctgttgcgttacgagtcgcccagtctggaacgggcctattagccgcgtgtgacatctgaacgttgattagagcggatactagcacaatgtattattcattagtctaagtgtgaaaacaaaaaacagatcatgttgttggtggatattttttatatttaactaaataataacantgtattataagtttaattttttcatacttaattatggctttctaaagaatcgttccgtagagacaaaacaagatagaactactaagacatatttaaattaacatactgtatgaaagtgtgagaatcttgctaaatatttaaaatattccttacattatcatttctcttcttataccaacaacgcttaaaggtttaagttacttaagtaca

SEQ ID NO: 75137 - DNA, 343 bp, Glycine max
  unsure (1)..(343): unsure at all n locations
gactntaactcccctttcatgtcttggtgttcttactntatctctgcccgacttggctattttcaagtcatgatgttcttcattgagagaagaaggcttcattttcatgtgatccagttatggcgtaagctgaattgacacactgaaacataagaaaaggagcaacaaagttcacagtttcacagcgtctctaacttatggagctcatgatcgatgacaaagtgaaccgacgcgtggataggaaaaaccttcttcacaaacccgggtatgtgtatgatcgacgagcaaaacccatcaaggatcaacaccgtgatctgtgaaacagcgagaattggatggaata

SEQ ID NO: 75138 - DNA, 445 bp, Glycine max
  unsure (1)..(445): unsure at all n locations
acatctgccttaactctgtctntgcctattctcatgggttatggcttcttatgggctatggcttcacttgtaactaaccatgtagaagttagcaaatggtttgtgatgctagctanngcaatgtaccttcaacttctaacttgtntcactttatatttgattatcctctgtgttgcatgtcctcttgatatccgcatgaattccaacccttttgcaagtgtattctcagtagcttaataaatatcatatctataggtataaatactacanaaaaatattataataattgagaatagaaatctgtaaccacaaaaattagtacactnttctcattattgctccttcattngtatctctcaaagttataaaattaatgatngggtattngttcatatngtccatgaacaaatattgttctcatactgcattaaaatgcatgctcata

SEQ ID NO: 75139 - DNA, 447 bp, Glycine max
  unsure (1)..(447): unsure at all n locations
gagaggtatnnngacaatgtgttatctttgttttgttatttcaaaccgntaaatatgtaactaatctttgctggnngtttgcattngttctattcttataggctcttagatttatggattgaggttagatcagttttgacgcctattggacaagggagttcacaggtttcagggtcatctcaattatcatcaaaagatgcgtttctgtcacaggcagaagcannaaatatctctcagattaatgtcatttccaaggtgatgttcttattcatttgtagcttctctttgtagaaaatctaatgccggttttttcaaacaagaaattgtttgtgttactgtcgccaagattacaactatagtgatggacaaccattcatggtgctatctagcttgcggtcaatgtcacanaanaattgacatagaaactgtgccattcacatgtcatgt

SEQ ID NO: 75140 - DNA, 497 bp, Glycine max
  unsure (1)..(497): unsure at all n locations
gcttcgaaatccgaaactaactggttgaagatcgattatcgatgaagaacggcgtataacgttcacgaaattgatcatggaaacgtcacggaagcgttacggaagcgtctcgacctcaattntctccttctttcttcttcacctcactaattntaagtgaattctgaataccaagggtgctgaccctttgtacccagccctccttccctatntacagcaaaaataggggaggtgcttgctggccagctcgcccaggcaagctagttgcttcctgatgaagctttctgatgggcccagtgctgaagaacacccctcggttggatcagttcacccncatttttcataatttgctcatttccttctgaaacgttgtgaaactntacggatcacgtgacgatgagtgttaagcatcttaattnggtcagccaaagtccgcatgtngacanacaatngtcactggacgaaatangatatgaaggattctacatgtgaataac

SEQ ID NO: 75141 - DNA, 145 bp, Glycine max
atagccgtgagagtcttaatagagtatgatgaactaatggatgtcaatatggccaccaatgaagccttggaatgagaaaccaagaatgcccgtaaggaagaacactaccaaagcatagttttgaagggctttatatggcagcaat

SEQ ID NO: 75142 - DNA, 478 bp, Glycine max
  unsure (1)..(478): unsure at all n locations
agcttggtacatatgaattatatgcctcaacttgatatgaagcactggcagatgcgccttatctattatggagacaattgcccccaccttatttgcggatgcaccttatccatgggaggcaatcctacttgattcagataaaattattgtggacagcaaaacaattccctccaagtatatttttagtattagttatgtatgcaacacgcttggtacatatgatctatatgcctcaacttgatagaaagcattggcggatacaccttatctacagtgtggacaatngcccccaccttatatgcgaatgcaccttaccacatgtggcaatcctacttgattcaaataaaattattgtggacaacaaanacattccctccaaatatatttntagtattagttatgtatgcaacacagttgttacatatgatttatatgcctcaacttgatcggaagcactagcagatgcaccttatctaat

SEQ ID NO: 75143 - DNA, 463 bp, Glycine max
  unsure (1)..(463): unsure at all n locations
ctgagttctgagaggtgctgaattgtttangtatgctaattacantattccctgctttcatttactggaagttcaaaggtacttcatctctctcttattntgattaaacattgtaatctttaattttatgtgtttacaacgtacattacattttcatgatgagtattttatgttacgacctctactagttagctaacaagtgtaatgtattataattntttgtaattcattttttttggtgattccattggttgtattctaaatacctattcttattttataacatatatggtagtagctataacatagnaaatggtattgaatattagggtatgcttctttccccaccaattattctttntagttagaataattattatagnttttcttcttaatatatattataattgtgggggggacttactcttttttaatacanattatactactttatattatcata

SEQ ID NO: 75144 - DNA, 435 bp, Glycine max
tgcaagcttaagtcttggtcttctcttttttcatgaatattttttattattattattattattattaatatggattacattgaaaatgactcattcacttcccttagttgtgggtcaggccttttctctctgtgctgtgaagatgtgactttcgtatcaataattaatcaattgagctaataaaataattatgttataaaataattaatattattatatataatactaaaaaacttaatatatatttactgcacatataagtttagataataacttctatgatagttaatttctattaaataaatatttttctcatataaattttattaacttatacttttaattagaattatatatgaacaaaatcttactgattaaattagtataatagataaaatagaatctattctgtataatttaaaaaaactatattaa

SEQ ID NO: 75145 - DNA, 404 bp, Glycine max
  unsure (1)..(404): unsure at all n locations
tacataatagtactcacacagaacgtttcttntttactatgagagcgcccaataaaccaacagctatatctatcatagagataaaccccgcttgagttgctgcccagtgccaaatgccaatgcataatataaactaaattggaaaaaaaagagctattgaaagagagattgattaagaatagtcaaaagaacgaagttatttttaaccatacatactcattaatacgatcgtttatatttggctgagactatttcgcaggttctggcttctcatgtttataagggcactcagttcttctggtacactcacccctaatgtagaaactgctaatatgcgcccgcgttcttctgtagtatggtgttgtttcttgagcttcacgatagtatcatctgggccgacttta

SEQ ID NO: 75146 - DNA, 508 bp, Glycine max
  unsure (1)..(508): unsure at all n locations
agtcacctccggcatgcaagcttcaagaaaaagatggtctcagcanattccttatttccagaagggaattctatcaatagacctccaatctttaatggagagggttaccactactggaaaacccggatgcaaatttttatcgaggcaatagaattaaatatctgggaagccattgaaatagggccttatatacccaccacagtagaaagaagttcaatagatggtagttcatcaagtgaaagcataaccatagaaaaacctatagatagatgggtctgagaggatagaaaacgagtacaatacaaccttaaagccaaaaacataataacatctgccctaggaatggatgaatatttcagagtttcaaatggcaagagtgctaaggaaatgtgggacactcttncgataacacatgaaggaactacagatgttaaaagatctaggataaatgcactaactcatgagtatgaattatttagaatgaatacaaatgaaaatattcagagta

SEQ ID NO: 75147 - DNA, 333 bp, Glycine max
  unsure (1)..(333): unsure at all n locations
agtagaatactggtaatgttctattatcattnnttctccatcattgaggtgccacttgagctgccaggtctctccacctttgggcgtattctttgaaagatctagtgccctttttgcacatgttctnngtgtgcatcctatccagaaccatatcaaaattgtactgatactacctaatgaaggcaaccattaggtccttccaagagtggactcgagaaagttccaggttagtgtaccangtaacagctaccccagtaagattttcttggaaggaatgtatcagcagttcctcatcttttgcgcatgcncccatcttccaacaatacatcttta

SEQ ID NO: 75148 - DNA, 478 bp, Glycine max
  unsure (1)..(478): unsure at all n locations
tcctctgagtcacctgccgcatgcaagctnntgaaagtggtgtttttcaccttctcactaagttaatctgctggcttagcgagcatttgctaagcgcatcactcctgggctaagcgcaaggaagactctggaagaagatgagatgtataggatcgctaagcacaccgcttcatctcactaagcacaccgcttcagttaatccgctaagcgagaaaggcacgcactaagccaaaattcactaatgtgcgctaagtggtccataattgcactaagcgcacgagcacgaacaaggccacctatntaagcctgaaatcagaattcagagagggagtttggactgggattcagagctttgcatgtctatattntctagagagagaaaggtccaagttccagagaagtttgaaagattntgttgtgtgaagatctgcagagaccagagcttganacaagagccattntgagagcttgagatgag

SEQ ID NO: 75149 - DNA, 379 bp, Glycine max
  unsure (1)..(379): unsure at all n locations
atccaggcactctctaggaggtgaagctcctccttccatggttattccttagnggatggcgcctcctctcacctcttctcctttaccttacactgcatatcgcatggtgaaagtcaccattgaaggacctcattgaagctcacagatccaacattcatagaagcttctcaagcaagcttccatcaagtggtaatcagagcacaagaacttcaagtaggtgctcccttaaacctcattaatttcagctttaccttctctccatggttggtcttcatttnctccatgtatctcctacatgtcttgtccaaatgttgtaacatgatttttagaatttcaccgattaacttgtataaagtagattgattttatggtctattct

SEQ ID NO: 75150 - DNA, 422 bp, Glycine max
  unsure (1)..(422): unsure at all n locations
agtcacctgcggcatgcaagcttctacttatgtggcatggcgggcttccttcactttcttgtctccaatgcgagctctgaccactgttcttccttcccgcgatgcttcttttcatgtccgcctgagtgggcttatagcctaaaccatacttcccacgatttccttgggtttttatcaagctagttatgccgccattgtctttgcctaaacccatcccgggttcataaccgttccccaacataactcgggccatcattactggcgcatcagacagaacaggttgcccaaaaagggagtccacggaggaaatgctgaccacctcaaaagactggaaagcggtttctaacgattcttccgcggcttccacgtaaggcatggaggatgggcagcttaccaagatatcnttctcgcctgacacgatg

SEQ ID NO: 75151 - DNA, 350 bp, Glycine max
  unsure (1)..(350): unsure at all n locations
ctatacaaaagttagtcgtatagagcgactaaattcctcaacaatttcttcaagtgcaactaaatcatcaactggttccagtgccagttcattagccagctattgtttaaatccctccaccttctaatcagctctactttcctccgcttggataaccattttgcttctagtcatcacaactttgcactcttctttaagattnttctctgtgtttgttgaaaagtgtttgatgatctttcagctaactgctttgcaagctgacccacctagacttctagaatcttaattgctgactcggtgctctttnggttagacattgacactcgcatgaatngagctagagtctcttc

SEQ ID NO: 75152 - DNA, 448 bp, Glycine max
  unsure (1)..(448): unsure at all n locations
agcttgagcaaattataacgacaataacattntaacttgtatgtccgattaagtctcgtaatatatggagacgctcgaaattgaaaaaaagatgctcctagcaaattcaaaccataataagttttgactcggatgttcgattgaatcccttaataattaaagatgctcgaaattgaagtcagaagctcctagcaaattcaaacaacataaacttttaactcggatgtccgattaagtcccgtaatatatcgagacgctcgaaggtgaaaacagaagctctgagcaaattctaacgacaataactntntactcggatgtttgattgagtcttgtaatatatcgagatgctccaaattgaaaacaaaatctcctagcaaattcaaacgacaataactnttcactcggatgtccgatggactcctgtaatatatcgagacgctccaacagt

SEQ ID NO: 75153 - DNA, 275 bp, Glycine max
  unsure (1)..(275): unsure at all n locations
cccatcatatctcccagaaccccatacccacatatttggagcttccatggagaatgaagaagaagagaatggcaacgtgagggagagagagagctgtctgaaataatgtggtgctgagtgaagagagagagagttgcttttngattttaaaaagggcttttcctcatttcttattattttattataaactatgccacatgtctccatttgagtggagcaaanagggcccactttccttttgactggacccatactcgccacaaagtgaggaaatc

SEQ ID NO: 75154 - DNA, 407 bp, Glycine max
  unsure (1)..(407): unsure at all n locations
aatagataaaatattaaagctttattataataaagttcgtgagcttgacgagccggtttgttcatataataatcataataataacaggataaggtgacatatactgcctagagagttcacttgcatgtgaaaaactttcacacacaataagagcttaaaggataatgcatccacgataatacttccatagagaacaatggtngtaaagacatctttagacaatctacatatcntcatttcgctatattagattaaaccatctctaatccacatatgttttaatattatgctctctgtttgtgtttaataactcgaattcaatatgatctcgcttatcaattatctttagatctatacattacttacacgaacatttataacctctctttctagttagtatttcacta

SEQ ID NO: 75155 - DNA, 321 bp, Glycine max
  unsure (1)..(321): unsure at all n locations
tcaggaggaggaagtgagacaagctcattgggactgtggaagcgagaaatgcccangtcctgatggtttcaactttnagtttataaagagattctggcagatgcttaaacctgatgttctcncgattttagatgaattccatgtcaatggtgtntttcctaggggctgtaatgcatcattcttagcattaaatccccacggtgaaggatccacatcttctgaatgattatcgacctatntcccttatagggtgcatgtataagattgtggcgaaattgctggctaaaagaatgaagaaagtcatgccatctattatatatg

SEQ ID NO: 75156 - DNA, 316 bp, Glycine max
ccgctgttatagacctcaggatccgctctttttttccgagaaactgtaattgggggttaatatgaggaatcatattttttgcaaagagggctaacgtttttcggccaataatggaacatgccagtgtcccccgaacataccgcggttgagctccacgaaaaaacctaccatctcattgtaaatttttagccacaccaaacaataaaatcctctgccaaaataaccatactgccacgacgtttaaaaaaatagtcgggcttttacaccgagttactgtagtttcttcaatccctatgaattgatgagccatagaatg

SEQ ID NO: 75157 - DNA, 335 bp, Glycine max
  unsure (1)..(335): unsure at all n locations
agagcatgcagctcaaaattcattacgcgcgtctcaatagattactggactcactcacacatccaagcanaacattattgtcgtttgaattagctcagagcttcagcaatcaattcctatggtctcgatatattacgggtctcactcagacatctgagtaaaaaagttaatatcgtttgaatttgctgagagcttcaacattcaatctcgagcgtctcgatgttttactggacttaatcagacattcgagcacaaagttcatcgcattcgaatttggacagagcttcaacgattcagttagagcgtttcgatataatacgggactcaatctgaca

SEQ ID NO: 75158 - DNA, 391 bp, Glycine max
gtgagcaaattcgaacgacaattacttttaacttgttatgtctgattgagtcccgtaatatatcgagacgctcgaaattgaatgttgatggtcgttgcaaattgaaacgacaataactttttactctgatgtctgattgagtcccgtaatatatcgagacgctcgaaattgaatcttgatgctctgagcaaattcaaacgacaataactttttactcggatgtctgattgagtcctgtaatatatcgagacgctcgaaatttaatacgaaagctatgagcaaattcaaacgacaataattttttactcggatgtctgattgagtctcgtaatatatcgacacgctcgaaattgaatgttgatgctctggtcgatttcaaacgacaataatt

SEQ ID NO: 75159 - DNA, 479 bp, Glycine max
  unsure (1)..(479): unsure at all n locations
acctgcggctgcagcttagctccttaatngcacaaggctcttaatatttgaatagtatccttgaggaaccttcacccaacgaagacactgacaaagacttatcttctccttcttggacaaaatatggcacgctggcggcaagaaaattttctcacattagtccttggatgcaactgcgatagtgtacccatatcagctagatctcgtagggtattcaagacatccttcatcttgccttgaatgataaggagcgtcccaatcacattgccacaaacattatttccacatgcactacatcaatacaatgcctaacgtgaatatcacaccagcacggaagatctaagaaaatggaccttttctccatatgcaacctaaattaatccttctttgggtcttcctaatctgtattctgtgtgaaccattgtatacctgttccagtaacatatcgcgcacatatgctatgattcattgaacttttt

SEQ ID NO: 75160 - DNA, 381 bp, Glycine max
tccatcaagtggtaattagagcacaagagcttcatttatgtgctccttaaacctccattaattttttgctttaccttctattccattattgtttcttcattttttctccatgtatctcctcacatgtcttgtgctaaaagttgttaacatgattctttagagtttacaccgattaaacttgctatagaagctaaatttgattctctatggttcaaatttcttgttcttgttcttgaaccatgaatcgtgttgagtttacgttcctttgacttttgtcttgttatttttttctgtggctgaaacctataccataaaattcttacaaaaatattaaagtagaacagaacctcaaaaatctagagtgacttgatcacctattgt

SEQ ID NO: 75161 - DNA, 398 bp, Glycine max
  unsure (1)..(398): unsure at all n locations
tgtgtctaccatcacgagtatcggctgcctttccatcattggggataccacctgngccgccagatcccttcaccttttgggcgtgttctttgatagatacgtccacctctttgcacatgttttgtagctgcatcctatttgaagccattatactgacactgcctaacgagggccaccaatatgttccttcaagaatggacttcggaagggtccaagtgagtgtaccaggtaacatctaccccagtgagactctcatggaatgaatgtttcagcaattctcatctgttgcgtatgctcccatctttcgacaatacatctttatatggctctttgagcaagtagtccccttgtacctgtcaaatccaacaccttgaactgggaggagttctatattgggt

SEQ ID NO: 75162 - DNA, 389 bp, Glycine max
tcaacttacagtgagtgattcaggcttagcgccactacatgtgctaagcgcacttccaatgacttcaaaatagaatgatgttggcgcttagcgcatcctttcccgctaaacccagcttgatagctcatcttatagaatgaatctggggcttagcgcagctataataaattttcacagagaggaagtggcgtttagcgcatcatccacgctaagcccactgcttaaggtgcaacttacagtgaagatgttgggcttagcgcagcgatgtgtgctaagctgaaccattcagccaatcaatcagggttctttgcacttagcgcaaggtttgcacttagcggatatgcaatctaaaaattttctgagtcattttctacttatctcttcacaca

SEQ ID NO: 75163 - DNA, 204 bp, Glycine max
ttatttagaaagatgcttcacacgcaaacctttgagaacatcatcattatctcaatgctcaccaagtgcttcatgatcgtaaatggtttaatgataactagattggaacaactgtttcaatggaaggtgaatagatggatgaaagttcacctttctaaagacaaaactgctttgttgtgagacaaaggcagtatgctgatctgc

SEQ ID NO: 75164 - DNA, 390 bp, Glycine max
  unsure (1)..(390): unsure at all n locations
gcttgttgattcttcctatatcagcttntcttagtttccttcatgatatttggatgggtcgttctaactctaattctcttctccagattgcaaaagactccatcttttattgaaccatgagatcctaggatcgtgggaggagctctaataccaattaatagcatccaatcaaaattagaatttactactccacgtatttgcgagacctgtgcccaccctctcaatcttttcttggtgtctaaaacttattgtgtatacactatcatactctgtcatctctccatctcaaagtaactaacaaaccgaggtcagctcacattttgttcgggctctgtagaagctctggaacatttctatcttaatttttctaaatttgctagcctgagagta

SEQ ID NO: 75165 - DNA, 446 bp, Glycine max
  unsure (1)..(446): unsure at all n locations
tgcaagcttgtgatgacagtccataccttctgaaacagttacctggaattgtgatggatacagcacaggcaacatctattgatactgtgatgttattaacacataattgttactaatacatatgctctagcaatcatgtgcctaatattctaattttgaagatctttccacgcactgcattcaatgggagttatatcgttagaggaacttgctgatgctgatccgatgagaatagagctagtgactggtcgagaatacccatttggtaaccatattaaagattctctactgtctctacctccaatagtcgatgtgacgcttgcagagattgaaagccatatacaanggaaatccaggctagtagtaacattggctaggatatcacaggcaggccagtcagttaaacgacattatgctgatatggtgtgttatctgaatgtcttcta

SEQ ID NO: 75166 - DNA, 385 bp, Glycine max
agttatgtttggacaaactcgaacttcctctcctaagattattagcaagtgcgcctttactcttgtgtaagatccattgaatggaatttcacaaatgttgcgcttgatctcataatttccatcgccaaaatctttcttgtttttgaaacatatttccatagaggtctagtttcatcctcttgttctatggcttgattggtagcaccagtacaattcatctatacaataaaaccaaagcaaatagataccataagaaataataatatacaatgaaacattcataaaagtatttataacaattataacaaaaatctataataatatacaatgaaacaaatatattataaacaaatgtaactataatctataataatataacatagca

SEQ ID NO: 75167 - DNA, 469 bp, Glycine max
  unsure (1)..(469): unsure at all n locations
agctntgtgtagaagaatgatggataatcttgattttatcaagggataactatttctgaanaaggcaagaaagagactgagactttctgatgtagttgttttctcaaaatcacatatttgaccctattttctttggtaactcattttctaattactacctaacaaatattttgaaagaaaataactcttaatatacgcgggataggagcaggtagatccatattaaaaagctgccaaattnggcaaaggatacatccagatcttatgcgatcgagttctccattgaatataatcagtttccgttcagtgttcaagaccgcctctgtagtaaagtcttccacaacgagcatttctgagatacaagggagcagtaatcttgatactttcatttgttatatcaacaagaacaaagggtatttagatataccattgacattaaaatatgggtagccaccaagaaaagtcatct

SEQ ID NO: 75168 - DNA, 385 bp, Glycine max
ttgataatttcatagattaataatgattttttcttctgccaaatggtcttattgttgatttcgcttgatagttaagctttgatgtttgctttggactcttggaagaagattgagaaagctgaagttggtcgaagatttctagaaatttttgttttggtcaatgcattttcgacatatttaactatattctaagttttcaaattttattttcatttccttttatattgatgtattgtcttctccaacaccttcgagcttgcgagggtattataaaaattagtttaattggttacaagtaagttattagtttagattgttataaattagtttagttagttacaaattaattacaagtttaactatataagacttaatgtattcatgt

SEQ ID NO: 75169 - DNA, 462 bp, Glycine max
  unsure (1)..(462): unsure at all n locations
agctnggaggactcatccaatatcagtggatgtattctattgagacgtacctagganaattaaagtcttatgtgtgtaatanggctcaacctgaaggctcaataactgaaggctacttaacacaagagggtttaactttttgctctagatatttagatggaattgagactaaattcaaccgattgggtcgtgttgatgatgaacctcacattgtgccacctaatgtaagcactttgtttccacccgttggaaaatcagttggaggttntacttacttcactttatctacaaggaanaagttacaagttcaccgtcatgtattgactaattgtacacaagttgaaacatttattcagtaagcattctaactagtaattattatntattataacatttcttcacttgagaaagtgagagatatactntatatatctcatataggcgaattcgagatattctatg

SEQ ID NO: 75170 - DNA, 389 bp, Glycine max
cgctttcacaagctcaaaaatgttatcacacaagctccagttttagccttaccagacttttcgaagccttttaccttggaaacatatgcatcgggaataggtgtaggtgctgtacggagtcaaatgcagcaccccattgcttacttttcaaaaaagttgaatgttagaatgcaaaaacaatcagcttatgcaagggagttctttgctattactgaagcaatagcaaaattcaggcattatcttttaggtcacaaatttgtcatcaagacggatcagaagagccttaagtcactcactgatcaagttgttcacacactagagcagcaaaactggttgcataagttgattggttatgatttcaccattgagtataagtcaagaaaagagaa

SEQ ID NO: 75171 - DNA, 234 bp, Glycine max
  unsure (1)..(234): unsure at all n locations
agcttcctcacgactataagtggagagtgcttcatactctggcatcatgcaagtggggggacgacacattagcagtggancacacataccatggcaatacgtaatctatgaatactcttccagggaggtgaactacataggaacgcataatctccacactatacctggttagcaccaaagaagatcgatgagattcacctacggaggactctccataaggcttatatcggggaa

SEQ ID NO: 75172 - DNA, 386 bp, Glycine max
tgtaggacattggagtcccgataacatgctttactttagtggctgctaagtcttaaagtcgcaccttaattttttgaacatgacagccatggcatgaaggttgcttatgctgaacaccacactgatgtgtacactgataccactaccatacccgttggaatcaaagtattcactgatcaattcttataaaatcgaatctgctattcaataattcatcctttcaaaaagtttgcattacttgacatgagatgtaaaaatccatgtctacatgagtagactattgtctaaattacatcaattaactgccctttatactcatatagacctcatattcatggcactattggcatgtagaggaccatgtggattacgaatagtatatactg

SEQ ID NO: 75173 - DNA, 451 bp, Glycine max
atactctaagtcacctgctgcatgcaagcttcaaaccacatgttacaaaggcacaatcacccaactatgtgggagatgattgccaaaataccacccaacaaaaagctctcagcagtgcatacaaaaccaaccttaacagtgttctctcatggctctccacagatgcagccacaagcaaaggctacaaccacaacagctttggcaacaacacctctggaggagatgcttctgatgctgtgtatggcctctatgattgccgcggcgacatagtcggatacttttgtcaattctgtgtctctactgcttccagagaagttcttcagcgctgccccaatagagtatctgcaattgtgtgggatgatttctgcatcctgacgtactctaatgagaacttctttgggaatgtcacagtgtatccatcatggcacgccgttcgaccgaaaatcgtgtc

SEQ ID NO: 75174 - DNA, 390 bp, Glycine max
ttgccaaacaatatcaccaggctaaaaattatcagaaattgaaaagtgtcactgcaattatatcatcagacattcctcccaatttttgatatcataatgaattcctaaacgaaaattctactccattataaatcactgtattaagagactgatgtcaatttaagtcacaactagttagctcaccattatcataagaacaattgacatttgatgtgagtatttggcaagcaatggaaaaaaatttattcaggttttaaaatactaaaaatttgaagtagacataggtttcaaacagaattcgggttaacttgaaaaactgatttaagagaagatgaattttaacaatggcatatattgaatcgttaaacttaacaaaggttggctcttttt

SEQ ID NO: 75175 - DNA, 380 bp, Glycine max
tgaaggtaaactagatgccttggttaatctggtaacccagctggccttgaataaaaaatttgtacctgttgcaagagtttgcggtttatgctcctatgccgaccaccatatagacctttgcccttctatgcagcaatctggagcaattgagcagcctgaagcatatgttgcaaacatttacaatagacctcctcaacctcagtagcgaaatcaaccacaatagaacaattatgacctctccagcaacagatacaatctcggatggaggaatcacccatatctcagatggtccagcccttatcaacaacaacagcagcttgctccttccttccaaaatgctactggtccaagcaagccatacattccttctccaatgcaac

SEQ ID NO: 75176 - DNA, 392 bp, Glycine max
  unsure (1)..(392): unsure at all n locations
agctnggagaggatgcttcatggaggaaaagaaagtgggagagaaagacggagggggagcacgacattgaatgaagaagaacggagagaagctgaactctgagttgtgtctcacacgactctcattcatcacaggtacaacaagtgttacacatgcttctatgtatagactacgtagctttcttgagaagctctcttgagaaaacttccttgagaagcttctatgagacaactttcttgagaagctaaagcttagctcacacacccctctcatactaagcttacctccttgagaagctgcttaagaagattcctatagaagctagagcttagctgcacatacctctcttatagctgagctcacctccttgagatgagaggctagagcttagc

SEQ ID NO: 75177 - DNA, 403 bp, Glycine max
taagctcctagaacaaaattgcctcaatcatttccaaatatgcatgtgaattaggaagcatcaacaagaatcaagccaaggctattgtgcaagcaatcaatggggcaaaatacaccaaatgattatgatgatggatggctcaaattctcacaaaggtaaactcatcactttcaaattgagctttcaaaactatcatgacatgtagaggaaaatcaaggatttcaaatcacaaattgtcaagaaacttttattttcaaaacaattacccatttcttgaacatatcctataatacaaagaaaaacatgcaaaatcgtacacgcacatagaattgacccaaaatattaaactagaaacccaaaataataaactaacaacattaacaaattaacacaactaacaaat

SEQ ID NO: 75178 - DNA, 370 bp, Glycine max
  unsure (1)..(370): unsure at all n locations
ggatccttaagtcacctgcngctgcagctttatttggacccnagtctctcctntatttctattctttatcccanatctaactctntgagttgataggtaagggaagctcacctctttctctatttgaatgttntgaaatgctaaaatatgttttgttgaagcttacatctgttggatcaagtggcctcagaataattaagaaggggggttgaattaattattaatgaacctttactaattaaaaatctatccttcttaatactactaaattcaattaggcttntactataatgtttagaaagtaaagaacaaaaatagaaacttaaccaaaattaanagcgataataaagtcacaacggaaataaagagt

SEQ ID NO: 75179 - DNA, 396 bp, Glycine max
tagcaacagccccaaaacccaatttttgtcgaaaccaagtgtcatgatttctatattaccaattttgctagctgttgatgttgcatcatagttttgctatgtcatctacctttggtctcatctctttaccttacaattcaggcaattctatcattaccctttttcaatatatagaattggcaacatgcaaacatatctaatccaggaaattccaccactaatagtcagcctataatccataaccaatgaagtcccccatctccaatttattccatcttctaattttattgtagtttctgcagatttaaaataagcgtttggttcttcgttttaacataaatctattgtttagtttataattcacccaattctgcctttagtcattttcaacatgca

SEQ ID NO: 75180 - DNA, 425 bp, Glycine max
  unsure (1)..(425): unsure at all n locations
caagtcacctgcaagctgcagcttgagagcttggaagaagantcttttattatcaaggtattgatatgatatatctatgaattcttgtgatgatgaatattcatcaaataatttaattagtgattaatttagggaaattttctagtctaatcacttttctttcattaagattgatattaaaatattacttaagaagatcaaacttattactactttaaccaatgacgtggtggtggttgtgaagatgtaagcacaactctatgcaccttctctatcagatggataagtatcctctcatgttgctcataggaagtgttgtagtctcttatctctcagctcagcaacatgggacttagttcacgaccaactcggttgagtagctcttgaacatgattttagttaaaaagttatctctccctataaat

SEQ ID NO: 75181 - DNA, 399 bp, Glycine max
gctattgatactcacgctttactctccagagtaatccgaacatgtcatttattctgggtgacaggacaagcttaccccgacttattgagattggtttactgatacaatctgtgctgatcagactgctttcgatacctttagaacgcttgcagctgggcctctacgatatgttatttcctgtcaaggctaccacatataccttgctttcacgaaaccacctgatgacttaagttctttgcagaacagcggtgcctccctatgggttgaatctctaccctatgctattgtctatgacactcatccctgtgtcgctgccatcccttactctgtattctgtgatgagatttgcgatctctgctatgtcaaacttacggtatgtgtttcccaatgtgggtgggt

SEQ ID NO: 75182 - DNA, 409 bp, Glycine max
  unsure (1)..(409): unsure at all n locations
agcttccttttaatgcatcgcacctaagaccaagcttcatggtggtatgggctnttgacggcagtcgttgggatgtaaggtgggagatcgatctcccgattcatatcggacctcacgtgtgccaaactaccttccaagtaatggacgtaaatcctgcctacagttgcttattaagccgaccttggattcatctggttggtgtggtcccgttaacactgcaccagaagttaaaatctgtgggggacggatagctgattatagttncgggaaaagaagacatacttgctagctgtccatctattatgccttatgttgaggctgcaaaggattcattggaaacatctttccaggcattggaagttgtgagcaatgctttcgnggagtctccctcagtgcacccacgctcatc

SEQ ID NO: 75183 - DNA, 385 bp, Glycine max
taaatttggactgaaataggcatggtataatgatgatggagtatgataggaagcaagatttttactcaagtattacaactaaagaaattatttaccaaaatcaagatactttaaatctattaaccaatatgcatcactttttgccacatcatcttgcacatattttgtggtattcaaagatcatgtgggcacgtgggattgtactaactacatcgacacaatccagtgagatggtgtcagcatggttaacacaaccaacacacctaggaagcaaagtagcagcaacctaccaagtgatgcaatcctccctaggaagggaccagtcactagaaccatgagcaagaggctccaagaagattgggctagagctactgaagaaggccct

SEQ ID NO: 75184 - DNA, 485 bp, Glycine max
  unsure (1)..(485): unsure at all n locations
agcacctgangctgcagcttgtactcttggcatttctctaacactacgttcttattatggttgtgactcttgaaaaaatcttcataaacaagtcactagaagacatgtgacttctgagaaattatttttctaaatcagtcactgggnatcgattaccattcacgtgttatcgactacacatcaatagatgtgactcttgtgtttagaatgttaacatttacaacgttacaagctctggtaatcgattacaagtattgtgtaatcgattacacgagtgttaaatgacttgaaatgttaaacacaagttgaactcttgaatctgaatcttacatataagacctggtatcgatactccttctgtatcgatacctagagtaaactcttggtatgatttgtgaaacttcttggctacccatgattgaaaactttttagactatcttgatgaggctctttgatcttgatctgagcttgaactgatcttata

SEQ ID NO: 75185 - DNA, 389 bp, Glycine max
tgtatgactatggggtacccagcacatgtggttctatgtggcgagccggcgatggtgcgcaaaaaatgttacacatgcgagaagaagcgcataaaacccaccatatgcctggagcccacctccaacggagctcacgtactcccacggaggccatatcctcgccattctgatgcccgggtccacattcatacttccaagcttacctatcttcctggggattgcgcattcaatcgtgatggactagctagaccatgcctatcatagcacaggcataaggctctacccgtatcacatctcgaaataacagctcttcacatactagtaccccatcaacattgtcttgcatgcacttcggtaaccgttggattgactcgctagttttactgaac

SEQ ID NO: 75186 - DNA, 473 bp, Glycine max
  unsure (1)..(473): unsure at all n locations
agcttggaagcgtaattgaattacttgacttatgctctcaacacanagaatagtttgcactataattagaaggtacggtcaaaagagtattctttatgaaatatttctttttatgagtcattgaactataaagtatcaccatcgctaagaacaagaatcttcaacaaccatactctntatgcaattaagggaaaacaccatactacaagtatacatagaattataaggttcttataataagtatacaacttacatataagaagtaagaattaaatagttaataaggatgtattaaggaatcataaacttcaactactacattcacgactacgcacaaaatatagggagttaagtagtcatgcgtttacacatcaagaaagacacactcatccaagacatatatatnggtcanaagattntcaccacactaatccacacatcaagatagatataagttgattaacaacatacat

SEQ ID NO: 75187 - DNA, 393 bp, Glycine max
  unsure (1)..(393): unsure at all n locations
tccatcagtacctctggtacttcatcactatttacataatgaaatatttatatatttttgccgataaaaaaaaaccatgcagatgatagcaacacactaacagcagtaccagatatcacacagataacagcatcagacaataattccaaccaagaggaaatcatgactacaaatagcggaggcaataacagaccaaaacgcaacacacacaggcccaagtacctcagtgaaatggctataaagctttttccacgttttacttgatacctgtgtggttatgcaatntcaaaattttgttataacaacttagcaaaatatcttgtatgaaatggctataaaaaggggtaatgatgaaataaaaagatatgagaattattccctgcaatttagctt

SEQ ID NO: 75188 - DNA, 391 bp, Glycine max
tgtagggttaaagtctcatgattgtcacgtgctcatgcaacaattgttagtcgtggctatacgagacatcttgtcaaacaaagtcaggttagccataactcgcctgagctttttcttccatgctatatgtagcaaagtcattgatcctgtgaagtttgatgagctggaaaatgaggccgcaattatattgtgccagttggagatgtatttttcccctgctttctttgacatcatgattcacttgattgtgcatttggtcagagaaatcaaatggggtggtcctgtttatctacgatggatgtacccggatgagcgatacatgaagatcttaaaagggtatacaaaaaatctatatcgtcctgaagcatctattgttgagaggtacattgca

SEQ ID NO: 75189 - DNA, 489 bp, Glycine max
  unsure (1)..(489): unsure at all n locations
ggatccttnagtcacctgcggcatgcaagctntgtccgcanaaatcacttaaaacctgttttattgtccaacgccttatacggtcttctttgcttntatcggttaacatggaccgctcataagcatanaatcaagacgtaactttaccgcttttgcaagaactacgtaggtttgatttcctaatagcaattgaggatacatacgagcaaaagccccgctcttgttgaccaccccaagagatcgttaatggtctgacgccttaacgcttctcttctttctaaacaaagagatcattaatggtccaacgccttaacgtttatctcctttcanaagaatcaaaagatcgttcaatggtccaacgccttatacgaatcatgttcgataaaatatatcttgcgagaaaagataatacaacttatccacatttattctaaagaactattaagtctgattctcatcgcattgagatcctaggagtgaagaacaccc

SEQ ID NO: 75190 - DNA, 385 bp, Glycine max
tttatctctatatatttttttatttttttagtgaatccaataatagccatatgatatacgagttcttgttattcaattatttgttttctaagaaatccgactcaatacgaattttctgagacttcattcacttcaatttactaccacaaattgcctcatgtacctacaacaattcttttacctgtattgaaaaataggggtatggcaaaaaaattagagcaattgtcctccactgagtgggcataagcttagcaagatgaagtagctttttatcctcttctcttgtccacccaatctatacacaaaaagcatcagattgaaaaatcactcattagaaaaatatcacaacaattaataacatagttggtacatactccttatcaat

SEQ ID NO: 75191 - DNA, 501 bp, Glycine max
  unsure (1)..(501): unsure at all n locations
agcttcatgctgctcaattgctccaggatgctgcatggaatggcacaggtctgtatggtggtcagcagaggagcacaaaccactatcccttgcgacaggtacagaattctgattcaaggccagctgggttaccaagttgaccaatgcatccagtttgccttcaagcttcttagtttcagatgatgcatatggggttgtagctacctcatgcactcctctaatgactatggcatcatttctagcactaaactgctgggagtnggaggccatcttctcaattaaatttctggcttcatcacgagtcatgtcttcaagggctccaccactggcagcatctatcatacttctctccatattactgaggtcttcataatagtatttgagaagaagctgctctgaaatctgatggtgggggcaactggcacatagtttcttatatctcttccagtactcatacaagctctcttcactgagttgtctataccagagatatccttctta

SEQ ID NO: 75192 - DNA, 388 bp, Glycine max
ttgagccaaaatcttgactcaccataaaccttgacccagggtgagaatgtcaatccttaccctcggaagcaaaaaaagaaaagaaggaaaatttcaaatcaaagagaaagcaaaaagaaaagaaaggaaattcccaatcaaagagtgggagaaagcgaaaagaaaagaaagaaaattcccaatcaaagaatgggagaaagtaaaaaaagaagaagaaaaaggaaggaaagaaagttcctgatcaaagaagcagaagaaatatgcagaaaggtgttttgaccagacaatatctgaacaatacagaattgtcaccaaatgaacaaaaggaaggaaaggaaaccatgagctaaagtggtcttctccctttgattgccaaccaaaatcctgt

SEQ ID NO: 75193 - DNA, 420 bp, Glycine max
  unsure (1)..(420): unsure at all n locations
gaccttaagtcacctgcggcatgcaagcttctggcaccattcctgctattgatccacatattttctgtcaanacctcatatatgtcactactacagcatagttgaatatggtatatggaaaaggtgaaactctaaatatagcaactactcgaaattgatggaaccagcttccttcctcagcaagcctaatcattgcagcattcttgggccatctctttaaccattgctgaaccatatataaattaagagcataaacagaaactcatagaaaaacaacttataagaatacgaataacaacaccaatctagaccatntatcatatgagaaacaaaatgacttacatgaatgcggtcacggaaaattagtccaattaagtaagggaggaccatcccaatggtngttccaatcattattataac

SEQ ID NO: 75194 - DNA, 387 bp, Glycine max
ttaacatcatgtagtcaaatttgcaacattgttaataaacacagaaacttttatctaattcttttgtattcaatgcctaataactgttactggaggaaaaatgtaactttttttatcaaaagatctttgaatatttgatgagtactggtggtatgaatgactaaagttgtgggcttatctgtctgtagtgggatgcagattactgaagcactaaagcttcaaatggaggttcagaagcgactacatgaacaattggaggtatatttccttgttgaactgatattgcgactttatcatgttagctaattgtaatttataatcttaattatttctattacatttaatcatgtgaaatgcaatgattatattaatttctctcttgattta

SEQ ID NO: 75195 - DNA, 136 bp, Glycine max
aagtcaccgcagctgcagctttaacaaatgtacctttttttttttttaatcaccctgaaactggaagtgggaaaccaccaaaactcccaggttctttcctcttcaatgtcactataactctttccaatctacacct

SEQ ID NO: 75196 - DNA, 388 bp, Glycine max
tgaagacaagactatacgaagtatcttccttgggtataacaatatctctaagggctaccgtgtctacaacttgtaagctaagaaactcgtcatcagtcgagatgttgaagttgatgagtacgcttcttggaattgggatgaagaaaaagtggagaagaatgttcttatacccgctcaactacctcaagaagaagctgaggaagaagacccaggtgaactcaccttcacctccaccacaacaacaagatcaagaactatcatcaccagagtctactccaagacgagtaagatcttcggtggacatatatgaaacatgtaacttggccatacttgaacctgaaatctttgaagaagcgtcaaagcacgaagtatgggtcaaggcaatgga

SEQ ID NO: 75197 - DNA, 478 bp, Glycine max
  unsure (1)..(478): unsure at all n locations
agcttgaagcccttaatntgtagttntggtttgataattctgcaatgcctaccatgtttaatagatgaggcatatgtattgaatgttttacactaggcatgtgtgttatatagtcttagtctgtttcatgattagtgattgatcaaatatgaagtggatgaagtattcttattctctaagtctcttaagaacttacttctacttgaactttggctaccaacatcgaattaattgattgcctcatttgctaatcgaatgtccaagtcaatttcagaagaaggaaggatctataccttaggataatcgattaccccatttgataattgattacccaactcctagaaacaaagagaagttgtctgtgtgattctataatcaattaccacacatgataatcgattattcagtcagcacaaaaggaacataaattcttatgctacaacgaattaatcaattatcctttatgattatcgataac

SEQ ID NO: 75198 - DNA, 382 bp, Glycine max
tgtagaatggctagacatgatacatgtcagggtttggtttggttcaaggataaaagggatgccccacactatttccatgacacaaatgcaaaaatgatgatttggaaacttttatgcaaaactggtcatgcatgcacctatgtggacactcaagtgtcaaacttttatggtcatgtgatgctagggctcaagattaatttcctccattttaaatcaacccaatgtttccaaaatatgttcttttatcaatttgtgcattcctccaagtccatttcgggcatccggggaaatttcacagcattcacccttcaggtgtagacacgttttttttcaaaaactagctatgatcagcgaatttttcttttaaagaaaagttggaaat

SEQ ID NO: 75199 - DNA, 355 bp, Glycine max
  unsure (1)..(355): unsure at all n locations
agcttgtgtgacactgaatngaataaccaaacgcaatctatataatatttagcacaaacgatatcagataatttagtgaaaattctctctgagttatgtttaaatgactaacatggttcaattcttgattcgtgcaagaaaaaatatctctgggagaggttaactctttanataactcttagtttctccggagattcgttctcgattttttgctgagaagaccttgttggtaaacaatcttgaactctatcagttttgaagcccacttcagaaattacaataaccctcctttgggttatgttntcatcatgaacaatcggaggttcatttaacaataggaaaaactgtatctact

SEQ ID NO: 75200 - DNA, 454 bp, Glycine max
agcttatcctgacctcgagagatacaggagacttattaaaatattcatttatctcactattacaagacctgatatctcctttgttgttggagtggtgagtcaatttatgcaaaatcctcatgttgatcattgggatgctgtcatgcgcattcttagatatgtgaagagagcacctgggaaaggattgttgtatgaagacatatgtaatacacatgtatcgggatattgtgatgcacatcgggctggctgcccatggataggagatccaatcctggttattgcgtctcattggaggaatgctatctcttgaagagcaaaacaaactgttgtgcccggtcattgcgagctgatattgactattgcatgctacatgtgacttatgtgtttaaaactctttagaattggatttgtaagttgacaatgaatatttggataccaaccgtctcatttgttc

SEQ ID NO: 75201 - DNA, 391 bp, Glycine max
tagtgataatttctttctttgtttcctgtaaacaaactaggtccaccttatgctttaagttgagctttcgaatagcagcccacttcaccccctacccaagcctctgcagttatatgaaagaattatcattaatacctttatcatctcccttctctgcttccatgtctaccaaacatcccataagctgctgaaaatcccccccacaggtcaaccccatttgatttagaagctcacattgtctctcgataatttcttctttttctttcactgataaagcagaatttgtgtctgtcaataactcctgttgggcttttttctttttgcaccactttcatctggaatagacctgcagaccattggatatcaactgttgttgcgggtgggggctatt

SEQ ID NO: 75202 - DNA, 388 bp, Glycine max
ttaaaggtaataaaagtggaataaacttgagatttttaaaaaataggaaaagtccataaattttttgaataatcatctaaatagaccacataatatttgtgacatgcaaaactcaaaacgggagatgtccataaattactatgcaaagtatcaaatggcatataagtagagttatgagaatcaacaaatggaaatttaacatgtttaccaagagaacaagaatgacaaaaatgagagtttctagttttattatattcaatcaaattatttcacctaagagagtctaaaagaggatctcacaggtgacctaaacggttatgccatagagaagaggacaaagctgcaaaagttgaaggtgagtaggctagatttgtggtggtggtaatgg

SEQ ID NO: 75203 - DNA, 483 bp, Glycine max
  unsure (1)..(483): unsure at all n locations
ggatccttaagtcacctgcggcatgcaagcttctctgaggtaatctttacttctaagcctttctcttagttagtttgagtttctcttaatgcctctggtggtttgggtactataatagggtctttttacaacttccttgaaaaacccttgagaatgagacattgcacaatttatctttntataacattcatgttnatttcgtgaccttcactaaaccccggtcacattggcgtgatggggaatttaaaatgatgtctcctcttagtagaatccgaaacacccctcaacccttaatggtttgacaggggcatttgactccaaatgttgtcattaaccttggttctgaaatctatactaaatntccttcaatctggtatgtagaaccttgcttttggactaacgaacgtgaacgagagaggtctctgagcggcgcatagagaaactggcgtatagcacatgataggtgaagcngagttattattg

SEQ ID NO: 75204 - DNA, 385 bp, Glycine max
tcatcttttggtccctctcatatttgttgcatgataaaacatgctctattttcatctcccactccaagtaggcctccggatcattctttcctttaaaggggggaatgttgagtttaataccatcaattcggttttgtctaggaacaccatcattccctcttctcctcctttcttctttattatgatctctattctccatttgatccaacctctcatggagcgcatcatctcgttgtttcattaacctctccatatgttgcatcaaagcttgcatttggaattgcgaaagcccccctccatcattaggatttgttcctgccatctcaaacaaacaaatcaaacgtaacaagacaattatagttgctgtttgaatacctcacccact

SEQ ID NO: 75205 - DNA, 438 bp, Glycine max
taaagaagctagagcttatctacacatacctctctaatagctaagctcacctccttgagatgagaagctagagcttaactacacaccccctataatagctaagctcacccccatgacaaaaacatgaagatacataaaaaagtccttactacaaagactatctcaaaagccccgaaatacaaggctaaaccctatactactagaatggccaaaatacaaggcccaaacgaatgaagaacctattctaatatttacaaagatatgcgggttcatacttagcccatgggctcgaaatcaaccctaaagctcatgagaaccctagggccttccttggatctctacctaatctacttggagtcttctacccaatgcactgcaggatatgattgatcacttttgtgtcgacagggtgttcccttgtcctacgattctcattac

SEQ ID NO: 75206 - DNA, 390 bp, Glycine max
ttcgaatatgccctatgtatttgcatctatagattcgctatgtgttaaatattaatgctctcataaatatgagagaagtgatgtcaaatattgatatgattgccccgagagatttgtgcttttttgcttggactcggaaagaaataaaatagacagaagtcttactaaagagaaaatgagttgactataagaatattgattttgaaactacttagattatcaaattcacagagagaactctgttaaatgataaaataaaattaaaataatcatattttatttattttgtttaaaactctcggattttcgatctgacgtttgctctgctggataaaacatataaaccagccttgatgtcaacctcatgtgtctaatttgccttctttttct

SEQ ID NO: 75207 - DNA, 454 bp, Glycine max
  unsure (1)..(454): unsure at all n locations
tgtcacgaagacctcacttaagcacgacattttgtgcgcttaagcaaagagaggcgaaagttgaaatatttacgatcacaaagctcaagcaagatgttacttacgcttcagtgaggaagtcacgacaagcccaagcctatatcagaatataaaagacctgagacacaatagaggagggattctggggtgattcagataatatctttctgagataaagagttctattcccagcgctcttagtattgattcattacacatctatatgcttgatcttgggaatcgtaatcaagttatgggcaattaatctcttcatgtgtcgaggatggataggctgaacttaactttatgttatactagtctttaatacatttattcagatttattaatttacttattctcttaatgcttgctntagattgatcacatactatttgatattacgactgatagttta

SEQ ID NO: 75208 - DNA, 387 bp, Glycine max
gatgtcaatccacccatatctggcttttatattaaccagacttaaaactgccgacaacagcgtcaacgaattcttgcaccccggatacaaaggatgctctgaatcagtctgtaatgtatcatacataagggcatgtgctagctgaaaagactcttgtccagggtcacgaatcatatactccaagcgatctcccatttctacatgaaacggctctgattgttgcacactctgcatgtctgtcattacaccatgccatatccacgtcggataattcctattaattgcatcacacaacagatgctctggcctgacacccagtgtatgtcgtcgctcattcaaacaattgatgcagggacgataatatcttccatcttcatgcagctgatc

SEQ ID NO: 75209 - DNA, 445 bp, Glycine max
  unsure (1)..(445): unsure at all n locations
agctnttggagaaaaagaagaccatctttttcttccaagttttatcagtgntcttgagcccttcttccatcaagcttaggtaagtgaccttcattttcaactataagcttgattatcacttcattttctttccctatattcacttgtagtttcaaaaccttattttcattattgaaggttggaaacttgaatctaaactccctcatttttccttctaaattatgtgcagcctacaagaggtaaggggatctctccaactcttgaaccatatgctcgttgttgaacttccttgaacatgttgttgctttgaaattnttgagcttgttgtcatgtcctgaatctgtgtgcataagtngtttccttgagtttttgatgcaaaaatgaattatttgcatgttaaaacatataagtagccttaaatttcacttaaaccggagtttcctag

SEQ ID NO: 75210 - DNA, 390 bp, Glycine max
ttatctccaaggcatagaatgattgcacttctggctctatcaatcatcgctgatttctccgttgagcttagagatttagacatgctttcttctcctttaagagcttctgcacaaccatgttgaatcaagattgcttccatcttgattctccataacccgatgtcattttcccctgaaaacttctcaatatcgtactttgttgttcccatctttcttgatcttgatcttgtccctaccgacggcgccacttgttgtggtctcctagcagttccgcttctcttagaacctgtacaagatcagaaaaccagaaaccagaatacaagcacaacaaatgaggcaagaatctacaccatgagtttatgtggctcgacaatgtgcctacatccacga

SEQ ID NO: 75211 - DNA, 250 bp, Glycine max
  unsure (1)..(250): unsure at all n locations
atcttnagtcacctgcggcatgcaatcttcaaatagtgtaccacactaccgtatctcttgtctagctattcctgaaagaagtgtatcaacagcttgtcatctttagagtgggcgcccatcttaccgctaatatattntcgagatggtttttgggacaagtcgtcctcttatacttgtcgaagtccggctctttgaacctctacggaataacaacatcgggtactaatcaaagatccgtcatgtctggaac

SEQ ID NO: 75212 - DNA, 381 bp, Glycine max
  unsure (1)..(381): unsure at all n locations
ntaggagaaaccattanaactaaagtagttcctaaacaaaaatcaattgagggagcttcgccaagtggccccatcgaaattgaaaaacctttattcaaacctttcaaagttagtgagaaggctaaacgaaaaattagggaacttagaaaagctaaatccttaactgaaggcgtaggtgacaatcatagtgaattactaaacaagattggtagtttacttaaggtcattccagatactccccaagcctcggaaaatacttctaaaatggtaacaagaagtacctccaaattaattaatgttattaatgaagatagtgaccacaactcagataacacaactgagataggatcactatcagaaaagaatataaatcccattaat

SEQ ID NO: 75213 - DNA, 383 bp, Glycine max
  unsure (1)..(383): unsure at all n locations
ntacccatatcatgaggtgcagaccaatatatcccacttagtcatcctctttctggaatcttgtagttttgaaatagcttatagcagaccttatgcgtaataatgtagcttatctcctgtagggcttcaattgataattctgaaactctgaaccaaacgtgattgattcctcatcaagcttcttcttcaacctcctccaagttctcaacatatcagcctgaatcagccccctgtaaagtgactcaaaggtacctttcagaggaagaaacccattctctatcatctcaacaaaataatggcaagcctccctccatctctgcctctcacacaacccatgtatcaaaaccgtatacaaatccaaatgcggccccgcccctgtctcc

SEQ ID NO: 75214 - DNA, 414 bp, Glycine max
  unsure (1)..(414): unsure at all n locations
tagcttatccttatggcctgcctccggactttaccctctctgccactccggaagatttaagccaagcccctactattgaagggcaactcccaccttatgaagagtattccgggcaagacgatggggaaggagatacccaccttggccccctgcttcacctcaaagatcgatccccgcatgaactaccccacctgaacatagttcgtcatatcccggcctcacccacacccgtaaaagaatctgttccctgtgcggaagataaggganagattgaggcgcttgaagagaggttaagagcagtcgagggccttcggaattaccctctctcggatatggcagagttatgtcttgtgctcaacatcgtcattcctctcaattcatagtccagactttgataagtacaaagggacgaca

SEQ ID NO: 75215 - DNA, 386 bp, Glycine max
tttcgattcattctatgtacccgtggtggtctacattgtgtttcgtgtatttttattctcgtttcatttactttttatacccccctttgacgtgcttaagccattttatttaagtcatttctcgcttaacctaaaaataaaataaatttccaccgatcgtttgaattgtattatccgttaacttcggttaaaatgaattccgaccgttcggtcgtgccgtaaccacgttggaaatcaaaaaagaggtaaaataataatataataataaaaaaaaacgtcttttagtaaaataaagcggaaaatcaatcggacgttttctctttgggatttctcattcttaattgaattgactaataactaaagtgaaactaaggctaaaatcaact

SEQ ID NO: 75216 - DNA, 468 bp, Glycine max
  unsure (1)..(468): unsure at all n locations
atcctcttagtcacctgcngctgcagcttgatgcaacagttggagaggttaatggaagattgagatgatgcgctccatgagagggtggatcaaatggagaatagagatcataatgaagaataaaggacgagaagagggaatgatgatgttcctagacaaaaccgaattgatgggattaaactcaacattcctctctttaaaggaaagaatgatccagaggcctacttggaatgggagatgaaaatagagcatgctttctcatgcaaaaactatgaggaggaccaaaaggtcacgcttgccgccacggagtntttcgactatgctcttgtgtggtggaacaagctacaataggagagaacaagaaatgaagagtcaatggttgatacatgggcggagatgaaaaggatcatgaggaagcggtatgtgccggctagttactcaagggaacttgaattcaagctccaaaac

SEQ ID NO: 75217 - DNA, 386 bp, Glycine max
tctggtgggacatcttgacttgctttccaatctgacattcaccacagattctgccttcttctattttcagattgggaatgcctctaacagcacctttgtcaatgattttcttcatgcctcttaagtgcagatgtccaaatctttgatgccatattctgacttcatcttctttggaggatagacatgtagaggagtagctggtttcttggggtgtccataggtaacaattgtcctttgatctgctgcccttcattagaacttcactcttctcatttgtcaccaagcattctgactttgtgaagtttacattgaatccttcatcacacagctgactgatgctgattaagtttgcagtcagtcccttcaccagcagtactttgttcaga

SEQ ID NO: 75218 - DNA, 486 bp, Glycine max
  unsure (1)..(486): unsure at all n locations
atgtactatgaacaaaactctatagcttcttcagcaacgtacctttcaaccatgcgtgcctctggtcggtattgattctttatataacctnttaacaccttcatgtaccgctcaaccaaatacatccatcgtaaaaaaaatgggcccacacaacctgatctccctcacaagatgaacaattaagtgaatcattatgtcaaagaatgaaggcgaaatatacatcttctattgacaaaggataatggcagtctcattctccaaaacatccaactgtttcaggtttatgactttgctacaaatagcattaaaggaaaaacacaaacgagttatcacaaccctaactttgtcaagaaagataccatgaatggctacatgttagagtntgttatatagcacgtgaacatcataagactcaacccaaccaatttgagatcattgacggatacaacatggtntncagcatggaagatcaaataatgttgagtt

SEQ ID NO: 75219 - DNA, 373 bp, Glycine max
  unsure (1)..(373): unsure at all n locations
tctaataaaaatcaaatagttcttataataatatttgaaatataaatactcttaggcttttcacatatataaggtgagaaactgtcatttcatttaatttaattggaatgattgtaataaattgtttgttcagcatttcctattgagatggtagtttctgtttctatatttaatataaatcatttccattcatgattggtgtaattgattcccaataatttgttttcaatcacgttatggtataagagcaactataattggcacattgaagcttactattaacttcatcttccacatgttgtgcgctattttatatgtgtgtgagattaaaatagtgtgatattatgtgaatnttaatatatgaatngaataa

SEQ ID NO: 75220 - DNA, 301 bp, Glycine max
agcttggttcgaggtacttacccgttgaagatcgaataacgatgaagaacgaatgaagaacgtcgaagaacgggtgaaacctttgcgagaatcctcacggaagacgttactgaaacgtttcggaagcgcctcggcttagattttcttcacggaaacaatttttcaagcaaactcccaagagagagaagtgcctgaggggctgggatgcaattgctcttgcattcctaccctcattatagccaaatatgggaggtgggtgccgaccagctcgcccaggcgagctcagctcgcccaggcgagc

SEQ ID NO: 75221 - DNA, 395 bp, Glycine max
tatgctgctaatatttacaatagacctcctcaacctcagcagcaaaataaaccacaacagaacaattatgacctctctagcaacagatacaaccctggatggaggaatcaccctaatctcagatggtctagccctcagcaacaacaacaacagtctgctccttccttccaaaatgctgctggctcaagcagaccatacattcctccaccaatccaacaacagcaacagccccagaaacagccaacagttgaggctcttccacaaccttccctcgaagaacttgtgaggcaaatgacaatgcagaacatgcagttttagcaagagaccagagcctccattcagagcttaaccaatcagatgggacaattggctacccaattgaatcaacaacagtc

SEQ ID NO: 75222 - DNA, 330 bp, Glycine max
  unsure (1)..(330): unsure at all n locations
agcttctcgcatccgcacctggaaggatctgattactgtctttcttangcagtatcagtacaactctgacatggctcccgaccggactcaactactaaacatggttaaatgggaacacgagtattttaaagaatacgctcagcgctggagagacctaacagtgcaagtatccccttccatggtcgagagagaaatggttactatgatgcggggatccttgcctgtatnttactatgagaagttagtgggctacatgccctctagcttcgcggacttggatttcgctggacaaaggatctatgtgggtttgaagaggggaacgtttgatta

SEQ ID NO: 75223 - DNA, 393 bp, Glycine max
ggcgcatgtatcaacagccaatgaagattgctttttactccaaggttctcctgcccacaattcatgagggggacctccttctgagaacaacatcccgcgatgttcaccacctttgaggacgctgcccacgactgctatcgccctgatatgaggaaagccgccattctcgcatgcccctattcatatacgctcacatcaagaaatggagcgtccgctcactggtccaccttatgtctccatagcgcatacatacacttaatatcctagagcatcactaagatgatctctacgtgcctcgctctatataccaattgaaattctgatactggcgacagatgtcgtacaggatgtcacgacatcacgcttcataacatgcaatgaatgtgtgactgt

SEQ ID NO: 75224 - DNA, 433 bp, Glycine max
  unsure (1)..(433): unsure at all n locations
acctgcggcatgcaagcttgtagagttaagtctcgtatcggtttaatcaattgtctatatctggtnatcgattacactattggttgagacaatgactaatttagtcacgagtctctgctttaatcgattaccaaggggattaattgattacttctctctcgttcagttgtcaaaggtgaacaagaacactttaattgattacttaggtcatctaatcgaatacattattcttggggttgttttccagatgttggatgaacactntaatcgattacttagataatctaatcgatcactttgctaaaataaccgattaccttatatgattaatcgaatacaaatggttataactatttcttctataaataaccaacttgtgtcacattacacatcacgagacattagagatactcaatcatctcgagataacttc

SEQ ID NO: 75225 - DNA, 350 bp, Glycine max
  unsure (1)..(350): unsure at all n locations
tgttaaagcttacatttgctcgtcttcgttgcgcaaatctgctttacgggtatgtggtactggtgttatttggctatggttttggattttttcttttaatattgttaaagttttttatgctatcatctaatcatgcatcatgaaatcattaaatgaatttgactattaccactacctgaaaaggccaccatttcccaatcttgtatcaacaaatgatgaaaattactcaaattttctcgtgtcggcaaaatcaatgacgattattctatcaagacgatagctaatccctatccaaacaacacaaggatcattgcccttccaattcttagcaaagatcggatganntctcc

SEQ ID NO: 75226 - DNA, 472 bp, Glycine max
  unsure (1)..(472): unsure at all n locations
gtcacctgangatgcagcttatanntttgtttctagatgtagatccacaacttcctttagtagtcatccacaatgctcaagagataacttgctctataatgagagcgagtcttggttggacccccaagatcagcatgaacataatcaagggtaccttttggtctctgcttgccagcattgaatatggctctgcaggctttgccatagacacaatgttcatagaactttaatctttccattatgtccccacaatgcaacttctattttgcaattcaatcaaccccttctcacttacatggcccaacctcatgtgccataactcagtttttgataaaactcttccggttgcagtggctgcagagccacatacaacttcaccatctacaaaatagaggccattctccataattcccttcatgacaaccatggagtcttaaactacatcagtattcctttttacccttgaacacat

SEQ ID NO: 75227 - DNA, 386 bp, Glycine max
tgtatagttccccaatttatggttattttgtagtgatttttgtaaataaatcttgttttatggttaatgctgtctctagaacatttccattggatttaatgatgaaatatgtgcattttcgggtgaaaaagaggctaagttttgaattgcaaaatgtagcagttgggctaagctcaacagttgggctaagcgcatatccaccgctaagcgtagtttcagtgcgcttagcgcaaaggagaatctggcagagcatcagcatcaaagctgcgcgctaagcgcgagatcaatgcgctaaccgcagtaggtgccttcagccaggctaagctcgagactggcgctaagccctcgcgctaagcgcgagggtcacgctaagcacagcgttgcga

SEQ ID NO: 75228 - DNA, 407 bp, Glycine max
ttttttgctttaccttctcttcattatggttttcattttctcatgatctctcacatgtttgtctaatgtgttacatgattattagagttccaccgattaacttgctataacagctagatttgatttcaatggttcaatctcttgctcttgttcttgaaccactgaatgtgttgagtttaagttccttagagttttgccatgttatcttttgtggctgaaacctataccattaaattcttacacaaatattaaagtagaagacaacctcataaatctagagtggcttgttacctatcgtatgttgcatagaagccatgtctagtcatgaaacttgtcacataagatttcttatgttgtgctcgaatttattttcttggttctttgctaactcatttgtcatgagtgat

SEQ ID NO: 75229 - DNA, 391 bp, Glycine max
tcttctactcctgtattagattttgtgtttactctacagatgtttcactctatgatgcagagcctccacagaggtcatgtcattatcatgccgagtctccagagctcaggcctgccatttattatgagcacagatgagttcctgactcaggtggtttggccagtagtccagccttctccttctggagggggtgggatctccgtaacccaagagcctgagcaggcaacagagaagccagttatagcagaggatgagctcactcctctttagccctctttaattgctgcagatacatctatggctcaagaagaggtatcttcacaatatcccatgccagagccatcccctccaacccattcttcaggatgcaccagctactccagcgctggat

SEQ ID NO: 75230 - DNA, 441 bp, Glycine max
  unsure (1)..(441): unsure at all n locations
gcttctttgagaaaacttccttgagaagctagagcttatctacacacacccatctaanaactaagctcacctccttgagaagcttccttgagaagctagagcttagctacacacacccctctaataactaagctcacctccttaagaagagaagctagagcttagctacacacccctataatagctaagctcacccccatgacaaggctaaaaaatcctacatttctagggtacccgacctacattatggagccctaaatacaaggctaaaaaataatgaaatcctagtctaatatgtacaaagataagtggacccaaccttggcccatgtgctcagaaatctaccctgacgttcatgagaaccctagggccttcttcagtagctctagcccaatcctcttggagccttttgctcatggctctggtgactggtcccttcct

SEQ ID NO: 75231 - DNA, 388 bp, Glycine max
ttaaaatttgaattaaaacgttcaataactgctggtaatcgattaccatatatgtgtaatcgattacacattgcaaattttgaattcaaattttaatagctgttgtaaatcatttttggccactggtaatcgattacatcctctggtaatcgattaccagagagtaaatctcttgaaaaagactttttaacttaaatttcttggccaaaccttttgctacttcaattaggaattcccttcctatttaatatacccttcctaagactctagagactgtcttgatcatccatcttgaatatctttaatttcttatgtgatcctttggcatcatcaaaacattcagcttgatcctttgtctacaattttctatttaccacaaaaataattt

SEQ ID NO: 75232 - DNA, 486 bp, Glycine max
  unsure (1)..(486): unsure at all n locations
agcttatgcaaatgtataattaggaacagatagtattatgtctagaagtaaaacgaatgacaagagttntctaatntggttttccaccatattttctatcttacgaactgacccttaaaacttttctagctcacaaccaaataaaatgtcacatgtccgctgtanagagaataatgaaggcaagaacgacacaagtagcttgcatgaaatctggtatctaaactctcttatcattggtgcaccaaaaatggttatcctaattcactgattggatccactggaaggtcttttctttctaattcacatgcttaccataaacaanatcatatatcatagtagtancatagtagataataaattagagtgcttaaatgaatcattccggaagatcacacccttaaaaaanactcagggatcaacacattaccaggaaccgaagtatgccatgtcttgactaccccaatccaactatcacatcaatatttc

SEQ ID NO: 75233 - DNA, 342 bp, Glycine max
ctcagcttgcttcgaaaattaagtaaaattttttcttccgaagttctccacctaatggcatggaccatatgaagctctctccattgcaagtgctgttctcttcattcagctgcattctcctcctatagaggctgctcttttctatcctaacacttctatcatcctatttacattcatcaaatcctgtcattttacagggagcacccgagtcaacatgttaaatactcaagtgaacactccaatgtcatattaatacctaaaggggaaaagagaaaaagcgtagatataattgattactatatgtcgatatatcatcattcgtatcttttcttcgatctttta

SEQ ID NO: 75234 - DNA, 389 bp, Glycine max
  unsure (1)..(389): unsure at all n locations
ancttctatagaaggtcgttcctaatttctctacatttgcatcacctttcaatgagctggtgaagaagaatgtatcatctacctgtggtgaaaaacaagagcaagcctttgctttgcttaaagaaaagcttactaaggcgacctgtctagctcttcctgacttttctaaaacttttgagctagaatgagacgcctctagagagggagtaggagctgtattgttacaccgcgggcactctatagcttatgttagtgaaatacttcatagtgccaccctcgactacctcacctatgataaagagccttatgtcttattaagagccctccaaacttgggagcattactttgtttccatgaatatgtcatcatagtgtcatcatcacttaagt

SEQ ID NO: 75235 - DNA, 381 bp, Glycine max
tgagatgaggaagtgttgaagggtgaagcttcctgcttttattgttgaccacagagtggtacctggagatatgtcgcgggggtcaggagaccttggggacgtcaggtggggtgctattgcccaaaaccaagcttgaccaatcccgacccaacccgggcatagtcggtcagtgagaacctgtgatgtacctaagcaggcgagctcctggcagtcaacagataaaaggaaaacaagaccacaaagcaaggaggcttgtggtggctggccagctgtgaattttgtgtaatatgtgagatatggcctctggtaatcgattaccaagggtgggtaatcgattacaaggcttaaaaatgaagacagggggctaagatggtctctggt

SEQ ID NO: 75236 - DNA, 294 bp, Glycine max
  unsure (1)..(294): unsure at all n locations
gagacaagatctaccgangttataataatattataattatgaacaacttttcactgtgcgccgctcatgtagatctagcatgacccatattgaagctcgacgtctatgtgtatcaatgcccacaatttcttgtagacaaccatgctgatctggtccaagatggatttcacgctgcaacttgtgttacacttcataaattcaacagatgaggacgcttaagttagtactggatttatattactagcaacgcagtgctctagagaggagaattgttcccagaacaattgagatcta

SEQ ID NO: 75237 - DNA, 387 bp, Glycine max
tctcgaagaagcaatgccctcccttccccattgtcgccgccgccgccgccgcggttagttacgatcgtcgcaatagattcgtcagttaattaattagttagttatttagtttgttagaaagtaaaaaacggagagatctagcgcgtgaggctccctatctgacaccaaaaacattgggttcttcgccggcgccggagacatttccggcggcgggaaaatcgaggagaggaagttcaacgtcgccggagagatcgcgtggcaacggaggcggaggaggaaaacgccatgaaagacggaggcggttggctagggtttccgatgggaacaatgccctctctccgtttttttccgaacgtttttgaatgctttctcttctcctcctactat

SEQ ID NO: 75238 - DNA, 375 bp, Glycine max
tttgttctctggatccgacgttggagttcatattgtaaggatctgtggagaggctaaaataggcaaaaccacagtcgctcgtggaggttacaactttaactatgacactggatttgatcactattgctatttttatcacgggggggatattctaaatcgccctaaatgaagaaatgaaggaatggcaatactcagccgtatataggtgttcgcaatttttgaagatcttcacgattcctagcagaagaaaaacattattgaacgatcttatcagatgggtactggcaggctagtcatcattacagctcggaatagaggcttcgcttaaactcatgggattgaaagcatatatgactcatagaggttcagtaagac

SEQ ID NO: 75239 - DNA, 454 bp, Glycine max
catgcaactataaaacaaattgccttatcattttcaatatgcatgtgaattaagacgcatcaacaagaatcacgccaacgctatggtgcaagcaatcaatggggcaaaacacaccaaatgattataatgatggatggctcaaattctcacaaaggtaaaatcatcactttctaattgagctttcaaaactatcatgacatgtagagaagaatcaaggtattcaagtcacagaatgtcaagaacttttattttcaaaacaattacccatgtcttgacatatcctataattaaagaaaacatcaaagtctacgtgcacacgaattgacccaaatattaactgaaatcgacgaactacacattacaattacacaactacagataacaaaccacaatctagcaaaccaaaacactccccccctactaaacaccatgtctcatgtcacaataagataaa

SEQ ID NO: 75240 - DNA, 380 bp, Glycine max
tggttcccaacgctctgttcaagctctcccaaaatctagagataaatctaggatcagtattagatactatgctagatggcacaccatgtaacctggcaatctcacttatatacaaggtggtcaaattctccaaggaaaatctaatattaatgggaataaagtgaacagacttagtcaatctgtcaataataacccagatagagtctaaacctctaggggttctaggtagtcctaccacaaaatccatggaaatactgtcccacttccactggggtatctctaaaggttgtaacttccctgaaggtctctgatgttctatcttagtcttttgacaaactaggcatgcatacacaaactcactaacctctctcttcatgttg

SEQ ID NO: 75241 - DNA, 490 bp, Glycine max
  unsure (1)..(490): unsure at all n locations
ggatcttaagcaccgcngctgcagcttctcttatgtggaaggcgggcttcttcattcttcttgttcaaccgcgagctntgactaccactcttncttccagcgatgcttctctttatatctgcctgagtgggcttatagcctaaaccatacttcccatgatttcctttggcattatcaggctaagtatgccgtcgttgtctttgcctaaacccattctcgggttcttaaccgttccccaacataactcgggccatcattactgctgcatcggacaggcaatgctgcccagagaagaagtccacggaggaaatgcttaccacctcacaagactggaaagcggtttctaatgactcctctacagctttcacataaggcatagatgatgggcagctcaccaagatgtcttcctcgtctgatacgatgaccagatgcccttccactacgaatttcaacttttggtggagtgaagagggaacactcccactgagtg

SEQ ID NO: 75242 - DNA, 393 bp, Glycine max
  unsure (1)..(393): unsure at all n locations
tcggaagaaagtgatgaggtacaagccctaaaggaaaagcttgaaagagcctgggtagtcaaagagaagttcaagtccacaaccatcaaagtctgaagagagtatgatgaactaagggacgtcaatatggccaccgctgaagccttggaacgagaaaccaagaaggcccgaaaggaagaacacaaccaaaacaagttttgaggggctttatagggaagcaatagtgagctcaagctccaaagagatgaaaggaatcatcacgggtcaaaggcatgatcttgaaggacgagctaaaggcttgccttangtcgaaaagaaatttgtcccaacagttaagcgagaatgaagggaatatgtgggccatcattgatgagtacaaagagaagctaaatc

SEQ ID NO: 75243 - DNA, 408 bp, Glycine max
  unsure (1)..(408): unsure at all n locations
agcttccctgctatggagagctaaatcctcagttggttcttcctatggagtacttgatgtaaatatttgtatatctatctaatgatgctttatgtgttcactgcgctatcagtacttaattctagtgtgactttgccttgatcacgcaattgcatgcttagttaaggtcactcaacattgggaaatggtgtgatccttataacctgataagatanggctagcttatcgtatgttcacgagacatcggtggacgataacctagtcttagtatgttatgtcttaatgcagctctggttaattttagtgctacaagagaaatctgatgacgatgctcgattangaatatgctcaacatgcactagacatcgcggtttagtaccccaggagacaacatagaacacatgaaca

SEQ ID NO: 75244 - DNA, 391 bp, Glycine max
tcaacaatgatattcatttttagaaaatttgtgattgttcttcttcctccaatcaagcagaaaaatgggtttccgtttaccttctatttgacgggcaccaaaagtggttcatcattgccataccatacttgaacctaccttcattccaggacttgttgagtcaagctgaggaagagtttggatatgatcattccatgggtggcctcacaattccttagagtgaagatgttttccaacatataacttatcacttgaatgtacaataaatctcgcactgttgcagacactgacttatttaatagacattttatacaataggcatcttctcaacctaattgtaaagattaccaatgttgggaaaaactcgatgggaggaaataccggggagatt

SEQ ID NO: 75245 - DNA, 346 bp, Glycine max
ttctcacggaaacttggattacctcttctttctcgggctcttcagcatgctcaaagaaccttctgatactttccccttttgtgattggaacataaccatctcctacaattaaccttgcatgtacacactgttgacccttcaacgaatgagctttaacagaaaagttcaggacagcggccatcttatcttcaagctcggagggtaacaaaacatgcactctaaccaccaagatccaggccactggctcgaacacatccattcaatccaacattttcaaattccaaaatgtcagtttttcttcagttgtcccaacagccactctaagtgatgatagggtcccgctgca

SEQ ID NO: 75246 - DNA, 383 bp, Glycine max
tgtttactgcgaattaggatcatggcattgtcttttattagaaccgtttgttctgctatgaagactcctcagttctgaaattatccttttaagccacattgaagttattgtgaaagaaattagggccattggtattaatagaaagtcagtaatatcctgatgttgctcaaattttcatggcacttgctatcattgtgaatagtggcacaagtaacattattaccaaatacatgcaatccacaaggtaaagcatgctcttgtttgatctttgaatcacttatgagattgataaatagctacttactattttttctatagcttgcttaaaccaaatatttcttacaaaacaaatcttttgatcgtagtatcttataccatcaatt

SEQ ID NO: 75247 - DNA, 497 bp, Glycine max
  unsure (1)..(497): unsure at all n locations
caagcttgaatagtgtacctaaacgagtggaacctgctggagagaaagatggcatgtcggagcatactggtgagaaatgttacgatagtgaagctgaaatcacatcatgcattgagctggttgaaatgactgaagagagatagtactaccagcgtgatggtcctttaataaaactggtggatatagagaaacacatgtacatggcagtggcacctgatccagacatcttgatccgaacttctggagaggctcgactcagcaaattatttctttggcagactagtacctgcccttggtatgcaccaactgcactttggcctgaaataggcctaacacacttggtctgggcagtatggaactttcagagacacctattttatttgganaagaaaagaagcaagtttaactgtatccctatatgcagaaaatcatagtgtatgtcatgtgatggcagctccttctattaaacaagttttggttcttatttattctattat

SEQ ID NO: 75248 - DNA, 378 bp, Glycine max
tgaggtagagcttgctttgtagagtcagaagtgtctataacacaatacgtgtaacttgagagaagttagtggaacttagtgttttgccaaggactggacatagtattagtggtagagacgaaccagtgcaacttttcgtgtttaatttttttgtgtgctttcctactgcttttaactgacctagggtctgaatttgtttttaggcttttgaaaacatcttgagttttacgtgtttatttttcatcatctaaacgggtttttcttaagatctattatctgttttacaaagcttcttcttcgaatgaaaaattttgtttgcttgtggaaaggttttaaaaattactaaaatcacaattcaacccccttcatgtgatattt

SEQ ID NO: 75249 - DNA, 389 bp, Glycine max
tctaagcccaatttgacaacccagaaccaatttgttttggcatcacaatagcaacaagccttggcacaggctcaggcacaaaataaccttgggaattctaattatggtgacatggatcctcgtagactttttggtcttcctcgaggtagcttaagtgcaaaggatggccagtctaccagaaatgatggatctatttgctctcaaatgcagtcagattcacctaaggttgcactagcttttcaaaaattaaaaaaggtcaattagaatttagaaatattaatgtttgattaacatgtataatataatatctttaaattcaacgcacatgcacacacacacacatataagttctatgaattgcttgagtgagtctccagaacccttgatag

SEQ ID NO: 75250 - DNA, 412 bp, Glycine max
  unsure (1)..(412): unsure at all n locations
ggctctatnttctcttttgcattgatttctcctttctcacactctatttccacactcagtacccctattgaaaaatcaccatgacatagaatcattaactatgtacccctattgaaaaatcaccatcacataaacgtgttatagaattttaagacactaagggctggtttctttaaacttaagaactttttttaaaataagcacttttaaataaagttaataggtagataaaatttgtttctcataataagagaaataaaagcaacttattgtaagcagaagttgtctaacacacatactataaaaatacaataaaatatatttattctgtcaagaaataagtcgttgtttcaagaaatacagttaaacaaccttacccaatttgtcttacttttgcattaatacttcctta

SEQ ID NO: 75251 - DNA, 382 bp, Glycine max
tgttcgagcatgtatcaacttataccaatttgtatgagttatggacaaatcttgaatctttgattcaaaagaagacaccaaggaataaagctcatcttgttagacgcttggtcaagctggagtatatggacgggcagaacatgattgaacatctaaacaccttcaaagatattgttaatcaattgaagaaggtagataatgaattataaactcttgtactcctcaatactcatcataggtaccaaccacatggtacaaaattcgcaagggtgagtttattataaaagaaatcaacacaaaaatcaaatgaccatggttagtatgaaaatattaacaaataccataatcatacacaaatatccattagttcgacatacactca

SEQ ID NO: 75252 - DNA, 434 bp, Glycine max
  unsure (1)..(434): unsure at all n locations
agcttncacaacatccaagcaaaacaacattcacacagcacaagctatcacagccaagcaaaacagagcataggcagataactctgccaaaacaccaaccaaaaatcacagcttttcccactcagagaccccagtaacaattccttcgatccaattcgttaaccgttggatcgactccaannatttactggaagtctatagtgcataagcctacatattgactcgtgggatctactagcaaacatccagaactcattctacattactctttccacaaccagcaaatacatgggattttctgtacttgtgcagaattctgctgcacaattttacagcaaaatctgcacaaagagcatatntcgaaaaccacacttcctctcatccaatcttgcccaaatcaattcctacaagttccaattcatgtatcaatcatg

SEQ ID NO: 75253 - DNA, 386 bp, Glycine max
tgagatgaggaagtgttgaacggtgaaactttctgcttttatcgttgaccacagagtggtacctggagatatgtcgcgagggtcaggagaccttggggacgtcaggtggggtgctattgcccaaaaccaagcttgaccaatcccgacccaacccgggcatagtcggtcagtgagaacctgtgatgtacctaagcaggcgagctcctggcagtcaacagataaaaggaacaaagaccacaaagcaaggaggcttgtggtggctagccagctgcgaaacttgattgatatgtgagatatggtctctggtaatcgattaccaaggatgggtcatcgattacaggcttaaaattgaagacaggaggctaagatggtctctggtaatcgat

SEQ ID NO: 75254 - DNA, 408 bp, Glycine max
  unsure (1)..(408): unsure at all n locations
gcntgnacttggaacgctatcttctgaatcttttcctcacatatcttatgatatggcattagagaaagaatttgagctatcccatatcatggaacatggaagtgtcttctttaccggaattaaagctcaatctcaggcagaggcatatcctttttaatactgttatacattgatataagatcacattatctctcgacagncactagcacaatctataataattcctcacatatgcataataagtgtccttaacttcattcttctttcatcactaccgacaatgatgtagattctgatgtgagactcttttcttgatttgatactactgttactataattaacaacttattagcacctgtcacatctttgttcagatttgatgatatattcagtagtgctgcaatggta

SEQ ID NO: 75255 - DNA, 382 bp, Glycine max
  unsure (1)..(382): unsure at all n locations
tatcacattntatataaataaagntagttttttttcaaactattgttgctacaagattaagcttattcattctaattgtatgccctatgtcttgtcggcaaagaattaccatacacaagactcagagaacaattatggtgtaagtacattgagctctttacatactgctttgagcgaacctaggatctcagatagtcaatgaccaattgatatcataatgaaatttatctaagaattcgacggcagattactccgaaaaatattagtaatagacatgagctttaaaagaaatattgactaaataatnaaccgagcaagcctacgggatatgatatagaataatcgacatctactttttaactccctttttgtgaaaaatgct

SEQ ID NO: 75256 - DNA, 375 bp, Glycine max
taggttatggttcacactgtatggttttcttgagcctcagtctatacacaacacgaaggatagacgtcaagaatgtcaacattacattgaaacatgggtcaaggaatcacatcgacaagtgtacttaggagcttacttgaattagtaagtgaaattcatcatgtacagtgaaaataaatttgcattataagtagctaattatagtttttcaacttcagggcacattgacaacttgttgttcaatgtccacgagacaattttgttgtctagttttgttctttgtgtaagaagtctgatttgagcatcaaggctgcaattagcaagttatttttcaaataataactcaattaccgtataccaattgtagcataacta

SEQ ID NO: 75257 - DNA, 458 bp, Glycine max
  unsure (1)..(458): unsure at all n locations
agcttgatgtacgctaagcctcgcatctcatgctatgcgcatattgcagaaagaattttggtgttacagaaagcgctaagcgccgcctgtcatgctaagccctcaatgctaacgggatattacaatttcaagttgggctttgcacgaagctaggctaagcgctagtgttttaaactcaaacgtcatgttggcacgctaagcgcagctgcgcgctaagcgcgccatgcataattcnagttttaaaaaacaaagacagaggcacttgggttgctaccttcgcactcaaacctctgcaccttctcatctctgagcattatnttgctctctgctgggtgtgtactgcttctctgcatcattnttgcttcatttcaaagacaatccaagtaagttagcatacttctattgttacttttcatgcttcaaaccttatgatagttgatttatgggtttcgtagtta

SEQ ID NO: 75258 - DNA, 384 bp, Glycine max
tgatggaatcaattttcaaaccatcaatcattaacaaaatttcatgctggtggctccttttctggaggaggaagtacgacaggctatttgggattgtgggagtgagaaaagccctggccctaatggactcaactttaagattattaagaagttctggcagttgatcaaacttgatgtccttcattttctagatgaatttcatgctaacggagtttttcccaggggatgtaatgcatccttcctagcattaatccccaaggtggctgacccacatctcttgaatgattatagacctatctctctaataggttgtatgtataagattatggcgaagttgttggctaaaagaatgaagaacgtgttgccaactatcatagatgaagc

SEQ ID NO: 75259 - DNA, 321 bp, Glycine max
  unsure (1)..(321): unsure at all n locations
acctataaagcatatctaatacaatcaacagnggtcactcctgttacgctgctatgactattcgcttggtgattagcttttgtgtaacagtaatgcatggttctagcacctcggttctgtttctgtcaaccacacagacttctttgtttcgaaatccctctcacagtggtacaatgactctttggcaccacagccaagcagacactcaccctatggattgctaaccacacacaaccactggctctctctatggctaacatcctgactatagatgagtcttttccatctgcaatattaatcactattgagatcaatatctta

SEQ ID NO: 75260 - DNA, 374 bp, Glycine max
tcagatgcttgtatataaaaatatcactctttggctgggaacacattttattagtaaaaatgcaaccataggaccccaatacctatactgtatcatgtctgtaatcacaataaagcccatcttagagtctgctacatttgtcaaactaatggcaaagttaaaaactttggcagtttcaccttactgaacaaatattttataacagcatttaattcatcaagtcgagaccctactcaataaacggattggacaccatgtgtactgtgatgataacagaagaataattgtgatcccaggacaactctattattcatcaagatgtgacacttggtgaagaacagagtcataccaatgggttgttgttccctcacggc

SEQ ID NO: 75261 - DNA, 460 bp, Glycine max
  unsure (1)..(460): unsure at all n locations
gcttgctgattacattctcttcctctttaatgatgaccaccacctgtaggttaggagcaacaaccaccaccaaaaaatatccatttgtatatagttttacttgtggcgtcctaaataatgaatgggttaatagtaataaattaaatggcagaaaccatggaaaattttaattttctttctttntcttttctctctctttttcacggtaattaaattcagaaggaaaattattactatagagtcctgaatggccagatcacaactctatttggagtcatttctttctgatcactcataacctctaaactattttgctctttcaaaaagtaaaatataccagtcatcattntaggtcgtcacgtgaaaaataataagatgccgtcgggtaaatcttttttcaataaagttgtaacatttccttttcaataacaagaatanacataattatatttatcatcta

SEQ ID NO: 75262 - DNA, 390 bp, Glycine max
ttaaaatttgaattaaaacgttcaataaactgttggtaagcaattaccatccatgtgtaatcgattacacattataaattttgaattcaaatttctagtgactgttataaacattttcagctgctggtaatcgattaccagagagcaaatctcaatttgaaatgatagaattctttggtcaaaccttttgtttttcaatttcgaaacttcttccaaagattctagagatcaacttgatcatatatcttgattttcttggattcttgtctcgaataaaacttagaagcacttgatccttcggcatcatcaaaacatcaaaacatcttgcttctacataggagtcatttgacttaatccatcaattgaaaaaaattcttcaactatttctcg

SEQ ID NO: 75263 - DNA, 442 bp, Glycine max
  unsure (1)..(442): unsure at all n locations
gcttctancacaatggacttaccttgaattaatntctttgatagcccctntgagcctatattcccctttctttggtttgaagttcattacaagccctatgtgaacaaccatgatatcaccttacccttatagaatattggagctntggaattgttctgggaataagctgcgtgttagtgcttagctttactgagctttaaaagattggctataaatttgttaaaacataatcacttanacaatgaatgatagctggagttgctgcacatgatgtccaacgttatgtcaaggaattagatcgggctgcacaatgcacaaggcaagataaaatgtcaaatgaagaatcgaagctgcacgatccacgatgtcggatacaatgtccaggacattctgcccgacaatactggacacataaatctggtatatctttaacagattaatg

SEQ ID NO: 75264 - DNA, 391 bp, Glycine max
tactagcttatttcaactgtgactctaatgtggatgctcctatctttgaaaagctgcatgcttgtgagaagtgattgatttaagcattccatgatatttagttcacatgattgaattcctttacgaatcagacaccattttcttttgtttgaccactggctttgtcacttgaggacaagtgagctgttctttctttgcgggcgacaaaatgattttagccttagtttcactttaatggtctttgttattttcccgattgattccttcgccaaacatgtatatatgtatattatattattgttgtttttgttgttgtttgtattttgttttgtgttgtgtagaaaaaagaaggagtagagacgagactcgtcatggactaactacagaaagg

SEQ ID NO: 75265 - DNA, 452 bp, Glycine max
  unsure (1)..(452): unsure at all n locations
agcttcatgcagtctttctgatcagccnctcttagttatccctttcaaagacaatgcggactanggatgaccacaactacagcggctttccaacacacacccctcacacccaaggctatgtgggcctggagcatggctatgtaagtcaccccacaatggatcaaggataggcatttatataataaaggagaggacaaaatgtgaggaattatttcttattgatggaattctctgtacatatagattagcctatctaaggacaacagtggaatagatgtcataataacagaaatatactgatcctgccaatctgcatgtccacactactactatctaaatagacagataactactaatattataggaatctcaaattggggatccaggatcttcacaattattaccaagaccttctatattcttcaattcttgcaactcctctacccttacta

SEQ ID NO: 75266 - DNA, 368 bp, Glycine max
tgctaaagaactgaggaaaaatcaagaacattcttgtactcacatcgttcgcgtatatgatatccactccacaaggtttgaagtagaggagagcttcatccctataacgcaacgtggcggacaaaagtgggcaataaacttgaatggccgtcattgtcaatgacgaacgtattctgcgctgcattatccatgttcacacattattgcagctcgtggctacgcgagcatgaactactaccaatatatagatgttggttatacaaacgagctcattttaaaaacttactacgcacaatggtgggctcttgggaatgaagcggctatacctcctattgatgactcatagacacttatatctgacgaactac

SEQ ID NO: 75267 - DNA, 366 bp, Glycine max
  unsure (1)..(366): unsure at all n locations
agctttgtaatcgattacacacatactgtaatcgattaccagatgagtntntcagaaagcattctcaacagtcacatctttntgtgtggctcttgaatggctatcatacgcctatatatatgtgacttgagacacgaatatgacaagagatttgaagaaaaaataagtcttatcctcttaaaaacaaaattggtttatcctcttacaaattccttggtcgaaactcttgtgattcaataaagaattatatggatgctcaaattgttcaatctatctctttcaagagagatttcttcttttcttcttcttcattctgaaaagggattaagagaccgacggtctcttggtgtgaaagaattctaacac

SEQ ID NO: 75268 - DNA, 385 bp, Glycine max
ttgttacttcttttggcttcttcaatgacctcatttgcaattagtgcgctgtgtagtaattgccttccttcaatgaatgcagattggacttcatctatgatggatgacatcacctccttcattcgagaggccaatagcttcgccacgatcttgtacatacaacctattagagagataggtctgtattcattcaagagctgtggatctaccaccttaggaattagcgctatgaaggatgcattgcagcctctaggaaagatcccgttagcatggaattcatggataaatctaataacatcgagtttgattagctgccagaacttcttaataaatttaaaattcagcccatcgggacctgggcttttatcactcccgcagtcccgta

SEQ ID NO: 75269 - DNA, 461 bp, Glycine max
  unsure (1)..(461): unsure at all n locations
agctntagcaatttcaacctatcacagaaacctctataattgtttttataccatgaagagaagaaatactaactaacaacagtgtcaaataagttgcttgaagggcatgatacattggctgatacaacaatactaagagatcaagatactcaatgagaaaacataacatattcctgactgatacaataaaattagaacaggtccttatttacagaagataataataaaaaactataggattgacttcataaatgcaataattgtaggagtgaacagagagtctatgatagatctgagataanggaagttatttgatgggcatgcatctcacaggcgtaacaaattaattatgagaagcaaaaagcttgagatgcataaaggagaagaaattgatatgcatcacacagcattttaagacctatctctgctaacatgactcagatcaagcacttattctatac

SEQ ID NO: 75270 - DNA, 387 bp, Glycine max
ttatgaaaacatatctatgttactttgtacatgtgtataacagtgtatcttagatatatgtcaatgaatgttaacacatcataaattaattttgtgacgatgttttcaacagactacaaccaattagcagtgaatttgaaacaagaaacttcatgttgaattacatctgtattgagtttattctccatgtagtatatttcaaacaagaagaaactacaagcaattaaaattgaatttgaattggataagtataattcattgccacacaacagtagtgaataaaactttactttccccccaaaacatggctaaagtattgcatatactgcgttcaaacttcattgtatatgaacatttggtcctatggttataaaactcaaattaata

SEQ ID NO: 75271 - DNA, 384 bp, Glycine max
tcaacattcaatttcgagcgttccgatatattacgggacacaaaagaacatccgagtaaaaagttattgtcgtttgaatttgctcagagattcggtcttcaattttgagcgtttcgatatattacgggactcaatcgaacatacgagtaaaaacttattgtcgtttgaatttgctcagagcttcagtattcaatttcgagcgtctggatattttacggctctcaatcatacatccgagtaaaaagtgattggtgtttgaagttgctcaaagcttcaacattcaatatcgagcgtttcgatatattacaggactgaatcagacattctagtcaaaagttactgtagtatgaagttgctcagagctaaggcattcaagtccgagcg

SEQ ID NO: 75272 - DNA, 321 bp, Glycine max
tagaagttcaagttcatagccatctaagtctgaatagagtatgatgaacttacggactgcaatatggccacacctgtagctttggaacgagataacaagaaggctccgagggaagaacactaccaatgcaaagttttgaggggctttataaggctactatagtgagctcacactccgagatgtgaaggaatcatccgggtctaggctgatcttgaggacagctaaggtttgcttacgtgaaaagaaattagccctacatataagcgagactgaagggaatatgtgggccatcttctattagtgcgaagagatgctcatcta

SEQ ID NO: 75273 - DNA, 391 bp, Glycine max
ttgagccaaaatcctgactcaccataaaccttgacccagggtgagaatgtcaatccttaccctcggaagcgaaaagaatagaagggaaatttccaatcaaagaaaaggaaagaaggaagatttccaatcaaaaagaaagcaaaaaagaaaagaaggaaaattccccaatcaaagagtgggagaaagcaaaaagaaaagaaagaaaattcccaatcaaagaatgggagaaagtaaaaaaggaagaagaagaaggaaagaaagctcctgatcaaggatcgaaggaaaacagaagaaatgtgcagaaaggtctttggaccggacaatatctgaacaatacagaattgtcaccaaatgaaaaaaaagaaggaaaggaaaccacgacctacaatgg

SEQ ID NO: 75274 - DNA, 459 bp, Glycine max
  unsure (1)..(459): unsure at all n locations
gcttggttcgaggtacttacccgtcgaatatctatgaacgatgaagaacgaatgaagaacgtcgaagaacggtcgaaacccttgcgagaatcctcacggaaaacgttacggaaacgtttcggaagcgcctcggcttataatatcttcacggagaacaatttttcaagcttattccaaagagagagaagtgcctgaggggctgggatgcgattcttcttgcattcctcctctaattatagcacaatatgggaggtggttgccgcccagctcgcccaggcgagctcagctcgcccaggcgagcagggttgcttcctccagaagcaaccgccttctggatgaatcttctggagggcccanatgggcctggttgtatttgcacccncattatactaagacacgccccttgctatttttggtgattactttttcgtatagtactgaacttacaattcgtacgat

SEQ ID NO: 75275 - DNA, 383 bp, Glycine max
tatgctgctaatatttacaatagacctccttaacctcagcagcaaaataaaccacaacagaacaattatgacctctctagcaacagatacaaccctggatggaggaatcaccctaatctcagatggtctagccctcagcaacaacaacaacagtctgctccttccttccaaaatgctgctggctcaagcagaccatacattcctccaccaatccaacaacagcaacagccccagaaacagccaacagttgaggctcttccacaaccttccctcgaagaacttgtgaggcaaatgacaatgcagaacatgcagttttagcaagagaccagagcctccattcagagcttaaccaatcagatgggacaattggctacccaattgaa

SEQ ID NO: 75276 - DNA, 369 bp, Glycine max
tcaaccaagaggggatggtccattccatgttcttgaaaggataaatgataatgcgtacaagattgaattgtgcggtgagtataacgtgagtactacattcaatgtgtccgacttaactctttttgatgtagatcgagaagccgatttgaggacaaatccttttgaagagggagagagtgatgacgacacggcatggaataaaggcacggaacctttataaggacttggaagacctatggcaagggtttgaacaaaagacgccaaggaagctcttcaacaagtgataaccatgccatttgaatgtaagcccgaattaccaatggaaaagcttcaaattgttgattgcaccatgttgcaagaataataaat

SEQ ID NO: 75277 - DNA, 385 bp, Glycine max
tggaattatagaagttagtagggcgatttttttcattcatactataaataatataataaatgacacatattcaccataaataaataaatgcatatactaataatatataaagataagttggaaatcaggaaccgtcgaaaagctcggaattatagaagttagcaggtcgtcatcaatttattcatactataaatagcgtaacaaaataacacaacacccactcataaatgagcatacaatgaaattattataataataattatttttaaaaagtcatacaaaaaataattaatttttttattattaatcagtaatataataacctttacactgaataatagtatcgggtctactctccaacaccaaaaaaatatcatacatctat

SEQ ID NO: 75278 - DNA, 383 bp, Glycine max
tggagaaatacaagttctggtcatatgagctattttgctagtttagtgttaggagtgtaaaggctttgtgggatcctctcacccgcagaccctttcttttgttcaaagggatgtgaacaaagtagctaatagtttggcttctttagcttccctttttgaggatagagtttggattgaggaagtttcccctcaaattctttcccttgtaaatgatgacttaggacctctagccattttcagttaattaatatcgtttacttcaagaagaaaatgaattgacaatatccatcctttgatgattgaaggagatacaagaaggaaaaattattattataagtagattttatattattttccttttctttattgaagtgaaagaaaag

SEQ ID NO: 75279 - DNA, 432 bp, Glycine max
  unsure (1)..(432): unsure at all n locations
gaaatgcttaccacctcaaaagactggaaagccagttataatgacttctctgccgcttccacataaggcatagaggatgggcagctcaccaagatgtcttcctcacctgatacgaagaccagatgcccttccactacgaatgtcaacttttggtggagtgtcgagggaacaacttctactgagtggatccacgaatatccattatttggaaggaacttgacaggtgtgagggcctatctgtactgngagatcgatctctcccctaacctctcggcgggtgccctcgaaggcacgaaccaccattgaactcagctttaagtgggaagcattgaatggtaatttctccanagtgctcctaggcatcacgtttaaactggaaccattatcgatgagcactttggctacgatatgggtcatacactcgactgatat

SEQ ID NO: 75280 - DNA, 377 bp, Glycine max
taggctgagttctacttaccacccacagactaacgattagaccaagcgcactatcaaatccttagaggacctcttgagagcctgtgtcttagagcagcggggtagttgggatggtttcttacccttgatagagtttacatataacaatagtttttactccagtataggtatggcaccttacgaggcgttgtatggtagaagatgtaggacacctctatgttgggtagatctaggtgagagcattgccttaggacctgaggtggttcagcagaacactgaaaaggtcaagttgatccaatagaggatgagagtagcccaaagtaggtagaagagctaccatgtaggaatagaaaggaccttgaatttgttgcaggtga

SEQ ID NO: 75281 - DNA, 394 bp, Glycine max
  unsure (1)..(394): unsure at all n locations
agctntaaaatttanataaaaagttagaaacagcttgtaatcgattaccatatatgtgtaatcgattacacnagggcaaatttgaattcaacatttaatagctgttgtaaatccggtttggccactggtaatcgattacatcctatggtaatcgattaccagagagtaacattgttgaagaagaacttttaacttaaaattcttggccaaaccttttgctacttcaattggaattcccttcctatataatataccctttctaagactctatagactgtctcgatcatcaataaatctttgagaagcatatgattcatgtaaattctttggcatcatcaaaacattcagcttgatcctttgtctacagaaagagatgagtgaatgatatgaacaa

SEQ ID NO: 75282 - DNA, 393 bp, Glycine max
tcatcgtgcactctaacaactgctccgtgtctaaagcatctacaaagaaacgaaaatgtaatcaatcatcctgaactgaactgaactaaactgaactcaaccacacacacacagtgagtttaattgaaaattaccagggtggtcgaaattgtactcgtgaacgcgttccaactcttcaggattcaacccgcgataaaacgagtcctataaaataaaaattcaaacaaaaagtactataaattaattgattggtttaaattgaaagaaagaaaaaaaaaaaggatacctgattgacgagaacaacgcggtgatcgtgaagttgctgaattatcatgtcgcagacggtggtttttcccgaggcagtacctcccgaaacacctacatacacgtgtg

SEQ ID NO: 75283 - DNA, 301 bp, Glycine max
gacctaagtactgcggctgcacttcattaatacagcgttgaatttttgaccatcgacatcagaaaacgaattgtcgtttaagtttctcagagcatccttttcgatttgagcgtctcgatatattacgagaatcaattcgacattcgagtaaaaagatacttggcgttgattttgctcacaccttccaatctgaatcttgctcgactgaatactatcggacacgatcggcgtcgaagacaaatttattatcatttgaatttgctcaagcttctgttctcaatggcgagcataccatatactt

SEQ ID NO: 75284 - DNA, 362 bp, Glycine max
atgagaaaattctaacgacaataactttttactctgatgtccgaatgagtcccgtaatatatcgtgacgctcgtaattgaaaacggaagctaacagaaaattcaaaacgaaaataactttttactaggatgtccgattgtgtcccgtagtatgtcgagaagctcgaagttgataacaaaagctctgagcaaattcaaacgacaataactttttacttggatgtccgattgtgtcccgtgtatgttccaacccccaaggttaaaacctgacctttggaccaaatcgaaattccattaattttgacctggatgcaccaatgaatcctgtaggtattcaaccccctttaatataaaacggaagct

SEQ ID NO: 75285 - DNA, 503 bp, Glycine max
  unsure (1)..(503): unsure at all n locations
gcttaaattgaatanaacgttcagaaactgcttggtatcgattaccatatatgtgtaatcgattacacagtgcannattttaattcaaattttaatagctgttgtaaatcaagtttggccactggtaattgattacatcctctggtaatcgattaccagagagtaaatttcttgtaaaagactttttaacttaaatttcttgaccaaccttttgtacttcaatggaattcccttctattaatataccttctaagactctaaagactgtcttgatcatccatcttgaatatctttaatntctttgtcttgaataaaagctctgagaacgcatgtgatccctttggcatcatcaaaacatcagcttgatcctttgtctacaacaacgaccatgatggtttatcaaagccttaatgattgatcactgtcgcaacgtgcccttttgggcnggcgatgcgtgactcgcggatgcgtgtccacgaaggatacgcacgagcgcaccacgt

SEQ ID NO: 75286 - DNA, 384 bp, Glycine max
tcttaagcaagcatccatcaagtggtatcacatctcatgagcttcatgtacgtgctctttaaacctccgttaattgtcagctataccttctcctccattgatgtttctgcattttttttctccatctatttcctcacatgtctagcgttgaatgttgttaacatgattctttagaatttgcaccgattaaacttgctatagaagctagatttgattttctatgggtcaaattacttgttcttgttctggaaccatgaattgtgatgagtttgggttcctttgagttttgtcttgctctttttgaggctaaaacctaaaccataaaattcttacgaagaaattaaagttgaagaaaacctcgcacatctacaagtacatgctcac

SEQ ID NO: 75287 - DNA, 438 bp, Glycine max
  unsure (1)..(438): unsure at all n locations
agcttccattggtgtcttgaaatctaaggctgatgaatgacatctattaatcaaatatgctattatgtttgcagcttctcccccaaaggtctttggcagtcctgcacttataagcatgcacctcactctttccaaaatggtcctattcattctttctgccaaccattctgctgtggagtgtgagggactggtttatgcctttngatgcccatnttcctgcanaactcattgaactgctctgaaacanacttcaggctatggtcagttcttaaaactcttaattntgtaccaagttgatttccaacaagagtatgccattctctgaattntcgaacagcttctgacgttattttcaaaacatacaaccatactcttcttgagaaatcatctatgatggtgagaaagtatgagcttccaccatgagttttcactctagat

SEQ ID NO: 75288 - DNA, 382 bp, Glycine max
ttagctgaaagacccaaagtagaaaatgttgaaatgatcatttgttgaaccatttcaggggttaaagttgacacagaagcaggcggatcctaatccccaaaatcagaagtagtagaaaagccaatagtggcagtgaaggttattgcatttctccgtggttgtctgattttacattcttttattatgtgacctttttccagtaattgttgaactttttaggatagtgggaagcaaaatgtccatggcctatgcaacaaaaacattggatagtactcatgtctcgtccttaaggtctgccttgtactgcatacaccataaaaagggagatagatttcattgttccatgtttgtttgagtgaggagacattgttcttcatgaaat

SEQ ID NO: 75289 - DNA, 484 bp, Glycine max
  unsure (1)..(484): unsure at all n locations
gcatgcagcttctncaataatgtgttccatcaaattatcagcttaagaatcttccggtcggactctcaaacttttcggaatgactctgattgtaacagacacctgacaaccatctccaacaatcgaggcatgcaaaccgatacctctaaacatncgngtgcgatgcctatccttctccatgggggaagatggcaaattggaacttcgtggccactctacagccagtgaaacatcatcaatatccaagctaaatgtgagagtgggacctgaaacatgtggtacagggtttgtgccatataaaagatgcatatctgttgtgacagctgattatagagaagagcaatgcaatccatcttccttgaagcttacccactggattattctcaaaagggttccctttagatgatgagctgtatggttgtatagctgtggatgtgagtggataaataaggactgaaatttgacattctgtgattcactgaca

SEQ ID NO: 75290 - DNA, 421 bp, Glycine max
  unsure (1)..(421): unsure at all n locations
ctctgattctgattgggctacatgttcatttattctcaagttagtcactagctattgtggtgttcttggtaattccttaatctcttggaaggctaagaagcaatcaacagtttccaggagctctactaaagctaagtatagagctcttgcttctcttgcctgtgaattacaatggataaagtatctttgtgatgatcttcatctctccactctagttnctttttgcactttntcttataatgaatctgcaattcagctcgcaaagaattcctcttttcatgagagaacaaagcacattgaagtggattggcatttaattcgaatcaagattcatgaaggcctcattctcttgtctcatgtccttctagtgtcaacctgtgatatgttactaaggcttgatcatactcctttcaaaaaatgt

SEQ ID NO: 75291 - DNA, 373 bp, Glycine max
tcgcacttgataatggagacacatgaacagctctaggcaatgacattcatggtgctccgaacaaaggtggagtatggaggattgccttgagggtccgcacttaggcaatcatgaaactcagctccaaactcaaaagtggaggacacatgaacagccctaagcaaattcatgtggctccggaacagaacgagaatggaggattgccttgagggtcctctcttaggcaatcatggaacacagctccaaactcgaaagtggaggacacatgaacagccctaagcaataacattcatgtggctccggaacaggatgagaatggaggattgccttgagggtcctctcttatgcaatcatggaacacagctccaaactc

SEQ ID NO: 75292 - DNA, 388 bp, Glycine max
tgcacaagtaactaaatttgtttttggtaaaaaatgaagtaaatatgataagggaccacttaggatcatcttgaaaacaagtataaaaagaaaggaacttgacactaaccacgacctgcagatagaaccaaagttattcaaagaaacttgaccctaaccgcgacctgtcagtagaaccaatgttatcaaacgagcatgaccctaactacgacttgccggtaaaaccaacactatcagtttttaacccaagaacaagggaaaaactttcaccattaaaaaacctttaaaattttattattattcaaaatctacttaccaaagggtttaaaggagtctatttataactcctactaataaccctaaattaggcccaaggaccaataactaa

SEQ ID NO: 75293 - DNA, 402 bp, Glycine max
  unsure (1)..(402): unsure at all n locations
agcttaagacaatgatggcgtagaattggatggtcataangngtgttgaaatttgtgacgttgaaggaaacttgtttgcattcatagtttgattggaagcttattgtcatgagtgatttgcaaaatgatgctacgccaatggaggttgatctttccttatgccaattatgggtgtgggtttattatctccttataaaatatcacacacaaatgatgctngaaaccattggtaaatgaattagtgggtggtttggatgggatccatcgagggagaatatgctgggaagatcaacgagggttatggtggttgtgaatatctataagccactcagaaggggatgatgataaagattgaagggaaagaggtgaggtgatgcaatcccatcctcaatgaaattagat

SEQ ID NO: 75294 - DNA, 379 bp, Glycine max
tgtccttctctgccgtagtgcgctccaccttgctagccaagtcttttttctctttcttcaagaccttgtagcgctcaaacacctcatttccatccaatctggtgcgtagcaacttggcaagaacactaccaatcttgggaggcaattggtggttcaacttcacagcttcaacaaaggcgacagtggcattagctatcttagggtgctccactctctagactgtgcgagcagtagccctccatttggtaaccttagcctcaaaggatgccaccttgtttagcgcctcttggtgcctttgtccattcttgtccaggatcgccaaacttcattggtcgaataagattttcatcaaaggccaacacaaagccaaccagggtct

SEQ ID NO: 75295 - DNA, 359 bp, Glycine max
ttcgagaaattcaaatggtcataagttttcacacggaggtctgattcaagcgcataagatatcgagacgctcgaaattgaacaacggaagctctcgagaaattcaaatggtcataacatttcactcggaggtccgattcatgcgtataatatatcgagacactcaaaattgaacaacggaagctctcgagaaattcaaagggtcataacttcttacacggaggtcagattcatgcgcataatatatcaagacactcgaaattgaacaacggatgatctcgagaaattcaaatggtcataactttttacacggaggttttgttcatgcacattatatatcgagacgctcgatagtgaaca

SEQ ID NO: 75296 - DNA, 483 bp, Glycine max
  unsure (1)..(483): unsure at all n locations
agcttgaatccacttacccgcactaagagcgagggtggcgctaagcacaacattgcgaattcagagcctatttaaagcctgtcttgtgcataattagggtacaaactttaaacagatgattggcacagattctagagcacactatatggcctacttcaagaaaagagctctggaggcagcaagaggagcaacttttacagagatacctanggtttgtaagcttattattgttagggtttcttctgtaatggttggctaaacaccgtagttagggatttttaatgaacagctgatgtaaatacctaatatctannatgatatgttttctgtgttcaatgcttccttcaatgcttaatgtttgtatgcctttggtctgatcatccatttgtgtgcatagctaggtgactntaacattgggaaatgtactgtngccttagaactttgatgaagtaggatcgaaacttagtcttacaagaaggatct

SEQ ID NO: 75297 - DNA, 380 bp, Glycine max
ttgagggtgcgcagcccaccatcttttcatagtagagtaccgataatgtgtctaccatcacgattatcatctccctttccattattgggggtaccacctgggccgccagatccctccaccttttgggcgtgttctttgaatgatccgtccctctttttgcacatgttctgtagttgcatcctatccggaaccatatcaaaattgtactgatactgcctaacaaaggcaaccattaggtccttccaagaatggactcgggaaggttccaagttagtgtaccaggtaacagctaccccagtaagactttcttggaaggaatgtatcagcaattcctcatcttttgcatattcccccatcttctgacaatacatctttagatg

SEQ ID NO: 75298 - DNA, 378 bp, Glycine max
tggttttgggcaatagcaccccacctgacgtccccaaggtctccagacccccgcgacatatctccaggtaccactctgtggtcaacaataaaagcaggaagtttcacccttcaacacttcctcatctcaagcttgtaggattatggggtacccatcacatgtggtactaggtggcggtcgggcgatggtgcacaacaagttttccacatccacaatgcgcgcataaacccaccatcccctgttgcccacctccaactgagctcacgtactcccacgtagcccatatcctcgtttctctcaacaccgggtccccatcaatcctcccaagctttcacaacatccaagcaaaacaacattcaaacagcacaagctatcaca

SEQ ID NO: 75299 - DNA, 361 bp, Glycine max
taagcgcaagctgcataaagccctggttaggttgaataaatatgctgactccaagcgagacgacgttacgttcgtcgtgggccaatgggtgtatgttaagttacggccatgtcggcagacttcgatcactggttccatccacccaaagctctctaaacggatctttggcccattccagattctctatcgcgtctaagctgtggcctatctatttcttcttatcacctaggtcgcaaatacacccagtatttcattgctctctcctccgcccccatcacggtccaccacccgccaccacttacgaatggtccttacaggtgcacgattaccagtccctttcacggccactatgcttacttgc

SEQ ID NO: 75300 - DNA, 400 bp, Glycine max
  unsure (1)..(400): unsure at all n locations
caacatcaaaaagccaaagacctcggagataacacagatatgacaaaggagtagaaaaatatataaatatcagagtataaaacacaagaagcctaactcactaagaagaaataatcaaaccagaatccaaataacttgaaatgtcaacaatcacanaacattcaagactgaacattaaaaaccacaagataaataagcaaagtacttagcataataatgtaaattctaagaaactaaaagccaaaatacacggattataaaagataaataatcagaaactaaaatctaagaagacggaggtggtggtggaagatcgaaactctgacgaatgtatncgacatcctcttcaagctgtgtaagacgaatgtccataccggcatagcgtgaatctaacgagtcg

SEQ ID NO: 75301 - DNA, 388 bp, Glycine max
tatataaaaacactttaaagacaattttcttttaaaaaaaatataaaatgagtttttttataaactaaaattaattatgcataagttaatttatagaaactctcatataatttctcagtaaactgagagagtttgtgtataagttaatttgaatttataaaaataatatttttttttcttcttattttgtatttttagaattacttttagataagctagcttgctcaaaaatgtacttagtacatggttaccaacactgagaaaggggatgcctttggtaattgtgaattgtgccttaactttctaatcccaactatttgatctcgtgatttacaatgactaatttgattcgtcacaaattgactatcaagaaaagtatctagggaag

SEQ ID NO: 75302 - DNA, 387 bp, Glycine max
  unsure (1)..(387): unsure at all n locations
ttaagtcacctgcggcatgcaagcttgccccanagaggtccaggaatgaataagcgctctacgtaaccagttccgctcccgagtatgacagccaccgctttatgagcgctgaacaccagcagcgcttcgaggccatcaaggtgtggtcatttctccgggagcgacgcgtccagctcagggacgatgagtatgccgatttccaggaggagatagttcgtcggcggtgggcatcaactggtacccccatggccaagttcgacccaaacatagtcctcgaattttatgccagtgcttggcctacggaggagagcgtgcgagatatgagatcctgcgtgaggggtcagtggatcccgttcgatgcggatgctatcagccaagtcctatgat

SEQ ID NO: 75303 - DNA, 455 bp, Glycine max
  unsure (1)..(455): unsure at all n locations
ggatccttaagcaccgcggctgcagctttagctcttggttaagntgtcagttagactgttataactgacatctctccttgaagagcttctactttatattatgggttgtaatagtctaacagaagctcatcagttttgtacattttcaataaagtttcagttcagaattctctcttaaattacttcaataagcatttattcaattggcccatatcacgtgaacacttacgccataattttgaccatgaaacttctcggaaacagctgagaagagcttattttgataagttacgcaaagaagctaaaaatggaagcttatgagagtcacaggctatatttataagttcaaataggctcttctaatgctttcttaatataaaaccatttatgtgtcttcaccttatagctcaagctgtctgggggtgagttcatgagatgatatcagagcctctatg

SEQ ID NO: 75304 - DNA, 380 bp, Glycine max
ttcaatctataatcaactattattttcattttccctaccaatactttttagttttttataatttacaatttattaactaataaattaatgagataaaaactgatgctacatgaaacaaataaagttatatgacaaaatactaggatagaaagaaaagaaagaattaaaaaccgtgtgaatgaagcaaagcatatcttatttcccataaatacagcatatctaaaaggattcttaaacaaagattctcatttcttatgcaagcatacacatccttaaactaagatctatagtctattgtcgtgacaagtgaaataattacgtatgtgaaactactaaagcttgcaatcacacacgctatcataacagagcacccaccagat

SEQ ID NO: 75305 - DNA, 439 bp, Glycine max
  unsure (1)..(439): unsure at all n locations
gacatttcggcgatcaaatgaanaattatatcaagataacaatggattcttttaggactaattgagatgattgcagatctcgatgtgataatgcaagatcatgttagacatattcaaaatcgcgaaattcattatcattatcttgagtataaaattcaaaatgagttgatctctcttttggatcacagtggtagaagttccatcgtaaaaaatattaaagaaggaaaacattcttctttaattcttgattgcacccccgatgtttgtcatccagaacaaatgactctaataatacgatgtgtaatatgcanataatataataaaattgaagatacttttagattnttaaaggaacgaccatcagataagacttttatgatacaagagtttaagctcttgacttatgtgacatgtagacgcacgatatatatggtctata

SEQ ID NO: 75306 - DNA, 381 bp, Glycine max
tgtcggaaccatggaccgggtcatggcatgccacatcaacggcacccttgttcctctcctcaaagaagccggtgctctctggctctgaaaagtagacccacccaactaacgctatctaagtataaataaacaaaaaaaatatatatgagagaggaaaaaaaaaggtttgattaaacagagtgtattattattattattatcacaggaaagggatgaagcggtcctttcgtgagtctcttcttctttcattccatgttggatacactactactactactacttgcagcagcagcagcagcagcttcttactgacttgttaatcaatcttctttgtttaattgctttctttcgagttgcatgctctttatataattattatgc

SEQ ID NO: 75307 - DNA, 381 bp, Glycine max
tctcaggaagatttctcaagaaattttctcaaggaagctacctagtctataaatagaagcatgtgtaacacttgttataactttaatgaacgagagtcttgtgagacacaactcaaagttcaacttctctccctttttcttccttcaatttcgtgctcccccctctctctttctctccctctttcttttccaccattgaagcatcctctccaagcttcttatccaaggctcatcttggtggtgaagctccttcttccatggcttattcccttgtggatggctcctcctctctcctcttctactttgtcttccgctgcatctccatggtggaaaatcaccattcaaagacctcattgaagctcacagatccagcctccatag

SEQ ID NO: 75308 - DNA, 449 bp, Glycine max
  unsure (1)..(449): unsure at all n locations
cgacaataactttttactcncatgtctcgatgagccccgtgagatgtggagactttcgagattgaatgctgaagctctgagccaattcatacgacgataactttttactcggatgtctgactgagtcccggattatatgcagacgctcaaaattgaatgtggaacctctgagccattcagacgacaataacgttctactcggacggccgagtgagtcccgtaatatatcgagactcttccaattgaatgtcgaacctccgagccatctcacacgacaataactttttactcggatgtctgatcgagtcccgctttatatcgagacgctcgaacttgaatgttgatcctctgaggcaattatacgacaatgactatatgctcggatggttgatcgagtcccggatatatcgagaacctcgaaattgatgttgaatcttgagcaattaaat

SEQ ID NO: 75309 - DNA, 383 bp, Glycine max
tcaacattcaatttcgagcgtctcgatatatgacgggactcaatcagacatacgagtaaaaagttattgtcgtttgaattggctcagagcttcaacattcaatttcgacggtgtcgatatattacgggactcaatcagacatccgagtaaaaagttattgtcgtttgaattagctgagagcttcaacattcaattccgagcgtctcgatatattgcgggacccgatcagacatccgagtaaaaagttattgtcgtttgaattggctcggagcttcaacattcaatttcgagcgtctcgatatatgacgggactcaatcagacatacgagtaaaaagttattgtcgtttgaattggctcagagcttcaacattcaatctcgagg

SEQ ID NO: 75310 - DNA, 380 bp, Glycine max
  unsure (1)..(380): unsure at all n locations
aagcttganaatggtgttttcaccttctcgctttccaatctgctggcttanggagccgtcgctgagcgcaacattcatgggctaaacgccaggaagactctggaagaagatgagttgtacaggttcgctaagcgcaccacttcatctcactaagcgcaccgcttcaattcatccgctaaatgagaaaggcactggctaagccaaaattcactaatgtgcgctaagccggccataattgcgctaagcgcatgagcacgaacaaggccatctatttaagcctgaaattagaatttagaggaagaagttggactgcngatcagagctttgcatgtctagagtttctagagagagaaaggccaagttctagaaaggttgagaga

SEQ ID NO: 75311 - DNA, 384 bp, Glycine max
tttcgattcattctatgtacccgtagtggtccacattgtgtttcgtgcatttttgtttactttttatatcccctgttgacgtgcttaagccattttacttaagtcatttctcgctcaacttaaaaataaaataaatttccaccgaacgtttgaattgtattatccgttaacttcggttaaaatgaattccgatcgttcggtcgtgccgtaaccacgttggaaatcaaaaagaggtaaaaaaaaaaataaatataataatcaaaaaatatttttttagtaaagtaaagcgaaaaatcaatcggacgttttctctttgggatttctcattcttaatcgaattgattaataactaaagtgaaactaaggctaaaatcaactcgccta

SEQ ID NO: 75312 - DNA, 428 bp, Glycine max
  unsure (1)..(428): unsure at all n locations
gcttctccgagatccctcttgtacatcttaattaanaccaaaacttaatccgcagatccctctcgtaagactatagttcgatcctgcttcaatcaagttctaaggcaacaatacatttcccaatgctaaagtcacctaactatgcacacaaattgatgatcagaccaaaagcatacaaacattaagcattgaacatagaaaacataatcaattagatattaagtatttacatcatttgttcattagaaatcctcgactaggtgtttggcttccgacaagtgcacaggatcgcacaagtagtataaaaccgtaagaaccgagtatcgaactctcggtgaacttgtgttatttggtaagctatntcagaaaatagatgtctggtgtgtaaagataagtgtgaatatgaataggtgtataaactatctgtg

SEQ ID NO: 75313 - DNA, 387 bp, Glycine max
tccttgagaagctagagcttagctacacacacccatctaaaaactaagctcacctccttgacaaaatacatgaaaatacaaaaaaagttcctactacaaagactactcaaaatgccctgaaatacaaggctaaaaccctatactaatagaatggccaaaatacaaggcccaaaagaaggaaaaacctattctaatatttacaaagaagagtggatccaaccttgacccatgggctctaaaatctaccctaaggttcatgagaaccctagggccttctttagtagctctagcccgagcctcttggagttttctatccaatacccttgaggggtaggattgcatcactaaccattgggattttgataataacaacttctggtgtcttgg

SEQ ID NO: 75314 - DNA, 461 bp, Glycine max
  unsure (1)..(461): unsure at all n locations
tcacctgcggcatgcaagcttaagctccttcaactgcacaaggctcttaatattntaagagtatccttgtggaaccttcagccgacgaagacactgacaaaaactcatcttcttcttcttggacgaagtatagcacgctgggggcaagtaaatgttctttccatcagaccttggatgcaactgtgatcgtatacctatatcagctagatcttgatgggtatacaagccatccttcgtcttgacttgaatgttaaggagcgtccctatcacactgttacaaacatttatctccacatgcataacatctagactatgtctaacatctagatcacacatgcacggaagatcaaagaaaacggaccgtctcttcatatcaattctgatattatcctattttggtcttcccatacagattcgaggttgaattgtgatttcttgctacagacacggattggcaatat

SEQ ID NO: 75315 - DNA, 386 bp, Glycine max
tcttaaaataaaatatatgagataatgtttatttttataaagataaagagatatgcaattattttaaatctttaattttttttctctgaaaaaaaactcaaattcatatctctttaacattgaatagaagcatatacatgaggcaaagtgcagacaaaaactagaaaagttcaagtctaattttagacctaaaaagtagaaagagaatttgtttggcagagttccactcatcaaagggttgatagtcagctattggtctcaatgtgggtacacataaagtcttcacactatcgaagaaaaaaatttagtttcaagaacacacatccaggtacaaaaatctatttatcattgttgtatattttgaatgaaaaaatagatcctaagtt

SEQ ID NO: 75316 - DNA, 295 bp, Glycine max
  unsure (1)..(295): unsure at all n locations
agcttgcattcaaagaacaagaggttctggactggcctacactcgccgagggcctgagattgggcttgggagaagaagtttgggtattcgctgacttttgttgagaattgaatatcgtaagcttccacgccggggttggaagactcgaatttcgagatggcgtattctttctcgtcgaagaagaccgtgcggccgccgcggtggttgatggcggcccacaggagggactcgtgggtgaggcctaaaaataaaaggttggggcgcggngggaggcngacgacggtggaggatactg

SEQ ID NO: 75317 - DNA, 383 bp, Glycine max
tcatggcatgcctcagagcttagtcttcgatagagaccctttgtttattagcaagttttggcaagaactgtttaagctatctggcacgaagttacgcttaagcttggcttgtcatcctcaatccgatggtcaaaccgaggttatgaaccgcataattgagcaatttctacgtgccttcgttcatcatcgcccatcgtcgtggggtaagttcttaccttgagtcgagtggtcgtataatacttctagaaatactagcacagacacctccccttttgaggtcacatacaacaagaaaccaccgacaatccttcagtatatcataggctcttcttaagtggaggcagtggatacattactcaccacacgggaggtagtttttgata

SEQ ID NO: 75318 - DNA, 476 bp, Glycine max
gcggcgtgctagctttcattggtgtcttgaaatctaacgcttatgaatgacatctattaatcacaaatgctatgagtgttgcagattctcccccacacgactttggcagtcctgcacttagaagcatgcacctcactctttccacaatggtcctattcattctctctgccaaaccattctgctgtggagtgtgagggactgttttatgccttatgatgcccattgtcctgcaaaactcatctgactgctctgaaacaaacttcatgctattgtcagttcttaaaacttttaactttgtaccaagtcgatgtccaacaagaagatgccattctctgaatttttgagaagcttctgacttattcttcaaaacatactaccatactcttcttgagacatcatctatgatggcgagatagtatgaagcttcaccatgaagtttcactctagatggtcccataaatctgaatgcccatact

SEQ ID NO: 75319 - DNA, 383 bp, Glycine max
ttagctgaaagacccaaagtagaaaatgttgatatgatcatttgttgaaccatttcaggggttaaagttgacacagaagcaggcggatcctaatccccaaaatcagaagtagtagaaaagccaatagtggcagtgaaggttattgcatttctccgtggttgtctgattttacattcttttattatgtgacctttttccagtaattgttgaactttttaggatagtgggaagcaaaatgtccatggcctatgcaacaaaaacattggatagtactcatgtctcgtccttaaggtctgccttgtactgcatacaccataaaaagggagatagatttcattgttccatgtttggttgagtgaggagacattgctcttcatgaaata

SEQ ID NO: 75320 - DNA, 394 bp, Glycine max
  unsure (1)..(394): unsure at all n locations
cgttagcagttactaatatgaattctgtaattaaaaaaacagntaatatggagagaaaaaacccaaacccccttatagcgaaaaaaaagtgtatgccagtagagatttcttacgtaatatacctttttcatttttattttccttctatctccctttcccattatatacaaaagtaatccctcttactgttcatgtctgaattcgatntctgaggaccctaattcttagctgtgatttatattcttagtttcaanaatcagtggaaatggcggccgtgagggacccgattctcaacatgggatttttatttttttcctggtgtatatttattttaatttatagaatttaaaaaatgcataattagatattagtgtaanataataagtcaatacat

SEQ ID NO: 75321 - DNA, 306 bp, Glycine max
  unsure (1)..(306): unsure at all n locations
ttaaataggaataaattaaattaaattacctggttgaaaccttctgccatttaaattaaaactcatgccctaatgtccattctaatcgagcattggtgtcctgactcctttatcacaagggtccttaaagaaatgcacctaatcatctgctttcactaacacaaggttcgagatcatcacatgatccatacacaaacagcacacggagagtgacttatcacatttctcacanatatagagaaacaggacgacatatagatatacatgtcatataaaaataccacttacttaaacacactcacatca

SEQ ID NO: 75322 - DNA, 409 bp, Glycine max
  unsure (1)..(409): unsure at all n locations
tctggcatgtatgagaagatctatactgagctggaaatgtttgtctattactttgttaaaacataagcacttagacaatgaagganagctggagttgctgcacatgatgtccaacgttatgtcaaggaataagatcgggctgcacaatgtacaaggcaagataaaatggcaaatgaagaattgaagttgcaggatccacgatgtcggatacaatgtcctgacatcctgcccgagaatactggagttgctgtacaatgcaagataaaagtcaagtgcagaagtgaagctgcaggatccacgatgtcggacacgatgtcctgacatccggcccgataatactggacatataaatctgttatatctttaacagaatattgtgcagntagcaagagattagaagatctatctt

SEQ ID NO: 75323 - DNA, 454 bp, Glycine max
  unsure (1)..(454): unsure at all n locations
agcttcagaccaaagcaacacaaaatctagggatccttaacccctcaatttaatggattttcaaggtttgagaagtgaaattgggaatgaaagtaaattggagcaaactctcacctcacacaagtctataacatcaatttaaacttgctcaaactggatttacacctaaaattccaccgaatcaaaatttgactcctcaacacccaattttaccctagaaatggccctttgttcactttggtcatttgtttttctctcttgcacagcccaagcttcctcatgagtcctaaatgacatttcaaactaggattaactcactntaacctccaaataccactaaatccagaattggccttccaactctcaaaaactcactctttntccactcataacaccatattctcactttctaaccctagggtaactctacccttcatcccctaacagtttccat

SEQ ID NO: 75324 - DNA, 473 bp, Glycine max
  unsure (1)..(473): unsure at all n locations
tcttattattgatgtgtngaatcactattntttatctcattaatggtgtttaattcaatgttcatgtttggtaatgaaagaattgagttggagttgaatcacggctcattagagggacggtatagaataaatcttgattntgcagccttgtggcgcttaagcgtgcactggatagcacttaagtgcaacagaggaccattgctatcaagagactggcgcttaagtgcaatctggcaaagtgaaaatggtgttcatgctaagagcgggcacatgggcccttaagcatgagtttcaaggacttntcctttgatgaattccaattaaactgcaatattatatgcttcttgaagtgtatgtgaaccttaaatgaaatggattaagtngattnnttgtattccccatgcaattcatattcatatgttgacattnnggtgttgatcatgagaacctgtgttgaaagtctcgtgatgtgt

SEQ ID NO: 75325 - DNA, 437 bp, Glycine max
  unsure (1)..(437): unsure at all n locations
taagcaccgcagctgcagtaaacatttctatggagatgagggatcatctctatttttcactccaagaatttacctttggtggtgtctccataaaacacatgttctctattntttggagaaatatgaataaactttgatgccatttctgtgatgggttggagccaccgctatcaatggacccactttggctcaaggagtccctcattcatataaatcatatttgatttttgtacccaaattttcttgggtccttgaatgttaagtttgactaaggatccttttggaacccataccacttttctaatgctactaccattctttctaatataacatggtgatgcactatgaccttccttaccacagtaaaagcatgttaagaaaggagaactaatcttttgagtggaagcaaagaatttttatacattctttggtgattt

SEQ ID NO: 75326 - DNA, 442 bp, Glycine max
  unsure (1)..(442): unsure at all n locations
tgaattcttatgcagacttctntntagtatttctaccgcataacatggcagatatgctgtcactataatttcaaacctttaaatttgtatttatactgtataacttttatgaaacaggccactaacaatgtcttttgccgtacattatccaattcattccaacactaggacattcattcaaatatgatttatgtgttcttataaaaaaatgatttatttgatctgtaaggacantttgaagcactaagccactaactacttttttttacttcaaaattactattactcgtttaatagtccgtgctattttcatgaggtccctaatgtcagtggtattctaataaaatgaanaanaaaatctctttatcttcttatgaatngtcaatgaaacccatataatgttcgaagggatatangttgcaatataatgtgaaatatgtat

SEQ ID NO: 75327 - DNA, 458 bp, Glycine max
  unsure (1)..(458): unsure at all n locations
acctctaagcacctgcggcatgcaagctntgttactgttgcatcaaactngnnnattgagcttgaaataactatgtttcctagacatttaattaccttttgttgattcctgtgcaaacatgtttacttgtgttggtagcctttccatttacttggataagactttgatatttaattggtaattntactaaggatgtccctctctacaagtgcttatattttgaaactatttctatgtgatgggtgtgctggaaatgggtttggtaatttatgcttaattattatttaaaaggagtaagtttgtaaattataactataaatttttataaaatacatttgtttgtaacttactaaatttttccttttaaagagtaagtgtatgctagtaagtgtgtataatactcgttaacttacactcaatttttcaaagaagtaagttaacaagttataattataaat

SEQ ID NO: 75328 - DNA, 469 bp, Glycine max
  unsure (1)..(469): unsure at all n locations
gctgctggggcttatggggctgatcttgagcttaatgatgttcttcaatggtgattntccaacatggagatgcagcggaaggcatagcagaagaggagagaggaggcaccatgcacaagggaataagccatggaagaaggagtttcgccaccaagatgagccttggataagaagcttggagatgatgcttcaatggaggaaaagaaagagggagagaaatagaaaggggggagcacganattgaatgaagaaaagagggagagaagtggaactttgagttgtgtctcacaagactntcattcatcaaagttacaacaagtgttgcacatgcttctatntatagactacgtagcttccttgagaagctttcttgagaaaacttccttgagaaagcttcttgagaaaacttccttgagaagctagagcttagatacacacacncctctcataactaagctcaccttcttga

SEQ ID NO: 75329 - DNA, 287 bp, Glycine max
  unsure (1)..(287): unsure at all n locations
cataagctaaatataaaatgtatctaacgcacgaaaaataaatgaacatcatgtcatgacttctcctgagctggtgtctgtttatccttgggtggtgcangcttcccatgaggtgaagaaggagcatcctgnggtgtctctagatttgtaacaggccaagaatcccacgtgctctacgctgcgatcatatcagctgcataatccacattagcaatgccatcctcctccccagagacttccaaaactggtgaagtgattggtgaggtctatggagtagcttctggagt

SEQ ID NO: 75330 - DNA, 188 bp, Glycine max
  unsure (1)..(188): unsure at all n locations
ttatctatataatgatggtttgngngttcactgtgctatcagaacttcattctaccatgcttttgccttgatcacgtagatgcatgtgggtntaggatcattcaataggggaaactgagctgattcttagaacttgatatgacacggctagtttggcataatttcacgagaaatcggggtatgataac

SEQ ID NO: 75331 - DNA, 402 bp, Glycine max
  unsure (1)..(402): unsure at all n locations
agcttgtaccagacgttcaaccattngttattctcattataaacattagntgngnatcagnggaatgtgtcgttgtttttcatatatggntaaaactgtcatgtgcttttacgttcaagttctagcttattgttcacgttgtgacacgtaaaggatccgtgccacactcaagattacttgttagctcaggttcaacttacatgccagttgttcattaggtgttatgtgcaagttctttcctggcattgatatntacaggacacattggtatctatctgctcatatttaagattgtattctctggccacttatcttgatctgcttctaatatataaatttacaggaatagcttaagggcacattacaatgaacgcattgattctggttgggggatntggaaca

SEQ ID NO: 75332 - DNA, 305 bp, Glycine max
  unsure (1)..(305): unsure at all n locations
gtttgctaagtcatctgcggntgaattaccttcttcgaaaatatgattgcatcagagntctgaccagtgatctctgaaagactgaaatttcatgagcctacgtacgagggctttgtcttaacanagaggaggacatcgtcaccaaaaatagacgagatgatgnagggttgccctactcgatngaatctagttagaaattaaataacaattggttaatataatttaaatggcacattntaatattaanaaataggatcaaaacatncattaatcatttnnaattgtagtggacaaacaactacaat

SEQ ID NO: 75333 - DNA, 448 bp, Glycine max
  unsure (1)..(448): unsure at all n locations
agctnttatccatggtttcttatgggggttatgcttgttattgactcatcttctccttgaaatgacatctctaaccacctttcctccttctccatttcactttcattaatcttcaagaagcaaaggactacattgatgaagaatatccaaggtctacaagctctatatggagctacattattctcacacaaattttacagaaaaaactaagagcttgttagtccttagtaggaaaaagagttattgaatactcaattcaaaagtaaaaaagatatttctgatatgtaatccattatacaacaattacctcatcgacatattttaatattttttttcctttgtattcttttgcttaagttgaacttgcatccaaaagacaatcatgtggcaaaaagtacataaggggctcttttntctttgtgattcgccccaactatcattatgcatc

SEQ ID NO: 75334 - DNA, 402 bp, Glycine max
  unsure (1)..(402): unsure at all n locations
cgtagtaccataaagaatgaagttcttgcattgatagtatatataatggtgattntagtgagtgttcaaactcccaagatcgtttgttcttattggtatagaattgatttttcaattgacttganttgtttaattgttaatttagaaatcaaagtaaatttcattatgtatttgacagagtgaaaattctgagcactccataaacttaccctgtaaagagtattagcgcatgtttggtttggcatccactattcatgttcatgtcaaatttagataaaaattaacgtaaaagcaactaatagttagttaggattgcaagtattgatgttataatccgttaaagtaggtgccaccagtaccaccatgtggcagtaaccaacttttgaagaggaaatgaaatca

SEQ ID NO: 75335 - DNA, 382 bp, Glycine max
  unsure (1)..(382): unsure at all n locations
agcttgcaagaaaaactcanagctnncaacaaactattaaacgcattttcgataaatgagaataccactaagatgaagagaattatttacaaaggatttgatggatgataaatccttctcaaagtaagagaaaaaaacaagtnaacaaaaaagaaactataagcattaacaaatgtgtaaagcagcccaatcccccaagatatccaatagggaaagaaaagaaaagctttctcgcaacagtccacacaatagtacaacatataagaaaaaggaaacaaaacaatttttatttgccaaagagccccgtaactggcaccccttcatgtgaaagtctataaaatgttaacaaagcataagcttaagaatgtgctgttgaaaactg

SEQ ID NO: 75336 - DNA, 405 bp, Glycine max
  unsure (1)..(405): unsure at all n locations
tatttatgttgcgttnggatcgatctctataaataataaagttcggactaattggaaataggcatgactcagatcacattgcatgtaattatcatgttgcttatccatattgacctatgtcattgagtgtattgtttcttctccgcatctcaagagttacgaagatcttattaagaaataaagagattataattgaggaagaaccatgaagccaccggttacctacgactgtagattccgctaagtttgttgatcaatcattatggattcaggtattcctaanattctttctcataatctaatgtaatatgttcttaatagttattgatattntataaggatctcctaanattccaacaatatattctcacctggttttgtgcaattctcacaacacaacatttt

SEQ ID NO: 75337 - DNA, 452 bp, Glycine max
  unsure (1)..(452): unsure at all n locations
agctttaattaagcaaagtcaaaattgttataccttataaatgaaatttcccaaatttgaatggaatcatgtgccctaacccacatcgcacttttcgtcgntntattcatcgtccttcttcgtcagcagctaaggcatcacatccatctattaatatcgaaagaccaaaagaaatcaagagaaaaattggggaagcgaaaaagagagaaaatgaaaggtanagtgagggagatggagtggttgggttacgtctagtggattgtgatgttggatcgattgtttgggttcgaagaaggaatggttcgtggtggccaagtcaaatacttggctttgatcacctttctacttctcatcttacttctccttgttcaggaactcccgttaagcttttcagaaaggaagattccaacaagtaattgtctttctcttcttttatacattattattctata

SEQ ID NO: 75338 - DNA, 481 bp, Glycine max
  unsure (1)..(481): unsure at all n locations
gtgttatgagcctacgtcttatagtttttgattaccaatgtttcttacataatcaaacaattgttaacatctccacctgngtttacactgtggtcatgttttcgtttatagaattcattcagaatatttgttggtgattatcgtctcctaatcaattgagtgttcattntgttattggctgctcatcttccaatcatgtcttgtcaaactacttaataatctgtcatgttgttacttttattatgaatagagagagacttcgctcttgttaatcacgttaaggtgtttcgagaggaaaatacttgagtaggcatgatccttgttacatatagatgaaagtcaacttagtaagtcatgtacctgtgttccttaaagatgtgcttagttaccacctaagtgcaagaatgagaatcttataagtgtaatacccatataaaattgtaaccgtagtttctatgagatgactggttaagagtcattt

SEQ ID NO: 75339 - DNA, 365 bp, Glycine max
  unsure (1)..(365): unsure at all n locations
agcttatccataaactacacttttgctattataatactactgnggctaataaaaggtacaatntaaaaataaaaaatgcttaaaaagtggagtttttgtccacaaacagtcaccagaggcaaagcaattgcaaagattcattaaatatgtacattaccttctatnggaggtatattgaccctctcctttagtaataaaaactcgaacacaacgtcccaaatatactttattattcaattcaagaacttgtgattatagtagaaaattgattttcaggttcaagtcatagctgtcaacagcggtcgtagcggccactatagcgactgagcagagcgacacccatccgtgacggacacgtgtgtaat

SEQ ID NO: 75340 - DNA, 240 bp, Glycine max
  unsure (1)..(240): unsure at all n locations
atgatgaatanggttggacctattattccacaaaagggactttgttagtgggatacattatcttatctggttaatttatgtgctgaaggactgtctgtgtccattaaagatgctgagagaagaggtgatttgcatggagtgaaaatttgtaatgaagctcatattattacccatctgctatctgtccaatgaataacaagttgtgagtagtttttcactctatntctctcctttggaatt

SEQ ID NO: 75341 - DNA, 435 bp, Glycine max
agcttcaacattcaacttcgagcgtcacgttatattttatgactcaattagacatccgagtaaaaagttattgtcgtttgaatttgctcaaagcttcaacattcaatttagagcgtctcgatatatgacgggactcaatcatacatccgagtaaaaagatattgtcgtcttaaattgctcagagcttctacattcaatttcgagcgtctcgatatatgacgggactcaatcaggcattcgtgtaaaaagttattgtcgttggaattcgctgagagcttctacattcaatttcgagcgtctcgatatgttacgggactccatcatacatccgagtaaaaagctattgtcggttgaagttgctcagagcttcaacattcaatttcgagcgtcttgatatatgacgggactcaatcaggcattcgagtaaaaagtatt

SEQ ID NO: 75342 - DNA, 252 bp, Glycine max
gttcgtgcactccctctacgctatacatcttacttctagatcgagtgatatacgggtgccttagcgcttttctaggattggtgagttccctacagaacctaacagtggtgaggatgccgaccgaacatgaatatgctaatgaatgatcaaagcacttggatccacctcaagggctttttacacaacgtgatgagtttcacaacttctctgtttgtaaagaggaacaaaagactttatctagcctagatcata

SEQ ID NO: 75343 - DNA, 355 bp, Glycine max
aagtcacctgcggctgcagcttacagcagatttagaatgaccactacctatattaaaatacctaatggcctaccctaggaataaatacctaatggctgagggaacctgaaaatgtggcaaccaaaagcaccccccacaagccacaggtcaacacctttggtctccaaaggtgagctagtgccatggccctatacactgactaactactaagccttagtgataccaaactatttgcaccacttacaagatggcatattaacaacaaccttaatgacaaggggcatatctctcatggcagaacacacactgattttctgactgctgatcaagatgacaactgtgaactctgttctgt

SEQ ID NO: 75344 - DNA, 262 bp, Glycine max
  unsure (1)..(262): unsure at all n locations
ccatagagctcccgcgaatttggtccggccatactctttcttgcgaagccctctggtctcttgttcaagggctctngcngtaattgcattctcttcccgtaacccggcacactccttccgaacgtgtgtagcagccaacttgaacttctccttggcgaagtttgcctttcctaactcgcttntgagagctnggacttcttcgtcctcttccggtgcttcanaattctcttcgctgacgacttntaacttggcgagccaatct

SEQ ID NO: 75345 - DNA, 417 bp, Glycine max
  unsure (1)..(417): unsure at all n locations
agcttattaccaatatgctctggtgcatgacctattgtataatgtatggcaganaaactctngagactnttaccatttccttgtaaaaggtcctcaattcgacacaaacatctatgttgcacctcctcatttgtgagttgtcctgtattgaaaattgaagtaagaaaaaaatatatataatgttaggcccttagtaaccttttacataaaatcgataatagcttcaagtttaaattttaatggttgagtttcatgtagctaaatatttttctgaaatatataccttgcgttggatattgtcatttgtgatggtaatgaatatcatctaccatccactgtcaaggtttttcccaaacatactctatcctactncatgtgttcatcaaaagttgtatacaaaaaagttttaaaggaaat

SEQ ID NO: 75346 - DNA, 405 bp, Glycine max
  unsure (1)..(405): unsure at all n locations
ttcgtgtatgctaagtttcgttgtgagtgttttgacctgaattgggagtgacatcggataacattttgtttccgattgtacaggctccactgacgtgcatgtgttgctgggttctcttcatcaaggtaacactaacttctatacttcatttgacctattttattttttctgggtagtaataagtaatgttgcatgatttttagtaaggtcttattctcgttgcactataacagagaatcaaccatgatttatgtagatggatccacagggttgttgaaattgcctgcaatggctttaacattttactgtccaacagagggggcttcactattagtgtnttaacatattatcttgttcttgagcaagtaatgcttaagtatagataatggttttacccaagtggat

SEQ ID NO: 75347 - DNA, 453 bp, Glycine max
  unsure (1)..(453): unsure at all n locations
agcttgcttgtggagcttctatggaggatggatctttgagcttcaatgaggtccttcaatggtgatttttcaccatggagatgcagcggaaggcaaaggagaagaggagaggggaggcaccatccactatggaataagccaaggaagaaggagcttcaccaccaagaattgccttggataagaagcttgaagaggatgctttaatggaggaaaagaaagagagaaggggggagcacgaaattgaaggaataaaatagggagagaagtggaactttgaagtgtatctcataagactttcattcatcaaagttacaacaagtgttacacatgcttctatttatagactaggtagcttccttgagaagctttcttaagaaaacttccttgagaagcttctttgagaaaacttccttgagaaactagangttagctacacacacccctctcataact

SEQ ID NO: 75348 - DNA, 370 bp, Glycine max
ttcatctggtcttgcactccctcttcgttattcatcttacttctagatcgagtggtataggggtgcctttgcgcctttttaattatggtgagttcccttaagaaacaaacagtggtgaatatgccaccaaaacatgaatatgcttatgaatgatcaaagcactttgatcaccttcaggccttttagacaacgtgatgagtttcagaacttctctttttatataaaggaacaatagcttttatctagccaagatcatacatagtgtacaacagaagctacggtttctattatatgggccattaaattatcatgtgttgacagtaactatatagcctgtgaaattctcttgggctgacacacttaacgatgg

SEQ ID NO: 75349 - DNA, 253 bp, Glycine max
  unsure (1)..(253): unsure at all n locations
agcttcattgcctaacaagccaacttacaacaacgtgtcctcatgtatactagcataaggatgcacaggtcanagttgagtatgtgaaaagattgtatgaccaagtgaaggtgcatattgcaaaaaaagaatgaaagttattcttagccagccaacaagaaaaggaatgaagtggttcttgaacctggtgatgatccttgtacatttgaggccaatgttttccaggaaggagggaatgatgatcttgaaatgg

SEQ ID NO: 75350 - DNA, 485 bp, Glycine max
  unsure (1)..(485): unsure at all n locations
cactatccatactcaagctcgcacttcctggtgtttgggaacctctccttcctcaggtgtacccttacccaatttcttggttcaagcacgactntctttctgcttttgttggcttgccttgcatagctcgcatttttcttttcaatttgaaccttcacttgctcatgcaacttcttcatatactcagctttagcctgtgcatccttatgcttaaacatagcaatgttaggcataggcaacaaatcaagaggagtcaaaggattaaatccatacactatctcanatggtgaacaattagttgtgctatggacagcccgattataagcaaactcaacatgaggcaaacaggctttccaagaattaagattttctttaaaacagtcctaagcagtgtgcctaaagtcctattgactacctcagttggaccatcagntngtgggtgacaagtagtagaaaacaacaatttagtaccaatcttaccccac

SEQ ID NO: 75351 - DNA, 437 bp, Glycine max
  unsure (1)..(437): unsure at all n locations
agcttggctntgaggacttgctccaatggctcatcatgtcttctattgaacctttcttcataggcttgaagagaacccatcaattggtctacggtcattgagtctaaatccttagactcttcaatagcacaaaccacataatcaaatttagcgattaacactactacaaaaagcagttttaacatcggcttattaacatcggttgtgacaaaaccgatgttaagttaaacgcagtggcatatttgtaaataaagtatcattcttaacatcggttttccaaaaaaccgatgttaatgcatacacgttaacattggttttttagaanaaaaaaatcatatatggcgctattaattttttgtaaatcaaagatttatttataataaacaatatagattcaacaggaaacctttaaaatcaactcattttaaaatgaattc

SEQ ID NO: 75352 - DNA, 439 bp, Glycine max
  unsure (1)..(439): unsure at all n locations
cactatacctactcaagctcgcttctacacattcaacaaggactaatcgtctgaattctntntgtgtctctcttctcccttntccaaaagaatagagggactaactgcctgaattcttttgtgtctcccttctccctttccaagagaattaaaaggactaactgcctgagatatcttttgtttccacttacaaagattcaaaggactaacctcctaaaaattctttgtcttaacacattgaagggtacatcctttgtggtacaagtagagggtacatatacttgggttgttgtaacagagaacaggagagggtacatctcttgtggatcagttcaagtggagggtacatccacttggttgttcaaagagaacaagggagggtacatctcttgtggatcttttcttgtaaaggaatttacaagcttggaagaaatctcaa

SEQ ID NO: 75353 - DNA, 400 bp, Glycine max
  unsure (1)..(400): unsure at all n locations
agctntanagtataccatgataggagatatattgttatattgagttntaatggggtggtattacaatgtgtaaccaagttgaatcaatgtgactcatgggagaaatacatgaaggatagtgtgatcctcataggtttggacctacaatgaagtggttgataattaggcatggatactatctgccaatgattaaagttgatttctatcattatgcgaaagaatgtgaagaatgccaaagattcagaccgttacaaaagattccagccaaagagatgcatgcaatggtcaagtcttggccattaaggggatgggctatgaacattattggcaagatttattcagcttcatccaaaaggcataattntattttggtagccactgattattttacaaaatggat

SEQ ID NO: 75354 - DNA, 346 bp, Glycine max
gtcctcgttagtatgaacttatatttcctctgtgacattactatttatcgatgtactccattgttgagtgggtgcaattttatgagagttgctttggaacatttatccacttacgaagctattaaatgctcacaatctctgctgttattattaaaatttgaaagtagaggggtttttttccaatttctactctattagtatttattaaaataggtcttgaatgagataatcataatcatatacgaggaatgctaaccccaatggtatgtcgggtatataagactcacacaccttaccttgcttaataataaaatcaattacttaccttaccaaacattaacctcat

SEQ ID NO: 75355 - DNA, 444 bp, Glycine max
  unsure (1)..(444): unsure at all n locations
agctngtagagtttcatcgaggcttggattttgtgattctgtgatgatcatcaagtntgggacttaggtttgacgagtcttatgtgcaacgcatgtgttgtgctcttgcatacatatcactcatcatgggtggcatgtactggagacatcgtgccgtgaatcagtatgactaaccaagggcggaccttgggttttgcaagccctttggaggattgactagggaattgtctaaactgggttttgggcgccatgctgttgcatacatgtcactcaccatgggtggcacatactgcagacttagtggcgtgctcttgcgtacatgtcactcgttgtgggtggcatgtactaaagacgtagtggcgtgctcttgcatacatgcccacttgttgtgggtggaatctactagagacttaagggtgtgctcttgcgtacatgtcacttgct

SEQ ID NO: 75356 - DNA, 341 bp, Glycine max
gaagagaatgagcatgttattggaagtatgactgtttatgttattcagtttgtcagattgattgtgaaggaatgcattaaccgcatcccggtgagagtgtgatccttaaatattgagagaaacgactatcatttagtactgatttttgtgtgaatctatgaagtatggattgaatgcatgaaattgaggatgatgaaggccatgttttattgctatagccgcttagccaaaaagctgaccatgtgttggaatgaattatcccttgtacctagtttgagctgaatgaattattgattgattgaaccctgatcctatacagtggtatctcctgctaccttgac

SEQ ID NO: 75357 - DNA, 435 bp, Glycine max
  unsure (1)..(435): unsure at all n locations
agcttataagaacaaaattgcctcaatcatttccaaatatgcatgtgaattangacgcatcaacaagaatcaagccaaggctattgtgcaagcaatcaatggggaaaaacacaccaaatgattatgatgatggatggctcaaattctcacaaaggtaaaatcatcactttcaaattgagctttcaaaactatcatgacatgtagagaagaatctaggatttcaagtcacaaaatgtcaagaacttttattntcaaaacaattacccatttcttgaacatatcctataattcaaagaaaaacatgaaaagtcgtacgcgtacacaaaattgacccaaaatattaaactaaaaatccgacgaaactaacaacattaacaaattaacacaactaacaaattaacaaaaccaacaaaactagcaaaaccaaagaacact

SEQ ID NO: 75358 - DNA, 430 bp, Glycine max
  unsure (1)..(430): unsure at all n locations
ctgcagattcggtcttcgctagtgaatggatcaatgtgtgtccgaatataggcaaatntgatcatcctactaggacgactgagataactggggcaaatgaagagggtgagaaagagggagaaacccatgctatgactgccattcctatacggccaagtttcccaccaacccaacaatgtcattactcagccaataacaaacctcctccttacccaccacccagttatccacaaaggccatccctaaatcaaccacaaagcctgtctaccgcacttccaatggcgaagaccacctttagcacaaactaaaaaaacaccaacaaaaaggaattttgcagcaaaaagcctgtagggttcccaccaaaatcccgtgtcatatgctaaacttgatcccatatccactcgataattcaatggtagccataacttcc

SEQ ID NO: 75359 - DNA, 412 bp, Glycine max
  unsure (1)..(412): unsure at all n locations
agcttatggcanatcgagtgcataaaggataagcaattagattatatataggaagaatagactaacattactccaacaaaaacgaagacggccagttgcttgattgactgcagaagctagtgactggtccaactcactgtattcaactacagtaagaggaccacctttacctcgtcttacaaacacaccaaccttttcttgtggatacgcctgtcatataatgacaaaatttaatatgcatatagtaagcaaataaaatcaattgaattgttatttttataaaagaaaactacttatcattggctcgtgcaatnttcataaattactgattctgaatattaccaacatcacaatgagatatagaactctaaatatattagaattgaactaaaccgtaggtatatacatttaa

SEQ ID NO: 75360 - DNA, 467 bp, Glycine max
  unsure (1)..(467): unsure at all n locations
catgaatattggaaaggggagctttggctggtttacggtcccttnttatatcttaacaagcatgggattaaagcgttatctaaaatgtaagcattggaaaataagcagcagttagtcagttacagtaagtcgtataaacattttgggttttttctgcgctactttggccaaaattgggacctacatccattctcaatcatctattgggattntcatttgtcgaataatgttatcttaatccactgtagcctctacatgctaggtgttaagaatgtttacctcaaatcctccgagctacgattcactcacaaaacccttaacatcataattatagtggttagatatgggtgcaacttagcgtaatgttgtcaatgttntgtggcttantatgtcttaantttgctcttgagcttgatcatcacgtacttctatggaattctagaaaaagtcaaaagtgttacttgact

SEQ ID NO: 75361 - DNA, 449 bp, Glycine max
  unsure (1)..(449): unsure at all n locations
agcttgcagctgcccaaatccatattactgataagtttgaggatgtcctccttcgngtagctaacctcgaacacactagcagccacaaccactcaccttcatcttccttagctaaccctgcatccataaataatagtctcaacccacacaaaatgaaacttgacgttccacgttttaatggttctgatccatcagggtggatcttcaaaatccaacaagttttcgcctaccactctaccccaaaatcagaacgcctcaccatagccttcttctacatggaggggccagcactggccctggtccagtgggttgcgcaaaaccaccaactgaccacctgggctaagtttttggaggccattgaagcttgctttgctcactctccctacaaggaccccaccgtgatcctcttctaactcactcaaaaaggaacagtgatggaataccttacc

SEQ ID NO: 75362 - DNA, 477 bp, Glycine max
  unsure (1)..(477): unsure at all n locations
tactcagctcacgctgtgatgggcctctggatgttgatgtcactattgaggatgtgtctattgggaagaaaacacaaggtggcttctctcanaagcccttgaatgtcaccaatttggacatgaccatgacattggagaatgccgatgttgacaagtatgccgctgaagagttgaaatcagacatcaaagcctatgagatggtgtntgatttgtatgtgggtggacacattggttttcacgttgtgaaattgcagatgaataatgtaccctttctagcatcttgtaatcaaatcaagagggaggatgtggattttggaagaaagcctgaatgtgaagttaagctgtttgctgccaggtaaaatttaataaactatgtgtatggttatgtttgggtgcacaaatcttggtgtgtaactaagaggcatatggtntaagaaaatgtttctatttgtttataaatataaatacgaaatatat

SEQ ID NO: 75363 - DNA, 428 bp, Glycine max
  unsure (1)..(428): unsure at all n locations
agcttgtgatattnttactatatatgtgtgtgtcttcgtttatctctacctgtttaaaaatgtgataattcactcctcatgtgttgcttatgtttggatcatgtgatgatcttaaaccttgtgtttgtgagagcaaatggctaggtgaattactttaagaaaccttgtgatggaggactccgagacacaatattttgataggatgtaacattggaacaagagtttttattttatttgcatgacgtatcacacatgtcattttactttatttgataaactcgaacagtcttgttttaagtcataaatatttctaagaaattttatttggtaacagtgaagcgaatgtgagcattacccacgtcgactggatttacgatttatttgatanaantgatttaattagattcccgcattatatatggcttttt

SEQ ID NO: 75364 - DNA, 439 bp, Glycine max
  unsure (1)..(439): unsure at all n locations
agcttaatgcanagaataactcttacaacatgatcttttcttagtgggaaaagcaaaagctttaattattccttcactcaatggatggtatcaccgagagcatgcataacctcattattgcccatggaatgttaatttacttgctactacatttaattgatggttaaagcatatctgatttgtaattattttaggatatttggggaaggattggacatagatgtcatgatatcaagtgatgataagcttcttattgttttggttagttggtattcagtctcttcattgtgagtgtaaatattagctaactaaacacattacgagctagatatagtttactattacattcctcttgggtacctctggtactcctatatttataatatattattctttngccgagaaaaaaaaacattaccaatattttaataatttattt

SEQ ID NO: 75365 - DNA, 466 bp, Glycine max
  unsure (1)..(466): unsure at all n locations
tcatggttgctgtgcatctntaattgcataaactctgatgatctcttatactaggatgttttcacttgtggagctccaaatgctatgaggacggcgtggaccttggtcattgcagagtgctttattccctggtttggtaatcattggagctagacattcttagcatttaaaaacagaacagtgtttctaattgtatctcttggatgcaatgcttgtattggtagcatgaagttgagtatctcgctgtagatctgcttttaatttgtgctctaaattcactaacgtgttcatgaactttggcatccttgactatggtagtagctaccttgcatattggttggttattggcaatgaagtntatcataatgcatctactggtaacatcttgngccatccaaatgtgttcattttgggtctgttgcttacccaagaaatataatccaatgaacttgtcgaactttaatat

SEQ ID NO: 75366 - DNA, 344 bp, Glycine max
  unsure (1)..(344): unsure at all n locations
agcttgaattaacaggtgatgctngagatgtatgaagtatatggtccacaaaaagtggagaaagggtaggacttatgcttaaataagaatccagaatttttgtgggattaaaggaagaaggaaaaagatccatatagggaaatctccactcaataaataaaaccttcattgatattgtaattctactaaaagatgaccagcacttgtacccttgtgagacagggattacctataaacaacactctcgagactganaattgacctgtgtgtatgatatggccttaataaaggaaacatgcacatcccaaagtcggaaaaatgattatcaggctctttattaacca

SEQ ID NO: 75367 - DNA, 354 bp, Glycine max
  unsure (1)..(354): unsure at all n locations
tagctctgactggaagtttttttagataagatgagaactttagaagatatctactggaccatagaatccatgatgataaaccatcatctaatattaatgcggacatactggtataagttaaatctataaccctacctatntctttaatgataattaataattcataaactatttctttanaaagaatcaccctatatcatattgaatcctatcttaaagtaaataattcataaatactctcttctcacgtgcttagcttaataaagatttatactaatatcatcaagaaatgggataaacggaaaatgatggatttgcccttaaatnttacatgtaactgtctgtctggtccca

SEQ ID NO: 75368 - DNA, 438 bp, Glycine max
  unsure (1)..(438): unsure at all n locations
agcttccttgagaagctagagcttagctacaaacacttctctataactaagctcgcctncttgagaaaattcctagagaagctagagcttagctacacacacccctctaatagctaagctcacctccttgagatgagaagctagagcttagctacacacacttcctataatagctaagtgttcattntcccacatgggttcttcttctccaattntcaacaaatatattcaagggaaatgaaacaccggaaagcataccgggtcatcaagtatttaaaattaaaacagagtgatccgagtatcgaacttagggaacttgcttattagacaaagttntattaaggagtaagggcatgggtggaacacacatggacaatggatggttaaaaacagaaataaactaattctatggtaaaaataataaatgcaagtaagtaa

SEQ ID NO: 75369 - DNA, 470 bp, Glycine max
  unsure (1)..(470): unsure at all n locations
actaagcttgcacatatctggttctgatgctgctctgaaagattcgttgcnatattatcatgactctntaccaaatngatgttcaggtcatagattatgtcaatntagtaaataaatcaccttttgttaaaattatcttctgcattttcgcaagttctataataagctcatatactataatgactagatgtatctgtttgtatctgtagattaaaaacgaataataaaaacaaaaattaataccaatacaactagacgtcaggacctctggttttctacatcagaagacatcaagatcatcgcattcaatataaatgcaactcgacgaaacttttagagaacttatatttgtgtgatttatttacaactatntacagcaacatgatagataanaaatgtaggaataaaataataacctgatgatataaaaaagaaaagaatatatttataaaaggtattataaaataata

SEQ ID NO: 75370 - DNA, 446 bp, Glycine max
  unsure (1)..(446): unsure at all n locations
agctnggatagaccctatgcttcgagtagattagggatgttaaacccttgctaagtgaaccactccaagtccaaatacctgggtattctcacattcttcactgcgtatatcatcttgaagtcgttcttcttactctcatccgcgaaccatgtaccaagcctgttaagagaaacctgagaacacttttcttgcttcctcttggaggtcttagctttcttctgagctctggagtggttgctagccatttttagaagagaaatagagggtttggagggagaaaaaaggttgggttcagaaatgggtggttagaagagatattggtgtgacatgtgaaggggttagggttgccttttatagagaggtagtgacgttttggttggctaaggttgggggcggcagtaaatgcacgaataatctgtaatatagtgaagatgacgaaatgtaac

SEQ ID NO: 75371 - DNA, 449 bp, Glycine max
  unsure (1)..(449): unsure at all n locations
gtggttaaggtacttagcatctctatctgacacattggtcctangcaaaccatgaagtggctaaggaacttatcatctctatctgacacaatggcccataagtctatttggtgttctattccccttagaggaggtagctcanggggtatctctttgggaaatatatcaccaaattcatgtaagagttcttggacctttgtggtaaggtctcgaatatangaatcgtggcagtgctaatggagggttcccttgatatgagaaggtagaaggattgtttaaaaaggagtgctcttttgatatcacactctgttgccaaatgaatttccttcttaacaatcatcttggaggagtctntttcctctntttccctcccttcgcctttgagacaaggcctactatccttcttttcttttcttctagttttctcctaatcctctattttatagtag

SEQ ID NO: 75372 - DNA, 466 bp, Glycine max
  unsure (1)..(466): unsure at all n locations
aagtcacctgcggcatgcaagcttatacatntgctattactaatagaaggaaacttttactgtttcttctgcttacttgacaagacttgcaacttgagtaataaactgagagaccgattcttgagttgccaagactgaagaagatggttcagctaaaggttttgcgggtggttcctcctttgattaggctttgataggaggagtagcatttgaggaactatcaagggcaaccttgttgtatccaaaaaggtgagaccgatatgtgtgtcacaagagtagattttcaaaagtttacacattttagtgatgtttgaatgaacttcctcataaacacttgaagaagaaaataaaagggtaaaatgagttttctcacattaactgaaatcaactcatgcatctcaactttcggagaaattagatcagaatactaggaataaagttaagtaattatgtcgattttcttctc

SEQ ID NO: 75373 - DNA, 477 bp, Glycine max
  unsure (1)..(477): unsure at all n locations
gcgatgaagctgttaaggcttagcaacattatatcaattctttgctaaacaaatgcaagaaccaaagaagagtgctgattctattttaacgaaattatggactngatttaggaattggtccagctttcagaactataatgtcaatgagcaggtttaaaattttctacctcttgtttttgtgttcaatataaatgtttgtgtgacacttgtctgattttccattgactatggatgactgggcaaagaagtttcatcattggtgggatgaatttaaatctacccttcaacactactggtttggtacaaaactactttgggctgatatcangataagctccagatntattgtgaaactcgccggtggaaagagtctttctagaaaggagaggcagcaactcacaaggacaacagctgatatntcaggctagtccattcgctgtattatcatagttcattatggagtattgttgcagtatt

SEQ ID NO: 75374 - DNA, 465 bp, Glycine max
  unsure (1)..(465): unsure at all n locations
agcttaagcatgagttgaaccagacttaaacgtgatttatcttattcatgagttgagccaggcttaagcgcaaggcttatatatttctttttagagggtgaggatgaaatgcttgagaggttagcttgtcaatccttctattactttctggatggatactcggggtataatcaaattgttgttaattcggaggatcaagagaaaaaaaccttcacttgcccacttggagtcttttcctatcagagaattccctttggactttgcaatgcaccagccacattccaaagatgtatgaatgctatatnttctgacatggtagaaaaatggatagaggtatttatggatgatttctctgtattcagagattcgttcacgtcatgcctcacaacttggaaagagtcctagaaagatgcataananataacctttgtgttaactggcanaagttcacttcatggtaaatat

SEQ ID NO: 75375 - DNA, 342 bp, Glycine max
tgcaaccactctgaataatagcatatactttgattaccaaaattttcttgcttctcacactcagtgtttatataaaaagtgtaaagacctctaaagacttggaacatcatatataggctatcttctccgactaaatagtcttgatgttagaaacctccatccttgtaatcttgggtaaaatgatagaccatctcatgatacaattaaaatatgattactaaaactccattatggttgatgatttgttttttaaaaataaccatcaggatgccagaatctatgtgatgtcatagtaacacgaagtgaatatgaggatctagggtgacattttaatgaagatat

SEQ ID NO: 75376 - DNA, 414 bp, Glycine max
  unsure (1)..(414): unsure at all n locations
agctngaagtgagatagcgtggaagagtttttctttctacttttatttgttgaccacagagtggtacctggagatatgttgcgggggtcacgagaccttggggatgtcaggtggggtgctatttcccaaaaccaagcttgatcaatcccgacccaacccgggcatagtcagtcagtgagaacctgtgacgttcctaaataggcgagctcatggcagtcaaccaataaaagaacaaagaccacaaagcaaggaggcttgtgtggtggctggccagctatggatcttgagtggtatctagaatttggcctctggtaatcgattaccaagggtgtgtaatcgattacaaggcttanaaatgaatacaggaagttaagatggcctctggtaatcgattaccaaggggtgtaatcgata

SEQ ID NO: 75377 - DNA, 307 bp, Glycine max
tgcataagctaattttatttaatgtttctgatattaatttctccaaaaactgaatcataagaattctcaggcggttagtcctttgaacacttttgtattatggaaagggaagaatcaaatgaattctcacactatgttcgtttgaattctttgacaagggagaagggagacacataagaattcaggcggttagtcctttgttcttttggaaaacgaagaagagagacacaacaagaattcacgtggttagtccttggcgaattctctttggcaaatggagacaggaatgaaaaggatgaatagcaca

SEQ ID NO: 75378 - DNA, 434 bp, Glycine max
  unsure (1)..(434): unsure at all n locations
ctgccgcttnaggttgcttgctacaatnnttattattgtctagtttcaaggggtttggacgaaggtggtaaaggcttttgatgaacgtgaattcattaaaagacatgtgttatgcacatgacctattggggttaacgacatagaatatttgacgaggttaggaggttttgattcaatcgcaattaggagtgttcaagtttgaaccaatccaaaataaaaaaacaaaaattgttttaaaaaaccaaaatctaaaccaaaccattattttttggatttgtttggattgatttttggataaaccaatcaattcggnttggattatcggtggcatttgcataaccaaatcaaatcgaacaaaatcacaaatatttatttatattggaatatcttatatttattatttgcatatataggagtgaaatataatccattct

SEQ ID NO: 75379 - DNA, 439 bp, Glycine max
  unsure (1)..(439): unsure at all n locations
ctaagctccaagaaaggccaaactccccttcaaaatctgatntcaagctaatatatgtggccttggttgtgcttgtgcgcttagcgcaattctaaaccgcttagcgcgcattagtggatttcggcttagcgcggcttttctcgctcagcggatggactaaagcggtgtgcttagcaggatggcccttctctcagtgaatatgcacagctcatccttcttccagattcttcctcgcgctcagccgagaagtgttacgctcagcatatggctcgctaagcccgaagattggcttagcgagatggtgaaaatcagcacttcaaaacttgtctaattaacctgaaatcgagagaaaaatgantattaaggacacaaaacggaagtacttagtatttattacctatcnttaacaaaaaggtattacaacactacataataccca

SEQ ID NO: 75380 - DNA, 427 bp, Glycine max
  unsure (1)..(427): unsure at all n locations
agcttaactggtccaaacatggcaagttttcatgctttaacaaatttcttcacaaataactatcatgaagcagaaacttagcaaaactacccatcatatttcccaaaaccccatacccacgaaaatcaagagggaaagaagttcacccaaacctaaaattttgaagtctcacacgtagagatgcgcttcacgactccgaaaatgccctcctttcgcgatttggagcagaaatgggcactaaaggttgaagctttgttggagcttcaatggagaaggaagaagaagagaatggcaacgtgagagagagaggaaaaggcttctgaaaaaaaaaattggggctgagtgaggagagagaantatagcttttggtttaaaaagggtttctcttttctattatttattaagctatccacatgtctcattgagt

SEQ ID NO: 75381 - DNA, 462 bp, Glycine max
  unsure (1)..(462): unsure at all n locations
cggagaggatgcttcaatggagganaagaaagagagagttaaagagttatgtggggagtacgaaattgaaggaggaaaaaggggagagaagttgaactttgagttttctctcacaagactctcattcatcaaagttaccataagtgttacacatacttctatttatagcctaggtagcttccttgagaagctttcttgagaaacttccttgagaagcttctttgagaagcttccttgagaagcttccttgagaagattcctagagaagctagagcttagctatacacacctctctaatagctaagttcacctccttgagatgagaagctagagcttagctacacaccccctataatagctaagctcaccctcatgccaaaatacatgaaaatatataaaaagtacctactacaaagactactcagaataccctgggaatacanggctaaaccctatactact

SEQ ID NO: 75382 - DNA, 448 bp, Glycine max
agctttcaatcgatcaaaggttgtcttgtctcttttcttccacacaaacctttagtttttcggtaagcaatgaaaaagtgggagggccttgtcaaccgacttcaagaggaacctagaaagggagttaatcttcctagaaagcagttggacttccttcacattactcgaactacgcatgttgatcaccccgagcatcgatcggggttagcatcaattcctcgatgcattaacatagagctgaggaattatttgctcgtacgccgaatgaacatttctctagattttattttagctgatatttatcaagggtgttgagggcgagccctggtgcagcggtaaagttgtgccttggtgacttgttggtcatgggttcgaatcccgaaacagcctctttgcatatgcaagggtaaggctgcgtacaatatccctcccccataccttcgcatag

SEQ ID NO: 75383 - DNA, 392 bp, Glycine max
  unsure (1)..(392): unsure at all n locations
tagagacgnctgcggcatgcaagctntaaagataggtaagaatggtatattattttctcttagacaaagaaggaaagctggaggtgctgctcatgatgtccaacgttatgtcaaggaataagatcgggctggactatgcacaaggcgagataaaatgtgaaatgtagaattgagctgcaggatccacgatgtccgatacaatggcccggacatcctgcccgagaatactggagttgctgacgacgcaagtaaaagaaagttgtgaaatgctgattcacgatgcggatctacgacggactctggcccatatactggactatatctgtctatcttaaagagtatgtgccaaaccaagatttgagcacttcgttagaacaataaaaatattaaag

SEQ ID NO: 75384 - DNA, 383 bp, Glycine max
tactaagctatgcacggaaatgaatatgaaatgagatgctcgttatacatttattctactaaccatgcattagtaccacgttcaatatcttgattgttagcgtgtgatttattattttagaaatgaggttatgatcccaacatggtcggctcatggtgcctaacacatgctactatgaatgttatgtgaagatacacgcactcccttttatgatgttgttgtgtgtaggaaaacgcatggatgagcatacattaatacaaatggtttgcaactatgcagatcatacaagttgttgaacgcatatgcatgacgatgccgtgactcatgcaaaatgtgaagctgtaatacgatcacacacttatgctcgaacgatatgtttatta

SEQ ID NO: 75385 - DNA, 375 bp, Glycine max
  unsure (1)..(375): unsure at all n locations
atgcagctatagaaaagggaatttctttcatganattcttcataatgatattctttacaaaaatatgatgaggatgtctatattatcttttaacaaagagagaagagattatatgtgataggagatagacaagtttggtaaaaaaaaaagcctaataaattcttaaagttttgaatgagaatgtttgaatggtttttatcaaaaagatcatgaaattcattttaaaaaataatctattaaaatttatataatatttaaagattttttataagctataaaaatcttattaaatataccagattttgtaacttcttaaaaaaaccttaaagcttattgaaatcaaagattttttatgaaaaatcttttaaatctatc

SEQ ID NO: 75386 - DNA, 445 bp, Glycine max
  unsure (1)..(445): unsure at all n locations
tcccgctgagaaagttanaaggttntagaggtcataataattaatgcatgaaggttgagaaaaccatgtaccgcttgagcaatgatgaaggcaatgacaagcaaaagaccatgtctttctgtgtatgaccaacccctcgagcgtgtcacgaaaattaaggcttgactaattgtactgacttgaagatagacagcagatcccaacattcttttggttggatcttttatatcagcatctggattataggagaagtgtttcacaccaatatggtcctggggcagaatacttcattatcatctcattgcatgaatgaataacacagtaatggacaactgtatagaagatacttacacgatagaagtttgttcaacaactatatagaagaagatcacagtcattagagctagatagctgccacgaacaatccccagttgtaaaaattcac

SEQ ID NO: 75387 - DNA, 435 bp, Glycine max
  unsure (1)..(435): unsure at all n locations
agcttcatacaacatatgcttctacaaattcatggtggtgtcattttttctgaggtgtataaaattcttattgtggttgatcagtccttattttattcattgacaaaattacgtagtcaaggtgtacattttgagggcaatttggttgatgactggaaacatatatattcaaatcatgatacccacaaaatggtttggaatgaaaatgatgatatgactggccgattgcttgctggntcattcacttttgaatgttgtatcatgcactacattttgtgtcgtatcttgctaccccattcaacanatcttgctcaagcttctaaggaggatttgattctgttttgggcccttcaaaccaatcgtcaaattgactangaccatcttgttcactaccgtatgcataaggcattacgggcaaatgcacctcttctatat

SEQ ID NO: 75388 - DNA, 489 bp, Glycine max
  unsure (1)..(489): unsure at all n locations
ctgatggtgtcgagaagaaataacatgtntgtcatcatcatataggtggagaatgtgaatgtatgtatacatgattntgatgatgtcaaagaagaatctaacaaggctacttcaaatgataagcatttgcttcaagaataattcaagattgcttcaacaaacaaatccttgtttcaagattcactaaagaccaagccttgccttaaaacaaagtgctttcaagacatgcaaggctctggtaatcgattaccaggaagtgtaatcgattacccgaagacagggttgagaaatagctgttgaaaaaggttntgaatttgaattttcaacatgtaatcgattaccatatgtctgtaatcgattaccagcaacgaaactttggaaattcaaattcaaaagtcataacccttcanattataactgtgtaatcgattacacaaacattgtaatcgattaccagtggaaagtttcagaaaatctgcaaccatcaca

SEQ ID NO: 75389 - DNA, 392 bp, Glycine max
  unsure (1)..(392): unsure at all n locations
agctngaaggcaaactggatgcattggttaactgggtatcccagctggccttgaatcagaaattgttcctatcgcaagggtttgtgggttgtgctcctctgctgaccaccatacagacacttttccttccatgcagcaacctggagcaattgagccacctgaagcttatgcttgaaacatttacaatagacctnctcaacctcaacagcaaaatcaaccacagcagaacaattatgacctctncagcaatagatacaaccgtggatggaggaatcaccctatcctcagatggtccagccctcagcaacaacaacagcagcctgctcctttcttccaaaatgctgctggcccaagcagaccatacattcctccaccaatccaacaacagcaac

SEQ ID NO: 75390 - DNA, 440 bp, Glycine max
  unsure (1)..(440): unsure at all n locations
tatgaatctatatgatgtcatggtgcttcanaagtgaaacaaaaagctagtaggggttaggatggccatagaagatcttgaggtggagttggagtgcatgttcaactgtttgatccacacaagagttntgcttcttaacattttaaccaaatagaanaactagttgggaaatgggagccccaacataccaatgacaaacaaattgactagctaactagctcaaaacccctttatctcttaatttaaattacttagatgggtaatcattcttttattctttgatggtttcaaataaactacattgtgaatgttgaatataattgaaacattgtctattccacccttgagtacttagattacagtcaatgggaaatagtttggacttaaaataaaagcaattcaatttcttggatatatatggtttattttgccatataatt

SEQ ID NO: 75391 - DNA, 305 bp, Glycine max
  unsure (1)..(305): unsure at all n locations
agcttatgcgcatgtttgcttacgaacgcacacttgttgacgatatactatnaaccgataatatgcacccatatacaatcaaggcagatatgttacctatactatctacacgtacttacaacgagtatttgttacttacatcacacacatctcctttgctaaattcacatacatgcctacttcaagcatgtggggtactctaaactgcacatgtgcacatctcgggattgctcactcctatacattcgcgaactatatgatgaatcttgactatctacacgataacgcgctacgtttcatgccct

SEQ ID NO: 75392 - DNA, 269 bp, Glycine max
atctccgggtatatccttctagacctatagaactcttaatctcagtactccacttaggactctcccactttagaacgccttctatcatacagggatccacagctctacccccttgagatctcacatgccctacgacactatctttctgtctccataactcacactcggacgacttagcatacagtcgtcggttcttaatggtatgcaccatgtcgcaacctacccttcagcgggagggcgacactagatccaatgatgcgcgatgcacg

SEQ ID NO: 75393 - DNA, 249 bp, Glycine max
agaatttttcttattcaaccaacagacacttgtacccatttgagactattaccctttgaacaacttaaaaagaggcattaccttgcaactaagcgcagaaatgaagactttgtcttcttttgggtacatcctttagcgttgctgaatgcaaaagagactaatgcttttaggagcaacatcaacttccagagggacaaaacctcacagttggaagttccaggtggaatattactatatggtgcattgatt

SEQ ID NO: 75394 - DNA, 465 bp, Glycine max
  unsure (1)..(465): unsure at all n locations
ccacatgttatgcatgagtgataacggcacctaatattttaactttctagctgagcgcgaattcattgggcttagctcgacccctatacatgaacccaaagaacatgagcgttgagcacacatcaacaggctagtcttgtgattttcaactgtcataagtctacaaattcttccttccaagagttatttgtgcgtcttaatcacatccaagaatatcataacatttctaaacacaactattaccttcataaccaattaatctactcaataaactccacatgcttaatcgtctaaatcccccaatgtcctaacatatgttgcaaatccaaccaattcataatgtaatatcacaccacaatagagtatatgatatagctttccttacccactagtttggagttcttcttttcttgaacgagaagtgaacggtttgatctngaagctcctaaggagtctttccccaac

SEQ ID NO: 75395 - DNA, 327 bp, Glycine max
ccagttccgctcccgaatatgacagccatcgttttaggagcgctgagcaccagcagcgcttctaggccatcaaaggacggctattccttccggagagacgcgtccagctcaaagacaatgagtataccgactttcaagaaaagatagttcgccagcggggggcatcgctggttacccccatggccaagttcgacccagacatagtcctcgagttttatgccaatgcttggcctacagaggagggtatgcaaaatatgcgatcttgtgtgaggggtcagtggatcccttcgatgcgaatgccctcagccagtttctgggatacccttt

SEQ ID NO: 75396 - DNA, 395 bp, Glycine max
ctgaagcatatccctcggaagaaagttatcgctattagctagtaagtcatctctgtgaagtcaacaattactcatacagacctgtagatccaaatctgccaagttcatctcaaatgccaaaggatagttatcctactgatatgataatactccagaatactgatgatggtcaaatccgaacagagaattatgttccaaaacccgagtttcaaaaagtggaagatatggttgatgatcattctgcattagaacaagactgggaagactataatgctcaattgatggaagaattgttacacaaaaagagatatccttatcaccacccagtgtacggaagtctcgccagatcaaaagtacaacattacaacttgtcattatccaccagattagactac

SEQ ID NO: 75397 - DNA, 223 bp, Glycine max
ttccgctccggagtatgatagtcaccgctttaagagcgcggtacaccagcaacgcttcgaagccatcaaggggtggtcgtttctccgggagcgacgcgttcagctcagggacgacgagtatactgatttccaagaagaaataaggcgccggcggtgggcaccactggttactcccatggccaagtttgatctagaaatagtccttgagttttatgccaatgct

SEQ ID NO: 75398 - DNA, 402 bp, Glycine max
  unsure (1)..(402): unsure at all n locations
ccaggctgctcgattgctccangatgctgcatggaatggctaaagtctgtatgtgtggcagcagaggagcacaaaccacatacccttgttacaagtacaaatatctgattctaggccagcaaggttaccaagttaaccaatgcatccagtttgccttcaagcttcttagttttatatgatgcagatgggtttgtagctacctcatgcactcctcttatgactatggcatcatttctggcgctaaacttctgggagttggaggccatcttcacaattaaatttctggcttcagcatgagtcatgtctccaagggctccaccactggcagcatctatcatacttctcttcatattactgagtccttcataaaaatatttgagaataaactcgtctgaaatctga

SEQ ID NO: 75399 - DNA, 435 bp, Glycine max
  unsure (1)..(435): unsure at all n locations
agcttcttcatagatggcagcaagtggctctcacattttgatgagaatctcttcattagagttatcattcaaccagggaatggcactgttcctggtaagagaacagtaacaacttcttacaatgctctctttcttggtggtgctaatangcttctccaagtgatgaagcatggttttcctgagttaggtttgacaagaaaggattgtgtggagactagttggatcaaatctgtgctttatattgctggctaccctgatggaacaaccccagaagttttgctccaagggaagtccacaacaaaggcttatttcatagccaaatcaaattttgtgagggaagtaattacagaaaagtccctcaatgcactatggaaaatttntctgcaggatgatggccctctaatgaattggaattctatgggtggaaaatgagta

SEQ ID NO: 75400 - DNA, 204 bp, Glycine max
  unsure (1)..(204): unsure at all n locations
tatgcggtgtctagactcggatgctattctcagaatgagagcgacattactatctaccaggcagctatcacaccgttgatatgctggatgactgactcttatcgagacagacactactcatattggcatacatgcactggctgtnttcaagattcctgagcaggcggaggactagtatatgagttagctacgcaaagtcctatg

SEQ ID NO: 75401 - DNA, 363 bp, Glycine max
agcttgactaggcgaagtgatttagccttatgtttttttagtttattagtcaattcaattaagaatgtgaaatcccaaagagaaaacgtccgattgattttttcgcttctatttgctaaaaggtattttttgattattatattattattttacctctttttttatttccaacttgggtacggcacaaccgaacggtctgtattcatttaaccaaaattaacggatgatacaattcaaatgatccgtggaaatttattttatttttagattaagcgatacatgacttatataaatggctcaagcacgtcaaaaggcggtataaaaagcaaacgaaaacgagaataataatacatgaaacaatat

SEQ ID NO: 75402 - DNA, 481 bp, Glycine max
  unsure (1)..(481): unsure at all n locations
cggcannatatttggctgtagaagacatcaatagattatacaaagacattgaatagttggctaatttatttctatccatcatttgaatagtttgcatttgaaatcatatacaagatcaacattgaaaagttggtatatgtagttacattgaatagtacattgaagactaaacactaatatttttttattactaataaatatagaaatatatatttcattgttaaaaaatatatttactaataaatatgaattaaatatttaagagaggtgtaagaaaagaaaagtggagtagtaaaaagaccaaaaatgcgtgtagaaaagaaaaggagggagagatatgtaatttgagaaaggaaaagaaaataaaaggagatatatgaaagatgagaaagggagaatagaagaaagagagatgagagttgagaatcatactactaataagcagaaaaaaaccttaatttctttcattgntaaatatatt

SEQ ID NO: 75403 - DNA, 429 bp, Glycine max
  unsure (1)..(429): unsure at all n locations
agctngagactggcgctaagcccaatttcacttacttatcgctaagcatgagggtggcgctaagcgcaacgtcacgattttagagcctatttaaagcctgttttgtgcagaattagggtagagaattcctagggcacaaaattctacaatatccacagtacctattttgggaaaagagccttggaagcagcaaagatgagcaacttgtgcattgaagcctatgttttgtcattagagagagattattgagtagagagtgagtgtgagatgttgagaaggggaaggggaatcctccttcttgtgtaaggaactatcattctctgcttttaatcttatttattggtacgagttctttggaatggctggctaaacaccctaggtggggatttttaatgattagctgatgtaaacaccttattatctcaatga

SEQ ID NO: 75404 - DNA, 394 bp, Glycine max
  unsure (1)..(394): unsure at all n locations
agcttgcattgacaggagcccatattctcgtcgttattttgtagatagatagaattcataacttagatggcatatttctcccaaatgcatcttgagtaaaagcccattgttatcgataaaattgctgtaatcaggctctacacatgcagggtgtcagagggttctcccagaggtcgtagttagggaaagtctcttctggcaatcccgtccgtgtctggtgagtaacaacaacatcttctacaanaggagcccaacccatatatggatccccaaaagacttggacattagccctttgtcaggcttaattgatgttagacggtgacccatgtatctacgtgcttcaatgatcagcttagcaaagttgctccatgggtcatcacgaatacatctgac

SEQ ID NO: 75405 - DNA, 377 bp, Glycine max
  unsure (1)..(377): unsure at all n locations
cggacatggctcgagaactggatgaaaataccctcgtttgatcgatcagtntgngctgctgaacctccaacccatggttgttgcagctggtgcttggcatgctgctgtggtggggcgggatggccgtgtttgtacgtggggatggggccgatatggttgcttggggcatgggaatgaagaatgtgaatcagtacctaaggtggtggaagcattgagcaatgtcaaagctgttcatgttgcaacaggagattacacaacctttgtcgtgtctgatgatggtgatgtgtattcatttggctgtggagaatctgctagtcttgggcataatgctgctggaaatgatgagcaggtctgctttgcttctcccttttttacat

SEQ ID NO: 75406 - DNA, 441 bp, Glycine max
  unsure (1)..(441): unsure at all n locations
agctntcataggtgaaatcaggtgcagccatttcccttagagtcctctcacgaggtggaggttgtgccatgttctcagaatgtgcaaaatcagaatgctcagaatcagaatgctcaaaattataatgctcaagatcaggatgttcaaaatcaccaataacagaatgcacagattcaccagttatggaatgctcagaatgatcaaaaggtataaaatgatgcctaactaatctatgaaatgtcctatctatctcacgatcaaagggttgtaagtcagatggattgcctctagtcatacactacattcagcatgcacacagctagttgccttgtcatgtaaataaaggtgtaggtttgaactacaactaccctcanatgatatccaaatgacttngaaatttgtgagcaaccttataanatgatgagaagatagcacaaaaat

SEQ ID NO: 75407 - DNA, 480 bp, Glycine max
  unsure (1)..(480): unsure at all n locations
cgtaggattatggngtacccatcacatgtggtactaggtggcggtcatgcgatggtgcacaacgagttttccacatccacaaagcgcgcataaacccaccatcccctgttgcccacctccaactgagctcacgtactcccacgtaacccatatcctcgtttctctcaacaccgggtccccatcaatcctcccaagcttccccaacatccaagtaattcaacattcaaatagcacaaactatcacagccaagaaaacagggcataggcagaaaactctgcccaaaactccaaccaaaatcacagcttttctcacttaaagaccccagtaacaattcattcgttccagttcgttaaccgttggatcgactcgaaaattntactggaagtctctagtacantaagcctacagttgaccgtgggatctgctagcanacatccagaactcattctgcactaccctnntcacagccaaccacacac

SEQ ID NO: 75408 - DNA, 427 bp, Glycine max
  unsure (1)..(427): unsure at all n locations
ctgcggcatgcaagcttctgagggtaccctattgagtgctgntntttttatggcttattcccttagcaatcccccaaattaaggacttatcataacttgaaacccttatgctctcttagaatcctaaaacatggtcaaggatatcataattaggctcaggggtttattcaaacaaatcattattacttttggctcaacaggagtgcaagggataaattcatcacaggtttggtttttggctaagtggttaaaataaaaagaagcatagccttgatcatatccaccttatgcaaataatctaacagtataagaatgatgcataattaggaatttaaaaacagacattctctcataattaagttcacacagctcaccgggacaagatatagttatcggcttaccagaccatgatctncttccatcaagc

SEQ ID NO: 75409 - DNA, 351 bp, Glycine max
  unsure (1)..(351): unsure at all n locations
gctntatctgaagaactcgccaagcgcacttactgtgctaagcgagttatttctttgaggatgaacattcatcctcttgctgaactacctgtggctaagcgaggctgaatcgctaagcctatgtgaactacctgtggctaagcgaggctgaatcgctaagcctaggtaactctaaccatttttttgtgatagccacacgctaagctgagcattcctgagccaagcgcaattggttgcggcatccgctaagctaagcgagcttcactcgctaagctcccataacttagtaaactttntgctcagtttagtgctgctaagcgcagcttattcttggctaagctcaaatccatg

SEQ ID NO: 75410 - DNA, 431 bp, Glycine max
  unsure (1)..(431): unsure at all n locations
agctntatgaganatttatactaagtacaggcccatagttnttcattaagcccatntgtttattagatctatcttnttggatggttatggtgtttgatagccttctttttatttagcaaagtgagtgaataggagataatagtttatctaacgtgggactttacaagtgaggtaatgagagagtttcttaaacttaaattttttttagtctttatacttggaactaaagtagaaaacatcataccacactttaacctaaaaccttaaggtctatatttatgggttttcttctcagtcatatcgtgttcaacttttaacttgttgtactcgatataagatataacatttcactttacacttatactccaacaagtcagccacacaaacacttcaaaatgatattatttgacttcaaagaatcttctcgatca

SEQ ID NO: 75411 - DNA, 243 bp, Glycine max
ctgcgctcatgcgttctacgaatcgaaagtgagatgcatcgaagttgctacgtgattatatacatatgcacgctcgcgataccgtgatgacaaggcgtaatgtacacactcctgggccataccttgacactactgataacctctcctgctgagtccgaatggagagagctgcgactatggggcttgctgcctactccatcttatcatgtgatgatatcctcgacgactatgacatgggtcgcc

SEQ ID NO: 75412 - DNA, 447 bp, Glycine max
  unsure (1)..(447): unsure at all n locations
agcttctctttatcgacttcgattatgaaattctcttcttaatgtcagtcaaataaagcgaagacataatttgtagaactggtaatggcgttgatgctggatttgaagattcgaggattgagcaaatcagtccagtggactgatccgatgtggcggttgtaacatcccaattttcgtaaactagattaaaaaggattgttatttataagtaaatagagtttaaaaaaatgatgagattttataaataaataaataaggagatataattattaattaaaataatgatttgagagaaaataaaaagggtattttatttatttgtttgatagagaataaaataaagtttggttttataaaataataaataaataaatagagtaaacaataggtcgtaaatgcccctagctataaataacaacatgctangtcagttttcagactgactcc

SEQ ID NO: 75413 - DNA, 463 bp, Glycine max
ccttctctctcagtgacgaggacatgttctagagcatgggcaatgatccacttgaaggacttggaggacctatcacaacggctaaagcaacgagagccaaggaagctcttcaacatgtgctgtccatactatttgaatacactcccaactttcaaggacaaaagtccacagatgtgagttgtatcatggcccacatggatgaggactaaatgacaccactatcgctcaattctatagagtttagtgcttctaaagaatggcccaatccttgtaaagttggctgaccaaaaatatgttttgggttaatcaactaaaagggctttagttacgtgtagctcaagttgtaataagggcccacatggcaacctacgcatcagcctttcgtagaccaaatggtggctgacttgatggctgccggaggcgactcttgcgtgccacaatatcagctacactcagacattaa

SEQ ID NO: 75414 - DNA, 452 bp, Glycine max
  unsure (1)..(452): unsure at all n locations
cagcttgctatgatgcangtgttactgttaaggcgtgtggcgactgttaaggatagcaatatagttgatacacttccatttaacatattgtcatctcattcagtgttgcatccccgacaacaaagatttccttactatcatcgntcaaggtatgtatgtgattctcacacttatgtgcttaagtattataggcaatggttgacatgttactattctttagtagtacattgtaattcattgagtgagccatagttccttgtttgagattgaatacaacgattaatatggacaggttggattaaattttgttttcaatcttgaattgtccatttggacagtttgggaagacaaattgtttttacttcattttgacttataagttaagtatgttgtgttatttttgactaaatntcgaacaatgcatcttgctttgttctctgggtgcatacatg

SEQ ID NO: 75415 - DNA, 431 bp, Glycine max
tcactctcacagagagggttgatgcttaagcattaatttctcactaagagatctagcacaatgtgttgtagatatggaatgcttcaacttgttcttcataacctttgaacatgcctcataagaagaccattggagtgggctccacatagctaacaagcctcaagagtgagtgagggtattttccagctatcaagatctagcagtagacaaaacaattctgaggttccattctgaggaaccttttttatgggcattctgaataactatcaaaaaagtcattctgatgttttctaagaatgaattcatgctttgatgaatttcaaattgatatcttattatggtgtagtgcagcctcatcactcttaacacttctttacaacttcaaagcattctcaagttgattactttagaaagacttagtaacaaaatga

SEQ ID NO: 75416 - DNA, 383 bp, Glycine max
  unsure (1)..(383): unsure at all n locations
agcttggccaaagattacctaatctcatgattatcttttaacacactangtaggaatctaattaggtcaactctacacaaaaatggcttaacaattatataaatacacagaatctatgtcatcatatgtgaaatagtgtattnttatcttactaatattgatatgttgcaatgtttaaccatcatagattgcaaaagcagtgattgcagctggtagagctctgtctgctagttcaacgtcagcagtgatagttgaagaactgaaagaggaaactagggtgctgaaagtcggtaattattctgtctctggcattgacaggtttatgtaagaaaaactattattatggaaatgcaaattaataacatgggtgccaattgcagttt

SEQ ID NO: 75417 - DNA, 474 bp, Glycine max
  unsure (1)..(474): unsure at all n locations
tatcccatgctntcttggccgtcgttgcgttggatatcttctcaaatgtatcttcatccaccgatggataaatgagaaagagagctttcttgtctctctttcttgactccttcaacgtctcctttacaccttggcttagcgaggcttcatcttgctcctcgaagtcattctctacgatatcccacacatcttgagctcctagtagcgccttcatcttgatactccaattatcatagttgttctttgtgagcatcgacacttggaaaggaaaacctccattcgccatcttttgaggatcttgaagctctgataccactttgttggaaataaggctttttatgtttaagaaaagtgtttacgaatattggagactctgaatataaactcgataggaagtagaactctttatggaggagagaactttctatttctgcttgatacaaatgtgtangattacatctctatttatactac

SEQ ID NO: 75418 - DNA, 366 bp, Glycine max
  unsure (1)..(366): unsure at all n locations
agctntcctctaacanacccaataatgctttgacctgaaattgtttaaaaggaaatcctaaaacaacaagggtgatcaagattacatgacgatgaagaactagagatagcggtattattaatataggctccagtaagggaaattaatgagaaagggccataaagagtgaaagtagaagcataagaatcagtgtaattaagagtgacactggcaatagttcctgatgcgcttagcactgtgatacttgacttgtggtgatgagcaaattggaccattgccctaatcacatccaagttattatggacttcaatgtanatgggttnttggactcgcacatnggcttggctaatcacatgggaatagctt

SEQ ID NO: 75419 - DNA, 445 bp, Glycine max
  unsure (1)..(445): unsure at all n locations
actcagctcgtgngatgtgatcaaaggggatatctngagcgctgttaatgaattccatggatacagacagttagtggttacctaaaggatctaatgattcattcttgactcttatcacaaagaaagagaatccacaaggccaaggggaatatagacccatttcccttaattgacgcctatataagattattgcaaatatcttggctaagagaattagcaaagtcgtgtgtagcattatagacactagacaatcgactntcatggggagtaagaatatattgngtgggctgttgatagccaacaaggttgtacatgaagcaaagtctaagaagaatgccatgtttgtctttaaagccaattntgagaaagcatatgactccgtgaggtggtgtttcttatcatacattctttttcagaatggcctttgtgctatgtgcatacaatg

SEQ ID NO: 75420 - DNA, 441 bp, Glycine max
  unsure (1)..(441): unsure at all n locations
agctngcatttgtcttgatcttgtgatgttagcacttatgaatgcacatggagatgaaaaaggttagcaagtaaaaacttcatcaaggcagacttaccacacttcattcctcacaaggctagtgtttctctcggcgcacaagtgtctcggctaagagtgtttttaatccaataactaaaaataatatttccaactttgcacttcatctcagttaatgtaatcatgcacacatattgtgggtcactaaggacttnttaagcttgtaacgtggctgggctaataaataactcatggtttttctttggattcaaagttaggttccaagagagcacacacccaaattttcctgataacccatggctcatatttcatagcccaacttctatgttntctactcttaacaacacancaaaattatttggcccttagttgcttacaact

SEQ ID NO: 75421 - DNA, 476 bp, Glycine max
ctataagcgcagggttgtgagacgaaggtcaagtggtctctatatactaagatgatgttccgagtacattggatgtggtacgaccatgccctcctgatttccagctgggaaattggcgagtggaggaacgccccggcatttacgcaacgagcataatgtaaacctttacggttttaaaagctctatagttgggcctaggctatagaattattccttatgttaaggctttgcgtctttggtttttgaatttataatacaaggatctttcttcatctgttcctacgtctctacccattctcattcatttgcatgtttacttctttatttctgaaacggcagatctgatgacgagtcctccgaaggtactaataattgcgacccgcttatcaacttctagcaagatacgaattaaacggaagatgaagggaacgaggatgtgggacttccaccagaattagaaagaatggtcgcccatg

SEQ ID NO: 75422 - DNA, 442 bp, Glycine max
  unsure (1)..(442): unsure at all n locations
agcttcaagattaatggcctcaacaaacttcttatttccagaatgaaattcaatcagtagacctccaatctttaatggagagggttaccactactggaaaacccgaatgcaaatttttattgaggcaatagacttaaacatttgggaagccatanaaatagggccttatatacccaccacagtagaaagaaccacaatagatggaagcacgacaatagaaaaacctatcgatagatggtctgaagaggatagaagacgagtacaatataatttaaaagccaaaaaaataattacatttgccctaggaatggatgaatatttcagggtttcaaattgtaagagtgctaaggaaatgtgggacactctacaagtaacacatgaaggcacaacaaatgttaatagatctaggataaacacactaactcatgaatatgaactaatt

SEQ ID NO: 75423 - DNA, 507 bp, Glycine max
  unsure (1)..(507): unsure at all n locations
tactcagctcatatctataccttgctgcatgcccctntaggaanatttctaagtttacctcanacatcacaataagggaatcttcagcacagtcaatgaaggtccatgttatagattttggcatcttttatggtttccaatggccaactnttatacagcggctntcatggagagcaggaggaccaccaaagctacggataacaggaatagacttcccacaacctggtttcaggccagcagaaagaattctataaacgggacgccgcttggcagcgtatgctgaagcctttaatgttccatttgagtacaaagccatagcaaataaatgggacacgattcaacttgaggaacttgagattgacagggatgagttccttgttgttacttgtttctatagaggtaagaaccttctggatgaatctgtggtagtggacagtccaagaaataatctccttaccctgattatgagaatcaacccataagtattcattcatggcatcatgaatg

SEQ ID NO: 75424 - DNA, 457 bp, Glycine max
  unsure (1)..(457): unsure at all n locations
agctntaaagtataacaaatctaagggtccgagaatttcctctatcataagcttctgaattctctgtatagaaatatgacctaaatgttttctaccataaagtggtgaaattctcctttaatttatgttttataccacatggatctatttgcaataagaacacttaatatcaattaaagacttctaatcaagaacatttgaataataagagatactaactttattattttcaaatggacaaaaataatcggattagtccaaaaatagaaacaaaattaaattcggtctaatagacggtgcaacatatgtttcaattaaattcaaataaaaagtctttaaaaataacctacaagcttatatatatatatatatatatatatatatatatatntcaactgtaacttcattgtcatttctcatattgatgagattttttagcatcacttcgcaaatgact

SEQ ID NO: 75425 - DNA, 478 bp, Glycine max
cgaagacaagactatacgaggtatcttccttgggtataacaatatctctaatggctaccgcgtctacaacttgcaaactaagaaactcgtcatcagtcgagatgttgaagttgatgagtacgcttcttggaattgggatgaagaaaaagtggagaagaacgttcttatacccgctcaactacctcaagaagaagctgaggaagaagacccaggtgaaccacctttacctccaccacaacaacaagatcaagaactatcatcaccagagtctactccaagacaagtaagatctttggtggacatatatgaaacatgtaacttggtcatacttgaacctggaagctttgaagaagcatcatagcatgaagtatgggtcaaggcaatggaagaagagatacagatgatcgagaaatacaacacatgggagttagtaaatcgtccccatggaaaagatatcattgggggtaaatgggtctat

SEQ ID NO: 75426 - DNA, 346 bp, Glycine max
agcttatcaacactaacagcttcccatcaagaaagtttggacaggatcacaacaacaagttattcaaagccttgcatctggcacagtattaccattcatacaacacattgctaaccacaaaacataatatcttattacatcatctaaacgtaggattcatgctaggacacataacaaactacggctccagatgcaagccaactctttatgcgccaaagatagaaatggtttgatcaactctcaacccggattaccaaagccattaaagtggattaaaatttaaaaatggacaggactggtccagtaaaaaataagtttgggtcaaatggaattttgacccatactt

SEQ ID NO: 75427 - DNA, 428 bp, Glycine max
  unsure (1)..(428): unsure at all n locations
ctaagctcgggaatacaggtagaagaacttaaggttctcttgaggcacatgatcatagactcattgaaagaggttcagagaagtctggtaatcatcaagcactgcaggctcatacatcatgaagaggaggccataacttcaaaggaaattttcgaggttgaggccatgggagaaattccaaaggtggctntggaagaaacacttgaagccaagattaaggaaagattgatcaagatcaaccagaaagctccagtagaagagggagtttcagtaattggcgaggaggaaagaaaaaggtaattgacagaaaaaaaaattcaatgttntaactgtaatcggattggacatntttccatagaatgtgtatgtgcaccaagtcacatagatcatcggtggagtcagtcacataatgatcatgatgaaaacat

SEQ ID NO: 75428 - DNA, 443 bp, Glycine max
agcttagtaatcataaagagtaaaaatgcagttactttatataaaaagaaaaaaaataccacgactgattaaaaaagatatacatgtataggaaataatatcttcagataatcacaatgaagatatagtttagcactcaatgtcaaacataatacacctaaaaattatcaattcaaatggttgagtttatataatttatgaatgtagaatgaaaaccctataatattcagtcattattaatgacatttagaagtatctgatataactttgacactgcgtaaagtaggaacgcaaaatcaattcctagcaatcccaaccaaaaaatataatcaaagaaatcaaccagaaattttttaatacataacctatgttgtattagttcaactcaatttggctattgtacctttcagctgctaacatgtttgtccgagcagagtgctctc

SEQ ID NO: 75429 - DNA, 483 bp, Glycine max
  unsure (1)..(483): unsure at all n locations
ctaaatcaagaagtattcaatgtgaaatatgtcacanatcaaaactcatctcaagaagccaagaaaagaaatactctaagacaaaactaaggaatcttaatgacaagcaaaaataatgaaatgaatactcaaaaagaatgccaaggaagacaaactaaaagagtccagaatgaagaanaggattgtccaaaaattgaactatactatatgtaaataaccaanaagacacattnttttntttaaatagaagtatgtaaaaacaagaaagactacgaatgtagatntttntttttgcatttttttgcgtgtattttgcttcactttttttatctttgcacttttttttggctcacaattcagatttgaatacaaatatgttgatgggaaaatccaaatctagactgtaatagaattttgcctccaaatctgaaaactagatttctttcctttttttcacggatttaatactatatnntataaata

SEQ ID NO: 75430 - DNA, 448 bp, Glycine max
  unsure (1)..(448): unsure at all n locations
agcttctcgaaaagaaccatctctcaagagatctagatttgaatctattatctaagcaggagcttctttgtggattggtgaatatttaagagtgttcctccatctccttccatgggcatgaagaagacctcaaagattgcctcttctcccttggttagcttgtttttatggttcaaattttgtggatttttttggttcttgaacctagtaattggaagagattttttgactttttgtatgtttgggtgtcgaatcttacagtttagctcacagatttcatagttttttgtcatactcatgtgactctgattntgattgtttaaccgtgcttgtggtaggacgccatcatcagaaggagaaagaacatttgttgttggcccttagtgagaattttacattgctataaactagagagacacccgtgccgatgcacgggctcatactaata

SEQ ID NO: 75431 - DNA, 446 bp, Glycine max
  unsure (1)..(446): unsure at all n locations
atattgttcttttttctttccttttctggttttgagtaatgtttaacggaggctgatgcaatttctcgttttcagtctttgttacttgctagtgcatgacagctaaaaaaaagtacaaattatttgtaatattattttctctttatagtattactttagttatattagtattacgttagtaatattgctttacttggtttctctttattggtaacagagggtgatgcaatttctcgttttctctttatagtattactttagtaatattatttgttcgttcttatgttaaattagcattatttgtatntattattattgctatatttattcaattcatatttgataacagatatatataatactacgtcatatatatatatgaattttgatattggtattattaatcaacctattcttaatgatatctcaaatgattgtattatatt

SEQ ID NO: 75432 - DNA, 366 bp, Glycine max
agcttgaacgcatagttatggagagtgtgagcatgtgttgataattaatgatgtaacatatgtacatgagcacatgcgagcgggagtatgtccatcttctatgaagctctgatattgttattgcgccatgcgcaagattcgcgaagtcgaaattaatgtggaaatatctcgagagactatctagataaacgctatatatatgcgacaagatagacatctcacagtatgtacatatatatcttgaactccaagctcaaactgatatgaaatggtctcaatacacagtgagctatgtttcaatcaaagaaaacacactctgtaactgagacaggttatcatgaaacttgagaataatacaactccatt

SEQ ID NO: 75433 - DNA, 427 bp, Glycine max
actccaagcgattatacaattcttaacccttactgacttcggccaaggtgtctgagagtcactagtgtattaggtcaagtcactctacagtcacgaatgtcatatgttcaatacacttatctgataaattaaccaacaacttacacgttttgggatataactatcagatgaaaaactgaagactcgagagcttatgcgcccattaagcgatttacataaaactgttgttgaggttaactatatcatatataatacagttatagtgtttgcatatattgttaataaattatcactatcaaacagagagatctatttctttaataatctatatcataaagcaatgatcgcatacctgatgatataattagcgatacctcgcactacttttggactgcatgactaatacttatcagccatcgacttctat

SEQ ID NO: 75434 - DNA, 455 bp, Glycine max
  unsure (1)..(455): unsure at all n locations
agcttgagaaagcanagtaagtcccatttcaacaatgtgacggtgtatacgctctacaacaccattctgatggtgattataacggcaaattagttgatgtataatcttcaataagaaactttgtaaaaggtttatattctccaccctaatctgactaaagaaacttagttggctaataaatgctaaatatgagttgttctcgataatgaaaatatctttaaaaatgattatttagcagttattcatgcttaattgttaagaattgatgttttttcctattcatggcttgcaaatatgaaagggagggattaaaagccttaaaaatgaagaaaatagcacacatttaaaagaaggcctatcacaagacgcgcagggcgcgctcagcgtgaaaacaagcagtggcgctaagcaaggaataggcgcactaagcgcgaatacagacacacgtgctaagc

SEQ ID NO: 75435 - DNA, 484 bp, Glycine max
  unsure (1)..(484): unsure at all n locations
gcttctntgggactctgaacaagcaattaactcctctttcagaaccatgctatgtgctctcgactggtttctttcttcccttcgcaacttgagttcactattgctaccccatagagctccgcgaaatttgttccggccatactcttccttgcgagccctcttggtctcttgttcaagggctcttgcggtaattgcattctcttcccgtaacccggcacactccttccgaacgtgtgtagcggccaacttgaacttctccttggcaagatttgcctttcctaactcgcttttgagagcttggacttcttcgtcctcttccggtgcttcaaaactctcttcgctgacgacttttaacttggcgagccaatctaaacctcgtatatgaactttcagccattcgtggtacccaccaatgatgccattacgaatgcctctaagctcttgatctntncttaacggnggttcccatgccttttgatagtct

SEQ ID NO: 75436 - DNA, 387 bp, Glycine max
  unsure (1)..(387): unsure at all n locations
agagccaaaagtttcagtgtcttctacttgccactcccgggaaantagcgaaactcgattgctaaccaaaaactgaacctattctgaagtggaaacacccacccatataaatatgtgtcctaccttcttcttagctatcttttgtcttaaactgacatagagagtgaatctcatcctgcttgaaaaacatattctatttataaaatatgtttccatcgtctaaacttgtttttgcgcacattagttatctctctttaattaggtatacctcccatgataactttagttgtctcgacaaaacacttacgagaattctatagatactatctagccccctangatatgtctatttgtacgtacttcttttaagaacttactcttgatcac

SEQ ID NO: 75437 - DNA, 470 bp, Glycine max
  unsure (1)..(470): unsure at all n locations
ggcggacttcctgcaaggctgcaacttaaactcttttcttcaaacgcatttcagacgaataagttcaagaaagagttatgacacttacaagttccaaactcctacattctttctaaaaaagttttatctccctttcattaagaaaagtgctcttcagcttcatcaacaagactggagtgaacaagagggaaacccgagagaatgggaagttgaatattgaagagaacaaactgataatattacttcaaaccctgaactgaattcaagtatagaacaagagccttttaaaggactctaagtgaaaatattaaatgccaaacattattcttacgaaatatcagaaataatcctaataaattcacacaatctaccttaatagaaantcctaagagatgttcctctgttatgcctagcaaacactttattccttttgggattctatatacagcgcagagatatactaactagtc

SEQ ID NO: 75438 - DNA, 187 bp, Glycine max
  unsure (1)..(187): unsure at all n locations
aaccttggataaaaagcttggagaggatgcttcaatggaggaaaagaaagagggagagaaagagagaggggggagcatgaaattgaaggaagaaaaagggacagaagttgaactctgagttgtgtctcacaagactctcattcatcanagntataacangtgttacacatgctcttatttatatact

SEQ ID NO: 75439 - DNA, 448 bp, Glycine max
  unsure (1)..(448): unsure at all n locations
cgacgtaacactttgagcatgaaagtatgtgttctattttttagaatgtatataggtgtatggcaattagaatatattagatgttcttgtatgttaacatgggtaataggatactttctacacattcgcgttaatataagcattatctngtaaactaacttctaaatgtttgttctcgcaggacatggccccgaggaaacttgcctcaaagagatccaggaaggataaagcggccgaaggaaccagttccgctcccgagtatgacagtcaccgctttatgagcgctgaacaccagcagcgcttcgaggccatcaagggatggtcatatctccgggagtgacgcgttcagctcanggacgacgagtataccgatttccaggaggagatagttcgtcggcggtgggcatcactggtctaccccatggccatgttcgatccagacataatc

SEQ ID NO: 75440 - DNA, 400 bp, Glycine max
  unsure (1)..(400): unsure at all n locations
agcttaacaaacagaggaagggtttggaggaataatgacaaatgactcaaagtaacgtaggttgaagctaattgtagaagaaaatacttgcgaatttattatacttacaggagctatacaagtcatccatatttttttttactaaactcatccatattttaatatattttatgttcgatggaaacaatgagcaaggtcgagttgatctccacttcattntctcgcaataaagagtngttagnggtttgtcagaaaattcaactcaaggatcttntatagttaaaagaattaaaccatccgaaaaaggacttcacattgcatcctgatgagccttagaattcttgtattagctgaaacaatctagaagatgtcttaccaaatagcatcataggggattaaa

SEQ ID NO: 75441 - DNA, 416 bp, Glycine max
  unsure (1)..(416): unsure at all n locations
cgcccgtccaatgcagcagtaatgatggcccgagttatggttgggaacggttacgaacccggaatgggtttaggcaaagacaacgacggcgtaactagcctgataaatgccaaaggaaatcgtgggaagtatgggttaggctataagcccactcaggcatatataaagagaagcatcgcgggaaggaagagcggtagtaaaagctcgcagttgagacaagaaggtgaaggaagcccaccctgccacataagtaggagctntataagcgcgggtcaaggggacgaaggtcaagtggtcgcgatatacaaagatgatgttccgagtacattggatttggtacgaccatgctctcctgatttccagctggggaaatggcgagtggaggaacgccctggcatttacgcaacgagcataat

SEQ ID NO: 75442 - DNA, 451 bp, Glycine max
  unsure (1)..(451): unsure at all n locations
agctngcttcagaaaataataacactaaaaaatcatgtcattcactntaaattatgaccaataatattaaagtacattcaagcattcattcatttattcggaaacaattgggagattgaaatttttgctcaggaaaaaaggatacaataaaaaaataactatatacaaatccatgctacctgttcattttcaccatccttcttcgaaagaaataaatgccaaaagcagacagaacatgatacctcatacatggcttcgagccttttgagcaccagatcgaggaatagccaacacagctatgagtccactgataagggctgaaacagctgccacagcaaaggctggggagtttcctccaccanatagctgatcccatggtccacttcccagtgacactattatctgtttaaaacatgataaacatgtaacttagtagctccaaaacatcatt

SEQ ID NO: 75443 - DNA, 482 bp, Glycine max
  unsure (1)..(482): unsure at all n locations
gacatgggtgttgcccagtttcatcatatcttncgtattacttatcacctctatcatatttaataattctcacatttatgtctaaggcatccattgcctaagaaatatcgggcagtaagtagacataaccgtaacgtgaataatcatcaataatggtgataaagtatcattcctttccgaaagaactaacatcaaaaggtccacaaatatcagtatgcacaattttaaaaagctgagtgcttcttgtagctcttatctttatatgttttgcttggtttcccttaatacaacacacacaaatatttagatccataaaatctagataaggaagaatttcattctttattaatctttccatcctttctctagaaatgtgacctannacgttatgtcacaagaaagcagatcgttcattcacttaaactatgttagtgccaacattatgatgcagagtcanaacagtttcagcatacaaactgtct

SEQ ID NO: 75444 - DNA, 421 bp, Glycine max
  unsure (1)..(421): unsure at all n locations
agcttangacaccatccncattcaaatcaaactgtttgatcatatatttgcactcatcaattggagaaatttcgtgaagcaacagttggatataatcaaaacaaatcagcagcagagacataggtaaaaatgttcaatacaaacacaacatcacagctgaagatccgtctttgagagcatgtacagaggtccagcttccaattaaagacatgcttgacgctaacaacccattcacattcataactgcagatatctccactaaagtataattaactgatgaatgtgcagcttgccactatcgcagaggagggcagtgtcaacttgacagcagagagaaattttgttgtaccaacgctacactacaacaaaatcctggtaaacacccaagaatgcaatccactaacacttngttcttctatct

SEQ ID NO: 75445 - DNA, 486 bp, Glycine max
  unsure (1)..(486): unsure at all n locations
ccgttcctctagttngagttcatttcatgttgtaatgttgatttgataatgcacttagtggttttatccctttaaataatttatttaatctattgaatttgtttttctttcctctttacactgacaaatgacttatgtgcttagtggacattaataaaaaaaattattttactgactatataaataaattatatctaaattgtgtgtatattctttgagtccacattgtacgagatatcataacatcgttcactaatggaagccttatatgttgtacctggcacgcccttattataaatggagcttttcgcatttactagcttcaaagcaatttcttatgcttccttgttcccattttcttcaaatcaactttagtgtcgatgctctcttcctcttcgtcgccgcgaatatggtctctattgaagtcccaagtcaaaaccgtgttctgatcagaatggagaccacanatagctttatcactatctt

SEQ ID NO: 75446 - DNA, 403 bp, Glycine max
  unsure (1)..(403): unsure at all n locations
agcttcacacatgaatagtatataaataaatgggtcttaccataatcaaatagcacaagtaagagaattcaacttatgaaacatttagcccaaggaccctaaatacaaggcccaaaaataataaaaccataatctaatatgtataaaggtaagtgggctcatatttaacccaagggcccaaaatctaccctaaagctcatgggaaccctagggccttctcttgcatctctggcccaatcttcttggagtctgctatccaatgccttggggaggtaggatngcaccatcccctcccccttgaaaagggtttgacctcaaatctagaggttcttgaaactttggggttctttcctcaacacctgtaaaaagaataaaaacatatatattantggtgttgggtatg

SEQ ID NO: 75447 - DNA, 468 bp, Glycine max
  unsure (1)..(468): unsure at all n locations
ccctgaactntaaatatatatctcttgataccttgcttagattctaggagagcatatggttcaagacaatttactctaaatttgggggaggaaagacaattataatgaaaagaaaaaggttaagcatcaacacacacaacagataagttgtatgttaaaaaaaaaataaaataagtgtgttgtttcaattaggtcaaaagcgacttangagaagaaaaatagtgagaaggctacttgtatgatacaagaaaaaatcattgngataagtctaggacttgtgctctcttagaatctaaacctttgaatcctagaaaaaccagtgagattttttgtagccacaacctcactacaagcctgagaaagtccttctgattctgtctatacatttctgacttgatggcatgagatgaaatgcatagaatggacctactcgttagtcgtatcaatgaatagcttaaacacttgtgc

SEQ ID NO: 75448 - DNA, 431 bp, Glycine max
  unsure (1)..(431): unsure at all n locations
agctttgcaagaacaaattgtcatgaacataacattgaaatagaggtaaaaaagaaaaagttttatgctaaagagccattcaaattcctaataatcctagttgtatatcaattctgcattaattctaatcctatatgggtaacccgtaaatgaaagtaaatcacattctggacaaacaaacacgacatttatattttctagaccttgttcacctaataatattgagtcaaaaacaaaaaaagaaaagtagtgaaataatttccccctttgcatttgcacatagaattgacacacgaacacgagaatttagattcaagtggtttaatcagctagaacaggcctcttagccaaagttgaagttacaagaatttcaccaaatgaaaaanaaaagataagaaattgaagaggaactcaagagaataagagaagcg

SEQ ID NO: 75449 - DNA, 425 bp, Glycine max
  unsure (1)..(425): unsure at all n locations
tctacttcctagtcacctttaggcataggaaatctaagcataacccatcaaatgaacatacattatacgcgaaattaaatcctaacaacatataatcaaacaagtaagcaatgaatagcaatatcaatagataatcaaaattacagagcaagccaatttgtcttctaccctagggttcaaaaacgaaataaaaaaaaaataaagtaagaagtacttaattggattgctgaggatgaactaagtgagtatggatgagggcaaaaagaagtagagggtagcaagaaaatatgagtacagtgcagatggtgaatgccaatgatggataaattatgcataagtaactacctacnggcagtatgtcttattattagcaagttcgactgtctcgcttaacgcgagtgactcgctaagcgagcactcagtga

SEQ ID NO: 75450 - DNA, 421 bp, Glycine max
  unsure (1)..(421): unsure at all n locations
agcttggacactgtaacacgtatgttaagattcactttaccttttccacttcttgcatatcccgtgtaccttgtaagttggtgtgctttgaccttaatttgaacattaattactctttagtcttggtagaagaattgacatggtggctgttgacatttgaatccagtggggtaggagtcctggcaagactggttctcactttgaccctagcagtgacttgttcgttcccaatgaaagaaaagatgttattacttccacagcttgttgggctgctatgttgggattgcttgttggattgggggttgtaatgggtccaattcaacttcttaagctttatggngttccctatgttggaagattcttccccttttcctcatttcaatggttcttctttctgagataaaaatgaatgcaagtctca

SEQ ID NO: 75451 - DNA, 484 bp, Glycine max
  unsure (1)..(484): unsure at all n locations
gctcgccgcccagctcgccctggcgagcaaggttgcttctttcataagttcagccttctggaggaatcatctggagggcccaagtgggcctggtttctatttacaccccctttttactaaatgcaccccccttttctatatttatgtaattctttttccgtaacgttacgaaactttacgaatttcgtaacgatacttattttccttccgcaagggtacgaattcttatggattatgtatttactctcttttggctttcgaagaagataccgaaactcacggattgcgctaaaacatctactttcgatatctgccacattacagaatttcacggattacgcaagcctgctttcntttggatttctgagacgtctcgggacttcatttattgcatgtcattaatccccggacagaaataaggtatgaacagtgtccctcttacttacctctcatcgagataagaggaagcaaagatcgacactga

SEQ ID NO: 75452 - DNA, 432 bp, Glycine max
  unsure (1)..(432): unsure at all n locations
agctttacaacattcaagcaaaccaacattcaaactttacaagttatcacagtcaagcaaaacagagcaaaggcagaaaactctgctcaaacaccaaccagaatcacagcttttctcacttaaagaccccagtaacaattccttcgatccaattcgttaaccgttggatcgactcccaaattttactggaagtctatagtacataagcctacattttgaccgttgggatctactagcaaatgtccagaactcattctgtactactctttccacaacctaccacacgcaagcattnttctgcacaagccataattctgctgtacctattttgacagcaaaattctgcataagtgcagatttcgaaaatcacactttctctcattcaatcttgcccaaatcaattcctacaagtcccaaatcatgtatcaatca

SEQ ID NO: 75453 - DNA, 486 bp, Glycine max
  unsure (1)..(486): unsure at all n locations
tggtctctgcagatcttcacanaacanaatctctcanactctctggtactnggacctttctctctctataactctcaagacatgtagaagcttaaagaataggccaaactcccctccaaaatctgatttctggcttaaataggtggctttgttcgtgctcatgtgcttagcgcaattctgaaatgcttagtgcgcattagtgaatttcggcttagcgcggcttttctcgctcagcgaatggaccgaagcagtgcgcttagcgggatggcccttcgcttagcgaacaagcacatttcatccttcttgcagattcttctttgcgcttagtcgaggaatggtgcgctcagcgaatagctcgctaagccagcagatgggcttagcgagagggtgaaaatcaacacttcaaaacttgcctaattatcctgaaattgagagaanatgattattaaatacacanaatgggagtactacgtattngttacctat

SEQ ID NO: 75454 - DNA, 203 bp, Glycine max
  unsure (1)..(203): unsure at all n locations
agcttctgatntcaattacaagagtcttgatatattactggactctatcagacattcgagtaaaaagttattgtcgtttgaatntgctacgagcattcgttttcagntacgagcgtntcaatatattacgggactcaattcgacatcctagttaaaaattattgtccgttggatttgataagaacctttgttttcaatttgga

SEQ ID NO: 75455 - DNA, 473 bp, Glycine max
  unsure (1)..(473): unsure at all n locations
tgagcanaatcaaacgacaataactcttactccgatgtccgattgtgtcccgtattatatcgagactctcgtaattgaaaacagaagctcgtagcatatgcaaatgacaatatacttttacacagatgtccgattatgtcccgtagtatatccatacgctcgtaattgaaaacagaagctcgtagcaaattcaaacgacaataactntntactcagatgtccgattatgtcccgtagtatatccatacgctcgtaattgaaaacagaagctcgtagcaaattcaaacaacaacaacttttaactcagatgtccgaatgagtacgctaatatatcgagacgcgggaaattgaanacagaagctctgagcaaattcaaaggacaataacttatatactcgatgtccgatagagtccgaatatatcgagatgctcgaaatgaaaacggagctcgtgcaatactacgacataatttt

SEQ ID NO: 75456 - DNA, 460 bp, Glycine max
  unsure (1)..(460): unsure at all n locations
agcttttcgattcattctatgtacccgaagtggtccatattgtgtttcgtgcattnttattctcattttgtttactttttataccccctgttgacgtgcttaagccattttacttaagtcatttctcgcttaacttaaaaataaaataaatttccaccgaacgtttgaattgtattatccgttatcctcggttaaaataaattccgaccgttcggtcgtgccgtaaccacgttggaaatcaaaaagaggtaaaaaataatataataatcaaaaagacatcttttagtaaaataaagcggaaaatcaatcggacgttntctctntgggatttctcattcttaatcgaattgattaataactaaagtgaaactaaggctaaaatcaactcacctagtcaagctcgtccacaaaaataggcttttgaagttagtcatctcaatttctcactaaagtaaatggg

SEQ ID NO: 75457 - DNA, 448 bp, Glycine max
  unsure (1)..(448): unsure at all n locations
aacatgggaccaactctntntattntcaaaaagaaagtcgtatctagtcaaggtctgagagaccatacaagtttcctaacgatttctaattatgtgggccattaagtctatcatatgctgacaatagccgagaagcccatgaatctcttcgggggcggagtaggtgtctgccatcaccttggccttggctaacaagcggtgaagttcttgactcccgttcaaggtaagagcaaaccgatccatccacatggttgcctcttggtgtaaagagtcgatcacccttcctctagcctctntttccgcgtatacttgagcatactcgtccgcgatcctatgctcgtgggtcgtggctagacctaactcttcttggtacttggcgatgatagctagcatgttggtctccgtctcgcataaacgctgagacaagcttctntnggaccttgaacag

SEQ ID NO: 75458 - DNA, 454 bp, Glycine max
  unsure (1)..(454): unsure at all n locations
agcttggagaggatgcttcaatggaggaaaagnaaatatggagatatttgagagaggggggagcatgaaattgaaggaagaaaaaaggagagaagttgaactttgagttgtgtctcacaagactctcattcatcaaagttacaacaagtgttacacatgcttctatttatagacaaggtagcttccttgagaagctntcttgagaaaacttccttgagaagcttctttgagaaaacttccttgggaagctagagcttagctacacacatccctcttataactaagctcacctccttgagaagattcctaaagaagctaaagcttagctacacacacctgtctaatagctaagctcacccccatgacaaaatacatgaaaatacaaaaagtccctactacaaaaactactcaaaatgcctcgaaatacaagactaaaaccctatactactagaat

SEQ ID NO: 75459 - DNA, 463 bp, Glycine max
  unsure (1)..(463): unsure at all n locations
aatgattattaaacacacaatatgaaaattctaagtatttattacctatacttaacaganaatacttataacattacaaaataaccataaattgggagagtttgatacaatttatacacagtttatacacaaaagttagtcattttcaccgactaacagacatttagtagaacatagggtcgaatcaattctaattgttattaaaaacaacattgttcatctcatcagagccaaagcgcaaataaaacatggatacatcagcgattcctaattatgtggaccattagttcgaccatgtgttggcagtaattgaaaagaatgtgaacttcatcaggatcagagtatgtgttagccaccgtcttggctctggctaacaactttggaagctcttgactctcattcagagtaagagcatacctatccatccatttcatgcgctcttcatgcaataactctatcacct

SEQ ID NO: 75460 - DNA, 451 bp, Glycine max
  unsure (1)..(451): unsure at all n locations
gcaagcttcgaacacacccagtcaataacgttcgnggttattctattttctaatttcagnaatgcatataaaggtcacacttttaacaattccataattactttctttagctgtacggtggggaaaaagggtcagtcccatccaacattggaattttaagatataaaaatatagaaaatgaatcaatcatataattgccgacaaaattatgaataaatgggaaaattttaagaatggcattgaaaataactaagtgtcacggaagttctcttactgctgatgtttgtttctaatgttggtctgatgtgtccaaatgttgtgtgtaaggaagatgcatgtgacaaattatgtggtgctgaacaacagctactggactagaaacagatcagtgccaatttcttatttggcagtgccaattcttcctttctgcatttggtcttgagtaatggag

SEQ ID NO: 75461 - DNA, 449 bp, Glycine max
  unsure (1)..(449): unsure at all n locations
tcttacgtcattccctattttcttgcttatagtcatcccgccctttcttctattagtctctaaagtgacagtctctcatggctatgagaggctaaaccccctctgtggagcctacagccaaacccttgtcatgcagntgttcttcttatctattaatgcaatttcaaattctattattcttttttgcttgtcattttcaatatgtggtttgaccattcatgcatctattattaggggttattcattgggaaatgataatgtctaaagaactgggaaatgacatctcaatattacattactagggatagagtgacattgttgtgcctcaacatacttctttatacttaatggttgttatgattccatctttgcaaagggatttgggagagagaatacataaattatgctcttcatcatgacggatcagggttgagcatattagtagatgt

SEQ ID NO: 75462 - DNA, 438 bp, Glycine max
  unsure (1)..(438): unsure at all n locations
agctntgatcaaatgactaanattaattatcaaaatatatatttagcagatagccaaaccaacttcactattcccggttagaaattccaatattctatattacctgctcattagctgtaggagggaggcctccaacatacacccgcctagcatgtcgtgtagcctgtaaattcagtacatcaaatacaggccataatcagggaaagccatgctaaaagggaaagaaggtaagtcactaaatcccatctcactgagaagcatttttacctgttgagtcatagcctgcactggcatgacagggagagcactaaattgctgcatcttaaaaaggaaaaaaacaagaataaagtgaaattaataagaacttgacactaaataaccatagctgggaaaaaaaaacaaaaatacctgacttgtaccaacggaacatattggaaa

SEQ ID NO: 75463 - DNA, 495 bp, Glycine max
  unsure (1)..(495): unsure at all n locations
tctctgggacatctggtgaaagcgcacgatcatccaatgtttgaatgtaaaaccggcgaccagtaccatatttgtcagcagatagagacagtttctccattattggaccaagagggctatgtctcatggaaaccatggctaaagcaacatcctgaaacacatcatttcaaatattatcagacctaataaatacatatactatccgaattttgaaagtattaatataacaaccaggtgaggtgactacaggattaaagaaattcaccttcctaattccttcaattaggactcagtttacataatacaaatataaatataataaattaagatggtgtaatattttnttatctgaatacagttgtgatcccaacttttagatgaaacatttatcattgaaaataaggatngaaaatgtttcgacatgtatgtattagtaataagtaatattttctgaagtatacgacatggtattaagaaactagaacataccacgcg

SEQ ID NO: 75464 - DNA, 299 bp, Glycine max
  unsure (1)..(299): unsure at all n locations
gcaagcttgagccaattcanacgtaagtaactttggaattgaatgtctgattgagncatttactaattcgaaacactcaaaattgaaaacagaagctctgagcaaattcaaacgacattaagtttttactagaaagtctgattcagtcatgtagtatatcgagacgaacgatattgaagatagaaacattttactcggatgtccggatgaaaacgagagctctgagcacattcaaacgaaagtaactnttgacatggatgtccgattgagttatttaataattcgagacgctctaaaat

SEQ ID NO: 75465 - DNA, 461 bp, Glycine max
ctcggtattcaatttgagcgtctcgaatattaaatgactcaatcgtttatccgagtcaaaagctattgtcagttgaatatgctcagagcttctgtttgaaattccagtgtctcgatttattacgggactctatcgatcatgcgagttaaaaggtattgtcttttgaatttgcttaaagttactgttttcaaattcgtgcatctcgatatactgcacgactcactcatactttccagtcaaaagttattgtcatttgaaatttgtgagagcttctatattcaagttcgagcgtcttgaattattatatgactcaatcggacatctgagtcaaaggtacattcgttgaatttctaagagctttgttttaattttagcgcttaataactatggaccaatctactctgagtaaagatatgtcttgtaattgggagagctttgtttcatttttgcgtcacaatttt

SEQ ID NO: 75466 - DNA, 358 bp, Glycine max
cactattatctcaagcttaacgaataataatactttaattgaggcattatgttcttggaagtttctcacaagacctctataccgcactgatgcgggcggtttaatgcgtggatgcgtcacggagctaattactgtcacatatcacaatcttaatatatatatttcaatgaatatgtaattacgttagaacaaattatgtatctctctaactaacatactcgactctctttataccatctgatttatggggaggaggaaagaataaatggttcaaacgcactctgtttgcgttctaccgaaattgaaagggtggacactggaattggaatttgctttgaaatgaaaacatggatgtcca

SEQ ID NO: 75467 - DNA, 395 bp, Glycine max
  unsure (1)..(395): unsure at all n locations
agcttcttgtgccatatcctgatannattttctttattattagtaagcatgttacatcttgtatagatagctcacacggtcgatcttgtacagattaccttttcttttaacagtaaatagtgaagagccattattggtctagacggcacatccttctttggtgaaggaaacattgtgtccactatcacataattgacttatgctaagtaggctgtgtttcaatacttcaacaagtaaaagattttctataggaggataagagttaatgtttatcttacctacacaaaatattttacttttctaattgacgccgaaagtgtctgttccaccatgcacgaggctcangagttggaacatatacctttctcctatcatgtgttgtgagcaaccattta

SEQ ID NO: 75468 - DNA, 489 bp, Glycine max
  unsure (1)..(489): unsure at all n locations
cgggagttggaccaaaatctgaagatggtttgtcttttacatgccctactcccttgagtggcatttgtattgattattatactgaatnttgcatcttagtccatatcatatcttttgtgcatcatgcattatcatgagtaagttagaagaaaaatttctaagttagaaaagtttcttcagaagaaagaactctttgtttagatcaattacagccttatcctaatcaattacacaaattgtgtttacatcgattacagccttattgtaatcgattacacaagttgtctgaagctggtagagttatgtctcatatcgatttaattgattacagccttatcattatcgattacatagttggttttgagacaacaactaatttatntagtctctgctttaattgattaccatatgatataatcgatcacttctctttctataagtgtttcaaaagtgaacaagaaacacttaatcgatactttgagatctaat

SEQ ID NO: 75469 - DNA, 442 bp, Glycine max
agcttctcgagtgagacaattgaaacaatgggacatgtcaacttgctagacacttttggagacgataaagattccaagaccatcatgatcaggtatctcctagccaatgctttcacttattataatatattaattggtcgacctacactcaatgaattgggggtcattatttcaactccccatctggcgatgaaatacccgagtacgagtggcaagattatcatcgctagagccgaccaagcaatgacataggaatgttatgcttcaagcctcaagattaccaagggaaagaaggtagcagaactcaaagtacaactgatatcatgcacctctccaacaatctaggagaagcagagctcgaccctataaaagccaagagcagagcccactgaagaagtgaagcctttccaactcgacaaagaaccatctcaatgcactaagc

SEQ ID NO: 75470 - DNA, 495 bp, Glycine max
  unsure (1)..(495): unsure at all n locations
cccgcttattagtgcacagctccttcaagaatatggcatatcttggatattgctntattgcatccaacagaggtatgtttacctctacttttctaaacatttccaagatctctttctctgcctcttccatttttttgttggaaactgctcttggagggaatggaagagggggaatgtgctgcttctgcaaatcagaattacctgtggaagaagattcacctgcacataaattgttaggtaaatttttgtcatcacctctttctggaatagagtgaagtttggcaggttcatttgcagatgaggaaggtgctactggttgaggtccttgacactgctttcccgacctcaatgaaatggcactcacatttttgggatattggacagcttgagaaggcagcttgtcagaattctgggactgtngttgattcaattgngtagctaattgtcccatctgattggttaagctctgaatggacgctctggtctcttgctgaa

SEQ ID NO: 75471 - DNA, 403 bp, Glycine max
  unsure (1)..(403): unsure at all n locations
agcttctcctcaccttccacgtagctttctcttctttcttcttctccaccattgttcttcattaaagctccaaaatttctcctcattcctactccaaattgcaaggagaagccattntcggagtcttggaacctccctcaacttcgtgaagcttcgaattntaggtatgggtggacttcttctcacatganattcgtgggtgttgggnttttgggagatatgatgggtagttctactacgttattgccttagggtagtcatttgtgaaggaatttgttgaaatcatgctaaacttgacatgtntgatgtgagtaaagctaccccattctcgtttannggtttatgatgatgctctgtgatatttgatgccgaattgttgtagaaactagagagatatgggaga

SEQ ID NO: 75472 - DNA, 440 bp, Glycine max
  unsure (1)..(440): unsure at all n locations
cgttcttgattntntctaagttctttaacaagcttagaacaatatacttgtccttcatttaattgtctttgggcttggcgaccacgatcaacaaagtactttcggaacttactatatgttgacttgaccaatgctgttatcggtatgctgcaacaatccttcaacaccttattcatacattctgagaggttggttgtcatgtgaccatatctttgtccagatgtatcgtaagtcatgcttcatttatcctttgaaatgcgatcaatccatgttgctatggctagactcaattgacgaaaattttctaaattntgatcaagcacatgcttgcaaggagtgtacgctgcatcanatttgtaccatcaaaagtngtagttagatatgaaacttaaattaacttcatgtataanataaaccttacccaatttcttgaacatctc

SEQ ID NO: 75473 - DNA, 431 bp, Glycine max
  unsure (1)..(431): unsure at all n locations
agcttcatgatgatgaaccaatgcaattttatgatgtcaaaagcccaagcgattgattcaagattgattcaagacttcaagatcaagcatcaagaatccaatccaagattcaagattcaagagaagaaatcaagaagcaacaagtcaagacttcacataggataagtattaaaaatatttttttcaaaaataaaaaagcacagttttggtttacaaaagaattttttcaatattntctaagttaccagaatgattactctctggtaatcgattaccagcggaccaattggtttcaaaatattttcanatggtttgcaacgctccacaatggatttcaaatagtgtaatcgattacactatattagtaatcgattacaagtgaatctgaacgttgaaattcaaatccaagtgtgaagggtcatactttcata

SEQ ID NO: 75474 - DNA, 481 bp, Glycine max
  unsure (1)..(481): unsure at all n locations
ctgctatgatgcangtgttactgttaaggcgtgtggcgactgttaatgatagcaatatagttgatacacttccatttagcatattgtcatctcattgaaagttgcatcctcgacaacaaagaattccttactatcatcgttcaaggtatgtatgtgattctcacacttatgtgcttaagtattataggcaatggttgacatgttactattctttagtagtacattgtaattcattgagtgagccatagttccccgtttaagattgaatacaacgattaatacggacagtttggattaattgttgtattcaatcttgaattgtccgtttggaacagttgggaagacaaattcgtnttacttcattttgacttataagttaagtatgttgtggttattttgactaaatatcgagcaatgcatctngctttgttctctgggtgcatacatgataggcgtgaatggatgtcaccactttcatgtt

SEQ ID NO: 75475 - DNA, 456 bp, Glycine max
  unsure (1)..(456): unsure at all n locations
agcttctatataagctgaaccattttatcaataaactttagttgagttttattcagaaaattagagtttatctcttttatcttagtgagagtgattctcctaaattcttgagtgattcaagaacaccctggctgtatcaaaggactttcacaacctttgtgtgttgccctcgctggaaagagtgattctttccttcctatcatctccacccttgttctttcaaaccacaattccagaaaatccacctctgcccaaaattatctcgtgaccataactcccattntacacactcaaattaagtgattcttgatcctaaattgaatttcaaaacgagatctttcacctcgttgtggaatcacctcatttggagccctgtagcttccgttattgccatttctatatttctgtccagccaccacttaacctatcgtttaccatcccattcattcattttat

SEQ ID NO: 75476 - DNA, 409 bp, Glycine max
  unsure (1)..(409): unsure at all n locations
tcctcgtagcttcttgagaagctntctaagaggcttctntgagaatctntcttaagaggcttctntgagaagctagatccttatctatccacccctntattaactaaattaacttccttaaaaataattacggatgaaaataacgcaacaaataatcaaacatcgaacataattactaataatatatatatatatcagggtgttacaacgccgatcgaacattgcctattagacatcatccaaatattattcagggattgaatagaaattacaataatcgacatcgatcgttntagagtcgcgacgggatatttcctgcggacattgcgcaattatnttttacaaacgctggccgataatatttntttacggtagaggatgcttttttgctctgtgttgccggtaaaat

SEQ ID NO: 75477 - DNA, 383 bp, Glycine max
  unsure (1)..(383): unsure at all n locations
agtcacctgccgcatgcaagcttcgagctcatcaactntccaaggggttagctcttatttgatcttgccatgatagccatctttctccgatgatagccatcttaagtggccaacgttgtcttcctcccaaggctccactaattcgaaaccttctgcactaactgagcctttatgttttaaagtttttgaaaaacacataatacatgtctaggtataccaattgggaaagagggttttcagtttatgtaatatctaaaggtacaaccacaagcaattaaaatgctaacaatgaaacacacgagggcatgattttaacttatcttgcttcaaatcctnttcgtatattcaaagatgactttgcgaggacaactcatcaatttgac

SEQ ID NO: 75478 - DNA, 453 bp, Glycine max
  unsure (1)..(453): unsure at all n locations
gcttgtcttactatcactgggatgctntattgcttcgaccaggttgaatgtgactnttttatccttcacgctcatctccaagttgccattccctatgtccacaacacattgtgtagtaagcatgaatggtctgcctagaataaggggaatatcagagtcttcttctatatccatgatcacaaggtctaccgataaagttaattggcgaaccttaacaaggacgtcttcaactacactatatggtctagtaatcgagcgttctgctagctgaagcatcatcttagtacgagcaattcccagattctcgattctttagtacatagagaggggcatcagattgatgcgtgcccccagatcaatgagagctttactcattaacacatgcccaatatagtgtgggaatggtacacttcctatgtctgtgacttctatgggagaatcctcaagatcaca

SEQ ID NO: 75479 - DNA, 443 bp, Glycine max
agcttctattctgaatttaagcatctcgatatacttctggacactatcgatcatccgagcaaaaagttattgtcgttttattttgctcggagcttctgttctgtatttcgagcgtctcgatatattacgggattcattcggacattccagtaaaaagttattgccctttgaatttgctcaaagcttctggtctgaatttcgagcgtctagatatactacgggacacaatcagacatccgagataaaagttattgccggtagattttgcttcaagcttctattctgaatatcgacactttcgatatacaacgggatacaatctgacacccgagtaaaagttattgtcaattattttgctcacagcttttgtctgaattcctagcgtttcatatactacgagacacaatcggacatccgagtaaatagttattatcgttcgattt

SEQ ID NO: 75480 - DNA, 392 bp, Glycine max
  unsure (1)..(392): unsure at all n locations
tgtagcaaatctaacgacaataactttntactcgaatgtccgattgtctcccattgtatatcgagacgttaaatattcagaatagaagctctgagcataatctaacgacaataactttttactctgatgtccgattgtgtcctgtagtatatcaagactctcgatattcagaactgaagctctaagctaaatcatatgacaaaaaacatttactcggatgttcgaatgaatcccgtaatatatggagacgctcgtatttgaaaactgaagctctgagcaatatcaaacgacaataactttttactcggatgtctgattgtgtcccatagtatatcgagactctcgaaatctagaacagaagctttgagcataatcatacgacaataaattta

SEQ ID NO: 75481 - DNA, 460 bp, Glycine max
  unsure (1)..(460): unsure at all n locations
acctgccgcatgcaagcttgaggaatgcaatggcttggttattgagcttactgttttaataattgngtatatatatagnttgtaagattctgtggaaacccaattcccagagaaagtgattgtcaatggatggagggcatacgcatgagatatcacatggtgttgtcttcggtccaactatgaaggataagttgtgaagacttgcgtaaccccaccttatcatacattagttggccagcataaagcctgcacatgtaaccaaatgagacgtgcctcagtgaaacgtaacgtctattcaagcattgattggtattccatanttttgtaaacatgctctgggcatgttctggaaggtaatttctggctgatgaattataaggcagcggatagcgagaggtcatatatcattttaattatttctgatgcctgacatctantttatttcacgcgagaatagtct

SEQ ID NO: 75482 - DNA, 126 bp, Glycine max
tggtcacatgctcgtggaggtatgattgtaccattcccttccccttagaaagggttcgaccttaaactagaggtactaaaactttggggttttcctaaccccggaaaagaaaaaacttaatatttg

SEQ ID NO: 75483 - DNA, 406 bp, Glycine max
  unsure (1)..(406): unsure at all n locations
agcttggttcccaatgctttgttcaaactctcccattatctagaggtaaacctangatctctatcagacactatgctagatggcacaccatgtatattgacaatctcactaatatacagggaggtcaacttctccaaggaaaatatgatattaatgggaataaagtgagcaaacttggtcagcctgttaataatgactcagatagaatctaaacctttgggagtcctacgtagtcttaaaacaaaatccatggaaatattttcccacttccattcggttatctctaagggttgtaacttacctgaaggttttttatgttctatcttagccttatgacagactaaatatgtatacacaaactcactaacctctctcttcatgttgggccaccaaaacattgtcatta

SEQ ID NO: 75484 - DNA, 453 bp, Glycine max
  unsure (1)..(453): unsure at all n locations
taacaccactaaagatgatatactaatctaagaatgttcaccggagcatcggaattcatgccctacaactcanacaaacganaacactacattcaaaactgcaactagcagatgttatctaacatatacgagaaagagaatagatttcatcatactctctactgataaaggcaattaaaaaacttcttttacttattatctttagaanaaaatgtactgattgaaaaatttaggtgagttagaagttaacaaccagatatatctgttgcactttttacattctaatcttttaaagatgaatttgtcaataatttacacatttataaacgaaaataattatttatccaattaataattaaaccttaaccttttgacctaaccagaatatgtttacataattagtctcctcgcatagtcaaaggggagaaataaagtaattgacaaaaacattct

SEQ ID NO: 75485 - DNA, 336 bp, Glycine max
  unsure (1)..(336): unsure at all n locations
agcttacctntaacggacccgaaagtgctttgacctcttttcgtttacccagaaatacgacaccatcactggtgatcaatattgcatgacgatgaataacttccgattgcgcgattattaacttaggttccttcttgggaaaatattgagaaatgggcatcaagaatgtctgtgactgcataataatcaatgtaattcatagtgactctggcaacagttcctgatgcgctcatcactgtgatactgactttgtggagatgatcaaatgggaccattgcctccatcacattccatgtattagggacatcaacgttcatgggtttttggactcgcgca

SEQ ID NO: 75486 - DNA, 288 bp, Glycine max
cgtcgagatgtgactcacgagagatcctgagcgctgtttatgaatttcatttatacacacaggtacaggttaccgaactgatctaatgatctattcttgactcttatcaccatgatcgataatccacgaggccaatgtgaatatagacccgtttcccttaatggactcctatataagcacatcgcttgtatctggcataatagaattaacttagccttgtggaccatgatggacactagacaatctactttgccggggagctacaatagattgcctgggctgttgatg

SEQ ID NO: 75487 - DNA, 344 bp, Glycine max
  unsure (1)..(344): unsure at all n locations
agctttgatagaattcatacgacaataactttntattcttatgtctgatgtgagcccgcaatatatcgagacgctccaaatttagaaccgaagctctgagcaaaatcaaaagacaacaactttntacatggatgtccgattgggtcccgctgtatgtccagaccctcgaaatttataacagaagctctgagcaaaatcgaatgaaaataaatttttactccgatgtccgaatgaatcccgtaatatattaagacgctcgtaattgaaaacggaagctctgagcaaattctaacgacaataacgctttactcagatgtccgatgcagtctcgtaatatatcgtga

SEQ ID NO: 75488 - DNA, 461 bp, Glycine max
caagcgtctagatatattacgggacacaatctgtcatccgagtaaaatgttattgtcgtttgaatttgctcagagcatctgttttcaatttcgagcgtctcgatatattacgggactcaatccgacatccgagataaaagttattgtcgttggaatttgcccagagcttcaattttcaatctcgagcgtctcaaaatattagagcactcaatcggacatcttagttaaaagttattgtcgtgtgaatatgctacgagcatctattttcaagtacgagcatctcgatatactatgggtcccaatcggacatccgagttaaaagttattgtcggtaatattctctaagagcttatgttatcaatatcgagcgttactatatatatctggacttagtcggaaatccgagttataagttattgtggtttgcatttgctacgagctcttgttttcaatctcgagcg

SEQ ID NO: 75489 - DNA, 453 bp, Glycine max
agcttagagagattcccgatctgagagggtactgtttctttggttacaacagaactcaggtcaagatacaccaaatttgagagattcccaatctgaggaggaatcttcccatggaatacagtaccagagaggtctatgtgagtcaaggagctcattgcacaaaggaaagaaggaattgccataccttctccaaggaaataattgaagctcaagtcaagatatcgaagcttagagagattcccgatctgaggaggaatcttccccatgaatgaagtaagagcgaggttgaggtgagtcaacgaagtcattgtccaaaggaaagaaggaattgacataccttctccaagaaatacatcggcgctcaagtccaagtaattcaaatgctttatatcagccagacaaggacttatctctcaccaaagatccatctccgataagcttcccaattgtagt

SEQ ID NO: 75490 - DNA, 481 bp, Glycine max
  unsure (1)..(481): unsure at all n locations
ccgaagaacttagctacactgganatcctgagccttgtggtccctctgtaacaaataattgcacaaacaaggaatggttgagggagagtgcttctgttggacaacgtgatggtaatttctttggaacatcagagttctatattggtatgggagttggatttgcagcaggattatggggttattgcagtgtttgtttcttcaacagaacttggaagcgtgcttattttcattatcttgaccacttgagatatcttgattatgtgatgatagatctgaacgtaagaaggttacttgggaaattatgagtttacatgttaactgttatgagtgagagacattacaacgtgttagtctagccattataaatgagataaggttaccatactatgtatctggtcatctgtggtggtctgtctgtttggtatcattggtataaatgtcttaatgtaagagaagtcacgagctgaacttatatcaatct

SEQ ID NO: 75491 - DNA, 444 bp, Glycine max
  unsure (1)..(444): unsure at all n locations
agcttctataaagatatgtctggactgcttctctcattataccagngattccttcacctactatattgaaaagcaagggggctagaggatccccttgtctcaagcctcttgtagggacaaattccttagaggggctaccattaatcaaaactgatatgtgtgctgattggagacaagctgatatccattttctccattttcggcagaaacccaacctaaacaacatttaatccaagaaagaccaaaacactgaatcatatgccttttcgaaatccaccttgaaaatcatcactcatcactggcttcttgcttctcattgcttcctcaaccacctcattgaggatcaagataccatgaagaatatgccttcctttaatgaaagctgactgcctttcatcaattagcccatccatgacagacctcaatctgttagacaacagcttg

SEQ ID NO: 75492 - DNA, 444 bp, Glycine max
  unsure (1)..(444): unsure at all n locations
gacactataaaactaagctcctatccaggcaattctgggtggtgaagctccttcttccttggcttattccctagtggatggtgcctcccctctcctcttctcctttgccttccgctgcatctccatggtgaaaagtcaccattgaaggacctcattgaagctcatagatccagcctccatagaagctccacaagcaagcttccatcagtaggataaggtctgaaaatccctttcctgcgcatcttcccataagggaatatgattcctcaccaagtcaatgagtggtgctacaagtatagaaaaatatgggacaaaccttctgtaaaagtctgttaagtcatggaagccccatatatcccttatacttggtggagtgggccactcangaatgacctntattctcttaggaatccgttgaaccccttgatcactatttacataatt

SEQ ID NO: 75493 - DNA, 422 bp, Glycine max
  unsure (1)..(422): unsure at all n locations
agcttgtaagtaataaatattatggagatgatgaattatttgngaaaagtgatatttattatcttagaagcggaacaggggccttctttgactgtatagatttctttacctattagctttggcctatcttaggtttacattttgcaaattcttatattattataatattcgatatatttgtaatgctttttattctatatatatatatatctctttatgttcgtgcatgtgtatgcatgaatgcgtgcatgctggtaagtatattcataaatatctattaaaaaaattaaaaaaaataaataaattgaaaacaaataaatttgaagcatattgtattagaacaaccttatacttatatataattaaagttatttaagtaatttcatattacaggtaccatataagttgagttattagcctat

SEQ ID NO: 75494 - DNA, 374 bp, Glycine max
agccttttggtgtcgatgtctccaccgtagacatcatcggcagcggcagcggtagcggagagcagcatatccgggtggatggagccatccatggagaggctgtgttggtgtcgaaccctactatgcctctcattattactattattactccttatattattattattattattattatccatgctgttgtgttgaggtggatgacgaagatgaattggatatgaatcgagttgatcgaattaacgtatatggaaagcaagtcgtttcatctgggagatcaacgtacaacgtgacgtcctctggtactggtataatcttcaaactggcgcgcctgtgccctctgttcttctgtggattctccggcatatccctta

SEQ ID NO: 75495 - DNA, 356 bp, Glycine max
  unsure (1)..(356): unsure at all n locations
ctggacgcattggtaacttgttatcccatctggccttgaaccaaaaatatgtacctgtcacaagggtctgcggtttgtgctcctctactgaccaccatacatacctttgcccttctatgcagcaacctggagcaattgaacagcccgaagcttatgctgcagatatttacaatagacctcctctacctcagcagcaaaatcaaccacagcagaacaattatgacctcttctcaacagatcaaccttggatggggaatcaccctaatctcagatggtctagccctcagcaacaacaacaccagctatgtgtttggatgaggaatttanagaattctanggaaatcanattcacagca

SEQ ID NO: 75496 - DNA, 459 bp, Glycine max
  unsure (1)..(459): unsure at all n locations
ctgcagctgtactaggaaaagttatctgttgtttctctttatatcgataggcacctgaacctgatgggtattataaaatattttntaagatattttgggaaaaggttggagatgatgtttggagatttgttagagaagcgattcagaaggtatgtttgatgtgtaggctgctaacactattattgtcctaattcctaaaggtgattctcaaaaaacatttagagtgtgtttggatagagaattttaacacaggagagtaatttatcagagaatttaaatttttctaatctagaattcattgtttggatgttttttttatgacagaattaaatttttggaatttaaaacggaattctaacaactaaaatgtaaatttcatttcttctaaaagtgnatattaagatatctcttataaaaatctctaaatgtcccgttttcttataccttcgtcttctttct

SEQ ID NO: 75497 - DNA, 407 bp, Glycine max
  unsure (1)..(407): unsure at all n locations
agcttgaatgcttgtttaattacaacgcgttggatgttgaacgattcttttattggaagttccatatccttggacgcctacaaagacatatacatatgaagtttaaaatagggttttgtaatcaatattttatttgatgacgtgtttcctacaaaattcaataaaatccattagttcatacaaaatttaatataattattatcattaaaatcatagattttgaaggggttagagaccatccaataatgtgtagttttaacaaaattatctaatgagataaaagatataaaaatatttataaatntttatatttttttgtggtatattaaagtacatttgtaattaaagtacatttgtggtattatttatttataaatatttataactattcttggtgcatgatatac

SEQ ID NO: 75498 - DNA, 519 bp, Glycine max
  unsure (1)..(519): unsure at all n locations
gctgtgtgatgtggactcatgtngacatgacagtttgataatgtatcattgataatgtgtngatatgatatngatagtgttgtggttggttaatatgtttgttggactgacatgttatctatatatcaatgtcccattaataatttttattaaagattaacgacaaactatcaataaatcaaaataattaaattttaaaaatataaggattaaatgtgtaataaaaaattctaatagattaaaattgtgcaataaaaaattatagaaactagaagtagatctaagccaattaattaattggataatacaacaaagtgctcaaatcttattagatatttatacaanagcatntgatgctaataagacatacaaattaaactttntaatacagcattgcacggaaatattntatgcataaaatatgtntgctaatatacaatagttacaatgaacttaagtntaatatcgtatccaaagattaaatgtaattccaaaatgaatccaatttacaataaactg

SEQ ID NO: 75499 - DNA, 475 bp, Glycine max
  unsure (1)..(475): unsure at all n locations
agcttaggtttccagttgcatatgatgtatctcattcttgtttgctatactaaaatgtgcaggtgatacaagccttttgtgattatgatttaaagattagaatcaacccactccttgttttatgaacccttttcgagcaagggaaagctagctccaaagaanatgatgacgaagaaagagtgaaatagaaatataaactaggttagttattctaagtctctctagagcaacacaatggttatatatagagactaataacattccttttcggactaccaatatgagttgggtcaaacacctttgcttggttatttctttttctcttctctatcttttcttaagtatgtgtgtactcgcatgatacaattatggtggtgaataagtgatgatgctagcctannagattagaggagacatgaacaaatcatagataggactcctccttctagatgattggtcttctaacttcttgcaa

SEQ ID NO: 75500 - DNA, 514 bp, Glycine max
  unsure (1)..(514): unsure at all n locations
ctatactcggaaatgacgccanaagggtatngaatgaagaacatgatctaattagacagcanaacctatactacctaaactgggagcaacaggacaaacaattagtgtctttggcttctaccatcaatggcaccgagtcttcacacaaaataatggttggaagatacttgaaacctaaccttttagaccaaagccaaaatcaaacaactaaaacataaactaagtgtctaatagataggagcaatgaatgactatatntttgaaacataatcatagtaacacgaatgggtaagaaaaactaactggttttgaaacaaaattaactataatgacttagtatcgtcttagtctaatttaaatctccaaattcacagtaacacgaatgggaacaaaacctattgtttggaanaataatcatattgactagtcttagcttagtcaaatatcaatcatatttaatatctaactatgggtntgaaacatgagaatagagacagaccactgaacaatggat

SEQ ID NO: 75501 - DNA, 425 bp, Glycine max
  unsure (1)..(425): unsure at all n locations
agctngtcagntattgtgcccaggtgctaatgtaccttactcatttgctagctanggcttatattgaccagtcagggttatcaactcttgttacaatgtggtatcctaccacaaataaaggcttagtgaatgcctctgttgagaggtgtcactatgagacatcttccttccacctgcctatcaaagagatgatcatcactctggattatgtgtcttgtctattgcacttgcctgtgacaggtagacccattgatcattctcattgacctttgacagagacaaagtgaagatcctgataatgactcatcttggcattcttacatagacagaggttgcatgcatgatgttgacgtanctggcatacttttatcatagatatgttaagtctggctcctatgtttgggctgncatgagctccactcatg

SEQ ID NO: 75502 - DNA, 438 bp, Glycine max
  unsure (1)..(438): unsure at all n locations
gtgaggatcatcaagtgtgggacttatgtttgacgagtcttatgtgcaacgcatgtgtagtgctcttgcatacatatcactcatcatgggtggcatgtactggagacatcgtgccgtgaatcagtatgactaaccaagggcggaccttgggtnttgcaagccctttggaggattgactatggaattgtctaaactgggtattgggcgccatgctgttgcatacatgtcactcaccatgggtggcacatactgcagacttagtggcgtgctcttgcgtacatgacactcggtgtgggtggcatgtactagagacgtagtggcgtgctcttgcatacatgccacttgttgtgggtggaatctactaaagacttaaaggtgtgctcttgacgacatgtcacttgctgtgggtggtgtgtattgcagacgtaatggcattct

SEQ ID NO: 75503 - DNA, 468 bp, Glycine max
  unsure (1)..(468): unsure at all n locations
agctntgaatgaggctgaagaagctgctgctcatgttcaacaagatccggtggagattaatttatctcagcctcatttgtcacaagatagtgacatggaggtccctgcaactattgttccaccaatagcaaggaataagctagccataacaagagccaaaaaaaggaaggttgctgataaagatgatgcagaaaactgaagaaccattttttgttgcattttgaaggttgctgaagacccatnttttgttgcgcatnttgaanggttgctgagttgaaggttgctgatgaagaanactgaagaagcattntttgttgcattttgatattaggatgtgtagttgtatattttgaaagcttcactggcatgtgaaatgatgtcaaatattaggatgtgtagtngtatagtttgaaggcctactgaacaattgcttctaactaccatgctntgggatgtcaaatattatgt

SEQ ID NO: 75504 - DNA, 432 bp, Glycine max
  unsure (1)..(432): unsure at all n locations
ctttactatattcttttatcttatatnaagaattttgctcanaataccactatgcattaaatgacaaggggtcttctagtgaaagctctcatcgtggttcgccactttacatttggttcactagatccacttctgtattatgatcttgttagcaagttttattagaaaatcaaataggtaatttgaatatgcttatgtaggaagttanntactttaagtggttataattatgtgatgatcacaaactttttaatttgatactccatccatgcataactaaattcacaaaagagacatnagttattttatctgtgcatgtgagaatgatagataaatattaactattaagttntattgtgatataatgatatgatanagaaaatagaangtataaaattctacacttnttttaaacaaaatatcatgtacttt

SEQ ID NO: 75505 - DNA, 478 bp, Glycine max
  unsure (1)..(478): unsure at all n locations
agcntttanaatntataacanaagaactatgattattgaagaatctattcatggttgttgttatgagactaaccctataaggtcaagaaaggaaacacttgatgatattacagattctttagaagatatgcacattcataaagaagggcacaaaggcaaaggaaatggaaataatgaagactctcatattgatgaaactaaaacaagtacaaatacagatcttctgaaagagtggagaacttcaagatgtcatcctcttgataatatcatcggtgacatatcaaaaggggtaacaactagacactctatcaaagatgcatgcaataatatggtttttgtttcttanatgaacctaaaaacttanatgaagcaataattaattatcattggatcattcgtatgcaagaagagttgaatcaatttgaaagagatcaagtgtgggaaatagttgatatacctaatgatcatccagttatac

SEQ ID NO: 75506 - DNA, 260 bp, Glycine max
  unsure (1)..(260): unsure at all n locations
gaatctcacatttnccacatatgtctatctaacttcacataacctaacatttacaccaagccatcacacactagatattcccaggtctttagactcttccaaatctatatgcgaatctaggatctctatcatacattgtaccccatggcacaccatagtatatgactatctcacttatacatagggacgtcaacgtttctaaagagagactaatattgatggggataaagtgagctgatttattctatctgtaactataa

SEQ ID NO: 75507 - DNA, 426 bp, Glycine max
  unsure (1)..(426): unsure at all n locations
agcttgngtgaagcttgagttgtaagatatataacttacactgacacaatacttgtgttgtgagaatatagtggaacttggtagtttgctcataactgaatatagtctcagaagtagagattgacccaagagttcgaatttgatttttttntttttttggaaatctcttatgttttacaaatttgttttcatagtctaaacaagtttctgataatctatgttataaaaagttgttttctcttgatgataactttgttctttatcaaaaaggctttaaacttttctaaaatcacaattcaatcccatctcttaataaaatcacattataattatactaatatttcctgtancaactaataataagtattaaataatttatcgcgttgttgttactttataatccagatgcatattctacttttatat

SEQ ID NO: 75508 - DNA, 239 bp, Glycine max
  unsure (1)..(239): unsure at all n locations
tcatgaaatctcttcactttctcctttgtagatcttgggagtctcataagcttttaagaagaacctcctcagttctttgcattaaagcttcctttccatacctgcttcatcaaatgccatgttacaaaccttcaccgcccaataagcacagtgctcaatctccatcataaggtggcatgccttaccaaaaaccaccttatanggagacantccccaacgggtgtcgatagcgatcatgt

SEQ ID NO: 75509 - DNA, 415 bp, Glycine max
  unsure (1)..(415): unsure at all n locations
actaagcttgtattgatagatatcgagtttgtgttcaaatctgncatattttatgatgaagacatataacatgcaatggaagatgcttggtatgaagcagacatattacctgaatccaatacagttgcacatgagaccctggtgggacagttcacaattggaagtatgacatgtgcaacatgtgtaaattctgttgaaagtatgttaagaaatcttccaggggtcaaaagggctgttgtagctttggctacttcatcaggtgaagttgaatatgatcccagtgtaattagtaaagatgatatagtcaacgtaattgaagattctggttttgatggttcatttatagaaagcaatgagcacgatacaataattttaggggtggttggtgtgtacagtctgatcgacacaccaagtt

SEQ ID NO: 75510 - DNA, 387 bp, Glycine max
agctgaataataagatatttctaatattgaatgtgcatcacgaaaaaacttcttctgttgatgctcattaacgacatgatggataatctcacctaccttgaagttatcaatggctagtaacgtttgtttagtggtagcaaaagatcatatgtgcattattgttggtctttactggcatactaaatagagtgaaacctcttatttgtctctgttctaacactgcgacaacacacttattacttaccccactcattatttcaaactcttggctccaattaggggccacaatcactagggcttgacccaaccttcctttctcgggtaaaggctgcatacattttcatacacttaaaacacatctttgttcatatgtgcttaaagttggca

SEQ ID NO: 75511 - DNA, 355 bp, Glycine max
  unsure (1)..(355): unsure at all n locations
ggatgtgtgctctatcacgcaagatagcatggtcactaacagccgtattctcaattaattccatggcttcttcaggggtcttcaatnttactttttcccctgcagaagcatctaatagctgcttggcttgtggccttaacccgttaatgacaatattgagtcggattggttctgaaaatccatgagtaggcgtctntcttagtcacccacganatctttccaaaccctcactcaaggactcgtctggaaattgatgagatgatgagatgacagctnttccttcaacaatcttggactctgggaagtatttcttcaagaatntntcaaccacttcatcccaagtcttaagactgta

SEQ ID NO: 75512 - DNA, 197 bp, Glycine max
cttgataaaaatttatgcatcattgtgggagacacgtaagtaatacgtgcttcaacccactggccttgaggaacttaaagcatggcatacaacaaaaactcggcatgctatcggcatggatgtcttgattcacttgaattgccgcgggagtgataacctagtacgtgtaaagatctgtggacgctctagcctgcctg

SEQ ID NO: 75513 - DNA, 472 bp, Glycine max
ttgttcaattgatgaaatctctgtacaatgcatttctagttgttctctgagtgcatacttgagtgtcgaggaagtaatctcaccgctttcatgtcgcgtacttggagatcaatgagaaatgctgctgaaatctcgtctaatctaacaaaagagacttaaccttgacgtatgaatctaccataaaaatatgtcttcttgaacggatacggtcacatcattaataaaaaaaagagagattttcatgcatcgaataactttgtgagtatcacagagttattatttagatggatcgacgttgtatgaacgaaagtcgcatgagccttgcatatgacgaaggcgtggaagagttcttgcaatttgcttctaacagaagtcgaccacgtgacgacgaggaatattcttgtccttgtataaatcgttgaacacgagacgaccaatactcgatgacatactggagcatctgttatgtgat

SEQ ID NO: 75514 - DNA, 441 bp, Glycine max
  unsure (1)..(441): unsure at all n locations
agcttgtagcaaattcgaacgacaataacatttcactctgaagtccgattgagncccgcaatatatcgagacgctcgaactntataaccgaagctcggagcaaatttgaacgacaatgacatttcactcggaagtcctattgagtcccgtgatatatcgagacgctcgaaatttaaaatcgaagctcgtagaaaatacgaacgacaataacttttcactcggaagtccgatggagtcccgtaatatatcgagacactcaaaatttaaaacccaagctctcagatacttctaacgacaataacttttcactcggaagtcctattgagtcccgtaatatatcgagacgctcgaaatttaaaaccgaagctcgtagcaaattcgaacgacaataacatttcactcggaagtccgattgagtcccgtaatatatcgtgacgctcg

SEQ ID NO: 75515 - DNA, 295 bp, Glycine max
  unsure (1)..(295): unsure at all n locations
atttccagcgtctcgatatattaccggactcaatcggacttccgagtgaaatgttattgtcgttcgaatttgctacgagcttcggtgtaaatttcgagcgtctcgatatattacgggactcaatcngacttccgagtgaaatgttattgtcgntagcatttgctgcgagcttcggttttaaaatttgagcgtctcgatatattacgggactcaatcggacttccgagtgaaatgttattgtcgttagcatttgctgcaagcttcngttttaaaattcgagcgtctcgatatatta

SEQ ID NO: 75516 - DNA, 364 bp, Glycine max
  unsure (1)..(364): unsure at all n locations
tttggataaaagtgtaaactacttattaattagaatattatgaatcattggttggaatattgaaaaaaaaagacaacctgacaaccagctgccctgaaggaactaaaatcatggcattcaacaagaactctgcatgcttcctgcatggatatcatcaataacttgaatagctgcgagaatgagaatctagttagtataaggagctgttaactaacttgcatagctggaagactaagctcctcaggtacatgccatgctcgatctttctcgaaagttgacaaatgctctggcccacaaagcaaccgatataagtatctgaatagtagttccanattactatcaattactgcagatggtcataaac

SEQ ID NO: 75517 - DNA, 502 bp, Glycine max
  unsure (1)..(502): unsure at all n locations
acttgctgttctcctttctctctcataacatgcttcttggcctttcgggggatgttaaaagttgaattgggaatttgttttatttgtattacagttataattagttaggagtagttacaaaattagttagttagctntacaactntgtataaaaactcattttctgtactttgtacaaaccaatttcaatgaatactcttcttaataatttgtgaccttaatgagttggccatcttttgaatgatgtttgatacatgtcagccagtgaagaaatatgtctaatgaataaatcnttggttnttgaacttcttattggtcaaatttgctagctgtactctcataatgtcatgtaaacaaaataggctctanaattttaaatataaaataaaatccaatattcaaatattgtacacaacacttataatataattataaaaacaataatattataatattcacctaaagttacataaaggctacatatgaatataatntcacacta

SEQ ID NO: 75518 - DNA, 422 bp, Glycine max
  unsure (1)..(422): unsure at all n locations
agcttcgggtacgaccatcgatcaaattggcgccattgtcggttatcagtgtccaatggttcataatagctagtgtcgtgttagtgtttaattcttgtgttcgtgtttaattcttgtgttagtgttagcgttgtgttagtgtgtgtgttagttagtgttgattaaggtcttggtattttgattagtgtgtgttctattttaatttttctgttaagcgcttccgttgtttcagttttgggtgtttngctgtgaatagtgttttgcgaccacttttgcttgcggcaaaatagatgagtagtggaaatcatgtagcaacggattttagtgaccacccttgttgaattaattangattntttgttttaatagctagagttgttatattgggctgaatttctttgggtcacttatattgacccatat

SEQ ID NO: 75519 - DNA, 502 bp, Glycine max
  unsure (1)..(502): unsure at all n locations
gagagaattggctctnctgaaaaatgattnttttttttanaaagcaatggcacatgtctcattntaagtggagcaaaaagggcccacctttntcctttgatttgacttcatactcagccacaaaggagaaaagttttgacctgttggatgctgaaatcctgcctcagtttgcgtgctgcctctctggttccagttccccgcgtttctctgcacccgtcggggcctattntcgaaagtatgcaatatatatatcaaaatgctcagaatgagaccctgagcctggttcagaggttggttttgttaaattttaagttgcacgcaaaatgataattnttttactaattaattgtgaattaatctataactgtccagttatggattactctntgtcaattagtttaccctgcgtatctntcccccaatgtacatatttctaccaagaatatatattatatacatacactaaataatacatacatatataattatttagatgtaacac

SEQ ID NO: 75520 - DNA, 476 bp, Glycine max
  unsure (1)..(476): unsure at all n locations
agcttanggtaaattaggctaaactttcgtaagcttcttgagctgagtctattcttacaagagggatctgtggacgaaactcagtttaagttagtctaaacctaagagtgttgtctcaattgggcttagtccaacaagagggatctaatgacgaagcttggattgattcngtccaatgagggatcgaggtttattaatttatgctgtagcatagaacacaagagcatgattgattagagaaatatatttatatgcatcaacttgtttgtgagaaagatccaccatttctacctactgctgtcacttttacttactttgcattntatagatttaggctaanagtttaatttaaattttgtttgaaattatcaatcatacatgttctctcaacaatgcttcatttttgaacttaattcaagctaacgttagttccctgtgttcgatactcggattcatccattttatattttatatac

SEQ ID NO: 75521 - DNA, 501 bp, Glycine max
  unsure (1)..(501): unsure at all n locations
atgcctntgtcaacctagtaactcagctggctatgaatcaganatctacacgtgttgagagagtttatgatctatgttcttctgcagatcaccatacagatctttgtccttctgtgcaacaatctaaagcaattgaacagcctgaagcttatgctgcaaacatctacaacaaacctcctcaacctcaacagcaaaatcagccagaacagaacaattatgacctctccagcaacaggtacaatcccgggtggaggaatcatcccaaccttagatggtcgaatccttcacaacagcagcaacaacaaccttattttcaaaatgctgctggcctaagcagaccatacgttcctccaccaatccagcaacaacaacagcaacagccccagaaacaaccaaatagtganggctctccgcaaccttcccttgaagaacttgtgaggcaaatgctatgcanaacatgcagtttcaacaagagaccagagcctccattcagagcttaac

SEQ ID NO: 75522 - DNA, 439 bp, Glycine max
  unsure (1)..(439): unsure at all n locations
agctngcacaacaagtaattaaatctgttttattgttttttacaaaacgaagtaactaactaactaattcttacatatatagagttactactcataaggaagggatgaaccttaattaggcccatctaatctacctaattaaactaattacacaaaacanagcccaaactcatagcccaattattcgagtgcagaggttctaaattccaagcctaatntgaccctcaagacaacaaaattgacccaagcttatttgtgacaaaattgaagatgtttttcttagatttccagggactactcacatgttccattttgagttctttagtgtcctgtaggccttgcccaaggaagatgggccanataaacataaaaatccgaaaataaaccacaattattaatcaaactcaatgatttgcctatacaaaactaagtaaagtga

SEQ ID NO: 75523 - DNA, 410 bp, Glycine max
  unsure (1)..(410): unsure at all n locations
agctgccacccagctcgcacaggcgagctatgttgttttctctagaaggcaccgccttctgngggaacttcctggaaggcccaagtgggcctgattgctatttgaacccccgctgtttactaaatacacccctgcctttttttgctgattcattttccgtaacgttacggaactttacgaatttcgtaacgatacttgttttctttccgtaatgtcacagaaccttacagattacgtaatcatccctttgttggctcccgggatgttacggaacttcacagattgtgcaacaatgcttcctttngactttcggcatgtcacggaacttcacagattgtgcaacaatgcttctctttgactttcggcatgttacgggaacttacaaattgcctaacgatgggtgccaagta

SEQ ID NO: 75524 - DNA, 383 bp, Glycine max
  unsure (1)..(383): unsure at all n locations
aatctacggtagaagtcagcatactggggaaataagtttgggatatagctcttgactcccataaccccttgcatattggagatagtggatgccttcaaggaatgaacaanggcttgtaaggaaccaatagtaatccatacattacctttccccataatattcattctttttgcagtttcaaagaagtttagtgccaaaggaaaggataaatggacaataatgactctacattgtccttctcttantttctcaagttgtggggacaatgaagaagaaactagangtgggattgtatagcattgcttaattctgtcccaatctgtagagctcagagagtgagataaatttagtgatgatgagctcatctctatatatagtatata

SEQ ID NO: 75525 - DNA, 456 bp, Glycine max
ttaagtcacctgcggcatgcaagcttgagatagatcttatcaattactttatttcattcttaatgcccatatcattctcaatcagtatttcatagaatcatagcccctcttccctctgtacaaaaccaatttttcttttacaagtcctttaaacaaagctagtatcgaaacacaactttggtggtttcagtatcaattgacagcagtcactgctgcttgttccatgccttgaatcctagctcagtccaaaacactatttcattacaccagattcctgaacaatctcttctccacaatcattgatgtcaacccaaaaccaaattcttaaaatttcggtttaagacctaattcaaccctacaaaaccaacttatatagtaagaattgcctaaaccttattagactacattggtcatatctctagtctatgtgagatctcaacatacctatcacaacac

SEQ ID NO: 75526 - DNA, 305 bp, Glycine max
tattatatgaatagtttcagtgtgctataacatatggtgtggggggtgctttaaatcaagtataattaattttaataaaactgattttaaacctctgattaaacataattaaagtggatattctaaataatctaaatttataataaaatacttacataatgcaaaaattaatctttgggtcaaataaacatgtctataagtcatttgctaagtttttttttcttttggtaaactataataagctaagttaatatacgtatatgtataatttgaattgatgacacactattgtaaatcaataattt

SEQ ID NO: 75527 - DNA, 464 bp, Glycine max
  unsure (1)..(464): unsure at all n locations
agcttgacaaatcaaagtaaaaaaatgaaagtcatgtccacaataaatgaaagtaaaaaaaagagttctttattgcagagataaaacagagtcttattacagataaaataataaaacatacatggtaaaaatgacatagataaggaaaatactttgtaaatgataacattgaactaaacttcaactggaaaatcatattcataattggtagtttgcaaatgataccattattagttgcaagagagtatgccgtatcttataatttaaatgaggcagttgcagtgggtaaacaattgaaatgctgaatctgtttgtttgacactttttatttgattggtaatctacattactaataatggttaccattattagttgcaagagagtatgccatatcttataatntanatgaaggcagtgcagtggtaaacaattganatgctgaatctgtttgttgacacttttat

SEQ ID NO: 75528 - DNA, 216 bp, Glycine max
  unsure (1)..(216): unsure at all n locations
acacaactataccataatcacgaagaaacanacgatcaagagttgccggtgcaagagaagccaagctttcatagcgaagaggtctacacgatattttttgtccttntagcatttctgtctaacatctgcactttcaatacttctaattctcatactatcananttgtgttgacttgtcacttctaatgtgacactgcatcttcaagaatggaacag

SEQ ID NO: 75529 - DNA, 477 bp, Glycine max
  unsure (1)..(477): unsure at all n locations
agcttatataacttacacaatctattctattaattattttagacctttagttaaattctaatataagtgaatntataatatcttttaggcattattcaaccaatttaattagactcatgcaatctgaaattgttttaacttgaaaagaaaaaaaatgagtaagtntttgagacaaaaactaacgctagctactagttgatttgctactttagatgtgaaatagacaagcaagaagaaggtaaaaaagggatgacacataaaggtgaaaagggaaggttggtattttcattaaaacatttngattgtttcctgagtntctctctttgtccagtaggcaggcaacacaatcctcttttctatgttaaaatcattgatcatttccactttcttattttcccatgtggaaccacttttgactttagcagaggaagaagaagatctgctgttgttgctggtgagatgtcaactaacctaacc

SEQ ID NO: 75530 - DNA, 482 bp, Glycine max
  unsure (1)..(482): unsure at all n locations
tctaactgtcttctatntttcctttccatctcatccatacaaaactccaatgagtagtcataccttcaacaataaacaagtaaaaatatggattctctccccttaataagtgtttcactcaaataatgaaatcacttgtgtttcacaccatcaagatgtttgatgatgatctcgctactcttgcattttatcactcaacttcctcttaaagttcttaaaagataaccttatcaataatattttttcgacaacaagagaaacaatcaagtgacttagaatttaaagaacaaaagagctaagagtggtgttggatggagaaattntaaattntaaaaatttcaaatacttcaattgaaattctnttatttttcaaaatttgtgtttggataaaanaaattaaaattatgaagatgaaaaacatgatgacaaaaaaagatatgggtggtgtgctagctatatgtatttctctatgctcacacccg

SEQ ID NO: 75531 - DNA, 391 bp, Glycine max
  unsure (1)..(391): unsure at all n locations
ngcttatctatcctcaagncactcgtgactctcatgtatgaatatccaaatctggtgatgtggccacgtggacacatgagctccaagtaacagaaacagctatattccccattggccagctgatactaaattactgatacaggaacagctatcagagaaacaaagttaccggtaaagtaaattaagaagatcattaatggcttctcttgcaaccttagctgctgttcaaccagctgcgctcaatggccttgctggaagttccctctctggaactaagctctctttctagccctctcgccacactggccaatacaaaaacttcaggttccatgcattctcataatanttaattttatatatatatacacgcacgatgaaggggtaaattata

SEQ ID NO: 75532 - DNA, 490 bp, Glycine max
  unsure (1)..(490): unsure at all n locations
cgtaagcataacactgctaaaccaaacaatacttcaaaaaatgtaagagaaaaaaactggaaagatgctaaatacatgacaatagtttaagaaaatgctaaaggttcctacttcatacaacaacatcaaagaagcaatgacgattaaataaataaatacataactaatgaacctaacctttcaagttaaaaactacgatacactattgaggagtggagtcacaactcacaatcagaaagttacaatcagcagacaattataggctaaccaataataaattgaaacataatatttaaggtgtaaaagaacaattaccctgcaagtgagctgagcagaaatgaagcaataacacaccaaccagtaatggtagaggtagtaatcgcaacatagtcaaagaaatacacgagactcaaccgagacacacgtgtgcaacaagtatcgacaagaaacaacccagngtgatatagtacaaacattgaagacacacaat

SEQ ID NO: 75533 - DNA, 373 bp, Glycine max
  unsure (1)..(373): unsure at all n locations
agcttcaacctagaggagacgaaccattcttagtgttggagaagatcaacgacaatgcctacaagattgacttgcctagtgagtataatgtaagtgccactttcaatgtgtctgatctatctctttntgatgcagatggaggagccttggatttgaggacaaatccttttcaaggagggagtgatgaggacataaccaagggcaaggaccatgaagcacttgaaggtcccatgaccagaggcagacttaaacaagcccaacacatcatagagacaaggctggtcatttgtatagctgtcattgatgatgattgaacgcccaagtggagaaagatgaaggcccataggcagaggcactaccaagactactaatt

SEQ ID NO: 75534 - DNA, 413 bp, Glycine max
  unsure (1)..(413): unsure at all n locations
ctcctgagtatgacagtcaccgctttangagcgctgtacaccagtagcgcttcgaggccatcaagggatggtcgtttcgacgggagcgacgcgtccaactcanggacgacgagtatactgatttccaggaggagatatggcaccggcggtggacatcactggttacccccatggccaagttcgatccagaaatagtccttgagttttatgccaatgcttggccaacagaggagggcgtgcgtgacatgaggtcctgngtaaggggtcagtggatcccgtttgatgccgacgctatcggccagctcctangatatccgttggtgttggaagaaggccaagagtgtgagtatggccagaggaggaaccggtctgatgggtcgatgaggaggccatcgcccanctgctatgtatac

SEQ ID NO: 75535 - DNA, 485 bp, Glycine max
  unsure (1)..(485): unsure at all n locations
cgcgatctctaagcacctgcaggctgcaagctgtaaggcttcgtgaaacaatactctgctatagcctgtttatgcttatagaatacgagtggtgttgcttgtagaggcaagaagggaatattgagtggaaccttcaaatgtttaaaataatgggttatggttttacctgcaaaggaaagcaaacaatattaagaggaaactatagaggtttagaatactagattgtggttttcatggcaaaggcgagcaaagaatactgagtggaacctacatagatntagaatattggatataggagcctatgaagacttcacaagaaagaatatcttanttctgtgcttggtcttagtggagaaagtctacaagtatacgaattatacgtatcctatgttgtgacaccctctaccctgacatatatattaataaacaaaatatattataatatcggtaaccaaattcacacgggtaaaaggttcacattcact

SEQ ID NO: 75536 - DNA, 451 bp, Glycine max
  unsure (1)..(451): unsure at all n locations
atggttattttgagtactataaatggcttgcctttttgcgagtttgggatgaacctggacagaaacgctaatctgccattcagcttctagacttccctgatgttagtagggctatgcatctctaatatggtcctgcatttgtcaggtttggcttctattccacgatgtgtaatcatgaaacccaagaactttcctttgccaaccccgaaagtgcattntnttaggttgaggcgcatgtngtacttgcatatttctccgaacacctcttccaagtcttgcacgtgttgggctacgctataagacttgacaaccatgtngtccacgtagacctcgacattcaatcctatatgtttttgaagaattctcattagtcttttgatgtggncctacattttcagcccaagacatgccatgtacagaatacatcctagtataatgtgttttctcatta

SEQ ID NO: 75537 - DNA, 387 bp, Glycine max
  unsure (1)..(387): unsure at all n locations
gcaagcttcttgtcagcagtgatgtccgcaacataattatcatctgctccagtcntcctggcatcatcattactagtaccaaaggtatcaacccccctacagaaggaagctggactcctgaccaagcaacttgtacagggcattggtcgcttcttatcacttcactcatgcaagacattcctacagttntcttaacctcttggagctaaggcaagcacgcgttattattgaaataaattgaacacaactatcctaagaaaaaaaaaacacacaatgcaattaaaaaaaggataaagtaagaagtcctggattgctcctagaagcactttttaatatcattagcttgcgggtagatgccttcaggtggctgaatgcactgaaacatat

SEQ ID NO: 75538 - DNA, 418 bp, Glycine max
  unsure (1)..(418): unsure at all n locations
ttctttgtttaattanttattgcactcataatcatataaaanattgaatgagtttctctaatctttgntttgtgttcaggtatatgtgtatttataagatctattgtcttggctctcctttcattngtttatgtttgagaagaatactttttctttntgaagaanaaaaatacccttttttgctgattntttatttctccacatgacttcatgaatcttatttcttagtgtgtgagtctgtagaatttgtgagttctattggtttgagaagaagtttcatgtttatttctctctcgtatgtgctggagtgttgaagtaattgatcaatctttcaactttgatatgatctttngaatgctagaatgtgagatctggtgatgtagatcatgatctggaaaaatatttgatgttttgtttc

SEQ ID NO: 75539 - DNA, 435 bp, Glycine max
  unsure (1)..(435): unsure at all n locations
agctngcttctacatgaaggcgcatgtttgattgattatagcttcttatctaanaagcttaccttgtgcatgattgatttatcccttgcacccattntaaactaaaagtatgattgtttgattgaaccttgagcctgtacagtttatctccttctatcttgtcttaggttgtaggagagcatcattcataaaaggaaattttggttcaaagaaaattttcccaaatttgggggaattatcgggtgaaaacttgtaatggtaagaaaagagcaacacacacagtcatctaataagcaacaagtaaaaacaaaaaaaaattgtaagtataaaataaaagtgtgtgtggtgctatntaagaaaaagaaaagctaagtgaagaaatgcaagtaatagagttggaataaaaagaaaanggtgatctatggatgaatgctc

SEQ ID NO: 75540 - DNA, 445 bp, Glycine max
  unsure (1)..(445): unsure at all n locations
gaatgtgaatgtatgtatacatgatnttgatgatgtcaaanaaagaatcaaataaggcttcatttgcttcaagattaatacaagattgtttcaacaaacaaagccttgattcaagatttcttcaagatcaagccttgcctcanaatgtagagatttcaagtcatccaaggcacatgtaatcgattaccaatacatgcaatcgattaccaaggcacatganagtgtgtaatcgattacacatcatatgtaatcgattaccagagactctgaatgttggngaattcaaatttaaatgaagagtcacaactgttcaagaaaaacaactgtgtaatcgattacactaattttgtaatcgattactagagaggagtttcaggaatatcgccaacagtcacatcttatcatttggatttgaatggccatcaaggcctatatatatgtgtga

SEQ ID NO: 75541 - DNA, 436 bp, Glycine max
  unsure (1)..(436): unsure at all n locations
agcttaagatgtgactatntgccaataatatcccacttaacattactacatcaaagttgtatgacatcacttatggaatgcatactacatcaattntagaactcatgttgttcaacacaatgttaaatatatgcatatatttaacatcgatatgatntcaaatcaatgtaaaaccctaataaccatttaacattggtcccctttgatttgatgtaagaagtgacacccctggttaagtcaggcacatcttacactatttattgacataaccgatggtgaaagattcccttacctacattgagttaacacaaaccaatgcgaaatgttttttttttataaaaaaggancactttgatatgtattcatcgtccatgtttatatttggaatatcatcttatatttaatcaccatacctattgctatcagttaatttttt

SEQ ID NO: 75542 - DNA, 489 bp, Glycine max
  unsure (1)..(489): unsure at all n locations
atatgcgtgtaagtgaacaaatataacacatccaattacatgaggtggtnaataaaccatggaatgaaggatacaatgatcaaacaacacatctagaggccttctcaagttaagcacctctagaaagggttcgattaatcaaataaactgtagagctcacagcctcaccccataaatgagatgggacattaccatctatcaaaagtaatcttgtcacctctaatatatgtctatttttccttttagccacttcattntgttgtggtgaataagggcatgtagttngatgcaagataccattaaagttcatgaactctattaattcagtcttaaaatattcccctcaattgtctaatctaatgaccttaatatatgtgttaaatngtgtagctatcatctgatgaaaggaacaaaaaatatcacacacatcacttttatgtttaagcaaataccccaggttacccgagtacaatcatcaacaaaactgat

SEQ ID NO: 75543 - DNA, 365 bp, Glycine max
tgcagcttgaaccagctattaatgtcccggtatttgatttttttatgaactaaacgctcattttggagtgccaacatatttaaaagcggctacttccattttttgttaatttggacaaacagctgaaatgactgctctatggaccccagtgtaccactgaaaaaatgcactatagtgcaataaagttggccagctataatggcttagttgggtaaaaaaacaatgtttttttgttagatagaaaatatttggctgaatttatgttcttaaattctaaaataatatttaattatatatataattttattcctaccatatctaaaacgtcttgtaattttaaagttttttttttaaattgggggact

SEQ ID NO: 75544 - DNA, 454 bp, Glycine max
  unsure (1)..(454): unsure at all n locations
gtgcagctggaagaaatctttggcggaaaatttgtgacgaanatcaagaaatgaaagctccctcgtgtgagttaatgctaaggaagaagaaaagaataatatgaaaagggtagtttgtggattntaaaaatttacgaggtgcgggagtcaaattttgcccaagagactttcatggtcttcaattattncattttgttgcatattttattggacccaattgaataaacttaaatatattttgggttcataataaattaaaaattgtgtttttggttcctggtaaagaacacgattttctattttcactcncccttgtactaatacactctcctttctaattttctctcaaaaataccctaacaattaatcttgtaattttgcactttcccatcttgtaatctttatacactgcacagtcaaccatgcacagccctagcgcttcaatgttcgatca

SEQ ID NO: 75545 - DNA, 450 bp, Glycine max
  unsure (1)..(450): unsure at all n locations
agctttntctacaacctnttctccccatttggcaatatataaaagccaaagaactcgggaatcgacacagatataacaatggagtataaggcataaccatccaaactcacaaacaagaaataaccaaaccagaatccaaataactcataacgtcaacaaccacataatgtcaaagcagaaaaggctgagatccaaataccacaagataaataaataaagtacttaacataataatttaaactctaagaaactaaatagccaaaatacacggcttataaaagacatataatcagaaactaaagtctaagaaggcggaggtggtggtggaagatcgaaactctgacgaatgtatccgacatcctcttcaagctgtgtgaggcgaatgtccataccagcanagcgtgtatctaacgagtcgaagcgggcaccaacataagaacgaagacccca

SEQ ID NO: 75546 - DNA, 414 bp, Glycine max
  unsure (1)..(414): unsure at all n locations
ttttcattcagctatcaaatcttaaaatggaaaaaaataaaaattaactaacatatcatcatgtaatcaaataaaattggattctttttttcataaaattaacaccagtattgcatattcctgctagcctatatcaaggcagactgcacacatatatcaaaatagcagcagcagtatgaaagcaaagaggcatccttaataccttgaaggtgaaaaatgctccacacctagatcctcatcccagagaaagatataatcataaatagagactatatctggatgtagaaaaccttttgcannaccacctgacaaaaatcatgaataatantgtagtcgaaaaannaaatcactacatatatagtgagtatgctacaaagaatataaatagtaataaactaccatctttggaactat

SEQ ID NO: 75547 - DNA, 408 bp, Glycine max
  unsure (1)..(408): unsure at all n locations
agctggctccaaccatttgtaaggttcatgatgatcttctcacaaatgcagccccccacagcaaccctgaaatagtagagacacaacactntattatcttaaagacaaaactttaaagcttaccaaattcacaatgctaatcagtaaaagtatataaaatatttcatattgtccactagttagcagtttgcaaggcagggtgacaggacaaaacgtgcttgaatagaaatgcaagtgatagagcaaaagagaggagatgttaattatgtccttgcattttcttaacaggtgtaatgggtcaagctatctcaacccataaaaatcatgcataactctggtgaagataatgtctatatgatgaattgcgcttaaatttttgcaatattctatcaagtgacaagagaaaga

SEQ ID NO: 75548 - DNA, 172 bp, Glycine max
ctatctttacagtctacaggttaatacatcaaattcatgctcggacctgtatgctaatatgggaaagaatcaaatgggacccacatagtacctcacactaacggctttacgttaagtgaccatctaaagccaaggcattcatggataagatccttcaaagtgttcactctat

SEQ ID NO: 75549 - DNA, 455 bp, Glycine max
  unsure (1)..(455): unsure at all n locations
agcttcatctagagttactcgggtctgtgtgagccttatggaatggaggttgatctgtggtcatgctgggtctccgactcgcttgataatagcgaagtctcgtctagtgttttcctcttttggtgatgcattgtcactgatagtctctagagatcggtaaggttacacgaaagtacccttgggatttatcactagaagtggacttttggatccttcccattaggttcctgaattaggggcacagagtaaactcactctggcttgttccttgatcgcatcatgcatctcttcatggcatcataatggacatatcattcctacatttatcatttatcatattcatgcattgcatntgcataagtcattgcattgtcatacatcttcatttagcatgcttttgttctgccaatngcatacattctattttcatcgttcgcatgtttatgtcactcatg

SEQ ID NO: 75550 - DNA, 431 bp, Glycine max
  unsure (1)..(431): unsure at all n locations
acactttcattcaataattcatatgtaagttcttcttgcagaatgtatgaattattcttacacacacatatctttttaatttatcaaataacctttattataaaaattagtagacaataatgttctttctcctagaangtaaacatttttttttctatttcatcaaataacacgaggtttaaaattaacctttgtcttctcattttgattanngtaaatactttttttttctcattntgtaatttcagtatttgatcaaacatagaggtaaactgatttatttcgatccattcaatttttactattattatgtaatgggtatgacttanaaataataaacacatatntagttntctttgcgattcattctagtttgagtgactaattctttctcttttattcttcacatgattataacagatgtagattca

SEQ ID NO: 75551 - DNA, 438 bp, Glycine max
  unsure (1)..(438): unsure at all n locations
agcttacaataaattgatacgctcgatattaacatttttatctctcgaganattcagatggccataacttttcccacggatgtccgattcgggtgcataatatgtcgagagcctcgaaattcaacaacagaagctcttgagaaattcaaatggtcataacttttcagatgtatgtctgattcaggcttattatatatcgatacgctcgaaattaaacatcgaaaactctcgagaaattcaaatggtcataacttttcacacgaatgtccgattcaggcgcataatatgtcgagaggctcaaaattgaacaacagacgctcttgagaaattaaatggtcatacttttaacactgatgttcgatcacgcctataatatatcgatacgctcgtaataaacatctggaactcttgagaaattcaatggccataactttcaca

SEQ ID NO: 75552 - DNA, 368 bp, Glycine max
  unsure (1)..(368): unsure at all n locations
gaattaaaacaaactaaatgactgagtgtaactganaattgtggcaaccagaagtcacccccaacagccaacaagtcagccaccatttggtctcccaaaaggctgatgcctatngtgccaattgggcccttattacaacttgaactaaagcccttctagttgattaacgcaacacatatttttggtcagccaactttacaaggattgggccattatttaaacaaactanacactctaaaattgaaataaagtggtgtcatttagtcctccatttgggccatgatacaactcacaaccttggactnttctccttganacttgngcttgtattcaatagtatggacagcactttgtgaagagcttccttg

SEQ ID NO: 75553 - DNA, 434 bp, Glycine max
  unsure (1)..(434): unsure at all n locations
agcttgcagactaagtgctcaccaacactatattatatttcctcangttggttcatgtaaaccttttcttctagatcaccattcaggaacgccgtttgcacatccatttgatgcagctcaagatcaaaatgagctactaatgccaaaattactcgaagagagtctntcttagatacaggggaaaaggtctctctataatcgattccttctctttgagtgaatcctttagcaacaagtcttgccttatgtctctcaatgttgccttctgagtctttcttttgtttgaagacccatctacatccaatggcttttacaccaacaggcaactcatcaagatcccaaacttggttagatgccatagaatccatctcatccctcatagcattataccacanatatgattccttataactcatgggttgtgaaaacgtctc

SEQ ID NO: 75554 - DNA, 461 bp, Glycine max
  unsure (1)..(461): unsure at all n locations
cgcgttcctaggcctagaatcttattcnggcactcattntaacctctacatgctgtccctacacatataaaacagccacacaatccanagttcacaaaaccatgcccatatgtcattgaggcatntcaccgagcacttggtgggcgcatgtttangcatgaatagcaagggaatgggggcaatgtggcatgccccatagcttcagaatgcaccatangcctagggccatcccttacaaccctctaactcacaccaatcaagcatgaaacanagccaaaattgccccacagaattgggcatattcacacaatgtagagcaccaaaagaagaccaagaaacatcaatggaaagctagaaagctcaagaatgagatacttacttgatggagggagtaacaacactaagaatggaagcaaaagcgcanaaatagtggcctatggtgaaaatccataattcccatg

SEQ ID NO: 75555 - DNA, 451 bp, Glycine max
  unsure (1)..(451): unsure at all n locations
agctnggttcgaggtacttacccgttgattatcgtttatcgatgaagaacgaatgaagaacgtcgaagaacgattgaaacctttgcgagattcctcacggaaaacgttactgaaacgtttcggaagcgcctcggcttagattntcttcacggaaacaatttttccaagcaaattcgaaagagagagaagtgcctaaggggctgaacccctttcttcttcacttcctcccctatttatagcaaaataggggaggtggttgccgcccagctcgcccaggcgagcagggttgcttcctccacaagcaaccgccttctggaggaatattcccgacggcccaagtgggcctgtgtgctatcttgcaccccattttactaagacactcccctctgttgtttttggtgattcttttcgtaaagtaccgaactacgaattcgtacgaacttgttctttc

SEQ ID NO: 75556 - DNA, 450 bp, Glycine max
  unsure (1)..(450): unsure at all n locations
agctnggttcaactgagtagccatatgccccatcttattttcagactctgaatggaggctcttgtctcttgctgaaattgcatattctgaatggtcatttgcctcactaactcctctaaggaaggttgagatggggcctcagttgcttggtgtctttgttgttgttgttgctgttgctgctgcattggaggaggaacatatggcctacttggaccagcaacattctataaaagagggacaggctgttgttgttgtggaggactcgcccatctcagaattggatgattcctccaacctggattgtatctgttgcttgaaagatcataattattctgttgttgttggtnttgctgctganggggtctnatatanatgtttgcagcataagcttcaggttgctcattgactccatattgctgcanagaaggacagagatctgtactgtgatct

SEQ ID NO: 75557 - DNA, 468 bp, Glycine max
  unsure (1)..(468): unsure at all n locations
cgcttgtggagcttctatggaggctggatctntgagccctcatgatggtccttaatggtggttntccaccatggagatgcagcagaagacaaaggagaagaggtgagaggaggcgccatccactanggaataagccaaggaagaaggagcttcaccaccaagaattgccttagataagaaacttgaagaggatgctntaatggaggaaaagaaagagagaaggggggagcatganattgaaggaataaaagagggaaagaagtgcaactttgaagtttatctcataagactttcattcatcanagttacaacaagtgttacacatgcttctatntatagactangtagcttccttgagaagctntcttaagaaaacttccttgagaagcttctttgagaaaacttccttgagaagctagagcttagctaccacacccatctaanaactaagctcaccttcttgagaag

SEQ ID NO: 75558 - DNA, 480 bp, Glycine max
  unsure (1)..(480): unsure at all n locations
agcttctntctcttctcatcaggtacatgtntgaatcataaatacccatacaccctcacatgcttcactgttggcttcctttgtgtccacacttcttcaggcactttattctttagcttcttagttggactcttattcagtatatagactgcagtggacacaacttctcccaaaaattctgatggcaggtgtttctccttcagcatacatctacccattttcattacagtcctattcctcctttcagccagcctattatactgaggagtatatggagcagtaacttcatgcattatgccatgttggatacagaaaaattcgaaatcctttgatgtatactcccctccaccatctgttctaataaccttgattgcttttcactttgttttcactcaacactttaaactccttgaatatagaaagcacttcactcttggcttttatcangtacaaccacatcatcctactaaactcatcaat

SEQ ID NO: 75559 - DNA, 483 bp, Glycine max
  unsure (1)..(483): unsure at all n locations
ctagtctataatagaagcatgtgtnnaccctttgttgtaacttgatgaatgaaattttatgagatactacttanagttccacttctttccctcctttattccttcaatttcgtgctccccccttctctctttcttttcctccattaaagcatcctcttcaagcttcttatccaaggaaattcttggtggtgaagctccttcttccttggcttattccctagtggatggtgcgctccctctcctcttctcctttgccttccgctgcatctncatggtgaanaatcaccattgaaggacctcattgaagctcanagatccaacctccatagaagctccacaagcaagcttncatcacttgatgataagataaaataatatttattgctaatatntatatctcaccatgacgggagtagatgctcanatggatgggcacagatgaaataccactgngcgacatgaaagatcaatgtatatatatta

SEQ ID NO: 75560 - DNA, 481 bp, Glycine max
  unsure (1)..(481): unsure at all n locations
agctntcacaagtaaaaaaagcacaatatttatagctacaatgcttccccatttacggagtttaaagttacagagggggagaagtgggaaaaggcaacaacaatcaacaatatgatatctttctgaaaatgaattgtgcaccatattgaggctgcaaagtcacaaatagtataggagcatgcatatagtttggagatagcacaaaactgtaactttgaatgatcaaagcaagagcaatctttgcctcaaccaatgccaaatnttgccccacacagattcgagggcctaatccgaagggaaagaatgcggccaaatgttttcgaggctcactaaatctcatcggattgaagttatggtaatcttctccccagatttctctgtcatgatgaacagcagtcaatgccaaaaagagtngagtcttagcaggaatattaattgcttcaagcatcacatctttagaggcttgctcattaacattact

SEQ ID NO: 75561 - DNA, 419 bp, Glycine max
agatctgtatggtggtctgcagaagattatataccacagactcttgcaacaggtgcagatttctgattcatggcaagctaagttactatgttgaccaaggcatcaagttttccctcaagctttttattttcagtagatgaagatgaatccgtggccacctcatggactcctctaaggacaatagcatcatttcttgcactgaattgttgggagttggaagtcatcttctcaatcaaattccaccactggcagtatcaatcatactcctctccatgttgctaagtccctcatagaaatattgaagaaggagttgctcagaaatctggtggtgaggatagcttgcacacaatttcttgaatctttcccagtactcatacaagctctcttccactaagtgcctgatgcctgaaatgtctttt

SEQ ID NO: 75562 - DNA, 442 bp, Glycine max
  unsure (1)..(442): unsure at all n locations
ggatcttaagtcacctgcggctgcagcttatntagaggcttcgagcacactccagataatctttataagatcctcaacggtgagatcatganaacgtgtcttgtgaagtggtagaccaaatttcgagaagatccagcggttaacgaaggctgggcatcgtttttaccgaggtagcttcatgtagctntctctagaagcttcattaagaggcttcctctagaagcttcctcgtggcttctntgagaagctttctcaagaggcttctntgagaagctagatccttatctatccacacccctctattaactaaattaacttccttaaaaataattacagatgaaaataacgcaacaaataatccaacatcanacataattactaataatatatagatatatatatcagggtgttacaccgtgtggtgttagctggaatatggatg

SEQ ID NO: 75563 - DNA, 345 bp, Glycine max
  unsure (1)..(345): unsure at all n locations
gaaagataatcttatntaaactggataaataatataattataagtgataaaactctgtctccaaatatttaacgtaattatatatgtaagactaattaatctaaaataactttgcatgattaacatactcagtgctataacactaatagtttggtaataactaattcattgataaatattataaaatcatcaatatttgagagtattagaataaattntacttcgtattagaataaaattaattagatgcaaacctattaacgaaatgctntaacttcaccaaatatgtgattatgaaagcaaagggtagatggcagaagaaagagcaggataaataccatggga

SEQ ID NO: 75564 - DNA, 455 bp, Glycine max
  unsure (1)..(455): unsure at all n locations
tagagtcacctgcggctgcaagctnacaaacttgtgcacacgttataaatatttgttgattatatccaanatacacgattgacaccttttaagaagtttgtactagcatagactaatcgggtgatgtatcttggaaacacaacaacaaataagtatataaattatttgacattggtttcttttagcacttcattnttttaaattcaaagtattttttttacacttcactttgttgcataataggggtgaaggcaaacctgcaagattgaagaggttgtttcatgattgcatgggagatttgtgtagttgttgggatgcaatgaatatcatacttgtcttgcagcatacaacgattaaaacttcgtttaaaaaaatgtgataaacccaggtttaatcccactatataagaagtacgcggctttgatcacatgacatctttttatgagttgcacatg

SEQ ID NO: 75565 - DNA, 406 bp, Glycine max
  unsure (1)..(406): unsure at all n locations
caatgactagcactntatgttcttacacacagatgaatgattttagcacttactcttttctctcacgagtaacaaagtcttttctaaactttacaagaatttacacaaagatatttttacagaaagaatttgaataatgagcacttcgattcatacttcatgtcttcaatcttctagtatttataagcctcattcaatcaattatacattatctctaaacaaacatatttcctctcttaatcttatggttggagaatgtggtcatgggggcattaaatgtgtgcattaaatgcacatacttctccattctaagaaaccactatncatcgatgacgtggtgaacactacaataggaaataatttccttttgcattagagcatatctctgcagtagaactcttctttt

SEQ ID NO: 75566 - DNA, 417 bp, Glycine max
agcttgtaggattatgggatacccatcacatgtggttctaggtggcggtcgggcgatggtgcaaaacgattctccgcatccacaaatcatgtataacccaccatcccctgttgcccacctccaactgagctcatgtactcccacgtagcccttatcctcgttcctctcaacgccgggtccccatcaatcctcccaagcttccacaacattcaggtaattccacatccaatcatcatggactaacaaaaccaagcaaaacagggcaaaggcagaaaactctgcccaaaacacaactcaaaatcacagcttttcacatacaattaccctagtaacatttccttcgtccaattcgtaaccgtggatcgatcaaaattttactggaatctctaaacataagtctactttgaccgtgggatc

SEQ ID NO: 75567 - DNA, 464 bp, Glycine max
  unsure (1)..(464): unsure at all n locations
gatccttaagtcacctgcngcatgcaagcttcttaagtctatttagctctggctcttgtcattgtccctctnacgccatgnattgggtcttgggcttccttttgggcttacgcctattctttgatgtcctcatcaaaagtccttattgaccaaggaagctccacacacataatctattggaagacattncaaagggttgaaatctcactcgccacgattcaaccacactacaaaccactcctatgttntactggataaagggtggaaaccanaggttacatggacctgatgagcaccttcagtcaatgcacccctctaatgagtctcatggtaaggtatttaattattgatctagacacttcttatattgctctgattggccagaacacattgaatgagctcatagccctagtctcaacaccacactctcaaatgatatatcctacctcgactggagaaattgt

SEQ ID NO: 75568 - DNA, 415 bp, Glycine max
  unsure (1)..(415): unsure at all n locations
cacaacaaagtttccacatccacaatgcgcgcataaacccaccatcccctgttgcccacctncaactgagctcacgtactcccacgtagcccatatcctcgattctctcaacaccgggtccccatcaatcctcccaagcttgcacaacatccaagaaaaacaacattcaaacagcacaagctatcacagcctagcaaaacagagcanaggcagaagactatgctcaacacatcaaccaaaatcacagcttttctcacttaaagaccacagtaacaattccttcgatccaattcgttaaccgtnggatcgactccaaaattgtactggaagtctatagtgcataagcctacattgtgaaccgtggatctactgcanacatctagactatactggctagacttcacagcaacaccac

SEQ ID NO: 75569 - DNA, 442 bp, Glycine max
  unsure (1)..(442): unsure at all n locations
agctntatgcattcagttntgccaacacgtatggttatgacaagatcttcctcactgttgcatattattctccanagttggttgaggacccttgaaaaatatatatgaattntgctgttggtctacaaaaaaaaataaaaatggggacacatatatagatgaaatgttgtgggggaatagaaataaagaccagaagttttcagtttacttgagttagctagtgaacgatatatgaagaagaaggtgtgaaggacgagaattcagatgacattggtcactacaaaaagctatagtagaagaaaggggcctatccgattctgctactgtctgttagtgctactactagctccaccattcttatcttanaagtgttgaaattaaatactcaaacatanaacagagaataagtaaggtggatgcgccagatngcatcaactattct

SEQ ID NO: 75570 - DNA, 338 bp, Glycine max
cctgtcgcaagggtttgtggtttgtgctcctctgctgaccaccatacagacctttggccttcaatgcagcaacctggagcaattgagcagcctgaagcttatgctccaaatatttacaatagacctcctcaacctcaacagccaaatcaaccacaacaaaacaattatgacctctccagcaacagatacaaccctggatggaagaatcaccctaacctcagatggtccagccctcagcaacaacaacagcagcctgctgctttcttccaaaatgctataggcccaagcagaccatacattccttcaccaatccaacaacagcaacaaccccagaaaca

SEQ ID NO: 75571 - DNA, 459 bp, Glycine max
  unsure (1)..(459): unsure at all n locations
agcttgtaggattattgggtacccatcacatgtggtatctatgtggcgatcgggcgatggtgcaaaacaagttttccacatccacaaatcccgtataaacccaccatcccctgttgcccacctccaactgagctcacgtactcccacgtagcccatatcctcgttcctctcaacgccaggtccccatcaatcctctcaagctcccacgacatccaagaaatttcacatccaatcatcatggactaacaaaaccaagcaaaacagggcaaaggcagaanactctgccaaaacacaactcaaaatcacagcttttcacatacaaataccccagtaacatntcctttgtccaattcgtaaccgttggatcgactcgaaaatntactggaagtctctagtacataagtctacattttgaccgttgggatctgctagaaaatgtncggaaccccatatgtacta

SEQ ID NO: 75572 - DNA, 436 bp, Glycine max
  unsure (1)..(436): unsure at all n locations
ttattctcgtttcatttacttcttataccccctttttgacgtgcttaagccattttatttaagtcatttctcgcttaacctaaaaataaaataaatttccaccgatcgtttgaattggatcatctggtaatttcgtttaaaatgaattccgaccgttcgatcgtgccgtaaccacgttggaaataaaaaaaagagagggtaaataataatataataataaaaaaaatattttttagtaaagtaaagcgaanaatcaatcgaacgttttcgctttgggatntctcattcttaataataactaaggtgaaactaaggctaanatcaactcgcctagtcaagctcgtccacaanaatanggttttgaaagttatcacttcatntcttattagaaaatgggcattttaaggccaacgcttaaatgacacctttaagaaaa

SEQ ID NO: 75573 - DNA, 439 bp, Glycine max
  unsure (1)..(439): unsure at all n locations
agcttgacaaagctggattgaacagtgtatttatattatccagtgggtgatacttgattntggaattcaatgtntgtaattggtttgaattgatcaattatatgatgtgagtgaattgaaatacgtagatcatatgccttgaatgagcaagcagtcattacaagagaaagaacatggaattaggatcatgaccganaatgttagttgctttgtcaggtngattgtgaacaaacgcatttaccgcaacccggtgagagtgtgatctttaattgtgagagaacgactaaggttaagtaatgggtttttcatgaatctttgagtatggaatgaatgcgtgaaattcaatatgatgaaggccatgttttgattgaagatagccacttagcttaaaagcttaccttgtgcatganntgattatcccttgcacccattntgagct

SEQ ID NO: 75574 - DNA, 471 bp, Glycine max
  unsure (1)..(471): unsure at all n locations
atatgaataggaggcgtggagttgaattattaggagagtagtngaactttgaagtgtgtctcaagtttctcattcatcanagttatgacaagtgttacacatgcttctatttatagcctagcacatgggaaacttccttgagaagcaaaggaaggtagcttctttgggaagctagaggaagaaagcttccttgagaagctagaggggggggctactcacactcttccaatagctaagctcacccccatgctaaaatacatgataatacaatatgaagcttccttgataagcaatgaagggagcttccttgggaagcaaggaagaaagtttccttgagaagctagaggggggctaccctccaatagctaagctcacccncatgccanaatacatgataatacataaacaatagttcctacgacaagactactcaaaatgccttgagatacaaggctgaaactctatactact

SEQ ID NO: 75575 - DNA, 464 bp, Glycine max
  unsure (1)..(464): unsure at all n locations
cctctgagtcacctgcngctgcagctgatgttacgctagcctcacatctatgctttcacatgttgaanaaaatttgtgttgcagaaagcgctaagcgcagcttgctgtgctaagccctaaatgctcactagaccttacaactttaagttgggcttagcgcgaggctaggctaagcgctagtgttntaaactcaaatgtcacattggcacgctaagcgcaactgtgtgctaagcgcaccataaaaatntcagttnttaaaaataaaaagcagaggcacttgggttgctacctttgcacccaaacctctgcaccctctcatctttgagaaaattcttntactctctgctatgtgtgtactacttccctgcatcatcnttgcttcatttcaagaacaatccaagtaagttagcacatttctatntttacttttaattcttcaaacctttggatagatgacttcttgt

SEQ ID NO: 75576 - DNA, 451 bp, Glycine max
  unsure (1)..(451): unsure at all n locations
atatgcatgtgatttatgaagcatcaacaagaatcaagccaaggctattgtgcaagcaatcaatggggcaaaacacaccaaatgattatgatgatggatggctcanattctcacaaaggtaaactcatcactttcaaattgagctttcaaaactatcatgacatgtagaggagaatcaaggatttcaagtcacaaaatgtcaagaacttttattttcaaaacaattacccatttcttgaacatatcctataattcaaagaanaacatgcaaagtcgtacatgcacacaaaattgacccaaaatattaaactcaaaatccgacgaaactaacaacattaacaaattaacacaactaacaaattaacaaaaccaacaaaactagccaaaccaaagaacactccctcccccccccccccatacttaacaacacattgtcctcatgtagcacaat

SEQ ID NO: 75577 - DNA, 253 bp, Glycine max
cccatttttactaaaaacaacctttgcttcttgttggtgaatcttttacccgaacgttatgaaattttacaaaatttcgaacgatgctttgtttcttttcgtaatgttacgaaaccttacggattacgtaatcattcctttttttccttccgggaacgtacgaaactttacgggatgcgcactaacactttcttttcaatttccggcatgtcacggaacttcacggattgtgctacaatgcctttcttttgac

SEQ ID NO: 75578 - DNA, 466 bp, Glycine max
  unsure (1)..(466): unsure at all n locations
agcntttaattngtatgctggctttattgtgtaagacatatatggatgcatctatcttctaaagctcgggtctgattgatcttcacatactaatgcactgttaattataaaacaaatcaaagtgtttactaaatccttttctcattccagcaagtttcaatgctaaaatagattccacttccaagcanccatttttccatgcactggccacttcattgacttttgcctcctcggttgtacagatgagaaacatgtcaaaaagatcttttgaacctagcttctaccaatntatcaactataatagtaggtaccacactcctatttcctattgtgatggctacttcctctntaaaccattntttctcgcactctcaccattctgacgccatagttttctctttatttaactcccactntacatantttttaaactataatcatgttcaataaaacctatccctggact

SEQ ID NO: 75579 - DNA, 482 bp, Glycine max
  unsure (1)..(482): unsure at all n locations
ctgacacatgaatactgagtgtcagttcatatgatgagcaatcctatanttgtatgatggcagatgtagaagaaanagttaaggtaaaaacctgctctgaatctgatacctcttcttgctcttcactagacaatgaagaagatatgccctatgatgttcttcttcaaaatagtcatatgatttctgttcattacaaaaagtataaagagaaatacaaaatatttgtttgcgaaaacactaaattgaagaaatcaagtgaagatttggaaaaagaaaatctagacatgagaagaaattccaaatcaaaagacatttatgtcttaagatacatcaaaacctttaattattttgattagatgtaaacaattacaaaggttaaaagttgtgtcttatacgctatcagaacatgtttcacgaaatctgtttgatgtntagacgatagaaagattatagaatcattatctaatacgacattagagatg

SEQ ID NO: 75580 - DNA, 482 bp, Glycine max
  unsure (1)..(482): unsure at all n locations
gatccttgagtcacctgcggcatgccaagcttaagaatgaaggacactcattgcattgcaattattagatgagaacttttatttgcactgatatggtgttgattggtgaaaaggtttcaaatcctattttaatgtttggttacactgcaaacatgtgatatattttacgatgtaatcttntataatgtttgttgcaaaacaattacatacgtgctattatagggaagcgacggtaaacataattaacactgtcacaaatgtttcattggctcattgattctcttcttggcttatcattttcattcttttactaaatatagtggagtgacaatttttgatgacacaatttgggtatgtgaatggagaaagtttttataacaatgcattattgatccaattgaattgacgagtgatatagatcggacacctactactttaacaagcgtgcattactagaaaatatacctttaacattgattcaa

SEQ ID NO: 75581 - DNA, 458 bp, Glycine max
  unsure (1)..(458): unsure at all n locations
agctngcaatgtccctcgatgtgtgttgtggtggtttantctttacatagnacatctcatatctttattatcgagaggaggcagagctactttcttgtggattaacactttggggattcacggtgaatatcgagtgtcttttcaccttgaaacaatttatgttgaatgttttggctggaataagtacgcttacgctatgtgaccatgtgtagttttgtcattcttatggtttgtttatttgggtcacgatgcttgtatattcaagggcgtctctctgatcttaagattcgctatggaataagtgcatgcttggaactattgattgagaaaatgcttgtttacacaatctctctttgataggtggaaaaaataagcagtttttttaccaaatctctaatctggttctcttatgacatgaacatagtgaactaatgctgttcatgttctattaatctaat

SEQ ID NO: 75582 - DNA, 422 bp, Glycine max
  unsure (1)..(422): unsure at all n locations
atccttagagtcacctgatgctgcagcttatatagttctagtcaaatcatttctcaatattattcttattttcaagatagtaatccccacttcaaattcaagttaggttaccataaacacgaaggataaaaatacgaacatccacttaataaatgaaataaaaatatgcacaaaccaaataacttaacatgccaaaacttgtgtaggtgagtaccttatgcagaggccagctagcttgtgacagctaataagccagaattgaagaaatctctgcttatataatacaagaaantttgtgtgggtagtgtatgttgtgtgaataaagcttcaaataaggtaatgaggttcacaatcaagcttcatatggttctagtagatcattgatcaatattattcttttgattatgaaaggagagaaatgt

SEQ ID NO: 75583 - DNA, 444 bp, Glycine max
  unsure (1)..(444): unsure at all n locations
agcttctcaaggaagctacctagtctataaatagaatcatgtgtaacacttgttgtaactntgatgaatgaaagtcttatgagatacacttcaaagttccacttctttccctctnttattccatcaatttcgtgctccccccttctctctttcttttcctccattaaagcatcctcttcaagcttcttatccaaggaaattcttggtggtgaagctccttcttccttggcttattccctagtggatggtgcctcccctatcctcttctcctttgccttccgctgcatctccatggtgaaaaatcaccattgaaggacctcattgaagctcaaagatccagcctncatagaagcttcaccagccagcttccaacaagtgggtatcagagcacaagagcttcaagtgggggctctntaatctcattaatttttttcttacctctct

SEQ ID NO: 75584 - DNA, 488 bp, Glycine max
  unsure (1)..(488): unsure at all n locations
gttgttggcttgaacaagcaccgaggcagtggtactatatgtntaatgagtntatgagtctctcangattcanaagatgtgacatggaccattgctgctatgttaaaaaatatactaatagttatgttatccttgttgtgtatgttgatgacatgttgattgcaggatctagtatggcagaaattaacaggttgaagcagcagttggcananaactttgaaatgaaggatcttggtccagctaaacaaatccttggtatgagaattcttataaacagatcagaaggaattttgaagctgtctcaggagaaatatatacacaagttgctggacaggttntaccttggagattctaagaccaggaatacccctctgggatctcatttgaagttttcanagaagcaatctttgcagacagatgaanaaaaatgttacatggtcagagtaccatatcatcancagctgggagtttgatgtatgctatggtgt

SEQ ID NO: 75585 - DNA, 188 bp, Glycine max
  unsure (1)..(188): unsure at all n locations
agtcacctgcggcatgcaagcttcttgcgtagtcgctcttgcntgctcggaaattctatattcaaatccctcttattactagctantttgaattctttagttcctgaatgtacaaccttcaaattcttgctcgttcccctctttgagaatgaggaggatcttcataggacttcatccagctgatgttt

SEQ ID NO: 75586 - DNA, 489 bp, Glycine max
  unsure (1)..(489): unsure at all n locations
ctagcaagcagtatatcattgacatataacaccatgtatgagtatntactcccactaatcttgtgatatacacaatcatcaactgcattttcctcanaaccatatgaggtaatgacttgatggaacttgtaataccattgacgggaagcttgtttcaaaccataaatggatttatttagtttgcaaaccatagactttgagtcatctgatacaaagttttctggttgcataatataaattgtttcttcaatgtcaccatttagaaatgcagtcttaacatccatctgatgtagctctaaatcataatgagctaccagtgccattattgttctaaaagaatcctttgaagatattagagaaaaggtttatntatagttaatgtcttccttttgggtaaatcctttagcgactagacgagccttatatctctcaacattgccctttgaatccctttggtttaaatatccatttgcatcaatangttcacac

SEQ ID NO: 75587 - DNA, 261 bp, Glycine max
  unsure (1)..(261): unsure at all n locations
agctatgagccaattctaacgataataatctttctattcggtatgtccgaangagcncncgaaatatatcgacacgctcgaaattgaatgttgacactcttagcctaatctaacaacaatatacgttttctcggaagttcgagtcagtgtcagtatatatcactacgctcgaaattgaatgctgaacctctgatcccacacatacgacaataactttttactggatgtctgatagagttccatattatatcgagacgcttg

SEQ ID NO: 75588 - DNA, 365 bp, Glycine max
  unsure (1)..(365): unsure at all n locations
agctntctcctttgtgcagctagctcatctctcttttcatgtgcagaatgaagcttgataggttcaggtgcatgtgctgctactggtggaggcacttcaatttgcttgtcagacctcaaggtgatggcactcacattttttggattctgcacagtttgtgaaggaaatttgtcaaaattttgggactaagcttggttcaactgagtagccatctgccctgtccgaattgtcagactctgaatggaggctcttgtctcttgctgaaattgcatattctggatggtcattttcctcattaactcctctaaggaaggtgagaagagtcttcagtgcttgttgctttgttgttgctctgctgtgctgca

SEQ ID NO: 75589 - DNA, 418 bp, Glycine max
  unsure (1)..(418): unsure at all n locations
taccaagtctttggaaaactctatctctctcttaggtggtaaaccgaatacatcctcangaaactctcttgaccacaggaggtcacccatggaaaccttggtttctactttcaagttagacatgatcatgtatacttgggcatattctttcgaagatgttatgacttggttgccaaagaataacatcctatccttactcacttaagaatcatcaaacaccacagttttatcanaacagtttaatgagacatggttggaagatagctagctcatacccaaaatagaaacaanttggcttanagggtaacaaatcaaatcaatcaagaatgttctactagaaatttctacaggacaattaaaacacacatcagaaagtaacatgaaccactagttggggtctctatcacaagatcattat

SEQ ID NO: 75590 - DNA, 349 bp, Glycine max
agcttgtctcagcgtttatgcgagactgttaccattatgctatctatcatcgctaagtaccaagaagagttgggtctagccatggcccacgagcatagaatcgcggacgagtatgctcaagtgtacgcggaataagaggctagaggaagggtgatcgactccttacaccaagaggcaaccatgtggatggaccggtttgctcctaccttgtaccgggagtaagaacttcctcgcttattagccaaggccaaagcgatggcagacacctactccacccccgaagagaatcatgggcttctcggctattggcagcatatgatagacttaatggcccacataattagaaatc

SEQ ID NO: 75591 - DNA, 344 bp, Glycine max
  unsure (1)..(344): unsure at all n locations
atagcttttattgttcctctcaatttgatctttgactctctcatgaagcgtcttcacatagtccgcctttgcttgaccttctttatgcttaaaaacagaaatattgggcatagcccanagatcaagaggagttagtgggttaaaaccataaacaacttcaacacgagaacaattagtagtgctatgaaaaactctattgtatgaaaactcaacatggggtgaacaagctgtccaaagtttntaagtcttcctcaaaactgtcctaagcacaagtcccaatgtctantaacaactntcatttgcccatcggtttgtgggtgacaagtggttgaaaatataaatta

SEQ ID NO: 75592 - DNA, 426 bp, Glycine max
  unsure (1)..(426): unsure at all n locations
agcttgtatnntatccataaattggtctaatagatatctgtttattatatcgaattaaaatttggacatctcatacatatagactatggatacaacatattactactgatataaaaacatcccatatattactgcattatacaactatacctaaaatgaaatgcgaaatgtctacaatattaatcgagtataaataaaatctaagactaagaccattattagtattataaaatatattntgttctaattttagatttgcacaatataataatgttaactctctcataaaatattattctctgaacataatgtaatatgtcacttcatggctcttgacgtaagatgcctagatacactagatattactacaagtatatgtatttgtatttttataatatgatgcaaatatcaattgatctaaatctc

SEQ ID NO: 75593 - DNA, 387 bp, Glycine max
  unsure (1)..(387): unsure at all n locations
agcttgagcanactcaaacgactataacttatnattctgacggcggatggagccccgtgatatatcgagacgttgaaaattgaatgctgaagctctgagcaaattcgaaggacaattacttttcactcatatgtctgactgagtgccgtatcaatccatccactcgaaaatgattgttgatgtcaatacgctcgatatgaatgttaagctcaagcaaatgaaaccacaatatctattgactcgaggtgtgtggatcgacatattatatgagacactaagatgagttttgaactctaagctatcaacgacataacttttgatcgattttattgaacgcgtataattagagatccaattaatctaaccttgacgtataaacacatacgt

SEQ ID NO: 75594 - DNA, 241 bp, Glycine max
  unsure (1)..(241): unsure at all n locations
gctgagagcttttacattcaattntgagcgtcgcgatgtatgacaggacttaatcacacatccatgttaaactttattgatgtgcgaatgagcggagagcttccacattcaattacgagcgtctcgatattgtacaggactcaatgagacatacgagctaaaagttattggctgttgaatctgctgagagcttcaacatgcaatttcaagcggctcgatttttacaggactgaatggacat

SEQ ID NO: 75595 - DNA, 401 bp, Glycine max
atccctaagtcaccgcggctgcagctgatgattgccagggctttgttcactttcaaacacccattggcatctgcttggttcaaatggtgtatggcaaagcttgtcacctatcagtggtagtagaaattatagctcactagaccatgaagttcctgcactgttgactttaccacatccaaagagaagaggaaggttcatctacttgaacttgaatagattctcctcatgcatatgaatcatcctagctctacatagaaagatccatgagataccatgacaaaaagatctttcatagagtattcatgccccgaacaacatgtatcgctctacaactcaggattaatagtatttcatggaaaattgaaatatagatggagtggtccctatactgtcaaagacgt

SEQ ID NO: 75596 - DNA, 433 bp, Glycine max
  unsure (1)..(433): unsure at all n locations
aatgaacttatgcatngngtatatataatgtgatctatgagacagattgcaaaaatgtttacagattntctacacagcaaaagaaagggtgtctctggttttagctctattataacacattgtaataatttacttatacttgttcgaaactccaaggtgagtttatctaagagacaaacaaatcttgtggctcacatgttagcaaggacatcaagattacatgctttctctcatgattntgatngcattcattctcatgttcttgaggttatcattaatgaaaatgaaataactntatttcctctaagagaattcaatactggtctaagtattctttataagcaaatacattttaaagatgtgtttagatcaattcaccgaaactaatattccctcgtattcatttattttaaaccttaataaacaataaata

SEQ ID NO: 75597 - DNA, 413 bp, Glycine max
  unsure (1)..(413): unsure at all n locations
agcttctataagtcagaggttgataatgttactgctctaaccttttacttanagttggctaacatagcaccttgtggtgacaaggaggctgttgtcgaatcaagtgacaatgttatccactctgtcaaactccatcctacctatgggtttatatgggagagggaggaaattgatgctgttccctctgaagatggagtcattccaccaactgggtggaatatatatgaggattaatatgactgaggccactgcatgggccagaattacggcttatatggccgaaaatagactaaatacggcctttgaggctgaatctcaacaaaatatggcagttgaagccaagatcgaagatcatgaatacaaagaaacaaaggatcgaagactggattgtatttatgatgatgagccgctgg

SEQ ID NO: 75598 - DNA, 490 bp, Glycine max
  unsure (1)..(490): unsure at all n locations
attcactntcttctacatcatattcaaacttgtccaaataaataatatagtcatctcgactcttagaaagtcatataagtctcatacaattaatatagaacctatatcctaatgtcacatcctatcagagcgtggtgttcccgtgtcctctagcatgaggttcttcatagtcatccacctattcatctgctcccccgaacacaaagttcaaatcatcacaggatcgaaacacanacagcaaaccgggagtgagttatcacattgctaactactagagagaaacaacacaacatatagtaaccaaatacaatttacttagcatatctcacattatttcatcactttgtcattcatcaatcacacttttcatccattaatcacacctttcaatcatcaatcattatacacaggaatcacacactccgatcaagacataataacacatcaatttcataatanacaattagcaagcgtatgcgacagttatgct

SEQ ID NO: 75599 - DNA, 475 bp, Glycine max
  unsure (1)..(475): unsure at all n locations
agctntatgcattcagttntgccaacacgatnggctaggactttatcttcctcactgttgcatattattctccanagttggttgaggacccttgaaaaatatatatgaattttgctgttggtctacaaaaaaaaataaaaatggggacacatatatagatgaaatgttgtgggggaatagaaataaagaccagaagttttcagtttacttgagttagctagtgaacgatatatgaagaagaaggtgtgaaggacgagaattcagatgacattggtcactacaaaaagctatagtagaagagaggggcctatccgattctgctactgtctgttagtgctactactagctccaccattcttatcttagaagtggttgaaataaatactaaaacataatacagagataaagttaaggtggatgcgccagataggcatcaactcattctcttgttgccttagaatctaactaggctatg

SEQ ID NO: 75600 - DNA, 370 bp, Glycine max
  unsure (1)..(370): unsure at all n locations
gtaacccagctggccttgaatcagaaatctgnacctgtctcaagggtttgtggnttgtgctcctctgctgaccaccatacagacctttgcccttcaatgcagcaacctggagcaattgagcagcctgaagcttatgctccaaatatttacaatagacctcctcaacctcagcagcaaaatcaaccacaacaaagcaattatgacctctccagcaacagatacaaccctggatggaggaatcaccctaacctcagatggtccagccctcagcaacaacaacagcagcctgctccttcctttccaaatgctattggcccaagcagaccatacattccttcaccaatccaacaacagcaacaaccccagaaac

SEQ ID NO: 75601 - DNA, 471 bp, Glycine max
  unsure (1)..(471): unsure at all n locations
ggatccttaagtcacctgcggcatgcaagcttatatatcttacattntccattnnttgtcccatgatctttctaaaactctgcaaaagctttagattgtatttcattcacgtttctccttgtctcgtntctcacattctaatactttgctcaattttaaacattattgtacccaagtaaacttacgagcaaagtgttgaaataggattaagtgtaataaaatatctctagctagattaaaggcagtccagcaaagtaaaataaagttttattcaactgtatactaactacaagaggacagatccttattcttgcagatgagtcagtggaggactctgtagctcactctgactcaaggtccctaactacccttctactcattcnggacatacangtatccagttttggtgcatttgaaattaagggtatcatgttcacatcactgactaatgtctcatggtgtggaatcaaa

SEQ ID NO: 75602 - DNA, 466 bp, Glycine max
  unsure (1)..(466): unsure at all n locations
ggtcttgtggaggtgacttatgtcttaaccccaaattctaacatgttatataacatcattcatgtctactcacctaacatctttacgctntaagaatagttggttcatgacataatacaataatataaattcatctcaattaccaccataaattcatctcaattcatgacttcttcttttccccattcttaagaaatcagtttttcccttgttacatttcttatcaattatcaacgaaattcacacatccaatgattaaaattcagcaaaaagatcaaaaccttaaacaacaacaactgattgaaaaattttaaagattataaacaaataatggatgagatntgatattgaaaggtgttgatagaagatgatttccagaggagaaaccaccaaacacgttggtgtggttgagatattcaataagaaaacacaacccccagagagacaaaaaataagagggaattat

SEQ ID NO: 75603 - DNA, 290 bp, Glycine max
  unsure (1)..(290): unsure at all n locations
agctngccgcccagctcgcccaggcgagctcagcttttccagtctatcatggttgcttcctccagaagcaaccgccttctggatgaatcttctggagggcccaaatgggcctgggtgctatattgcaccccatttatactaagtacacccccctctgctgttttttggggattcttttattcttaaagatacggaaacttactaattttggacgatactttttttctttcccgaatgtttccgaaccttgtggattacataatcatccccttattgacttactgaatgtt

SEQ ID NO: 75604 - DNA, 504 bp, Glycine max
  unsure (1)..(504): unsure at all n locations
ctcgcccaggcgagcaaggttgcttcctccagaaattcaaccttctggaggaatctttttgagggcccaagtggacctggttgctatttacacccncctttntactaaatgcacccccttatatatttttctgtaattctttttccgtaacgttacgaaactttacgaatttcgtaacgatacttattttcctttccgcaaggttacgaatccttacggatttatgtatttactctttttggctntcaaagaagttacggaaactcacggattgcgcaaaaacacctcttttcgatttccgccacattacggaatttcacggattacgcaagcctgcttccttttggatntctgagacgtctcgggacttcatttattgcatgtcatcaatntataatcctcggacgaaattaaggtatgaacagtgcccctctttacttacctctcatcgagataagaggaaagcanagataggacactgatntcgtccgtcctgccctttct

SEQ ID NO: 75605 - DNA, 425 bp, Glycine max
  unsure (1)..(425): unsure at all n locations
agctnntgcggattggtctntgacggcaaaaggatttatgcgtgtctgattagaggaaaatttgatcatcctactttgataagtgagaaagctggggcaaatgaagaggatgataatgagggagaaacccatgttgcgactatcattcctacacggccaaacttgccaccagcccaacaatgtcattactcaaccaatatcagctcttctcattacccaccacccagttatccacaaaggctatacctaaatcaaccacaaaacccgcctaccacataaccaatgctgaacaccacctttagcacaaaccaaaacaccaaccaagaaatgaattgtgtggcgacaaagcctatagatttcaccctaatttcggtgtcctatgctgacttgctctcatatccactcggtaattcaacggtagccat

SEQ ID NO: 75606 - DNA, 427 bp, Glycine max
  unsure (1)..(427): unsure at all n locations
tataaaaatatatgaattatattaaattaaattatttgttattatggattatattntcagtattaattgtatttataataatcatacagaatatgagatacttattagtgtacgtaaaatgttctttgtgtgtttggtgatgaaaaaccaacataaacaaatntattagtattctgttacaaaaatttactttatattttatactacatattcacgtatctgaaatntgtaacaaataaaatttcaaatttattgtgaatgtaatatacataatggttaanaataatatcaaataaaatttatatttcacacaaagaagtgttaaataatatatatataagtatctaaagtntaatcttaaaacanagtaaatcttcacctatacctacactcacacatacatatggatattacacntttgtgatat

SEQ ID NO: 75607 - DNA, 423 bp, Glycine max
  unsure (1)..(423): unsure at all n locations
agcttatgcgcatatttccttacgaacgttcgctatcacaagacattcttttaactaagaaaaatgcacccatatacactcaaggcagcttcgttacctagattatntacatgtacttccaaggtgtatttgttacttacatcacacacatctccttggctaaatgtacatacatgcatactcaaagcattttggggtaccaaaaattngcacatgtgcacatcttggtatatctaatacctatacatatacaaacttcatgatgaatattgactatctacacaataaagtgctacatttcatgctcttttcaatttttgctacctaaagccgatgcaaattcaagtatatttcctttgtgactanattgattaaaggttatattcttttgaatgtatttcttacatacatgcacatattata

SEQ ID NO: 75608 - DNA, 267 bp, Glycine max
  unsure (1)..(267): unsure at all n locations
tcctcgtccgtctttcgtcgttcttcatcgntcttcggtctttgactggtnagttcccgaaatcgaactctntaattcattctatgtacccttagtggtcctcattngtttcgcgtgctttttattntatttcatttactttccgtacccctttttgacgtgctttagtcatttatttaagtcattttctcgcctaatcaaaaataaaataaatntccaccggtcattcgtattgtaacatccttntaatttctgtaaatgaatcta

SEQ ID NO: 75609 - DNA, 494 bp, Glycine max
  unsure (1)..(494): unsure at all n locations
cgaccggatccttaagtcacctgcggcatgcaagcnttgagccaattcaaacgacaataactttntatatgaatgtctgattgagtcctgtcatatatcgagacgctcgaaattgaatgttgaatctttgagccaatccaaacgacaataactttttactcggatgtctgattgtgtcccgtaatataacgagactctcaaaattgaatgttgaagctctgagctaattcaaacgacaataacttttaactcggatgtctgatngagtcctgtcatacatcgagacgctcgaaattgaatgttgaagctctgagccaattcaaacgacaataactntntacttggatgtctgattgactctcgtcacatatcgagacgctcgaaattgaatggtgaagctctgagccaattcaaacgacaataactttttactcggatgtctgattgagtcctgtcatatatcaagacgctcgaaattgaatgttgaacctctg

SEQ ID NO: 75610 - DNA, 346 bp, Glycine max
  unsure (1)..(346): unsure at all n locations
agtaaaaagtattggccttttgatttcctcacagcttcaacattcaattttgagcgtctcgatatatgacgggactcaatcagacaccgagtaaaagtatggtcgtttgattagctcagaagcttcacattcaatttcgagcgtctcgatatgtgacgagactcaatcagacatccgagtaaaaagttattgtcgttagaatttcctcagagcttcaacattcaattttgagcgtctcgatgtatgacgggactcantcagacatnncgagtaaaagtattggtcgttgatntgctcagagctttcacattcatntcgagcgtctcgatatattacgagactatat

SEQ ID NO: 75611 - DNA, 395 bp, Glycine max
  unsure (1)..(395): unsure at all n locations
agcttgtggttattagatcatttaatgcttgcattaaacgcatatcctgcttcatgcaggaaaaccactatgattggctttcgtgttgatcactataacaaaaaatcagtttcttttagtcaaagtagatctatcacagtaaaacacatcttttgatgttgtttgggaacttttagaacttanacttcatttattcttcataggatacgacaaatcctgaaagaatgtcttgtgagacatattttgcccaatgaacctcagacacanagtactaaatgaagtctaaatgtcatctttaatattgtttcaatcatgactattcatactctgctgaaaatcaatagagatatgaagcatatctgatattcatagacaaactttaaccgggttttatt

SEQ ID NO: 75612 - DNA, 438 bp, Glycine max
  unsure (1)..(438): unsure at all n locations
actcttcttcaacctcatttctatatagtcatatattgagtgaatggtcctcattggggcgttacttaatttaataatcatcttattcaaatacaccatactataatgattaaaaaaagccatcattcaataaaacaagaaataatgttgctatattctgtctaactaattagatcatactaagtgaagttcattttcaagttcttcaactctaatattgatagcattcacaataacgagaatangccagggttttaattacaaaagaaaaggctacgtgatgttttggaagtccattcgttcaaaataactctgatcttgttagtggtggagaaaantttaagtaaatgtggaagaaattttgagaaagcatttttgattttgaaatcaaaggaacatgtgaaaggactaacacttgataagatttaggatatgttg

SEQ ID NO: 75613 - DNA, 374 bp, Glycine max
  unsure (1)..(374): unsure at all n locations
agcttttcgattcattctatgtacccgtggtggtctacattgtgtntcgtgtattcttattctcattttcatttactttntatacccccttgtgacgtgcttaagccattttatttaagtcatttctcgcttaacctaaaaataaaataaatttccaccgaacatttgaattgtattatccgctaactttgggaaaaagaatttcgaccntcggtcgtgccgtaaccacgttggaaataaataaagaggtaaaataataatattataaacaaaaaataccttttagtaaaataaaagcgtaagatcaatcggacgttttctctttgggatttctcattcttaaatgaatngactaataactaaagtgaaaccaa

SEQ ID NO: 75614 - DNA, 418 bp, Glycine max
  unsure (1)..(418): unsure at all n locations
cacattcacaaatcacgtacaaacccaccatcccctggtgcccacctnccactgaactcacgtactcccacgtagcccttattctcgttcctctcaacgccgagtccccatcactcctcccaagcttgcacaacattcaagtaattcaacatccactcatcacaaactaacaaaaccaagcaaaacagggcaaaggcagaaaactcttgctaaaactcaaaccaaacatcacagctntttctcacttaaagaccccagtaacatttccttcgttccaatttgttcaccggtggatcgactngaanattntactggaagtccctagtacataagtctacattntgaccggtgggatctgctaggaaatatcagaaacccatatgtactacccttttcacaaccagccatacacaagcat

SEQ ID NO: 75615 - DNA, 472 bp, Glycine max
  unsure (1)..(472): unsure at all n locations
agcttcggctaanaccggtgaatgttaattgccatttaaggaatccattattccaaactccaaaggagaagaaaattatacacaaagaataataatatttgattaattntgttaatgtaattgtgatcaatcaagactctataccaaaaacttatgtatttgcttttgggataagagtttcatagtaaaaaaacttttatataaagtttaaacatgaatcacttcattaaattctttattttagatttgaataaaaaatattaatcatactgaattntaaaagctaatattattcaaaatggaatgatatatagaattttaaaaatcatatatatataaataaagactaaaagaagatantttatgtaaaanaattgatagatttnttaaaataaattatagagattaaatgaataattaattctttaatatataataatttaaccttaaataatagtactccgtatttatg

SEQ ID NO: 75616 - DNA, 441 bp, Glycine max
  unsure (1)..(441): unsure at all n locations
ctctatcttgtagttgtgagctggtgtcaattgatcgcaagcactttggctctntattgcatgtnntatgtctcagcttcaataatatatgatcattcttctaataaattctgcgagtattcacttgtaatgtgtcttgggctttcctgtttagctcagctgccaagaactctacttccttaatttgtccagttacgaagttttcatcagtgttgtgacttgagattatatccacgtagaacatgaggaattttgatgtgctnttatatatntacatttataaattacaattctatagaattagttctgttgactatttcgatatttatatatctgtagacatctaggaatatccttggaaatgctatagaaactggtcagaatatntggttcagtaatctattcaaccgtatcagctacacaacctgtggtgtcgatatc

SEQ ID NO: 75617 - DNA, 424 bp, Glycine max
  unsure (1)..(424): unsure at all n locations
agcttagagaacattggtcctatccctacatgaaattggtgggttgcaatgggtcatangcatganaaactattntaataatgagatcggttntaatgtataatcatattagaaaattaatcattcctaataattttttcttttttaaattttntattttttaaaaatcttttctaagatggtntattttgaaaaactcagtccatgattatttccaaggaaaaaacatgagaaaaaagagaggacttccgacttggaacacaagataaaaacctatagctcgagaaaaaagaagaaagtcattggaagtcaccgactacttccacaccatcttccttccattcncccacacattgttaattttttttgtatggttaagcctctcatgataatgactcatgagaaagtaaaccactcatgattg

SEQ ID NO: 75618 - DNA, 482 bp, Glycine max
  unsure (1)..(482): unsure at all n locations
ctctattntttttatatatgcatntcgcatatatgatcgactgcatgtctattgaatntccagtagatgctatntgaatttttggtgtagatggcagtgatagtttcttataactgattttntttttcaattgaatttattttgacatttaagcctacaaaactttttttcaattgtatatcacattaatctttctttnttttaaaatttttgtctaaactttatgctatacagattaaatgttgattgtctttagtatgattctaatgttcattcctccccttttttagataattcatttgtgaattattttgtagaccatctttatcctgtgtaaaattattagaattactattatcatacaaaaaaaaaaacaattaaaacaactattagaaacatcataacatatactttcctaaaaaaaacatatattacttaacaacatatgatgcacagaanaaaaataanaatcgcagtcgatg

SEQ ID NO: 75619 - DNA, 446 bp, Glycine max
  unsure (1)..(446): unsure at all n locations
agctnttatgtgcaagtaataaaaagttctcctagtgtagccgtggacgtangcacatacattgtgtgctgaaccacgttaaactgtgtgtctntttctttcttccctttatttctttctcttcttttattgctctatactaacaacaattaccaaggttgggcgaattntaattgctactattgtggaaagttcgggcaagaagcttcagagtgtaaattcaagcaacaagcaaacgttgcggaaagtcaaaatgttggtgagaattctaatagacatcaaagnttatttttagctagtaatacttttttctaaggatgaaaatatttagtatttggatactgngtgtaacaatcatatgtgtggcaaaaaagaattantttctgctttagatgaaacgaataaatctaccatgagatttggaaataatgcacatattccaatta

SEQ ID NO: 75620 - DNA, 375 bp, Glycine max
  unsure (1)..(375): unsure at all n locations
cttctctcttgtatcgatattctctaaacttatgttcaaattcatcttcttcatgccttcttgatctcttttcttctcttctactggtattatctctcccatcaaatttgtcatcatcttcatgccttcttgatctattcaagtctcttttactgctattttctctcccctcaaatttgtcatcatcttcatgccttcttgatctcttttcttctcttctactgctattctctcttccctcaaaattatcatcatcatcatcatgccaccgctttgtcatctcttttctatcacttctcttaaggtggttgtctaattcagcatcattgttgcnggccctagaaaatgaatctctgtctctagtttctgcaatat

SEQ ID NO: 75621 - DNA, 405 bp, Glycine max
  unsure (1)..(405): unsure at all n locations
atcttaagtcacctgcggcatgcaagctnnttgtacaagcaatcaactcanagtactgatatttaaataattgaaatttaaagaactgaaacataaaaactaaaatttatatgactgaacataaatcataaaataacttanataaactaaaatgttcaaaatgcacaaatttaaatgtcctgctcctgtgattgctcttgtgcatgctcattgagatccaacaattgagcagctggtgaattctgagggatatgttgctctagctcagatgctggtgaagatggcatggattcatcaggtatgggtactggggatggctttcgaatttggtctgtggaagtctcatccttctgagccatctgtacacctgaatcaaaataaaagggctcaagaggagtgagctca

SEQ ID NO: 75622 - DNA, 459 bp, Glycine max
  unsure (1)..(459): unsure at all n locations
tattaaattcctaggatcatgaganactaggtgtgtcctactatgacttgagaaacttaagtgatcaaataacaagcagagatttaaaaggtactaggttgcctcctagtagcgcttctttaacgtcttgagttggacacgtgatgacttgtcggtcacggacctagtactntgcttacatttggctntggacttggtcgcctattggtcagccatgtgtcatangcaacgctctaaccttttgtggatgagctgaggtgaactctataggttgtggcggtgcgcttgttgcccactactgtgatgcctcgccctgtgcctgcctgtggcgcaatacttctcgatgaaagtctggttcatatggggcctgatgaccatgctgggggcgacgggcactccgtagaattgatagaggcctgtaatgagaagtggaaaccccaggaccctgtggactacttc

SEQ ID NO: 75623 - DNA, 436 bp, Glycine max
  unsure (1)..(436): unsure at all n locations
ctgcaagcttggatnatagtttaagccctcggcctatgttgcttatcaacctanatagacgtatagtaattatatatttnttatattattatctataatatatataattaaatatatgtgttatcattataaaaaataatatatgtattatccataatactatatcatcagatgataaaaaatagataaataatatttttatttaagataattatatacttaccaaatattcgatatataaataataatgacttattaaatctaagaattttctttttaaagtctaagacttacacgtgttttgttaaacaattttttatagaaaaaatatgtgtattttatgaaagtttttcttacttacctctaagtactgcctactgtaaattggtggtagtctttcaattccctttatcctaaaaatattaactctttattt

SEQ ID NO: 75624 - DNA, 406 bp, Glycine max
  unsure (1)..(406): unsure at all n locations
gcatgagctaatctctgctgattctgtattgatgccaagaatgctttataatcaaatatatattttccttgataatccataacagttggtgcctcagttgacacgtcaagctagctcatcctagtataaattaatccattcttctacgtccaattcccagaggccacctactagtcatcctatacatgatgcacaccatgtttgcgtgcctcaataanaaagtagaagataatctcaaagtcacaaaggcagtgtacagagatgagttaataaccaaaaagaaaccttcaacagtgccaagcaaggcattattgaagaanagtgtctcgtttgcggactcagaaaccttcatttttggagaagataccaatgagaagaagttggtgaaaggaacgtgtattattga

SEQ ID NO: 75625 - DNA, 425 bp, Glycine max
  unsure (1)..(425): unsure at all n locations
agnncttgggttgagaacctatataacaacaccaatgttctagttntatgagccttntcattntgggacaaagaataattntaggttttgcaattctagtttttactgttcacgtagcaataaaatttcgttttctgctcgttgggagacgacctangatcactttctagatactgcatttttaatgtttatttaattcgggtacggcctcgatcaaatttggcgccgttgccgtggagcaatgggccaaaggttcataatagtgtttagttatcttattttgtgtagcattctattttgcattttagttgcattccctggttagcgactgattcacctttgtgtttgctgtgacagtgataaccactgatttgcaatatattagcgatttttgtttgatattagaggtgtatttttgctgattt

SEQ ID NO: 75626 - DNA, 472 bp, Glycine max
  unsure (1)..(472): unsure at all n locations
caatatacaagaaaattaatgagagttcttctatggtgatcagtccacccatcagccatcatagtacatctagtttccttccaaacttcttggtaaattttaacaagcttcctcccttcatcaaaccatntatataacaaaggaccacaaattctataaaaaaaaaatggagatgtatacaccggactcatgctactaataacatcaatcataggttgataatatgtcgagttaattgcattaaatggcactatagcatctatcatccattttgcaatggctttgtcacacttttctacaatnttcttattttgcaagacactcttcaagctaggttgagctntatgagttgttctangcatgaaatagtcatctacatgaaatagtgtctttcctttttgagactnggaagaaacangtgatnnntggagtcttcttaatttctcaactattctcacanggtcttcatcca

SEQ ID NO: 75627 - DNA, 339 bp, Glycine max
  unsure (1)..(339): unsure at all n locations
agctntgttttagggttttctatattttttcttctgttttgattcttctgagnncgnaatgcaatnttacgttttctgcttctaattacaatttcgttcttgcttcttcttctactctcatttacgtttctgttccattttacatttctgtttgtttacgtttctgttcatttacgtttccgttcatttacgtttctgcttcatgtttcaattgcgttttctgtttgaatccatggaaggctagattttctggtgttgtttccttttgaggacgaagcccaactctctttgaggtttcgcttgtaatgtggtttcctggcagttctcccttcaccagta

SEQ ID NO: 75628 - DNA, 321 bp, Glycine max
  unsure (1)..(321): unsure at all n locations
gtacgttgtaagcaacacaaggcggaagaataataatcaaatataactaaagttcatataataatcattcataagtcaaaacaccaaatataaaccattcataaaatactaagtggccaataccgaaatataaccaaagttcagaanatgantacttanaaagcatagccaaatacacggcttanaagtaaagataataatatctaaaactaggaaagtggtggaggtcgaagcactgacgaagataagcacatcctcttcaagctgtgtgatacanggtatccattcttcaaagcgaccatccaaagaatcaaagcgttc

SEQ ID NO: 75629 - DNA, 398 bp, Glycine max
agacaatggaaccaagtcgagggagtactcttttaatcctctaagaccttctttggtcttctctgttatcaccacttacatacaccaggaacctcaaagataatattcaaagttcactcggtcattataacataaaaaaggacatccaactacataataataattagtataataataataataataataataataataataataataataataatgaatataacaattaaagaaaataaaagaaaaacacaaactaagagagagcaagaataaaacatgctcttcttcctgttgaacacaagacctgtgtttcttcttgttgaacaatagattaaaataattaaagaatttatatgatatcatcaccaccagttgtacaatgttatcatcaaatcttg

SEQ ID NO: 75630 - DNA, 432 bp, Glycine max
  unsure (1)..(432): unsure at all n locations
agcttgcagtgttttattcatgggaatattattctttatagtttagagnattntacattcctgggaatgtttttacaaaacttatatcaaaagtggtaatgtgatattcccaagtccacattcccatgaagcttgctcatcacaccttgaaacaagaaccacccaaatgttcataactcacctaccaatttccaacagactcaaatcaaacatacaaatgcagcaatttgcaataaataatttacctttaaacgatgtttaccaagaggtggttgcaacttgccaaaagtagctagcaagagattttcagcacaagacacatctaagagcttgataaatcacctgcagagtaagagctagatcagtcatttttttctctgtagaaccagtcacagtagaacttcaaaatacagaaaaaagaatctacattca

SEQ ID NO: 75631 - DNA, 470 bp, Glycine max
  unsure (1)..(470): unsure at all n locations
atccttagagtcacctgccgcatgcaagcttgctcatgcatatggaaggttctgtacttgtttgttctntccaagatagaatgctaaatactcatgatttgggacaaaaatggcagcagaatttctaaaattctcaatctaggatccatgagaatacttcactagacattntaggatccatgagaatactttactagacattntaaaggcatcccaacgtcttgagcaaatgttgtagaagttgattaataaacttgtagaggccactatgccatttatcgcgatcaccttcaccgaagaggtcgagtttgttgttaaatcaaacaatacggtaacaaaaaatctatgattgaaatataagacaaccaaatatttatcaacgcactggcaaactgtcaaaaaagcaaatntagctggcggtaccaaataccaacggaaattatgatgagtatttgctcagatacaatcat

SEQ ID NO: 75632 - DNA, 434 bp, Glycine max
  unsure (1)..(434): unsure at all n locations
aagctattcctttattagcctcagaagcccatatatttccagttaaaatggtctgaccatgaaaattctcccatcacggatgctggcttacatattttaggcaccaaggaagtcctcaaaatgtcatgatattcatgcaatgaattaaagttcttggttactaaaccaatggtggagcatcaatcatgttaattantgggaaatttcataagttcttctataatattcatgcaagtggttcaacttagtacatgaatgattactcactgatatgtttggcagcaagaaatcggctactctgtgtaattcctcaggcattccaattacatttgaaaggcgtcttagtgatttccttactccttctgagaaatgcattagttcttgctttctacatgaaaacgatgtctgacttagttgaggaaattgatattcat

SEQ ID NO: 75633 - DNA, 403 bp, Glycine max
  unsure (1)..(403): unsure at all n locations
agcttcaccttctggtcctcctcatagttgtggcattagaatacatgctctattttcatctcccactccaagtaggcctccggatcattctttctctttaatggaggaatgttgtagttaataccatcaattcggttgtgtctaagaacaccatcattccctcttctcctcctttcttcttcattatgatctctattctccatttgatccaacctctcgtggagcgcatcatctcgttgtttcattaacctctccatatgttgcatacaagcttgcatttggaattgcgaaagccccactccatcattatgagtagtacctgacatctcaaacaaacaaatcaaccgtacangacaattatagttgctgtttgatacctccgcactcaagtgatcacacaata

SEQ ID NO: 75634 - DNA, 409 bp, Glycine max
  unsure (1)..(409): unsure at all n locations
agcttgatggtgttgagaagatatcacatgtntgttatcatcaaanagggggagaatgtgaatgtatgtatacatgattttgatgatgtcaaaagaagaatcaaacaaggctcatnttgcttcaagattaatacaagattgtttcaacaaacaaagccttgattcaagatttcttcaagatcaagccttgcctcacaatgaaaggtttcaagtcattcaaggcacatgtaatcaattaccaatacatgtaatcgattaccaatgggttgaaagtgtgtaattggttacacatcatatgtaatcgattaccagagactctaaacattgagaatttataatttaaatgaagggtcacaactgttcaagaaaaacaactgtgtaatcaaatacactaattctggtatcgata

SEQ ID NO: 75635 - DNA, 489 bp, Glycine max
  unsure (1)..(489): unsure at all n locations
tactaagctcgttttactgttcctattaaccagtcttcatatttgttgtgcctattgtctttaaggcacattaaaactgctgcatctatgcccatatcaattaacggcttgatggctacttgtacacaacctatatggacatatttgtatttacgggtgtgttcataaattgaatttttggaaagtaaatgaaattcttcccctatatcttgtcctaaaggaatataattntcaactgttttgattatgtaatcaaaattatgtttctttttaattgtctcgagaacatacacagtatcctgagggatttctggaatgttccagtcatccatgttatggtttatatcttcgaatcgaacttcctcatcgaagagattgtgttttgnggagatctcatgggtctggttctcatgctcattgagcaagttattatcttggacgagttcattgaggaagaggatgaagacgagttggatctaatagaaatgt

SEQ ID NO: 75636 - DNA, 445 bp, Glycine max
  unsure (1)..(445): unsure at all n locations
agctatgagaaacatgtgatcctttggcatcatcataacatttagcttgatcctttgtctacacttctttgagtcgagatgactttattatttatttggacaagtttgaatatgatgtaaaagaaagtgaatgtgagccttttacccatttgaaaagcttgtatttaaaaatgttataaaaatacctcttaattaatatttgaattttattcttttattaatatatatgtgaggggtagagggtgtcacaaacttattcatcaaaaagcacactagtcatccatgccttttttgttagctcgatactgacaatccaagttattcatgttgacattcttgaagcaacaagactttgcatatnttccaataatccatagagggatattttcaaagccatcatcattgcaacaaataactaccgtcagcctttctttatcttgctttc

SEQ ID NO: 75637 - DNA, 435 bp, Glycine max
  unsure (1)..(435): unsure at all n locations
aatggattggagtctcaatttcattgtctccttgtgagagggcattttctctctaaatacactattttgcaaatcccgatgatgagaatgtgcataaatgagtttcgaaggtcatgttaaaatttaaggacgatccaacatttaacgagtctaggatcgcaattatatagaaatagatttgaatgtatgcgagaaaaagagaagattttgtgaaaggaagaatggaaaacatatttgggaggaagagacaacgtagaaacatatcctaaatataanaactgacctaatatgtctctatttatagctaggatactntaagtctattatttactctattttattagtttataaaaatgaactctattctacttcctatcaaataataaataanatatgctttntattttctaaaaacacatatctattttatttacc

SEQ ID NO: 75638 - DNA, 469 bp, Glycine max
  unsure (1)..(469): unsure at all n locations
agcttntgaagcattactcatacaattgttcatatttagattgcaccaacacattcctaatgtccatcacattgtctcactcttccacctttcccacatgaatcttgtattttgctctcaccttcttagcaatatgggattgacataagaagcggttgaagaaggaaaaacactcttcaatgcattcatcanagcaagatccctattagtgacaataacttgagggtaaacatcatcttccacaaacaatccttgcaccttagttaatgcccattgaaaattatgcgttctctcatattgtaaataagcaaatgtaacaaagaaagtcatgtgtngaagtcacctcaacgatctccaacaacgaaagacgacgatatttggtcatcttgtanatactatcatanatcaacactatagagaatgaattcataacttgatggatctagatgnaccacaatatatctctaac

SEQ ID NO: 75639 - DNA, 468 bp, Glycine max
  unsure (1)..(468): unsure at all n locations
tctatggaggttaaatctttaagttntaatattgtccttcaatggtgatatttagccatggagttgcagtggaagataaaggagaaaaggtgagaggaggcgccacccactagagaataagccatggaaggagaagatttaccaccaagaaagtgtcttggataagttgcttagagaggaagctntaatggaggaagagaatgagagagagagagtagcgtggaatgaaggagaataaggagagagactgaactctgaagtgtgtctcacaagtttctcattcatcanagttgtgacaagtgttgcacatgtttctatttatagcctangtcactaactaaatggaattgcctttntgaatttcattntcatttcatgtgaatctaaaaggaatattccaagaatattccanaggcatcttagcatatccctttagatgccacaagcatggaaggtgtgactctagca

SEQ ID NO: 75640 - DNA, 458 bp, Glycine max
  unsure (1)..(458): unsure at all n locations
gatcctctaagtcacctgccgcatgcaagctntntattntcagtagatgaagatgaattcgttgtcacctcatggactcctctaagaacaatagcatcatttcttgcactgaattgttgggagttggaagccatcttctcaatcaaattcctagcttcagcaggggccatatcaccaagagctccaccactggaagcatcaatcatactcctctccatgttgctaagtccctcatagaaatattgaagaaggagttgctcggaaatctggtggtgaaggcagcttgcacacaatntcttgaatctttcccagtactcatacaagctttctccactaagttgcctgattcctgaaatgtcttttctgatggcaatggtcctagatgcanggaagaatntctccaagaacaccctcttaaggtcatcccaattgaaaatagacctgtgagcaggtagtat

SEQ ID NO: 75641 - DNA, 434 bp, Glycine max
  unsure (1)..(434): unsure at all n locations
ttcactacanagcacttaatatatcgtaatggatataaatattctaactcatttgattactaaaacagataattccatcaatgaataatntaatagctaattgtgcaaaaagaacattcttgacattaacatggcagcttcaatcatacatatccagtctcaagtcttattgatcatgtggtgaagcaataggtataatgagcatgaatttgtaagttcaataaaagaacatgtntggtcttaccaataatgttgaaaaccagttttacgggtggctcacagtatcattgatgcagtagcaatgttgtagagggtgagggatagctgatttgatttttgttatagctaatgttgatcattcacatatgaatganagtaaatattatcccattctgcttcatttcttagcttacgccacgatgtgtctataatat

SEQ ID NO: 75642 - DNA, 476 bp, Glycine max
  unsure (1)..(476): unsure at all n locations
agcntggaggaactaattcacgaaccgctgctgctgtagactctgtcactatcctttgcagcacgatgccacacacatggcaactcctaaaaagatagaaacatttgaatagtctctttcagaagttatagcatataccttaaatagagaagataaggaattaaaggaaaatcaagtataacttgtgtggtagaatttgagaaacatgcaatagatcaagattgacaccacgtttaaacatcttgatcagtgatagttactacttactatctttaacacatttaattactcttataattaccttttaaatgatttttttttatcttcattgattagtcctaatactaattaagttgaattaatgggtcatgttggacttcgaatctttttaacaacatttgtttcantttgacacagttgtttcacaatttggtcatattgttgaaatgctacaatttctacatattctaaatata

SEQ ID NO: 75643 - DNA, 460 bp, Glycine max
  unsure (1)..(460): unsure at all n locations
taagtcacctgcggcatgcaagctngcaaaccatatcaatgaataaccgggctatcttgtgtgttgtatagttggtaggaagtatgccaaaatgagctccgttcgaaaagtgatccacaactgtcaaaatcatagtagcactctagtaattgggcagcccggtaatgaagtccaatttcatatcctcccatggactagacgaaggagaaattggttgaagcatgcctaaaggtttttgaggaacatacttggtatgttggcaatcaatacatcgcaggatgtattctcggacatcttgcttcataccaacctagaagaagttgcgttgaagacaactcgaggtcttagccaggctcacgtggccactcataggatanttttggtattctttcaatagaagtggaataaaggaattactcttatttacccaaatgtgggctttgaaaataatactcatcct

SEQ ID NO: 75644 - DNA, 437 bp, Glycine max
  unsure (1)..(437): unsure at all n locations
aatcctcatagtctccagcattctccaatatatagtgggctgtcaattgctcatcacggtcacatgccaaanatgcttctatcaccgaggctctatcaaatcccatagcctcaagctacgaataataagtaaaaatcaatcagcaggaatgaaaatcgcaatgacacgtatattattagactacaaaaaggagtgacattgacatacccttccaattgccttctgctcagctggagtcacattgatggcatggggcatgtcttgctcagctgctcaaacatatcactgacagaaaaaagatggatacgtttctacttcaaaacttcgtgaatataaaatattaaatgatgcangtaaactcccacattaatattatatgatataagaatagaatatcaagctcacaaggngaaacgtttcttcatattgcatatatg

SEQ ID NO: 75645 - DNA, 404 bp, Glycine max
  unsure (1)..(404): unsure at all n locations
agctntgatcacatttatcattctagacaaacttctcattcttactaagtcagttagttaggggtagtgctaacttataaaatccctcaatgaatntcctataatagccggccaaccccaagaaacttctaatttctgttggaggtttcggttgttgccactccataaccgactccactttaatcgggttcactgcaaccccatctttagaaatcacgtgccccaagaattgcactttctctaaccaanattcacatttcgacaatttggcgaacaatttcctatccctcaagatatgcaacacaattctcaaatgcttttcatgctccttcttattccttgaatacactaggatattatcaatgaacacaaccaccaactgatcttaattatcatggaatata

SEQ ID NO: 75646 - DNA, 455 bp, Glycine max
  unsure (1)..(455): unsure at all n locations
cagagacataaatggaatatgaatggagctttcaaatgctttgaagcattcaaaattctcattagagaagaactccatatctatgaatnttgggtctacaatggaacgagaggaaaagaggttcgtgtaccgtgtacgctgttcctctgatgaaaataatgatccacacggaatggagggaggaattanggcttcttgtgacccanaatgccgctgactctgactcgaggttccttttcgctctttcgatggttctgccgattgaggagtgtttttatgatttcaatcggttcanatganagagatngaaaaaagatgaagtttgngctttgcggcgagtgatttgtcaagaattgagtgtgatatgactggaaacaaactggggcgaaggtttcgaagagaaaagttgagattcaaattaaatcgatattaatgcnggcgtgcgaatcatacac

SEQ ID NO: 75647 - DNA, 346 bp, Glycine max
  unsure (1)..(346): unsure at all n locations
gctgcaagcttgtaatatttattggataattttctgtctattangctcttgatgtctttagagttacttcctcgttgacatcttttggcttgaatggaattgccatgacaggtntattgttactgtctttgatatttggtagttgatattgtgttgcgggaggtaattccgattggattaactcaccatctttaacttgccaacttgttatgacatttgttgttggatcacttatgatgtcttgtttccaagggtaatctatatcatttctgatggcataagcatgaaaccaatanaagaanaggacattaatcttgattctttccacaaattcgtagaacttgtc

SEQ ID NO: 75648 - DNA, 430 bp, Glycine max
  unsure (1)..(430): unsure at all n locations
atcctctaagccacctgcggcatgcaagcttgtaggcctaagatcttcttcatttatggatttctntgcttcttggaagatgaatggcagcggaatggagaaaggaagagagagaggagactccacttctacgagaagatgagtctagaagaagctcaccaccatatgaggccatggataatagcttggaggaagaatgagatgaatgaggggagatggagagaacagcacgaaattttgtgctccatatgagctttgatatctgaagtttaatattcaaatgatcaaagttgaaaaaaatgcacacacatgacctctatttatagcctaagtgtcacacaaaattggagggaaattcacatctcacttgaattngaaattgaatgtgtggagccaaacttnggagctcaaatttcactaattatgatta

SEQ ID NO: 75649 - DNA, 455 bp, Glycine max
  unsure (1)..(455): unsure at all n locations
agctnntgagccaaatcccaacttaccgtataaccttgacccatggtgagaatgtcaatccttgccctcggaagaagacaaagaanagaaagttcccgacccaagaatcggaagaaaacaaagagaaaattcccaatcaaaagagtggaagaaagcaaaaaaaaaggaaagaaaattctcgatcaaggattggaagacaacagaagaaatatgtagaacaatatctaaacaacacagagttgtcaccaagtaaaaaagacaaaaaaagaaaggaaaacacgatctagagtggtcctctccctttgattgccaaccaaaaatcttgtgcgctagcgactttctcgccccgcactaaacaaaaacagaaaagggaaaggcangaacactcaaagccgaatttccaccaaaaaacaccattcccaagataaagtctattgatccatgatcacgcatgt

SEQ ID NO: 75650 - DNA, 402 bp, Glycine max
  unsure (1)..(402): unsure at all n locations
tactatttctttttgctaatatgtaaatataaatggtataagggtattccgtanaaacattgtctatatttacttctaagaatgttaggggtaaaaatgaccatgtccttcagaaagttgttctcagaatatcccaaaaataaatccctcttattactagatattntgaattctttagttcctcaatgtacaacctgtcaaatngtgctcgttcccctctttcttttttgcaaaaaagaaaatcaaatgctgtgaaaacatggatgaagtcctaagaaaatcaatatcanagaanaaatggatgagatcacaattaanaagcacaactacctatctttcagagtccttcggttaatntgtcttgtctccttatgtggtgcggctttggttaataattgtata

SEQ ID NO: 75651 - DNA, 393 bp, Glycine max
  unsure (1)..(393): unsure at all n locations
agctntgagtaatatannaacgacaatatatcttttactctgatgtccgattgagtcccgtaatatatcgagacgctcgtaattgaaaacagaaactttgagcatattcaaacgacaatatactttgactcagatgtccgcttgtgtcccttactatatcgagacgctcgtaatagagaagggaagctctgagaaaaatcaaacgacaataactcttaactcggatgttggatagagccccgtaaaatatcgagacgctcgtaattgaaaacagaagctctgagcaaattcaaacgacaataacttttgactcggatgtctgattgagtcccatatatgtcgagacgctctgaattgaaacagaagctttgagaaatttaaacgacaataact

SEQ ID NO: 75652 - DNA, 273 bp, Glycine max
atggtggcaaccaaaagtcacccccaacagccaacaagtcaaccaccatttggtcttccaaaaggctgatgcctatggtgccaattgggcccttattacaacttgaactaaagcccttttagttgattaacccaaaacatatttttggtcagccaactttacaagggatgggccattatttagacaaactaaacactctaaaattgaaataaagtggtgtcatttagtccttcatttgggccatgatacaactcacaaccttggacttttctt

SEQ ID NO: 75653 - DNA, 459 bp, Glycine max
  unsure (1)..(459): unsure at all n locations
agcttccacatatccaagaaattcaatttcaaatattatgaaactaccctaaaccaagaaaacagggtagtggcagaaaactctgcccaaaacacattcaaataccacagctnttcttactcatataccccagtaacattctcttctttccgatttgttaaccattggatcgacttgaaaattttagtggaggttactagtacataaatctacattttgaccgttgggatctgctagaaaatgcctacaacacgaaatgtaatactctgcccatgactagcaatgcacaagcatttttctgcacatttggtcaagttggctgcacaatangacaactttttgctgcattatgtggcagatatcgaaatccaactngcccacatccaaatttgctcagattggatcctacaagtcctaaatcatgcataaatcatatttaaaccaaagacaagcttcata

SEQ ID NO: 75654 - DNA, 405 bp, Glycine max
  unsure (1)..(405): unsure at all n locations
ggaatcgctactgcggacctttgttaagccttggtctgtgatgttgagagaatgaaggtgttgaggtttttatcttttgaangggaaattggaaaataatgtacacaattgatgaatggcttatttttgtgattgaaacataaaagaggtgaatttatgatcatgtntatcaccttgcttgtgagagtgttgcttggtgcctaattatctgggatcttatgctgcatttttgggaggttatggtgtgtatattgggcacatgttcttgcaatttattatagttcgttcaaatttagttcacttgtttcatatgattgtcgattgaaattgatatatctttgtatccttaagtgcgatnggttatgtacataagcattgttgttacttatgtagacattgattgtg

SEQ ID NO: 75655 - DNA, 418 bp, Glycine max
  unsure (1)..(418): unsure at all n locations
agctngtagaatggctagacattatacatgtcanggcttnggctggtacaagggtaaaagggatgctccacattatttccatgacacaaatgcaaaaatgatgatttggaaattctatgcaaaactggtcatgcatgcacctatgcggacactcaagtgtcaaatttttatggtcatgtgatgctagggcttatgatttatttcctctattttagatcaacccaatgtttccaaaatagtgtctattatcaatttgtgcattcattccagtccatgttaggcgtgcggggaaatttaacaggcattacccttcaggtgtaaacacgtttttattctcttaaaaattggtcatgatcaatgaattttctttccaagaagagttggaatcattctttttataagcatgtcggttttaact

SEQ ID NO: 75656 - DNA, 483 bp, Glycine max
  unsure (1)..(483): unsure at all n locations
tgntgtgcaccatcgcccgaccgccacctagtacgacatgtgatggtgtccccataatcctacaagcttgagatgaggaagtgttgaagggtgaaacttcctgcttttattgttgaccacagagtggtacctggagatatgtcgcgggggtcaggagaccttgtggacgtcaggtggggtgctattgcccaaaaccaagcttgaccaatcccgacccaacccgggcatagtcggtcagtgagaacatgtgacgtacctaagcatgcgagctcctggcagtcaacagataaaaggaaaacaagaccacagagcaaggaggcttgtggtggctggccagctgtgaattttgtgtaatatgtggattgtggcctctggtaatcgattaccaagggtgggtaatcgattacaaggcttanaattgaagacggnggctaagatggtctctggtaatcgattaccaaggggtgtaatcgattaccaggc

SEQ ID NO: 75657 - DNA, 409 bp, Glycine max
  unsure (1)..(409): unsure at all n locations
gtactcctctaatgactatagcatcatttctggcgctaaactgctgggagttggaagccatcttctcaattaaatntatggcttcagcaggagtcatgtctccaaaggctccaccactggcagcatctatcatacttctctccatattactgagtccttcataaaaatattggagaagaagctgctccgaaatctgatggtgagggcaactggcacatagttttttaaatatctcccactattcgtatgggctctctccactaagttgtctaatacttgagatatccttcctgatggttgtggtcctggaagcanggaaaatttttctaagaatactctcttaaggtcatcccagctcgtgatggaccttggagcaaggtaatacagccagtcctttgcactcccttta

SEQ ID NO: 75658 - DNA, 109 bp, Glycine max
caagagacttgtataatgatgcacacgtcacagttgaatatgtgacaagaatgtatgaccaactgaacgtgagaattgcatataagaatgaaagttatactaagcaagc

SEQ ID NO: 75659 - DNA, 261 bp, Glycine max
caatatgttgcacgaggctctagcgactacgatacgaagatggagaattctgtctttcaacggggagctcgacaatgtaacacacatgtacgcaccccattcaaagagtcaaccaaaaacggtagaaaatatctagaattagtattagactaacgtataccactaagggcgacttggtgtcttagaccatcgcatattggagaggaaccatttcatctttgtcgaatagaggtgatccatcatacgcgtggaccacatcgt

SEQ ID NO: 75660 - DNA, 234 bp, Glycine max
aaaaaccattttttttatgcatatgaatggcccatcttgcattgccgcttaccactcatacaataatgcctttggggttcccagcctccatatcatgccttctgaattggcaatcccctgggagcctttatacctgaatggaccaggaaaaaagggggggtaaaacatgcctatattaaatctttctaagcccatatttatatatagtggaaaaaaaatgttgaccctgtgtat

SEQ ID NO: 75661 - DNA, 423 bp, Glycine max
  unsure (1)..(423): unsure at all n locations
tgcatgcaagcttcggaagatagtgatgaggtacaagcccttatatcatagctngaaagagcccgagtagtcgaagagaagttcaagtccatagccatcaaagtctgaaaagagtatgatgaactaagggacgtcaatatggccaccgctgatgccttggaacgagaaaccaagaaggcccaaaaggaagaacacgtgccagcaaagttttgaggggctttatagggcagcaatagtaagctcaaactccgaagaggtgaaaggaatcatcacgggtcaaaggcatgatcttgaaggacgagctaaaggcttaccttatgtcgaaaagaaatttgtcccaacagttaagcgagactgaagggaatatgtgggccatcatcgatgagtgcaaagagaagctaaatctagcggcgactcacgagc

SEQ ID NO: 75662 - DNA, 374 bp, Glycine max
  unsure (1)..(374): unsure at all n locations
agtcacctgcggcatgcaagcttatttagacctcgatggcctcttttctgttctatcccactgtcattttttcgatcactatcggtgaataatacttttttgccgaggtgcgataatgtttccttgcccaagtaatgggaacatgccaatttcngccgaaaccaaacatcggttcggcacgcacgaaaaaacctaacccgactatattgtaagtttttatgcaacaccgaacaagaaacttacctgccgtaagaaaaacattatctgccacgagcgtttttttaaaaaaattgcgcatgtcgcttaaaatatacctggcatttaccacgatgtggtttgggttttattaatcctcgagaaattaataatgcatt

SEQ ID NO: 75663 - DNA, 167 bp, Glycine max
  unsure (1)..(167): unsure at all n locations
ctagcgtctcacatatgatgctcctgaatttgttctctgcgngaaangttatgaccgtgcgaatatctcgagagcttccactgttcaatttcgagtgtatcgatatgtgatgctcctcgatcagacattcaagtgcatagttatgaccctcttaagttctcgagagc

SEQ ID NO: 75664 - DNA, 462 bp, Glycine max
agcttgatcagataatcgttgaaaccaaacctttcttatattaaactcggaggctaaatttatagtctaaagccaagcacagaaagggaaactcggttgagtgcaggaacgacgacgagatagaacatggctacccaacccatcctcaaagccaaactaaaatcgtaaaaaaaataaaatagaatgaagatgagaagagaagtaaaaacaaaaaatgctcagactttgtgttaagaagagaagagataaagagagaggaaacatctcaacgtggcagaaaaaaggcaacacagcaggcaggtggcacataacaaagcaacaggtggcacaaaaccaaagcaaagctggagggctataaaatgaccaaaaaaaacaaaaattggacagctgtcaagctctcagccatgggtattttgaccaaaaaaaccaaaaaatggacagctgtcaagctctcgggcatgg

SEQ ID NO: 75665 - DNA, 330 bp, Glycine max
cgagaggtacaagatactcttgatgaattgccccaatcatggtatttatgaggttggtcaattatacatttgttatgttctcaatcaactctgctgcctcttcgagtgtcttatattgtaatattcctccactagctacagcatcaaacatcaccttttgttgcccttcaaacctccaaggaagatgtataattgatcgaccttgttaatatcatgactggggcaattcatccagaaagtcttgtacctctcacaagcttcacacaatggttcatcactattctgatggaagctcaatatatttgtcttagcctggtttctattttcctc

SEQ ID NO: 75666 - DNA, 348 bp, Glycine max
  unsure (1)..(348): unsure at all n locations
agcttgagctcactgttgctgccccacaaagctccttgaaatttttcctggccatgctcttccttgcgagccctcttggtttcttgttcaagggctcttgcggtagctgcattttcttctcgtaacccgacacactctttccggacgtctgtagtgaccaacttgaatttttctttggcaagtcttgcttttcctagctcggttnttagagctcagacttcttcatcctcttccggagcttcgaagttctcttcgttgataatctttaacttggagagccaatcaaaccctcgtgtacgaactttcagccattcatgaataatttcgcaacctacccttcggtgggag

SEQ ID NO: 75667 - DNA, 380 bp, Glycine max
  unsure (1)..(380): unsure at all n locations
ataagaaaaatagaaaactcttaatgtggttcaattaatatatgaaaacatttcggtgtgcaaagcttaacgtgaagtaatattaaatgaaatggtcatatatntttaccaatttcacagagaaacgtttaactaagagatagtgtagctcagttggttgatagtgtgggtgaattgatgtaaaccactaagtatgaacagaaatatgtntatcggcttatgcatctgcgcccaatgctgtctctgcaataaacaaaacagaagggtcagcgcgtcagccattatatgctaaactcgcgctgaaattgttccacgtgtttatgctagtagctacctttcttgcctaatttctatgctgcatatttatatagagagagaga

SEQ ID NO: 75668 - DNA, 391 bp, Glycine max
  unsure (1)..(391): unsure at all n locations
agctnttagtgttgntctacatcttgaattggagtttcacctctataatacacattaacatttgatggaaacctttattacacggattacttgagtgaaactccaattctgattggagagcaatgccaaaagcactaataaaactacatctaagttttgtaattgcttttattatttatactgtgttgcgagaatttgtttgattntgggaggaaagaaggaaaacaaagcacacaacattntttttaatttgattntaatctctaccattaattgttttagttgtcatctaagcgttaaaatcaattgttctcatttctcatttgaaacatcccattttatatatatatatagatgaaagtgtgtaaaactccccctgagtcaacaactt

SEQ ID NO: 75669 - DNA, 428 bp, Glycine max
  unsure (1)..(428): unsure at all n locations
tggtattggagagatggataatgttaataaagttctattatctattagctaagcgattgtgaagataacaataaagaagctctttgggtcacagtggttatagctaggtctaaatcaagagaggatccagtacaaaatccttcaacatcgtcatggtggatgaatatttggaagatatgccaaagagggaatcaaggtgtatggttctggagtaattatagacggattctaggtgatggaagggataccttgaagcaatcctaccccccaaaggcattggatagaagactccaagaagaatgtgctatagatgcaagagaaggccctagggttgtcatgagccttatggtagatntcgagcctgtgggctaagtatgagcccacctatctttcgtcatattacgataacggttcttcatttcggccct

SEQ ID NO: 75670 - DNA, 358 bp, Glycine max
agcttgaatggctagtttgtgtagtcctcaaggcttgttcatttcacttggcgctacagagcagggacactttccccagaagtaatgaagggcctatatttcagaacatcatcctttacccattcaaaaccggcaacggcaagggggacgagggcaacccaacactatggctactttgcacaccagggaacgccttaccgccctctccaacactatgggaagaattatgtggacctaactacgctccactcctgataagtcattatacggttgtcacatctcccaattatgaacatcattactcatttactcaacttcattggtatagttgctaatctcttagctacagaaacatcct

SEQ ID NO: 75671 - DNA, 352 bp, Glycine max
  unsure (1)..(352): unsure at all n locations
caaaatggtgctcgatgtgatgtccctgtgaataacaaccttgtcccaaccgtgtgaaggtagtaagcccctctgccacgtcgacaaggatacgacggcgttgctcccaccccagaagcttctccgacttatcaaaacccacttgttgagactcccgtgggcatgtaatcataaaccaacataagctcgttccccctttctgcaccaccctctcatttgaaccaagttcttgtgctgaaagcctcccatgctnganatctccgccatgaattcccgcaacccttgcttcgaatcgtggttcacgcacttcaccgcaatttgcgtatggttcggtaacgtccctctgtacact

SEQ ID NO: 75672 - DNA, 468 bp, Glycine max
  unsure (1)..(468): unsure at all n locations
tctatgagtgattagaatacattctgtttcattcatgtattatntctgaaagncaagagtgacttagtaacataanatacttgngtcttaatctcagtgggagattaagtgtggcgttaggagtgacctagagagtactcattgtattcagaagtggcatagagaatacttggttgtaataaaaaaattgattagtgaaacccttcaagtcttgagagagaactggatgtagcccacaagttggggtgaaccaatataaaatatctgtatattcattattacttttatataactagatcttttctttaagtcacttatacactatcattatcaagtttggtgaacttattgtctaagcactaagtatatatccctctatactattaacccttcttctagtgtgttnannntcttcatctctctgtttttgtcacacacacggacacgcactctcacacacttacacac

SEQ ID NO: 75673 - DNA, 447 bp, Glycine max
  unsure (1)..(447): unsure at all n locations
taaccctacagtcactggtcaaagtatttcttcttgaagaaaccttctatgaatctttggtaatatcctgttaaacccataaaactcctaatcctcaaaaccagactttagactcttccacttcaggaaagcctttattctagagggggtctaccactatccccttttagatatcccataccctangaaactaactttctccaaccaaaactcacacttggacaanctaacatannagtatcgattcctaagggtctgcaacacaatcctcaagtgctcctcacgttcttaagggtgatagactctattcgtgtaatccatanacacaccaggagcattagtcacaccaaagggcatgactagatactcgtagtgaccataacagttcctaaaagtagtcttcanaatatcctaaaacttcactcngaattgatggtaacctgacct

SEQ ID NO: 75674 - DNA, 201 bp, Glycine max
  unsure (1)..(201): unsure at all n locations
cgtcttcttcgtgaccttcatcggtcttcttcgttctacttcgccatctgngggcgatgacagtggtgttgctgcatactaccctccgcattgtcgacgtaagttcctcttcgatctcgtctgcaccatgggtgttgacagggaaccttctgtgatgatgctgggctagctaccattcctaaatatttacatatattgtct

SEQ ID NO: 75675 - DNA, 61 bp, Glycine max
tgccttcattactgcttgggcatgctgcaccttacaagactttgacacactgacgttgatt

SEQ ID NO: 75676 - DNA, 453 bp, Glycine max
  unsure (1)..(453): unsure at all n locations
cttctacaaaanatttcccatgctgtggcattctgctatatgccagctgaggtctccatcttccaaaattgtgattctgtcaaaagctttttaattntccaagtattattctcttanttttcttaacctaccatnttcagcttctatagttagattttgaatttttgtttgaaatattgtgtgctatcttctcatcattttataagggttgctcacccaaattcaagtcatttggatatcatttgatgatagttgtagttcaaacctacactgttacttgcatgagaaggcaactaattgtgcatgttgaatgtagtgtatgactagaggcaatccatctgatttacaaccctttgatcctganatggataggacatttcatagattagttaggcatagtgtgcatcttgattaccctgaacattntgtaacctttgagcatcctgagcattt

SEQ ID NO: 75677 - DNA, 306 bp, Glycine max
  unsure (1)..(306): unsure at all n locations
ttgctactgggaaatcgattacaaaccatctgggtaatcgattacaaagaaaaagtaaaactctttgggtaaacatgttttgagaaaaatccatgtgctactcaatttttgagaanaaccttttcatacttatctngattaagccttctcttgattcttgaatcttgagtctntgaatctgatctcttgaatcttgattcttgaaatcttgatctctttgaatctggatcttggatcttgaaataaacattcctcttgaatcttgaagtgttcttgattctatcttgaatatcttgaactcattct

SEQ ID NO: 75678 - DNA, 275 bp, Glycine max
  unsure (1)..(275): unsure at all n locations
agacagccacacatactacttaatgcccgcgtcttaagtaccaacgttatcaattntatttcacaaacttactcacttgatgataccaacactttgtgtcaacagtctgtaggatctctcatcataaacataacatgtgctatacaaattatgtgtgtcaaacaaaggacccgaaataacactaccaacatgtgtgtagataactcactctataagagaagtaaaaatactctgctgaaattcgttgcagctaatttgttcttctttagaatact

SEQ ID NO: 75679 - DNA, 342 bp, Glycine max
  unsure (1)..(342): unsure at all n locations
gcttgaatcggacatccgtgtganaagntatttcctttttaatnnctaattatctncgngntggatntcgagcctgtcgacatattatgcacccgaatcggacatncgtgtgaaaagtcatgatcatttgaatgtctcgagaggttccgatgtttaatttcgaacgtatcaatatattataacccgtgaatcggacctccgtgtgaaaagttatgacaatttgaaatttgacgagagccttccgttggtcaacttcgaatatcactatatgagatgcgccttaattggacatccgagttaaaggtatgaccatttgaattctcaagagctttcgtgctcaat

SEQ ID NO: 75680 - DNA, 261 bp, Glycine max
  unsure (1)..(261): unsure at all n locations
atgctcgagattaaacatcggatgctctcattatttcaaatggncataactgttcacatgaatgtccgattcgggcgcataatatgtcgagacgctcgaaattgaacaacggaagctcttgagaaattcatatggtcataacttttcacacagatgtccgcttcacgcttattacatatcggtacgctcctcaattaacatctgacactctcgcgaaatttaaatggccataaccttccacacggatgtcccattctggcg

SEQ ID NO: 75681 - DNA, 431 bp, Glycine max
  unsure (1)..(431): unsure at all n locations
agctntctgggacctctttcgcattggaaatcattatcaagagaatattggtagtcatgctaacagaattatttttcattatattaatataactaaattaaaagaaatactctnttagaaatntnnatattntaattatatatttatataattttaatgaacattaataatgtaagaataaaacactactagaaaaagtacatttaacatcgtcactttaacattggttttgagaaaaatcgatgttaaggttaagcggtggcataattataattaatatgtagttgttaacatcaattttctaaaaaatcaatggtaattatcttacattaacatcggtttttcaaaaatcgatgtaacaattatatggtccctccgttgttcaaaacctacgttttctaatctggaacctcatctttttttctgggttc

SEQ ID NO: 75682 - DNA, 421 bp, Glycine max
  unsure (1)..(421): unsure at all n locations
tggtgtgatacatcagtatgtgttcatagntatctattattttatgtaagaaaatctgtgattaaacaataaatttagccttttatagttntctattagtgtactggtacaggtttaaaaggttgttactatatctttatcagtntgnttgggtaattggttgtaaaccaacagtgttggaaggaatgtgactgctagttttatcatgtaatgacctggatcgccttcttacaatcattgccaaacttgtatgtactactttgcctgtttgccaatgattcattctaacactgtattgtgagttttattgtctaaaatgtctacatatttaaagtatcatttctacacatttatgtcattaatattcatcttatataaaatttaatcatttcaacattaatataatgtatttttgataaat

SEQ ID NO: 75683 - DNA, 450 bp, Glycine max
  unsure (1)..(450): unsure at all n locations
catgcaagcttaagctntgaaaatattggctacattgagattttctgctcaatccaatgagatcacgcttcaacttgaagatgcgaggagcattgctctgctgaaagcgttcttgcaaatctttccaaatatcatgtgcagaagtcgagtaaatgacgctggaagcaagatccttggaaatagaattgataatccaagatgcaacaatgttattggtgtgttgcaggaattgaaaagagaatctccaatttcaagtatcggaatcgaaccatcgatgaatcccaatttggttttggcaatcaatgccatgcgcattgatctactccaagaactataattatcaccatttagaggttgcgaaacacgcaaaatccctgagttatctgacggatgtaggtagaacgagttaccagcatcttccattgatgaaaatcanagaagaatcgagag

SEQ ID NO: 75684 - DNA, 383 bp, Glycine max
  unsure (1)..(383): unsure at all n locations
ttaatggtaattcttataaatgtcttgcagcttccacggttgtacaatgtgtacaaagaaatgggaattgtgacatcattccagaacatgcttgacaatatntttattccactttttgaggtcactgtcaacccagattcacatcctcagctgcatgttttcctgaaacacgtgtgttattcatctatgttgactttttagagtaaatagccaatttagtcctccaaagatgaagtgccattagattggcctcatcataatgcttgctgtaacttaatcctagataaatgaatgcttattntttaaaagctctcacacacagtctaagaagatagccattatttttctaaaataagttgaaccacacatactcttcattcatt

SEQ ID NO: 75685 - DNA, 341 bp, Glycine max
  unsure (1)..(341): unsure at all n locations
agctaactaagctnttatcatttacaatacaatatcttgacccaaaagatggttcttgaccagatcgaaccccaaaaacagcaactgagtcaatgactaggacaaccaatgcttctgggacttatctctaacagcccctcacaactagaagtgactcacacttcagcctgggatgaacaatacaagtacaaaatgaaagcgcaatacaatgaaacatgcccganatacatcagcaaaagatagacaatgactgaaaacattcaaagacaattggaatatgcttaaccattaagcagaagccataacacaaggcttaaccactcaacanaagcaaacacact

SEQ ID NO: 75686 - DNA, 488 bp, Glycine max
  unsure (1)..(488): unsure at all n locations
aatcaagtttcaaagaatcaagagtgcagatcaatcattttcnatattcacgattcacgaacactccagagcaggattctagactcgagattcaggaatcaacagaagactcagtcaagataagtactaacaaagtttttcaaaatattgagtagcacaagaatttttcactaaatcttttaccacagagttttactctctagtaatcgattaccagaaggtagtaatcgattaccagtagccaacattgtttttcaaactgatttacaaagctgtaattgattatcatgagcttgtaatcgattaccaatgttttaaaacgttagatttcaaatttcaagagtcacaactagtgataaaacattttcaaaccattctaaacttgtgtgatcgatttcataatacttggtatcaattaccaaagtttctaaacggtttgatttcaaatttatacatgaagagtcacatctggtgatgtgtatcgatac

SEQ ID NO: 75687 - DNA, 442 bp, Glycine max
  unsure (1)..(442): unsure at all n locations
agcacttgttccaatctgaccactttctttacaggctcttggttcagcttcctttgtcctcttttgttcaataaatcgataagcatcagcagcagttacacagcccgcaattcgagcttcctaaaaaaaatttcaaatgcatcggcagatgtggccaaaattaaaataatttgatcaaggctaaaaatcaagaaacctctcccaatataagtggtgtgcagaaaacctcacattcttcggaactccaccaacacagctccataaactaacgtatttcattgtctatataactcatgtaattatgaccaatccgtaataagaaatatatatttcttataaaattacatgggaatagagtctantttagatatgttattgcgtcacatgtaatntgttcacactctagtcctaggcatgaggaggtggtgttattgagctacct

SEQ ID NO: 75688 - DNA, 201 bp, Glycine max
  unsure (1)..(201): unsure at all n locations
ttctttttcccattcccatttcctttatgtgaagaaaatattnttgggcatgagtagcaacttgagtcctggttcttgtcttaacagcatgttatgagatgttcttccaatcacccttgccaaagtaggcaagcccttcaagagacagcctgttattgaaaggaaaaagtgacaaaaaataatttctgaatgaaacatttg

SEQ ID NO: 75689 - DNA, 360 bp, Glycine max
  unsure (1)..(360): unsure at all n locations
ctgcggcatgcaagctntaattcgttctcacataggagaatacgcttattctatagaaagaaaatatttgtatatagactacgtttacattagttggacaaactgaatcaatcagtaacacataatcttaacaaataaaaaaaaagtaacgcattatcagataatacanagatatatgagattatntagtataaagtgatgaaatactgaattgttcattggggttaactagcaaactcgatgaagagagtctgttattctcgatctaaagagatcttctcagaatgtattccgcaccttggtgggaattggaatttctgcgttataaatgggttttgtctcccgtctatatgttgaact

SEQ ID NO: 75690 - DNA, 147 bp, Glycine max
  unsure (1)..(147): unsure at all n locations
gagcttaagtaggtgcttttatacctttataattttagctntaccttctcctccattgttgtttcttcattttgctccatgtatctcctcacatgtctngtgttaaatgttcttaacatgattctttagagtttccaccgactaatc

SEQ ID NO: 75691 - DNA, 442 bp, Glycine max
  unsure (1)..(442): unsure at all n locations
actaagctccttaactgccaaggctctaatattttttattatccttgnggaaccttcacccgatgaagacactgacaaaaacttatcttctccttcttggacaaagtatggcaggctgggggcaagtaaattttcttcccatcagaccgtggatgcataccatcaatcttcttccactgggagcaatcagccggatgacgaaccattccatcagaaatccttccatttgcatgccatgtaaagtcttttgcatcgtcctcgttagcaaaaagacgcgtaaaccttggaatgattggaagataccacaaaacctttgctggggggcccttgttggagttttcatcaaaactactttcttcttcatccttcactttgtaccgtgaagtcccacagatagggcattcggacatttcttggaatcatgcctgtacagatgcaatca

SEQ ID NO: 75692 - DNA, 338 bp, Glycine max
aagagtaatgtcccactggtaaaactaactttccaaatgtttgccttcgcaggaatggccccgatgaagcttgcctcacagaggtccaggaagggcaaggcggccaaaggaactagttccgccccggagtacgacagtcaccgctttatgagaattgtgcaccagcagcgcttccaagccatcaatggatggtcgtttctacgggagcgacgcgtccagctcaaggacgacgagtatactgatttccatgacgaaatatggcgccggcggtgggcaccacttggtactcccatggccaagtttgatccataaatagtccttgagtattatgccaatgc

SEQ ID NO: 75693 - DNA, 412 bp, Glycine max
atcctcttagtcaccccgctgctgctgtgacccgacaacaagagacttcgtatgttatttagactcaacggttgtacacgagagcactctatgtattcgatgtatgttaaatgccagttaagagcttacttttatagactctccatgtctggtcctgaagaccatttgaagacgcttcactttttgaataacttgatatccattggaatacatacttctcttgatttgtataccaaacttatgactactaatgcactacccaaacagttgaatcgactcacaacattttcgtgaaaagatgtgactctcccatttgaaatcgaatgcaactgtcaacacactggtatcgataccaattattgtaatctagacaccgtttgaaatgatggaacgtgcaaagacacaaactttt

SEQ ID NO: 75694 - DNA, 378 bp, Glycine max
tcttgcaactggagcatatgtttcttcataatctataccctattcttgaatgtatccttttgcaactaatctagccttatttctaatgattatgccatgttcatctaacttattcctaaataccccattttgtcctatgatggggtacgttttacgtttttcctctatatctcccacatagttctttttcaatcgatcaatatttctttcatacccctattctaatatcttctcctctgcttcatttctatacagtactattataatatactatttcttactatgcttactttttcaactacgtcatctcatatctctctcatccccttctcactagctcctttatactattttgtcttaattttctactcatattct

SEQ ID NO: 75695 - DNA, 429 bp, Glycine max
  unsure (1)..(429): unsure at all n locations
tctggacnttcacccccgtgccacccctttgaatattttcagcccctacttatgaggggcaacttccaccttatgaagactatccccggcaagacgatggggatagagataccaattatggactcctgctccacctcatagagccatcctcgcttgaactatcccagcccaacatagtccggcatatttcggtctcacccacacccgtaatagatactgctcccttccggaaaatatggaaagattgtagcccttgaaagaggttacagcaccaagggcctggcattaccatactggatttatcgattattctttgccaatatttctacttccaatttaataccgtcttgaaatacaaggaacaatgtgacagggcttttaaatattgctatatgggcctaactttacataattgtgcttttatattta

SEQ ID NO: 75696 - DNA, 140 bp, Glycine max
gtgttaagggtgaaacttctgctttattgtgacacatagtggacctggagaatgtcgcggggtcatgagaccttgggacgtcaggtgtggtgctattgcccaaaaccaagcttgaccaatcccgacccaacccgggcata

SEQ ID NO: 75697 - DNA, 432 bp, Glycine max
  unsure (1)..(432): unsure at all n locations
cttgagaatcgtcagagacggacatgaaattatgatatggtcanaacaatnggatttgtgtataaatttggatttggaagttatgtcgattgtcaactgctggacattgtataacgcagcatatctcaaggcgctacttacggttcatattgagttgaacagaggctccagaaatgaagtttaagcaatgaaacgtaaccatccccactagacagaacctgagatacatatttcgtacgtttagacaagatacaagtccgaacagcatatattgtttccataaaattcaatatatggagcagaacacaatcagattactcacgtcacctgtccctctctcttatatttgtcatctgtgtcttcatcgcttttctttctcttccttcatcaatcattgatactgaatgtgctccgacaggaaaaaacttaccc

SEQ ID NO: 75698 - DNA, 438 bp, Glycine max
  unsure (1)..(438): unsure at all n locations
ctaatgagctcttctatagtcatttaactcagattcttgatggctcttaatgttgtaacccgcggtcttcactctctagataaacttcataatattttatcaatgtgatcataattatcatattgtctacctagagagcgaagctcattcagaatggtttagaagcatccaaacatggtttggatatcttgtccatcttccatactgaagagttcatacttatgtgtcagaacgctcaacttgttacgttttacctcagaggacccttcgtangtaatgcctaaggtgtcccacgtccgtttggcgcttctgaagctgtgaactctggaatactctctttaagatagagcacacaacatagcatttcttgctctagagttgagaagaaatcatgatttatgttcctctgtcccattttccctanggatctcatttctt

SEQ ID NO: 75699 - DNA, 378 bp, Glycine max
  unsure (1)..(378): unsure at all n locations
atcatattgaactaggaacacatactntttctaatgaaaaaattcactaaattcctttagtattctcaacatctcaaagataacacacatttgtcaacacttgatagagggtaacatgatttatcaaaccaactctcatcattcaaatatcataattgccatgagttctcaaaatgaagaatattcttttttntgtgaaaaatacattattgtatataacggaaaaagttgtgtctgggtgactngttggtcatgggttcgaatcccgaaacagcctctttgcatatgcaaggggaaggctgcgtacaacatctcctccccataccttcgcataacgaagagcctctgggcaatggggtacgatagcttgcattatac

SEQ ID NO: 75700 - DNA, 340 bp, Glycine max
  unsure (1)..(340): unsure at all n locations
tcctttgtatctgtgttacccattaatgtgaattttctatnntcgtagaggtacagctagacagatgctatgctactacaangaagcaattgatggtaagatcttttcatttttctgatatttgtgtgcatcttatcatttcattaagaaaattgaggaaagtcaatgggcaatctgtagtattatttacaaaanagctatcgaccactagtgtggttagccacacattttcattttgtangtcatgcacgaatttatctnttttataagttctccaacataaataaaaaatataacttgaaatgactcanggtctattgtttcctatttttgaaaacta

SEQ ID NO: 75701 - DNA, 226 bp, Glycine max
  unsure (1)..(226): unsure at all n locations
atggtgacccgatgcttatatgtacaatgataanggctacgtangagtacgtgagctcatttgaaggtgggcaactggggatggtgggttcatgtttgatttgcggaagtgggagagttgatttgcgccatcgcccgatcgccacctagtaccacatatgacgggtgccccataatccaacaagcctgatgtgacaaagcgcggaatagttagcccttctactttt

SEQ ID NO: 75702 - DNA, 309 bp, Glycine max
cttcctcgttattaccaccaacgccatctataaagatccaagcgctttatccatcacccacagccagcattagccaccacagaccatcatttttctcctttggaaacccacaccgataggaaccctttagccgaagcagaatcttccaacttggcttgcggtttggtagaaaatgaaaacactaatgtggaccttcgttatctttcgagggaaccatgggtctatgctcgatacttgtaagtttcatcttgtctttgcatcatttttgaactttgaaccggcatgcatgtctaatgctcccttggaaaa

SEQ ID NO: 75703 - DNA, 453 bp, Glycine max
agcttgaaaaatatgatagtcaatttacttataaatgttaaataactgcctactaccttgaagcaatatcaagtaagcttctcatagctgatccagaatcagatccccatgccagaatttgttgtcttccctcagatataaaagcagattaacattctgtagcattctgctcgtgtcacatcattgtatatatttaataatataatcagaaatagtttaaaatacaaatgaaataagattgtggtgtatctagcaaaaaagaatcacctgaatttcactgtggtcatcactttgaaggattatgttgataacagcatttaaagagacatcatatattgctttcactacatcaagcaggggcattctgtataaagcttccacaatctgagatgagaaaaccatatgatatatatattgctcaaaggccaagctgacatgttctcagatacttgc

SEQ ID NO: 75704 - DNA, 193 bp, Glycine max
  unsure (1)..(193): unsure at all n locations
tgatataactcgcaacactattcgcaactaaagacaaaaacatgaatgatgatttttganattctgccgtctcaatcaacagtttgcacgtacctacccactcgttcaaagttgagagcgaccagccttgttcactacatgtgtgataaccatgatttacgacaaaaacatgaatgaatactgatgtctatct

SEQ ID NO: 75705 - DNA, 419 bp, Glycine max
  unsure (1)..(419): unsure at all n locations
gcttgaggaacacntaatagactgaggaactctttttaaattcaatcttttgtaccaacagaacccaaaaatcaaaaggagaaatgaaatacatcacaaacttgtcctccaaatgccgaacactatttgttgtcttctttgttgcttgcagtgacaactttatgtcggggaagactcacgaacacaaaaaaatttaaccttntatcctgtaaaaaatcattcataacacaaaacaaaggcagaagatgcaaaanaattaaagcttntgtgttgcaaaggaagaacaatagtcagccatggtaaaataagcccgaggaacacaaaaagattaaggaacacaaaaaaaagtcaatcttttgtaccaatagaacccataaatcaaaaggagaaatgaaatacatcacaaacctattctttaa

SEQ ID NO: 75706 - DNA, 454 bp, Glycine max
  unsure (1)..(454): unsure at all n locations
atgtccagattcgttgactcgttttgtcttgtgttctaaaggaganattgtcttcagtgactatgtgatggtcatcactcgatgtcaggacatgcgaaccttctgtaacaaatgcccgtcataaatggcatatatcacgatgatcgcgtacatgtaactcgaaatgatcatcatgaagggttatgggagaataatcatacataactgcttatggttttactggcaatgtatatgacctacttcataattgtaatacatttatgtacctgaattttttcaacttaatgtagattacatttggtctttaactgaatttatgttatataactgacatgtcaaattgatgtgccatacatttattgatctaatgacattatgttatattctgcatgcatgtaatttatttgtcagttcgctatctagccactccctactactcacatgtcaaaccttt

SEQ ID NO: 75707 - DNA, 335 bp, Glycine max
  unsure (1)..(335): unsure at all n locations
agtcacctgcggcatgcaagcttacaatggcctggtgttgccaattntatatatcttncgtaatactcatcaactctatcatatctaataattttcacatttatgtctaattggctttttacgccttaacatacttctaaccatattcattaaaggtctattacgcctttctgatacaccatcttggtgtggtggtccaggaatggtatattgcacacaaatgcgcatttctgaacaagccttacaaatggacctgggtgttgcccaattttattcatatcttccgaatactcatcacctctatcatatctaataattttcacatttatgtctaa

SEQ ID NO: 75708 - DNA, 332 bp, Glycine max
  unsure (1)..(332): unsure at all n locations
cactaataagatatatagcatcagatattattgatgaagcacttgattgccctgctgctatccaccaattggtctggcactcctttgagtattcaagctgcttgctcaatggaattgaactctgcacccaggaaaacatacaacagcacttgacaattatatgatgtttaattaagaagaaaaaaaaagaacaatgagtttgagttaagacttttaaatgtatttacatatagnttggatgtcaattcaaagtaaccagaagaagctgaggcaaaagttgcaccattcaataggtcttatctttggtctttaagtganggaggctggttgat

SEQ ID NO: 75709 - DNA, 369 bp, Glycine max
  unsure (1)..(369): unsure at all n locations
ttgcttgcatatgaacatgtgtttattaacaacctctgcgaagaacacaaagaaagaaagaattctcaagtattttcaagatcatgcaaaatagctctggtaatgatgaaaattcagaanatttaagcttgatggtgaaaaagtttgaaatttatcaaagatccaagacagaaaattctctaaacccttcaaagaagatagaaagtaacaacaacaccttcacatgcttcanatgtgggaagcaaggtcacatcanatatgaatgtcctatctaccttagaaaacaccttgcttaanagaaaggaaagaaggatagaaaacagaaaanagcctacatggctagtgagaaatacttatagtgttagtaat

SEQ ID NO: 75710 - DNA, 345 bp, Glycine max
  unsure (1)..(345): unsure at all n locations
acactcttctntgcgattcttctcaatatttggcccanagctgttggatacttctctgctaactgcttggccaattgacccacctgaatctcatggttttttagggctgactcagtactcttatggttggacatggtcacttgcatgaattgagccagggtttcttccagtttggtagtcctctggaaaatattangcccttgttgaggcggtctattggagggccaccctagtccttatngaattgataccagggtgtgatctccattgtccttgctgaatgtagggaccttgctggaaacctgagaatccttcttggttgtttgtagtcgatgaatacgacta

SEQ ID NO: 75711 - DNA, 470 bp, Glycine max
  unsure (1)..(470): unsure at all n locations
atcctcttagtcacctgccgcactgcaagctangatgtatntattagagagttctgagtctctatgtgtgtanggttnggtgttcttttttcctttgcttcctactccttttataggcctaaggtagcttaatttccatgcaacctcgcgcttagagcgggctttcatgcaaagcgtgcctttgggcttcttcgcgctaagcctgagcgggccgttgagcgaggagacacattggtcctggcttatgcactaagcgagctgtcccttcttcaactcttttcttcaaggctttttcttcaagtntttgcatcaattttcctccaaagcactcganatcttcttcttttaactcctacaaataaaaaattgcaaagatattaatttcttcattatttcattaaaaacaatgggtaaagaaagaaattgcaatcattcttagccaaaataactcaaatttcatagttatcaac

SEQ ID NO: 75712 - DNA, 357 bp, Glycine max
  unsure (1)..(357): unsure at all n locations
tcttacttttatcttttacaaaacaaacgatccctgtttttctgttacttgtaggtaattgcatatgctctcaatctttggtctggagaaggatctgcaatgaattgatatgcaatgaatgtcngtctgtcgtatctcctactatcgtcttgcagttatgtgttgatcaatgctgatagtttgcagcttggaaatattcaccggcttaaatatcaaagcaaagtatattactcagtgactcctattccttgagattatcctcttttttcatgtttaagatttctgattctacttacnaactaagtgttctgtgaatatatgattaaatggacgataatggtaagatgatattaaatg

SEQ ID NO: 75713 - DNA, 427 bp, Glycine max
  unsure (1)..(427): unsure at all n locations
gcttgctacccagctcgcccaggcgagctcagctctcccattcgaggtangttgcttcctncagaagcaaccgccttctggaggaatattctggaagggcctagtgggcctgattgctatttgcacccccattttttttaaatacaccccctcgctttttttggtgattcttttccctaacgttacgacacttttcgaatatcctaacaatgctttttttcttttctaatgttctgaaacctatcgatatctatcatccctttttactctgagataggatcatattcatttaatacgcgtttcatctttcttttactctggcctctacattctctatagttgcttactttgatctactctctcagaaatccatcatctaccatctcgattttgtcgttccctttatattctgtttccttatctccct

SEQ ID NO: 75714 - DNA, 397 bp, Glycine max
  unsure (1)..(397): unsure at all n locations
attctgtttacacaagtcgttctattctgttattagaaatgtgacctaagcgcttatgccataatgctcctgagtttgtattatcaattctatgcttagtaccacacaattctgcattaaaggaatcaccatagcaagctacaatatcaagtaaacatagattatcattagccaagagtgaaccagttccaacaatatctgaattgaaagacaacctatacacattgttttcaaatgaacacaaataacccaatttgtccaaataagaaactganaccanatttcatctaaatgacggtacaacaaaagtgtgtttcaaatccaaataaaaaccaatacataataataatctanaatgccctatagcttccacctctatcaattaccatatcaacat

SEQ ID NO: 75715 - DNA, 285 bp, Glycine max
aggtttttttttcacgtttttttgggattttagaaggttcccttacccgtaatttaaatatttgtttttaggagtgaagcttatatgtcattttgatattttttaattttttatttcattatatattattttcttgtagtattgtttattttttattggattgttgttctgttgttaaagtttaagtttttagttaattattttttattattttatagttatttatatcataattttttgtgtttgttagtatttttatattatatggttaatatttatattatg

SEQ ID NO: 75716 - DNA, 189 bp, Glycine max
cggaatgtccaaggacattttctttttaacatgccattctgctacgtacaaaccatgatgttgacaatatgtaacagtcattcggcacagaatcaatgtggaaaaatcatctcgacaaattaggtgtaaggggtcaaattgttatgaaaatttggagaataattagtccccttctcccctcctgccttt

SEQ ID NO: 75717 - DNA, 392 bp, Glycine max
  unsure (1)..(392): unsure at all n locations
agctnttggttatatatgcctcatcttcaatttgttttttgtgtcacaatgggtagatttctacacttgatattcatttgatgaatatcgtcgctgggggccattaatgcttgcattaaatgcacgttcattcctcatgcagagagtccactcttcaaatcttgcatgttcattactgtagcaggtagtcacttcctttacatcanaacagatcttgtttagtagaactcttcttttgatggcgattggggaaatttagaccttgacttcatttgttcttcataagattcgacagatcctatgaaaatgtttgtgcaaagagatctcagcacagagtataaatgaagtctaaatgcatatcaatcatgacctattgccattgctaaacataa

SEQ ID NO: 75718 - DNA, 252 bp, Glycine max
  unsure (1)..(252): unsure at all n locations
aaagctgacctctggttgatcccttgtcacacatctaattgtactcatgcagtagcatggtcaatctgtgactacacttatccaatcangtaacattacctggtggcgctggctcttattatgatcaaagatcactgattaccacaagttggtgatctgccttcttcaccattaaacactgagtggtgcaccgaacagctggttgagtagatattgcatgcctattgaaaaacgttgcctgtctatatctta

SEQ ID NO: 75719 - DNA, 442 bp, Glycine max
  unsure (1)..(442): unsure at all n locations
acctgcggctgcagcttgcaaagaactgaggaaaaatcaagaacaagcttgtacgcacatcgttcgcgtgtatgatatccactccacaaggtttgaagtagaggagagcttcaaccctataacgcaacgtggcggacaaaagtgggcagtaaacttgaatgatcgtcattgtcaatgcggaaggtattctgcgcttcactatccatgttcacatattattgcagctnggtggtacgtgagcatgaactactaccaatatatagatgttgtttatacaaccagcacatcttacaagcttactccgcacaaggtggctcccgggaatgaaacgccttttctcatataataacatgaatcttttctttctcaacactatttgcgaaggcttctattcacatgtctacacgtatgtttgggtatctttcttcccttccatattcct

SEQ ID NO: 75720 - DNA, 403 bp, Glycine max
  unsure (1)..(403): unsure at all n locations
atgccactctcacaacgaagatggcatactaccttctccaataaacacaaacatcaatgtaaatntagagcaaactcatgcacatacttccttacgaacagtcactcgcacaagatattcttctaactacataagaaatgcacccatgcacaatcaaaggcaccttcgttacctagaacacttatatgcacttcccaggtgtatatgctacctacatcacatgcagtacctttgctgaaattacatacatgcatactcaaggcactttggctacaaaaattgatacggcacatcaagtattctatacctatcatcaccaacctcgtgagaatttggctcctcacaataagtgcacattcatgcttattaagtgttttgtacctaaaccatcgaatttagatat

SEQ ID NO: 75721 - DNA, 411 bp, Glycine max
  unsure (1)..(411): unsure at all n locations
agctnntgagaaantcanatggtcataactttttactttgatgttagattaacgcgcatcacatatagagacgcacgaaaatgaacaacggtagctcacgagaaattcaaatggtcatcacttttcacactgaggtctgattcgggcttataatatattgatatgctcgaaattaaacatcggaagctctcgagatattcaaatggtcataacttttcacacagatgttagattatggcgcatcacatatagagacgctcgaaaatgaactacggaagctctcgggaaattaaaatggtcataacttttcacactgacgtccgantaaggcttataatatatcgatacgctcgaaattaaacatctgaagctctcgagaaatgcaaatggccataactttcacacggatgt

SEQ ID NO: 75722 - DNA, 380 bp, Glycine max
  unsure (1)..(380): unsure at all n locations
gtcacctgccgcatgcaagcttatggtaaaatttgngacctagccatggtagatgtctccacagaggccattgcctccctcgcccagtattatgatcagccgttgaggtgcttcacctttggggacttccagctatcacccatggtggaagaatntgaagagatcctangatgtcctctatggggaaggagaccatacctcttcttagggttctatccctcattagctagaatttctaagatagtccanatctcggcgcatgaattagaccacagaaagcaagtcaaaaatggggtggttggaataccgagaaaatgtttggaggcaaaagcaagaatcttggcaggtaaaggaaaatgggccccgttcatagacattct

SEQ ID NO: 75723 - DNA, 338 bp, Glycine max
agtcacctgccgcatgcaagcttgcctccagctcgccaggcgagctatgttgttttctcctgaagcaaccaccttctggaggaatattctggaaggcccaagtgggcttggttgctatttgcacccccatttttactaaatacaccccttgctcttttttggtgattttcttccgtaatgttatgaaaacttacgaacttcgtaacgatgcttgttttctttctgtgatgtttcgaaaccttatggataacataatcatcccttctttgccttctggaacgtaatggaactttacggatcgcgcactaacaacttctttaattgtcagcactttacag

SEQ ID NO: 75724 - DNA, 321 bp, Glycine max
gcatagataataaatacttagtacttccattttttgtatttaacaatcattttctctcaatttcaggtgaattatgcaagctttgaaaaatggtgttcttcaccttctcgctaagccaatctgctggcttatcgagcatccgctaagcgcaacactcatgggctaagcgcgacgaagactctataagagatgagttgtataggttcgctaagtacaccacttcatctcactaagtgcaccgctttaggtcatccgctaagcaagaaaggcacgcgctaagccacaactcactaatgtgcgctaagtgtccataattgcgct

SEQ ID NO: 75725 - DNA, 313 bp, Glycine max
  unsure (1)..(313): unsure at all n locations
aacctgccgctgcagctgtgcattcatatcttgtgagtgtgctccatatgttctcaagactggactaatacatttgctgcccaagttatatggtcttgcacgtgaagatcctcttaagcatcttaaggagttccatattngttgttccaccatgaagccccctgatgtccaggaagatcatatctttctaaaggcttcttctcattctctggagggagtggcaaaagaatggctatactaccttgctcccagttccatttttagctgggatgaccttaaaagggtgttcttggagaaaattatttctgcatct

SEQ ID NO: 75726 - DNA, 362 bp, Glycine max
  unsure (1)..(362): unsure at all n locations
tacaaagctgggagggtgatgtaaatatctgatctttggttgtttgtcatcaagagacaccactagataacatattatacacattatgagatgcacaacaatcttcattatccttataattaaagggtttagaaataattcacctccacaattgtgccatcttctaaatattgtgcagttgaggaaaattctagtatgtaatcacacacagatagaagacaattcatttctcttcccacataaccttcttctaggcttagaggctccaactttaaatnntgtcaacaacaattgctgcagattcccaattcaaataagttaagccatctttcttctcatactcttctaattntgtctaattc

SEQ ID NO: 75727 - DNA, 211 bp, Glycine max
  unsure (1)..(211): unsure at all n locations
tttgatctgctgccttcattagaacttcactcttctcatttgtcaccaagcattctgacttttgtgaagttacattgaatccttcatcacacagctgactgatgctaatcaagtttgcagtcagtcccttcaccagcaatactttgttcagactangaagtccatcatgaactagcttttccattccaatgatcttttctttagagccatc

SEQ ID NO: 75728 - DNA, 470 bp, Glycine max
  unsure (1)..(470): unsure at all n locations
tggtttggagaaaagactgcgctgattaaattatcgctatntattcttccaagaaataaatgatgtgctaatacctccctacaactacaaatcctcagaaaacagacagaatgtatacaatgtcgtataagctatccaaatgaaatttagcaagaatgacaaatcanaagatgaaggaaggacaaaagccatcagaaaaacaatntatgaaactatctgtccttacgttctcccacatgatgacttngtgcanagtaatacaagtcaaaatatgtatactcatgagaancattttgtgagaggaaccaatagaattgtcagaatatatggaaatattaaaaaaggccttatcatatctttcttagaatatcttatacgagtgggtttcgcgattcctattatctcataacaggatgatactatatttattatcttatcatgagttgttccctcattatcatgatagcgaa

SEQ ID NO: 75729 - DNA, 62 bp, Glycine max
tcattcaacgaaactcgtccaatttcaacttctgcgctttaaagctctgaagagctatacgc

SEQ ID NO: 75730 - DNA, 329 bp, Glycine max
gtgatcatttatcttgtttagttcttgttttatgccatagagaaggtaattgttgtgcagatactcttgtctctctagcttcttctaacattggatcttgttggtgggaatttattcctcattttttagtgaatgagtactatagatatagatgtgatctcccaaactacaggttcaaatggatagtatggtgttgcatgggtcaggttcttgtcccacatgatgcttttgccatccctttttttaattgaacaatattcttcttggcttgttgttttgcttggttgcgcttcaccatgtacacctatatcgatcttggtacttacttt

SEQ ID NO: 75731 - DNA, 414 bp, Glycine max
  unsure (1)..(414): unsure at all n locations
tacccatcacatgtggttctatgtggcggtcgggcgatggtgcacaacangttttccacatccacaattcgcgcataaacccaccatcccctgtttgccacctncaactgagctcacgtactcccacgtagcccatatcctcggttctctcaacaccgggtccccatcaatcctnccaagcttccacaacatccaagcaaaacaaaattcaaacaacacanaccatcacagccaagaaaaacagggcaaaggcagaaaactctgcccaaaacaccaaccaaaatcatagcttttctcacttaaagaccccagtaacaattccttcgttccaattcgttaaccgttggatcgactccaaaantntactggaagtctctagtacataagcctacattttgaccgttgggatctact

SEQ ID NO: 75732 - DNA, 311 bp, Glycine max
tgagagtgtgatcctaaaattttgagagaaacaacaatcatttagtactggattttgcatgaacctctaaagtatggactgaatgcatgaaattgaggatgatgaagccatgtttgatatgatagccatagcaaaacctgaccatgttcttgaatgatttattctttgccccaattgagctgaatgaatatgatgatgaatctgagctatgcaggtatctctgtactgcttaggtgaggaagcatatccatggagctgttcaagcaattgcctaattgggggtatataagtaattgtcaattggggaatct

SEQ ID NO: 75733 - DNA, 303 bp, Glycine max
  unsure (1)..(303): unsure at all n locations
acctgcagcctgcagcttgattgaacctccacaactccccgttgtgtcattttaatttcaaattgcanaacttgtttcctatttttaaggaaccatctntatctttgtttttgaacaattaactaactaaatatttgaaacccacatattatggggaaaaatcatcttaatttactagattagtattcaattaatctacaaacattaatccctttaattaaaaaaatggacaaccttcaatcatcacccgagcatattactaaaattacaatatttaagtgaataattatttgtcaccttaat

SEQ ID NO: 75734 - DNA, 383 bp, Glycine max
  unsure (1)..(383): unsure at all n locations
tacgatgtacgtgctcatgcaacaattgtttccgtgttatacgagacatcttgccgaacaaagtcaggttagccataactcgcctatgccttttcttccatgctatatgtagcanagtcattgatcctatgnaagttgatgagctggaaaatgaggctgcaattatactgtgccagttggagatgtatattccccctgcttttcttgacatcatgattcacttaattgtgcatatgggaagagaaatcaaatgtcgtggtcctgtttatctacggtggatgtacccggttgagcgatacatgaagatcttaaaagggtatacacaaatattatattatccataaccatctattgttgagaagtactttgcatataaatccatt

SEQ ID NO: 75735 - DNA, 335 bp, Glycine max
  unsure (1)..(335): unsure at all n locations
tagaccatcacaaaatgagccatgctattgtgcangcaatcatatgggccatacacacccaatgattatgatgaaggatggctcaaattcttcacaaagtaaatcatcactttcaaatagagctttcaaactatcatgacatgtagagaaaaacaaggatttcaagtcacaaaatgtcaaaactttnattntaaaacaatacccatttttgacatatctatattcaagagaacatgcaagtcgacgtcacacaaattgaccaaatattaactaaaatcgacaaactaacacattacaattacacactacaaatacaaaccacaactaccaaccaa

SEQ ID NO: 75736 - DNA, 374 bp, Glycine max
  unsure (1)..(374): unsure at all n locations
gcaagctntacatcccatattgtgataaaancttttgtataaattgttatgctgaggctatgaaatgatgattcttactatgagtatgtgacaaattgaacatgtgacggatgatgaaatacatgtgtattgagatgagatgtgtgtattgagttgtgaactatgaactgtgcaatcacacaattgtaagaccctttaacgacgacgagtattgtgatgggatccactgtgggaaccctacgagttaaatgatttgaaagcaattgagaaatgtgtgtattgcatgttcatagataaagagatatgattcatgacgtgtgataacatgttaaattgagatataccattgtgattggatttattgtatggataaa

SEQ ID NO: 75737 - DNA, 378 bp, Glycine max
  unsure (1)..(378): unsure at all n locations
cataggtttagcataatctgtttaagcaccacctataaaacaagacccaattataaacacttacctagttggtttcaaaacctacataatacttctctacttcttctaaggtnttcaagagaactaaatcacagtataacaacagtactaaatcacattattgaataattaaggaatgaggcagggtggcaatataactgcagttacttctcttataaaagtcaaaatttaaaaatgtttcacttaatcacattgtatgactgtnctcactactctgtgtgctacttacaaatgtttgttaccaataatggttttattcttggtcactggcattaaagacnacctatatatgatttgcaaatggtgttcatgatgaga

SEQ ID NO: 75738 - DNA, 262 bp, Glycine max
tggatcgtctagtatctatctatgcaaccaacccaatccgaatcactaaagccttttcaatgaacttcactgttagcagataaaagaatccctgcacttggagatcctttgacgtatctaaaaatactggatgctgcctgctgatgagctgtaatgcgttcagcaacaaatggactcaaatgctgtacaacaaaagtaatatcacgcgctgtatcagtcaaatagatcaatctttcaattaaccatctgtatgaggatgcat

SEQ ID NO: 75739 - DNA, 365 bp, Glycine max
  unsure (1)..(365): unsure at all n locations
tggcactaattgaagttttctcatcttatatataagctgcacctcgagaattgagacaagcaatatgggactttctaacacacccagccccacccctccatagatgcatgccaaaacaagcgggcctactagaatatataagctgccatgttagatttcagcttaaaaccaattggcactacttgtaattgcccaacagatatataagttgctccccgagaattgaggcaggcaatgtggaacttcctaacaatttgtttaggtccccttgtgcagctcattgcattgatctaatccctgaggacattggagagcttcctgtactctataataccattgacaatgcanagaaaagctctacttac

SEQ ID NO: 75740 - DNA, 358 bp, Glycine max
  unsure (1)..(358): unsure at all n locations
atgcagcttctagccaatggtcttaccttgaatttttcttttgatagcccctttgagcctattttcccttttatttgttgtgaagctcattacaagccttaagtgaaaaaccatgatatcacattgcccttaaggaattgtggagctttggaattgttctgggaataagctgggaataattgtggnggggtatcgttctttacttaaaataccatattgctatacttgaagtttctatcttatcttataatggacgttttcttgtttcattattatcccactgttcttatttattctacgtgatatcttcatatgtattactttagacagtgttgcattactatatcgattaattttt

SEQ ID NO: 75741 - DNA, 311 bp, Glycine max
  unsure (1)..(311): unsure at all n locations
cttccatccacagaaatatgatgtcatctctatgacaatcgaaaaaatagaacaactgcttctacatccacatgccaagccggtaatcgtgattccaaatgacacagtcgccattcatataggcgattttattgggatgctactatcatagatttacaaacacacactttatttattattacatcctgtctcaatttgattctcccnaccacctatttatatgatgtcaaagtgtctgtgtatatgctgataacatcaacaacatctaacactaccccgataataaaatgtgtgatcaattatttatatac

SEQ ID NO: 75742 - DNA, 334 bp, Glycine max
atgatattaatctattcctggatgaatattattcttatttatggacaactttcacatttataaaataacactcccctttttatattaattatattcttggcgctagcaaaaaatataataatatttcactaaaatatttaattgattaaattaaattctctaatctaagtttcaaataaattattttcttttgcaaagattagaatattcgcttgtgtatgaccccttaggtttaatactaaatcagtagtaaattaatcataattgattgactaatcaaggtagtcgtctagcaacactccttaacatccgagtagcatgaagtaacatattt

SEQ ID NO: 75743 - DNA, 271 bp, Glycine max
  unsure (1)..(271): unsure at all n locations
tataaaataaactgtgttaacttatacatcangtgatattgagaatccttcatgtcattctttttggcttccatgcatcagatgaggataagcttaaacaattttgtgggtaacactcctttgaaatttccttctccttctgtaaaaaanaaaatgacatttccttctcctattttatagcatattgacttagtgaaattagcaatttgtatacatgtatacagatatgcatgttacctggtgtggagaagtgcaaactgttataaaaaaa

SEQ ID NO: 75744 - DNA, 198 bp, Glycine max
  unsure (1)..(198): unsure at all n locations
gcatgcaagcttgcaagtctccactcatcatcatgttcaaacttaacagaaactacccacatacatgcactaaattgcctataaactcaaaacgtngttaattgtaattattntaaactctgtcatatgtgtttcattacaattatgaggcatctcactgctaaatttggttcaacttggtccttctgtccttgatcg

SEQ ID NO: 75745 - DNA, 221 bp, Glycine max
  unsure (1)..(221): unsure at all n locations
gatgcaagcgggttgttatttatgttgggcccgttctcttgaaaggacaaccactcggcctctatcaagtcttggaccttgccttctagggccaagcactattcgatcgagtggcccggngccccccatggtatgtgcaggtcgcgctagggttataccatattgggaatggngaatggtagatctttctccggaccaccacgttcaaatgggtggcgatg

SEQ ID NO: 75746 - DNA, 330 bp, Glycine max
  unsure (1)..(330): unsure at all n locations
aggccctctcttctctntctccttttttcggattgggcaatcccagttcggacttttagtttaatcaataaaatttggtcttcaatctataatttcattctctatggataaagggaaggctaagtcttcaacgttgttttctctgaagatcaacacagttctctttgaggtctattatactgttaaatttgttcttttttcctctcactaattacttgaatttgtgctattaatcatgatgcttatgcttgataattgctctgcctaattaacgtctgctaatatcgttatgagaattgggatgtgtgctaacacatatgaatgctatgt

SEQ ID NO: 75747 - DNA, 331 bp, Glycine max
  unsure (1)..(331): unsure at all n locations
actattcangtagccaggcagagagtatcgtatggtnttcattttcagctttggttcgtattactattcatgtgaggttactgttcacgtagtaatttccactttcattttctgcttcaatttccacgtttgttttctacttcaaattccatttcgtttctgctgttaatggaaggctgaatcattagtgttgttttctctcgacgattaagcatagctctctttgacggtgtgttcttaatattaaattctaatcagtttttcccctttaccaattattctgtattgttgctgaaattaatccatgcatgcttaatgtttgattaattgc

SEQ ID NO: 75748 - DNA, 427 bp, Glycine max
  unsure (1)..(427): unsure at all n locations
ttcgtcagttatcagctctatattcttgctaatnttctgttggntcattgaaatgtatgctttgtagtccttatatacacttcttgagattcccttgatatttttttggcgaagaagattcatcatgatcttgtttcaccttcattccccaaatgaaactcatcaagccaaggtctatcatttcaaatgctttaagcatttcatctttaaacccctttatgagtttctcatcacttcctgtcacaagcaaatcatcaacatagataacaataatggattaaattgcatctaccaacttcacatataatgcagcctcacttggactttngacaaatccaagatcttgaagatgatcatctattctgctataccaggccttaggcgcctgttaagaccatataaaaccttttcaacttgtaactttctc

SEQ ID NO: 75749 - DNA, 365 bp, Glycine max
  unsure (1)..(365): unsure at all n locations
tctcttntaaaaatgaatgtagaatgtcttctgctatttgtactgatgaaaagaactttgatcaatttcttaatggactgctcttttgggatcttcattttcaaatacgtcaatgtcttagatgtgatgaagggttcgaaaaatattgtttcacatgtttccagctgaagttgttgagtcatgagtgggccagctgggcctgctaatggtagtcatacgaaaatgatgataatagtgataattaaagtgtgttttttcgaatcaaaaatcaaattaattagtgttgcttagttccttttcttttattagtgctgctggaaaatttgcattgtgtgctattggataattactgacatcgtacacta

SEQ ID NO: 75750 - DNA, 293 bp, Glycine max
  unsure (1)..(293): unsure at all n locations
cagctgatgctcttgagaaaatnnntattaatgntttattctatgtgaccaaagccagctttaatttgtcacttagatgtgtacgcaacaaataatgggcactgcacattgttgaaataataaagcaattactgtccttgataagcagcaataaatgtagggaagatcctatgtcatggcgccttgttatatggaaccttgtttacgaacaatggttatggggagttgcttctttttagaattgcgagttattatgctgacctgatgaaatatttgtcggtcatacatatgat

SEQ ID NO: 75751 - DNA, 338 bp, Glycine max
tttcaggggcacagcatttcgttaccattgcaagatatcactggattcaatcataattagagtctatctgtacactatgtacatcccgaactgtgacaccaaaccatgtgaaaacgcaatatatgtatattttttgttaaagagagattttgttatttaaacaatgtttatgtaaacttaagaatattttattagaattatatgaacagagtaatataacgagtccttgataacttttatattatattttactacattttatatttccttttttccccttttaaggttcccttcaaaacaaaccctcctccctaatggataaacatttgcatctcatt

SEQ ID NO: 75752 - DNA, 401 bp, Glycine max
taaatttaaaatgggctttctaagttgatacctaacatcataataacataagctgattgcaatttcaaagttctttatactcttagaaaaaagggccatacactcttaatttctccttttctttcaaatcttatgattaagagaacacattctcaaatcaagaaaacagaatcatatgaatgaattgaatacttatcttctaatgatggttctctgttcacaaataaaaccaaatggttgaacttagttaagtaataatcataacatgaaatagcagaaaaaggtcagccatcatatattgaattaatcatttttagaccctaagtagtaatcattacaatcatgtctaatagagctgctaatatttagctcacctctctgccatctatggaattcagtag

SEQ ID NO: 75753 - DNA, 368 bp, Glycine max
ctgcagctgctggaactttatggagagattttttattttagagtcctcatgatgatttctatctgggatgcgcacagatatagaaaatgtgcaggaacgccttcctaggaatagtatgaaaaagagtttccaccagaagtgccttggataaaacttaagagaacttcatggggaaagaagagagaagggaaacacaaatggggaaagaagagaaaatgatttgagtggtctacaaactctattctcaaggtcaacaagtgttcacacctttattatacctagtacttcttgaaacttctgatagctaacttactcacatccttatactaacacctcttaaacttctgaagattctaaactaagttact

SEQ ID NO: 75754 - DNA, 218 bp, Glycine max
agcgggagggaaaatttggcctttctatgaaagaaaccgcgcggacttataattatggacatgtctctatggcaaaactatatgaagagaggaccgggtcacacatggatttgaattcatgcatggctaaccatttgtgatgggaaaggaaattcataatgttcgaccacaaagagtcgaaactttaagattcagctcctagttcctatggataccat

SEQ ID NO: 75755 - DNA, 431 bp, Glycine max
  unsure (1)..(431): unsure at all n locations
gcaagcttttctacaacctttttcttcccctttggttcattatatagccaaagaactcgggaatcaacacanatataataatggagtagaaagatataacaatggagtataaggcataaccctccaatntcacaaacaagaaataatcaaccagaatccaaataactcaaaacatcaacaaccacataatggtcaagctgaaattcaaataaccacaagataaaataaataaagtacttatcgtaataatttaaactctaagaaacgaaacagccaaacatataatcagaaactaaagtctaagaagacggaggtgggtgtggaagatcgaaactctgacgaatgtatccgacatnctcttcaagctgtgttaggcgaatgttcataccggcaaaacgtgtatctaatgagtcgaagcggtcaccaacata

SEQ ID NO: 75756 - DNA, 373 bp, Glycine max
  unsure (1)..(373): unsure at all n locations
catatggagacgctcgaagttcggaattgaagctctgagcaaaatcaaacgacaataacttnttactcggatgtcgcgatgtgtcccgtagtatatcgagatactcgaaattccgaacagaagctctgagcaaaatcaaataacaataactttttactcggatgtccgattgtgtcgcgtagtgtatcgagaccctttgatattcataatagaacctctgagataaatgaaatgacattaacttttaactcggatgtccgattgtgtcccgtaatgtttcgagatactcganattcagaccagaagctctgagccaaatctaatgacaataacttttactcagatgtcctattgtgcccttattgtatgagac

SEQ ID NO: 75757 - DNA, 343 bp, Glycine max
  unsure (1)..(343): unsure at all n locations
tgtgtttacaacaaggatatatggacantttttgattgtcgactacaagttgatgatgaaatacattaagacaaggatatatgaactggttgggcccacgaggacgatcctggatgcactacaactgaacaaggtcactagacgtcgtacgatgatcatagaaaggttcaactacttcataagaaatcgttcctcactagctacgtaccttcattggcaaccagttcatcgcctatctttctaatcaggtcttatgcgaatntggccatgcctaggggattcctcgcgcaccttgtcgaattacacacattgtttcctcttgtgatatgtaaataacattatc

SEQ ID NO: 75758 - DNA, 283 bp, Glycine max
  unsure (1)..(283): unsure at all n locations
ggaacaactcattttctgtagaagataaatctgtgtccactgatgaaattaaagaatctcgaactctgtgttggctctgttccccatctctgttccaattttatctgatattctgacttagcaattgttaccccattccccttccatctgagtttctgtctctctgcatnggttgagctgcaactgaatatttanacattgggttntacggagtgtgatgtgagttttaatgttctatatgtaaaatttagaacaccttgtctattttagccatctataatgc

SEQ ID NO: 75759 - DNA, 471 bp, Glycine max
  unsure (1)..(471): unsure at all n locations
gtcacctgcggttgcangcttagaaaaatatagattgaaaagagttatttgttatanaatgtactcagtaaaataaatagacatatattcataanagatgagaattgaatacatacatgatgacattaaccaatttaaatgataggtgttgttcgtgtttgaagaattaagtgatagtatttcaaccctcgaaaattgacattcaacagttttattgatagacatctaatacanatgatcgaattataagattttgacatgtgtacaacgatattccaaaatacattaatctgatattagttattgtcgntgtataacttcttcgcaactatgtcaattgacaatttgatttacgaaaaagatttcacttttgaacgctcntcattctcacatactctaatgaaatcataaatcttaatcgaaataactctcttcattatacaatcaacttctcaaaattagaccatattt

SEQ ID NO: 75760 - DNA, 382 bp, Glycine max
  unsure (1)..(382): unsure at all n locations
tacgagcnggaattaccctctacagcgcgcattcaccctgtatttcatgtatcacttctgaaaccctgcatcaaaacaccagacacgcgaatccttcctcttgccgtgacagccgtcgtcgcaccttctcgaaccaaccctaagaattattggtcgcgtacattacctcggagcacgattcagggaagaatcctggacactgtggggacaacgccagctgaactattggaatctaggctgcatcggcatcctttctgacttgatctgatgcaagactttttgagaatgggatgatacaaatgcccagaatgactgaactattccatagtggcctcatgcggaataggcacacaatggagcctctgcctacaatatatgtact
